United States Patent Application Publication US 2005/0244851 A1 - sequence listing, part 19

SEQ ID NO: 718653 - DNA, 25 bp, Homo sapien
atcagataggcaggccgtggctcca

SEQ ID NO: 718654 - DNA, 25 bp, Homo sapien
actttgaagcgcagagttgagtgct

SEQ ID NO: 718655 - DNA, 25 bp, Homo sapien
tgagctcgctgaaccactttgaagc

SEQ ID NO: 718656 - DNA, 25 bp, Homo sapien
tgatatgaggacaggaatttctccg

SEQ ID NO: 718657 - DNA, 25 bp, Homo sapien
taatgcgtgccggaaatcccgggag

SEQ ID NO: 718658 - DNA, 25 bp, Homo sapien
tgcgctttcgcggaaactccggttc

SEQ ID NO: 718659 - DNA, 25 bp, Homo sapien
gaatttctccgtaagtgtccacttc

SEQ ID NO: 718660 - DNA, 25 bp, Homo sapien
tgctagctacaatcgccctactctg

SEQ ID NO: 718661 - DNA, 25 bp, Homo sapien
taccttctatttaactgcatgtctg

SEQ ID NO: 718662 - DNA, 25 bp, Homo sapien
ccagcagtcctacagatgatgctcc

SEQ ID NO: 718663 - DNA, 25 bp, Homo sapien
tgctgtccagcattagaacttgtac

SEQ ID NO: 718664 - DNA, 25 bp, Homo sapien
ctgtccatgtttgggaaggtccgtg

SEQ ID NO: 718665 - DNA, 25 bp, Homo sapien
ttgactcgtgtggagtttcctttgt

SEQ ID NO: 718666 - DNA, 25 bp, Homo sapien
tccgtgttgactcgtgtggagtttc

SEQ ID NO: 718667 - DNA, 25 bp, Homo sapien
tgtttgggaaggtccgtgttgactc

SEQ ID NO: 718668 - DNA, 25 bp, Homo sapien
atgctgcataaagagtgagacctgc

SEQ ID NO: 718669 - DNA, 25 bp, Homo sapien
ttggttatgctgcataaagagtgag

SEQ ID NO: 718670 - DNA, 25 bp, Homo sapien
ttatgctgcataaagagtgagacct

SEQ ID NO: 718671 - DNA, 25 bp, Homo sapien
ggttatgctgcataaagagtgagac

SEQ ID NO: 718672 - DNA, 25 bp, Homo sapien
gtccatgagatgtctgattcttcat

SEQ ID NO: 718673 - DNA, 25 bp, Homo sapien
tcatccagacatgcatgcctattcc

SEQ ID NO: 718674 - DNA, 25 bp, Homo sapien
ccagacatgcatgcctattccatct

SEQ ID NO: 718675 - DNA, 25 bp, Homo sapien
ctgtcaccacagaccttggtggcat

SEQ ID NO: 718676 - DNA, 25 bp, Homo sapien
gctgtcaccacagaccttggtggca

SEQ ID NO: 718677 - DNA, 25 bp, Homo sapien
tcctgaatcagccttgtacatgttt

SEQ ID NO: 718678 - DNA, 25 bp, Homo sapien
gagtcttctattctgagccctgatt

SEQ ID NO: 718679 - DNA, 25 bp, Homo sapien
tggatttaaaatcagggacctgaat

SEQ ID NO: 718680 - DNA, 25 bp, Homo sapien
tcagagcaatttatcaggtttaagc

SEQ ID NO: 718681 - DNA, 25 bp, Homo sapien
attagtcagaactatgctctcctga

SEQ ID NO: 718682 - DNA, 25 bp, Homo sapien
gtcagaactatgctctcctgacaat

SEQ ID NO: 718683 - DNA, 25 bp, Homo sapien
aactatgctctcctgacaatgggct

SEQ ID NO: 718684 - DNA, 25 bp, Homo sapien
agaactatgctctcctgacaatggg

SEQ ID NO: 718685 - DNA, 25 bp, Homo sapien
tgaggtaggagcctgtatcatctct

SEQ ID NO: 718686 - DNA, 25 bp, Homo sapien
ctaggcctccatccgtgaatctctg

SEQ ID NO: 718687 - DNA, 25 bp, Homo sapien
tgactctcacgtgcttttggctcca

SEQ ID NO: 718688 - DNA, 25 bp, Homo sapien
taagtaggcagtacccctaggcctc

SEQ ID NO: 718689 - DNA, 25 bp, Homo sapien
tgcctttggctcgatgtctgaagcc

SEQ ID NO: 718690 - DNA, 25 bp, Homo sapien
ttttgcctttggctcgatgtctgaa

SEQ ID NO: 718691 - DNA, 25 bp, Homo sapien
cctttggctcgatgtctgaagcctt

SEQ ID NO: 718692 - DNA, 25 bp, Homo sapien
ttggctcgatgtctgaagcctttgc

SEQ ID NO: 718693 - DNA, 25 bp, Homo sapien
gagcagaccgtcttcaattcagtaa

SEQ ID NO: 718694 - DNA, 25 bp, Homo sapien
agactgatcttgtcacattcagatg

SEQ ID NO: 718695 - DNA, 25 bp, Homo sapien
taatgcctgctacatcgcgaaaagc

SEQ ID NO: 718696 - DNA, 25 bp, Homo sapien
caggagtacacagtaaaaccggaca

SEQ ID NO: 718697 - DNA, 25 bp, Homo sapien
gaatgctggccgagaatcctgggtt

SEQ ID NO: 718698 - DNA, 25 bp, Homo sapien
caaatcccagaaccaccgatgagct

SEQ ID NO: 718699 - DNA, 25 bp, Homo sapien
aatccaagatgcgtgttttacccgg

SEQ ID NO: 718700 - DNA, 25 bp, Homo sapien
tccggctcaaagtctgcttctaggg

SEQ ID NO: 718701 - DNA, 25 bp, Homo sapien
ggaaattcacatgcccgtggcggtg

SEQ ID NO: 718702 - DNA, 25 bp, Homo sapien
cactgggaaattcacatgcccgtgg

SEQ ID NO: 718703 - DNA, 25 bp, Homo sapien
aaccactgggaaattcacatgcccg

SEQ ID NO: 718704 - DNA, 25 bp, Homo sapien
attcacatgcccgtggcggtgtggc

SEQ ID NO: 718705 - DNA, 25 bp, Homo sapien
tagccactccgcaaggctttgaaac

SEQ ID NO: 718706 - DNA, 25 bp, Homo sapien
ttggacctgtgagttcccagaggcc

SEQ ID NO: 718707 - DNA, 25 bp, Homo sapien
ctgggatggggtagccactccgcaa

SEQ ID NO: 718708 - DNA, 25 bp, Homo sapien
gggcttttatcttcgcttggacctg

SEQ ID NO: 718709 - DNA, 25 bp, Homo sapien
atggatgttcatgttaggaggccca

SEQ ID NO: 718710 - DNA, 25 bp, Homo sapien
atgttcatgttaggaggcccatggg

SEQ ID NO: 718711 - DNA, 25 bp, Homo sapien
gcacagagaagtaaggattccaggg

SEQ ID NO: 718712 - DNA, 25 bp, Homo sapien
ctcaacccagtccaagtgcacagag

SEQ ID NO: 718713 - DNA, 25 bp, Homo sapien
agcttccaacggcaggcgatttctc

SEQ ID NO: 718714 - DNA, 25 bp, Homo sapien
aagaaatgccgcagaggaagcttcc

SEQ ID NO: 718715 - DNA, 25 bp, Homo sapien
taattaatctgagcgcacttctcct

SEQ ID NO: 718716 - DNA, 25 bp, Homo sapien
ccagctgcgtaaacttgttggacaa

SEQ ID NO: 718717 - DNA, 25 bp, Homo sapien
ttagccttctaagaacgatgaggtg

SEQ ID NO: 718718 - DNA, 25 bp, Homo sapien
tattgacacgtttaccagaagaatt

SEQ ID NO: 718719 - DNA, 25 bp, Homo sapien
ggcacaccctgcgtcttccaaggcc

SEQ ID NO: 718720 - DNA, 25 bp, Homo sapien
tccaagcagcttggcacacacattg

SEQ ID NO: 718721 - DNA, 25 bp, Homo sapien
aaagtacgtgtttctggtcccgcat

SEQ ID NO: 718722 - DNA, 25 bp, Homo sapien
cgccccagaggacgaaaagtacgtg

SEQ ID NO: 718723 - DNA, 25 bp, Homo sapien
ggcttctcgggacatgatattttct

SEQ ID NO: 718724 - DNA, 25 bp, Homo sapien
tcccagtcaatttcccgccagggag

SEQ ID NO: 718725 - DNA, 25 bp, Homo sapien
taaacacaaatgttgtgcaccatcc

SEQ ID NO: 718726 - DNA, 25 bp, Homo sapien
ccctgatttattgactcgcttctcc

SEQ ID NO: 718727 - DNA, 25 bp, Homo sapien
gcaccatccctgatttattgactcg

SEQ ID NO: 718728 - DNA, 25 bp, Homo sapien
ttaggcacattcctatggacttggg

SEQ ID NO: 718729 - DNA, 25 bp, Homo sapien
ggtaggagaacatgacatctggaca

SEQ ID NO: 718730 - DNA, 25 bp, Homo sapien
cctggtagaggaaccacagggtcag

SEQ ID NO: 718731 - DNA, 25 bp, Homo sapien
tcctcagaggaaggttgtatcagtt

SEQ ID NO: 718732 - DNA, 25 bp, Homo sapien
ctttgcacgtcgtggcgggttcccg

SEQ ID NO: 718733 - DNA, 25 bp, Homo sapien
ggaactgcgtctgaacataccagag

SEQ ID NO: 718734 - DNA, 25 bp, Homo sapien
gtctttgcaatctcgactttgcacg

SEQ ID NO: 718735 - DNA, 25 bp, Homo sapien
gtgtgacctgcgctgtctttgcaat

SEQ ID NO: 718736 - DNA, 25 bp, Homo sapien
gctttgacgcggcacatgcatttct

SEQ ID NO: 718737 - DNA, 25 bp, Homo sapien
cttctcctcactggcatggggcggc

SEQ ID NO: 718738 - DNA, 25 bp, Homo sapien
tggctggaaacccaccttctggctg

SEQ ID NO: 718739 - DNA, 25 bp, Homo sapien
tctggctgtgttgatcgtttgtgga

SEQ ID NO: 718740 - DNA, 25 bp, Homo sapien
acctgctgacacgtcactgtgccag

SEQ ID NO: 718741 - DNA, 25 bp, Homo sapien
acacgtcactgtgccagtagccagg

SEQ ID NO: 718742 - DNA, 25 bp, Homo sapien
tgctgacacgtcactgtgccagtag

SEQ ID NO: 718743 - DNA, 25 bp, Homo sapien
tgccacctgctgacacgtcactgtg

SEQ ID NO: 718744 - DNA, 25 bp, Homo sapien
gatggagatcctgattccacaccac

SEQ ID NO: 718745 - DNA, 25 bp, Homo sapien
ccacggcaaaagccatcactaacgt

SEQ ID NO: 718746 - DNA, 25 bp, Homo sapien
cacggcaaaagccatcactaacgtc

SEQ ID NO: 718747 - DNA, 25 bp, Homo sapien
acggcaaaagccatcactaacgtca

SEQ ID NO: 718748 - DNA, 25 bp, Homo sapien
cggcaaaagccatcactaacgtcat

SEQ ID NO: 718749 - DNA, 25 bp, Homo sapien
aatccttgcgtactttgatagcatc

SEQ ID NO: 718750 - DNA, 25 bp, Homo sapien
ttaaatccttgcgtactttgatagc

SEQ ID NO: 718751 - DNA, 25 bp, Homo sapien
taaatccttgcgtactttgatagca

SEQ ID NO: 718752 - DNA, 25 bp, Homo sapien
aaatccttgcgtactttgatagcat

SEQ ID NO: 718753 - DNA, 25 bp, Homo sapien
tcagttgctcactccatttttggaa

SEQ ID NO: 718754 - DNA, 25 bp, Homo sapien
tggaaaggatggtgtaactaataga

SEQ ID NO: 718755 - DNA, 25 bp, Homo sapien
ggatggtgtaactaatagatgttcc

SEQ ID NO: 718756 - DNA, 25 bp, Homo sapien
ttgctcactccatttttggaaagga

SEQ ID NO: 718757 - DNA, 25 bp, Homo sapien
catttttgaagctatctgtatttgc

SEQ ID NO: 718758 - DNA, 25 bp, Homo sapien
ggtctctcaaccatgaagttgtctg

SEQ ID NO: 718759 - DNA, 25 bp, Homo sapien
tgcaagcctgttccatttccataaa

SEQ ID NO: 718760 - DNA, 25 bp, Homo sapien
gaagctatctgtatttgcaagcctg

SEQ ID NO: 718761 - DNA, 25 bp, Homo sapien
aaggtcacttttggccggcgctgga

SEQ ID NO: 718762 - DNA, 25 bp, Homo sapien
gtgcaaactcgcctcctgttcagag

SEQ ID NO: 718763 - DNA, 25 bp, Homo sapien
cattgtagaagcgtccaaggtcact

SEQ ID NO: 718764 - DNA, 25 bp, Homo sapien
tgaactaagcgcactggaggctgaa

SEQ ID NO: 718765 - DNA, 25 bp, Homo sapien
gacaggcgggacggctccgagcggg

SEQ ID NO: 718766 - DNA, 25 bp, Homo sapien
cgagcgggcgcggccactccgcggg

SEQ ID NO: 718767 - DNA, 25 bp, Homo sapien
acaggcgggacggctccgagcgggc

SEQ ID NO: 718768 - DNA, 25 bp, Homo sapien
gctccgagcgggcgcggccactccg

SEQ ID NO: 718769 - DNA, 25 bp, Homo sapien
agcgcccggagcaagtgcagctgca

SEQ ID NO: 718770 - DNA, 25 bp, Homo sapien
cagcgcccggagcaagtgcagctgc

SEQ ID NO: 718771 - DNA, 25 bp, Homo sapien
ccagcgcccggagcaagtgcagctg

SEQ ID NO: 718772 - DNA, 25 bp, Homo sapien
gcgcccggagcaagtgcagctgcag

SEQ ID NO: 718773 - DNA, 25 bp, Homo sapien
agcagctttccacctgaatccttca

SEQ ID NO: 718774 - DNA, 25 bp, Homo sapien
cagcagctttccacctgaatccttc

SEQ ID NO: 718775 - DNA, 25 bp, Homo sapien
tcagcagctttccacctgaatcctt

SEQ ID NO: 718776 - DNA, 25 bp, Homo sapien
gcagctttccacctgaatccttcat

SEQ ID NO: 718777 - DNA, 25 bp, Homo sapien
cactgtgaaagccaccagaagcatt

SEQ ID NO: 718778 - DNA, 25 bp, Homo sapien
tcatcatttgtgaaggtcacctgct

SEQ ID NO: 718779 - DNA, 25 bp, Homo sapien
gaagcattcaggtcctcatcatttg

SEQ ID NO: 718780 - DNA, 25 bp, Homo sapien
tgttgacgaacacagatagggatgg

SEQ ID NO: 718781 - DNA, 25 bp, Homo sapien
tgagttggaatttgcctggccctcg

SEQ ID NO: 718782 - DNA, 25 bp, Homo sapien
gacagcatcacagttaaagggacct

SEQ ID NO: 718783 - DNA, 25 bp, Homo sapien
catcaggtactgtgccggatgcagg

SEQ ID NO: 718784 - DNA, 25 bp, Homo sapien
caaaagggcaaaacctggtctggtg

SEQ ID NO: 718785 - DNA, 25 bp, Homo sapien
caccagatgtagaatgcaccaatgc

SEQ ID NO: 718786 - DNA, 25 bp, Homo sapien
ggctatgaagtccaagaccatggca

SEQ ID NO: 718787 - DNA, 25 bp, Homo sapien
ccgtgcctagccctagactgggtaa

SEQ ID NO: 718788 - DNA, 25 bp, Homo sapien
catgacatggcaagacgcatcacat

SEQ ID NO: 718789 - DNA, 25 bp, Homo sapien
ccagcagtggagcagcaacagccaa

SEQ ID NO: 718790 - DNA, 25 bp, Homo sapien
gtggagcagcaacagccaaatcagc

SEQ ID NO: 718791 - DNA, 25 bp, Homo sapien
ctggggccagcagtggagcagcaac

SEQ ID NO: 718792 - DNA, 25 bp, Homo sapien
acagcggccaaggtggtgtggttct

SEQ ID NO: 718793 - DNA, 25 bp, Homo sapien
tccttctgaaactgcaacaacacaa

SEQ ID NO: 718794 - DNA, 25 bp, Homo sapien
gattcctttgggttgatcctgtctg

SEQ ID NO: 718795 - DNA, 25 bp, Homo sapien
gttaaactccagctactttcagtag

SEQ ID NO: 718796 - DNA, 25 bp, Homo sapien
gcctgccattgccactctattgagc

SEQ ID NO: 718797 - DNA, 25 bp, Homo sapien
ttcagagccttatgttttcgtttcc

SEQ ID NO: 718798 - DNA, 25 bp, Homo sapien
gtcttaaatatttccgcggcatata

SEQ ID NO: 718799 - DNA, 25 bp, Homo sapien
ttccccactttttaagcatgtctta

SEQ ID NO: 718800 - DNA, 25 bp, Homo sapien
tgcttcaaccaaatataactcataa

SEQ ID NO: 718801 - DNA, 25 bp, Homo sapien
ctctcccttttctctttgtcgttca

SEQ ID NO: 718802 - DNA, 25 bp, Homo sapien
caggtgcctctcccttttctctttg

SEQ ID NO: 718803 - DNA, 25 bp, Homo sapien
cccttttctctttgtcgttcatcat

SEQ ID NO: 718804 - DNA, 25 bp, Homo sapien
tcccttttctctttgtcgttcatca

SEQ ID NO: 718805 - DNA, 25 bp, Homo sapien
tttgcaggtatgtggccaaaagaac

SEQ ID NO: 718806 - DNA, 25 bp, Homo sapien
tagatttgcaggtatgtggccaaaa

SEQ ID NO: 718807 - DNA, 25 bp, Homo sapien
gatttgcaggtatgtggccaaaaga

SEQ ID NO: 718808 - DNA, 25 bp, Homo sapien
tggggcttcctttctgaacagtacc

SEQ ID NO: 718809 - DNA, 25 bp, Homo sapien
tgagtaacatcgtagactcttgcag

SEQ ID NO: 718810 - DNA, 25 bp, Homo sapien
tgctgagtaacatcgtagactcttg

SEQ ID NO: 718811 - DNA, 25 bp, Homo sapien
agtaacatcgtagactcttgcagtt

SEQ ID NO: 718812 - DNA, 25 bp, Homo sapien
gctgagtaacatcgtagactcttgc

SEQ ID NO: 718813 - DNA, 25 bp, Homo sapien
gagtgcttaatgtgctcaacacgca

SEQ ID NO: 718814 - DNA, 25 bp, Homo sapien
cttaagagtgcttaatgtgctcaac

SEQ ID NO: 718815 - DNA, 25 bp, Homo sapien
agtgcttaatgtgctcaacacgcac

SEQ ID NO: 718816 - DNA, 25 bp, Homo sapien
taagagtgcttaatgtgctcaacac

SEQ ID NO: 718817 - DNA, 25 bp, Homo sapien
cagctgaaccctggtacatttctct

SEQ ID NO: 718818 - DNA, 25 bp, Homo sapien
catggattcataggagagacacccc

SEQ ID NO: 718819 - DNA, 25 bp, Homo sapien
ttcagctgaaccctggtacatttct

SEQ ID NO: 718820 - DNA, 25 bp, Homo sapien
tcatgccatggattcataggagaga

SEQ ID NO: 718821 - DNA, 25 bp, Homo sapien
aaatccgccacatctctgaggtatg

SEQ ID NO: 718822 - DNA, 25 bp, Homo sapien
gaggtatgcctacattctgattgtc

SEQ ID NO: 718823 - DNA, 25 bp, Homo sapien
tgcagtagtctgaaaccaaatccgc

SEQ ID NO: 718824 - DNA, 25 bp, Homo sapien
gattagtgacaacgctgctttcagc

SEQ ID NO: 718825 - DNA, 25 bp, Homo sapien
ggaagccactaatccagttctagaa

SEQ ID NO: 718826 - DNA, 25 bp, Homo sapien
tatcactcgatgtggagattcacag

SEQ ID NO: 718827 - DNA, 25 bp, Homo sapien
tcaataatgcgttcactgaaggaca

SEQ ID NO: 718828 - DNA, 25 bp, Homo sapien
cagtaggtgcatcaatactttggcc

SEQ ID NO: 718829 - DNA, 25 bp, Homo sapien
gcagtgatcaaaccacattccgtgg

SEQ ID NO: 718830 - DNA, 25 bp, Homo sapien
tctcagaacttactaccagggacac

SEQ ID NO: 718831 - DNA, 25 bp, Homo sapien
cattccgtggagacccgaagttcta

SEQ ID NO: 718832 - DNA, 25 bp, Homo sapien
tacgtccagtccagcaacaacgaag

SEQ ID NO: 718833 - DNA, 25 bp, Homo sapien
tagcttcatcgatcaggaccatacg

SEQ ID NO: 718834 - DNA, 25 bp, Homo sapien
tgaagtagcttcatcgatcaggacc

SEQ ID NO: 718835 - DNA, 25 bp, Homo sapien
tcaggaccatacgtacgttgtagtg

SEQ ID NO: 718836 - DNA, 25 bp, Homo sapien
tcatcgatcaggaccatacgtacgt

SEQ ID NO: 718837 - DNA, 25 bp, Homo sapien
aaggagaaagaagcgcagaccagtc

SEQ ID NO: 718838 - DNA, 25 bp, Homo sapien
catcaaactctttcatgtgacaggc

SEQ ID NO: 718839 - DNA, 25 bp, Homo sapien
cacatgtgcatcttaagactggaac

SEQ ID NO: 718840 - DNA, 25 bp, Homo sapien
tgagaacgacaaaactgaagtgcac

SEQ ID NO: 718841 - DNA, 25 bp, Homo sapien
tgagcctggctagtaacgtgtgaca

SEQ ID NO: 718842 - DNA, 25 bp, Homo sapien
gagactcaggcactcttgtcaactg

SEQ ID NO: 718843 - DNA, 25 bp, Homo sapien
tcagcgttttgactaggagagcccc

SEQ ID NO: 718844 - DNA, 25 bp, Homo sapien
tcatatgttgtacacgaaacacggg

SEQ ID NO: 718845 - DNA, 25 bp, Homo sapien
gcatcctgagagtgtccaagtttgc

SEQ ID NO: 718846 - DNA, 25 bp, Homo sapien
tgcatcctgagagtgtccaagtttg

SEQ ID NO: 718847 - DNA, 25 bp, Homo sapien
catcctgagagtgtccaagtttgcc

SEQ ID NO: 718848 - DNA, 25 bp, Homo sapien
gccaagtaaagtatcgcacatccaa

SEQ ID NO: 718849 - DNA, 25 bp, Homo sapien
cacctttgactatgttaagatggaa

SEQ ID NO: 718850 - DNA, 25 bp, Homo sapien
gtgttgccaacaaccttatttggga

SEQ ID NO: 718851 - DNA, 25 bp, Homo sapien
tgactattaatttgcaacacacctt

SEQ ID NO: 718852 - DNA, 25 bp, Homo sapien
ccttcaatgggagtgacagactata

SEQ ID NO: 718853 - DNA, 25 bp, Homo sapien
cactatcggaaaatgcgtatgcagc

SEQ ID NO: 718854 - DNA, 25 bp, Homo sapien
tgattacacctaagtgctgtgggaa

SEQ ID NO: 718855 - DNA, 25 bp, Homo sapien
acactggcctctgtgataaaccgtg

SEQ ID NO: 718856 - DNA, 25 bp, Homo sapien
tactggaccatttaccaaggctgca

SEQ ID NO: 718857 - DNA, 25 bp, Homo sapien
aaagcctcccatattgtactactgg

SEQ ID NO: 718858 - DNA, 25 bp, Homo sapien
gataagaatcaactggctttcagcc

SEQ ID NO: 718859 - DNA, 25 bp, Homo sapien
tgacttcagtcatgcaaaaagactg

SEQ ID NO: 718860 - DNA, 25 bp, Homo sapien
tcaggtaggacatcgtcagaaccca

SEQ ID NO: 718861 - DNA, 25 bp, Homo sapien
caccctctggcaactgttagttcag

SEQ ID NO: 718862 - DNA, 25 bp, Homo sapien
caaatgaggaagtctgagtagacca

SEQ ID NO: 718863 - DNA, 25 bp, Homo sapien
tagaccagtgttggactagatcctc

SEQ ID NO: 718864 - DNA, 25 bp, Homo sapien
ggatggtcaccagaagtatcacttg

SEQ ID NO: 718865 - DNA, 25 bp, Homo sapien
gagattaaagcaggttgctgagacc

SEQ ID NO: 718866 - DNA, 25 bp, Homo sapien
tgtcaccaaaagtgtcacttggcag

SEQ ID NO: 718867 - DNA, 25 bp, Homo sapien
ttaaagcaggttgctgagaccagtc

SEQ ID NO: 718868 - DNA, 25 bp, Homo sapien
tagcttcaactcagagccatcccca

SEQ ID NO: 718869 - DNA, 25 bp, Homo sapien
cctacgtggacttccctctccttca

SEQ ID NO: 718870 - DNA, 25 bp, Homo sapien
tccaatccacctccagtcttgggat

SEQ ID NO: 718871 - DNA, 25 bp, Homo sapien
catccccaacgctcttctcttctgt

SEQ ID NO: 718872 - DNA, 25 bp, Homo sapien
tatagaccagattaggcctgccagg

SEQ ID NO: 718873 - DNA, 25 bp, Homo sapien
tgaagcaatcaacctagcctacggg

SEQ ID NO: 718874 - DNA, 25 bp, Homo sapien
caaaaagtagaggatagctggcacc

SEQ ID NO: 718875 - DNA, 25 bp, Homo sapien
tattcgaggcatggtcacacacaac

SEQ ID NO: 718876 - DNA, 25 bp, Homo sapien
tagagatactctctagctgtagacg

SEQ ID NO: 718877 - DNA, 25 bp, Homo sapien
tctaagagccaacagaaagctacct

SEQ ID NO: 718878 - DNA, 25 bp, Homo sapien
gctgtagacgctcacgcaatgtaga

SEQ ID NO: 718879 - DNA, 25 bp, Homo sapien
gactgaagctatatgcccgcctaag

SEQ ID NO: 718880 - DNA, 25 bp, Homo sapien
ggatgcttgtggagagctgctctgg

SEQ ID NO: 718881 - DNA, 25 bp, Homo sapien
catctgtggcgtgaggatgcttgtg

SEQ ID NO: 718882 - DNA, 25 bp, Homo sapien
cagcaggctaggtgagtacacgtaa

SEQ ID NO: 718883 - DNA, 25 bp, Homo sapien
acgtaacggtcaactggcatctgtg

SEQ ID NO: 718884 - DNA, 25 bp, Homo sapien
gatggcagtggcattaaaacccaca

SEQ ID NO: 718885 - DNA, 25 bp, Homo sapien
accagtggcaggatgggtaccaatg

SEQ ID NO: 718886 - DNA, 25 bp, Homo sapien
cccacaatggccatgagtagttttc

SEQ ID NO: 718887 - DNA, 25 bp, Homo sapien
cactctatcgtggtagcaggacaga

SEQ ID NO: 718888 - DNA, 25 bp, Homo sapien
gaacacggctcccagaactagcata

SEQ ID NO: 718889 - DNA, 25 bp, Homo sapien
acacggctcccagaactagcatata

SEQ ID NO: 718890 - DNA, 25 bp, Homo sapien
acggctcccagaactagcatataaa

SEQ ID NO: 718891 - DNA, 25 bp, Homo sapien
tgcagaacacggctcccagaactag

SEQ ID NO: 718892 - DNA, 25 bp, Homo sapien
gaacatctcacttgtgaggtcaaag

SEQ ID NO: 718893 - DNA, 25 bp, Homo sapien
catggcttgatgtcacgcttcctat

SEQ ID NO: 718894 - DNA, 25 bp, Homo sapien
ccaggacttcaggatggaacatctc

SEQ ID NO: 718895 - DNA, 25 bp, Homo sapien
tgaggtcaaagtcttttggcagagc

SEQ ID NO: 718896 - DNA, 25 bp, Homo sapien
ccaggagcggtaacggcaactgaaa

SEQ ID NO: 718897 - DNA, 25 bp, Homo sapien
tagccctggtagtgttagatgcgac

SEQ ID NO: 718898 - DNA, 25 bp, Homo sapien
agacatagccctggtagtgttagat

SEQ ID NO: 718899 - DNA, 25 bp, Homo sapien
tgttagatgcgaccaggagcggtaa

SEQ ID NO: 718900 - DNA, 25 bp, Homo sapien
ggagctaacactgaagactgacgca

SEQ ID NO: 718901 - DNA, 25 bp, Homo sapien
tagcgttttgtaggagcacccaggc

SEQ ID NO: 718902 - DNA, 25 bp, Homo sapien
tggtagaactgggtccacgaggaca

SEQ ID NO: 718903 - DNA, 25 bp, Homo sapien
ttaactcaggagaccgctggcatct

SEQ ID NO: 718904 - DNA, 25 bp, Homo sapien
gttgttcggactatgctaagccctg

SEQ ID NO: 718905 - DNA, 25 bp, Homo sapien
taaagaagagctagcaaacctgacg

SEQ ID NO: 718906 - DNA, 25 bp, Homo sapien
tatagtagcctgcagtggcaacact

SEQ ID NO: 718907 - DNA, 25 bp, Homo sapien
tgccgtgcccttacacagcgatggg

SEQ ID NO: 718908 - DNA, 25 bp, Homo sapien
gtcatgtaagagcaggttcttccca

SEQ ID NO: 718909 - DNA, 25 bp, Homo sapien
tagttaaagtcatgtaagagcaggt

SEQ ID NO: 718910 - DNA, 25 bp, Homo sapien
caagtagttaaagtcatgtaagagc

SEQ ID NO: 718911 - DNA, 25 bp, Homo sapien
attgaatggcaagtagttaaagtca

SEQ ID NO: 718912 - DNA, 25 bp, Homo sapien
taagatcttactctgtggtcagtcc

SEQ ID NO: 718913 - DNA, 25 bp, Homo sapien
tgaggctctctaaaacgtggtccag

SEQ ID NO: 718914 - DNA, 25 bp, Homo sapien
gaatcaaatcaacagaagtgaggct

SEQ ID NO: 718915 - DNA, 25 bp, Homo sapien
tgcatgacagctaagacaaatggct

SEQ ID NO: 718916 - DNA, 25 bp, Homo sapien
agaactgctttacctgcgtcccaaa

SEQ ID NO: 718917 - DNA, 25 bp, Homo sapien
ggagtgagtacaatctctggaggct

SEQ ID NO: 718918 - DNA, 25 bp, Homo sapien
aatagactccactacgatcagagag

SEQ ID NO: 718919 - DNA, 25 bp, Homo sapien
gatcagagagtgcactccgcatgag

SEQ ID NO: 718920 - DNA, 25 bp, Homo sapien
agtcatgtaaatgtgactcctcaag

SEQ ID NO: 718921 - DNA, 25 bp, Homo sapien
gacgtttaatacacctgtttgccat

SEQ ID NO: 718922 - DNA, 25 bp, Homo sapien
ttgttccactggtcaacttgcctat

SEQ ID NO: 718923 - DNA, 25 bp, Homo sapien
gcccatatttgtagagtattactca

SEQ ID NO: 718924 - DNA, 25 bp, Homo sapien
tatcctaaagccaagaggcagtctt

SEQ ID NO: 718925 - DNA, 25 bp, Homo sapien
aaagcagctcagatgtgtttttgtc

SEQ ID NO: 718926 - DNA, 25 bp, Homo sapien
tcttttgagggtgttagggatcaac

SEQ ID NO: 718927 - DNA, 25 bp, Homo sapien
atccctgacgcccaaggaaagcagc

SEQ ID NO: 718928 - DNA, 25 bp, Homo sapien
caatgatgaaccgtgggcacagaca

SEQ ID NO: 718929 - DNA, 25 bp, Homo sapien
gaataattctatagtcatggctgcc

SEQ ID NO: 718930 - DNA, 25 bp, Homo sapien
gcacttctgtagatcacgttggaag

SEQ ID NO: 718931 - DNA, 25 bp, Homo sapien
tcagcagcagaggatctccaaatac

SEQ ID NO: 718932 - DNA, 25 bp, Homo sapien
tcaaaaggcaaacatagcaaggagc

SEQ ID NO: 718933 - DNA, 25 bp, Homo sapien
gcaggtttaagcagtcccggcaaat

SEQ ID NO: 718934 - DNA, 25 bp, Homo sapien
tatcgataacgttgcctacactgga

SEQ ID NO: 718935 - DNA, 25 bp, Homo sapien
caatgttttgtgtacctgcgactcc

SEQ ID NO: 718936 - DNA, 25 bp, Homo sapien
tcctcacagcacttcaagggctcag

SEQ ID NO: 718937 - DNA, 25 bp, Homo sapien
gatgaggaagttagagtttctgccc

SEQ ID NO: 718938 - DNA, 25 bp, Homo sapien
caagccagtgcactcgttactaaca

SEQ ID NO: 718939 - DNA, 25 bp, Homo sapien
tacctggagggaggttccatcatgg

SEQ ID NO: 718940 - DNA, 25 bp, Homo sapien
tctaaggcgtacggacatgacagga

SEQ ID NO: 718941 - DNA, 25 bp, Homo sapien
ctctaaggcgtacggacatgacagg

SEQ ID NO: 718942 - DNA, 25 bp, Homo sapien
ctaaggcgtacggacatgacaggag

SEQ ID NO: 718943 - DNA, 25 bp, Homo sapien
cctctctttgtatgctaatggaaaa

SEQ ID NO: 718944 - DNA, 25 bp, Homo sapien
tctaagagctccaggttcctttaaa

SEQ ID NO: 718945 - DNA, 25 bp, Homo sapien
cctctctcactgtaagttgagtgga

SEQ ID NO: 718946 - DNA, 25 bp, Homo sapien
acatcagcaatgcagtcaccgcaca

SEQ ID NO: 718947 - DNA, 25 bp, Homo sapien
gagacagacctacctgagggagacc

SEQ ID NO: 718948 - DNA, 25 bp, Homo sapien
taatcctcattagcccgagagctgt

SEQ ID NO: 718949 - DNA, 25 bp, Homo sapien
taagagcaatttggcaccggaagag

SEQ ID NO: 718950 - DNA, 25 bp, Homo sapien
aagcagtttactcccggaaagatgg

SEQ ID NO: 718951 - DNA, 25 bp, Homo sapien
tgtaaacaaggtcgagctgctgcat

SEQ ID NO: 718952 - DNA, 25 bp, Homo sapien
catgtacctcaggaatccaggaccc

SEQ ID NO: 718953 - DNA, 25 bp, Homo sapien
atccaggaccctgatcaatttcctt

SEQ ID NO: 718954 - DNA, 25 bp, Homo sapien
tgtacctcaggaatccaggaccctg

SEQ ID NO: 718955 - DNA, 25 bp, Homo sapien
tgaccatgtacctcaggaatccagg

SEQ ID NO: 718956 - DNA, 25 bp, Homo sapien
gtatgccccctctgttctctgttac

SEQ ID NO: 718957 - DNA, 25 bp, Homo sapien
tgtatgccccctctgttctctgtta

SEQ ID NO: 718958 - DNA, 25 bp, Homo sapien
gctgtatgccccctctgttctctgt

SEQ ID NO: 718959 - DNA, 25 bp, Homo sapien
ctgctgtatgccccctctgttctct

SEQ ID NO: 718960 - DNA, 25 bp, Homo sapien
cacagatgggtaatcttgtcctagg

SEQ ID NO: 718961 - DNA, 25 bp, Homo sapien
tgtccaggtgtcagcaatgcgtttc

SEQ ID NO: 718962 - DNA, 25 bp, Homo sapien
tgatttccacttgcaacactcgttt

SEQ ID NO: 718963 - DNA, 25 bp, Homo sapien
tcagcaatgcgtttccacagatggg

SEQ ID NO: 718964 - DNA, 25 bp, Homo sapien
gatgagactcagcagttcactgacg

SEQ ID NO: 718965 - DNA, 25 bp, Homo sapien
gcagttcactgacgactgtgggcat

SEQ ID NO: 718966 - DNA, 25 bp, Homo sapien
gcaatgaagtagatgagactcagca

SEQ ID NO: 718967 - DNA, 25 bp, Homo sapien
tgcctgagcaatgaagtagatgaga

SEQ ID NO: 718968 - DNA, 25 bp, Homo sapien
cacaaagtccacgtgtcccggtgaa

SEQ ID NO: 718969 - DNA, 25 bp, Homo sapien
tcccggtgaagtgacgatgagctgt

SEQ ID NO: 718970 - DNA, 25 bp, Homo sapien
accgtcaatcaggtgcgagtccagc

SEQ ID NO: 718971 - DNA, 25 bp, Homo sapien
tattaagccatcataatcagcaccg

SEQ ID NO: 718972 - DNA, 25 bp, Homo sapien
acctccacttagcagaagaatcaac

SEQ ID NO: 718973 - DNA, 25 bp, Homo sapien
tcttttgactctgcccaagagagct

SEQ ID NO: 718974 - DNA, 25 bp, Homo sapien
tctgctcatctagaaagggaccatg

SEQ ID NO: 718975 - DNA, 25 bp, Homo sapien
ggaaaaatcattcacatgggcagca

SEQ ID NO: 718976 - DNA, 25 bp, Homo sapien
ggaccatgacccatctatctgcaga

SEQ ID NO: 718977 - DNA, 25 bp, Homo sapien
tgtatatcaactgcattcttaaatt

SEQ ID NO: 718978 - DNA, 25 bp, Homo sapien
gctgtatatcaactgcattcttaaa

SEQ ID NO: 718979 - DNA, 25 bp, Homo sapien
atgcgttaagctgtatatcaactgc

SEQ ID NO: 718980 - DNA, 25 bp, Homo sapien
cattcttaaatttgaatgtagccat

SEQ ID NO: 718981 - DNA, 25 bp, Homo sapien
ttccaggtggatctgtggtaggcct

SEQ ID NO: 718982 - DNA, 25 bp, Homo sapien
agctcccttcggcaaggcaggtgag

SEQ ID NO: 718983 - DNA, 25 bp, Homo sapien
caggtgagaacaaggcggttccctt

SEQ ID NO: 718984 - DNA, 25 bp, Homo sapien
tgtcatcgcgcatccacttgaactc

SEQ ID NO: 718985 - DNA, 25 bp, Homo sapien
tgccagagagcaccgaggagaacca

SEQ ID NO: 718986 - DNA, 25 bp, Homo sapien
gagcaagtgaggtgctacaagggac

SEQ ID NO: 718987 - DNA, 25 bp, Homo sapien
caagtgaggtgctacaagggacggg

SEQ ID NO: 718988 - DNA, 25 bp, Homo sapien
ggtgggtaatgggaatggggagagc

SEQ ID NO: 718989 - DNA, 25 bp, Homo sapien
caggttgccagtttttagggagaca

SEQ ID NO: 718990 - DNA, 25 bp, Homo sapien
gaaatcccctcaaggcagtaagcag

SEQ ID NO: 718991 - DNA, 25 bp, Homo sapien
taccctgccctaagaaatctagctg

SEQ ID NO: 718992 - DNA, 25 bp, Homo sapien
ttactttatcttgacccaggttgcc

SEQ ID NO: 718993 - DNA, 25 bp, Homo sapien
taatcttcttggatagtcctttccc

SEQ ID NO: 718994 - DNA, 25 bp, Homo sapien
tccgccgagtcctgtgtaagcacag

SEQ ID NO: 718995 - DNA, 25 bp, Homo sapien
gctggtgagaacagacactccgccg

SEQ ID NO: 718996 - DNA, 25 bp, Homo sapien
taagcacagggaactattgcctcta

SEQ ID NO: 718997 - DNA, 25 bp, Homo sapien
ctttgattagattctagacactgtg

SEQ ID NO: 718998 - DNA, 25 bp, Homo sapien
tctggcttggtttcaatcaactgat

SEQ ID NO: 718999 - DNA, 25 bp, Homo sapien
tcctgcatctgcatatgcttgatga

SEQ ID NO: 719000 - DNA, 25 bp, Homo sapien
tgatactgtgaagatattgagcaac

SEQ ID NO: 719001 - DNA, 25 bp, Homo sapien
caactcatttgtgcccttttcatta

SEQ ID NO: 719002 - DNA, 25 bp, Homo sapien
gcactggctggtaactccagtaatt

SEQ ID NO: 719003 - DNA, 25 bp, Homo sapien
ttattgcactggctggtaactccag

SEQ ID NO: 719004 - DNA, 25 bp, Homo sapien
ccacaactcatttgtgcccttttca

SEQ ID NO: 719005 - DNA, 25 bp, Homo sapien
taaatctggggttggtgatgcccag

SEQ ID NO: 719006 - DNA, 25 bp, Homo sapien
gcagtggctcaagcagtgatggcca

SEQ ID NO: 719007 - DNA, 25 bp, Homo sapien
tgtccagtgccaactagggcagtgg

SEQ ID NO: 719008 - DNA, 25 bp, Homo sapien
gagggctaaaggagaactcatctga

SEQ ID NO: 719009 - DNA, 25 bp, Homo sapien
ctgcctctacaggtaccagctctga

SEQ ID NO: 719010 - DNA, 25 bp, Homo sapien
gcctctacaggtaccagctctgaga

SEQ ID NO: 719011 - DNA, 25 bp, Homo sapien
tctacaggtaccagctctgagacac

SEQ ID NO: 719012 - DNA, 25 bp, Homo sapien
ctctacaggtaccagctctgagaca

SEQ ID NO: 719013 - DNA, 25 bp, Homo sapien
ttctccacgtattccctgatgttaa

SEQ ID NO: 719014 - DNA, 25 bp, Homo sapien
tccacgtattccctgatgttaactt

SEQ ID NO: 719015 - DNA, 25 bp, Homo sapien
cacgtattccctgatgttaacttta

SEQ ID NO: 719016 - DNA, 25 bp, Homo sapien
tctccacgtattccctgatgttaac

SEQ ID NO: 719017 - DNA, 25 bp, Homo sapien
accacgcagcggtaaaacccagcat

SEQ ID NO: 719018 - DNA, 25 bp, Homo sapien
tgtttcgcaccacgcagcggtaaaa

SEQ ID NO: 719019 - DNA, 25 bp, Homo sapien
gcggtaaaacccagcatcgagcttc

SEQ ID NO: 719020 - DNA, 25 bp, Homo sapien
tcccattctgtttcgcaccacgcag

SEQ ID NO: 719021 - DNA, 25 bp, Homo sapien
ggaataatcttgtgcccttctctaa

SEQ ID NO: 719022 - DNA, 25 bp, Homo sapien
gctgcacgtccttgagaaactgttt

SEQ ID NO: 719023 - DNA, 25 bp, Homo sapien
ccttctctaaaccaagtcacttgag

SEQ ID NO: 719024 - DNA, 25 bp, Homo sapien
gcagcaggtttagaatcgctgcacg

SEQ ID NO: 719025 - DNA, 25 bp, Homo sapien
tacggaaggaattccacagttgctc

SEQ ID NO: 719026 - DNA, 25 bp, Homo sapien
gggtaggagacgagaatcaacagct

SEQ ID NO: 719027 - DNA, 25 bp, Homo sapien
tgttcaggtagatgagaatcatgag

SEQ ID NO: 719028 - DNA, 25 bp, Homo sapien
caagaatcacgaggtttacggaagg

SEQ ID NO: 719029 - DNA, 25 bp, Homo sapien
tagagatttaccaacagcttcatgc

SEQ ID NO: 719030 - DNA, 25 bp, Homo sapien
tgctgccactgacgttaattaaaag

SEQ ID NO: 719031 - DNA, 25 bp, Homo sapien
tcatactcgtgaataagtgctgtct

SEQ ID NO: 719032 - DNA, 25 bp, Homo sapien
tcatgcatatagtgagaacacaggt

SEQ ID NO: 719033 - DNA, 25 bp, Homo sapien
tgtttactgcccatacttcacaatc

SEQ ID NO: 719034 - DNA, 25 bp, Homo sapien
tgagtcacctgggatgctgtttact

SEQ ID NO: 719035 - DNA, 25 bp, Homo sapien
cattactggcaagttgtctattgca

SEQ ID NO: 719036 - DNA, 25 bp, Homo sapien
cttcacaatccagatcattactggc

SEQ ID NO: 719037 - DNA, 25 bp, Homo sapien
aagcctgcgacttttctcatctgcg

SEQ ID NO: 719038 - DNA, 25 bp, Homo sapien
tctcatctgcgtcaccagattcctt

SEQ ID NO: 719039 - DNA, 25 bp, Homo sapien
gacttttctcatctgcgtcaccaga

SEQ ID NO: 719040 - DNA, 25 bp, Homo sapien
cccacacaagtttaagcctgcgact

SEQ ID NO: 719041 - DNA, 25 bp, Homo sapien
acctctcgctctgcacggtgaggct

SEQ ID NO: 719042 - DNA, 25 bp, Homo sapien
agcccatatcctgacctattattgc

SEQ ID NO: 719043 - DNA, 25 bp, Homo sapien
tcgcactacctgacaatctgaaaga

SEQ ID NO: 719044 - DNA, 25 bp, Homo sapien
gaaaacacgaaatcctcacaagcat

SEQ ID NO: 719045 - DNA, 25 bp, Homo sapien
tcaacatgtgatcggtctgtgccat

SEQ ID NO: 719046 - DNA, 25 bp, Homo sapien
aatgtgtatgtcttccgcccttgga

SEQ ID NO: 719047 - DNA, 25 bp, Homo sapien
tgatcaaacaaatctccctgctgtc

SEQ ID NO: 719048 - DNA, 25 bp, Homo sapien
tatgccagccaccaaatacacaagg

SEQ ID NO: 719049 - DNA, 25 bp, Homo sapien
tctagtccaggttctatgatcagtg

SEQ ID NO: 719050 - DNA, 25 bp, Homo sapien
gaactgacgtattcttgaaaagcct

SEQ ID NO: 719051 - DNA, 25 bp, Homo sapien
gaatgaagccattcccgtgggaagc

SEQ ID NO: 719052 - DNA, 25 bp, Homo sapien
gacggatgggatcttattctaacag

SEQ ID NO: 719053 - DNA, 25 bp, Homo sapien
aaaatgactcattctggcacaagtg

SEQ ID NO: 719054 - DNA, 25 bp, Homo sapien
gacactcaacgcttcaagcatggaa

SEQ ID NO: 719055 - DNA, 25 bp, Homo sapien
tgaaccgtcctacaaaagcaaatct

SEQ ID NO: 719056 - DNA, 25 bp, Homo sapien
catttaaactttgaaggcctcagga

SEQ ID NO: 719057 - DNA, 25 bp, Homo sapien
tggtaattgcaacagctgactcact

SEQ ID NO: 719058 - DNA, 25 bp, Homo sapien
aatgaatagtttgctgctgacgccc

SEQ ID NO: 719059 - DNA, 25 bp, Homo sapien
tggtcagactgagcaaattctattg

SEQ ID NO: 719060 - DNA, 25 bp, Homo sapien
gctgacgcccttttatgatggctgc

SEQ ID NO: 719061 - DNA, 25 bp, Homo sapien
tatctataggttgagtttttggcac

SEQ ID NO: 719062 - DNA, 25 bp, Homo sapien
gatctctgccaggatatcaagtggg

SEQ ID NO: 719063 - DNA, 25 bp, Homo sapien
tcaggttatatatctataggttgag

SEQ ID NO: 719064 - DNA, 25 bp, Homo sapien
aatgatctctgccaggatatcaagt

SEQ ID NO: 719065 - DNA, 25 bp, Homo sapien
aggcttcccaattatagtatctgtt

SEQ ID NO: 719066 - DNA, 25 bp, Homo sapien
gaggcttcccaattatagtatctgt

SEQ ID NO: 719067 - DNA, 25 bp, Homo sapien
ggaggcttcccaattatagtatctg

SEQ ID NO: 719068 - DNA, 25 bp, Homo sapien
gatgagatgtgttccacgagccttc

SEQ ID NO: 719069 - DNA, 25 bp, Homo sapien
tgagatgtgttccacgagccttcat

SEQ ID NO: 719070 - DNA, 25 bp, Homo sapien
aagatgagatgtgttccacgagcct

SEQ ID NO: 719071 - DNA, 25 bp, Homo sapien
agaagatgagatgtgttccacgagc

SEQ ID NO: 719072 - DNA, 25 bp, Homo sapien
gggcagatagctgctaacttgtggc

SEQ ID NO: 719073 - DNA, 25 bp, Homo sapien
tggccagtaaggtccaggcatcgcc

SEQ ID NO: 719074 - DNA, 25 bp, Homo sapien
gatagctgctaacttgtggccagta

SEQ ID NO: 719075 - DNA, 25 bp, Homo sapien
tcatgggggcagatagctgctaact

SEQ ID NO: 719076 - DNA, 25 bp, Homo sapien
tgtaagtctatagctgccacggatg

SEQ ID NO: 719077 - DNA, 25 bp, Homo sapien
gactcctctgatggtcttggaaaag

SEQ ID NO: 719078 - DNA, 25 bp, Homo sapien
tgttaagatggaacctactcctggt

SEQ ID NO: 719079 - DNA, 25 bp, Homo sapien
gatgccatcaagaacattcgggatt

SEQ ID NO: 719080 - DNA, 25 bp, Homo sapien
caatgacgggatggccaggctttga

SEQ ID NO: 719081 - DNA, 25 bp, Homo sapien
aggctttgaagcattggaggcactg

SEQ ID NO: 719082 - DNA, 25 bp, Homo sapien
ggaggcactggaccactctccagag

SEQ ID NO: 719083 - DNA, 25 bp, Homo sapien
cactggaccactctccagagtgctg

SEQ ID NO: 719084 - DNA, 25 bp, Homo sapien
tgccatcgatcagcgccgagcactg

SEQ ID NO: 719085 - DNA, 25 bp, Homo sapien
acaggtccccggcagacgcaccttc

SEQ ID NO: 719086 - DNA, 25 bp, Homo sapien
tgtccagccttcacagttccctggg

SEQ ID NO: 719087 - DNA, 25 bp, Homo sapien
acgcaccttccacagaggacccacc

SEQ ID NO: 719088 - DNA, 25 bp, Homo sapien
actcgtttcgagaatcagtgcaaat

SEQ ID NO: 719089 - DNA, 25 bp, Homo sapien
gaatcagtgcaaatactggtcacaa

SEQ ID NO: 719090 - DNA, 25 bp, Homo sapien
cagtgcaaatactggtcacaaacaa

SEQ ID NO: 719091 - DNA, 25 bp, Homo sapien
tcactcgtttcgagaatcagtgcaa

SEQ ID NO: 719092 - DNA, 25 bp, Homo sapien
ctttgatgcgtggtaggtgatgaat

SEQ ID NO: 719093 - DNA, 25 bp, Homo sapien
cgtggtaggtgatgaatgaagaatc

SEQ ID NO: 719094 - DNA, 25 bp, Homo sapien
tctggcactttgatgcgtggtaggt

SEQ ID NO: 719095 - DNA, 25 bp, Homo sapien
agtgtctggcactttgatgcgtggt

SEQ ID NO: 719096 - DNA, 25 bp, Homo sapien
tagggtaagctcaaatgggaggaac

SEQ ID NO: 719097 - DNA, 25 bp, Homo sapien
catctctagggtaagctcaaatggg

SEQ ID NO: 719098 - DNA, 25 bp, Homo sapien
aggttcatctctagggtaagctcaa

SEQ ID NO: 719099 - DNA, 25 bp, Homo sapien
tctctagggtaagctcaaatgggag

SEQ ID NO: 719100 - DNA, 25 bp, Homo sapien
caaggtgagaccaggtttctgctgt

SEQ ID NO: 719101 - DNA, 25 bp, Homo sapien
tgctgttctgacaagcgtgcgtatg

SEQ ID NO: 719102 - DNA, 25 bp, Homo sapien
tatgaaggtgtctggtgtccggcag

SEQ ID NO: 719103 - DNA, 25 bp, Homo sapien
acaaggtgagaccaggtttctgctg

SEQ ID NO: 719104 - DNA, 25 bp, Homo sapien
aatgaataatgggaactaagatcct

SEQ ID NO: 719105 - DNA, 25 bp, Homo sapien
agatccttacatgccattactccag

SEQ ID NO: 719106 - DNA, 25 bp, Homo sapien
gggaactaagatccttacatgccat

SEQ ID NO: 719107 - DNA, 25 bp, Homo sapien
atgccattactccagtgccagctgg

SEQ ID NO: 719108 - DNA, 25 bp, Homo sapien
accatgctccccgtcaactcttctt

SEQ ID NO: 719109 - DNA, 25 bp, Homo sapien
ccacgggcctggcaactgctgtgtg

SEQ ID NO: 719110 - DNA, 25 bp, Homo sapien
ctcgccgtcatgatgaggagggcac

SEQ ID NO: 719111 - DNA, 25 bp, Homo sapien
agttgtttgtcacttctcagaaggg

SEQ ID NO: 719112 - DNA, 25 bp, Homo sapien
cactctctgtgacgatggacactgt

SEQ ID NO: 719113 - DNA, 25 bp, Homo sapien
gccagtgccatcactctctgtgacg

SEQ ID NO: 719114 - DNA, 25 bp, Homo sapien
ttgggttctttgctttatcagacag

SEQ ID NO: 719115 - DNA, 25 bp, Homo sapien
ttgtgtgtaaacaacatctgttggg

SEQ ID NO: 719116 - DNA, 25 bp, Homo sapien
tatagagaggcccttaacgcgatca

SEQ ID NO: 719117 - DNA, 25 bp, Homo sapien
gagaggcccttaacgcgatcaggca

SEQ ID NO: 719118 - DNA, 25 bp, Homo sapien
acaccatgatattctgtcttaatat

SEQ ID NO: 719119 - DNA, 25 bp, Homo sapien
cttaacgcgatcaggcaactgtgac

SEQ ID NO: 719120 - DNA, 25 bp, Homo sapien
tgtcccatagagcttcgattgggtg

SEQ ID NO: 719121 - DNA, 25 bp, Homo sapien
ctgaaccaggacacactgttcatgt

SEQ ID NO: 719122 - DNA, 25 bp, Homo sapien
agcttcgattgggtgtacttacaag

SEQ ID NO: 719123 - DNA, 25 bp, Homo sapien
accaggacacactgttcatgtccca

SEQ ID NO: 719124 - DNA, 25 bp, Homo sapien
ctggaagcacaggatttatggttgg

SEQ ID NO: 719125 - DNA, 25 bp, Homo sapien
cacaggatttatggttggtgaaaac

SEQ ID NO: 719126 - DNA, 25 bp, Homo sapien
gatttatggttggtgaaaacagccc

SEQ ID NO: 719127 - DNA, 25 bp, Homo sapien
ggtgaaaacagcccactgggcactg

SEQ ID NO: 719128 - DNA, 25 bp, Homo sapien
agggatgtgatactgacgtcggaat

SEQ ID NO: 719129 - DNA, 25 bp, Homo sapien
cagggatgtgatactgacgtcggaa

SEQ ID NO: 719130 - DNA, 25 bp, Homo sapien
gggatgtgatactgacgtcggaatc

SEQ ID NO: 719131 - DNA, 25 bp, Homo sapien
tccctgctatgtttgcatggccagg

SEQ ID NO: 719132 - DNA, 25 bp, Homo sapien
taggcatcgactgggaagctccctg

SEQ ID NO: 719133 - DNA, 25 bp, Homo sapien
gggaagctccctgctatgtttgcat

SEQ ID NO: 719134 - DNA, 25 bp, Homo sapien
cttgctaggcatcgactgggaagct

SEQ ID NO: 719135 - DNA, 25 bp, Homo sapien
aggatgagtaaacagtcttcttgat

SEQ ID NO: 719136 - DNA, 25 bp, Homo sapien
ttgatcgtgaccaagaccttctcat

SEQ ID NO: 719137 - DNA, 25 bp, Homo sapien
gagtaaacagtcttcttgatcgtga

SEQ ID NO: 719138 - DNA, 25 bp, Homo sapien
aacagtcttcttgatcgtgaccaag

SEQ ID NO: 719139 - DNA, 25 bp, Homo sapien
taactccaggccacgtctttttcac

SEQ ID NO: 719140 - DNA, 25 bp, Homo sapien
aaggaaagtcgccaatgggcacagt

SEQ ID NO: 719141 - DNA, 25 bp, Homo sapien
catcattattaactccaggccacgt

SEQ ID NO: 719142 - DNA, 25 bp, Homo sapien
ccttcaacttaacttctaccatcat

SEQ ID NO: 719143 - DNA, 25 bp, Homo sapien
gacatccagagttcattaaaactca

SEQ ID NO: 719144 - DNA, 25 bp, Homo sapien
tcattaaaactcagaggttcctcct

SEQ ID NO: 719145 - DNA, 25 bp, Homo sapien
ctggaacatagacatccagagttca

SEQ ID NO: 719146 - DNA, 25 bp, Homo sapien
catagacatccagagttcattaaaa

SEQ ID NO: 719147 - DNA, 25 bp, Homo sapien
gggtgctccacatctgcgccagcac

SEQ ID NO: 719148 - DNA, 25 bp, Homo sapien
cgggtgctccacatctgcgccagca

SEQ ID NO: 719149 - DNA, 25 bp, Homo sapien
gtggcgaggatcaccagctgattct

SEQ ID NO: 719150 - DNA, 25 bp, Homo sapien
tgcacgtagtatgccccggcatcac

SEQ ID NO: 719151 - DNA, 25 bp, Homo sapien
cactggttgtggtggcgaggatcac

SEQ ID NO: 719152 - DNA, 25 bp, Homo sapien
tgaatgggcttgtcttgttttctcc

SEQ ID NO: 719153 - DNA, 25 bp, Homo sapien
ccgtaactactacactagagagaga

SEQ ID NO: 719154 - DNA, 25 bp, Homo sapien
ggcactggatcaatattaaaccgta

SEQ ID NO: 719155 - DNA, 25 bp, Homo sapien
gagccctaaagctctccgaactatt

SEQ ID NO: 719156 - DNA, 25 bp, Homo sapien
ttgcttgcagaattaccatttggga

SEQ ID NO: 719157 - DNA, 25 bp, Homo sapien
ccttacagagtagggaggtaggcaa

SEQ ID NO: 719158 - DNA, 25 bp, Homo sapien
gctagtacagcggtttgcaaattca

SEQ ID NO: 719159 - DNA, 25 bp, Homo sapien
taaatcccgtatgtcaccaggaagg

SEQ ID NO: 719160 - DNA, 25 bp, Homo sapien
caatatacttttcggtcagggtaga

SEQ ID NO: 719161 - DNA, 25 bp, Homo sapien
tcaatacatcacaccctcaccagga

SEQ ID NO: 719162 - DNA, 25 bp, Homo sapien
ggccaggtcctgaactgcagtgttc

SEQ ID NO: 719163 - DNA, 25 bp, Homo sapien
actgcagtgttcattgcttagagcc

SEQ ID NO: 719164 - DNA, 25 bp, Homo sapien
ggtcctgaactgcagtgttcattgc

SEQ ID NO: 719165 - DNA, 25 bp, Homo sapien
tcaatcttgtgtggtgtttccacaa

SEQ ID NO: 719166 - DNA, 25 bp, Homo sapien
aatcttgtgtggtgtttccacaaaa

SEQ ID NO: 719167 - DNA, 25 bp, Homo sapien
tcttgtgtggtgtttccacaaaagc

SEQ ID NO: 719168 - DNA, 25 bp, Homo sapien
caatcttgtgtggtgtttccacaaa

SEQ ID NO: 719169 - DNA, 25 bp, Homo sapien
tattctcccgacagcaagcaaaaat

SEQ ID NO: 719170 - DNA, 25 bp, Homo sapien
tgctttattctcccgacagcaagca

SEQ ID NO: 719171 - DNA, 25 bp, Homo sapien
cgctggccagaaagtttttacaaat

SEQ ID NO: 719172 - DNA, 25 bp, Homo sapien
cattaaatgataattggctgtaata

SEQ ID NO: 719173 - DNA, 25 bp, Homo sapien
cagcaggcggtaccattatgggact

SEQ ID NO: 719174 - DNA, 25 bp, Homo sapien
tgacaggttcataaagctttcccgg

SEQ ID NO: 719175 - DNA, 25 bp, Homo sapien
taaatatgcactaaacagcaggcgg

SEQ ID NO: 719176 - DNA, 25 bp, Homo sapien
tcaaagtggatccacccctgggatg

SEQ ID NO: 719177 - DNA, 25 bp, Homo sapien
tgacccagtacccatgccaatacag

SEQ ID NO: 719178 - DNA, 25 bp, Homo sapien
tacagtgatccactacccataccag

SEQ ID NO: 719179 - DNA, 25 bp, Homo sapien
acccttgggtattctccagtggagg

SEQ ID NO: 719180 - DNA, 25 bp, Homo sapien
aggccagtacggtgacttctttgac

SEQ ID NO: 719181 - DNA, 25 bp, Homo sapien
cctgggttccagacagatttcttct

SEQ ID NO: 719182 - DNA, 25 bp, Homo sapien
aattcaccatgccagtacagcgacc

SEQ ID NO: 719183 - DNA, 25 bp, Homo sapien
ctgacagtataccagtgtgggagca

SEQ ID NO: 719184 - DNA, 25 bp, Homo sapien
aacccaggcacctcgtggtcactgg

SEQ ID NO: 719185 - DNA, 25 bp, Homo sapien
gtctgtgtaagcaattcccgttttc

SEQ ID NO: 719186 - DNA, 25 bp, Homo sapien
tgtctgtgtaagcaattcccgtttt

SEQ ID NO: 719187 - DNA, 25 bp, Homo sapien
ctgtctgtgtaagcaattcccgttt

SEQ ID NO: 719188 - DNA, 25 bp, Homo sapien
tctgtgtaagcaattcccgttttcc

SEQ ID NO: 719189 - DNA, 25 bp, Homo sapien
gctccaggtagttaagcgtagattt

SEQ ID NO: 719190 - DNA, 25 bp, Homo sapien
tcgcgacctccgctctccgaagctg

SEQ ID NO: 719191 - DNA, 25 bp, Homo sapien
ttttcaggtagtccattctctgtct

SEQ ID NO: 719192 - DNA, 25 bp, Homo sapien
taagcgtagatttttcaggtagtcc

SEQ ID NO: 719193 - DNA, 25 bp, Homo sapien
tgataggaaccaggggtaaagacac

SEQ ID NO: 719194 - DNA, 25 bp, Homo sapien
ctgataggaaccaggggtaaagaca

SEQ ID NO: 719195 - DNA, 25 bp, Homo sapien
gctgctgcccctcgtagcgggagga

SEQ ID NO: 719196 - DNA, 25 bp, Homo sapien
cagccagactaaagagggtcgtgga

SEQ ID NO: 719197 - DNA, 25 bp, Homo sapien
agcagccagactaaagagggtcgtg

SEQ ID NO: 719198 - DNA, 25 bp, Homo sapien
ctgcccctcgtagcgggaggagaag

SEQ ID NO: 719199 - DNA, 25 bp, Homo sapien
tgaagctatttagccgcttagcttc

SEQ ID NO: 719200 - DNA, 25 bp, Homo sapien
ctagggatgtctgaagctatttagc

SEQ ID NO: 719201 - DNA, 25 bp, Homo sapien
tatttagccgcttagcttcaatgtc

SEQ ID NO: 719202 - DNA, 25 bp, Homo sapien
agctatttagccgcttagcttcaat

SEQ ID NO: 719203 - DNA, 25 bp, Homo sapien
cctgcgtacgtggagaactaacttt

SEQ ID NO: 719204 - DNA, 25 bp, Homo sapien
tctgcacccatatgagatgattctc

SEQ ID NO: 719205 - DNA, 25 bp, Homo sapien
tcccacgtgtgggttttggttcatg

SEQ ID NO: 719206 - DNA, 25 bp, Homo sapien
cacacggtcaggtaggaaaacagag

SEQ ID NO: 719207 - DNA, 25 bp, Homo sapien
gtttggaagtcatgaattcagtttc

SEQ ID NO: 719208 - DNA, 25 bp, Homo sapien
tcttgttagtcaaaattagtcacat

SEQ ID NO: 719209 - DNA, 25 bp, Homo sapien
tattaatctatttgaactacctgat

SEQ ID NO: 719210 - DNA, 25 bp, Homo sapien
tctagactgaatcaataagcatatc

SEQ ID NO: 719211 - DNA, 25 bp, Homo sapien
gcatgaatatactatggtttaaacc

SEQ ID NO: 719212 - DNA, 25 bp, Homo sapien
cattatccttaactaatccattgta

SEQ ID NO: 719213 - DNA, 25 bp, Homo sapien
attccatagcatgaatatactatgg

SEQ ID NO: 719214 - DNA, 25 bp, Homo sapien
cattcattattaaggcttccatatt

SEQ ID NO: 719215 - DNA, 25 bp, Homo sapien
acatgtgagccactttgttgttaac

SEQ ID NO: 719216 - DNA, 25 bp, Homo sapien
attagcacggggaatgaaggcctgc

SEQ ID NO: 719217 - DNA, 25 bp, Homo sapien
aaatacggcttttccattagcacgg

SEQ ID NO: 719218 - DNA, 25 bp, Homo sapien
taccagccacgtttatttccacatg

SEQ ID NO: 719219 - DNA, 25 bp, Homo sapien
gaacagggacctatgtgtgcaaatt

SEQ ID NO: 719220 - DNA, 25 bp, Homo sapien
ttataaacagcagcccatgaacagg

SEQ ID NO: 719221 - DNA, 25 bp, Homo sapien
tcagctcagaatattaggtaacaaa

SEQ ID NO: 719222 - DNA, 25 bp, Homo sapien
catacggagcaatgatactgtacac

SEQ ID NO: 719223 - DNA, 25 bp, Homo sapien
ccagaaagtactggtcaagtctgaa

SEQ ID NO: 719224 - DNA, 25 bp, Homo sapien
catctacaaactgggagggttccgt

SEQ ID NO: 719225 - DNA, 25 bp, Homo sapien
ggtggagattcccaaggatataggg

SEQ ID NO: 719226 - DNA, 25 bp, Homo sapien
gggtatccacaaagagtctaacaag

SEQ ID NO: 719227 - DNA, 25 bp, Homo sapien
taaaaaccctttcataatgacatcc

SEQ ID NO: 719228 - DNA, 25 bp, Homo sapien
ttaaaaaccctttcataatgacatc

SEQ ID NO: 719229 - DNA, 25 bp, Homo sapien
aaaaaccctttcataatgacatcct

SEQ ID NO: 719230 - DNA, 25 bp, Homo sapien
aaaaccctttcataatgacatcctt

SEQ ID NO: 719231 - DNA, 25 bp, Homo sapien
tggccatcccgaagttgcagaacgc

SEQ ID NO: 719232 - DNA, 25 bp, Homo sapien
tctcaatcactgctgggtacggctg

SEQ ID NO: 719233 - DNA, 25 bp, Homo sapien
gcaacctcaaccagctgttcgggat

SEQ ID NO: 719234 - DNA, 25 bp, Homo sapien
gggtacggctggtctgcaacctcaa

SEQ ID NO: 719235 - DNA, 25 bp, Homo sapien
tatcaaggagatcaatcttgtcttt

SEQ ID NO: 719236 - DNA, 25 bp, Homo sapien
taagacttatcaaggagatcaatct

SEQ ID NO: 719237 - DNA, 25 bp, Homo sapien
gacttatcaaggagatcaatcttgt

SEQ ID NO: 719238 - DNA, 25 bp, Homo sapien
ttaagacttatcaaggagatcaatc

SEQ ID NO: 719239 - DNA, 25 bp, Homo sapien
cagagtaggctgcaacataatgttt

SEQ ID NO: 719240 - DNA, 25 bp, Homo sapien
taggctgcaacataatgtttcatgg

SEQ ID NO: 719241 - DNA, 25 bp, Homo sapien
gagtaggctgcaacataatgtttca

SEQ ID NO: 719242 - DNA, 25 bp, Homo sapien
ggctgcaacataatgtttcatggat

SEQ ID NO: 719243 - DNA, 25 bp, Homo sapien
gtgaagcacatgtatcttctgtgga

SEQ ID NO: 719244 - DNA, 25 bp, Homo sapien
atctgatgccctgatgttgtagctc

SEQ ID NO: 719245 - DNA, 25 bp, Homo sapien
ggaatatgcactgggcgagaccccg

SEQ ID NO: 719246 - DNA, 25 bp, Homo sapien
agcacatgtatcttctgtggatctg

SEQ ID NO: 719247 - DNA, 25 bp, Homo sapien
gccttcagggatgcgtggagatatc

SEQ ID NO: 719248 - DNA, 25 bp, Homo sapien
cgtggagatatctgagggtgggcaa

SEQ ID NO: 719249 - DNA, 25 bp, Homo sapien
atggccgacagaggaggtgcttcca

SEQ ID NO: 719250 - DNA, 25 bp, Homo sapien
gggctgcgtggcaggcgtgcctgtg

SEQ ID NO: 719251 - DNA, 25 bp, Homo sapien
gatgcaatgaggcttcccgtctacc

SEQ ID NO: 719252 - DNA, 25 bp, Homo sapien
cacacctttctgtaccctggatgca

SEQ ID NO: 719253 - DNA, 25 bp, Homo sapien
aagtgcagcccgtgtcttggggaat

SEQ ID NO: 719254 - DNA, 25 bp, Homo sapien
tgtcttggggaatctgtcacacctt

SEQ ID NO: 719255 - DNA, 25 bp, Homo sapien
tccaaacgaacaggcattttcaggc

SEQ ID NO: 719256 - DNA, 25 bp, Homo sapien
gccataaaacgggaagctattgtct

SEQ ID NO: 719257 - DNA, 25 bp, Homo sapien
gcgttttcgcgtttgccttgcagga

SEQ ID NO: 719258 - DNA, 25 bp, Homo sapien
tttcaggcatacaaccaaggctact

SEQ ID NO: 719259 - DNA, 25 bp, Homo sapien
ctcactggatccagccaccacactt

SEQ ID NO: 719260 - DNA, 25 bp, Homo sapien
gtctcactggatccagccaccacac

SEQ ID NO: 719261 - DNA, 25 bp, Homo sapien
tcactggatccagccaccacacttc

SEQ ID NO: 719262 - DNA, 25 bp, Homo sapien
tctcactggatccagccaccacact

SEQ ID NO: 719263 - DNA, 25 bp, Homo sapien
tatgatgaaaagaaaggccgtcgcc

SEQ ID NO: 719264 - DNA, 25 bp, Homo sapien
tcgccctggccggttcaaaagcgct

SEQ ID NO: 719265 - DNA, 25 bp, Homo sapien
tgaggcgtcttccaaagctgtggag

SEQ ID NO: 719266 - DNA, 25 bp, Homo sapien
gcctcgcagacgtatggcccggtgt

SEQ ID NO: 719267 - DNA, 25 bp, Homo sapien
gagatgctggcaacaccacttagag

SEQ ID NO: 719268 - DNA, 25 bp, Homo sapien
gatttcgaaggtaaactcaacctca

SEQ ID NO: 719269 - DNA, 25 bp, Homo sapien
tcaacctcaccttcatttgccgagt

SEQ ID NO: 719270 - DNA, 25 bp, Homo sapien
gaagagtcagtgtcggatgctatct

SEQ ID NO: 719271 - DNA, 25 bp, Homo sapien
tgtggataagatagcttggcatgcc

SEQ ID NO: 719272 - DNA, 25 bp, Homo sapien
tatcatgataacaaaaggctgttgt

SEQ ID NO: 719273 - DNA, 25 bp, Homo sapien
gaaattcaacagaggcatggccaag

SEQ ID NO: 719274 - DNA, 25 bp, Homo sapien
tgggaactgtcttccagagctggtt

SEQ ID NO: 719275 - DNA, 25 bp, Homo sapien
acttcagctgaaatccgactctcgg

SEQ ID NO: 719276 - DNA, 25 bp, Homo sapien
gactctcgggctcagcagtaaaata

SEQ ID NO: 719277 - DNA, 25 bp, Homo sapien
catggcttgacatccgatgtccaca

SEQ ID NO: 719278 - DNA, 25 bp, Homo sapien
ttgacatccgatgtccacagtttct

SEQ ID NO: 719279 - DNA, 25 bp, Homo sapien
ttgagtggcccagtgcctttggcac

SEQ ID NO: 719280 - DNA, 25 bp, Homo sapien
tgtggtacagtgaaaatcatctctc

SEQ ID NO: 719281 - DNA, 25 bp, Homo sapien
cactgtacttaaccatgctttccag

SEQ ID NO: 719282 - DNA, 25 bp, Homo sapien
gagaaggatcccatttcattgagtg

SEQ ID NO: 719283 - DNA, 25 bp, Homo sapien
catatcttgacatgcttcagtgcaa

SEQ ID NO: 719284 - DNA, 25 bp, Homo sapien
cctggtgagtgctcaatggcagtat

SEQ ID NO: 719285 - DNA, 25 bp, Homo sapien
tccatgaggcatatctacacttagc

SEQ ID NO: 719286 - DNA, 25 bp, Homo sapien
ggagttctactgtctcagaggagca

SEQ ID NO: 719287 - DNA, 25 bp, Homo sapien
tcattgctggcgaagcactggaaga

SEQ ID NO: 719288 - DNA, 25 bp, Homo sapien
gagtcctctggacgcagcttctgga

SEQ ID NO: 719289 - DNA, 25 bp, Homo sapien
taggtgtgggtctggatctcccctc

SEQ ID NO: 719290 - DNA, 25 bp, Homo sapien
cactttgtatcgaggattctggagc

SEQ ID NO: 719291 - DNA, 25 bp, Homo sapien
ggatacgtccaggtcaggtagctgt

SEQ ID NO: 719292 - DNA, 25 bp, Homo sapien
gatacgtccaggtcaggtagctgtg

SEQ ID NO: 719293 - DNA, 25 bp, Homo sapien
tggatacgtccaggtcaggtagctg

SEQ ID NO: 719294 - DNA, 25 bp, Homo sapien
tgggtgtacccagtggttacatcca

SEQ ID NO: 719295 - DNA, 25 bp, Homo sapien
agtggttacatccaggtagccatgg

SEQ ID NO: 719296 - DNA, 25 bp, Homo sapien
tactcactggatacgtccaggtcag

SEQ ID NO: 719297 - DNA, 25 bp, Homo sapien
cactggatacgtccaggtcaggtag

SEQ ID NO: 719298 - DNA, 25 bp, Homo sapien
ggttacatccaggtagccatggggc

SEQ ID NO: 719299 - DNA, 25 bp, Homo sapien
tggttacatccaggtagccatgggg

SEQ ID NO: 719300 - DNA, 25 bp, Homo sapien
ctgattacatccaggtagccatggg

SEQ ID NO: 719301 - DNA, 25 bp, Homo sapien
ggttacatccaggtagccatggggc

SEQ ID NO: 719302 - DNA, 25 bp, Homo sapien
tggttacatccaggtagccatgggg

SEQ ID NO: 719303 - DNA, 25 bp, Homo sapien
tggatacgtccaggtcaggtagctg

SEQ ID NO: 719304 - DNA, 25 bp, Homo sapien
tccaggtcaggtagctgtgagcctg

SEQ ID NO: 719305 - DNA, 25 bp, Homo sapien
tacgtccaggtcaggtagctgtgag

SEQ ID NO: 719306 - DNA, 25 bp, Homo sapien
gatacgtccaggtcaggtagctgtg

SEQ ID NO: 719307 - DNA, 25 bp, Homo sapien
gatagccatggggctgaatgtactc

SEQ ID NO: 719308 - DNA, 25 bp, Homo sapien
ctggttacatccagatagccatggg

SEQ ID NO: 719309 - DNA, 25 bp, Homo sapien
tagccatggggctgaatgtactcac

SEQ ID NO: 719310 - DNA, 25 bp, Homo sapien
cagatagccatggggctgaatgtac

SEQ ID NO: 719311 - DNA, 25 bp, Homo sapien
tgtacccagtggttacatccaggta

SEQ ID NO: 719312 - DNA, 25 bp, Homo sapien
tgggtgtacccagtggttacatcca

SEQ ID NO: 719313 - DNA, 25 bp, Homo sapien
cccagtggttacatccaggtagcca

SEQ ID NO: 719314 - DNA, 25 bp, Homo sapien
agtggttacatccaggtagccatgg

SEQ ID NO: 719315 - DNA, 25 bp, Homo sapien
ggttacatccaggtagccatggggc

SEQ ID NO: 719316 - DNA, 25 bp, Homo sapien
tggttacatccaggtagccatgggg

SEQ ID NO: 719317 - DNA, 25 bp, Homo sapien
ctgattacatccaggtagccatggg

SEQ ID NO: 719318 - DNA, 25 bp, Homo sapien
tgtgagcctgggtgtacccactggt

SEQ ID NO: 719319 - DNA, 25 bp, Homo sapien
ggttacatccaggtagccatggggc

SEQ ID NO: 719320 - DNA, 25 bp, Homo sapien
tggatacgtccaggtcaggtagctg

SEQ ID NO: 719321 - DNA, 25 bp, Homo sapien
tccaggtcaggtagctgtgagcctg

SEQ ID NO: 719322 - DNA, 25 bp, Homo sapien
agccgtcggcctgggtgtgctcact

SEQ ID NO: 719323 - DNA, 25 bp, Homo sapien
ctgtgggccaaggtgtacccactgg

SEQ ID NO: 719324 - DNA, 25 bp, Homo sapien
cgtgggcgtgggtgtacccactgga

SEQ ID NO: 719325 - DNA, 25 bp, Homo sapien
gatacatccgggtagccgtgggcgt

SEQ ID NO: 719326 - DNA, 25 bp, Homo sapien
gtctggctttgctgataggtgtacc

SEQ ID NO: 719327 - DNA, 25 bp, Homo sapien
tctggctttgctgataggtgtaccc

SEQ ID NO: 719328 - DNA, 25 bp, Homo sapien
aggtctggctttgctgataggtgta

SEQ ID NO: 719329 - DNA, 25 bp, Homo sapien
tggctttgctgataggtgtacccac

SEQ ID NO: 719330 - DNA, 25 bp, Homo sapien
ggctggagtcatctcgtccttcact

SEQ ID NO: 719331 - DNA, 25 bp, Homo sapien
ctggagtcatctcgtccttcactgc

SEQ ID NO: 719332 - DNA, 25 bp, Homo sapien
tggctggagtcatctcgtccttcac

SEQ ID NO: 719333 - DNA, 25 bp, Homo sapien
gctggagtcatctcgtccttcactg

SEQ ID NO: 719334 - DNA, 25 bp, Homo sapien
cacccgagtccaggtcttgccagat

SEQ ID NO: 719335 - DNA, 25 bp, Homo sapien
aggtcttgccagatgccgcaggccc

SEQ ID NO: 719336 - DNA, 25 bp, Homo sapien
tgggctgccctttgaaagctacaaa

SEQ ID NO: 719337 - DNA, 25 bp, Homo sapien
ggtctcaacacttctgtgcctgtgt

SEQ ID NO: 719338 - DNA, 25 bp, Homo sapien
cccgtcagtaactgtggtgtccact

SEQ ID NO: 719339 - DNA, 25 bp, Homo sapien
tgatggcgggtttgggagccccgga

SEQ ID NO: 719340 - DNA, 25 bp, Homo sapien
ggctgtcatcccgtcagtaactgtg

SEQ ID NO: 719341 - DNA, 25 bp, Homo sapien
tcttttccaggtgatggcgggtttg

SEQ ID NO: 719342 - DNA, 25 bp, Homo sapien
tgtagttgccggcatcctggatgaa

SEQ ID NO: 719343 - DNA, 25 bp, Homo sapien
tgaacctaggaatccggacagagcc

SEQ ID NO: 719344 - DNA, 25 bp, Homo sapien
tggccgatgcattcagggagccctc

SEQ ID NO: 719345 - DNA, 25 bp, Homo sapien
ctgtgttggccgcatagcaggtgta

SEQ ID NO: 719346 - DNA, 25 bp, Homo sapien
catttggtccaatccttaagctcca

SEQ ID NO: 719347 - DNA, 25 bp, Homo sapien
ttaagctccagaaaactactctgca

SEQ ID NO: 719348 - DNA, 25 bp, Homo sapien
ttggcaattgaagttaaaaagtggc

SEQ ID NO: 719349 - DNA, 25 bp, Homo sapien
taacaattgtttagcaaaagcggaa

SEQ ID NO: 719350 - DNA, 25 bp, Homo sapien
aacccgggggtcatgtgtggcacca

SEQ ID NO: 719351 - DNA, 25 bp, Homo sapien
cgtggtccccttaatcaccacgtgg

SEQ ID NO: 719352 - DNA, 25 bp, Homo sapien
gaaacccgggggtcatgtgtggcac

SEQ ID NO: 719353 - DNA, 25 bp, Homo sapien
acagtgcagcgtggccgtggtcccc

SEQ ID NO: 719354 - DNA, 25 bp, Homo sapien
aaggagctctttccgaggcctgacg

SEQ ID NO: 719355 - DNA, 25 bp, Homo sapien
gctactacgaaaccacagggatccg

SEQ ID NO: 719356 - DNA, 25 bp, Homo sapien
gagcgagtaacccagttccatctga

SEQ ID NO: 719357 - DNA, 25 bp, Homo sapien
tcgggtggcgacatggaaatttaca

SEQ ID NO: 719358 - DNA, 25 bp, Homo sapien
ccacgatcctagacgtgctcgatgg

SEQ ID NO: 719359 - DNA, 25 bp, Homo sapien
aatctcgcagctgtagtcaccgatg

SEQ ID NO: 719360 - DNA, 25 bp, Homo sapien
gatgtcgcctgaccacgtctggctg

SEQ ID NO: 719361 - DNA, 25 bp, Homo sapien
tgctcgatggagtcagggccacgtt

SEQ ID NO: 719362 - DNA, 25 bp, Homo sapien
caagccgggcgtgacacttgtgaag

SEQ ID NO: 719363 - DNA, 25 bp, Homo sapien
tctgaccgctgacttgggacacaag

SEQ ID NO: 719364 - DNA, 25 bp, Homo sapien
tggctaacaccaaacgtctcagtac

SEQ ID NO: 719365 - DNA, 25 bp, Homo sapien
tatgcagcatgatgcgctggcctct

SEQ ID NO: 719366 - DNA, 25 bp, Homo sapien
tctcacagtccctggaatatgctca

SEQ ID NO: 719367 - DNA, 25 bp, Homo sapien
caggggtcagctctcacagtccctg

SEQ ID NO: 719368 - DNA, 25 bp, Homo sapien
cagctctcacagtccctggaatatg

SEQ ID NO: 719369 - DNA, 25 bp, Homo sapien
cagtccctggaatatgctcacacat

SEQ ID NO: 719370 - DNA, 25 bp, Homo sapien
tagaggcggaaatgccagttatcaa

SEQ ID NO: 719371 - DNA, 25 bp, Homo sapien
gttatcaattctactcctcccaagc

SEQ ID NO: 719372 - DNA, 25 bp, Homo sapien
tctgaatcggtgtggtctgaaacca

SEQ ID NO: 719373 - DNA, 25 bp, Homo sapien
taaccgaatctccattagaggcgga

SEQ ID NO: 719374 - DNA, 25 bp, Homo sapien
gttctgaggtgaatgaggcagttca

SEQ ID NO: 719375 - DNA, 25 bp, Homo sapien
atcaaagggccggacccaagagagc

SEQ ID NO: 719376 - DNA, 25 bp, Homo sapien
ttcagagagctccacgatgtaataa

SEQ ID NO: 719377 - DNA, 25 bp, Homo sapien
cggacccaagagagcaccacggcgt

SEQ ID NO: 719378 - DNA, 25 bp, Homo sapien
aataaagaataggactgtttccatc

SEQ ID NO: 719379 - DNA, 25 bp, Homo sapien
tagatggcgctatttagtgctgacc

SEQ ID NO: 719380 - DNA, 25 bp, Homo sapien
cttgcacacgctgagtggaggccaa

SEQ ID NO: 719381 - DNA, 25 bp, Homo sapien
gaagacacggaccaaccagctggta

SEQ ID NO: 719382 - DNA, 25 bp, Homo sapien
ggagaatggcatcccagtcagcctg

SEQ ID NO: 719383 - DNA, 25 bp, Homo sapien
caaagacgatggaaagcgcgggtcc

SEQ ID NO: 719384 - DNA, 25 bp, Homo sapien
cagagataagtagcccaaagacgat

SEQ ID NO: 719385 - DNA, 25 bp, Homo sapien
cctgaagggcgctagatgagacact

SEQ ID NO: 719386 - DNA, 25 bp, Homo sapien
gcgcgggtccctatcgaatcagata

SEQ ID NO: 719387 - DNA, 25 bp, Homo sapien
agtgaacgcagaagcagacctcagc

SEQ ID NO: 719388 - DNA, 25 bp, Homo sapien
gaagtgaacgcagaagcagacctca

SEQ ID NO: 719389 - DNA, 25 bp, Homo sapien
ggaagtgaacgcagaagcagacctc

SEQ ID NO: 719390 - DNA, 25 bp, Homo sapien
tgaacgcagaagcagacctcagccc

SEQ ID NO: 719391 - DNA, 25 bp, Homo sapien
tttcacccacattagagatggtcag

SEQ ID NO: 719392 - DNA, 25 bp, Homo sapien
tccctttcacccacattagagatgg

SEQ ID NO: 719393 - DNA, 25 bp, Homo sapien
gctaaggtccctttcacccacatta

SEQ ID NO: 719394 - DNA, 25 bp, Homo sapien
ctgaagtggcgctaaggtccctttc

SEQ ID NO: 719395 - DNA, 25 bp, Homo sapien
ggccaacgtttgacagatgcacctt

SEQ ID NO: 719396 - DNA, 25 bp, Homo sapien
ctcagggccaacgtttgacagatgc

SEQ ID NO: 719397 - DNA, 25 bp, Homo sapien
cagggccaacgtttgacagatgcac

SEQ ID NO: 719398 - DNA, 25 bp, Homo sapien
gggccaacgtttgacagatgcacct

SEQ ID NO: 719399 - DNA, 25 bp, Homo sapien
ttcaccgcgcacacccggaattgat

SEQ ID NO: 719400 - DNA, 25 bp, Homo sapien
gtacgagccggagtcaggccactca

SEQ ID NO: 719401 - DNA, 25 bp, Homo sapien
ttgtctcggcgctgtactggcccct

SEQ ID NO: 719402 - DNA, 25 bp, Homo sapien
ggccactcacggtgacgcctgtcat

SEQ ID NO: 719403 - DNA, 25 bp, Homo sapien
ggactgattagtccgcccactggcc

SEQ ID NO: 719404 - DNA, 25 bp, Homo sapien
ctggaccataatggactgattagtc

SEQ ID NO: 719405 - DNA, 25 bp, Homo sapien
cactatatttttcgggggagcactg

SEQ ID NO: 719406 - DNA, 25 bp, Homo sapien
tagtccgcccactggccactatatt

SEQ ID NO: 719407 - DNA, 25 bp, Homo sapien
ctaatggcggcctaaagatggccaa

SEQ ID NO: 719408 - DNA, 25 bp, Homo sapien
tggcggcctaaagatggccaatcac

SEQ ID NO: 719409 - DNA, 25 bp, Homo sapien
aatggcggcctaaagatggccaatc

SEQ ID NO: 719410 - DNA, 25 bp, Homo sapien
taatggcggcctaaagatggccaat

SEQ ID NO: 719411 - DNA, 25 bp, Homo sapien
cggcttcagcctaaggaaactcttc

SEQ ID NO: 719412 - DNA, 25 bp, Homo sapien
gcttcagcctaaggaaactcttcct

SEQ ID NO: 719413 - DNA, 25 bp, Homo sapien
tgacggcttcagcctaaggaaactc

SEQ ID NO: 719414 - DNA, 25 bp, Homo sapien
ttcagcctaaggaaactcttcctgc

SEQ ID NO: 719415 - DNA, 25 bp, Homo sapien
ctgtgtgacaggtatttccacttac

SEQ ID NO: 719416 - DNA, 25 bp, Homo sapien
cgtggaccggaacatcagtaaggct

SEQ ID NO: 719417 - DNA, 25 bp, Homo sapien
tgacaccgaagcagagaagaaaccc

SEQ ID NO: 719418 - DNA, 25 bp, Homo sapien
tcagtaaggctgctgacaccgaagc

SEQ ID NO: 719419 - DNA, 25 bp, Homo sapien
gagctgagacagacacgcgtggacc

SEQ ID NO: 719420 - DNA, 25 bp, Homo sapien
gtgtggtcccacgcgggcagggcac

SEQ ID NO: 719421 - DNA, 25 bp, Homo sapien
caggacgctgatctctgagctctgt

SEQ ID NO: 719422 - DNA, 25 bp, Homo sapien
aggctcctccaggacgctgatctct

SEQ ID NO: 719423 - DNA, 25 bp, Homo sapien
ggcatgtggaaatcttcaggctcct

SEQ ID NO: 719424 - DNA, 25 bp, Homo sapien
gagctctgtggttctgcagattcca

SEQ ID NO: 719425 - DNA, 25 bp, Homo sapien
gctggtgatgttccgctgctggtac

SEQ ID NO: 719426 - DNA, 25 bp, Homo sapien
gtgtactcggtcactgccctgctga

SEQ ID NO: 719427 - DNA, 25 bp, Homo sapien
aggcagtagttcacctccgggctgg

SEQ ID NO: 719428 - DNA, 25 bp, Homo sapien
catactgtgtccagatgatcaggtc

SEQ ID NO: 719429 - DNA, 25 bp, Homo sapien
aaggcgtgtacagaaacttccttag

SEQ ID NO: 719430 - DNA, 25 bp, Homo sapien
ggcgtgtacagaaacttccttagtc

SEQ ID NO: 719431 - DNA, 25 bp, Homo sapien
gcgtgtacagaaacttccttagtca

SEQ ID NO: 719432 - DNA, 25 bp, Homo sapien
aggcgtgtacagaaacttccttagt

SEQ ID NO: 719433 - DNA, 25 bp, Homo sapien
aattacttccctgggcaaggatttg

SEQ ID NO: 719434 - DNA, 25 bp, Homo sapien
tgtgaatcaggcgagggcataaatc

SEQ ID NO: 719435 - DNA, 25 bp, Homo sapien
ctgtaggacaaatgaggctgtgttg

SEQ ID NO: 719436 - DNA, 25 bp, Homo sapien
ggcataaatcgcagagtgaaaaagg

SEQ ID NO: 719437 - DNA, 25 bp, Homo sapien
caatacgggatgataataaaagcat

SEQ ID NO: 719438 - DNA, 25 bp, Homo sapien
tataaaggaggatttatggacttac

SEQ ID NO: 719439 - DNA, 25 bp, Homo sapien
ataaaagcatgtaatatcaaggaac

SEQ ID NO: 719440 - DNA, 25 bp, Homo sapien
caacagacagccagtcaatacggga

SEQ ID NO: 719441 - DNA, 25 bp, Homo sapien
gaattacttgcatatggacaggtcc

SEQ ID NO: 719442 - DNA, 25 bp, Homo sapien
gtaatcaagaattacttgcatatgg

SEQ ID NO: 719443 - DNA, 25 bp, Homo sapien
tcaagaattacttgcatatggacag

SEQ ID NO: 719444 - DNA, 25 bp, Homo sapien
tacttgcatatggacaggtccttcc

SEQ ID NO: 719445 - DNA, 25 bp, Homo sapien
taaatagaccagttaaagcaaatgt

SEQ ID NO: 719446 - DNA, 25 bp, Homo sapien
ttattaaatagaccagttaaagcaa

SEQ ID NO: 719447 - DNA, 25 bp, Homo sapien
aatagaccagttaaagcaaatgtta

SEQ ID NO: 719448 - DNA, 25 bp, Homo sapien
ttaaatagaccagttaaagcaaatg

SEQ ID NO: 719449 - DNA, 25 bp, Homo sapien
tccgcggaattttttccactcgaca

SEQ ID NO: 719450 - DNA, 25 bp, Homo sapien
aaagcgtattgatttctgagtccat

SEQ ID NO: 719451 - DNA, 25 bp, Homo sapien
gcggaattttttccactcgacacca

SEQ ID NO: 719452 - DNA, 25 bp, Homo sapien
accaaaagcgtattgatttctgagt

SEQ ID NO: 719453 - DNA, 25 bp, Homo sapien
cccacgatgcaagaagcacaaatct

SEQ ID NO: 719454 - DNA, 25 bp, Homo sapien
gatgcaagaagcacaaatcttcacg

SEQ ID NO: 719455 - DNA, 25 bp, Homo sapien
tctaccccacgatgcaagaagcaca

SEQ ID NO: 719456 - DNA, 25 bp, Homo sapien
ggagctgcttctaccccacgatgca

SEQ ID NO: 719457 - DNA, 25 bp, Homo sapien
caggtgcagtatcagttctcctggg

SEQ ID NO: 719458 - DNA, 25 bp, Homo sapien
tgggtgctcggcagccttcactgga

SEQ ID NO: 719459 - DNA, 25 bp, Homo sapien
cagggaccacttgctggctccgatc

SEQ ID NO: 719460 - DNA, 25 bp, Homo sapien
gctccgatctcctctagcaagccag

SEQ ID NO: 719461 - DNA, 25 bp, Homo sapien
aaatctcagtttctctacacagtga

SEQ ID NO: 719462 - DNA, 25 bp, Homo sapien
ccctgttacacataaaccgtgaaat

SEQ ID NO: 719463 - DNA, 25 bp, Homo sapien
acagtgaaatttcatcgtccatgac

SEQ ID NO: 719464 - DNA, 25 bp, Homo sapien
cacataaaccgtgaaatctcagttt

SEQ ID NO: 719465 - DNA, 25 bp, Homo sapien
tctaccaggaccgtttgctgccagt

SEQ ID NO: 719466 - DNA, 25 bp, Homo sapien
ctgtgactacgtccagcaggtattt

SEQ ID NO: 719467 - DNA, 25 bp, Homo sapien
taccaggaccgtttgctgccagtta

SEQ ID NO: 719468 - DNA, 25 bp, Homo sapien
cccacagagtctgtgactacgtcca

SEQ ID NO: 719469 - DNA, 25 bp, Homo sapien
gcgcgtatgaaaagcccgttgatga

SEQ ID NO: 719470 - DNA, 25 bp, Homo sapien
gcttcatagcaccaaggcgcgtatg

SEQ ID NO: 719471 - DNA, 25 bp, Homo sapien
gaaaagcccgttgatgatgtccaga

SEQ ID NO: 719472 - DNA, 25 bp, Homo sapien
gccgaacgcttcttgtgtgaagctt

SEQ ID NO: 719473 - DNA, 25 bp, Homo sapien
cagcacaatcctcacgtcaagttct

SEQ ID NO: 719474 - DNA, 25 bp, Homo sapien
aagttctggtcctgcatcctggagg

SEQ ID NO: 719475 - DNA, 25 bp, Homo sapien
ggctgcagcacaatcctcacgtcaa

SEQ ID NO: 719476 - DNA, 25 bp, Homo sapien
tggtcctgcatcctggaggcagtgc

SEQ ID NO: 719477 - DNA, 25 bp, Homo sapien
agaggtggtgtctatgtctgaaacc

SEQ ID NO: 719478 - DNA, 25 bp, Homo sapien
gaaacccttcaatgtaggctctgag

SEQ ID NO: 719479 - DNA, 25 bp, Homo sapien
ccaatagagtatgatccaggtccta

SEQ ID NO: 719480 - DNA, 25 bp, Homo sapien
ggagccagcctttccgctttcctag

SEQ ID NO: 719481 - DNA, 25 bp, Homo sapien
aaggtcctggttcttcaggtgcttg

SEQ ID NO: 719482 - DNA, 25 bp, Homo sapien
tcttcaggatgggaaccccagtggc

SEQ ID NO: 719483 - DNA, 25 bp, Homo sapien
caggtgcttgttctaaagtgaggca

SEQ ID NO: 719484 - DNA, 25 bp, Homo sapien
gcagcacggctgatgacgcatacat

SEQ ID NO: 719485 - DNA, 25 bp, Homo sapien
cagtcattgatgacagcagaacaaa

SEQ ID NO: 719486 - DNA, 25 bp, Homo sapien
cagaacaaatggcaggagggaccat

SEQ ID NO: 719487 - DNA, 25 bp, Homo sapien
ctgtggcagggcagtcattgatgac

SEQ ID NO: 719488 - DNA, 25 bp, Homo sapien
ggcagggcagtcattgatgacagca

SEQ ID NO: 719489 - DNA, 25 bp, Homo sapien
aatggtggtggagttcacggcttcc

SEQ ID NO: 719490 - DNA, 25 bp, Homo sapien
ccattgataaactgctgaggcggag

SEQ ID NO: 719491 - DNA, 25 bp, Homo sapien
tatccctggttgatgccattgataa

SEQ ID NO: 719492 - DNA, 25 bp, Homo sapien
acggcttccgtctgcacgttctgcg

SEQ ID NO: 719493 - DNA, 25 bp, Homo sapien
agcacagaacggaagtgaagtaggc

SEQ ID NO: 719494 - DNA, 25 bp, Homo sapien
aaatctggggcaatagtgaccacag

SEQ ID NO: 719495 - DNA, 25 bp, Homo sapien
ccatggtggactccgtggaaatctg

SEQ ID NO: 719496 - DNA, 25 bp, Homo sapien
cttcttcaggttcgttatgtgtcca

SEQ ID NO: 719497 - DNA, 25 bp, Homo sapien
ctggcgacggccaaactctagtaga

SEQ ID NO: 719498 - DNA, 25 bp, Homo sapien
agtagagacaagttcagaaggctga

SEQ ID NO: 719499 - DNA, 25 bp, Homo sapien
gagacaagttcagaaggctgagccc

SEQ ID NO: 719500 - DNA, 25 bp, Homo sapien
tgggagtgcggtgaggctgggagtc

SEQ ID NO: 719501 - DNA, 25 bp, Homo sapien
gcaagtcgctgctggccggacagca

SEQ ID NO: 719502 - DNA, 25 bp, Homo sapien
ctgcctgcgactcagggacagcagg

SEQ ID NO: 719503 - DNA, 25 bp, Homo sapien
gcagggcccacagcaagtcgctgct

SEQ ID NO: 719504 - DNA, 25 bp, Homo sapien
cacagcaagtcgctgctggccggac

SEQ ID NO: 719505 - DNA, 25 bp, Homo sapien
gtccaagatctctgtgaaactcaga

SEQ ID NO: 719506 - DNA, 25 bp, Homo sapien
tgtgtccaagatctctgtgaaactc

SEQ ID NO: 719507 - DNA, 25 bp, Homo sapien
tcctgccagctgaccttgagagatg

SEQ ID NO: 719508 - DNA, 25 bp, Homo sapien
gctgaccttgagagatgtgtccaag

SEQ ID NO: 719509 - DNA, 25 bp, Homo sapien
tgcccacaggagcgctcagtgccat

SEQ ID NO: 719510 - DNA, 25 bp, Homo sapien
cacaggcacgtaagcctcatagtca

SEQ ID NO: 719511 - DNA, 25 bp, Homo sapien
ggcacgtaagcctcatagtcacacc

SEQ ID NO: 719512 - DNA, 25 bp, Homo sapien
agacacaggcacgtaagcctcatag

SEQ ID NO: 719513 - DNA, 25 bp, Homo sapien
aagcagagtttttggtggatgttgt

SEQ ID NO: 719514 - DNA, 25 bp, Homo sapien
ccatttccgggtcagagcatgccac

SEQ ID NO: 719515 - DNA, 25 bp, Homo sapien
tgttgtgataaggaaacaagtactg

SEQ ID NO: 719516 - DNA, 25 bp, Homo sapien
cacgagtccttggatatatcctgtc

SEQ ID NO: 719517 - DNA, 25 bp, Homo sapien
gtaaggtgataacatccgatctcat

SEQ ID NO: 719518 - DNA, 25 bp, Homo sapien
acatccgatctcatctcctctagga

SEQ ID NO: 719519 - DNA, 25 bp, Homo sapien
gagctcccctgatgcgggcatcact

SEQ ID NO: 719520 - DNA, 25 bp, Homo sapien
atgctgggctggtaaggtgataaca

SEQ ID NO: 719521 - DNA, 25 bp, Homo sapien
cgagagcatggtggtgccgcaccaa

SEQ ID NO: 719522 - DNA, 25 bp, Homo sapien
caggtttgcccacgaacacagtttt

SEQ ID NO: 719523 - DNA, 25 bp, Homo sapien
tttgcaggaagcctgcgagagcatg

SEQ ID NO: 719524 - DNA, 25 bp, Homo sapien
tgccttcagcacagaatagaatttc

SEQ ID NO: 719525 - DNA, 25 bp, Homo sapien
ttcctgccgtacacttcccaagaga

SEQ ID NO: 719526 - DNA, 25 bp, Homo sapien
cgtgagacgagagtcgttcctgccg

SEQ ID NO: 719527 - DNA, 25 bp, Homo sapien
tgttcagggtgtgcgtgagacgaga

SEQ ID NO: 719528 - DNA, 25 bp, Homo sapien
gttcctgccgtacacttcccaagag

SEQ ID NO: 719529 - DNA, 25 bp, Homo sapien
cagtgcccacggcagtcacagcggc

SEQ ID NO: 719530 - DNA, 25 bp, Homo sapien
cttggatcttgtactcgtgcgtcgt

SEQ ID NO: 719531 - DNA, 25 bp, Homo sapien
tcacagcggccacgtcgatggtgta

SEQ ID NO: 719532 - DNA, 25 bp, Homo sapien
ttggatcttgtactcgtgcgtcgtg

SEQ ID NO: 719533 - DNA, 25 bp, Homo sapien
ccacctggagatggacgttttcccg

SEQ ID NO: 719534 - DNA, 25 bp, Homo sapien
aagggtggcggagcgagggctgatg

SEQ ID NO: 719535 - DNA, 25 bp, Homo sapien
tagcctggccggaactgaagggtgg

SEQ ID NO: 719536 - DNA, 25 bp, Homo sapien
tgcccctcaacaatccacctggaga

SEQ ID NO: 719537 - DNA, 25 bp, Homo sapien
actgctcttcgcaaatgccagctcc

SEQ ID NO: 719538 - DNA, 25 bp, Homo sapien
ccagctcccagtctaacgacacacg

SEQ ID NO: 719539 - DNA, 25 bp, Homo sapien
ctgctcttcgcaaatgccagctccc

SEQ ID NO: 719540 - DNA, 25 bp, Homo sapien
gctcccagtctaacgacacacgtac

SEQ ID NO: 719541 - DNA, 25 bp, Homo sapien
ccagtcactgtcacccccacggtaa

SEQ ID NO: 719542 - DNA, 25 bp, Homo sapien
tcactgtcacccccacggtaagtaa

SEQ ID NO: 719543 - DNA, 25 bp, Homo sapien
agtcactgtcacccccacggtaagt

SEQ ID NO: 719544 - DNA, 25 bp, Homo sapien
tcccagtcactgtcacccccacggt

SEQ ID NO: 719545 - DNA, 25 bp, Homo sapien
cattatggaaaactctgctcagggc

SEQ ID NO: 719546 - DNA, 25 bp, Homo sapien
tttggcaacccacatctgagcatca

SEQ ID NO: 719547 - DNA, 25 bp, Homo sapien
tatagggcctttcaatgggttcctc

SEQ ID NO: 719548 - DNA, 25 bp, Homo sapien
tcacgttcacagagcctcgagacgg

SEQ ID NO: 719549 - DNA, 25 bp, Homo sapien
caaatgattggggaacccaggcagg

SEQ ID NO: 719550 - DNA, 25 bp, Homo sapien
tgccacatggctccattaggctctg

SEQ ID NO: 719551 - DNA, 25 bp, Homo sapien
cgcggtttgtcattacctggaggca

SEQ ID NO: 719552 - DNA, 25 bp, Homo sapien
aaagatgtcgattggaacaggtgcc

SEQ ID NO: 719553 - DNA, 25 bp, Homo sapien
tgccttctgagcagcgagtgtctgg

SEQ ID NO: 719554 - DNA, 25 bp, Homo sapien
gcagcgagtgtctggttatctacag

SEQ ID NO: 719555 - DNA, 25 bp, Homo sapien
tgtctggttatctacagggctgttg

SEQ ID NO: 719556 - DNA, 25 bp, Homo sapien
tctgagcagcgagtgtctggttatc

SEQ ID NO: 719557 - DNA, 25 bp, Homo sapien
gggacccaagggacacagagaaggc

SEQ ID NO: 719558 - DNA, 25 bp, Homo sapien
tgggggacccaagggacacagagaa

SEQ ID NO: 719559 - DNA, 25 bp, Homo sapien
ctgggggacccaagggacacagaga

SEQ ID NO: 719560 - DNA, 25 bp, Homo sapien
acccaagggacacagagaaggccgg

SEQ ID NO: 719561 - DNA, 25 bp, Homo sapien
tctggtttcgtgtggccgtgtggct

SEQ ID NO: 719562 - DNA, 25 bp, Homo sapien
aactctggtttcgtgtggccgtgtg

SEQ ID NO: 719563 - DNA, 25 bp, Homo sapien
caaactctggtttcgtgtggccgtg

SEQ ID NO: 719564 - DNA, 25 bp, Homo sapien
agcaaactctggtttcgtgtggccg

SEQ ID NO: 719565 - DNA, 25 bp, Homo sapien
gagagacagccacggccttgtgccc

SEQ ID NO: 719566 - DNA, 25 bp, Homo sapien
tgccacacaagctgcgccagctagg

SEQ ID NO: 719567 - DNA, 25 bp, Homo sapien
gccagctagggagccacgggagaga

SEQ ID NO: 719568 - DNA, 25 bp, Homo sapien
tctcccccttgatggtgccacacaa

SEQ ID NO: 719569 - DNA, 25 bp, Homo sapien
acagaaggactggacccaaacagtg

SEQ ID NO: 719570 - DNA, 25 bp, Homo sapien
caagaactgggccacagaaggactg

SEQ ID NO: 719571 - DNA, 25 bp, Homo sapien
gaggggaccttccataccatctcat

SEQ ID NO: 719572 - DNA, 25 bp, Homo sapien
aacctctgagggcttggaggccatc

SEQ ID NO: 719573 - DNA, 25 bp, Homo sapien
tcctcttcatagagggtgacccact

SEQ ID NO: 719574 - DNA, 25 bp, Homo sapien
tcctcctcgtcgccgatagctccca

SEQ ID NO: 719575 - DNA, 25 bp, Homo sapien
cagcatctgggcatcaggctcattc

SEQ ID NO: 719576 - DNA, 25 bp, Homo sapien
cactcctcctcgtcgccgatagctc

SEQ ID NO: 719577 - DNA, 25 bp, Homo sapien
tcaaaggccttacgggaagtgatca

SEQ ID NO: 719578 - DNA, 25 bp, Homo sapien
tctgctttgtttgcacacggcacgt

SEQ ID NO: 719579 - DNA, 25 bp, Homo sapien
aaagccaaggatttactgcccggat

SEQ ID NO: 719580 - DNA, 25 bp, Homo sapien
gaaggatcttcctaggacatctgct

SEQ ID NO: 719581 - DNA, 25 bp, Homo sapien
aggatctcctgatgctgggtcacgg

SEQ ID NO: 719582 - DNA, 25 bp, Homo sapien
tccagtgagtaactgtgagacttac

SEQ ID NO: 719583 - DNA, 25 bp, Homo sapien
ggtaactgaggcctctatccgctca

SEQ ID NO: 719584 - DNA, 25 bp, Homo sapien
caaccttggcagaataaactttgtc

SEQ ID NO: 719585 - DNA, 25 bp, Homo sapien
gatcaatgcagatctgatggcctcc

SEQ ID NO: 719586 - DNA, 25 bp, Homo sapien
ttttaaatgatcaacggcactctgc

SEQ ID NO: 719587 - DNA, 25 bp, Homo sapien
cgcaagctgcgttagggcaaacctg

SEQ ID NO: 719588 - DNA, 25 bp, Homo sapien
aaactcagaagaatgggaccctttg

SEQ ID NO: 719589 - DNA, 25 bp, Homo sapien
tctggatgacccgggaagacggact

SEQ ID NO: 719590 - DNA, 25 bp, Homo sapien
ggtctcactggcagtacggaccgtg

SEQ ID NO: 719591 - DNA, 25 bp, Homo sapien
ggctcggcccaacaatgttcacttg

SEQ ID NO: 719592 - DNA, 25 bp, Homo sapien
cggaccgtgacgctggttggagcca

SEQ ID NO: 719593 - DNA, 25 bp, Homo sapien
tcccgttgtactgagaatccggcag

SEQ ID NO: 719594 - DNA, 25 bp, Homo sapien
ggtcactgacgacttgggccactgc

SEQ ID NO: 719595 - DNA, 25 bp, Homo sapien
agtacttaatcctgtagcccacgga

SEQ ID NO: 719596 - DNA, 25 bp, Homo sapien
gcatctgcagctcgtattccatcca

SEQ ID NO: 719597 - DNA, 25 bp, Homo sapien
gacagacacaagtgggacaggccaa

SEQ ID NO: 719598 - DNA, 25 bp, Homo sapien
ccgggattaggaaagctccaagaca

SEQ ID NO: 719599 - DNA, 25 bp, Homo sapien
gacagaaattcctgccgagtctggc

SEQ ID NO: 719600 - DNA, 25 bp, Homo sapien
taatgtgagtcgatcccctgttgga

SEQ ID NO: 719601 - DNA, 25 bp, Homo sapien
ggctgtgaaatctccattctgatga

SEQ ID NO: 719602 - DNA, 25 bp, Homo sapien
gctgtgaaatctccattctgatgag

SEQ ID NO: 719603 - DNA, 25 bp, Homo sapien
aggctgtgaaatctccattctgatg

SEQ ID NO: 719604 - DNA, 25 bp, Homo sapien
ttttatctcaaataggaaatcctga

SEQ ID NO: 719605 - DNA, 25 bp, Homo sapien
tctcaaataggaaatcctgactttc

SEQ ID NO: 719606 - DNA, 25 bp, Homo sapien
gcagacttttatctcaaataggaaa

SEQ ID NO: 719607 - DNA, 25 bp, Homo sapien
aaaaaagatgcttggtctgtttgct

SEQ ID NO: 719608 - DNA, 25 bp, Homo sapien
cttgtagcccagtatgagcccattc

SEQ ID NO: 719609 - DNA, 25 bp, Homo sapien
ccattctggtcctgttccggcacgg

SEQ ID NO: 719610 - DNA, 25 bp, Homo sapien
aaatctgggtcgagctgacagcctc

SEQ ID NO: 719611 - DNA, 25 bp, Homo sapien
tccggcacggatgtccatgtcagta

SEQ ID NO: 719612 - DNA, 25 bp, Homo sapien
gctgtgcatgctgtaggtaccccac

SEQ ID NO: 719613 - DNA, 25 bp, Homo sapien
taatttgtccatgctggcatttggg

SEQ ID NO: 719614 - DNA, 25 bp, Homo sapien
cacagcacgagggttatcaggaggc

SEQ ID NO: 719615 - DNA, 25 bp, Homo sapien
ggttgtaaagtgactgcgctccagg

SEQ ID NO: 719616 - DNA, 25 bp, Homo sapien
gtgtgcagggcttctggatctaatt

SEQ ID NO: 719617 - DNA, 25 bp, Homo sapien
atccaggtctttggcccggaacagg

SEQ ID NO: 719618 - DNA, 25 bp, Homo sapien
tcgtagagcacgaacttgcgcaggc

SEQ ID NO: 719619 - DNA, 25 bp, Homo sapien
gccgactgcgtgtggttccctcgca

SEQ ID NO: 719620 - DNA, 25 bp, Homo sapien
ttccctcgcacgatgtggctcctgg

SEQ ID NO: 719621 - DNA, 25 bp, Homo sapien
tctgagctcggattcccttactggg

SEQ ID NO: 719622 - DNA, 25 bp, Homo sapien
tgactctgagagcaaacatcaggtt

SEQ ID NO: 719623 - DNA, 25 bp, Homo sapien
ctaaatgactctgagagcaaacatc

SEQ ID NO: 719624 - DNA, 25 bp, Homo sapien
gatttccctcatctgagctcggatt

SEQ ID NO: 719625 - DNA, 25 bp, Homo sapien
ggaacacgagcctcactggtgggcc

SEQ ID NO: 719626 - DNA, 25 bp, Homo sapien
tgagtctcacttcggggaacacgag

SEQ ID NO: 719627 - DNA, 25 bp, Homo sapien
tatccgcacggaggtgagtctcact

SEQ ID NO: 719628 - DNA, 25 bp, Homo sapien
ggctcctccggaggttgccacacta

SEQ ID NO: 719629 - DNA, 25 bp, Homo sapien
tcatctcggttcaggaaatgctagg

SEQ ID NO: 719630 - DNA, 25 bp, Homo sapien
gctggagacagccttttgtttaacc

SEQ ID NO: 719631 - DNA, 25 bp, Homo sapien
tcggttcaggaaatgctaggctgct

SEQ ID NO: 719632 - DNA, 25 bp, Homo sapien
gctgctggagacagccttttgttta

SEQ ID NO: 719633 - DNA, 25 bp, Homo sapien
atctcagcggcttcttacaaggatt

SEQ ID NO: 719634 - DNA, 25 bp, Homo sapien
tctcagcggcttcttacaaggattg

SEQ ID NO: 719635 - DNA, 25 bp, Homo sapien
catctcagcggcttcttacaaggat

SEQ ID NO: 719636 - DNA, 25 bp, Homo sapien
tcatctcagcggcttcttacaagga

SEQ ID NO: 719637 - DNA, 25 bp, Homo sapien
caggctgccggagtgattacctaca

SEQ ID NO: 719638 - DNA, 25 bp, Homo sapien
gcaaagcgaaaataggtcacagcct

SEQ ID NO: 719639 - DNA, 25 bp, Homo sapien
cctctcagggaagcaagggctcaat

SEQ ID NO: 719640 - DNA, 25 bp, Homo sapien
ggtcacctgattgagaaatgccgta

SEQ ID NO: 719641 - DNA, 25 bp, Homo sapien
tgactccaaagcacgaccatctggg

SEQ ID NO: 719642 - DNA, 25 bp, Homo sapien
tcaaaacgctgaatctgccaacagg

SEQ ID NO: 719643 - DNA, 25 bp, Homo sapien
caagtgggtcagagaacccgcaagc

SEQ ID NO: 719644 - DNA, 25 bp, Homo sapien
cagggatcatacttgctggagctcc

SEQ ID NO: 719645 - DNA, 25 bp, Homo sapien
tttggtaatcatttttctacgcata

SEQ ID NO: 719646 - DNA, 25 bp, Homo sapien
gacctcacgtggatccacccttctc

SEQ ID NO: 719647 - DNA, 25 bp, Homo sapien
tgagtactcaacaaacccggatttc

SEQ ID NO: 719648 - DNA, 25 bp, Homo sapien
ttttctacgcatatgagtactcaac

SEQ ID NO: 719649 - DNA, 25 bp, Homo sapien
gtggtccagcggctgagctcctgcg

SEQ ID NO: 719650 - DNA, 25 bp, Homo sapien
aaccttgttaactctgcagctccag

SEQ ID NO: 719651 - DNA, 25 bp, Homo sapien
ggaaccttgttaactctgcagctcc

SEQ ID NO: 719652 - DNA, 25 bp, Homo sapien
cctggctcacagacaacgtgtggtc

SEQ ID NO: 719653 - DNA, 25 bp, Homo sapien
ttattaacgatcactcctctccact

SEQ ID NO: 719654 - DNA, 25 bp, Homo sapien
tattaacgatcactcctctccactg

SEQ ID NO: 719655 - DNA, 25 bp, Homo sapien
ttccttattaacgatcactcctctc

SEQ ID NO: 719656 - DNA, 25 bp, Homo sapien
gacgttccttattaacgatcactcc

SEQ ID NO: 719657 - DNA, 25 bp, Homo sapien
aggtcggtggctgtgaactgcctca

SEQ ID NO: 719658 - DNA, 25 bp, Homo sapien
ctgcctcgtcttggcggacagcctg

SEQ ID NO: 719659 - DNA, 25 bp, Homo sapien
cgccgacctccacggtggtgaaggt

SEQ ID NO: 719660 - DNA, 25 bp, Homo sapien
cctgaagatgtatgcggactccggg

SEQ ID NO: 719661 - DNA, 25 bp, Homo sapien
tagtggtaactagcaagtctcttgg

SEQ ID NO: 719662 - DNA, 25 bp, Homo sapien
tggcccagcgtatcccgtttcaaag

SEQ ID NO: 719663 - DNA, 25 bp, Homo sapien
ggtggcccagcgtatcccgtttcaa

SEQ ID NO: 719664 - DNA, 25 bp, Homo sapien
cgtttcaaaggctctcttggactta

SEQ ID NO: 719665 - DNA, 25 bp, Homo sapien
tggacgaggagtaggtctgccactc

SEQ ID NO: 719666 - DNA, 25 bp, Homo sapien
catgctgtcgcctcatggctgatgg

SEQ ID NO: 719667 - DNA, 25 bp, Homo sapien
ccggaggctgcgtgcggtcacttct

SEQ ID NO: 719668 - DNA, 25 bp, Homo sapien
cacctgcatggtgaagtaccggatg

SEQ ID NO: 719669 - DNA, 25 bp, Homo sapien
tgcagcctcgttttcctaacatgag

SEQ ID NO: 719670 - DNA, 25 bp, Homo sapien
tacggacctcaccagatgttgtgcc

SEQ ID NO: 719671 - DNA, 25 bp, Homo sapien
tcagaggggacatcaagccggagct

SEQ ID NO: 719672 - DNA, 25 bp, Homo sapien
ttctaaattccaacccgccagcata

SEQ ID NO: 719673 - DNA, 25 bp, Homo sapien
ttgaacacctggacggttgaaatcc

SEQ ID NO: 719674 - DNA, 25 bp, Homo sapien
aacacctggacggttgaaatcctca

SEQ ID NO: 719675 - DNA, 25 bp, Homo sapien
cacctggacggttgaaatcctcagg

SEQ ID NO: 719676 - DNA, 25 bp, Homo sapien
cctggacggttgaaatcctcaggga

SEQ ID NO: 719677 - DNA, 25 bp, Homo sapien
agtcactgtccccaatgtcgttggt

SEQ ID NO: 719678 - DNA, 25 bp, Homo sapien
cgtggtcaccgcctctgtctctgaa

SEQ ID NO: 719679 - DNA, 25 bp, Homo sapien
tggtggctttcaggcgcagcttgta

SEQ ID NO: 719680 - DNA, 25 bp, Homo sapien
tgcagcgtggtcaccgcctctgtct

SEQ ID NO: 719681 - DNA, 25 bp, Homo sapien
agcggccaggaacgcggtctgggcc

SEQ ID NO: 719682 - DNA, 25 bp, Homo sapien
ggcagcggccaggaacgcggtctgg

SEQ ID NO: 719683 - DNA, 25 bp, Homo sapien
gcggtctgggccccgggttgctcac

SEQ ID NO: 719684 - DNA, 25 bp, Homo sapien
taagtatctcgggctccaggggcag

SEQ ID NO: 719685 - DNA, 25 bp, Homo sapien
tggacgcggctgatagagctgcctc

SEQ ID NO: 719686 - DNA, 25 bp, Homo sapien
caaagagtggctcgtgaatgagaaa

SEQ ID NO: 719687 - DNA, 25 bp, Homo sapien
tgggccacacagaataacaatccat

SEQ ID NO: 719688 - DNA, 25 bp, Homo sapien
catcacttacctgcgctgttgtcaa

SEQ ID NO: 719689 - DNA, 25 bp, Homo sapien
tccatattcactgaacggaatgacg

SEQ ID NO: 719690 - DNA, 25 bp, Homo sapien
ggcccagcagaagtgtgacacgcat

SEQ ID NO: 719691 - DNA, 25 bp, Homo sapien
tctgctccctccaaatctgtgtggt

SEQ ID NO: 719692 - DNA, 25 bp, Homo sapien
tgagctgaactcttatgcctcccag

SEQ ID NO: 719693 - DNA, 25 bp, Homo sapien
gacgtggtgtgtggcgtcgctgaga

SEQ ID NO: 719694 - DNA, 25 bp, Homo sapien
cgctgagacagatcccgggggctct

SEQ ID NO: 719695 - DNA, 25 bp, Homo sapien
tgtggcgtcgctgagacagatcccg

SEQ ID NO: 719696 - DNA, 25 bp, Homo sapien
tatcaggacagaggacgtggtgtgt

SEQ ID NO: 719697 - DNA, 25 bp, Homo sapien
agctcgagccctgcaccgtccactg

SEQ ID NO: 719698 - DNA, 25 bp, Homo sapien
caggtggcactaggcacgtccctga

SEQ ID NO: 719699 - DNA, 25 bp, Homo sapien
cagcagcaccaaggggagctcgagc

SEQ ID NO: 719700 - DNA, 25 bp, Homo sapien
tccaggtggcactaggcacgtccct

SEQ ID NO: 719701 - DNA, 25 bp, Homo sapien
ccacagagttgagtggagggaaggc

SEQ ID NO: 719702 - DNA, 25 bp, Homo sapien
ttttatcaccaggtaggggaggcag

SEQ ID NO: 719703 - DNA, 25 bp, Homo sapien
gttttatcaccaggtaggggaggca

SEQ ID NO: 719704 - DNA, 25 bp, Homo sapien
cagctcgaggaactggtacctcaga

SEQ ID NO: 719705 - DNA, 25 bp, Homo sapien
gcagctcgaggaactggtacctcag

SEQ ID NO: 719706 - DNA, 25 bp, Homo sapien
ggaagactgcagaggccttcagcca

SEQ ID NO: 719707 - DNA, 25 bp, Homo sapien
aagcctccctctcgccccagaatag

SEQ ID NO: 719708 - DNA, 25 bp, Homo sapien
cttcaaagcctccctctcgccccag

SEQ ID NO: 719709 - DNA, 25 bp, Homo sapien
caaagcctccctctcgccccagaat

SEQ ID NO: 719710 - DNA, 25 bp, Homo sapien
ttcaaagcctccctctcgccccaga

SEQ ID NO: 719711 - DNA, 25 bp, Homo sapien
gaggaggaggcggcttttgatgagg

SEQ ID NO: 719712 - DNA, 25 bp, Homo sapien
cagggaatggcgtttgagctgccct

SEQ ID NO: 719713 - DNA, 25 bp, Homo sapien
aagaactggaggataactgcaggga

SEQ ID NO: 719714 - DNA, 25 bp, Homo sapien
aatggcgtttgagctgcccttggag

SEQ ID NO: 719715 - DNA, 25 bp, Homo sapien
gaagcggtgttctttgctccccagg

SEQ ID NO: 719716 - DNA, 25 bp, Homo sapien
ggaggaagcggtgttctttgctccc

SEQ ID NO: 719717 - DNA, 25 bp, Homo sapien
caggctctccgacagaatggcttgg

SEQ ID NO: 719718 - DNA, 25 bp, Homo sapien
ccgacagaatggcttggatagtgag

SEQ ID NO: 719719 - DNA, 25 bp, Homo sapien
cattcaggctttcgtccctcggagg

SEQ ID NO: 719720 - DNA, 25 bp, Homo sapien
tgtatccctgaagaaggccattcag

SEQ ID NO: 719721 - DNA, 25 bp, Homo sapien
ccctgtagtagatcctgtatccctg

SEQ ID NO: 719722 - DNA, 25 bp, Homo sapien
tatagggtttttgagcgtcttggcc

SEQ ID NO: 719723 - DNA, 25 bp, Homo sapien
atcatggcgcagtgcaggcagagcc

SEQ ID NO: 719724 - DNA, 25 bp, Homo sapien
gggccctcgtcagagcaacgatcat

SEQ ID NO: 719725 - DNA, 25 bp, Homo sapien
gtcagagcaacgatcatggcgcagt

SEQ ID NO: 719726 - DNA, 25 bp, Homo sapien
ccctctccagggttctagaagctgt

SEQ ID NO: 719727 - DNA, 25 bp, Homo sapien
gggagggcaccgtccacacggcgtg

SEQ ID NO: 719728 - DNA, 25 bp, Homo sapien
gggcaccgtccacacggcgtgttct

SEQ ID NO: 719729 - DNA, 25 bp, Homo sapien
gcaccgtccacacggcgtgttctgg

SEQ ID NO: 719730 - DNA, 25 bp, Homo sapien
gagggcaccgtccacacggcgtgtt

SEQ ID NO: 719731 - DNA, 25 bp, Homo sapien
caagctgtgtgagcataggagcata

SEQ ID NO: 719732 - DNA, 25 bp, Homo sapien
tttgattttgcgacagagcccaggg

SEQ ID NO: 719733 - DNA, 25 bp, Homo sapien
agacaccagtgctgcaatttcccgt

SEQ ID NO: 719734 - DNA, 25 bp, Homo sapien
agctgctgccgtccgcgcactgggt

SEQ ID NO: 719735 - DNA, 25 bp, Homo sapien
tgttagttcacacatcgtcgatgtg

SEQ ID NO: 719736 - DNA, 25 bp, Homo sapien
tgttcaccgtcttgaagctgctttg

SEQ ID NO: 719737 - DNA, 25 bp, Homo sapien
ggagctgctgttcaccgtcttgaag

SEQ ID NO: 719738 - DNA, 25 bp, Homo sapien
catcgtcgatgtggagctgctgttc

SEQ ID NO: 719739 - DNA, 25 bp, Homo sapien
gttataggcggtcattattacttca

SEQ ID NO: 719740 - DNA, 25 bp, Homo sapien
tggctgggctctcgccgatgatgtt

SEQ ID NO: 719741 - DNA, 25 bp, Homo sapien
tattacttcatagcgccggtacttc

SEQ ID NO: 719742 - DNA, 25 bp, Homo sapien
acaaagacctccacgggcgcgctgg

SEQ ID NO: 719743 - DNA, 25 bp, Homo sapien
actctttaaagtcaccagccagcga

SEQ ID NO: 719744 - DNA, 25 bp, Homo sapien
caggctctatgtgaagtcagggaac

SEQ ID NO: 719745 - DNA, 25 bp, Homo sapien
tggccgaaggaatggcgttgctctc

SEQ ID NO: 719746 - DNA, 25 bp, Homo sapien
tgtggtctccttggccgaaggaatg

SEQ ID NO: 719747 - DNA, 25 bp, Homo sapien
gccatggccgccgtccgcagtggca

SEQ ID NO: 719748 - DNA, 25 bp, Homo sapien
tggcacccaccctttactgacggca

SEQ ID NO: 719749 - DNA, 25 bp, Homo sapien
agtcacccgaatacaactggagagc

SEQ ID NO: 719750 - DNA, 25 bp, Homo sapien
tcaatgggctcctctacagccaggt

SEQ ID NO: 719751 - DNA, 25 bp, Homo sapien
cagcagattagggttgttacaatgc

SEQ ID NO: 719752 - DNA, 25 bp, Homo sapien
aaagggaatggcgaactggctttct

SEQ ID NO: 719753 - DNA, 25 bp, Homo sapien
ctagaaagggaatggcgaactggct

SEQ ID NO: 719754 - DNA, 25 bp, Homo sapien
aatgcaggtacttgggctgcgagaa

SEQ ID NO: 719755 - DNA, 25 bp, Homo sapien
agcaaccgccgcaataaaactgcca

SEQ ID NO: 719756 - DNA, 25 bp, Homo sapien
cgccgcaataaaactgccaggaatg

SEQ ID NO: 719757 - DNA, 25 bp, Homo sapien
aggacctgcaccaggagcgctgcca

SEQ ID NO: 719758 - DNA, 25 bp, Homo sapien
aaccgccgcaataaaactgccagga

SEQ ID NO: 719759 - DNA, 25 bp, Homo sapien
cagctgaagggcaggcccgtacctc

SEQ ID NO: 719760 - DNA, 25 bp, Homo sapien
ctgaagggcaggcccgtacctcagg

SEQ ID NO: 719761 - DNA, 25 bp, Homo sapien
tcccttcggtgccagcaagttgctg

SEQ ID NO: 719762 - DNA, 25 bp, Homo sapien
agcaagtgggtgctgaagaaaggcc

SEQ ID NO: 719763 - DNA, 25 bp, Homo sapien
ctttggctgtagctagggagtgcac

SEQ ID NO: 719764 - DNA, 25 bp, Homo sapien
tcctgcaaggtcacaggctgcagag

SEQ ID NO: 719765 - DNA, 25 bp, Homo sapien
gcagagggtggtctgagcgagggcg

SEQ ID NO: 719766 - DNA, 25 bp, Homo sapien
cagtcaaagctgtacatgagagaga

SEQ ID NO: 719767 - DNA, 25 bp, Homo sapien
gaactggcagtaggttctgaccact

SEQ ID NO: 719768 - DNA, 25 bp, Homo sapien
tttaaccctacagctgtcaggggtg

SEQ ID NO: 719769 - DNA, 25 bp, Homo sapien
tgggaactggcagtaggttctgacc

SEQ ID NO: 719770 - DNA, 25 bp, Homo sapien
ttgtgactttgtccccatcctttaa

SEQ ID NO: 719771 - DNA, 25 bp, Homo sapien
tagtgcttccaccttcttatcagct

SEQ ID NO: 719772 - DNA, 25 bp, Homo sapien
gcgtttgatttcgtccagtaatgat

SEQ ID NO: 719773 - DNA, 25 bp, Homo sapien
cgtccagtaatgatctttgcttccc

SEQ ID NO: 719774 - DNA, 25 bp, Homo sapien
tcttatcagctcaatagccatcatc

SEQ ID NO: 719775 - DNA, 25 bp, Homo sapien
gcaaatcttgctcgcaatctgctcc

SEQ ID NO: 719776 - DNA, 25 bp, Homo sapien
ggcaaatcttgctcgcaatctgctc

SEQ ID NO: 719777 - DNA, 25 bp, Homo sapien
tggcaaatcttgctcgcaatctgct

SEQ ID NO: 719778 - DNA, 25 bp, Homo sapien
aaatcttgctcgcaatctgctcccc

SEQ ID NO: 719779 - DNA, 25 bp, Homo sapien
tgacagccatcgtggaattcctgac

SEQ ID NO: 719780 - DNA, 25 bp, Homo sapien
gcctgagccgggttatggcgtggcc

SEQ ID NO: 719781 - DNA, 25 bp, Homo sapien
gccatcgtggaattcctgacatttc

SEQ ID NO: 719782 - DNA, 25 bp, Homo sapien
gagccgggttatggcgtggcctcct

SEQ ID NO: 719783 - DNA, 25 bp, Homo sapien
tgaggaaagagcaatgcggagagaa

SEQ ID NO: 719784 - DNA, 25 bp, Homo sapien
ctgaggaaagagcaatgcggagaga

SEQ ID NO: 719785 - DNA, 25 bp, Homo sapien
ggaaagagcaatgcggagagaagct

SEQ ID NO: 719786 - DNA, 25 bp, Homo sapien
aggaaagagcaatgcggagagaagc

SEQ ID NO: 719787 - DNA, 25 bp, Homo sapien
cagctggctggccgtgagtggggtc

SEQ ID NO: 719788 - DNA, 25 bp, Homo sapien
tagccttggatgttcccattctggc

SEQ ID NO: 719789 - DNA, 25 bp, Homo sapien
tgtagccttggatgttcccattctg

SEQ ID NO: 719790 - DNA, 25 bp, Homo sapien
ccattctggctctccgggggtggtg

SEQ ID NO: 719791 - DNA, 25 bp, Homo sapien
cttgtagccttggatgttcccattc

SEQ ID NO: 719792 - DNA, 25 bp, Homo sapien
tccgtttcgttctggctgtctgcct

SEQ ID NO: 719793 - DNA, 25 bp, Homo sapien
ttaggtccatctccggcggcgttga

SEQ ID NO: 719794 - DNA, 25 bp, Homo sapien
tacttggtatggctggtcaggttct

SEQ ID NO: 719795 - DNA, 25 bp, Homo sapien
gaaggctgatatgctgaccaggtac

SEQ ID NO: 719796 - DNA, 25 bp, Homo sapien
tgggtgcgcccctgctgggggtcac

SEQ ID NO: 719797 - DNA, 25 bp, Homo sapien
gtgggtgcgcccctgctgggggtca

SEQ ID NO: 719798 - DNA, 25 bp, Homo sapien
ctggtgggtgcgcccctgctggggg

SEQ ID NO: 719799 - DNA, 25 bp, Homo sapien
ggcctggtgggtgcgcccctgctgg

SEQ ID NO: 719800 - DNA, 25 bp, Homo sapien
acgccagaaagctgggggccccagg

SEQ ID NO: 719801 - DNA, 25 bp, Homo sapien
ctgcaggatgccgttggccgccgca

SEQ ID NO: 719802 - DNA, 25 bp, Homo sapien
aagggctcgtacaccacccgatagc

SEQ ID NO: 719803 - DNA, 25 bp, Homo sapien
tagccctgcaggatgccgttggccg

SEQ ID NO: 719804 - DNA, 25 bp, Homo sapien
caggacacgttgagcgtggtggagg

SEQ ID NO: 719805 - DNA, 25 bp, Homo sapien
agctcagattccaaaaccccccact

SEQ ID NO: 719806 - DNA, 25 bp, Homo sapien
cagccccgtccagctcagattccaa

SEQ ID NO: 719807 - DNA, 25 bp, Homo sapien
gccccgtccagctcagattccaaaa

SEQ ID NO: 719808 - DNA, 25 bp, Homo sapien
aaccccccacttcaggcgccagaag

SEQ ID NO: 719809 - DNA, 25 bp, Homo sapien
cagaacacagaggtctggtcttggc

SEQ ID NO: 719810 - DNA, 25 bp, Homo sapien
aacacagaggtctggtcttggctca

SEQ ID NO: 719811 - DNA, 25 bp, Homo sapien
cagaggtctggtcttggctcagctt

SEQ ID NO: 719812 - DNA, 25 bp, Homo sapien
cacagaggtctggtcttggctcagc

SEQ ID NO: 719813 - DNA, 25 bp, Homo sapien
cctgtgttgtgaggcgtggcttcaa

SEQ ID NO: 719814 - DNA, 25 bp, Homo sapien
ggatgctgagggtagccgaaggcct

SEQ ID NO: 719815 - DNA, 25 bp, Homo sapien
tgccagcatccctcctaggatgctg

SEQ ID NO: 719816 - DNA, 25 bp, Homo sapien
gcttcaagtggaaccctgggtggtc

SEQ ID NO: 719817 - DNA, 25 bp, Homo sapien
cccaggtcctcgattccagcatctg

SEQ ID NO: 719818 - DNA, 25 bp, Homo sapien
tccagcatgtagaacaggagcttca

SEQ ID NO: 719819 - DNA, 25 bp, Homo sapien
ttcccaggtcctcgattccagcatc

SEQ ID NO: 719820 - DNA, 25 bp, Homo sapien
ctttcccaggtcctcgattccagca

SEQ ID NO: 719821 - DNA, 25 bp, Homo sapien
ctctgccctggaataggaactgcct

SEQ ID NO: 719822 - DNA, 25 bp, Homo sapien
taggaactgcctggacgcaggaaag

SEQ ID NO: 719823 - DNA, 25 bp, Homo sapien
gcagagccacctgcccgcaaccccc

SEQ ID NO: 719824 - DNA, 25 bp, Homo sapien
ggcagagccacctgcccgcaacccc

SEQ ID NO: 719825 - DNA, 25 bp, Homo sapien
ggaagaatgggaaaacctgagctgc

SEQ ID NO: 719826 - DNA, 25 bp, Homo sapien
gaggaagaatgggaaaacctgagct

SEQ ID NO: 719827 - DNA, 25 bp, Homo sapien
ttgaggaagaatgggaaaacctgag

SEQ ID NO: 719828 - DNA, 25 bp, Homo sapien
aggaagaatgggaaaacctgagctg

SEQ ID NO: 719829 - DNA, 25 bp, Homo sapien
ctggggagcagaaccagtcacttac

SEQ ID NO: 719830 - DNA, 25 bp, Homo sapien
agtttccacggagattctgcaaatc

SEQ ID NO: 719831 - DNA, 25 bp, Homo sapien
ctgcaaatccattaacacagaagac

SEQ ID NO: 719832 - DNA, 25 bp, Homo sapien
catggagtttccacggagattctgc

SEQ ID NO: 719833 - DNA, 25 bp, Homo sapien
aatgctttgagtttcccagtgatgc

SEQ ID NO: 719834 - DNA, 25 bp, Homo sapien
tgtatagcgagaacacagaatgccc

SEQ ID NO: 719835 - DNA, 25 bp, Homo sapien
gaatgcccatgtaagcgggacatgc

SEQ ID NO: 719836 - DNA, 25 bp, Homo sapien
tgcaaaaactgtcatgaaacgaaca

SEQ ID NO: 719837 - DNA, 25 bp, Homo sapien
ggatccgctgcttgactgatgtgca

SEQ ID NO: 719838 - DNA, 25 bp, Homo sapien
aatccgaagtctggaacgtgcccaa

SEQ ID NO: 719839 - DNA, 25 bp, Homo sapien
cagcaagcccaaacgtggggggtct

SEQ ID NO: 719840 - DNA, 25 bp, Homo sapien
tgttcttcctgacacccggggaggc

SEQ ID NO: 719841 - DNA, 25 bp, Homo sapien
ccccgatgagatataagctgactca

SEQ ID NO: 719842 - DNA, 25 bp, Homo sapien
agctgactcagtgagtctgatctgc

SEQ ID NO: 719843 - DNA, 25 bp, Homo sapien
tcttttgacgtatgtgggtacggga

SEQ ID NO: 719844 - DNA, 25 bp, Homo sapien
tacgggatgtggcttgtcggacagg

SEQ ID NO: 719845 - DNA, 25 bp, Homo sapien
tagagtgacggggatggctggggat

SEQ ID NO: 719846 - DNA, 25 bp, Homo sapien
agagtgacggggatggctggggatg

SEQ ID NO: 719847 - DNA, 25 bp, Homo sapien
ctagagtgacggggatggctgggga

SEQ ID NO: 719848 - DNA, 25 bp, Homo sapien
gtgctctggacaatgtgatgtccca

SEQ ID NO: 719849 - DNA, 25 bp, Homo sapien
cctggttctccaggtagtgtggttc

SEQ ID NO: 719850 - DNA, 25 bp, Homo sapien
ctgagtgctcaagtggcctggtgct

SEQ ID NO: 719851 - DNA, 25 bp, Homo sapien
ctctggacaatgtgatgtcccaggg

SEQ ID NO: 719852 - DNA, 25 bp, Homo sapien
tctgccataaaatcggattcccaag

SEQ ID NO: 719853 - DNA, 25 bp, Homo sapien
aatgtaaaaatagctctgccataaa

SEQ ID NO: 719854 - DNA, 25 bp, Homo sapien
gccataaaatcggattcccaagcac

SEQ ID NO: 719855 - DNA, 25 bp, Homo sapien
tcagggtacaatcccataaaccacc

SEQ ID NO: 719856 - DNA, 25 bp, Homo sapien
gaaataggtcactcccttggtgagg

SEQ ID NO: 719857 - DNA, 25 bp, Homo sapien
ctggcccggctgtgatattggcttg

SEQ ID NO: 719858 - DNA, 25 bp, Homo sapien
tgatggtccgcgcttggacacggaa

SEQ ID NO: 719859 - DNA, 25 bp, Homo sapien
tgatattggcttggagctcgggccc

SEQ ID NO: 719860 - DNA, 25 bp, Homo sapien
tgaccaggacatctctaggcgagcc

SEQ ID NO: 719861 - DNA, 25 bp, Homo sapien
taggtgtgtcgccagagtgtccctc

SEQ ID NO: 719862 - DNA, 25 bp, Homo sapien
ggcctcgatcacatagcccgtggta

SEQ ID NO: 719863 - DNA, 25 bp, Homo sapien
agttcagaggcggacttggtgacca

SEQ ID NO: 719864 - DNA, 25 bp, Homo sapien
taaactagttcctagcaccgtggtc

SEQ ID NO: 719865 - DNA, 25 bp, Homo sapien
gattaactgtgcaaccatctgaagg

SEQ ID NO: 719866 - DNA, 25 bp, Homo sapien
tatgcccttaaggtgaaccgcacag

SEQ ID NO: 719867 - DNA, 25 bp, Homo sapien
tgttaggtgatacccactagctcca

SEQ ID NO: 719868 - DNA, 25 bp, Homo sapien
tgtaatgaggcctgtaatggatgac

SEQ ID NO: 719869 - DNA, 25 bp, Homo sapien
tggagaacgtcttgccagggagctt

SEQ ID NO: 719870 - DNA, 25 bp, Homo sapien
gatgacagctgagatccaaagccct

SEQ ID NO: 719871 - DNA, 25 bp, Homo sapien
aaagccctcaggtaccagcaaggtg

SEQ ID NO: 719872 - DNA, 25 bp, Homo sapien
ccctcttgctgaacctgctgacttg

SEQ ID NO: 719873 - DNA, 25 bp, Homo sapien
cacttgaaaactcccgttgccaaag

SEQ ID NO: 719874 - DNA, 25 bp, Homo sapien
tggaacttctatggatgtcaaacct

SEQ ID NO: 719875 - DNA, 25 bp, Homo sapien
tgtcaaaccttcagagaaatactga

SEQ ID NO: 719876 - DNA, 25 bp, Homo sapien
cttccatcggatcctcattcaaggc

SEQ ID NO: 719877 - DNA, 25 bp, Homo sapien
aactcgtaagtcactccttgccgga

SEQ ID NO: 719878 - DNA, 25 bp, Homo sapien
tcacaaacatgtcccataagccttc

SEQ ID NO: 719879 - DNA, 25 bp, Homo sapien
ccttgccggagcttatccaggctga

SEQ ID NO: 719880 - DNA, 25 bp, Homo sapien
tccgcgggatgtccttcacaaacat

SEQ ID NO: 719881 - DNA, 25 bp, Homo sapien
tattctgcccgtgcaggacgagggc

SEQ ID NO: 719882 - DNA, 25 bp, Homo sapien
tgacgatcaggctggacagagccat

SEQ ID NO: 719883 - DNA, 25 bp, Homo sapien
cactcctcgtagaatggggcttcca

SEQ ID NO: 719884 - DNA, 25 bp, Homo sapien
ggacgagggcgaacaccaccagcag

SEQ ID NO: 719885 - DNA, 25 bp, Homo sapien
tggagaaggtgctcttgacattgag

SEQ ID NO: 719886 - DNA, 25 bp, Homo sapien
tcttgacattgaggtggcggctgct

SEQ ID NO: 719887 - DNA, 25 bp, Homo sapien
gcagcaaatcctccgttgtccaggg

SEQ ID NO: 719888 - DNA, 25 bp, Homo sapien
ggcagcaaatcctccgttgtccagg

SEQ ID NO: 719889 - DNA, 25 bp, Homo sapien
gcctgtcagttgtggagactgtgct

SEQ ID NO: 719890 - DNA, 25 bp, Homo sapien
gtgcctgtcagttgtggagactgtg

SEQ ID NO: 719891 - DNA, 25 bp, Homo sapien
cctgtcagttgtggagactgtgcta

SEQ ID NO: 719892 - DNA, 25 bp, Homo sapien
tgcctgtcagttgtggagactgtgc

SEQ ID NO: 719893 - DNA, 25 bp, Homo sapien
ttgaggctcacgctctcggtcagca

SEQ ID NO: 719894 - DNA, 25 bp, Homo sapien
tcctcgtctgagtagtgcaggccgc

SEQ ID NO: 719895 - DNA, 25 bp, Homo sapien
tgcatctgccgacttctccttgagg

SEQ ID NO: 719896 - DNA, 25 bp, Homo sapien
cacggcgccgttgtacttgttgcag

SEQ ID NO: 719897 - DNA, 25 bp, Homo sapien
gtcactgcccggaagtaggcaccga

SEQ ID NO: 719898 - DNA, 25 bp, Homo sapien
cactgcccggaagtaggcaccgaca

SEQ ID NO: 719899 - DNA, 25 bp, Homo sapien
tcactgcccggaagtaggcaccgac

SEQ ID NO: 719900 - DNA, 25 bp, Homo sapien
actgcccggaagtaggcaccgacac

SEQ ID NO: 719901 - DNA, 25 bp, Homo sapien
ttctgccaagcccaaggctatggtg

SEQ ID NO: 719902 - DNA, 25 bp, Homo sapien
cccaaggctatggtgcggacagcaa

SEQ ID NO: 719903 - DNA, 25 bp, Homo sapien
caagcccaaggctatggtgcggaca

SEQ ID NO: 719904 - DNA, 25 bp, Homo sapien
gtgcggacagcaaacccggcatcct

SEQ ID NO: 719905 - DNA, 25 bp, Homo sapien
ccggcgctgtgagatgagcctcttt

SEQ ID NO: 719906 - DNA, 25 bp, Homo sapien
tgaccagactgtcctgctcgaaggc

SEQ ID NO: 719907 - DNA, 25 bp, Homo sapien
tacatgcagcgagcttctgataagc

SEQ ID NO: 719908 - DNA, 25 bp, Homo sapien
tggatactcgaaagagcagcggccc

SEQ ID NO: 719909 - DNA, 25 bp, Homo sapien
ctccatcaggtgacgatgaacacat

SEQ ID NO: 719910 - DNA, 25 bp, Homo sapien
tctccatcaggtgacgatgaacaca

SEQ ID NO: 719911 - DNA, 25 bp, Homo sapien
ttctccatcaggtgacgatgaacac

SEQ ID NO: 719912 - DNA, 25 bp, Homo sapien
cttctccatcaggtgacgatgaaca

SEQ ID NO: 719913 - DNA, 25 bp, Homo sapien
ttctccatcaggtgacgatgaacac

SEQ ID NO: 719914 - DNA, 25 bp, Homo sapien
tctccatcaggtgacgatgaacaca

SEQ ID NO: 719915 - DNA, 25 bp, Homo sapien
cttctccatcaggtgacgatgaaca

SEQ ID NO: 719916 - DNA, 25 bp, Homo sapien
ctccatcaggtgacgatgaacacat

SEQ ID NO: 719917 - DNA, 25 bp, Homo sapien
tcctctccccagagggtatcaaggg

SEQ ID NO: 719918 - DNA, 25 bp, Homo sapien
ctctccccagagggtatcaagggaa

SEQ ID NO: 719919 - DNA, 25 bp, Homo sapien
cctctccccagagggtatcaaggga

SEQ ID NO: 719920 - DNA, 25 bp, Homo sapien
tgggcagcgcgtcctcgtagtcaga

SEQ ID NO: 719921 - DNA, 25 bp, Homo sapien
agtgcttgggcagcgcgtcctcgta

SEQ ID NO: 719922 - DNA, 25 bp, Homo sapien
tgtagtggttcacgaaggagtgctt

SEQ ID NO: 719923 - DNA, 25 bp, Homo sapien
gggtcgctcatgtagtggttcacga

SEQ ID NO: 719924 - DNA, 25 bp, Homo sapien
ctgtgcggcgcaggtgcgcggccct

SEQ ID NO: 719925 - DNA, 25 bp, Homo sapien
aggtgcgcggccctgggccctgcgc

SEQ ID NO: 719926 - DNA, 25 bp, Homo sapien
gcaggtgcgcggccctgggccctgc

SEQ ID NO: 719927 - DNA, 25 bp, Homo sapien
gtgcgcggccctgggccctgcgctt

SEQ ID NO: 719928 - DNA, 25 bp, Homo sapien
gaggagaagccggtgagcggagttc

SEQ ID NO: 719929 - DNA, 25 bp, Homo sapien
cggtgagcggagttcgcgcgccggg

SEQ ID NO: 719930 - DNA, 25 bp, Homo sapien
cccgcgctctgcgtggtgatgaccg

SEQ ID NO: 719931 - DNA, 25 bp, Homo sapien
gtgatgaccgggtgcagctgcgcgc

SEQ ID NO: 719932 - DNA, 25 bp, Homo sapien
aatagactccggaaagttgcctccg

SEQ ID NO: 719933 - DNA, 25 bp, Homo sapien
gaaatctagtgtccacaagtaggta

SEQ ID NO: 719934 - DNA, 25 bp, Homo sapien
tgcagcgaagttacaaaaagccgtt

SEQ ID NO: 719935 - DNA, 25 bp, Homo sapien
gttgcctccgttccgccctgaggga

SEQ ID NO: 719936 - DNA, 25 bp, Homo sapien
ctagttggtcttgaagacggagaaa

SEQ ID NO: 719937 - DNA, 25 bp, Homo sapien
cccggaggtgccaagccattgcacc

SEQ ID NO: 719938 - DNA, 25 bp, Homo sapien
cattgcaccagtgaaatacaccttc

SEQ ID NO: 719939 - DNA, 25 bp, Homo sapien
ttggtcttgaagacggagaaaccca

SEQ ID NO: 719940 - DNA, 25 bp, Homo sapien
acacagacagtgacggctgagccac

SEQ ID NO: 719941 - DNA, 25 bp, Homo sapien
ctgagcccagggaaaaacgtttgct

SEQ ID NO: 719942 - DNA, 25 bp, Homo sapien
aagttgggacaaaacgcactgagcc

SEQ ID NO: 719943 - DNA, 25 bp, Homo sapien
tttgctcttcaaaccccaggagccg

SEQ ID NO: 719944 - DNA, 25 bp, Homo sapien
gagttgaccgtgtgctgtgttcggg

SEQ ID NO: 719945 - DNA, 25 bp, Homo sapien
tggagacgccgtcccgtgtcctcgt

SEQ ID NO: 719946 - DNA, 25 bp, Homo sapien
gtaacaagcaattctggagacgccg

SEQ ID NO: 719947 - DNA, 25 bp, Homo sapien
gtgtcctcgtgtcccgcggagttga

SEQ ID NO: 719948 - DNA, 25 bp, Homo sapien
atctttcccatgtacaaagctgaac

SEQ ID NO: 719949 - DNA, 25 bp, Homo sapien
tctggttaacaatgcacgcttccta

SEQ ID NO: 719950 - DNA, 25 bp, Homo sapien
tggagacagcaaagacgcattcatt

SEQ ID NO: 719951 - DNA, 25 bp, Homo sapien
catttcatgtgacatagtttaaaaa

SEQ ID NO: 719952 - DNA, 25 bp, Homo sapien
gggacggcctggtgtgcacgaggcg

SEQ ID NO: 719953 - DNA, 25 bp, Homo sapien
taaaagctggcctcggactgggaga

SEQ ID NO: 719954 - DNA, 25 bp, Homo sapien
aagcggtggctgctgcgagcagcca

SEQ ID NO: 719955 - DNA, 25 bp, Homo sapien
ctggtgtgcacgaggcgagtcggga

SEQ ID NO: 719956 - DNA, 25 bp, Homo sapien
ggcagcccagtcgtctgttgcaaag

SEQ ID NO: 719957 - DNA, 25 bp, Homo sapien
gcagcccagtcgtctgttgcaaaga

SEQ ID NO: 719958 - DNA, 25 bp, Homo sapien
cagcccagtcgtctgttgcaaagat

SEQ ID NO: 719959 - DNA, 25 bp, Homo sapien
catctctgagctgttaagttttcca

SEQ ID NO: 719960 - DNA, 25 bp, Homo sapien
gcacctgcccgtttgccgtgcactg

SEQ ID NO: 719961 - DNA, 25 bp, Homo sapien
agtgggcaccagcagtgctcccgtt

SEQ ID NO: 719962 - DNA, 25 bp, Homo sapien
gtcactgggggaacggcacctgccc

SEQ ID NO: 719963 - DNA, 25 bp, Homo sapien
agcagtgctcccgttccatccagac

SEQ ID NO: 719964 - DNA, 25 bp, Homo sapien
ttagatacaaacacggcctccgaag

SEQ ID NO: 719965 - DNA, 25 bp, Homo sapien
aaatgccgcattgctctgggaggcc

SEQ ID NO: 719966 - DNA, 25 bp, Homo sapien
gcatgactttcagcacggcaggaga

SEQ ID NO: 719967 - DNA, 25 bp, Homo sapien
gccgctccgtacagatcaaggttta

SEQ ID NO: 719968 - DNA, 25 bp, Homo sapien
tgtgccaagaatgcgtaagaaataa

SEQ ID NO: 719969 - DNA, 25 bp, Homo sapien
tgtgtgccaagaatgcgtaagaaat

SEQ ID NO: 719970 - DNA, 25 bp, Homo sapien
ctgtgtgccaagaatgcgtaagaaa

SEQ ID NO: 719971 - DNA, 25 bp, Homo sapien
tgccaagaatgcgtaagaaataaaa

SEQ ID NO: 719972 - DNA, 25 bp, Homo sapien
tacgcagacgggttgctcgtcagga

SEQ ID NO: 719973 - DNA, 25 bp, Homo sapien
gggagccacacttaggtacgcagac

SEQ ID NO: 719974 - DNA, 25 bp, Homo sapien
tggatccatgctaccaggacgctga

SEQ ID NO: 719975 - DNA, 25 bp, Homo sapien
gttgctcgtcaggaggatagctaca

SEQ ID NO: 719976 - DNA, 25 bp, Homo sapien
gacctgacggctccctaaaccagaa

SEQ ID NO: 719977 - DNA, 25 bp, Homo sapien
agacgtgtcccagcgggcaggctca

SEQ ID NO: 719978 - DNA, 25 bp, Homo sapien
cagctcatgagtttccacgttgtcc

SEQ ID NO: 719979 - DNA, 25 bp, Homo sapien
aaaattgtacccatagcacctctct

SEQ ID NO: 719980 - DNA, 25 bp, Homo sapien
catgtcaacaggataaaggtaaggg

SEQ ID NO: 719981 - DNA, 25 bp, Homo sapien
tgtcaacaggataaaggtaagggtg

SEQ ID NO: 719982 - DNA, 25 bp, Homo sapien
ctgcatgtcaacaggataaaggtaa

SEQ ID NO: 719983 - DNA, 25 bp, Homo sapien
tgcatgtcaacaggataaaggtaag

SEQ ID NO: 719984 - DNA, 25 bp, Homo sapien
tcaacaatagtagtaacggcagggc

SEQ ID NO: 719985 - DNA, 25 bp, Homo sapien
taatcgtcatccaacaagacagggc

SEQ ID NO: 719986 - DNA, 25 bp, Homo sapien
tatggagtgcccactttagatggca

SEQ ID NO: 719987 - DNA, 25 bp, Homo sapien
aataaaatcttctaagccgcctgtg

SEQ ID NO: 719988 - DNA, 25 bp, Homo sapien
ttaaccgactcaggctaagttcagc

SEQ ID NO: 719989 - DNA, 25 bp, Homo sapien
gatgtcaagagctggacacgtggac

SEQ ID NO: 719990 - DNA, 25 bp, Homo sapien
gaagagcctccagattgttcattcc

SEQ ID NO: 719991 - DNA, 25 bp, Homo sapien
ccagcttggaaactcgcaggaagaa

SEQ ID NO: 719992 - DNA, 25 bp, Homo sapien
tttgctgccagagctcgagcctgtg

SEQ ID NO: 719993 - DNA, 25 bp, Homo sapien
ggtgaatcttttcactcgcactggg

SEQ ID NO: 719994 - DNA, 25 bp, Homo sapien
taggtagcatttcccgcctgagccc

SEQ ID NO: 719995 - DNA, 25 bp, Homo sapien
cgtgtgcaccgtgatgtaggtagca

SEQ ID NO: 719996 - DNA, 25 bp, Homo sapien
tttgtggaaagcatgccaggctgtt

SEQ ID NO: 719997 - DNA, 25 bp, Homo sapien
tgtggaaagcatgccaggctgttgc

SEQ ID NO: 719998 - DNA, 25 bp, Homo sapien
ggaaagcatgccaggctgttgctcc

SEQ ID NO: 719999 - DNA, 25 bp, Homo sapien
tggaaagcatgccaggctgttgctc

SEQ ID NO: 720000 - DNA, 25 bp, Homo sapien
tagcactgtgggtcttgcctggccg

SEQ ID NO: 720001 - DNA, 25 bp, Homo sapien
tggtacacaggagagtcctaccctg

SEQ ID NO: 720002 - DNA, 25 bp, Homo sapien
gatcctgcatctgtgaaggacacca

SEQ ID NO: 720003 - DNA, 25 bp, Homo sapien
tgcctggccgtgatatgaaccgtgg

SEQ ID NO: 720004 - DNA, 25 bp, Homo sapien
tcgcctctgcggcaagcgactccca

SEQ ID NO: 720005 - DNA, 25 bp, Homo sapien
tgcggcaagcgactcccagattctc

SEQ ID NO: 720006 - DNA, 25 bp, Homo sapien
ctctgcggcaagcgactcccagatt

SEQ ID NO: 720007 - DNA, 25 bp, Homo sapien
gcctctgcggcaagcgactcccaga

SEQ ID NO: 720008 - DNA, 25 bp, Homo sapien
tgattcattcggaaggcaacagaac

SEQ ID NO: 720009 - DNA, 25 bp, Homo sapien
ttccaataatctctgctaagagcga

SEQ ID NO: 720010 - DNA, 25 bp, Homo sapien
gctaagagcgaccaggattcttggt

SEQ ID NO: 720011 - DNA, 25 bp, Homo sapien
ttcttggtggtctaattgagattcc

SEQ ID NO: 720012 - DNA, 25 bp, Homo sapien
aatgattggaaagctctatctcccc

SEQ ID NO: 720013 - DNA, 25 bp, Homo sapien
caaaagttgttcctcggagactcct

SEQ ID NO: 720014 - DNA, 25 bp, Homo sapien
gggaatttctgccttatttctaatg

SEQ ID NO: 720015 - DNA, 25 bp, Homo sapien
atgtcccgcccctctgtctcacgat

SEQ ID NO: 720016 - DNA, 25 bp, Homo sapien
tccctagaacgtagaagtggctgag

SEQ ID NO: 720017 - DNA, 25 bp, Homo sapien
tgtccctagaacgtagaagtggctg

SEQ ID NO: 720018 - DNA, 25 bp, Homo sapien
ccctagaacgtagaagtggctgagc

SEQ ID NO: 720019 - DNA, 25 bp, Homo sapien
cctagaacgtagaagtggctgagct

SEQ ID NO: 720020 - DNA, 25 bp, Homo sapien
tggaccaaatgcagttgccgtggaa

SEQ ID NO: 720021 - DNA, 25 bp, Homo sapien
ctgagatcccggcagtaactggtta

SEQ ID NO: 720022 - DNA, 25 bp, Homo sapien
tgaagctctctagaccaggaaaggc

SEQ ID NO: 720023 - DNA, 25 bp, Homo sapien
ttatgacgggttttccacaggatgg

SEQ ID NO: 720024 - DNA, 25 bp, Homo sapien
cctggacgcatccacaggtcaccag

SEQ ID NO: 720025 - DNA, 25 bp, Homo sapien
ccctggacgcatccacaggtcacca

SEQ ID NO: 720026 - DNA, 25 bp, Homo sapien
gagcacaaggataacagttcagcat

SEQ ID NO: 720027 - DNA, 25 bp, Homo sapien
cggccggagcacaaggataacagtt

SEQ ID NO: 720028 - DNA, 25 bp, Homo sapien
gccggagcacaaggataacagttca

SEQ ID NO: 720029 - DNA, 25 bp, Homo sapien
ggaaacggccggagcacaaggataa

SEQ ID NO: 720030 - DNA, 25 bp, Homo sapien
gccttgtagcctgtgccaataaagt

SEQ ID NO: 720031 - DNA, 25 bp, Homo sapien
ccaataaagtgcagggccgggaaag

SEQ ID NO: 720032 - DNA, 25 bp, Homo sapien
ctgtgccaataaagtgcagggccgg

SEQ ID NO: 720033 - DNA, 25 bp, Homo sapien
tgtagcctgtgccaataaagtgcag

SEQ ID NO: 720034 - DNA, 25 bp, Homo sapien
ctgcaacatcctcatcggtcctggg

SEQ ID NO: 720035 - DNA, 25 bp, Homo sapien
accaccgaaggctgcaacatcctca

SEQ ID NO: 720036 - DNA, 25 bp, Homo sapien
caccaccgaaggctgcaacatcctc

SEQ ID NO: 720037 - DNA, 25 bp, Homo sapien
ctttgagtcattcttatccttacac

SEQ ID NO: 720038 - DNA, 25 bp, Homo sapien
cccttaagcaaacgtggagtgggct

SEQ ID NO: 720039 - DNA, 25 bp, Homo sapien
tcatcccagagttggtttcaagaag

SEQ ID NO: 720040 - DNA, 25 bp, Homo sapien
catgattgctgtttttgcgttatta

SEQ ID NO: 720041 - DNA, 25 bp, Homo sapien
catcctagcctatgtgcaggagtgg

SEQ ID NO: 720042 - DNA, 25 bp, Homo sapien
catgactggtgatgactgtaggccc

SEQ ID NO: 720043 - DNA, 25 bp, Homo sapien
ttgtcactgaggatgatcagagggc

SEQ ID NO: 720044 - DNA, 25 bp, Homo sapien
taggaaacccactgcgatcaacttc

SEQ ID NO: 720045 - DNA, 25 bp, Homo sapien
ggttattgagggcatcagcatccac

SEQ ID NO: 720046 - DNA, 25 bp, Homo sapien
gtcatgatgagacaaggccctcggg

SEQ ID NO: 720047 - DNA, 25 bp, Homo sapien
aggccctcggggaacccactgtgat

SEQ ID NO: 720048 - DNA, 25 bp, Homo sapien
tttccttctgggggagtcatgatga

SEQ ID NO: 720049 - DNA, 25 bp, Homo sapien
acccactgtgatttgaagacagcca

SEQ ID NO: 720050 - DNA, 25 bp, Homo sapien
ctgtggggaaattctgctggagcct

SEQ ID NO: 720051 - DNA, 25 bp, Homo sapien
tctgtggggaaattctgctggagcc

SEQ ID NO: 720052 - DNA, 25 bp, Homo sapien
tgtggggaaattctgctggagcctg

SEQ ID NO: 720053 - DNA, 25 bp, Homo sapien
ctctgtggggaaattctgctggagc

SEQ ID NO: 720054 - DNA, 25 bp, Homo sapien
aaaccaggacttgctgacgggttga

SEQ ID NO: 720055 - DNA, 25 bp, Homo sapien
aggacttgctgacgggttgattggg

SEQ ID NO: 720056 - DNA, 25 bp, Homo sapien
aaccaggacttgctgacgggttgat

SEQ ID NO: 720057 - DNA, 25 bp, Homo sapien
ccaggacttgctgacgggttgattg

SEQ ID NO: 720058 - DNA, 25 bp, Homo sapien
gcgagaccacgagcccaccgggaaa

SEQ ID NO: 720059 - DNA, 25 bp, Homo sapien
aaaacgaacaactccaaacgcgctg

SEQ ID NO: 720060 - DNA, 25 bp, Homo sapien
aacgcgctgccttaagagcggtaac

SEQ ID NO: 720061 - DNA, 25 bp, Homo sapien
cggtaacactcaccgcaaaagtctg

SEQ ID NO: 720062 - DNA, 25 bp, Homo sapien
tgaggagtgcgggagcagggcaccg

SEQ ID NO: 720063 - DNA, 25 bp, Homo sapien
ctgaggagtgcgggagcagggcacc

SEQ ID NO: 720064 - DNA, 25 bp, Homo sapien
aggagtgcgggagcagggcaccggg

SEQ ID NO: 720065 - DNA, 25 bp, Homo sapien
gagtgcgggagcagggcaccgggac

SEQ ID NO: 720066 - DNA, 25 bp, Homo sapien
catctggaggcagaactatctttct

SEQ ID NO: 720067 - DNA, 25 bp, Homo sapien
ttacttttggtcatctggaggcaga

SEQ ID NO: 720068 - DNA, 25 bp, Homo sapien
tttgtcagatttccagtagggtaga

SEQ ID NO: 720069 - DNA, 25 bp, Homo sapien
cagatttccagtagggtagactatt

SEQ ID NO: 720070 - DNA, 25 bp, Homo sapien
accatgggtcgtaaatgaaggcgga

SEQ ID NO: 720071 - DNA, 25 bp, Homo sapien
gccagacagtgcttcgacggccata

SEQ ID NO: 720072 - DNA, 25 bp, Homo sapien
caggcatagcaaccatgggtcgtaa

SEQ ID NO: 720073 - DNA, 25 bp, Homo sapien
ctctgactccggctggtgtctccag

SEQ ID NO: 720074 - DNA, 25 bp, Homo sapien
cagaatacccagaaagcctgataag

SEQ ID NO: 720075 - DNA, 25 bp, Homo sapien
ccagaaagcctgataagccctcctt

SEQ ID NO: 720076 - DNA, 25 bp, Homo sapien
atacccagaaagcctgataagccct

SEQ ID NO: 720077 - DNA, 25 bp, Homo sapien
cagaaagcctgataagccctccttg

SEQ ID NO: 720078 - DNA, 25 bp, Homo sapien
ggtggctcatactacagaaatgtat

SEQ ID NO: 720079 - DNA, 25 bp, Homo sapien
tgccatagtaaagtactgtagattg

SEQ ID NO: 720080 - DNA, 25 bp, Homo sapien
tccctatgtcttcacagggtcatcc

SEQ ID NO: 720081 - DNA, 25 bp, Homo sapien
gcaaggtacatgtctcccgatgcct

SEQ ID NO: 720082 - DNA, 25 bp, Homo sapien
cccaaatcgagcagttgcgtctact

SEQ ID NO: 720083 - DNA, 25 bp, Homo sapien
tctgagagaactgcttgcctggccc

SEQ ID NO: 720084 - DNA, 25 bp, Homo sapien
cagttgcgtctactgctggcttcag

SEQ ID NO: 720085 - DNA, 25 bp, Homo sapien
ctccatcccaaatcgagcagttgcg

SEQ ID NO: 720086 - DNA, 25 bp, Homo sapien
cattcatcacgggaactcttggttg

SEQ ID NO: 720087 - DNA, 25 bp, Homo sapien
tcattcatcacgggaactcttggtt

SEQ ID NO: 720088 - DNA, 25 bp, Homo sapien
tgtcccaaacaatggaggtcagccg

SEQ ID NO: 720089 - DNA, 25 bp, Homo sapien
cacctactgcatgttgaagccttgg

SEQ ID NO: 720090 - DNA, 25 bp, Homo sapien
gcaaggcatttctgcttagggcccc

SEQ ID NO: 720091 - DNA, 25 bp, Homo sapien
tggaagtctacagctcccgtagtga

SEQ ID NO: 720092 - DNA, 25 bp, Homo sapien
gaaatgctctacgacctctactctg

SEQ ID NO: 720093 - DNA, 25 bp, Homo sapien
gacgcatatgtcaaacgcactgaaa

SEQ ID NO: 720094 - DNA, 25 bp, Homo sapien
aaatgacagctacgaaggctcaggg

SEQ ID NO: 720095 - DNA, 25 bp, Homo sapien
cacgtgctactacgacaatgacgca

SEQ ID NO: 720096 - DNA, 25 bp, Homo sapien
gctgaatccagctccaatgcaggta

SEQ ID NO: 720097 - DNA, 25 bp, Homo sapien
gaatccagctccaatgcaggtaatg

SEQ ID NO: 720098 - DNA, 25 bp, Homo sapien
tctgctgaatccagctccaatgcag

SEQ ID NO: 720099 - DNA, 25 bp, Homo sapien
ccagctccaatgcaggtaatgccat

SEQ ID NO: 720100 - DNA, 25 bp, Homo sapien
gctgccattccgctcacggcagaaa

SEQ ID NO: 720101 - DNA, 25 bp, Homo sapien
ttcgcaaatcttgccagctgtgtct

SEQ ID NO: 720102 - DNA, 25 bp, Homo sapien
agctggtgttctcactcccgctgct

SEQ ID NO: 720103 - DNA, 25 bp, Homo sapien
ttgttttgccagctggtgttctcac

SEQ ID NO: 720104 - DNA, 25 bp, Homo sapien
gacaagtcagtgaaggtcatctctg

SEQ ID NO: 720105 - DNA, 25 bp, Homo sapien
ccaggtttgatgcttgtggcatcga

SEQ ID NO: 720106 - DNA, 25 bp, Homo sapien
gaggttgggccaggtttgatgcttg

SEQ ID NO: 720107 - DNA, 25 bp, Homo sapien
gatgcttgtggcatcgacaagtcag

SEQ ID NO: 720108 - DNA, 25 bp, Homo sapien
tctctcaataactgctaaattccct

SEQ ID NO: 720109 - DNA, 25 bp, Homo sapien
gcacctagttgaattctctcaataa

SEQ ID NO: 720110 - DNA, 25 bp, Homo sapien
ccctgtggatattcccatggctgca

SEQ ID NO: 720111 - DNA, 25 bp, Homo sapien
catcaggtaatttgcacctagttga

SEQ ID NO: 720112 - DNA, 25 bp, Homo sapien
cctttgtgagcgcacaaagagaatt

SEQ ID NO: 720113 - DNA, 25 bp, Homo sapien
gacttcatgttcagcctttgtgagc

SEQ ID NO: 720114 - DNA, 25 bp, Homo sapien
catgttcagcctttgtgagcgcaca

SEQ ID NO: 720115 - DNA, 25 bp, Homo sapien
tcaggacttcatgttcagcctttgt

SEQ ID NO: 720116 - DNA, 25 bp, Homo sapien
ccctgaggcctctccgtgaaggcag

SEQ ID NO: 720117 - DNA, 25 bp, Homo sapien
gaacatggttcttattctatataaa

SEQ ID NO: 720118 - DNA, 25 bp, Homo sapien
cttctacgaggctagtggaatcctt

SEQ ID NO: 720119 - DNA, 25 bp, Homo sapien
aggcagatttaggaagggccagatc

SEQ ID NO: 720120 - DNA, 25 bp, Homo sapien
tctgtaataatcttgcagctgtggg

SEQ ID NO: 720121 - DNA, 25 bp, Homo sapien
cctagcaggtgacagaggtcgtaat

SEQ ID NO: 720122 - DNA, 25 bp, Homo sapien
cctttgtcttcagggaggatccagg

SEQ ID NO: 720123 - DNA, 25 bp, Homo sapien
cagctgtgggattctgttgacaaac

SEQ ID NO: 720124 - DNA, 25 bp, Homo sapien
ctgggatgggcgtcaggtgctgtgt

SEQ ID NO: 720125 - DNA, 25 bp, Homo sapien
taacaggtttcccacaagtagccag

SEQ ID NO: 720126 - DNA, 25 bp, Homo sapien
gtttcccacaagtagccagaagctg

SEQ ID NO: 720127 - DNA, 25 bp, Homo sapien
caggtttcccacaagtagccagaag

SEQ ID NO: 720128 - DNA, 25 bp, Homo sapien
aagatgccagacagcgggtgtgtgc

SEQ ID NO: 720129 - DNA, 25 bp, Homo sapien
gcccagaggccgtatttccacctgg

SEQ ID NO: 720130 - DNA, 25 bp, Homo sapien
aggtagttttatgtggctggtcaga

SEQ ID NO: 720131 - DNA, 25 bp, Homo sapien
tccagtcgtgcccagaggccgtatt

SEQ ID NO: 720132 - DNA, 25 bp, Homo sapien
catgcctggctaattattattatta

SEQ ID NO: 720133 - DNA, 25 bp, Homo sapien
gacccaatgagacctcttgttgaga

SEQ ID NO: 720134 - DNA, 25 bp, Homo sapien
cacgggatggaaacatcaggatggc

SEQ ID NO: 720135 - DNA, 25 bp, Homo sapien
cggcaagagtatctccatcacggga

SEQ ID NO: 720136 - DNA, 25 bp, Homo sapien
tttgacccaatgagacctcttgttg

SEQ ID NO: 720137 - DNA, 25 bp, Homo sapien
tgctaacacgcgtgtcttcctccgt

SEQ ID NO: 720138 - DNA, 25 bp, Homo sapien
aacacgcgtgtcttcctccgtggga

SEQ ID NO: 720139 - DNA, 25 bp, Homo sapien
taacacgcgtgtcttcctccgtggg

SEQ ID NO: 720140 - DNA, 25 bp, Homo sapien
gctaacacgcgtgtcttcctccgtg

SEQ ID NO: 720141 - DNA, 25 bp, Homo sapien
aagtcatacggtggcccatctgcgg

SEQ ID NO: 720142 - DNA, 25 bp, Homo sapien
ttcacaaagtcatacggtggcccat

SEQ ID NO: 720143 - DNA, 25 bp, Homo sapien
cccatctgcggcaggttggaagtct

SEQ ID NO: 720144 - DNA, 25 bp, Homo sapien
gcccatctgcggcaggttggaagtc

SEQ ID NO: 720145 - DNA, 25 bp, Homo sapien
tcatcttccaggggtctccagagtg

SEQ ID NO: 720146 - DNA, 25 bp, Homo sapien
catcatcttccaggggtctccagag

SEQ ID NO: 720147 - DNA, 25 bp, Homo sapien
tccatcatcttccaggggtctccag

SEQ ID NO: 720148 - DNA, 25 bp, Homo sapien
atcttccaggggtctccagagtgac

SEQ ID NO: 720149 - DNA, 25 bp, Homo sapien
tcgagtctacgataacttcatagtc

SEQ ID NO: 720150 - DNA, 25 bp, Homo sapien
gataacttcatagtctctcctgcct

SEQ ID NO: 720151 - DNA, 25 bp, Homo sapien
tcaggactcctcgatgtctccattt

SEQ ID NO: 720152 - DNA, 25 bp, Homo sapien
cggcacttgtggacatcgagtctac

SEQ ID NO: 720153 - DNA, 25 bp, Homo sapien
cagatggtctctgcacagtcattct

SEQ ID NO: 720154 - DNA, 25 bp, Homo sapien
tcagatggtctctgcacagtcattc

SEQ ID NO: 720155 - DNA, 25 bp, Homo sapien
gatggtctctgcacagtcattctca

SEQ ID NO: 720156 - DNA, 25 bp, Homo sapien
atggtctctgcacagtcattctcac

SEQ ID NO: 720157 - DNA, 25 bp, Homo sapien
ccaatcctggaaatgatgatgactg

SEQ ID NO: 720158 - DNA, 25 bp, Homo sapien
gcaacccgagtcatagccaatcctg

SEQ ID NO: 720159 - DNA, 25 bp, Homo sapien
gagttccaagctacggatgtgggca

SEQ ID NO: 720160 - DNA, 25 bp, Homo sapien
tagacagtgcatctcgagttccaag

SEQ ID NO: 720161 - DNA, 25 bp, Homo sapien
ccgagagcgtgtaccatgggcaaga

SEQ ID NO: 720162 - DNA, 25 bp, Homo sapien
cttgtggtccccgagagcgtgtacc

SEQ ID NO: 720163 - DNA, 25 bp, Homo sapien
gtaccatgggcaagatgtggctctg

SEQ ID NO: 720164 - DNA, 25 bp, Homo sapien
gtgtaccatgggcaagatgtggctc

SEQ ID NO: 720165 - DNA, 25 bp, Homo sapien
ctctcaacagcacaacgtgggacat

SEQ ID NO: 720166 - DNA, 25 bp, Homo sapien
agttagagcagcgccgccctgagca

SEQ ID NO: 720167 - DNA, 25 bp, Homo sapien
gcagcgccgccctgagcagctctca

SEQ ID NO: 720168 - DNA, 25 bp, Homo sapien
agcagctctcaacagcacaacgtgg

SEQ ID NO: 720169 - DNA, 25 bp, Homo sapien
cacgagggtgatgttgcacgttttc

SEQ ID NO: 720170 - DNA, 25 bp, Homo sapien
gatcaaaagccctggtcacgagggt

SEQ ID NO: 720171 - DNA, 25 bp, Homo sapien
tgcacgttttcccgctgagttggct

SEQ ID NO: 720172 - DNA, 25 bp, Homo sapien
ttggctgccgctttgatcatcctgg

SEQ ID NO: 720173 - DNA, 25 bp, Homo sapien
taggagatgttctttgaacaactgc

SEQ ID NO: 720174 - DNA, 25 bp, Homo sapien
gatgttctttgaacaactgcctttc

SEQ ID NO: 720175 - DNA, 25 bp, Homo sapien
tagcgtaggagatgttctttgaaca

SEQ ID NO: 720176 - DNA, 25 bp, Homo sapien
agctaatagcgtaggagatgttctt

SEQ ID NO: 720177 - DNA, 25 bp, Homo sapien
tgagaacgatggcatacacatgtgt

SEQ ID NO: 720178 - DNA, 25 bp, Homo sapien
gcatacacatgtgtctgcatgagcg

SEQ ID NO: 720179 - DNA, 25 bp, Homo sapien
acacatgtgtctgcatgagcgtgga

SEQ ID NO: 720180 - DNA, 25 bp, Homo sapien
gagcatttatgagaacgatggcata

SEQ ID NO: 720181 - DNA, 25 bp, Homo sapien
tccagagcatctgagattgggcaga

SEQ ID NO: 720182 - DNA, 25 bp, Homo sapien
tagctgcaaagtccgtgactcaggg

SEQ ID NO: 720183 - DNA, 25 bp, Homo sapien
gcctcggcggctgattctgggttca

SEQ ID NO: 720184 - DNA, 25 bp, Homo sapien
gacaggtgagtgtcctggaaagcca

SEQ ID NO: 720185 - DNA, 25 bp, Homo sapien
gtgtccttgcgcaggccggccactg

SEQ ID NO: 720186 - DNA, 25 bp, Homo sapien
caggccggccactggcctctgagcc

SEQ ID NO: 720187 - DNA, 25 bp, Homo sapien
gcgcaggccggccactggcctctga

SEQ ID NO: 720188 - DNA, 25 bp, Homo sapien
cgtgtccttgcgcaggccggccact

SEQ ID NO: 720189 - DNA, 25 bp, Homo sapien
tgaagaacgcgcacaaatccagctt

SEQ ID NO: 720190 - DNA, 25 bp, Homo sapien
actcgcgcacccgacattgggcagg

SEQ ID NO: 720191 - DNA, 25 bp, Homo sapien
agccgtcgcgaggaggcaaccgacc

SEQ ID NO: 720192 - DNA, 25 bp, Homo sapien
tgtgcgcacgcgcaatgtgcaacgc

SEQ ID NO: 720193 - DNA, 25 bp, Homo sapien
aggttgcggtgtgccgagatcacat

SEQ ID NO: 720194 - DNA, 25 bp, Homo sapien
ggttgcggtgtgccgagatcacatc

SEQ ID NO: 720195 - DNA, 25 bp, Homo sapien
gttgcggtgtgccgagatcacatct

SEQ ID NO: 720196 - DNA, 25 bp, Homo sapien
ttgcggtgtgccgagatcacatctg

SEQ ID NO: 720197 - DNA, 25 bp, Homo sapien
tgactctgcagaatccatttgccaa

SEQ ID NO: 720198 - DNA, 25 bp, Homo sapien
ctctgcagaatccatttgccaaacc

SEQ ID NO: 720199 - DNA, 25 bp, Homo sapien
tctgactctgcagaatccatttgcc

SEQ ID NO: 720200 - DNA, 25 bp, Homo sapien
gactctgcagaatccatttgccaaa

SEQ ID NO: 720201 - DNA, 25 bp, Homo sapien
aagactaatgctgagttggagctgt

SEQ ID NO: 720202 - DNA, 25 bp, Homo sapien
agataagactaatgctgagttggag

SEQ ID NO: 720203 - DNA, 25 bp, Homo sapien
gataagactaatgctgagttggagc

SEQ ID NO: 720204 - DNA, 25 bp, Homo sapien
actaatgctgagttggagctgttca

SEQ ID NO: 720205 - DNA, 25 bp, Homo sapien
gcacgcatttccttgtggccatatg

SEQ ID NO: 720206 - DNA, 25 bp, Homo sapien
ggctactcatagtcccctgccatgg

SEQ ID NO: 720207 - DNA, 25 bp, Homo sapien
gcagcttaaaccaacatctatctag

SEQ ID NO: 720208 - DNA, 25 bp, Homo sapien
tccggaggctcaactgggcaagaat

SEQ ID NO: 720209 - DNA, 25 bp, Homo sapien
tcaaatggctcagggaatggcggat

SEQ ID NO: 720210 - DNA, 25 bp, Homo sapien
gaaccactcactggcaaagggacgg

SEQ ID NO: 720211 - DNA, 25 bp, Homo sapien
tggaatctctgaccataggcccctg

SEQ ID NO: 720212 - DNA, 25 bp, Homo sapien
tgaaaacggtccaaacaatgctgaa

SEQ ID NO: 720213 - DNA, 25 bp, Homo sapien
gggggacaccagatccaatgtcaat

SEQ ID NO: 720214 - DNA, 25 bp, Homo sapien
tccagggggacaccagatccaatgt

SEQ ID NO: 720215 - DNA, 25 bp, Homo sapien
ttatcccgtccccacagtggagagc

SEQ ID NO: 720216 - DNA, 25 bp, Homo sapien
atcgtcccttatcccgtccccacag

SEQ ID NO: 720217 - DNA, 25 bp, Homo sapien
gctgtgatcaaatgccagctgctgt

SEQ ID NO: 720218 - DNA, 25 bp, Homo sapien
ttctcacggttctgcagttaggaag

SEQ ID NO: 720219 - DNA, 25 bp, Homo sapien
caagatctgatgtccagtgggcccc

SEQ ID NO: 720220 - DNA, 25 bp, Homo sapien
taatgccatcatgaaggcaactgca

SEQ ID NO: 720221 - DNA, 25 bp, Homo sapien
aagctgctcaactgggaaccctagg

SEQ ID NO: 720222 - DNA, 25 bp, Homo sapien
gaggactggacgtccatcgggatcc

SEQ ID NO: 720223 - DNA, 25 bp, Homo sapien
cgggatccagagttgctccgatgtc

SEQ ID NO: 720224 - DNA, 25 bp, Homo sapien
tagcccaaacaccagattcacagaa

SEQ ID NO: 720225 - DNA, 25 bp, Homo sapien
gcagaaacgagaaggaacgaaatta

SEQ ID NO: 720226 - DNA, 25 bp, Homo sapien
acaagaccactacacgaagttaagg

SEQ ID NO: 720227 - DNA, 25 bp, Homo sapien
cctgtgaagctggtagcagaaacga

SEQ ID NO: 720228 - DNA, 25 bp, Homo sapien
aaattaactccaaggcagtaagcca

SEQ ID NO: 720229 - DNA, 25 bp, Homo sapien
gcgccgagcgcagcgcgagcagggc

SEQ ID NO: 720230 - DNA, 25 bp, Homo sapien
gccgagcgcagcgcgagcagggcgc

SEQ ID NO: 720231 - DNA, 25 bp, Homo sapien
agcgcagcgcgagcagggcgcgggc

SEQ ID NO: 720232 - DNA, 25 bp, Homo sapien
cgagcgcagcgcgagcagggcgcgg

SEQ ID NO: 720233 - DNA, 25 bp, Homo sapien
gcgatcgcgcccggaggcagcggcg

SEQ ID NO: 720234 - DNA, 25 bp, Homo sapien
ccgcgatcgcgcccggaggcagcgg

SEQ ID NO: 720235 - DNA, 25 bp, Homo sapien
ggagcccgcgcccgcgatcgcgccc

SEQ ID NO: 720236 - DNA, 25 bp, Homo sapien
cgcgcccgcgatcgcgcccggaggc

SEQ ID NO: 720237 - DNA, 25 bp, Homo sapien
cgatggtgacgctgggctggcgcat

SEQ ID NO: 720238 - DNA, 25 bp, Homo sapien
gggcgcgccgcgtctctggaaggcc

SEQ ID NO: 720239 - DNA, 25 bp, Homo sapien
tagaagtgcggctcctggaagctga

SEQ ID NO: 720240 - DNA, 25 bp, Homo sapien
cacgaagacgccgttcttgccgagg

SEQ ID NO: 720241 - DNA, 25 bp, Homo sapien
ctccaggatcggggtcggggtgatc

SEQ ID NO: 720242 - DNA, 25 bp, Homo sapien
cagggtagggacgtagatgacccca

SEQ ID NO: 720243 - DNA, 25 bp, Homo sapien
ggacgtagatgaccccagggatcca

SEQ ID NO: 720244 - DNA, 25 bp, Homo sapien
atgaccccggagtccaggccgatgg

SEQ ID NO: 720245 - DNA, 25 bp, Homo sapien
agtgggagttcagaatgaccccgga

SEQ ID NO: 720246 - DNA, 25 bp, Homo sapien
tgaccctggagtccaagctggtggg

SEQ ID NO: 720247 - DNA, 25 bp, Homo sapien
ggtgaccctggagtccaagctggtg

SEQ ID NO: 720248 - DNA, 25 bp, Homo sapien
ggggtgaccctggagtccaagctgg

SEQ ID NO: 720249 - DNA, 25 bp, Homo sapien
ctggggtgaccctggagtccaagct

SEQ ID NO: 720250 - DNA, 25 bp, Homo sapien
gggtggtcctgagaaccaggtcagg

SEQ ID NO: 720251 - DNA, 25 bp, Homo sapien
ggggtggtcctgagaaccaggtcag

SEQ ID NO: 720252 - DNA, 25 bp, Homo sapien
gggggtggtcctgagaaccaggtca

SEQ ID NO: 720253 - DNA, 25 bp, Homo sapien
ggtccaggacggcaggcatcaggca

SEQ ID NO: 720254 - DNA, 25 bp, Homo sapien
gcagagcagagggtgcggagggcag

SEQ ID NO: 720255 - DNA, 25 bp, Homo sapien
gggcagagcagagggtgcggagggc

SEQ ID NO: 720256 - DNA, 25 bp, Homo sapien
agagcagagggtgcggagggcagtg

SEQ ID NO: 720257 - DNA, 25 bp, Homo sapien
cttgaggtccggggcagagcagagg

SEQ ID NO: 720258 - DNA, 25 bp, Homo sapien
tagtgtcacccagtagagcaagatc

SEQ ID NO: 720259 - DNA, 25 bp, Homo sapien
tagaagaaacgctatcacggagacc

SEQ ID NO: 720260 - DNA, 25 bp, Homo sapien
gagatgcttacccaccaggcgtagt

SEQ ID NO: 720261 - DNA, 25 bp, Homo sapien
tacctaataggagccagtgcctgca

SEQ ID NO: 720262 - DNA, 25 bp, Homo sapien
taaccagtttacaggaatgacaagg

SEQ ID NO: 720263 - DNA, 25 bp, Homo sapien
taagggatccaaggcaatgaccacc

SEQ ID NO: 720264 - DNA, 25 bp, Homo sapien
gcagaatccaatctgtaaaggcagg

SEQ ID NO: 720265 - DNA, 25 bp, Homo sapien
gagtctgatggaatccccgggtcta

SEQ ID NO: 720266 - DNA, 25 bp, Homo sapien
tcgctgcatgaaaacacccaattgt

SEQ ID NO: 720267 - DNA, 25 bp, Homo sapien
gacaggtaacatgcgacgtcgtaac

SEQ ID NO: 720268 - DNA, 25 bp, Homo sapien
ggtggcacatctcactcgctgcatg

SEQ ID NO: 720269 - DNA, 25 bp, Homo sapien
aggtaacatgcgacgtcgtaacaag

SEQ ID NO: 720270 - DNA, 25 bp, Homo sapien
ccaggtctcaggagtcggacctgat

SEQ ID NO: 720271 - DNA, 25 bp, Homo sapien
gagtcggacctgatgcccgtctttg

SEQ ID NO: 720272 - DNA, 25 bp, Homo sapien
ttcactaacagaccaaccctcccta

SEQ ID NO: 720273 - DNA, 25 bp, Homo sapien
gacctgatgcccgtctttgtctcct

SEQ ID NO: 720274 - DNA, 25 bp, Homo sapien
ccccagctccggttcaaaaccatca

SEQ ID NO: 720275 - DNA, 25 bp, Homo sapien
ccagctccggttcaaaaccatcacc

SEQ ID NO: 720276 - DNA, 25 bp, Homo sapien
gctccggttcaaaaccatcacccaa

SEQ ID NO: 720277 - DNA, 25 bp, Homo sapien
tcaaaaccatcacccaacgggaaca

SEQ ID NO: 720278 - DNA, 25 bp, Homo sapien
aagcttcaccccgttccgcgaagcg

SEQ ID NO: 720279 - DNA, 25 bp, Homo sapien
tccgcgaagcggctccccctccaac

SEQ ID NO: 720280 - DNA, 25 bp, Homo sapien
cttcaccccgttccgcgaagcggct

SEQ ID NO: 720281 - DNA, 25 bp, Homo sapien
ttccgcgaagcggctccccctccaa

SEQ ID NO: 720282 - DNA, 25 bp, Homo sapien
taatatggactccaacccgagggag

SEQ ID NO: 720283 - DNA, 25 bp, Homo sapien
ttcccaatgccagggctgtacagcc

SEQ ID NO: 720284 - DNA, 25 bp, Homo sapien
tcaagcggcgatgaatcactgttcc

SEQ ID NO: 720285 - DNA, 25 bp, Homo sapien
ggctgcaagtgttccctggttaata

SEQ ID NO: 720286 - DNA, 25 bp, Homo sapien
caggctcaggcgatcttctcacctc

SEQ ID NO: 720287 - DNA, 25 bp, Homo sapien
accaccatgcccagataatttttta

SEQ ID NO: 720288 - DNA, 25 bp, Homo sapien
caagtagctgcgagtacaggcaagc

SEQ ID NO: 720289 - DNA, 25 bp, Homo sapien
catgcccagataattttttactttt

SEQ ID NO: 720290 - DNA, 25 bp, Homo sapien
gaccctttcggtgtggctactggca

SEQ ID NO: 720291 - DNA, 25 bp, Homo sapien
ggttagacactgatcggaagcctca

SEQ ID NO: 720292 - DNA, 25 bp, Homo sapien
catgcggtagccagttttccacacg

SEQ ID NO: 720293 - DNA, 25 bp, Homo sapien
tggcagacgctaccagggttagaca

SEQ ID NO: 720294 - DNA, 25 bp, Homo sapien
gattctgcccacattgaggaagggt

SEQ ID NO: 720295 - DNA, 25 bp, Homo sapien
ttcacgaggatgatgaagacctcct

SEQ ID NO: 720296 - DNA, 25 bp, Homo sapien
catgctgcttgggactgtctccgat

SEQ ID NO: 720297 - DNA, 25 bp, Homo sapien
gactgttggcattacctcatccagc

SEQ ID NO: 720298 - DNA, 25 bp, Homo sapien
cctatgtggactgtgcgcttgggaa

SEQ ID NO: 720299 - DNA, 25 bp, Homo sapien
taagcagcctatgtggactgtgcgc

SEQ ID NO: 720300 - DNA, 25 bp, Homo sapien
tcgatctgctcggagacatcgagtc

SEQ ID NO: 720301 - DNA, 25 bp, Homo sapien
tcgagtccagataagcagcctatgt

SEQ ID NO: 720302 - DNA, 25 bp, Homo sapien
agcacaacgcttcctgaacagagct

SEQ ID NO: 720303 - DNA, 25 bp, Homo sapien
cagcacaacgcttcctgaacagagc

SEQ ID NO: 720304 - DNA, 25 bp, Homo sapien
ccttccatccacacgcctcctgcta

SEQ ID NO: 720305 - DNA, 25 bp, Homo sapien
ttccatccacacgcctcctgctacc

SEQ ID NO: 720306 - DNA, 25 bp, Homo sapien
accttccatccacacgcctcctgct

SEQ ID NO: 720307 - DNA, 25 bp, Homo sapien
cttccatccacacgcctcctgctac

SEQ ID NO: 720308 - DNA, 25 bp, Homo sapien
ccagggttacaatggctgcgtggcc

SEQ ID NO: 720309 - DNA, 25 bp, Homo sapien
atgagatgacggaaccacacacagc

SEQ ID NO: 720310 - DNA, 25 bp, Homo sapien
acttcccggctgtgatgctgatgga

SEQ ID NO: 720311 - DNA, 25 bp, Homo sapien
caacacgtctgctgctccttgtgaa

SEQ ID NO: 720312 - DNA, 25 bp, Homo sapien
gagaaagtaacacggctgtgcgcgt

SEQ ID NO: 720313 - DNA, 25 bp, Homo sapien
aaagtaacacggctgtgcgcgtccc

SEQ ID NO: 720314 - DNA, 25 bp, Homo sapien
taacacggctgtgcgcgtccccgtt

SEQ ID NO: 720315 - DNA, 25 bp, Homo sapien
ggagaaagtaacacggctgtgcgcg

SEQ ID NO: 720316 - DNA, 25 bp, Homo sapien
caattctgcgggaaccggagcccaa

SEQ ID NO: 720317 - DNA, 25 bp, Homo sapien
gcagcagcaaaggaacggaatcccc

SEQ ID NO: 720318 - DNA, 25 bp, Homo sapien
tggatgccaattctgcgggaaccgg

SEQ ID NO: 720319 - DNA, 25 bp, Homo sapien
accggagcccaaacgagagagggat

SEQ ID NO: 720320 - DNA, 25 bp, Homo sapien
tcctgagacaacaactaagcccggt

SEQ ID NO: 720321 - DNA, 25 bp, Homo sapien
tgccaggcccagttttgctaaagct

SEQ ID NO: 720322 - DNA, 25 bp, Homo sapien
gaaatcacatgtaagtggcatcgcc

SEQ ID NO: 720323 - DNA, 25 bp, Homo sapien
gcagccacggcagttgacggagatt

SEQ ID NO: 720324 - DNA, 25 bp, Homo sapien
cccaggaggtgaatgcatagaaaca

SEQ ID NO: 720325 - DNA, 25 bp, Homo sapien
gcctagctggtagcaggttcctgga

SEQ ID NO: 720326 - DNA, 25 bp, Homo sapien
agggtcagtacacacacagcacgtg

SEQ ID NO: 720327 - DNA, 25 bp, Homo sapien
tgcacacgagtaagagttcataacc

SEQ ID NO: 720328 - DNA, 25 bp, Homo sapien
tactggtacccactaccaggcctgg

SEQ ID NO: 720329 - DNA, 25 bp, Homo sapien
gcacccgctttggcctcccaaagtg

SEQ ID NO: 720330 - DNA, 25 bp, Homo sapien
cctccgcctccaggtccaagcgatt

SEQ ID NO: 720331 - DNA, 25 bp, Homo sapien
ctccgcctccaggtccaagcgattc

SEQ ID NO: 720332 - DNA, 25 bp, Homo sapien
tgcacccgctttggcctcccaaagt

SEQ ID NO: 720333 - DNA, 25 bp, Homo sapien
gatttgagacaaaggtgaacgccac

SEQ ID NO: 720334 - DNA, 25 bp, Homo sapien
tgcaaatcaacgaaacagaccatgt

SEQ ID NO: 720335 - DNA, 25 bp, Homo sapien
tgtcagaagggcacagttgagacct

SEQ ID NO: 720336 - DNA, 25 bp, Homo sapien
tatgggatcggatcacgctgcagcc

SEQ ID NO: 720337 - DNA, 25 bp, Homo sapien
ccgttccaccagtgctggacacgat

SEQ ID NO: 720338 - DNA, 25 bp, Homo sapien
cgttccaccagtgctggacacgatg

SEQ ID NO: 720339 - DNA, 25 bp, Homo sapien
gttccaccagtgctggacacgatgg

SEQ ID NO: 720340 - DNA, 25 bp, Homo sapien
ttccaccagtgctggacacgatggc

SEQ ID NO: 720341 - DNA, 25 bp, Homo sapien
tgcacacgtgcacgcacacacacgc

SEQ ID NO: 720342 - DNA, 25 bp, Homo sapien
cacacacgcatgcacacacacctac

SEQ ID NO: 720343 - DNA, 25 bp, Homo sapien
cgcacacacacgcatgcacacacac

SEQ ID NO: 720344 - DNA, 25 bp, Homo sapien
cacacacacgcatgcacacacacct

SEQ ID NO: 720345 - DNA, 25 bp, Homo sapien
gaagggcatcccaaggctatttgaa

SEQ ID NO: 720346 - DNA, 25 bp, Homo sapien
gattctccccgagatactggtcaga

SEQ ID NO: 720347 - DNA, 25 bp, Homo sapien
cacttaagctggctcaactgggcca

SEQ ID NO: 720348 - DNA, 25 bp, Homo sapien
aggcacggcccagcgagtgaatctt

SEQ ID NO: 720349 - DNA, 25 bp, Homo sapien
tcctcccataggtctgctagccagg

SEQ ID NO: 720350 - DNA, 25 bp, Homo sapien
tgctcttcgtcaaagcgtttttgaa

SEQ ID NO: 720351 - DNA, 25 bp, Homo sapien
gcattacaaatgtgcggctcctccc

SEQ ID NO: 720352 - DNA, 25 bp, Homo sapien
cagggacccgcttcaaaggaagtga

SEQ ID NO: 720353 - DNA, 25 bp, Homo sapien
tcttgatggccgtgctgggaaaccg

SEQ ID NO: 720354 - DNA, 25 bp, Homo sapien
catgctccggaggtccggctccggg

SEQ ID NO: 720355 - DNA, 25 bp, Homo sapien
tagagcgacgtgaactggatcttga

SEQ ID NO: 720356 - DNA, 25 bp, Homo sapien
gcctcttctttgtgatagagcgacg

SEQ ID NO: 720357 - DNA, 25 bp, Homo sapien
ctgatggtgcccgtcggggagggga

SEQ ID NO: 720358 - DNA, 25 bp, Homo sapien
tgatggtgcccgtcggggaggggac

SEQ ID NO: 720359 - DNA, 25 bp, Homo sapien
ctacaaaagataagaaaattaagtg

SEQ ID NO: 720360 - DNA, 25 bp, Homo sapien
tctctacaaaagataagaaaattaa

SEQ ID NO: 720361 - DNA, 25 bp, Homo sapien
aagataagaaaattaagtgggtgtg

SEQ ID NO: 720362 - DNA, 25 bp, Homo sapien
ataagaaaattaagtgggtgtggtg

SEQ ID NO: 720363 - DNA, 25 bp, Homo sapien
taacttgtcggcaaagcagggtaga

SEQ ID NO: 720364 - DNA, 25 bp, Homo sapien
cagtgtgtagttctaactgtggacc

SEQ ID NO: 720365 - DNA, 25 bp, Homo sapien
cttgtaacttgtaggtcactggtaa

SEQ ID NO: 720366 - DNA, 25 bp, Homo sapien
ggctgtgttccaagagaagccagtg

SEQ ID NO: 720367 - DNA, 25 bp, Homo sapien
cacagggcggtttcaaagaacagga

SEQ ID NO: 720368 - DNA, 25 bp, Homo sapien
tactttctccgcacagaattctccc

SEQ ID NO: 720369 - DNA, 25 bp, Homo sapien
ctccccaacaagaatccggtctttg

SEQ ID NO: 720370 - DNA, 25 bp, Homo sapien
cggtctttgcacagggcggtttcaa

SEQ ID NO: 720371 - DNA, 25 bp, Homo sapien
gcttggattacacacctggctcatt

SEQ ID NO: 720372 - DNA, 25 bp, Homo sapien
tagcttggattacacacctggctca

SEQ ID NO: 720373 - DNA, 25 bp, Homo sapien
agcttggattacacacctggctcat

SEQ ID NO: 720374 - DNA, 25 bp, Homo sapien
gtagcttggattacacacctggctc

SEQ ID NO: 720375 - DNA, 25 bp, Homo sapien
tgagcaaaaacagtcactctgtgca

SEQ ID NO: 720376 - DNA, 25 bp, Homo sapien
cgccgaattgtacgagttactttca

SEQ ID NO: 720377 - DNA, 25 bp, Homo sapien
gaaacagctcttgaagtcttgccct

SEQ ID NO: 720378 - DNA, 25 bp, Homo sapien
ctccacgttggagaaatcaggaaga

SEQ ID NO: 720379 - DNA, 25 bp, Homo sapien
aagcagaggctgctcgagcctcaca

SEQ ID NO: 720380 - DNA, 25 bp, Homo sapien
gagggaccacatgtgtttgttcaca

SEQ ID NO: 720381 - DNA, 25 bp, Homo sapien
tcggagcagcccgtctctcaataag

SEQ ID NO: 720382 - DNA, 25 bp, Homo sapien
cagccgctaagagctgtaaagtgcc

SEQ ID NO: 720383 - DNA, 25 bp, Homo sapien
caggacaaccccgtgtggtcacaga

SEQ ID NO: 720384 - DNA, 25 bp, Homo sapien
acaaccccgtgtggtcacagaggca

SEQ ID NO: 720385 - DNA, 25 bp, Homo sapien
acaggtgtccacaaggcggcgctgt

SEQ ID NO: 720386 - DNA, 25 bp, Homo sapien
gcggcgctgtgggaaaaggctcggg

SEQ ID NO: 720387 - DNA, 25 bp, Homo sapien
gtaactggaggagccggcaccgcgt

SEQ ID NO: 720388 - DNA, 25 bp, Homo sapien
ccagctgcaggtccgaggtcacgtt

SEQ ID NO: 720389 - DNA, 25 bp, Homo sapien
tccgacgcggcctttgctgcaaact

SEQ ID NO: 720390 - DNA, 25 bp, Homo sapien
cgttctgcacaaagcggtaactgga

SEQ ID NO: 720391 - DNA, 25 bp, Homo sapien
gccgggtcactatggcccgatcctg

SEQ ID NO: 720392 - DNA, 25 bp, Homo sapien
tgcaccacggcgccaggtgggctca

SEQ ID NO: 720393 - DNA, 25 bp, Homo sapien
tatggcccgatcctgggtcaccagg

SEQ ID NO: 720394 - DNA, 25 bp, Homo sapien
tgggctgagaccacctcgagcacac

SEQ ID NO: 720395 - DNA, 25 bp, Homo sapien
tctaccgccagctgcggctccattc

SEQ ID NO: 720396 - DNA, 25 bp, Homo sapien
caacggggatgatttgggcacgaaa

SEQ ID NO: 720397 - DNA, 25 bp, Homo sapien
cagcaaatgaccaacggggatgatt

SEQ ID NO: 720398 - DNA, 25 bp, Homo sapien
cgagaaagggccgacggctctaccg

SEQ ID NO: 720399 - DNA, 25 bp, Homo sapien
cgccatcctgctcaagggctgtatg

SEQ ID NO: 720400 - DNA, 25 bp, Homo sapien
tatgaaggctttgacgccgggctgc

SEQ ID NO: 720401 - DNA, 25 bp, Homo sapien
ttgaaaacagctattggacaaaaat

SEQ ID NO: 720402 - DNA, 25 bp, Homo sapien
taagacaaagttataaggagaacgc

SEQ ID NO: 720403 - DNA, 25 bp, Homo sapien
gccagcctttgtcggccgtccggta

SEQ ID NO: 720404 - DNA, 25 bp, Homo sapien
taggagaacggcggctttgactcat

SEQ ID NO: 720405 - DNA, 25 bp, Homo sapien
taatgcttggtgatgtgggcgtaga

SEQ ID NO: 720406 - DNA, 25 bp, Homo sapien
tgatgtgggcgtagatcccgctcag

SEQ ID NO: 720407 - DNA, 25 bp, Homo sapien
gaggcagggtctattcgccaaaagg

SEQ ID NO: 720408 - DNA, 25 bp, Homo sapien
taacggttcaaagagaggttgtgcc

SEQ ID NO: 720409 - DNA, 25 bp, Homo sapien
ttccacgagcttggcttcagaggca

SEQ ID NO: 720410 - DNA, 25 bp, Homo sapien
ctgggaacgtgggactttgataaag

SEQ ID NO: 720411 - DNA, 25 bp, Homo sapien
gaaggatttccgagactgccgctca

SEQ ID NO: 720412 - DNA, 25 bp, Homo sapien
ggctcatctgatgggcaacctggga

SEQ ID NO: 720413 - DNA, 25 bp, Homo sapien
cagtgaacgcaacaacctacggagt

SEQ ID NO: 720414 - DNA, 25 bp, Homo sapien
cgcattcagacggtgagaaacgccc

SEQ ID NO: 720415 - DNA, 25 bp, Homo sapien
catcagcccggggtgtgtgggcgaa

SEQ ID NO: 720416 - DNA, 25 bp, Homo sapien
acatcagcccggggtgtgtgggcga

SEQ ID NO: 720417 - DNA, 25 bp, Homo sapien
agcccggggtgtgtgggcgaagctg

SEQ ID NO: 720418 - DNA, 25 bp, Homo sapien
tcagcccggggtgtgtgggcgaagc

SEQ ID NO: 720419 - DNA, 25 bp, Homo sapien
ccctcccgagacaggcactctgggg

SEQ ID NO: 720420 - DNA, 25 bp, Homo sapien
ctctgggacagaagctaacttggac

SEQ ID NO: 720421 - DNA, 25 bp, Homo sapien
agctaacttggacccaaactcaggg

SEQ ID NO: 720422 - DNA, 25 bp, Homo sapien
ccaaactcagggtcgtgtggaatgg

SEQ ID NO: 720423 - DNA, 25 bp, Homo sapien
tgcgctttgggaataccggtactct

SEQ ID NO: 720424 - DNA, 25 bp, Homo sapien
catgatcactggctgggcgctgacg

SEQ ID NO: 720425 - DNA, 25 bp, Homo sapien
gatgtatccgttggccgagttggca

SEQ ID NO: 720426 - DNA, 25 bp, Homo sapien
gagttggcagatgtggtgaccaccc

SEQ ID NO: 720427 - DNA, 25 bp, Homo sapien
tgcacgacgtggatggcgtggcccg

SEQ ID NO: 720428 - DNA, 25 bp, Homo sapien
ccagctcatgctgatttaaagggac

SEQ ID NO: 720429 - DNA, 25 bp, Homo sapien
caccacaaagggtcctgcgaaggct

SEQ ID NO: 720430 - DNA, 25 bp, Homo sapien
cttgccggccgggaccaccacaaag

SEQ ID NO: 720431 - DNA, 25 bp, Homo sapien
aaagggtcctgcgaaggctgccagc

SEQ ID NO: 720432 - DNA, 25 bp, Homo sapien
tggctggccaccgtctggatgactc

SEQ ID NO: 720433 - DNA, 25 bp, Homo sapien
ccgttctgggtcacggcccggactg

SEQ ID NO: 720434 - DNA, 25 bp, Homo sapien
ggaaccgcatgctttccgttctggg

SEQ ID NO: 720435 - DNA, 25 bp, Homo sapien
aagcgttgccggctaaactgttcgt

SEQ ID NO: 720436 - DNA, 25 bp, Homo sapien
tgggagccacagagcttgggatgtg

SEQ ID NO: 720437 - DNA, 25 bp, Homo sapien
gtgaccaccaccggcgcggatgaac

SEQ ID NO: 720438 - DNA, 25 bp, Homo sapien
gatgaactcgcttgggtcgcaagga

SEQ ID NO: 720439 - DNA, 25 bp, Homo sapien
cgcggatgaactcgcttgggtcgca

SEQ ID NO: 720440 - DNA, 25 bp, Homo sapien
caccggcgcggatgaactcgcttgg

SEQ ID NO: 720441 - DNA, 25 bp, Homo sapien
cagctgcgatcactccagccggtgt

SEQ ID NO: 720442 - DNA, 25 bp, Homo sapien
gggccggcagctgcgatcactccag

SEQ ID NO: 720443 - DNA, 25 bp, Homo sapien
ggaccttttgacctcgggctctcca

SEQ ID NO: 720444 - DNA, 25 bp, Homo sapien
tccagccggtgtggttacagcacca

SEQ ID NO: 720445 - DNA, 25 bp, Homo sapien
cttaaaccacgggaaggcaggcgat

SEQ ID NO: 720446 - DNA, 25 bp, Homo sapien
ggcgatcaaatggaaagggctgggt

SEQ ID NO: 720447 - DNA, 25 bp, Homo sapien
ggtcgccgctgggtgagtcccactc

SEQ ID NO: 720448 - DNA, 25 bp, Homo sapien
tctcctccgtctgtgggtgcggccg

SEQ ID NO: 720449 - DNA, 25 bp, Homo sapien
gctgttaggtggtccgtggctcggc

SEQ ID NO: 720450 - DNA, 25 bp, Homo sapien
aacaggcatctgtccggtgcccggg

SEQ ID NO: 720451 - DNA, 25 bp, Homo sapien
tcaagatgctgagctccaacctcct

SEQ ID NO: 720452 - DNA, 25 bp, Homo sapien
tgtcctcccggacaaaggcggctgg

SEQ ID NO: 720453 - DNA, 25 bp, Homo sapien
cacgggcgaccccactccactgcac

SEQ ID NO: 720454 - DNA, 25 bp, Homo sapien
gggacggggactctgatgggggcca

SEQ ID NO: 720455 - DNA, 25 bp, Homo sapien
ctgatgggggccacgggcgacccca

SEQ ID NO: 720456 - DNA, 25 bp, Homo sapien
cactccactgcacagcacgtgtgtc

SEQ ID NO: 720457 - DNA, 25 bp, Homo sapien
tgccatagaaacgactcaattcggg

SEQ ID NO: 720458 - DNA, 25 bp, Homo sapien
tatttcccatggaaaggttagtgcc

SEQ ID NO: 720459 - DNA, 25 bp, Homo sapien
ccagggcaacaggtacggacttcca

SEQ ID NO: 720460 - DNA, 25 bp, Homo sapien
tacggacttccacaaagagcttatt

SEQ ID NO: 720461 - DNA, 25 bp, Homo sapien
taacaggaagaatgcgctgcgtctc

SEQ ID NO: 720462 - DNA, 25 bp, Homo sapien
tgtggccgggacatgcaaccctttt

SEQ ID NO: 720463 - DNA, 25 bp, Homo sapien
ggacttacctcctagccaaagcagg

SEQ ID NO: 720464 - DNA, 25 bp, Homo sapien
tgacagattccaccctcaacggagg

SEQ ID NO: 720465 - DNA, 25 bp, Homo sapien
agaggacctaccagacctcgggaag

SEQ ID NO: 720466 - DNA, 25 bp, Homo sapien
ggcaggtgtgagacacacatggctc

SEQ ID NO: 720467 - DNA, 25 bp, Homo sapien
accagacctcgggaaggaaagtgag

SEQ ID NO: 720468 - DNA, 25 bp, Homo sapien
gggcggcaggtgtgagacacacatg

SEQ ID NO: 720469 - DNA, 25 bp, Homo sapien
gccctctttatgcagaggacacaag

SEQ ID NO: 720470 - DNA, 25 bp, Homo sapien
attcgctgaatgatgcctgtgatct

SEQ ID NO: 720471 - DNA, 25 bp, Homo sapien
tcaaaacttcttgggggcttcggca

SEQ ID NO: 720472 - DNA, 25 bp, Homo sapien
aaccagtacagaaaatggacccagg

SEQ ID NO: 720473 - DNA, 25 bp, Homo sapien
tgaagtcactcaagggcaaagcaga

SEQ ID NO: 720474 - DNA, 25 bp, Homo sapien
gattccgtcctgcaacgtgaggcgg

SEQ ID NO: 720475 - DNA, 25 bp, Homo sapien
gaactcactgaatcgcccaaagaag

SEQ ID NO: 720476 - DNA, 25 bp, Homo sapien
ttttcatcaggagtgtggcgcagtc

SEQ ID NO: 720477 - DNA, 25 bp, Homo sapien
tatgtgatgaaaaccgtgtcctgag

SEQ ID NO: 720478 - DNA, 25 bp, Homo sapien
gacgcagcagctctaatgggacaat

SEQ ID NO: 720479 - DNA, 25 bp, Homo sapien
cctctggtcaccaaacgtagcagct

SEQ ID NO: 720480 - DNA, 25 bp, Homo sapien
gaattcaagccgcacggtgtgggta

SEQ ID NO: 720481 - DNA, 25 bp, Homo sapien
gccttctgatttgcccggagagcct

SEQ ID NO: 720482 - DNA, 25 bp, Homo sapien
cacggcgaggttcatcagtcagaga

SEQ ID NO: 720483 - DNA, 25 bp, Homo sapien
ttctcagggcaggagtctgacctcc

SEQ ID NO: 720484 - DNA, 25 bp, Homo sapien
gacttggatgtgacagacaggcacg

SEQ ID NO: 720485 - DNA, 25 bp, Homo sapien
tcagaggaggaacgctcacttcagc

SEQ ID NO: 720486 - DNA, 25 bp, Homo sapien
tttccccatggcgagaatgacaggg

SEQ ID NO: 720487 - DNA, 25 bp, Homo sapien
cagggcaggtgcaaagagtgactaa

SEQ ID NO: 720488 - DNA, 25 bp, Homo sapien
gccaaaaccagccattaggatgagt

SEQ ID NO: 720489 - DNA, 25 bp, Homo sapien
cttaagacgcaactgggtcactggg

SEQ ID NO: 720490 - DNA, 25 bp, Homo sapien
tggcctgaaatctggacgatggaac

SEQ ID NO: 720491 - DNA, 25 bp, Homo sapien
cctctggtggcctgaaatctggacg

SEQ ID NO: 720492 - DNA, 25 bp, Homo sapien
tctggacgatggaacttaagacgca

SEQ ID NO: 720493 - DNA, 25 bp, Homo sapien
gtgacagagtgacttggagaccgct

SEQ ID NO: 720494 - DNA, 25 bp, Homo sapien
tgggtaaggagcaaaaaaagtgaca

SEQ ID NO: 720495 - DNA, 25 bp, Homo sapien
gagcaaaaaaagtgacagaggccag

SEQ ID NO: 720496 - DNA, 25 bp, Homo sapien
aaaaaagtgacagaggccaggcgcg

SEQ ID NO: 720497 - DNA, 25 bp, Homo sapien
taaggagcaaaaaaagtgacagagg

SEQ ID NO: 720498 - DNA, 25 bp, Homo sapien
cagttaacctggagatttagaggct

SEQ ID NO: 720499 - DNA, 25 bp, Homo sapien
gagtctctcatttcagcttagccaa

SEQ ID NO: 720500 - DNA, 25 bp, Homo sapien
tttaacatccatacaggcctgtgaa

SEQ ID NO: 720501 - DNA, 25 bp, Homo sapien
aagctgcttttacctctagactcgg

SEQ ID NO: 720502 - DNA, 25 bp, Homo sapien
gacacgcaaggtgacatgaccagaa

SEQ ID NO: 720503 - DNA, 25 bp, Homo sapien
gaaaaatactttagacaggcgccac

SEQ ID NO: 720504 - DNA, 25 bp, Homo sapien
tcaggacagactctggaacacggct

SEQ ID NO: 720505 - DNA, 25 bp, Homo sapien
tggactcagcgacatctcaggacag

SEQ ID NO: 720506 - DNA, 25 bp, Homo sapien
taatatagaattttatttctggtta

SEQ ID NO: 720507 - DNA, 25 bp, Homo sapien
atagaattttatttctggttataga

SEQ ID NO: 720508 - DNA, 25 bp, Homo sapien
tatagaattttatttctggttatag

SEQ ID NO: 720509 - DNA, 25 bp, Homo sapien
ctttaatatagaattttatttctgg

SEQ ID NO: 720510 - DNA, 25 bp, Homo sapien
ctgtccgtccgccaccttcagtagc

SEQ ID NO: 720511 - DNA, 25 bp, Homo sapien
tatgtctagggggtcgggagcctct

SEQ ID NO: 720512 - DNA, 25 bp, Homo sapien
agggggccgggagcctgtatgtcca

SEQ ID NO: 720513 - DNA, 25 bp, Homo sapien
gggtcaggtgtttgtgtatccaggg

SEQ ID NO: 720514 - DNA, 25 bp, Homo sapien
gggctgacatcttaaactagaacta

SEQ ID NO: 720515 - DNA, 25 bp, Homo sapien
ggctgacatcttaaactagaactaa

SEQ ID NO: 720516 - DNA, 25 bp, Homo sapien
cgcatcacatgagcaggagggacag

SEQ ID NO: 720517 - DNA, 25 bp, Homo sapien
catttcggcggaaattgggcgcctg

SEQ ID NO: 720518 - DNA, 25 bp, Homo sapien
ggacaggttgccgaccaatgggctt

SEQ ID NO: 720519 - DNA, 25 bp, Homo sapien
cgtcacgtgccgcatcacatgagca

SEQ ID NO: 720520 - DNA, 25 bp, Homo sapien
accagacgcgcacgaacctcggaaa

SEQ ID NO: 720521 - DNA, 25 bp, Homo sapien
ttccgggaccgcgtcacgtgagcgc

SEQ ID NO: 720522 - DNA, 25 bp, Homo sapien
agacgcgcacgaacctcggaaactc

SEQ ID NO: 720523 - DNA, 25 bp, Homo sapien
aggagctccgcaccccggtcaactt

SEQ ID NO: 720524 - DNA, 25 bp, Homo sapien
gcctggtggagcaaactctccgctc

SEQ ID NO: 720525 - DNA, 25 bp, Homo sapien
aactctccgctcctgccgagaacat

SEQ ID NO: 720526 - DNA, 25 bp, Homo sapien
aaactctccgctcctgccgagaaca

SEQ ID NO: 720527 - DNA, 25 bp, Homo sapien
ctggcctggtggagcaaactctccg

SEQ ID NO: 720528 - DNA, 25 bp, Homo sapien
cctgccctgtgagacccacccccgt

SEQ ID NO: 720529 - DNA, 25 bp, Homo sapien
tgccctgtgagacccacccccgtgt

SEQ ID NO: 720530 - DNA, 25 bp, Homo sapien
cccctagggagagatgcaggaagga

SEQ ID NO: 720531 - DNA, 25 bp, Homo sapien
cacccccgtgtgcccctagggagag

SEQ ID NO: 720532 - DNA, 25 bp, Homo sapien
ggaccttgggattaacatgttacat

SEQ ID NO: 720533 - DNA, 25 bp, Homo sapien
tagaacttaacctgccttcaagacc

SEQ ID NO: 720534 - DNA, 25 bp, Homo sapien
cttgtctcttggcaaggaccttggg

SEQ ID NO: 720535 - DNA, 25 bp, Homo sapien
gaaggttgcctatgttgagctgctg

SEQ ID NO: 720536 - DNA, 25 bp, Homo sapien
tgtacttcgtggctgagatgatgag

SEQ ID NO: 720537 - DNA, 25 bp, Homo sapien
agatccgggaacagaacttcttcag

SEQ ID NO: 720538 - DNA, 25 bp, Homo sapien
cagtttacagatccgggaacagaac

SEQ ID NO: 720539 - DNA, 25 bp, Homo sapien
tgcagcagtttacagatccgggaac

SEQ ID NO: 720540 - DNA, 25 bp, Homo sapien
gcaggtctacgcatgtcttctccag

SEQ ID NO: 720541 - DNA, 25 bp, Homo sapien
gctgttctgcgtgtggtcccaggcc

SEQ ID NO: 720542 - DNA, 25 bp, Homo sapien
atggcggcgcaaagcacctggagct

SEQ ID NO: 720543 - DNA, 25 bp, Homo sapien
gacatctctcgcaggatggcggcgc

SEQ ID NO: 720544 - DNA, 25 bp, Homo sapien
cggctctggcgcccctgcttcctgt

SEQ ID NO: 720545 - DNA, 25 bp, Homo sapien
cagccatccggtgccaactggggtg

SEQ ID NO: 720546 - DNA, 25 bp, Homo sapien
ccatccggtgccaactggggtggtg

SEQ ID NO: 720547 - DNA, 25 bp, Homo sapien
tccggtgccaactggggtggtgact

SEQ ID NO: 720548 - DNA, 25 bp, Homo sapien
ggggtcatctcggaggcctggaggt

SEQ ID NO: 720549 - DNA, 25 bp, Homo sapien
gggggctgggcaccaaccaggatga

SEQ ID NO: 720550 - DNA, 25 bp, Homo sapien
agtgatgaagtacaacgccctgagt

SEQ ID NO: 720551 - DNA, 25 bp, Homo sapien
aagtacaacgccctgagtacgccgg

SEQ ID NO: 720552 - DNA, 25 bp, Homo sapien
aagcgtcggtcgctgagaccccggc

SEQ ID NO: 720553 - DNA, 25 bp, Homo sapien
cagctcccccatttcggaagtctgt

SEQ ID NO: 720554 - DNA, 25 bp, Homo sapien
gacactcctgagaagcgtcggtcgc

SEQ ID NO: 720555 - DNA, 25 bp, Homo sapien
cccccatttcggaagtctgtgtgac

SEQ ID NO: 720556 - DNA, 25 bp, Homo sapien
aatcaaacagggcaaacgctggggt

SEQ ID NO: 720557 - DNA, 25 bp, Homo sapien
atcaaacagggcaaacgctggggta

SEQ ID NO: 720558 - DNA, 25 bp, Homo sapien
tcaaacagggcaaacgctggggtac

SEQ ID NO: 720559 - DNA, 25 bp, Homo sapien
tgccggctctccagcgctcgtagca

SEQ ID NO: 720560 - DNA, 25 bp, Homo sapien
tggcccacggctctgacctcctcgt

SEQ ID NO: 720561 - DNA, 25 bp, Homo sapien
ggctctgacctcctcgtttctgtca

SEQ ID NO: 720562 - DNA, 25 bp, Homo sapien
tccagcgctcgtagcacgccctggc

SEQ ID NO: 720563 - DNA, 25 bp, Homo sapien
cccgggctgaggaccacgaccttgg

SEQ ID NO: 720564 - DNA, 25 bp, Homo sapien
ggctgaggaccacgaccttggccat

SEQ ID NO: 720565 - DNA, 25 bp, Homo sapien
agggtgcccgggctgaggaccacga

SEQ ID NO: 720566 - DNA, 25 bp, Homo sapien
gtgcccgggctgaggaccacgacct

SEQ ID NO: 720567 - DNA, 25 bp, Homo sapien
tgctggccgacttttctcagaaaac

SEQ ID NO: 720568 - DNA, 25 bp, Homo sapien
ggttgaatcctacagatgcctgggt

SEQ ID NO: 720569 - DNA, 25 bp, Homo sapien
ttgttgggatgctggccgacttttc

SEQ ID NO: 720570 - DNA, 25 bp, Homo sapien
aaacagaatcctgcagcgtcccaaa

SEQ ID NO: 720571 - DNA, 25 bp, Homo sapien
agccagtcgaccagccgcttgctga

SEQ ID NO: 720572 - DNA, 25 bp, Homo sapien
tggaggctggcgtagcgcagccagt

SEQ ID NO: 720573 - DNA, 25 bp, Homo sapien
ccttgctggaggctggcgtagcgca

SEQ ID NO: 720574 - DNA, 25 bp, Homo sapien
cctgggcgtggagaagaagccgccg

SEQ ID NO: 720575 - DNA, 25 bp, Homo sapien
gtggccgctggagagcaccgtgaag

SEQ ID NO: 720576 - DNA, 25 bp, Homo sapien
agaagtctgtggctaccgccccgtc

SEQ ID NO: 720577 - DNA, 25 bp, Homo sapien
catagagaaggcctgcacgttcagc

SEQ ID NO: 720578 - DNA, 25 bp, Homo sapien
cgttcagccactggtcgtctgtgaa

SEQ ID NO: 720579 - DNA, 25 bp, Homo sapien
caatgaggcgctggcagtactcgaa

SEQ ID NO: 720580 - DNA, 25 bp, Homo sapien
gaggaggtggcggagatcaccgaca

SEQ ID NO: 720581 - DNA, 25 bp, Homo sapien
agatcaccgacagagtggagccctc

SEQ ID NO: 720582 - DNA, 25 bp, Homo sapien
tcggttactttgctcaatgaggcgc

SEQ ID NO: 720583 - DNA, 25 bp, Homo sapien
ttctgcaggtcggagtcccccttcc

SEQ ID NO: 720584 - DNA, 25 bp, Homo sapien
ctttctgcaggtcggagtccccctt

SEQ ID NO: 720585 - DNA, 25 bp, Homo sapien
gctttctgcaggtcggagtccccct

SEQ ID NO: 720586 - DNA, 25 bp, Homo sapien
agctttctgcaggtcggagtccccc

SEQ ID NO: 720587 - DNA, 25 bp, Homo sapien
tcaaatgggccgagtcgctgcctcc

SEQ ID NO: 720588 - DNA, 25 bp, Homo sapien
accacatcaaatgggccgagtcgct

SEQ ID NO: 720589 - DNA, 25 bp, Homo sapien
catcaaatgggccgagtcgctgcct

SEQ ID NO: 720590 - DNA, 25 bp, Homo sapien
aatgggccgagtcgctgcctcccat

SEQ ID NO: 720591 - DNA, 25 bp, Homo sapien
gtcctgccggcacagcacgtccagc

SEQ ID NO: 720592 - DNA, 25 bp, Homo sapien
tcaggcaggagagacttcggtacag

SEQ ID NO: 720593 - DNA, 25 bp, Homo sapien
agcacccgcacagaggccgggtccc

SEQ ID NO: 720594 - DNA, 25 bp, Homo sapien
agcagcacccgcacagaggccgggt

SEQ ID NO: 720595 - DNA, 25 bp, Homo sapien
tggatgaattcaaaggccagcatgg

SEQ ID NO: 720596 - DNA, 25 bp, Homo sapien
gaacaggtgctggtagacggcttcc

SEQ ID NO: 720597 - DNA, 25 bp, Homo sapien
aacaggtggaggttgtccctgcaga

SEQ ID NO: 720598 - DNA, 25 bp, Homo sapien
tccaccgggatcctggtgaacaggt

SEQ ID NO: 720599 - DNA, 25 bp, Homo sapien
ggcacccagggatgcccaaatatac

SEQ ID NO: 720600 - DNA, 25 bp, Homo sapien
cctggcacccagggatgcccaaata

SEQ ID NO: 720601 - DNA, 25 bp, Homo sapien
tggcacccagggatgcccaaatata

SEQ ID NO: 720602 - DNA, 25 bp, Homo sapien
gccctggcacccagggatgcccaaa

SEQ ID NO: 720603 - DNA, 25 bp, Homo sapien
aggcccgggactcacagggctctat

SEQ ID NO: 720604 - DNA, 25 bp, Homo sapien
ctcaccctgcacaccgcattccagg

SEQ ID NO: 720605 - DNA, 25 bp, Homo sapien
tgcacaccgcattccaggcccggga

SEQ ID NO: 720606 - DNA, 25 bp, Homo sapien
gactcacagggctctatgctcagcc

SEQ ID NO: 720607 - DNA, 25 bp, Homo sapien
tggacagcaccgtcaatcacgtgac

SEQ ID NO: 720608 - DNA, 25 bp, Homo sapien
ggagttcttggacagcaccgtcaat

SEQ ID NO: 720609 - DNA, 25 bp, Homo sapien
tcttggacagcaccgtcaatcacgt

SEQ ID NO: 720610 - DNA, 25 bp, Homo sapien
acacccacaagggagttcttggaca

SEQ ID NO: 720611 - DNA, 25 bp, Homo sapien
ccgggggagggatcctaccaggcag

SEQ ID NO: 720612 - DNA, 25 bp, Homo sapien
gccccagtgctgtgagaacaaactc

SEQ ID NO: 720613 - DNA, 25 bp, Homo sapien
caaatggcacccaagtgcccaaggc

SEQ ID NO: 720614 - DNA, 25 bp, Homo sapien
agggatcctaccaggcagcagccct

SEQ ID NO: 720615 - DNA, 25 bp, Homo sapien
agcacagcggttcggacacggctcg

SEQ ID NO: 720616 - DNA, 25 bp, Homo sapien
acagcggttcggacacggctcggag

SEQ ID NO: 720617 - DNA, 25 bp, Homo sapien
cacagcacagcggttcggacacggc

SEQ ID NO: 720618 - DNA, 25 bp, Homo sapien
gcacagcacagcggttcggacacgg

SEQ ID NO: 720619 - DNA, 25 bp, Homo sapien
ggagcgccacaaactcggaggtgag

SEQ ID NO: 720620 - DNA, 25 bp, Homo sapien
aggagcgccacaaactcggaggtga

SEQ ID NO: 720621 - DNA, 25 bp, Homo sapien
ctgagagaggtgtcccagagtggcc

SEQ ID NO: 720622 - DNA, 25 bp, Homo sapien
tcccagagtggcctctcggatgcag

SEQ ID NO: 720623 - DNA, 25 bp, Homo sapien
tggcctctcggatgcagccggtgct

SEQ ID NO: 720624 - DNA, 25 bp, Homo sapien
aggtgtcccagagtggcctctcgga

SEQ ID NO: 720625 - DNA, 25 bp, Homo sapien
ttggggcgcagcaggtattggaaaa

SEQ ID NO: 720626 - DNA, 25 bp, Homo sapien
cactggccttggggcgcagcaggta

SEQ ID NO: 720627 - DNA, 25 bp, Homo sapien
actgcgggtcccggaaggcctccag

SEQ ID NO: 720628 - DNA, 25 bp, Homo sapien
gcgcagcaggtattggaaaagaccc

SEQ ID NO: 720629 - DNA, 25 bp, Homo sapien
taaagccatcgggacaaaggctggc

SEQ ID NO: 720630 - DNA, 25 bp, Homo sapien
tcaggctcggtttgtccatctgcaa

SEQ ID NO: 720631 - DNA, 25 bp, Homo sapien
ttgtgtgggacacaaagcaccctgg

SEQ ID NO: 720632 - DNA, 25 bp, Homo sapien
gaagcagggcctctataatggtgat

SEQ ID NO: 720633 - DNA, 25 bp, Homo sapien
ggcacactgggccacgcgggcacag

SEQ ID NO: 720634 - DNA, 25 bp, Homo sapien
cacactgggccacgcgggcacagcc

SEQ ID NO: 720635 - DNA, 25 bp, Homo sapien
acgcgggcacagccggccatgggct

SEQ ID NO: 720636 - DNA, 25 bp, Homo sapien
gcgggcacagccggccatgggctgc

SEQ ID NO: 720637 - DNA, 25 bp, Homo sapien
ttgccctgtcctggggacggaagac

SEQ ID NO: 720638 - DNA, 25 bp, Homo sapien
tgccctgtcctggggacggaagaca

SEQ ID NO: 720639 - DNA, 25 bp, Homo sapien
ctggggacggaagacagggcctgct

SEQ ID NO: 720640 - DNA, 25 bp, Homo sapien
gtgcacaccggcagcgtaccctggg

SEQ ID NO: 720641 - DNA, 25 bp, Homo sapien
tggttgatcagggacccgtcagcca

SEQ ID NO: 720642 - DNA, 25 bp, Homo sapien
ggtagagcgagtcgctcctgcccag

SEQ ID NO: 720643 - DNA, 25 bp, Homo sapien
cagcgccagctggttgatcagggac

SEQ ID NO: 720644 - DNA, 25 bp, Homo sapien
aagagggacctgagctaaccctgaa

SEQ ID NO: 720645 - DNA, 25 bp, Homo sapien
cagaaagaaggacgggaatgttctt

SEQ ID NO: 720646 - DNA, 25 bp, Homo sapien
ggcagaaagaaggacgggaatgttc

SEQ ID NO: 720647 - DNA, 25 bp, Homo sapien
ggaagagggacctgagctaaccctg

SEQ ID NO: 720648 - DNA, 25 bp, Homo sapien
cctccgatagaggaacacagaagac

SEQ ID NO: 720649 - DNA, 25 bp, Homo sapien
tctgagtggtaggtgtatgctgcac

SEQ ID NO: 720650 - DNA, 25 bp, Homo sapien
gcctcagagaaactgttctcactgg

SEQ ID NO: 720651 - DNA, 25 bp, Homo sapien
ctggagaaacccgggaagcgtctga

SEQ ID NO: 720652 - DNA, 25 bp, Homo sapien
ctgcccagaaagccgggtctacgcc

SEQ ID NO: 720653 - DNA, 25 bp, Homo sapien
gcccagaaagccgggtctacgcctg

SEQ ID NO: 720654 - DNA, 25 bp, Homo sapien
tgtgcagacctatgaccccatcccc

SEQ ID NO: 720655 - DNA, 25 bp, Homo sapien
tgcccagaaagccgggtctacgcct

SEQ ID NO: 720656 - DNA, 25 bp, Homo sapien
gagggtttcagcgtacacagggcca

SEQ ID NO: 720657 - DNA, 25 bp, Homo sapien
gtttcagcgtacacagggccaggaa

SEQ ID NO: 720658 - DNA, 25 bp, Homo sapien
accagggagggtttcagcgtacaca

SEQ ID NO: 720659 - DNA, 25 bp, Homo sapien
caccaccagggagggtttcagcgta

SEQ ID NO: 720660 - DNA, 25 bp, Homo sapien
ggcccggggacagagattcagcccc

SEQ ID NO: 720661 - DNA, 25 bp, Homo sapien
ctgtgggaggccagcgcccgcctta

SEQ ID NO: 720662 - DNA, 25 bp, Homo sapien
ctaggcccggggacagagattcagc

SEQ ID NO: 720663 - DNA, 25 bp, Homo sapien
tgtgggaggccagcgcccgccttac

SEQ ID NO: 720664 - DNA, 25 bp, Homo sapien
tgggtgacctcgaatagcagagcct

SEQ ID NO: 720665 - DNA, 25 bp, Homo sapien
cacggtgcacctccgatcgtaggtc

SEQ ID NO: 720666 - DNA, 25 bp, Homo sapien
tcgtaggtcaccgacaggtactcgc

SEQ ID NO: 720667 - DNA, 25 bp, Homo sapien
gaagaacttgttgatctgctccacg

SEQ ID NO: 720668 - DNA, 25 bp, Homo sapien
gctccgggaggccagcttcgtcagc

SEQ ID NO: 720669 - DNA, 25 bp, Homo sapien
ggatcagatcttggctccgggaggc

SEQ ID NO: 720670 - DNA, 25 bp, Homo sapien
atcagatcttggctccgggaggcca

SEQ ID NO: 720671 - DNA, 25 bp, Homo sapien
aggccagcttcgtcagcgtggtcat

SEQ ID NO: 720672 - DNA, 25 bp, Homo sapien
aaagaaggtccctccgtcagctgca

SEQ ID NO: 720673 - DNA, 25 bp, Homo sapien
gcgctgctgcgaccatttcacaaca

SEQ ID NO: 720674 - DNA, 25 bp, Homo sapien
agtggctttagctcagcagggccca

SEQ ID NO: 720675 - DNA, 25 bp, Homo sapien
agcgcccagcagagtggctttagct

SEQ ID NO: 720676 - DNA, 25 bp, Homo sapien
gctggactgtgagccagggtcctca

SEQ ID NO: 720677 - DNA, 25 bp, Homo sapien
tggctggactgtgagccagggtcct

SEQ ID NO: 720678 - DNA, 25 bp, Homo sapien
gagctggtggctggactgtgagcca

SEQ ID NO: 720679 - DNA, 25 bp, Homo sapien
ggtggctggactgtgagccagggtc

SEQ ID NO: 720680 - DNA, 25 bp, Homo sapien
ccgtgttggcatcgcggtgatagcg

SEQ ID NO: 720681 - DNA, 25 bp, Homo sapien
tctgtggcccgggtacggatggctt

SEQ ID NO: 720682 - DNA, 25 bp, Homo sapien
ggtgtgagcacaaactgggccacgc

SEQ ID NO: 720683 - DNA, 25 bp, Homo sapien
ggctgcacacctccgtgctgggtgt

SEQ ID NO: 720684 - DNA, 25 bp, Homo sapien
tcaccctggcatgaggccggcctcc

SEQ ID NO: 720685 - DNA, 25 bp, Homo sapien
ccctggcatgaggccggcctccctc

SEQ ID NO: 720686 - DNA, 25 bp, Homo sapien
ttccgggctgtgcacaaatgacctg

SEQ ID NO: 720687 - DNA, 25 bp, Homo sapien
cacagctgtgccttggtagtccgga

SEQ ID NO: 720688 - DNA, 25 bp, Homo sapien
cacgccttggtatgcacagttgtac

SEQ ID NO: 720689 - DNA, 25 bp, Homo sapien
tcttaatctgcaccgaagtccctgg

SEQ ID NO: 720690 - DNA, 25 bp, Homo sapien
gagcgaacaaacaaagcatcccggt

SEQ ID NO: 720691 - DNA, 25 bp, Homo sapien
caaagagcgaacaaacaaagcatcc

SEQ ID NO: 720692 - DNA, 25 bp, Homo sapien
gaacaaacaaagcatcccggtgtgg

SEQ ID NO: 720693 - DNA, 25 bp, Homo sapien
caaacaaagcatcccggtgtggaag

SEQ ID NO: 720694 - DNA, 25 bp, Homo sapien
tgagtcatgcagtatgtggccttgg

SEQ ID NO: 720695 - DNA, 25 bp, Homo sapien
ctgagtcatgcagtatgtggccttg

SEQ ID NO: 720696 - DNA, 25 bp, Homo sapien
taattatagatccaaaggaagctgc

SEQ ID NO: 720697 - DNA, 25 bp, Homo sapien
caatggcaagcagcacgttcacagt

SEQ ID NO: 720698 - DNA, 25 bp, Homo sapien
caaaaatagcagagtcccgtgtacc

SEQ ID NO: 720699 - DNA, 25 bp, Homo sapien
ggaaaacacggccactaagcaggct

SEQ ID NO: 720700 - DNA, 25 bp, Homo sapien
ggccgctgaagcacctagctgaggt

SEQ ID NO: 720701 - DNA, 25 bp, Homo sapien
ctgatttgatgccttaacggtggaa

SEQ ID NO: 720702 - DNA, 25 bp, Homo sapien
cacaacgtgtgtgttagcactgccg

SEQ ID NO: 720703 - DNA, 25 bp, Homo sapien
tcagcatccatggaaagaagctctt

SEQ ID NO: 720704 - DNA, 25 bp, Homo sapien
gatcatctgaactgactctccctgc

SEQ ID NO: 720705 - DNA, 25 bp, Homo sapien
aagtggaccggcctgatggtctctg

SEQ ID NO: 720706 - DNA, 25 bp, Homo sapien
gggtcatctttgatagcaacagaga

SEQ ID NO: 720707 - DNA, 25 bp, Homo sapien
cacccaggcgttggaaagtggaccg

SEQ ID NO: 720708 - DNA, 25 bp, Homo sapien
ggcacagtgttgaggttggcagagc

SEQ ID NO: 720709 - DNA, 25 bp, Homo sapien
cttgtccaagggcttggcgcaccat

SEQ ID NO: 720710 - DNA, 25 bp, Homo sapien
gcgccgtcgggccaccttgtgtgtc

SEQ ID NO: 720711 - DNA, 25 bp, Homo sapien
tgtgaatatcctttgccggcactcg

SEQ ID NO: 720712 - DNA, 25 bp, Homo sapien
gattctcctcgtggctggagctcag

SEQ ID NO: 720713 - DNA, 25 bp, Homo sapien
cgtgggcgtcggaaatcctcagaaa

SEQ ID NO: 720714 - DNA, 25 bp, Homo sapien
tcttctttagggatagggccagctt

SEQ ID NO: 720715 - DNA, 25 bp, Homo sapien
tggtgtgtcctcttaatggctcgtg

SEQ ID NO: 720716 - DNA, 25 bp, Homo sapien
tccgggtgtcgagggccaggcaggc

SEQ ID NO: 720717 - DNA, 25 bp, Homo sapien
gggatgcctgcaggctccgggtgtc

SEQ ID NO: 720718 - DNA, 25 bp, Homo sapien
cctgagcagtgtttggcccggcgat

SEQ ID NO: 720719 - DNA, 25 bp, Homo sapien
caggcaggcaccagggaacagagtg

SEQ ID NO: 720720 - DNA, 25 bp, Homo sapien
tttctactccttctatcccattgtc

SEQ ID NO: 720721 - DNA, 25 bp, Homo sapien
tactccttctatcccattgtcaaag

SEQ ID NO: 720722 - DNA, 25 bp, Homo sapien
tctactccttctatcccattgtcaa

SEQ ID NO: 720723 - DNA, 25 bp, Homo sapien
tccttctatcccattgtcaaaggca

SEQ ID NO: 720724 - DNA, 25 bp, Homo sapien
gaagatgtcaacaacgaccgtccca

SEQ ID NO: 720725 - DNA, 25 bp, Homo sapien
gaagaagatgtcaacaacgaccgtc

SEQ ID NO: 720726 - DNA, 25 bp, Homo sapien
agatgtcaacaacgaccgtcccatc

SEQ ID NO: 720727 - DNA, 25 bp, Homo sapien
aagaagatgtcaacaacgaccgtcc

SEQ ID NO: 720728 - DNA, 25 bp, Homo sapien
ggaggaaggccgctaacagagcttc

SEQ ID NO: 720729 - DNA, 25 bp, Homo sapien
aaggccgctaacagagcttcaggga

SEQ ID NO: 720730 - DNA, 25 bp, Homo sapien
gaggaaggccgctaacagagcttca

SEQ ID NO: 720731 - DNA, 25 bp, Homo sapien
ggaaggccgctaacagagcttcagg

SEQ ID NO: 720732 - DNA, 25 bp, Homo sapien
gaggatgtgctcagcagctcggctt

SEQ ID NO: 720733 - DNA, 25 bp, Homo sapien
aggatgtgctcagcagctcggcttg

SEQ ID NO: 720734 - DNA, 25 bp, Homo sapien
gagctggtgacggtcaccagctgct

SEQ ID NO: 720735 - DNA, 25 bp, Homo sapien
cagctgcttgtccagtttccctgtg

SEQ ID NO: 720736 - DNA, 25 bp, Homo sapien
tgccagcagcgggtcactaggcact

SEQ ID NO: 720737 - DNA, 25 bp, Homo sapien
cagagtccgtgggagctggtgacgg

SEQ ID NO: 720738 - DNA, 25 bp, Homo sapien
agtaaggctgcctctgacctgccaa

SEQ ID NO: 720739 - DNA, 25 bp, Homo sapien
tgatgtcacaggaatctctgggaga

SEQ ID NO: 720740 - DNA, 25 bp, Homo sapien
tgctggtgatgtcacaggaatctct

SEQ ID NO: 720741 - DNA, 25 bp, Homo sapien
ggagatgattggtgggtgagagccc

SEQ ID NO: 720742 - DNA, 25 bp, Homo sapien
caggctctgccagctacccgcgctc

SEQ ID NO: 720743 - DNA, 25 bp, Homo sapien
gctctgccagctacccgcgctctga

SEQ ID NO: 720744 - DNA, 25 bp, Homo sapien
ccagctacccgcgctctgagcccgg

SEQ ID NO: 720745 - DNA, 25 bp, Homo sapien
ctctgccagctacccgcgctctgag

SEQ ID NO: 720746 - DNA, 25 bp, Homo sapien
gtcccggtgcagtggacagcgaggc

SEQ ID NO: 720747 - DNA, 25 bp, Homo sapien
gagcaagggccatagaagtcaaggt

SEQ ID NO: 720748 - DNA, 25 bp, Homo sapien
gggtcagagcaagggccatagaagt

SEQ ID NO: 720749 - DNA, 25 bp, Homo sapien
aagggccatagaagtcaaggtcagg

SEQ ID NO: 720750 - DNA, 25 bp, Homo sapien
atcttttgctcttggagaaacagaa

SEQ ID NO: 720751 - DNA, 25 bp, Homo sapien
tttgctcttggagaaacagaaaatc

SEQ ID NO: 720752 - DNA, 25 bp, Homo sapien
tctgcggccctaaagattccattgc

SEQ ID NO: 720753 - DNA, 25 bp, Homo sapien
aggtcggctcgaaggtcaacagcag

SEQ ID NO: 720754 - DNA, 25 bp, Homo sapien
tctcattttagactacaatttatct

SEQ ID NO: 720755 - DNA, 25 bp, Homo sapien
tctttctgtagtttcacacacatgg

SEQ ID NO: 720756 - DNA, 25 bp, Homo sapien
ttctcattttagactacaatttatc

SEQ ID NO: 720757 - DNA, 25 bp, Homo sapien
ctttctgtagtttcacacacatggg

SEQ ID NO: 720758 - DNA, 25 bp, Homo sapien
gccgtatctacatgaaggtgtgctg

SEQ ID NO: 720759 - DNA, 25 bp, Homo sapien
ccaagaactgtcatcagccgtatct

SEQ ID NO: 720760 - DNA, 25 bp, Homo sapien
tggaggaccgccattattcacaatt

SEQ ID NO: 720761 - DNA, 25 bp, Homo sapien
catcagccgtatctacatgaaggtg

SEQ ID NO: 720762 - DNA, 25 bp, Homo sapien
gctctccgcctacggagacttgact

SEQ ID NO: 720763 - DNA, 25 bp, Homo sapien
gctggaggatgaaaggaacggagac

SEQ ID NO: 720764 - DNA, 25 bp, Homo sapien
cgggctctccgcctacggagacttg

SEQ ID NO: 720765 - DNA, 25 bp, Homo sapien
tggaggatgaaaggaacggagaccc

SEQ ID NO: 720766 - DNA, 25 bp, Homo sapien
gagggcagcctagccgcgcctgcat

SEQ ID NO: 720767 - DNA, 25 bp, Homo sapien
atagagagggcagcctagccgcgcc

SEQ ID NO: 720768 - DNA, 25 bp, Homo sapien
agagagggcagcctagccgcgcctg

SEQ ID NO: 720769 - DNA, 25 bp, Homo sapien
agagggcagcctagccgcgcctgca

SEQ ID NO: 720770 - DNA, 25 bp, Homo sapien
aaagctgcagctacgagctccgtgg

SEQ ID NO: 720771 - DNA, 25 bp, Homo sapien
gcgcaagcgtacagcgcgcgtacag

SEQ ID NO: 720772 - DNA, 25 bp, Homo sapien
gaagaaccatagaggcactccgggt

SEQ ID NO: 720773 - DNA, 25 bp, Homo sapien
tcccgactaacgacaggaagaacca

SEQ ID NO: 720774 - DNA, 25 bp, Homo sapien
aaatgcagacatgcacatacgggac

SEQ ID NO: 720775 - DNA, 25 bp, Homo sapien
tacgggactgctaatatctaaacat

SEQ ID NO: 720776 - DNA, 25 bp, Homo sapien
gcacatacgggactgctaatatcta

SEQ ID NO: 720777 - DNA, 25 bp, Homo sapien
catggtgaccatctgtttcaaaaga

SEQ ID NO: 720778 - DNA, 25 bp, Homo sapien
tccccgatggcagtgaaagttgttc

SEQ ID NO: 720779 - DNA, 25 bp, Homo sapien
ccccgatggcagtgaaagttgttca

SEQ ID NO: 720780 - DNA, 25 bp, Homo sapien
tggacttagagacttggagactgtg

SEQ ID NO: 720781 - DNA, 25 bp, Homo sapien
aagagaaatttgtgggctagaagac

SEQ ID NO: 720782 - DNA, 25 bp, Homo sapien
gacaaagaggtggacttagagactt

SEQ ID NO: 720783 - DNA, 25 bp, Homo sapien
aggtggacttagagacttggagact

SEQ ID NO: 720784 - DNA, 25 bp, Homo sapien
tcatatgacctcatgcttgagctga

SEQ ID NO: 720785 - DNA, 25 bp, Homo sapien
tctacagaaacaagtggtagcctct

SEQ ID NO: 720786 - DNA, 25 bp, Homo sapien
gaagcctgtcggacttcagtctgcc

SEQ ID NO: 720787 - DNA, 25 bp, Homo sapien
cttgagctgatctgacatgctagca

SEQ ID NO: 720788 - DNA, 25 bp, Homo sapien
gggatttataatgattctgtcttct

SEQ ID NO: 720789 - DNA, 25 bp, Homo sapien
ctgctactgggatttataatgattc

SEQ ID NO: 720790 - DNA, 25 bp, Homo sapien
tggataatctgggttttccagaaga

SEQ ID NO: 720791 - DNA, 25 bp, Homo sapien
ttggctggccagcagactgctactg

SEQ ID NO: 720792 - DNA, 25 bp, Homo sapien
ctggtcaagaggagtcaatttagaa

SEQ ID NO: 720793 - DNA, 25 bp, Homo sapien
ggagtcaatttagaatagtcaaaaa

SEQ ID NO: 720794 - DNA, 25 bp, Homo sapien
ggtcaagaggagtcaatttagaata

SEQ ID NO: 720795 - DNA, 25 bp, Homo sapien
tcaagaggagtcaatttagaatagt

SEQ ID NO: 720796 - DNA, 25 bp, Homo sapien
gaggaggtcagcagcttggatgaag

SEQ ID NO: 720797 - DNA, 25 bp, Homo sapien
ggtcagcagcttggatgaagcagtg

SEQ ID NO: 720798 - DNA, 25 bp, Homo sapien
ggaggtcagcagcttggatgaagca

SEQ ID NO: 720799 - DNA, 25 bp, Homo sapien
aggtcagcagcttggatgaagcagt

SEQ ID NO: 720800 - DNA, 25 bp, Homo sapien
tcgggtgattgcatagtgtcctttg

SEQ ID NO: 720801 - DNA, 25 bp, Homo sapien
gtgtcctttgagctcgtgcagggcc

SEQ ID NO: 720802 - DNA, 25 bp, Homo sapien
ctttcgggtgattgcatagtgtcct

SEQ ID NO: 720803 - DNA, 25 bp, Homo sapien
gactactgagcactttgaagtcggc

SEQ ID NO: 720804 - DNA, 25 bp, Homo sapien
tgtagtcaagaggtgtgaccccaac

SEQ ID NO: 720805 - DNA, 25 bp, Homo sapien
gaccccaacaggaagaccaagtaga

SEQ ID NO: 720806 - DNA, 25 bp, Homo sapien
agtcaagaggtgtgaccccaacagg

SEQ ID NO: 720807 - DNA, 25 bp, Homo sapien
gaagatgtagtcaagaggtgtgacc

SEQ ID NO: 720808 - DNA, 25 bp, Homo sapien
cctcatcctggctggtgagattttc

SEQ ID NO: 720809 - DNA, 25 bp, Homo sapien
catcctggctggtgagattttccat

SEQ ID NO: 720810 - DNA, 25 bp, Homo sapien
cctggctggtgagattttccatatg

SEQ ID NO: 720811 - DNA, 25 bp, Homo sapien
ggtatctctgggtacctcatcctgg

SEQ ID NO: 720812 - DNA, 25 bp, Homo sapien
catgtcctgtggctacgctgttagg

SEQ ID NO: 720813 - DNA, 25 bp, Homo sapien
tttcaggaagactgggtgggactcc

SEQ ID NO: 720814 - DNA, 25 bp, Homo sapien
gctcagaaggtgatctcatctctct

SEQ ID NO: 720815 - DNA, 25 bp, Homo sapien
taatccccagtgtggcggtgctcag

SEQ ID NO: 720816 - DNA, 25 bp, Homo sapien
gtttctggtgatagctcctgccatt

SEQ ID NO: 720817 - DNA, 25 bp, Homo sapien
ggtgatagctcctgccattttttaa

SEQ ID NO: 720818 - DNA, 25 bp, Homo sapien
actggtttctggtgatagctcctgc

SEQ ID NO: 720819 - DNA, 25 bp, Homo sapien
ttccactggtttctggtgatagctc

SEQ ID NO: 720820 - DNA, 25 bp, Homo sapien
cttgttcaaacttgaaatcaattta

SEQ ID NO: 720821 - DNA, 25 bp, Homo sapien
caaacttgaaatcaatttaagaata

SEQ ID NO: 720822 - DNA, 25 bp, Homo sapien
aacttgaaatcaatttaagaatact

SEQ ID NO: 720823 - DNA, 25 bp, Homo sapien
ttgaaatcaatttaagaatactggt

SEQ ID NO: 720824 - DNA, 25 bp, Homo sapien
ctgactgtgaagaaggtacggtgtt

SEQ ID NO: 720825 - DNA, 25 bp, Homo sapien
gagaaaatagttcctgtccagatgc

SEQ ID NO: 720826 - DNA, 25 bp, Homo sapien
tacggtgttgcagctacacactgcc

SEQ ID NO: 720827 - DNA, 25 bp, Homo sapien
ctaaaaattttgacgtgctgagaaa

SEQ ID NO: 720828 - DNA, 25 bp, Homo sapien
tgtagtttatcacgttaaagtagta

SEQ ID NO: 720829 - DNA, 25 bp, Homo sapien
gcacttagaaaagtgactggtacat

SEQ ID NO: 720830 - DNA, 25 bp, Homo sapien
catctttactcggttctttttgtag

SEQ ID NO: 720831 - DNA, 25 bp, Homo sapien
tactataattatcaatgctacaaat

SEQ ID NO: 720832 - DNA, 25 bp, Homo sapien
cctattgggagggaatcccattcac

SEQ ID NO: 720833 - DNA, 25 bp, Homo sapien
gacagacaggcctgaggtacccatt

SEQ ID NO: 720834 - DNA, 25 bp, Homo sapien
tacccattggcatgaagagtaagtg

SEQ ID NO: 720835 - DNA, 25 bp, Homo sapien
actttgctctcagttgcctattggg

SEQ ID NO: 720836 - DNA, 25 bp, Homo sapien
ggccaggccagatgggatcagactc

SEQ ID NO: 720837 - DNA, 25 bp, Homo sapien
gggcaagaggacacttgcctcttgg

SEQ ID NO: 720838 - DNA, 25 bp, Homo sapien
gccagatgggatcagactctgcctt

SEQ ID NO: 720839 - DNA, 25 bp, Homo sapien
ctgtgggcaagaggacacttgcctc

SEQ ID NO: 720840 - DNA, 25 bp, Homo sapien
atctaatgaatgcacacaggtccaa

SEQ ID NO: 720841 - DNA, 25 bp, Homo sapien
cagcctcccacccatctaatgaatg

SEQ ID NO: 720842 - DNA, 25 bp, Homo sapien
cccatctaatgaatgcacacaggtc

SEQ ID NO: 720843 - DNA, 25 bp, Homo sapien
gagggccaggttagcgtcctgtgaa

SEQ ID NO: 720844 - DNA, 25 bp, Homo sapien
ctgctgccacaccagcagcccctgc

SEQ ID NO: 720845 - DNA, 25 bp, Homo sapien
gccacaccagcagcccctgcccccg

SEQ ID NO: 720846 - DNA, 25 bp, Homo sapien
acaccagcagcccctgcccccgctc

SEQ ID NO: 720847 - DNA, 25 bp, Homo sapien
tgctgccacaccagcagcccctgcc

SEQ ID NO: 720848 - DNA, 25 bp, Homo sapien
catgctgatatccagggagaggaaa

SEQ ID NO: 720849 - DNA, 25 bp, Homo sapien
cgtctccaaggtctcaaagagccgc

SEQ ID NO: 720850 - DNA, 25 bp, Homo sapien
tctccaaggtctcaaagagccgcag

SEQ ID NO: 720851 - DNA, 25 bp, Homo sapien
agaggaaattggcgtaggccaagtc

SEQ ID NO: 720852 - DNA, 25 bp, Homo sapien
taacagcagcgaaagagaggtttgc

SEQ ID NO: 720853 - DNA, 25 bp, Homo sapien
gaggcacaatgaaaacccgactgga

SEQ ID NO: 720854 - DNA, 25 bp, Homo sapien
tacaattaagacttgtgggccaggc

SEQ ID NO: 720855 - DNA, 25 bp, Homo sapien
ttttagtctatcatcctggcagcgc

SEQ ID NO: 720856 - DNA, 25 bp, Homo sapien
tgagctcctcgagggtagaaaacag

SEQ ID NO: 720857 - DNA, 25 bp, Homo sapien
tctgagctcctcgagggtagaaaac

SEQ ID NO: 720858 - DNA, 25 bp, Homo sapien
gagctcctcgagggtagaaaacaga

SEQ ID NO: 720859 - DNA, 25 bp, Homo sapien
ctgagctcctcgagggtagaaaaca

SEQ ID NO: 720860 - DNA, 25 bp, Homo sapien
agcagtgcccacgagatgcccagga

SEQ ID NO: 720861 - DNA, 25 bp, Homo sapien
tcgagcagtgcccacgagatgccca

SEQ ID NO: 720862 - DNA, 25 bp, Homo sapien
cgagcagtgcccacgagatgcccag

SEQ ID NO: 720863 - DNA, 25 bp, Homo sapien
gagcagtgcccacgagatgcccagg

SEQ ID NO: 720864 - DNA, 25 bp, Homo sapien
cagcatgaagtctgtgccttgaagc

SEQ ID NO: 720865 - DNA, 25 bp, Homo sapien
gtctgtgccttgaagccaaacccag

SEQ ID NO: 720866 - DNA, 25 bp, Homo sapien
gcccaggaaatgcagggctacatac

SEQ ID NO: 720867 - DNA, 25 bp, Homo sapien
tgaagtctgtgccttgaagccaaac

SEQ ID NO: 720868 - DNA, 25 bp, Homo sapien
ttgaaccaggagaaatagaggatac

SEQ ID NO: 720869 - DNA, 25 bp, Homo sapien
caggagaaatagaggatactcggaa

SEQ ID NO: 720870 - DNA, 25 bp, Homo sapien
gtgtggccctcagccacgttgaacc

SEQ ID NO: 720871 - DNA, 25 bp, Homo sapien
tggccctcagccacgttgaaccagg

SEQ ID NO: 720872 - DNA, 25 bp, Homo sapien
ccaggagaatgctgtcactcaggag

SEQ ID NO: 720873 - DNA, 25 bp, Homo sapien
aggagaatgctgtcactcaggagga

SEQ ID NO: 720874 - DNA, 25 bp, Homo sapien
caggagaatgctgtcactcaggagg

SEQ ID NO: 720875 - DNA, 25 bp, Homo sapien
gcagaggcatcccactcttgctgag

SEQ ID NO: 720876 - DNA, 25 bp, Homo sapien
gacttccggcatttgagatctaacc

SEQ ID NO: 720877 - DNA, 25 bp, Homo sapien
gaagcccctataccaatcattttag

SEQ ID NO: 720878 - DNA, 25 bp, Homo sapien
tctgaggaaagtagactctgggtcc

SEQ ID NO: 720879 - DNA, 25 bp, Homo sapien
aacagtgggtaaagataacaggtgg

SEQ ID NO: 720880 - DNA, 25 bp, Homo sapien
ccaataaatctgtgaaacggtgacc

SEQ ID NO: 720881 - DNA, 25 bp, Homo sapien
aagggcggttggacctacttgctgt

SEQ ID NO: 720882 - DNA, 25 bp, Homo sapien
caaaggagaacaataaccagattcc

SEQ ID NO: 720883 - DNA, 25 bp, Homo sapien
aacagtgttgagactatggcaggac

SEQ ID NO: 720884 - DNA, 25 bp, Homo sapien
aaaccgagtttgattctagcaaaga

SEQ ID NO: 720885 - DNA, 25 bp, Homo sapien
gcaaagatttagatagataatggaa

SEQ ID NO: 720886 - DNA, 25 bp, Homo sapien
gagtcaagctgtataactctacttc

SEQ ID NO: 720887 - DNA, 25 bp, Homo sapien
tgcacattagactgacccaggaaga

SEQ ID NO: 720888 - DNA, 25 bp, Homo sapien
tataatgtaatccaccagagacgtg

SEQ ID NO: 720889 - DNA, 25 bp, Homo sapien
gggaccagatcctacgactctatgg

SEQ ID NO: 720890 - DNA, 25 bp, Homo sapien
gatgatacgaacactaacttggtgg

SEQ ID NO: 720891 - DNA, 25 bp, Homo sapien
tgtgtggtcctcagaaacagggacc

SEQ ID NO: 720892 - DNA, 25 bp, Homo sapien
acagacaccctcgattgctggagga

SEQ ID NO: 720893 - DNA, 25 bp, Homo sapien
tataggcatgtgtggccattcccgg

SEQ ID NO: 720894 - DNA, 25 bp, Homo sapien
gctggaggaccatcttcagagagga

SEQ ID NO: 720895 - DNA, 25 bp, Homo sapien
taccttgtcgatgatctgttggctg

SEQ ID NO: 720896 - DNA, 25 bp, Homo sapien
gtcgatgatctgttggctgtagtat

SEQ ID NO: 720897 - DNA, 25 bp, Homo sapien
tttatttccgcgctctttattctgt

SEQ ID NO: 720898 - DNA, 25 bp, Homo sapien
agtttttgtttaccttgtcgatgat

SEQ ID NO: 720899 - DNA, 25 bp, Homo sapien
tggcacgtgctacaactcaggactt

SEQ ID NO: 720900 - DNA, 25 bp, Homo sapien
caggtttcaacagtccaagaggcag

SEQ ID NO: 720901 - DNA, 25 bp, Homo sapien
gaaagtatgttacaccaacagcacg

SEQ ID NO: 720902 - DNA, 25 bp, Homo sapien
catacttggaagcagctatggcgga

SEQ ID NO: 720903 - DNA, 25 bp, Homo sapien
tttcaacaagcagatcccacgaggg

SEQ ID NO: 720904 - DNA, 25 bp, Homo sapien
cacttttcaacaagcagatcccacg

SEQ ID NO: 720905 - DNA, 25 bp, Homo sapien
agcagatcccacgagggctcactca

SEQ ID NO: 720906 - DNA, 25 bp, Homo sapien
gcacacttttcaacaagcagatccc

SEQ ID NO: 720907 - DNA, 25 bp, Homo sapien
cacacccagccgacttctagagttt

SEQ ID NO: 720908 - DNA, 25 bp, Homo sapien
ccatgatgcgatctggaaaacaggg

SEQ ID NO: 720909 - DNA, 25 bp, Homo sapien
aagggcagcacgtgtagttgacaac

SEQ ID NO: 720910 - DNA, 25 bp, Homo sapien
agccctgggcctaagagagtacaag

SEQ ID NO: 720911 - DNA, 25 bp, Homo sapien
aaatgtgtcaggtggtcctcagcac

SEQ ID NO: 720912 - DNA, 25 bp, Homo sapien
gaaagtgcctccaggactcgatgtc

SEQ ID NO: 720913 - DNA, 25 bp, Homo sapien
acatcctgagtctggtgaaaagcag

SEQ ID NO: 720914 - DNA, 25 bp, Homo sapien
ctgggaccccgaggcaaaatgtgtc

SEQ ID NO: 720915 - DNA, 25 bp, Homo sapien
gagccactgttctcgaccaagcatg

SEQ ID NO: 720916 - DNA, 25 bp, Homo sapien
tgatgtgtatcaccgaccagggaag

SEQ ID NO: 720917 - DNA, 25 bp, Homo sapien
gacaaaagcagagacgcatagtgga

SEQ ID NO: 720918 - DNA, 25 bp, Homo sapien
tagtggaaactctgagagcgtccca

SEQ ID NO: 720919 - DNA, 25 bp, Homo sapien
tagccttgtcccacaagctttggtt

SEQ ID NO: 720920 - DNA, 25 bp, Homo sapien
ctcagatagccttgtcccacaagct

SEQ ID NO: 720921 - DNA, 25 bp, Homo sapien
cttgtcccacaagctttggttccag

SEQ ID NO: 720922 - DNA, 25 bp, Homo sapien
agatagccttgtcccacaagctttg

SEQ ID NO: 720923 - DNA, 25 bp, Homo sapien
ttccaacttctgcatgcccatagct

SEQ ID NO: 720924 - DNA, 25 bp, Homo sapien
cttccaacttctgcatgcccatagc

SEQ ID NO: 720925 - DNA, 25 bp, Homo sapien
ttctgcatgcccatagctctccagt

SEQ ID NO: 720926 - DNA, 25 bp, Homo sapien
tgcatgcccatagctctccagttac

SEQ ID NO: 720927 - DNA, 25 bp, Homo sapien
cagccattgctgtattcaactgcat

SEQ ID NO: 720928 - DNA, 25 bp, Homo sapien
gcagccattgctgtattcaactgca

SEQ ID NO: 720929 - DNA, 25 bp, Homo sapien
tgcagccattgctgtattcaactgc

SEQ ID NO: 720930 - DNA, 25 bp, Homo sapien
ctgcagccattgctgtattcaactg

SEQ ID NO: 720931 - DNA, 25 bp, Homo sapien
gccccgcaggctccgcgattctcgt

SEQ ID NO: 720932 - DNA, 25 bp, Homo sapien
aggctccgcgattctcgtccactgg

SEQ ID NO: 720933 - DNA, 25 bp, Homo sapien
tccgcgattctcgtccactggaggc

SEQ ID NO: 720934 - DNA, 25 bp, Homo sapien
cgcgattctcgtccactggaggcca

SEQ ID NO: 720935 - DNA, 25 bp, Homo sapien
ctgggccaggccgccaggacacaca

SEQ ID NO: 720936 - DNA, 25 bp, Homo sapien
gctcaccgtacagcggcagcctggg

SEQ ID NO: 720937 - DNA, 25 bp, Homo sapien
cgcgcgaaccctggcctgcacaccc

SEQ ID NO: 720938 - DNA, 25 bp, Homo sapien
tcaagctcgggggtccccgctcaag

SEQ ID NO: 720939 - DNA, 25 bp, Homo sapien
cctgtccacctcactaaggttgttc

SEQ ID NO: 720940 - DNA, 25 bp, Homo sapien
cctcactaaggttgttctgctcccg

SEQ ID NO: 720941 - DNA, 25 bp, Homo sapien
tcactaaggttgttctgctcccgag

SEQ ID NO: 720942 - DNA, 25 bp, Homo sapien
ctcctgtccacctcactaaggttgt

SEQ ID NO: 720943 - DNA, 25 bp, Homo sapien
gtgatccgccttccttggccaatat

SEQ ID NO: 720944 - DNA, 25 bp, Homo sapien
tccgccttccttggccaatatggcg

SEQ ID NO: 720945 - DNA, 25 bp, Homo sapien
gatccgccttccttggccaatatgg

SEQ ID NO: 720946 - DNA, 25 bp, Homo sapien
ccgccttccttggccaatatggcga

SEQ ID NO: 720947 - DNA, 25 bp, Homo sapien
gctgctcttggaaacgtgcagagac

SEQ ID NO: 720948 - DNA, 25 bp, Homo sapien
ttggaaacgtgcagagactgtggct

SEQ ID NO: 720949 - DNA, 25 bp, Homo sapien
tcttggaaacgtgcagagactgtgg

SEQ ID NO: 720950 - DNA, 25 bp, Homo sapien
cgtgcagagactgtggctggtagac

SEQ ID NO: 720951 - DNA, 25 bp, Homo sapien
caaccagagcagaacaagccatctt

SEQ ID NO: 720952 - DNA, 25 bp, Homo sapien
tgaacaacacaaccaaccaacttga

SEQ ID NO: 720953 - DNA, 25 bp, Homo sapien
aaagagaaccacaaatgcagcagat

SEQ ID NO: 720954 - DNA, 25 bp, Homo sapien
tacaagtaggcacacaatcaacaag

SEQ ID NO: 720955 - DNA, 25 bp, Homo sapien
gatataccatgcatgcattactcaa

SEQ ID NO: 720956 - DNA, 25 bp, Homo sapien
tgcattactcaaaagaatgctacat

SEQ ID NO: 720957 - DNA, 25 bp, Homo sapien
taagatataccatgcatgcattact

SEQ ID NO: 720958 - DNA, 25 bp, Homo sapien
accatgcatgcattactcaaaagaa

SEQ ID NO: 720959 - DNA, 25 bp, Homo sapien
cactgattatcaggcagtagagtta

SEQ ID NO: 720960 - DNA, 25 bp, Homo sapien
atcaggcagtagagttatctatgag

SEQ ID NO: 720961 - DNA, 25 bp, Homo sapien
cccgggctgaagcaatggttttcaa

SEQ ID NO: 720962 - DNA, 25 bp, Homo sapien
tttcaaggcactgattatcaggcag

SEQ ID NO: 720963 - DNA, 25 bp, Homo sapien
tgtacaaagtaccaatggcaaacgg

SEQ ID NO: 720964 - DNA, 25 bp, Homo sapien
aatggcaaacgggaagcagcttcaa

SEQ ID NO: 720965 - DNA, 25 bp, Homo sapien
tgaggtgtacaaagtaccaatggca

SEQ ID NO: 720966 - DNA, 25 bp, Homo sapien
taccaatggcaaacgggaagcagct

SEQ ID NO: 720967 - DNA, 25 bp, Homo sapien
tcctggtcctcttcctcctaactca

SEQ ID NO: 720968 - DNA, 25 bp, Homo sapien
ccacagaaactagatggctatagtt

SEQ ID NO: 720969 - DNA, 25 bp, Homo sapien
tatcttctcatcagggtccagctgc

SEQ ID NO: 720970 - DNA, 25 bp, Homo sapien
acatccctgtaagttatcttctcat

SEQ ID NO: 720971 - DNA, 25 bp, Homo sapien
acagaaactagatggctatagttct

SEQ ID NO: 720972 - DNA, 25 bp, Homo sapien
cttaatgatgacgtttggcttggtg

SEQ ID NO: 720973 - DNA, 25 bp, Homo sapien
caacttaatgatgacgtttggcttg

SEQ ID NO: 720974 - DNA, 25 bp, Homo sapien
tgctccaacttaatgatgacgtttg

SEQ ID NO: 720975 - DNA, 25 bp, Homo sapien
tccctgctccaacttaatgatgacg

SEQ ID NO: 720976 - DNA, 25 bp, Homo sapien
ctggactatgttgacatggaaattc

SEQ ID NO: 720977 - DNA, 25 bp, Homo sapien
ggactatgttgacatggaaattcac

SEQ ID NO: 720978 - DNA, 25 bp, Homo sapien
tggactatgttgacatggaaattca

SEQ ID NO: 720979 - DNA, 25 bp, Homo sapien
cagttcacaagcataggtggaggat

SEQ ID NO: 720980 - DNA, 25 bp, Homo sapien
gttcacaagcataggtggaggatga

SEQ ID NO: 720981 - DNA, 25 bp, Homo sapien
actagactccaggttaaaagtgtca

SEQ ID NO: 720982 - DNA, 25 bp, Homo sapien
caactagactccaggttaaaagtgt

SEQ ID NO: 720983 - DNA, 25 bp, Homo sapien
tcaactagactccaggttaaaagtg

SEQ ID NO: 720984 - DNA, 25 bp, Homo sapien
tacgatggtggcatcccttccaaaa

SEQ ID NO: 720985 - DNA, 25 bp, Homo sapien
gagagatccaggcatgtgaatgtcc

SEQ ID NO: 720986 - DNA, 25 bp, Homo sapien
tcacgtttacagagaggattcacat

SEQ ID NO: 720987 - DNA, 25 bp, Homo sapien
gatagaccagaagacaaggtatctg

SEQ ID NO: 720988 - DNA, 25 bp, Homo sapien
tagctatggaaaggtactggtattc

SEQ ID NO: 720989 - DNA, 25 bp, Homo sapien
gaaaggtactggtattcaagagccc

SEQ ID NO: 720990 - DNA, 25 bp, Homo sapien
tatggaaaggtactggtattcaaga

SEQ ID NO: 720991 - DNA, 25 bp, Homo sapien
cactagctatggaaaggtactggta

SEQ ID NO: 720992 - DNA, 25 bp, Homo sapien
tctctctatcaggtcatcaactctc

SEQ ID NO: 720993 - DNA, 25 bp, Homo sapien
tatgcttgaaggaacaaggcttgtt

SEQ ID NO: 720994 - DNA, 25 bp, Homo sapien
tcatcaggttttgtcctagcatagc

SEQ ID NO: 720995 - DNA, 25 bp, Homo sapien
ccatcactactaattaattgcgaaa

SEQ ID NO: 720996 - DNA, 25 bp, Homo sapien
tttgctattgatacaagcagcttgc

SEQ ID NO: 720997 - DNA, 25 bp, Homo sapien
cttcattgtgagaataggtatcccc

SEQ ID NO: 720998 - DNA, 25 bp, Homo sapien
tcattgtgagaataggtatccccat

SEQ ID NO: 720999 - DNA, 25 bp, Homo sapien
ttcattgtgagaataggtatcccca

SEQ ID NO: 721000 - DNA, 25 bp, Homo sapien
attgtgagaataggtatccccattt

SEQ ID NO: 721001 - DNA, 25 bp, Homo sapien
tccagaatcattccactcatagggc

SEQ ID NO: 721002 - DNA, 25 bp, Homo sapien
cttctcccctatgtaagctctctta

SEQ ID NO: 721003 - DNA, 25 bp, Homo sapien
gcttctcccctatgtaagctctctt

SEQ ID NO: 721004 - DNA, 25 bp, Homo sapien
ctggtccagaatcattccactcata

SEQ ID NO: 721005 - DNA, 25 bp, Homo sapien
gcagacttgcgggagaaggatttcc

SEQ ID NO: 721006 - DNA, 25 bp, Homo sapien
cattcgttacatggatagggcctct

SEQ ID NO: 721007 - DNA, 25 bp, Homo sapien
tgtgatctccgatgtacagtgaggg

SEQ ID NO: 721008 - DNA, 25 bp, Homo sapien
gagccctctggtggatgatgaattt

SEQ ID NO: 721009 - DNA, 25 bp, Homo sapien
ctgtgtgtactttccgatgtctaat

SEQ ID NO: 721010 - DNA, 25 bp, Homo sapien
taaatgacttctataatgtatagtg

SEQ ID NO: 721011 - DNA, 25 bp, Homo sapien
ccgatgtctaatgaaggctgaattt

SEQ ID NO: 721012 - DNA, 25 bp, Homo sapien
tatgacacccgagaaaagaatttcc

SEQ ID NO: 721013 - DNA, 25 bp, Homo sapien
ctaaatgagctgtatgatggtcggt

SEQ ID NO: 721014 - DNA, 25 bp, Homo sapien
gtcggtgagatacaactgagagaac

SEQ ID NO: 721015 - DNA, 25 bp, Homo sapien
tatgatggtcggtgagatacaactg

SEQ ID NO: 721016 - DNA, 25 bp, Homo sapien
agctgtatgatggtcggtgagatac

SEQ ID NO: 721017 - DNA, 25 bp, Homo sapien
tctccccttttggaagtggctggtg

SEQ ID NO: 721018 - DNA, 25 bp, Homo sapien
ggctggtgcccatcgaaggctgaat

SEQ ID NO: 721019 - DNA, 25 bp, Homo sapien
ttctgaatgacttctataatgttca

SEQ ID NO: 721020 - DNA, 25 bp, Homo sapien
tcagtatagtatgacaactcattga

SEQ ID NO: 721021 - DNA, 25 bp, Homo sapien
tgaatggcttctgtagtggacagtg

SEQ ID NO: 721022 - DNA, 25 bp, Homo sapien
cctgaatggcttctgtagtggacag

SEQ ID NO: 721023 - DNA, 25 bp, Homo sapien
ctgaatggcttctgtagtggacagt

SEQ ID NO: 721024 - DNA, 25 bp, Homo sapien
tgatggctattgaaggctgatctgt

SEQ ID NO: 721025 - DNA, 25 bp, Homo sapien
ctctgatggctattgaaggctgatc

SEQ ID NO: 721026 - DNA, 25 bp, Homo sapien
tctgatggctattgaaggctgatct

SEQ ID NO: 721027 - DNA, 25 bp, Homo sapien
ctgatggctattgaaggctgatctg

SEQ ID NO: 721028 - DNA, 25 bp, Homo sapien
caaaatattggcactaggcacactc

SEQ ID NO: 721029 - DNA, 25 bp, Homo sapien
aacgactgcctcctgtactaatgag

SEQ ID NO: 721030 - DNA, 25 bp, Homo sapien
ggtaggtacctaaactgttccagca

SEQ ID NO: 721031 - DNA, 25 bp, Homo sapien
ccagcaagaaatggagcgaggacat

SEQ ID NO: 721032 - DNA, 25 bp, Homo sapien
taacttttatgcagggaacttacca

SEQ ID NO: 721033 - DNA, 25 bp, Homo sapien
gttaggtccttctgaacaatgccga

SEQ ID NO: 721034 - DNA, 25 bp, Homo sapien
tgtccattctacaggatagccttga

SEQ ID NO: 721035 - DNA, 25 bp, Homo sapien
caaaactcaggtgatggtatacacg

SEQ ID NO: 721036 - DNA, 25 bp, Homo sapien
tacatattcgagatcagggaccaga

SEQ ID NO: 721037 - DNA, 25 bp, Homo sapien
ttcactgccaagaaaggtcacccct

SEQ ID NO: 721038 - DNA, 25 bp, Homo sapien
cgatgagcaattccaccagtagtgt

SEQ ID NO: 721039 - DNA, 25 bp, Homo sapien
tggccaaggctaactgctaccctaa

SEQ ID NO: 721040 - DNA, 25 bp, Homo sapien
tggccctcttccgtgatccccagtc

SEQ ID NO: 721041 - DNA, 25 bp, Homo sapien
ctcttccgtgatccccagtccagcc

SEQ ID NO: 721042 - DNA, 25 bp, Homo sapien
gccctcttccgtgatccccagtcca

SEQ ID NO: 721043 - DNA, 25 bp, Homo sapien
ggcctggccctcttccgtgatcccc

SEQ ID NO: 721044 - DNA, 25 bp, Homo sapien
acgagcctgagccacgccctcgagc

SEQ ID NO: 721045 - DNA, 25 bp, Homo sapien
ctccccagggattgttagatccgga

SEQ ID NO: 721046 - DNA, 25 bp, Homo sapien
ctggagctcggacgcctccacgagc

SEQ ID NO: 721047 - DNA, 25 bp, Homo sapien
ttagatccggacagttctgccccag

SEQ ID NO: 721048 - DNA, 25 bp, Homo sapien
gcagcagcagcaacagcgggggcca

SEQ ID NO: 721049 - DNA, 25 bp, Homo sapien
cgggtggggagcggctttggcggtg

SEQ ID NO: 721050 - DNA, 25 bp, Homo sapien
gggaccggggcggccgggagcagca

SEQ ID NO: 721051 - DNA, 25 bp, Homo sapien
gcagcagcaacagcgggggccacat

SEQ ID NO: 721052 - DNA, 25 bp, Homo sapien
cttggagcaggttctgaaggccttc

SEQ ID NO: 721053 - DNA, 25 bp, Homo sapien
agcaggttctgaaggccttcctggg

SEQ ID NO: 721054 - DNA, 25 bp, Homo sapien
tgaaggccttcctgggtgttagcat

SEQ ID NO: 721055 - DNA, 25 bp, Homo sapien
gttctgaaggccttcctgggtgtta

SEQ ID NO: 721056 - DNA, 25 bp, Homo sapien
aaagggtgatgctcttcagccaggc

SEQ ID NO: 721057 - DNA, 25 bp, Homo sapien
gggacttcctggtgctggctagaaa

SEQ ID NO: 721058 - DNA, 25 bp, Homo sapien
cctggtcctctgtgctgtcgctgtg

SEQ ID NO: 721059 - DNA, 25 bp, Homo sapien
ggctagaaagggtgatgctcttcag

SEQ ID NO: 721060 - DNA, 25 bp, Homo sapien
aggtgtgagtctgcccgcagctctc

SEQ ID NO: 721061 - DNA, 25 bp, Homo sapien
acagccccatcaatacagccagagc

SEQ ID NO: 721062 - DNA, 25 bp, Homo sapien
cggctttctggtcgcgtggccacca

SEQ ID NO: 721063 - DNA, 25 bp, Homo sapien
cttcctccccggctttctggtcgcg

SEQ ID NO: 721064 - DNA, 25 bp, Homo sapien
ggtctggagagggcacacggccgtc

SEQ ID NO: 721065 - DNA, 25 bp, Homo sapien
cactccttgggagtggacagggaaa

SEQ ID NO: 721066 - DNA, 25 bp, Homo sapien
ctgccaatgcgttgaggcccacact

SEQ ID NO: 721067 - DNA, 25 bp, Homo sapien
aagccccatgttccccggagcctgt

SEQ ID NO: 721068 - DNA, 25 bp, Homo sapien
ctagcattttacgctgtcccacacg

SEQ ID NO: 721069 - DNA, 25 bp, Homo sapien
tagcattttacgctgtcccacacga

SEQ ID NO: 721070 - DNA, 25 bp, Homo sapien
agcattttacgctgtcccacacgat

SEQ ID NO: 721071 - DNA, 25 bp, Homo sapien
taacggacgcattgcgagattgcag

SEQ ID NO: 721072 - DNA, 25 bp, Homo sapien
aagcgcacataacggacgcattgcg

SEQ ID NO: 721073 - DNA, 25 bp, Homo sapien
ctggacgaaggcaagcgcacataac

SEQ ID NO: 721074 - DNA, 25 bp, Homo sapien
gacgcattgcgagattgcaggcaca

SEQ ID NO: 721075 - DNA, 25 bp, Homo sapien
taaccttgccgtattcattgcgagc

SEQ ID NO: 721076 - DNA, 25 bp, Homo sapien
taatcgtgcggagccattgcaagcg

SEQ ID NO: 721077 - DNA, 25 bp, Homo sapien
gtgccggacacattgcaagcgcaga

SEQ ID NO: 721078 - DNA, 25 bp, Homo sapien
caagcgcagataaccatgccggatg

SEQ ID NO: 721079 - DNA, 25 bp, Homo sapien
caagtacaagcacgcataacggaag

SEQ ID NO: 721080 - DNA, 25 bp, Homo sapien
tcaagggaagcttcgatgtcacgtc

SEQ ID NO: 721081 - DNA, 25 bp, Homo sapien
caagcgctgataaccatgccagagg

SEQ ID NO: 721082 - DNA, 25 bp, Homo sapien
aaacaaaggcgatgcagctggtcca

SEQ ID NO: 721083 - DNA, 25 bp, Homo sapien
ttccttgacactggtactatctctg

SEQ ID NO: 721084 - DNA, 25 bp, Homo sapien
gacactggtactatctctgaacatc

SEQ ID NO: 721085 - DNA, 25 bp, Homo sapien
ttgacactggtactatctctgaaca

SEQ ID NO: 721086 - DNA, 25 bp, Homo sapien
ccttgacactggtactatctctgaa

SEQ ID NO: 721087 - DNA, 25 bp, Homo sapien
ctgtagcttcagtctctgggctcaa

SEQ ID NO: 721088 - DNA, 25 bp, Homo sapien
tctaatagagatacctgattttggt

SEQ ID NO: 721089 - DNA, 25 bp, Homo sapien
gcccctctagtgaagttctaactca

SEQ ID NO: 721090 - DNA, 25 bp, Homo sapien
tctatttggtggaacattgttcttc

SEQ ID NO: 721091 - DNA, 25 bp, Homo sapien
catgcttgttacagtctacaccggc

SEQ ID NO: 721092 - DNA, 25 bp, Homo sapien
caccggctgaaaatctcaggatgga

SEQ ID NO: 721093 - DNA, 25 bp, Homo sapien
gaaaatctcaggatggaagacatat

SEQ ID NO: 721094 - DNA, 25 bp, Homo sapien
gttacagtctacaccggctgaaaat

SEQ ID NO: 721095 - DNA, 25 bp, Homo sapien
ggaaattcagatggccggagctgct

SEQ ID NO: 721096 - DNA, 25 bp, Homo sapien
ccggaaattcagatggccggagctg

SEQ ID NO: 721097 - DNA, 25 bp, Homo sapien
ccccggaaattcagatggccggagc

SEQ ID NO: 721098 - DNA, 25 bp, Homo sapien
cagtccaatgttccccggaaattca

SEQ ID NO: 721099 - DNA, 25 bp, Homo sapien
tcaggccagcagctcgcgttggggt

SEQ ID NO: 721100 - DNA, 25 bp, Homo sapien
gcagggctgtcccattggactcagg

SEQ ID NO: 721101 - DNA, 25 bp, Homo sapien
tgtcccattggactcaggccagcag

SEQ ID NO: 721102 - DNA, 25 bp, Homo sapien
actcaggccagcagctcgcgttggg

SEQ ID NO: 721103 - DNA, 25 bp, Homo sapien
gagcggcaagaagaggacgaagagc

SEQ ID NO: 721104 - DNA, 25 bp, Homo sapien
ccaggatcagtaggttccccgccag

SEQ ID NO: 721105 - DNA, 25 bp, Homo sapien
aggatcagtaggttccccgccaggg

SEQ ID NO: 721106 - DNA, 25 bp, Homo sapien
ggggccacacggagaagcccaggat

SEQ ID NO: 721107 - DNA, 25 bp, Homo sapien
ccatggtcatgagccgagggtagca

SEQ ID NO: 721108 - DNA, 25 bp, Homo sapien
aagtacattggcgagtgcagggcgg

SEQ ID NO: 721109 - DNA, 25 bp, Homo sapien
gccagcatgcgtggcgtgagcacca

SEQ ID NO: 721110 - DNA, 25 bp, Homo sapien
agcaccagcgtgtaggctgcctgcg

SEQ ID NO: 721111 - DNA, 25 bp, Homo sapien
ccgcgcagcaggcggccaagcaggc

SEQ ID NO: 721112 - DNA, 25 bp, Homo sapien
cgcgcagcaggcggccaagcaggcc

SEQ ID NO: 721113 - DNA, 25 bp, Homo sapien
ctggaagatgaccgcggtgaggccc

SEQ ID NO: 721114 - DNA, 25 bp, Homo sapien
gaagatgaccgcggtgaggcccagg

SEQ ID NO: 721115 - DNA, 25 bp, Homo sapien
tggaagatgaccgcggtgaggccca

SEQ ID NO: 721116 - DNA, 25 bp, Homo sapien
agatgaccgcggtgaggcccagggc

SEQ ID NO: 721117 - DNA, 25 bp, Homo sapien
agaagacgtggttgaccaggccgcc

SEQ ID NO: 721118 - DNA, 25 bp, Homo sapien
ggtgggacgccaccgtgttgaaggc

SEQ ID NO: 721119 - DNA, 25 bp, Homo sapien
tgaggagcaggggtagcaccagcag

SEQ ID NO: 721120 - DNA, 25 bp, Homo sapien
cgtggcacagccgtagtggagcaca

SEQ ID NO: 721121 - DNA, 25 bp, Homo sapien
cgcagcgtgtagatggccgggtaca

SEQ ID NO: 721122 - DNA, 25 bp, Homo sapien
gcatgtcccggttccgcagcgtgta

SEQ ID NO: 721123 - DNA, 25 bp, Homo sapien
ttgtcctcctcaagggaacggctgt

SEQ ID NO: 721124 - DNA, 25 bp, Homo sapien
ttgatatagatgagcgagaccagct

SEQ ID NO: 721125 - DNA, 25 bp, Homo sapien
ccatccccagcgtcctctggccgac

SEQ ID NO: 721126 - DNA, 25 bp, Homo sapien
ctggtggccatccccagcgtcctct

SEQ ID NO: 721127 - DNA, 25 bp, Homo sapien
ggtggccatccccagcgtcctctgg

SEQ ID NO: 721128 - DNA, 25 bp, Homo sapien
ggccatccccagcgtcctctggccg

SEQ ID NO: 721129 - DNA, 25 bp, Homo sapien
aatggtgagattcccctcagtggga

SEQ ID NO: 721130 - DNA, 25 bp, Homo sapien
gcacccagcatcaggcaaaatccac

SEQ ID NO: 721131 - DNA, 25 bp, Homo sapien
gggaggcttagatggctccagaatg

SEQ ID NO: 721132 - DNA, 25 bp, Homo sapien
cctcagtgggagaaatctcaggaca

SEQ ID NO: 721133 - DNA, 25 bp, Homo sapien
accttcaggagcgaatccacgcgga

SEQ ID NO: 721134 - DNA, 25 bp, Homo sapien
cagtgcgacggccacggaaacttct

SEQ ID NO: 721135 - DNA, 25 bp, Homo sapien
gaggagatttcagtgcgacggccac

SEQ ID NO: 721136 - DNA, 25 bp, Homo sapien
aatccacgcggaggtcaccagtgtg

SEQ ID NO: 721137 - DNA, 25 bp, Homo sapien
ctccagacgtctccgcgggttgtcg

SEQ ID NO: 721138 - DNA, 25 bp, Homo sapien
acttgctgcagagccggcactgcac

SEQ ID NO: 721139 - DNA, 25 bp, Homo sapien
tcagacacgtgtgggaggaacggcg

SEQ ID NO: 721140 - DNA, 25 bp, Homo sapien
cgggttgtcgggtgctgccaagttg

SEQ ID NO: 721141 - DNA, 25 bp, Homo sapien
catgagccactacttccgacaaatt

SEQ ID NO: 721142 - DNA, 25 bp, Homo sapien
gagcacttttattttgggagctcta

SEQ ID NO: 721143 - DNA, 25 bp, Homo sapien
tttatccatgtcctaaataatatag

SEQ ID NO: 721144 - DNA, 25 bp, Homo sapien
caccacgttcggctttatcagtaat

SEQ ID NO: 721145 - DNA, 25 bp, Homo sapien
acaagggtcagataatcttctctgt

SEQ ID NO: 721146 - DNA, 25 bp, Homo sapien
ctcttgtttatgctccagagccggg

SEQ ID NO: 721147 - DNA, 25 bp, Homo sapien
aggctgcactcagggtcggcgccgg

SEQ ID NO: 721148 - DNA, 25 bp, Homo sapien
accctgggatcaaccgccgcctcat

SEQ ID NO: 721149 - DNA, 25 bp, Homo sapien
ggcgcgcgcgcgagggcgggtcagg

SEQ ID NO: 721150 - DNA, 25 bp, Homo sapien
ctccccgctctggctcgccaggttc

SEQ ID NO: 721151 - DNA, 25 bp, Homo sapien
tcctggttgaagttggcgaagagca

SEQ ID NO: 721152 - DNA, 25 bp, Homo sapien
cctggttgaagttggcgaagagcag

SEQ ID NO: 721153 - DNA, 25 bp, Homo sapien
ccccgctctggctcgccaggttcat

SEQ ID NO: 721154 - DNA, 25 bp, Homo sapien
cagacaacagcgcgacggccaagac

SEQ ID NO: 721155 - DNA, 25 bp, Homo sapien
ccaagaccagctgctcttgatgccc

SEQ ID NO: 721156 - DNA, 25 bp, Homo sapien
gctgctcttgatgcccctttcactt

SEQ ID NO: 721157 - DNA, 25 bp, Homo sapien
acaacagcgcgacggccaagaccag

SEQ ID NO: 721158 - DNA, 25 bp, Homo sapien
tattaactggttcactgcaatttca

SEQ ID NO: 721159 - DNA, 25 bp, Homo sapien
tgatcctctcccacttattaactgg

SEQ ID NO: 721160 - DNA, 25 bp, Homo sapien
ggtatccactggaaaaatgtagtcc

SEQ ID NO: 721161 - DNA, 25 bp, Homo sapien
taacataagccttccaaggtgatac

SEQ ID NO: 721162 - DNA, 25 bp, Homo sapien
gtgcttaggcggatagagcccgaca

SEQ ID NO: 721163 - DNA, 25 bp, Homo sapien
ttcatcatctttgcggagaagccat

SEQ ID NO: 721164 - DNA, 25 bp, Homo sapien
ttccctaatcgtcagtccgtaaaga

SEQ ID NO: 721165 - DNA, 25 bp, Homo sapien
tacttgattgcgtgcttaggcggat

SEQ ID NO: 721166 - DNA, 25 bp, Homo sapien
tcttgttttgccgacagttgtcact

SEQ ID NO: 721167 - DNA, 25 bp, Homo sapien
cgtgaccatcctgccgtcattaaca

SEQ ID NO: 721168 - DNA, 25 bp, Homo sapien
gcccggcctgtagcactgagtttat

SEQ ID NO: 721169 - DNA, 25 bp, Homo sapien
cttggtgacttggaaaccaaatcac

SEQ ID NO: 721170 - DNA, 25 bp, Homo sapien
tgcattcatagatctgttccagctt

SEQ ID NO: 721171 - DNA, 25 bp, Homo sapien
ttcatagatctgttccagcttatcc

SEQ ID NO: 721172 - DNA, 25 bp, Homo sapien
tataaccggacttactaccaacagc

SEQ ID NO: 721173 - DNA, 25 bp, Homo sapien
ccggacttactaccaacagctaggg

SEQ ID NO: 721174 - DNA, 25 bp, Homo sapien
aaaggccgcacctgctggcgggcca

SEQ ID NO: 721175 - DNA, 25 bp, Homo sapien
aggagcgagtccgaaaggccgcacc

SEQ ID NO: 721176 - DNA, 25 bp, Homo sapien
tccgaaaggccgcacctgctggcgg

SEQ ID NO: 721177 - DNA, 25 bp, Homo sapien
gcgagtccgaaaggccgcacctgct

SEQ ID NO: 721178 - DNA, 25 bp, Homo sapien
gtgcaggtgctgagaaggtaatacc

SEQ ID NO: 721179 - DNA, 25 bp, Homo sapien
tgctgagaaggtaataccaccaacc

SEQ ID NO: 721180 - DNA, 25 bp, Homo sapien
ggtgctgagaaggtaataccaccaa

SEQ ID NO: 721181 - DNA, 25 bp, Homo sapien
ctgagaaggtaataccaccaaccat

SEQ ID NO: 721182 - DNA, 25 bp, Homo sapien
agcaagtcgccattagaggtggtga

SEQ ID NO: 721183 - DNA, 25 bp, Homo sapien
ggtgggagatttcaaagtgagaaca

SEQ ID NO: 721184 - DNA, 25 bp, Homo sapien
gtatgagacgatcatctcaaagagc

SEQ ID NO: 721185 - DNA, 25 bp, Homo sapien
tgagaacagtatgagacgatcatct

SEQ ID NO: 721186 - DNA, 25 bp, Homo sapien
gaggaaatgagacacgtcccctgag

SEQ ID NO: 721187 - DNA, 25 bp, Homo sapien
tagagaccatcccaagtatacagtg

SEQ ID NO: 721188 - DNA, 25 bp, Homo sapien
gaacgaggagcttatatggcgacct

SEQ ID NO: 721189 - DNA, 25 bp, Homo sapien
tggaagtcaacagaagagggcatct

SEQ ID NO: 721190 - DNA, 25 bp, Homo sapien
tggaacgggccataaacacaagtac

SEQ ID NO: 721191 - DNA, 25 bp, Homo sapien
gctcagcagcatctcagactagcgg

SEQ ID NO: 721192 - DNA, 25 bp, Homo sapien
ttctttctgacaacagcaagcgacc

SEQ ID NO: 721193 - DNA, 25 bp, Homo sapien
gatgcaagcgtctgccacaaatggg

SEQ ID NO: 721194 - DNA, 25 bp, Homo sapien
caaactcctaggtaaagtgaaagag

SEQ ID NO: 721195 - DNA, 25 bp, Homo sapien
tgaatggtgagtttaggaaccaaac

SEQ ID NO: 721196 - DNA, 25 bp, Homo sapien
cattcacacgaaagacaaaggttcc

SEQ ID NO: 721197 - DNA, 25 bp, Homo sapien
cactctaaggatggcccctcacgag

SEQ ID NO: 721198 - DNA, 25 bp, Homo sapien
agggtcttgattcgctggagcctca

SEQ ID NO: 721199 - DNA, 25 bp, Homo sapien
cagggcacagcgctgagggtgcctg

SEQ ID NO: 721200 - DNA, 25 bp, Homo sapien
tgcctgcggaacatgtggtcatggg

SEQ ID NO: 721201 - DNA, 25 bp, Homo sapien
tctgagggtcttgattcgctggagc

SEQ ID NO: 721202 - DNA, 25 bp, Homo sapien
acaggcagaatctgcgctcaaaaac

SEQ ID NO: 721203 - DNA, 25 bp, Homo sapien
ggcagaatctgcgctcaaaaacaaa

SEQ ID NO: 721204 - DNA, 25 bp, Homo sapien
ccacaggcagaatctgcgctcaaaa

SEQ ID NO: 721205 - DNA, 25 bp, Homo sapien
agaatctgcgctcaaaaacaaacac

SEQ ID NO: 721206 - DNA, 25 bp, Homo sapien
acaaagggaagtacatgcgtgaaca

SEQ ID NO: 721207 - DNA, 25 bp, Homo sapien
caaagggaagtacatgcgtgaacat

SEQ ID NO: 721208 - DNA, 25 bp, Homo sapien
aaatcacaaagggaagtacatgcgt

SEQ ID NO: 721209 - DNA, 25 bp, Homo sapien
tcacaaagggaagtacatgcgtgaa

SEQ ID NO: 721210 - DNA, 25 bp, Homo sapien
gcttccttggtgctttaaggctgac

SEQ ID NO: 721211 - DNA, 25 bp, Homo sapien
tgttgagcttcacagccagaatcgt

SEQ ID NO: 721212 - DNA, 25 bp, Homo sapien
taaggctgacgatggccactaggct

SEQ ID NO: 721213 - DNA, 25 bp, Homo sapien
acaatgcacacatcttccgtatcgg

SEQ ID NO: 721214 - DNA, 25 bp, Homo sapien
gtttggaggcgtctccctgatcgta

SEQ ID NO: 721215 - DNA, 25 bp, Homo sapien
gcaccttcatgtcccgaatgttgtg

SEQ ID NO: 721216 - DNA, 25 bp, Homo sapien
tgtggatgtacagggactcctccag

SEQ ID NO: 721217 - DNA, 25 bp, Homo sapien
tccctgatcgtatgcagcaccttca

SEQ ID NO: 721218 - DNA, 25 bp, Homo sapien
cagcatcagtaggaaggcagcttgg

SEQ ID NO: 721219 - DNA, 25 bp, Homo sapien
tgaaagttgatcaaaccaatgagct

SEQ ID NO: 721220 - DNA, 25 bp, Homo sapien
acatgaccagcatcagtaggaaggc

SEQ ID NO: 721221 - DNA, 25 bp, Homo sapien
aaaccaatgagcttatgtggtcaca

SEQ ID NO: 721222 - DNA, 25 bp, Homo sapien
tgggtacgccaagtagcagttgtcg

SEQ ID NO: 721223 - DNA, 25 bp, Homo sapien
gaagacctgcacctctccgatggtc

SEQ ID NO: 721224 - DNA, 25 bp, Homo sapien
caaattaatggtatcgaagacctgc

SEQ ID NO: 721225 - DNA, 25 bp, Homo sapien
ttgttgattgacagcgcacacaggc

SEQ ID NO: 721226 - DNA, 25 bp, Homo sapien
ataaagagtggccaccgcacagtga

SEQ ID NO: 721227 - DNA, 25 bp, Homo sapien
tcaaacattcccgtggcgaggagct

SEQ ID NO: 721228 - DNA, 25 bp, Homo sapien
cacactttagagagctattcgagca

SEQ ID NO: 721229 - DNA, 25 bp, Homo sapien
cgcaagtgccaattagctgttccta

SEQ ID NO: 721230 - DNA, 25 bp, Homo sapien
cgaagccgtggcaagtttagttcca

SEQ ID NO: 721231 - DNA, 25 bp, Homo sapien
cgtgagccggaatcatgtttgcagc

SEQ ID NO: 721232 - DNA, 25 bp, Homo sapien
ggccagtgccgctaaaggactgtcg

SEQ ID NO: 721233 - DNA, 25 bp, Homo sapien
gttccacttgcgtcaaaggccagtg

SEQ ID NO: 721234 - DNA, 25 bp, Homo sapien
atcaaagtaaaggtcatcggtggcc

SEQ ID NO: 721235 - DNA, 25 bp, Homo sapien
tcccggagctggtaagtataggacc

SEQ ID NO: 721236 - DNA, 25 bp, Homo sapien
taaatacactactacctacggcagc

SEQ ID NO: 721237 - DNA, 25 bp, Homo sapien
aaaagtctgtggacgccttggcacc

SEQ ID NO: 721238 - DNA, 25 bp, Homo sapien
tctttactcctctccgaaactcaaa

SEQ ID NO: 721239 - DNA, 25 bp, Homo sapien
ttactcctctccgaaactcaaagag

SEQ ID NO: 721240 - DNA, 25 bp, Homo sapien
ctttactcctctccgaaactcaaag

SEQ ID NO: 721241 - DNA, 25 bp, Homo sapien
actcctctccgaaactcaaagagtt

SEQ ID NO: 721242 - DNA, 25 bp, Homo sapien
cactagagacgcatggagaaaggga

SEQ ID NO: 721243 - DNA, 25 bp, Homo sapien
cctggtggataaaagagatcggctc

SEQ ID NO: 721244 - DNA, 25 bp, Homo sapien
gagggcgacactcgacttggactcc

SEQ ID NO: 721245 - DNA, 25 bp, Homo sapien
tctgaaagtgcggtactgctggagc

SEQ ID NO: 721246 - DNA, 25 bp, Homo sapien
ggttcaactcaagtggcggagaaga

SEQ ID NO: 721247 - DNA, 25 bp, Homo sapien
caattcgttaacacagctgcaagct

SEQ ID NO: 721248 - DNA, 25 bp, Homo sapien
agaagagttcctgtcacgggcacac

SEQ ID NO: 721249 - DNA, 25 bp, Homo sapien
gccattctttccacaccagagggta

SEQ ID NO: 721250 - DNA, 25 bp, Homo sapien
cacggtctcagtgttgctggaggcg

SEQ ID NO: 721251 - DNA, 25 bp, Homo sapien
ttctttcacagtctcgagtttgaag

SEQ ID NO: 721252 - DNA, 25 bp, Homo sapien
cggagaggaacatgccgtccatgct

SEQ ID NO: 721253 - DNA, 25 bp, Homo sapien
cagtctcgagtttgaagatgtgcac

SEQ ID NO: 721254 - DNA, 25 bp, Homo sapien
ttaaagaaacgtatatttgcaactc

SEQ ID NO: 721255 - DNA, 25 bp, Homo sapien
taaagaaacgtatatttgcaactca

SEQ ID NO: 721256 - DNA, 25 bp, Homo sapien
aaagaaacgtatatttgcaactcac

SEQ ID NO: 721257 - DNA, 25 bp, Homo sapien
taataaattcttgtggaagccgtcc

SEQ ID NO: 721258 - DNA, 25 bp, Homo sapien
gctctggagccgacagcaaaagtct

SEQ ID NO: 721259 - DNA, 25 bp, Homo sapien
ggaacctgaggagaggccatcttca

SEQ ID NO: 721260 - DNA, 25 bp, Homo sapien
gagctacagcctttggccacggaca

SEQ ID NO: 721261 - DNA, 25 bp, Homo sapien
tgccctggttgaacatttctgtcac

SEQ ID NO: 721262 - DNA, 25 bp, Homo sapien
agcagatgtttttgtggccgcagaa

SEQ ID NO: 721263 - DNA, 25 bp, Homo sapien
gccgcagaatggcaggcggaccgtg

SEQ ID NO: 721264 - DNA, 25 bp, Homo sapien
tggaggccatgagcactttcccgaa

SEQ ID NO: 721265 - DNA, 25 bp, Homo sapien
tcagaagcacggaaggggccacaag

SEQ ID NO: 721266 - DNA, 25 bp, Homo sapien
catccccgacaactctcgatggagt

SEQ ID NO: 721267 - DNA, 25 bp, Homo sapien
gacaactctcgatggagtgtcggct

SEQ ID NO: 721268 - DNA, 25 bp, Homo sapien
tgtcggctctaagaagctgctcctg

SEQ ID NO: 721269 - DNA, 25 bp, Homo sapien
tacatgtacaggtacccgtcggcgg

SEQ ID NO: 721270 - DNA, 25 bp, Homo sapien
ctgggggtccaggttgtacatgtac

SEQ ID NO: 721271 - DNA, 25 bp, Homo sapien
ttcatcagggcacactcgccgccct

SEQ ID NO: 721272 - DNA, 25 bp, Homo sapien
caacaaccgcgggatcttctgaatt

SEQ ID NO: 721273 - DNA, 25 bp, Homo sapien
gaacaaacctgtacctcacagtgag

SEQ ID NO: 721274 - DNA, 25 bp, Homo sapien
ttccaaatgcgaaactccaccctgg

SEQ ID NO: 721275 - DNA, 25 bp, Homo sapien
cacagtgagacaagaggctctcagc

SEQ ID NO: 721276 - DNA, 25 bp, Homo sapien
cacgtgcactgaattgtggaggcca

SEQ ID NO: 721277 - DNA, 25 bp, Homo sapien
gccctgcgggcagtacacactggct

SEQ ID NO: 721278 - DNA, 25 bp, Homo sapien
ggaagaaagcgacacagctcagcgt

SEQ ID NO: 721279 - DNA, 25 bp, Homo sapien
tctgcacacgtttttacatgaagag

SEQ ID NO: 721280 - DNA, 25 bp, Homo sapien
aggacgccaggcattcatcacgccg

SEQ ID NO: 721281 - DNA, 25 bp, Homo sapien
ggcagtcgtgagaggcagagtccaa

SEQ ID NO: 721282 - DNA, 25 bp, Homo sapien
agctgcgccgtatgtctgagtgact

SEQ ID NO: 721283 - DNA, 25 bp, Homo sapien
atctcattggtcgtttccagactgc

SEQ ID NO: 721284 - DNA, 25 bp, Homo sapien
ggtcgtttccagactgccgtccagc

SEQ ID NO: 721285 - DNA, 25 bp, Homo sapien
tctcgttggggatgaaggcacgtaa

SEQ ID NO: 721286 - DNA, 25 bp, Homo sapien
gttggggatgaaggcacgtaagtac

SEQ ID NO: 721287 - DNA, 25 bp, Homo sapien
cgttggggatgaaggcacgtaagta

SEQ ID NO: 721288 - DNA, 25 bp, Homo sapien
aagtctcgttggggatgaaggcacg

SEQ ID NO: 721289 - DNA, 25 bp, Homo sapien
cttccaggtttgcgtcacgcccctt

SEQ ID NO: 721290 - DNA, 25 bp, Homo sapien
tccaggtttgcgtcacgccccttac

SEQ ID NO: 721291 - DNA, 25 bp, Homo sapien
ttccaggtttgcgtcacgcccctta

SEQ ID NO: 721292 - DNA, 25 bp, Homo sapien
catgcatgggtcttagtgctgccgc

SEQ ID NO: 721293 - DNA, 25 bp, Homo sapien
tgaggcaaaacccttggcagtactt

SEQ ID NO: 721294 - DNA, 25 bp, Homo sapien
tgaaggcagtactcgatgcagattt

SEQ ID NO: 721295 - DNA, 25 bp, Homo sapien
atttgctgaaggacgaaaaaggtgg

SEQ ID NO: 721296 - DNA, 25 bp, Homo sapien
taggcagctcgagatgaagtcattt

SEQ ID NO: 721297 - DNA, 25 bp, Homo sapien
taaactgaagcctgtactaagacgt

SEQ ID NO: 721298 - DNA, 25 bp, Homo sapien
ctttgcagccttaggcagctcgaga

SEQ ID NO: 721299 - DNA, 25 bp, Homo sapien
aaagagacgacgaagtcacccttca

SEQ ID NO: 721300 - DNA, 25 bp, Homo sapien
atgggcgggtgctcgctgtcctcat

SEQ ID NO: 721301 - DNA, 25 bp, Homo sapien
tcagtcagtccgaagaatcatgggc

SEQ ID NO: 721302 - DNA, 25 bp, Homo sapien
tccgaagaatcatgggcgggtgctc

SEQ ID NO: 721303 - DNA, 25 bp, Homo sapien
aatcatgggcgggtgctcgctgtcc

SEQ ID NO: 721304 - DNA, 25 bp, Homo sapien
gactcaggtcaaagttcatagcagc

SEQ ID NO: 721305 - DNA, 25 bp, Homo sapien
ccgactcaggtcaaagttcatagca

SEQ ID NO: 721306 - DNA, 25 bp, Homo sapien
tctgctccccgggtcagaggtcaca

SEQ ID NO: 721307 - DNA, 25 bp, Homo sapien
tcccccgactcaggtcaaagttcat

SEQ ID NO: 721308 - DNA, 25 bp, Homo sapien
tggccttgacaagcagacccactgt

SEQ ID NO: 721309 - DNA, 25 bp, Homo sapien
cgaggaggttttgcgggcttcacca

SEQ ID NO: 721310 - DNA, 25 bp, Homo sapien
tacagatatgaaaaaacccaacggc

SEQ ID NO: 721311 - DNA, 25 bp, Homo sapien
ggcttggcacgttcatgcatgcaaa

SEQ ID NO: 721312 - DNA, 25 bp, Homo sapien
cctttcaagttcatttgctgcctga

SEQ ID NO: 721313 - DNA, 25 bp, Homo sapien
cgctgtcctccaatatccacaggga

SEQ ID NO: 721314 - DNA, 25 bp, Homo sapien
gtatcagaaagaacctcgctgtcct

SEQ ID NO: 721315 - DNA, 25 bp, Homo sapien
tttttagtatcagaaagaacctcgc

SEQ ID NO: 721316 - DNA, 25 bp, Homo sapien
caaacaaaatcgctttcctttgctc

SEQ ID NO: 721317 - DNA, 25 bp, Homo sapien
atacaaacaaaatcgctttcctttg

SEQ ID NO: 721318 - DNA, 25 bp, Homo sapien
aacagatcatttaattatacaaaca

SEQ ID NO: 721319 - DNA, 25 bp, Homo sapien
taattatacaaacaaaatcgctttc

SEQ ID NO: 721320 - DNA, 25 bp, Homo sapien
tacagaaggtttggtcccagagtcc

SEQ ID NO: 721321 - DNA, 25 bp, Homo sapien
tcatcttacagtgcgggaagccgag

SEQ ID NO: 721322 - DNA, 25 bp, Homo sapien
taaatgccctcgacactttggctgc

SEQ ID NO: 721323 - DNA, 25 bp, Homo sapien
agttctaacgggcaactcagcggcc

SEQ ID NO: 721324 - DNA, 25 bp, Homo sapien
gaccggcaagaacgcaggcggaaca

SEQ ID NO: 721325 - DNA, 25 bp, Homo sapien
gtgtcctggcccacgcacaagcggg

SEQ ID NO: 721326 - DNA, 25 bp, Homo sapien
atgctaatccaaacatggaccggca

SEQ ID NO: 721327 - DNA, 25 bp, Homo sapien
ccagctgttccaccaacgcaatcat

SEQ ID NO: 721328 - DNA, 25 bp, Homo sapien
ggccatttgtcagcaccaaggaggc

SEQ ID NO: 721329 - DNA, 25 bp, Homo sapien
cagagtgactttgccaaccacagtg

SEQ ID NO: 721330 - DNA, 25 bp, Homo sapien
ggagctcgtctgaacaaattgcggg

SEQ ID NO: 721331 - DNA, 25 bp, Homo sapien
ccacgaaggtcaagaaggacataaa

SEQ ID NO: 721332 - DNA, 25 bp, Homo sapien
cacgctcaagaaaactgtggagtgg

SEQ ID NO: 721333 - DNA, 25 bp, Homo sapien
ttccattcacgggtcctgtcaaata

SEQ ID NO: 721334 - DNA, 25 bp, Homo sapien
cacgggtcctgtcaaatatctgtgg

SEQ ID NO: 721335 - DNA, 25 bp, Homo sapien
tatctgtggatcgtaaagtgtccca

SEQ ID NO: 721336 - DNA, 25 bp, Homo sapien
tggactgtctgcatcgatccggcct

SEQ ID NO: 721337 - DNA, 25 bp, Homo sapien
tgggccccacagaacgggaactgtc

SEQ ID NO: 721338 - DNA, 25 bp, Homo sapien
actcaggcgggccttggccacggtc

SEQ ID NO: 721339 - DNA, 25 bp, Homo sapien
tgtcggatagatactgtggctgtcc

SEQ ID NO: 721340 - DNA, 25 bp, Homo sapien
ctctctctgcattacccaggcttga

SEQ ID NO: 721341 - DNA, 25 bp, Homo sapien
atattaaatcagtcttctaactttc

SEQ ID NO: 721342 - DNA, 25 bp, Homo sapien
atgggctctctctgcattacccagg

SEQ ID NO: 721343 - DNA, 25 bp, Homo sapien
tgcctggcttatgccttgattactg

SEQ ID NO: 721344 - DNA, 25 bp, Homo sapien
acttgggagcaggtgcgcccgtctc

SEQ ID NO: 721345 - DNA, 25 bp, Homo sapien
atgctcagagcctgcgtttgagggg

SEQ ID NO: 721346 - DNA, 25 bp, Homo sapien
aggcccggcgcacaggggtctgggt

SEQ ID NO: 721347 - DNA, 25 bp, Homo sapien
gcactctcaatgaacttgggagcag

SEQ ID NO: 721348 - DNA, 25 bp, Homo sapien
gtggtggccccaggatgaccatgta

SEQ ID NO: 721349 - DNA, 25 bp, Homo sapien
tggccccaggatgaccatgtagacc

SEQ ID NO: 721350 - DNA, 25 bp, Homo sapien
aataaaaggtggtggccccaggatg

SEQ ID NO: 721351 - DNA, 25 bp, Homo sapien
ataaaaggtggtggccccaggatga

SEQ ID NO: 721352 - DNA, 25 bp, Homo sapien
aaacaccccttgcaaactcgctgag

SEQ ID NO: 721353 - DNA, 25 bp, Homo sapien
agagtccctgggccgttccgcgtca

SEQ ID NO: 721354 - DNA, 25 bp, Homo sapien
tcgctgagccccaggatcagagtcc

SEQ ID NO: 721355 - DNA, 25 bp, Homo sapien
tccctgggccgttccgcgtcagccc

SEQ ID NO: 721356 - DNA, 25 bp, Homo sapien
cggtccacgagcgcggcgacgagca

SEQ ID NO: 721357 - DNA, 25 bp, Homo sapien
ggtccacgagcgcggcgacgagcac

SEQ ID NO: 721358 - DNA, 25 bp, Homo sapien
ccggccccggtccacgagcgcggcg

SEQ ID NO: 721359 - DNA, 25 bp, Homo sapien
ccccggtccacgagcgcggcgacga

SEQ ID NO: 721360 - DNA, 25 bp, Homo sapien
gtatccgtgaaagctgggacgcccc

SEQ ID NO: 721361 - DNA, 25 bp, Homo sapien
tccacgtccgtgatgaagctgttgt

SEQ ID NO: 721362 - DNA, 25 bp, Homo sapien
tgatgaagctgttgtatggcagcag

SEQ ID NO: 721363 - DNA, 25 bp, Homo sapien
ggtacttgtgatgcaggtagtccac

SEQ ID NO: 721364 - DNA, 25 bp, Homo sapien
gcatcgcaaagtagatggcgtgata

SEQ ID NO: 721365 - DNA, 25 bp, Homo sapien
gccaccaagatgtaggtgaggctca

SEQ ID NO: 721366 - DNA, 25 bp, Homo sapien
tgtaggtgaggctcatgtcaaacac

SEQ ID NO: 721367 - DNA, 25 bp, Homo sapien
agatgtaggtgaggctcatgtcaaa

SEQ ID NO: 721368 - DNA, 25 bp, Homo sapien
ccaagatgtaggtgaggctcatgtc

SEQ ID NO: 721369 - DNA, 25 bp, Homo sapien
gagagggcccaaggctaagaggtag

SEQ ID NO: 721370 - DNA, 25 bp, Homo sapien
atggcgtaggcctggtcccgagaga

SEQ ID NO: 721371 - DNA, 25 bp, Homo sapien
caggttgatggcgtaggcctggtcc

SEQ ID NO: 721372 - DNA, 25 bp, Homo sapien
tgtgcagccgaaggccacggtgccc

SEQ ID NO: 721373 - DNA, 25 bp, Homo sapien
ggcctggtcccgagagaagagctgc

SEQ ID NO: 721374 - DNA, 25 bp, Homo sapien
cccctgcgtgtaccgcttgggcagc

SEQ ID NO: 721375 - DNA, 25 bp, Homo sapien
ccgtgtacccgtagaagctggattg

SEQ ID NO: 721376 - DNA, 25 bp, Homo sapien
catccccgtgtacccgtagaagctg

SEQ ID NO: 721377 - DNA, 25 bp, Homo sapien
gcagcatccccgtgtacccgtagaa

SEQ ID NO: 721378 - DNA, 25 bp, Homo sapien
tccccggggggtctgcagatactca

SEQ ID NO: 721379 - DNA, 25 bp, Homo sapien
cctccccggggggtctgcagatact

SEQ ID NO: 721380 - DNA, 25 bp, Homo sapien
ctccccggggggtctgcagatactc

SEQ ID NO: 721381 - DNA, 25 bp, Homo sapien
ccccggggggtctgcagatactcac

SEQ ID NO: 721382 - DNA, 25 bp, Homo sapien
gccagggccaagtgggtcttgacct

SEQ ID NO: 721383 - DNA, 25 bp, Homo sapien
gagacataagcttccccgatcacaa

SEQ ID NO: 721384 - DNA, 25 bp, Homo sapien
tgtgcatgacatcacggccatggac

SEQ ID NO: 721385 - DNA, 25 bp, Homo sapien
tcatgtaaggttcaggcgtgagcaa

SEQ ID NO: 721386 - DNA, 25 bp, Homo sapien
tgctggcgcgctcgtcgggcagcag

SEQ ID NO: 721387 - DNA, 25 bp, Homo sapien
ggctcagagagatcatcacgcccgc

SEQ ID NO: 721388 - DNA, 25 bp, Homo sapien
gccgtgtggtatagaagagcacgaa

SEQ ID NO: 721389 - DNA, 25 bp, Homo sapien
gaggatgcggctcagagagatcatc

SEQ ID NO: 721390 - DNA, 25 bp, Homo sapien
ccggcgacaacgtcgtggtgcacgc

SEQ ID NO: 721391 - DNA, 25 bp, Homo sapien
cgacaacgtcgtggtgcacgcggta

SEQ ID NO: 721392 - DNA, 25 bp, Homo sapien
aacgtcgtggtgcacgcggtagcca

SEQ ID NO: 721393 - DNA, 25 bp, Homo sapien
cgtccccggcgacaacgtcgtggtg

SEQ ID NO: 721394 - DNA, 25 bp, Homo sapien
tggacccttggccgcggcacatcaa

SEQ ID NO: 721395 - DNA, 25 bp, Homo sapien
cacatcaaagcgcatgtaggccccg

SEQ ID NO: 721396 - DNA, 25 bp, Homo sapien
ggccgcggcacatcaaagcgcatgt

SEQ ID NO: 721397 - DNA, 25 bp, Homo sapien
cgcggcacatcaaagcgcatgtagg

SEQ ID NO: 721398 - DNA, 25 bp, Homo sapien
ggatctcagactcgaggccggggaa

SEQ ID NO: 721399 - DNA, 25 bp, Homo sapien
gtggcggatctcagactcgaggccg

SEQ ID NO: 721400 - DNA, 25 bp, Homo sapien
agtggcggatctcagactcgaggcc

SEQ ID NO: 721401 - DNA, 25 bp, Homo sapien
cagtggcggatctcagactcgaggc

SEQ ID NO: 721402 - DNA, 25 bp, Homo sapien
ggatcatgggcacgctgccgaagta

SEQ ID NO: 721403 - DNA, 25 bp, Homo sapien
gctgccgaagtagccgttgctgatg

SEQ ID NO: 721404 - DNA, 25 bp, Homo sapien
tttgcctgccgccaggatcatgggc

SEQ ID NO: 721405 - DNA, 25 bp, Homo sapien
aagtagccgttgctgatgcccatga

SEQ ID NO: 721406 - DNA, 25 bp, Homo sapien
ggtcccaagtgatagtcctaccttg

SEQ ID NO: 721407 - DNA, 25 bp, Homo sapien
ccaaaacaccgtcctgagccagtga

SEQ ID NO: 721408 - DNA, 25 bp, Homo sapien
tgggagcaccctctccggatcctgt

SEQ ID NO: 721409 - DNA, 25 bp, Homo sapien
catctgctatgcactccaggccttg

SEQ ID NO: 721410 - DNA, 25 bp, Homo sapien
tgcagtaggccacggcggaccccag

SEQ ID NO: 721411 - DNA, 25 bp, Homo sapien
ccattggcggtggaggcgtgcaggc

SEQ ID NO: 721412 - DNA, 25 bp, Homo sapien
cattggcggtggaggcgtgcaggca

SEQ ID NO: 721413 - DNA, 25 bp, Homo sapien
ttgcagaacttcagtccagggtggg

SEQ ID NO: 721414 - DNA, 25 bp, Homo sapien
tgagaccaaacgcagaacacagtgc

SEQ ID NO: 721415 - DNA, 25 bp, Homo sapien
cacagatggaaggtagacgcaggta

SEQ ID NO: 721416 - DNA, 25 bp, Homo sapien
gcagaaacgtgttccggtcctcgga

SEQ ID NO: 721417 - DNA, 25 bp, Homo sapien
cttgctggatgagggtcaagaccta

SEQ ID NO: 721418 - DNA, 25 bp, Homo sapien
tggaaacaccgtctctggaaggaca

SEQ ID NO: 721419 - DNA, 25 bp, Homo sapien
caagacctaggtcaagctgacttca

SEQ ID NO: 721420 - DNA, 25 bp, Homo sapien
cactctggcgggtgtctgctgtcct

SEQ ID NO: 721421 - DNA, 25 bp, Homo sapien
caaccagacaatcttgagggaagga

SEQ ID NO: 721422 - DNA, 25 bp, Homo sapien
tactaatgctaagagtggccccaag

SEQ ID NO: 721423 - DNA, 25 bp, Homo sapien
tctaaatgagctcatcggctgggca

SEQ ID NO: 721424 - DNA, 25 bp, Homo sapien
tagattatagtgtctagcaccggct

SEQ ID NO: 721425 - DNA, 25 bp, Homo sapien
actgtgaaaaatagctatgaaatta

SEQ ID NO: 721426 - DNA, 25 bp, Homo sapien
tgaaaaatagctatgaaattataaa

SEQ ID NO: 721427 - DNA, 25 bp, Homo sapien
tgtgaaaaatagctatgaaattata

SEQ ID NO: 721428 - DNA, 25 bp, Homo sapien
aaactgtgaaaaatagctatgaaat

SEQ ID NO: 721429 - DNA, 25 bp, Homo sapien
gggcgcttctaaggaaccaaactga

SEQ ID NO: 721430 - DNA, 25 bp, Homo sapien
tgcccagcacgttgcaagcacttgg

SEQ ID NO: 721431 - DNA, 25 bp, Homo sapien
caaactgacgctcactctgggcttc

SEQ ID NO: 721432 - DNA, 25 bp, Homo sapien
tcaggatggcctagacttggggaac

SEQ ID NO: 721433 - DNA, 25 bp, Homo sapien
ggctcacgttcgaggactctgggaa

SEQ ID NO: 721434 - DNA, 25 bp, Homo sapien
gggctcacgttcgaggactctggga

SEQ ID NO: 721435 - DNA, 25 bp, Homo sapien
tcacgttcgaggactctgggaaccc

SEQ ID NO: 721436 - DNA, 25 bp, Homo sapien
gccggggctcacgttcgaggactct

SEQ ID NO: 721437 - DNA, 25 bp, Homo sapien
cagagcctgtggacaagcgagccaa

SEQ ID NO: 721438 - DNA, 25 bp, Homo sapien
ctggagccgagcagcaccccaggtt

SEQ ID NO: 721439 - DNA, 25 bp, Homo sapien
cccttagccctggagccgagcagca

SEQ ID NO: 721440 - DNA, 25 bp, Homo sapien
cccagcacccgagccatttgcagag

SEQ ID NO: 721441 - DNA, 25 bp, Homo sapien
cgacaaggatgagctgaaggacggc

SEQ ID NO: 721442 - DNA, 25 bp, Homo sapien
ggcagatctgagcaaggcttgagac

SEQ ID NO: 721443 - DNA, 25 bp, Homo sapien
taaaatgagctgtctgggccgagcg

SEQ ID NO: 721444 - DNA, 25 bp, Homo sapien
gcttagtcaactgcagatgaggcaa

SEQ ID NO: 721445 - DNA, 25 bp, Homo sapien
tcctgaggctgagttatccgggtcg

SEQ ID NO: 721446 - DNA, 25 bp, Homo sapien
acttcagtggtgtcttttttgggca

SEQ ID NO: 721447 - DNA, 25 bp, Homo sapien
gctgcatttagtggtgatggtgcca

SEQ ID NO: 721448 - DNA, 25 bp, Homo sapien
tctagaaggatacaccatgctgtta

SEQ ID NO: 721449 - DNA, 25 bp, Homo sapien
attgcagggcgcgtttgctcatgcc

SEQ ID NO: 721450 - DNA, 25 bp, Homo sapien
ccctgtgggttcttgtaggaggcca

SEQ ID NO: 721451 - DNA, 25 bp, Homo sapien
caggccctgtccactacaatacaat

SEQ ID NO: 721452 - DNA, 25 bp, Homo sapien
taggaggccaagttggttgtcaccc

SEQ ID NO: 721453 - DNA, 25 bp, Homo sapien
agatgcaagccattgcacccgacct

SEQ ID NO: 721454 - DNA, 25 bp, Homo sapien
tgacacccgagacactggtggaggc

SEQ ID NO: 721455 - DNA, 25 bp, Homo sapien
tctgagtgtccagactttgtggagg

SEQ ID NO: 721456 - DNA, 25 bp, Homo sapien
accgggcagagctgcgcagagccct

SEQ ID NO: 721457 - DNA, 25 bp, Homo sapien
ccggaggaagaaccgctggctgagc

SEQ ID NO: 721458 - DNA, 25 bp, Homo sapien
tgcagagccttataaagtacagtgg

SEQ ID NO: 721459 - DNA, 25 bp, Homo sapien
taaatggaaacccttcgagctgggc

SEQ ID NO: 721460 - DNA, 25 bp, Homo sapien
caccggccctgagcataaatggaaa

SEQ ID NO: 721461 - DNA, 25 bp, Homo sapien
actctgcggcccacgggtctggaga

SEQ ID NO: 721462 - DNA, 25 bp, Homo sapien
tcggtactgaccatgtgcaacggcg

SEQ ID NO: 721463 - DNA, 25 bp, Homo sapien
gtctacaccgtcttccgcgagcagg

SEQ ID NO: 721464 - DNA, 25 bp, Homo sapien
ttcgtgccttccgtggaggccttcg

SEQ ID NO: 721465 - DNA, 25 bp, Homo sapien
agtccaagaccaagaatgcggcgct

SEQ ID NO: 721466 - DNA, 25 bp, Homo sapien
tgaggggttcaaggccctagctccc

SEQ ID NO: 721467 - DNA, 25 bp, Homo sapien
gggttcaaggccctagctccctgca

SEQ ID NO: 721468 - DNA, 25 bp, Homo sapien
gttcaaggccctagctccctgcagg

SEQ ID NO: 721469 - DNA, 25 bp, Homo sapien
aaggccctagctccctgcaggaacg

SEQ ID NO: 721470 - DNA, 25 bp, Homo sapien
gagcttcttgaatgccctctgtaaa

SEQ ID NO: 721471 - DNA, 25 bp, Homo sapien
tcccgtgggcacctgctgataatca

SEQ ID NO: 721472 - DNA, 25 bp, Homo sapien
caccctagtcctgagaatgcatacc

SEQ ID NO: 721473 - DNA, 25 bp, Homo sapien
gcttctgtggtgaaaccaactctct

SEQ ID NO: 721474 - DNA, 25 bp, Homo sapien
tgattgctgatctttgtgtatgaac

SEQ ID NO: 721475 - DNA, 25 bp, Homo sapien
tgaaagaattgcaacatcaccttcc

SEQ ID NO: 721476 - DNA, 25 bp, Homo sapien
catattcgactgctacttttcagga

SEQ ID NO: 721477 - DNA, 25 bp, Homo sapien
acacggccttccctctaggattttg

SEQ ID NO: 721478 - DNA, 25 bp, Homo sapien
tttgcaatttccagagtagccctcg

SEQ ID NO: 721479 - DNA, 25 bp, Homo sapien
gggtctctcaggagctgccacctcg

SEQ ID NO: 721480 - DNA, 25 bp, Homo sapien
ggagctcgccgattttgctctctct

SEQ ID NO: 721481 - DNA, 25 bp, Homo sapien
tcctgttcgaattgcagtttcggat

SEQ ID NO: 721482 - DNA, 25 bp, Homo sapien
ccccgagctcgaatctttttcttgg

SEQ ID NO: 721483 - DNA, 25 bp, Homo sapien
caaacgctacttttggcgctcgtgg

SEQ ID NO: 721484 - DNA, 25 bp, Homo sapien
caaaatctgggcgagaaaagaacaa

SEQ ID NO: 721485 - DNA, 25 bp, Homo sapien
ccttgttttccagcgcgaaagaggg

SEQ ID NO: 721486 - DNA, 25 bp, Homo sapien
tgatcgcggcactcccgcggaggat

SEQ ID NO: 721487 - DNA, 25 bp, Homo sapien
atggatggccgagacttcgggcccc

SEQ ID NO: 721488 - DNA, 25 bp, Homo sapien
cgggaagtacatggccggcctgaat

SEQ ID NO: 721489 - DNA, 25 bp, Homo sapien
aatctccatccgcacccgggtaagt

SEQ ID NO: 721490 - DNA, 25 bp, Homo sapien
gccgccgagcgcaagccccgctggc

SEQ ID NO: 721491 - DNA, 25 bp, Homo sapien
tggccgccgccatgcacgccgcgga

SEQ ID NO: 721492 - DNA, 25 bp, Homo sapien
actctgggactacgccgaggccgaa

SEQ ID NO: 721493 - DNA, 25 bp, Homo sapien
ggactctgggactacgccgaggccg

SEQ ID NO: 721494 - DNA, 25 bp, Homo sapien
cgccaagacgccgtgtgcgccgcct

SEQ ID NO: 721495 - DNA, 25 bp, Homo sapien
tctcctccccgccaagacgccgtgt

SEQ ID NO: 721496 - DNA, 25 bp, Homo sapien
tttctatttcttccgcggcctgtct

SEQ ID NO: 721497 - DNA, 25 bp, Homo sapien
aagacgccgtgtgcgccgcctcgcg

SEQ ID NO: 721498 - DNA, 25 bp, Homo sapien
gctactgtctggctccggattgcag

SEQ ID NO: 721499 - DNA, 25 bp, Homo sapien
gacgccgagacgttttcgattatag

SEQ ID NO: 721500 - DNA, 25 bp, Homo sapien
aaaagtaaggagaacgcagcggagc

SEQ ID NO: 721501 - DNA, 25 bp, Homo sapien
agccggaattcagccattttaactc

SEQ ID NO: 721502 - DNA, 25 bp, Homo sapien
aggcggcccattaaaccgcgccttg

SEQ ID NO: 721503 - DNA, 25 bp, Homo sapien
tctattttgatcactcagcccagac

SEQ ID NO: 721504 - DNA, 25 bp, Homo sapien
ggattgcggcgacaaccatcttcct

SEQ ID NO: 721505 - DNA, 25 bp, Homo sapien
tcaccaccagttttgatcattcagc

SEQ ID NO: 721506 - DNA, 25 bp, Homo sapien
cagtgctaggaaaacggccttctcg

SEQ ID NO: 721507 - DNA, 25 bp, Homo sapien
gaagattagagactcacccgctgcc

SEQ ID NO: 721508 - DNA, 25 bp, Homo sapien
agggattcagttcgcgctcagccga

SEQ ID NO: 721509 - DNA, 25 bp, Homo sapien
tctgacaccgcgtttcagggaggga

SEQ ID NO: 721510 - DNA, 25 bp, Homo sapien
gcactttttgggcttggcggctact

SEQ ID NO: 721511 - DNA, 25 bp, Homo sapien
tagaaactaacgcaggaagctccag

SEQ ID NO: 721512 - DNA, 25 bp, Homo sapien
tttccagggtacgtaatgcctagcc

SEQ ID NO: 721513 - DNA, 25 bp, Homo sapien
gaacgaatgggcactaactcgctca

SEQ ID NO: 721514 - DNA, 25 bp, Homo sapien
aattacggcgtctcggagcatccag

SEQ ID NO: 721515 - DNA, 25 bp, Homo sapien
atgatttatggcacacgtaccccgc

SEQ ID NO: 721516 - DNA, 25 bp, Homo sapien
tctgcgtaaggctcaagggcgctct

SEQ ID NO: 721517 - DNA, 25 bp, Homo sapien
tgggagggcttaactaggaacacac

SEQ ID NO: 721518 - DNA, 25 bp, Homo sapien
tcagagatggatggtgttgacaccg

SEQ ID NO: 721519 - DNA, 25 bp, Homo sapien
tctctttggtgaacggagaagctcc

SEQ ID NO: 721520 - DNA, 25 bp, Homo sapien
taccccaaggcggtgatcctgtgaa

SEQ ID NO: 721521 - DNA, 25 bp, Homo sapien
ttgacaccgaggaacgaggccgttc

SEQ ID NO: 721522 - DNA, 25 bp, Homo sapien
tgcaaatgcgccctctctggatctg

SEQ ID NO: 721523 - DNA, 25 bp, Homo sapien
ctagaaattctaggaaggagccgaa

SEQ ID NO: 721524 - DNA, 25 bp, Homo sapien
tattcgtgtgtcaaaaccgccgctt

SEQ ID NO: 721525 - DNA, 25 bp, Homo sapien
gggcaagcgctcaaattcctctggg

SEQ ID NO: 721526 - DNA, 25 bp, Homo sapien
ctcttcagcaggcgcccccgggagc

SEQ ID NO: 721527 - DNA, 25 bp, Homo sapien
gctcttcagcaggcgcccccgggag

SEQ ID NO: 721528 - DNA, 25 bp, Homo sapien
ggtgacaatgtggatggcccgccat

SEQ ID NO: 721529 - DNA, 25 bp, Homo sapien
caggtagactgagcaggatcgcaga

SEQ ID NO: 721530 - DNA, 25 bp, Homo sapien
tgagaagactgagtactgagtggcc

SEQ ID NO: 721531 - DNA, 25 bp, Homo sapien
gccagattagctgaggacgtgtcct

SEQ ID NO: 721532 - DNA, 25 bp, Homo sapien
tgcaggtttgttacggcagccacag

SEQ ID NO: 721533 - DNA, 25 bp, Homo sapien
gcaggtttgttacggcagccacagg

SEQ ID NO: 721534 - DNA, 25 bp, Homo sapien
cacaggacactaacacagatctgga

SEQ ID NO: 721535 - DNA, 25 bp, Homo sapien
gccacaggacactaacacagatctg

SEQ ID NO: 721536 - DNA, 25 bp, Homo sapien
aaagcaaattaaaggggctgctgag

SEQ ID NO: 721537 - DNA, 25 bp, Homo sapien
gaaagcaaattaaaggggctgctga

SEQ ID NO: 721538 - DNA, 25 bp, Homo sapien
aagcaaattaaaggggctgctgagg

SEQ ID NO: 721539 - DNA, 25 bp, Homo sapien
agaaagcaaattaaaggggctgctg

SEQ ID NO: 721540 - DNA, 25 bp, Homo sapien
gatcttctcaggaccgacttggcgc

SEQ ID NO: 721541 - DNA, 25 bp, Homo sapien
caggaccgacttggcgccatgggaa

SEQ ID NO: 721542 - DNA, 25 bp, Homo sapien
aatgcaaacccataataggagccca

SEQ ID NO: 721543 - DNA, 25 bp, Homo sapien
ggaatgcaaacccataataggagcc

SEQ ID NO: 721544 - DNA, 25 bp, Homo sapien
cacgcccgttcatacccgtacactt

SEQ ID NO: 721545 - DNA, 25 bp, Homo sapien
acgcccgcagactggcacacgcaca

SEQ ID NO: 721546 - DNA, 25 bp, Homo sapien
gcatgtgcactcactcgtccaacgg

SEQ ID NO: 721547 - DNA, 25 bp, Homo sapien
tacccgtacacttcagacactctga

SEQ ID NO: 721548 - DNA, 25 bp, Homo sapien
tcagaactgcgggtttcccagagtt

SEQ ID NO: 721549 - DNA, 25 bp, Homo sapien
gggtttcgtggcagctcaggctccc

SEQ ID NO: 721550 - DNA, 25 bp, Homo sapien
gaactctgatgtggagggtccagga

SEQ ID NO: 721551 - DNA, 25 bp, Homo sapien
gttcctggctctcgggtttcgtggc

SEQ ID NO: 721552 - DNA, 25 bp, Homo sapien
tgctgtgttccaagctcaggaagtg

SEQ ID NO: 721553 - DNA, 25 bp, Homo sapien
agctcaggaagtggacatctccccc

SEQ ID NO: 721554 - DNA, 25 bp, Homo sapien
cttcacaggtgccgggggccactct

SEQ ID NO: 721555 - DNA, 25 bp, Homo sapien
tccaagctcaggaagtggacatctc

SEQ ID NO: 721556 - DNA, 25 bp, Homo sapien
ggtctgtacctggagtcgactgagt

SEQ ID NO: 721557 - DNA, 25 bp, Homo sapien
atgcgaagagccctgaaaaggtcag

SEQ ID NO: 721558 - DNA, 25 bp, Homo sapien
gaggccagaacatgcgaagagccct

SEQ ID NO: 721559 - DNA, 25 bp, Homo sapien
catgtggcgagcctttaaagtaaaa

SEQ ID NO: 721560 - DNA, 25 bp, Homo sapien
tctgggaagaggctcggcccaaatg

SEQ ID NO: 721561 - DNA, 25 bp, Homo sapien
tgggaagaggctcggcccaaatgtg

SEQ ID NO: 721562 - DNA, 25 bp, Homo sapien
gaggaggcaccaggatccggatggg

SEQ ID NO: 721563 - DNA, 25 bp, Homo sapien
ggaggcaccaggatccggatgggga

SEQ ID NO: 721564 - DNA, 25 bp, Homo sapien
gaagtttctagatctactgggcatg

SEQ ID NO: 721565 - DNA, 25 bp, Homo sapien
gccgtatctcatgaccaggtgctaa

SEQ ID NO: 721566 - DNA, 25 bp, Homo sapien
gaaaaccgcctgtcagaacacttgg

SEQ ID NO: 721567 - DNA, 25 bp, Homo sapien
tgagcattgtctgtccacgtgagac

SEQ ID NO: 721568 - DNA, 25 bp, Homo sapien
tgctccttttaggatctgaaaatta

SEQ ID NO: 721569 - DNA, 25 bp, Homo sapien
ttcccctgttatctgctccttttag

SEQ ID NO: 721570 - DNA, 25 bp, Homo sapien
gctccttttaggatctgaaaattac

SEQ ID NO: 721571 - DNA, 25 bp, Homo sapien
tcccctgttatctgctccttttagg

SEQ ID NO: 721572 - DNA, 25 bp, Homo sapien
ggccagacctagagccgtagggctc

SEQ ID NO: 721573 - DNA, 25 bp, Homo sapien
agagccacaggccgttggacccagg

SEQ ID NO: 721574 - DNA, 25 bp, Homo sapien
tgctccggccttggcggtgccagca

SEQ ID NO: 721575 - DNA, 25 bp, Homo sapien
cctggatgcggggaccttgatcccc

SEQ ID NO: 721576 - DNA, 25 bp, Homo sapien
ctgccaggacatgggcctgagcggt

SEQ ID NO: 721577 - DNA, 25 bp, Homo sapien
ttgctgcttcgacccaggacggcag

SEQ ID NO: 721578 - DNA, 25 bp, Homo sapien
tgcacagggcgggaagacacttgct

SEQ ID NO: 721579 - DNA, 25 bp, Homo sapien
caggacgggctgagctcctcttgcg

SEQ ID NO: 721580 - DNA, 25 bp, Homo sapien
tggaaagcacccctgaaacagtgga

SEQ ID NO: 721581 - DNA, 25 bp, Homo sapien
gaattgcgtctgctccaggaatgca

SEQ ID NO: 721582 - DNA, 25 bp, Homo sapien
tccccactcgggctagagaattgcg

SEQ ID NO: 721583 - DNA, 25 bp, Homo sapien
catcctagcgtgtgtacgatcgcgc

SEQ ID NO: 721584 - DNA, 25 bp, Homo sapien
acacccagtcatcacattgaggaac

SEQ ID NO: 721585 - DNA, 25 bp, Homo sapien
agagaggcacatctcgccaatgagt

SEQ ID NO: 721586 - DNA, 25 bp, Homo sapien
tctgcagcatctgaacaaggtttga

SEQ ID NO: 721587 - DNA, 25 bp, Homo sapien
cacattgaggaactataggaggatc

SEQ ID NO: 721588 - DNA, 25 bp, Homo sapien
tgcctcctccccagtagcttggctt

SEQ ID NO: 721589 - DNA, 25 bp, Homo sapien
attcttctgccttcgcctctggagt

SEQ ID NO: 721590 - DNA, 25 bp, Homo sapien
gcgattcttctgccttcgcctctgg

SEQ ID NO: 721591 - DNA, 25 bp, Homo sapien
tggagtagctgggataaaaggcgca

SEQ ID NO: 721592 - DNA, 25 bp, Homo sapien
gtgggacacattccagcacacctgt

SEQ ID NO: 721593 - DNA, 25 bp, Homo sapien
ttccatccaggcaaatatgtacagg

SEQ ID NO: 721594 - DNA, 25 bp, Homo sapien
tcccagggaagaaaggtgggacaca

SEQ ID NO: 721595 - DNA, 25 bp, Homo sapien
caggaaacctccgatacccgtgtgg

SEQ ID NO: 721596 - DNA, 25 bp, Homo sapien
tcctgatcgccagagttgtccccgt

SEQ ID NO: 721597 - DNA, 25 bp, Homo sapien
tcagtgccccggttccttggctggg

SEQ ID NO: 721598 - DNA, 25 bp, Homo sapien
gagcctgcttgctgaatgacgtggg

SEQ ID NO: 721599 - DNA, 25 bp, Homo sapien
cctgtctcggaaggcacaagctgtc

SEQ ID NO: 721600 - DNA, 25 bp, Homo sapien
ttcgagcatccctagccgggcaggt

SEQ ID NO: 721601 - DNA, 25 bp, Homo sapien
cccgcctgcggacgaacggaagtgc

SEQ ID NO: 721602 - DNA, 25 bp, Homo sapien
acatggccagctccggagaggtact

SEQ ID NO: 721603 - DNA, 25 bp, Homo sapien
ggaagtgacgagagcccgctccttg

SEQ ID NO: 721604 - DNA, 25 bp, Homo sapien
ggcgtttgcacacgaaagacagtgg

SEQ ID NO: 721605 - DNA, 25 bp, Homo sapien
gcctaagaacgagctcagagaagag

SEQ ID NO: 721606 - DNA, 25 bp, Homo sapien
gagaggaggcgacgctattccatga

SEQ ID NO: 721607 - DNA, 25 bp, Homo sapien
cgtcggtcagatggtgcaaaaatct

SEQ ID NO: 721608 - DNA, 25 bp, Homo sapien
cagaggatgcgacggaatcgtgaca

SEQ ID NO: 721609 - DNA, 25 bp, Homo sapien
ggaatattccgagggacaatggcag

SEQ ID NO: 721610 - DNA, 25 bp, Homo sapien
ccaaaacgctgagtagtggtaacta

SEQ ID NO: 721611 - DNA, 25 bp, Homo sapien
cgatgatggaacacttgatcttagc

SEQ ID NO: 721612 - DNA, 25 bp, Homo sapien
cttgcctccaccttccaaagtactg

SEQ ID NO: 721613 - DNA, 25 bp, Homo sapien
gcagtcctcttgcctccaccttcca

SEQ ID NO: 721614 - DNA, 25 bp, Homo sapien
gctatattgcttgggctgatctgaa

SEQ ID NO: 721615 - DNA, 25 bp, Homo sapien
gtcttgctatattgcttgggctgat

SEQ ID NO: 721616 - DNA, 25 bp, Homo sapien
gacagcttcacccataggttgacca

SEQ ID NO: 721617 - DNA, 25 bp, Homo sapien
tcttgccaaggaagtcccagcctta

SEQ ID NO: 721618 - DNA, 25 bp, Homo sapien
tatagctgcacaagcgtctgctgcc

SEQ ID NO: 721619 - DNA, 25 bp, Homo sapien
cctggtgtcaaaaagacgggactgc

SEQ ID NO: 721620 - DNA, 25 bp, Homo sapien
cacgagcatcgggtgatgttcatta

SEQ ID NO: 721621 - DNA, 25 bp, Homo sapien
gcagagactttgatgaacacgagca

SEQ ID NO: 721622 - DNA, 25 bp, Homo sapien
taattgggcctgctgtggtgacgca

SEQ ID NO: 721623 - DNA, 25 bp, Homo sapien
ggaagacatcacaagcacgaaggca

SEQ ID NO: 721624 - DNA, 25 bp, Homo sapien
tatgacttagttgcgttacaccctt

SEQ ID NO: 721625 - DNA, 25 bp, Homo sapien
caaagttcacaatgtggccgaggac

SEQ ID NO: 721626 - DNA, 25 bp, Homo sapien
tcctcctgagcgcaagtactccgtg

SEQ ID NO: 721627 - DNA, 25 bp, Homo sapien
tttgaatgatgagccttcgtgcccc

SEQ ID NO: 721628 - DNA, 25 bp, Homo sapien
tgtggcatccacgaaactaccttca

SEQ ID NO: 721629 - DNA, 25 bp, Homo sapien
atccgcaaagacctgtacgccaaca

SEQ ID NO: 721630 - DNA, 25 bp, Homo sapien
tgccctggcacccagcacaatgaag

SEQ ID NO: 721631 - DNA, 25 bp, Homo sapien
taccctggcattgccgacaggatgc

SEQ ID NO: 721632 - DNA, 25 bp, Homo sapien
cccagccatgtacgttgctatccag

SEQ ID NO: 721633 - DNA, 25 bp, Homo sapien
gctatccaggctgtgctatccctgt

SEQ ID NO: 721634 - DNA, 25 bp, Homo sapien
tgtacgttgctatccaggctgtgct

SEQ ID NO: 721635 - DNA, 25 bp, Homo sapien
gccatgtacgttgctatccaggctg

SEQ ID NO: 721636 - DNA, 25 bp, Homo sapien
ccccaaggccaaccgcgagaagatg

SEQ ID NO: 721637 - DNA, 25 bp, Homo sapien
tgaaccccaaggccaaccgcgagaa

SEQ ID NO: 721638 - DNA, 25 bp, Homo sapien
aaggccaaccgcgagaagatgaccc

SEQ ID NO: 721639 - DNA, 25 bp, Homo sapien
cctgaaccccaaggccaaccgcgag

SEQ ID NO: 721640 - DNA, 25 bp, Homo sapien
tgccttttatggtaataacgcggcc

SEQ ID NO: 721641 - DNA, 25 bp, Homo sapien
cgctaactgcgtgcgcgctgggaat

SEQ ID NO: 721642 - DNA, 25 bp, Homo sapien
tctgagccgggctcttgccaatggg

SEQ ID NO: 721643 - DNA, 25 bp, Homo sapien
aattggcgctaattgcgcgtgcgcg

SEQ ID NO: 721644 - DNA, 25 bp, Homo sapien
gatgtccacacctaggatgtcccgc

SEQ ID NO: 721645 - DNA, 25 bp, Homo sapien
tgcccaagagatgtccacacctagg

SEQ ID NO: 721646 - DNA, 25 bp, Homo sapien
acacctaggatgtcccgcggtgggt

SEQ ID NO: 721647 - DNA, 25 bp, Homo sapien
cgctcagtgcccaagagatgtccac

SEQ ID NO: 721648 - DNA, 25 bp, Homo sapien
tctgagaggggtgtgcggcagggcg

SEQ ID NO: 721649 - DNA, 25 bp, Homo sapien
ttcttctgagaggggtgtgcggcag

SEQ ID NO: 721650 - DNA, 25 bp, Homo sapien
gttcttctgagaggggtgtgcggca

SEQ ID NO: 721651 - DNA, 25 bp, Homo sapien
cttctgagaggggtgtgcggcaggg

SEQ ID NO: 721652 - DNA, 25 bp, Homo sapien
ggcatttcgaaagtcgcggccacac

SEQ ID NO: 721653 - DNA, 25 bp, Homo sapien
ctccgccgccccttcggagaagcag

SEQ ID NO: 721654 - DNA, 25 bp, Homo sapien
gaagcagccgggcatttcgaaagtc

SEQ ID NO: 721655 - DNA, 25 bp, Homo sapien
gggaagcccgcggaggaagtcgctg

SEQ ID NO: 721656 - DNA, 25 bp, Homo sapien
ggaaaagagaaatcagggactcgat

SEQ ID NO: 721657 - DNA, 25 bp, Homo sapien
tggaaaagagaaatcagggactcga

SEQ ID NO: 721658 - DNA, 25 bp, Homo sapien
tcgatgctcagtctctgcagggctg

SEQ ID NO: 721659 - DNA, 25 bp, Homo sapien
agggactcgatgctcagtctctgca

SEQ ID NO: 721660 - DNA, 25 bp, Homo sapien
ttggagagagtgcagttataaccac

SEQ ID NO: 721661 - DNA, 25 bp, Homo sapien
gagagtgcagttataaccacccttt

SEQ ID NO: 721662 - DNA, 25 bp, Homo sapien
tggagagagtgcagttataaccacc

SEQ ID NO: 721663 - DNA, 25 bp, Homo sapien
gagagagtgcagttataaccaccct

SEQ ID NO: 721664 - DNA, 25 bp, Homo sapien
ttcatcatgcggtgaaggaccccgg

SEQ ID NO: 721665 - DNA, 25 bp, Homo sapien
gtcattgttggtgcccagtttcttc

SEQ ID NO: 721666 - DNA, 25 bp, Homo sapien
tctagctgcccgtcattgttggtgc

SEQ ID NO: 721667 - DNA, 25 bp, Homo sapien
tgagaaatctagctgcccgtcattg

SEQ ID NO: 721668 - DNA, 25 bp, Homo sapien
ttgttgtattaccatccgcaggtgg

SEQ ID NO: 721669 - DNA, 25 bp, Homo sapien
ttgtattaccatccgcaggtgggac

SEQ ID NO: 721670 - DNA, 25 bp, Homo sapien
tattaccatccgcaggtgggacctg

SEQ ID NO: 721671 - DNA, 25 bp, Homo sapien
tgttgtattaccatccgcaggtggg

SEQ ID NO: 721672 - DNA, 25 bp, Homo sapien
agcgcgcagcttgccagtaactcca

SEQ ID NO: 721673 - DNA, 25 bp, Homo sapien
gcggttcttgccctgaattaggtga

SEQ ID NO: 721674 - DNA, 25 bp, Homo sapien
aattaggtgaattaggcggacagcg

SEQ ID NO: 721675 - DNA, 25 bp, Homo sapien
tgccagtaactccagcaagcctcat

SEQ ID NO: 721676 - DNA, 25 bp, Homo sapien
aggacgctgttacttcgccctcggt

SEQ ID NO: 721677 - DNA, 25 bp, Homo sapien
cggcttccctaaggaaggcgatttg

SEQ ID NO: 721678 - DNA, 25 bp, Homo sapien
gggccgccccgctgcatcgtttgtt

SEQ ID NO: 721679 - DNA, 25 bp, Homo sapien
gatgggccctcaggacgctgttact

SEQ ID NO: 721680 - DNA, 25 bp, Homo sapien
cagcgccttcctcaagtgctcgagt

SEQ ID NO: 721681 - DNA, 25 bp, Homo sapien
tgctcgagttcggtgctcacagcca

SEQ ID NO: 721682 - DNA, 25 bp, Homo sapien
accatggtcgcagtcactactacga

SEQ ID NO: 721683 - DNA, 25 bp, Homo sapien
ctatggcagcgcgacaggccctaag

SEQ ID NO: 721684 - DNA, 25 bp, Homo sapien
taggttcctgaaggtggtcaaatcc

SEQ ID NO: 721685 - DNA, 25 bp, Homo sapien
gtggtcaaatccagggcgcccctct

SEQ ID NO: 721686 - DNA, 25 bp, Homo sapien
cccaagagggcccaaagccctgaag

SEQ ID NO: 721687 - DNA, 25 bp, Homo sapien
ccgggcagccaaggtaggttcctga

SEQ ID NO: 721688 - DNA, 25 bp, Homo sapien
aaaaatcagaataagcatcgctctc

SEQ ID NO: 721689 - DNA, 25 bp, Homo sapien
ctcagtgacaatgctacgacctcca

SEQ ID NO: 721690 - DNA, 25 bp, Homo sapien
cagaataagcatcgctctcagtgac

SEQ ID NO: 721691 - DNA, 25 bp, Homo sapien
gtgacaatgctacgacctccacctt

SEQ ID NO: 721692 - DNA, 25 bp, Homo sapien
ctgtggatccatacatgagctgccc

SEQ ID NO: 721693 - DNA, 25 bp, Homo sapien
gagttaactgtgcagtccaggaggg

SEQ ID NO: 721694 - DNA, 25 bp, Homo sapien
tccatacatgagctgccctgtgcag

SEQ ID NO: 721695 - DNA, 25 bp, Homo sapien
tggatccatacatgagctgccctgt

SEQ ID NO: 721696 - DNA, 25 bp, Homo sapien
tgtggcacccgcgaggaggcctggt

SEQ ID NO: 721697 - DNA, 25 bp, Homo sapien
cctcgtggccgagagcctgtgaatg

SEQ ID NO: 721698 - DNA, 25 bp, Homo sapien
cctgtgaatggcgtctctgttgctg

SEQ ID NO: 721699 - DNA, 25 bp, Homo sapien
ccctctgtaaatgagcggcctcgtg

SEQ ID NO: 721700 - DNA, 25 bp, Homo sapien
cccgcacgcaccctccgcagcgctc

SEQ ID NO: 721701 - DNA, 25 bp, Homo sapien
gttcggctgccgcggcccgcacgca

SEQ ID NO: 721702 - DNA, 25 bp, Homo sapien
cctttgttcggctgccgcggcccgc

SEQ ID NO: 721703 - DNA, 25 bp, Homo sapien
ggtggcagtagacgagaggccgctg

SEQ ID NO: 721704 - DNA, 25 bp, Homo sapien
tacttgttgccgcagttgatgaggc

SEQ ID NO: 721705 - DNA, 25 bp, Homo sapien
tcaggtacttgttgccgcagttgat

SEQ ID NO: 721706 - DNA, 25 bp, Homo sapien
tgttgccgcagttgatgaggccgaa

SEQ ID NO: 721707 - DNA, 25 bp, Homo sapien
cctcggctgtgccgttggcggtcat

SEQ ID NO: 721708 - DNA, 25 bp, Homo sapien
agggggctgctccagcgtccagatc

SEQ ID NO: 721709 - DNA, 25 bp, Homo sapien
tggctgcgcaggcacacggccgcgc

SEQ ID NO: 721710 - DNA, 25 bp, Homo sapien
tcgtcagggggctgctccagcgtcc

SEQ ID NO: 721711 - DNA, 25 bp, Homo sapien
cgcgctgcccgcctcgtcagggggc

SEQ ID NO: 721712 - DNA, 25 bp, Homo sapien
gtccttgtccgccgccaggtagcgg

SEQ ID NO: 721713 - DNA, 25 bp, Homo sapien
tagatgttgacctgagggtgcatgg

SEQ ID NO: 721714 - DNA, 25 bp, Homo sapien
gtgcgcctcggactgcagcgaccag

SEQ ID NO: 721715 - DNA, 25 bp, Homo sapien
tgcatggcgatgtgcacgctccact

SEQ ID NO: 721716 - DNA, 25 bp, Homo sapien
ggcgccaggtaacggccctcgcagt

SEQ ID NO: 721717 - DNA, 25 bp, Homo sapien
ttgcccgccttgagcgtgccgctgg

SEQ ID NO: 721718 - DNA, 25 bp, Homo sapien
taacggccctcgcagtcgcggaagg

SEQ ID NO: 721719 - DNA, 25 bp, Homo sapien
agcgtgtagccagtggccggctcgg

SEQ ID NO: 721720 - DNA, 25 bp, Homo sapien
gggccgtcaggagggctccttccaa

SEQ ID NO: 721721 - DNA, 25 bp, Homo sapien
ggctcccgtccagccatctccaagg

SEQ ID NO: 721722 - DNA, 25 bp, Homo sapien
ccgtcaggagggctccttccaagag

SEQ ID NO: 721723 - DNA, 25 bp, Homo sapien
ggagggatgaggacacaaactgggc

SEQ ID NO: 721724 - DNA, 25 bp, Homo sapien
ggaggcctggaatgcacactttaca

SEQ ID NO: 721725 - DNA, 25 bp, Homo sapien
tggcgttccccagcatgtgtgtcgg

SEQ ID NO: 721726 - DNA, 25 bp, Homo sapien
tagaaacgagataaggaccccaaga

SEQ ID NO: 721727 - DNA, 25 bp, Homo sapien
cccgggagttggctgacatagaaac

SEQ ID NO: 721728 - DNA, 25 bp, Homo sapien
gggaggctccttctcaatgagactt

SEQ ID NO: 721729 - DNA, 25 bp, Homo sapien
ggctccttctcaatgagacttccaa

SEQ ID NO: 721730 - DNA, 25 bp, Homo sapien
cagcccgcctggaacaaatgcagga

SEQ ID NO: 721731 - DNA, 25 bp, Homo sapien
gacttccaatggctgcgcagggctt

SEQ ID NO: 721732 - DNA, 25 bp, Homo sapien
tgtccaatgcgctggggctccgctg

SEQ ID NO: 721733 - DNA, 25 bp, Homo sapien
ttagggaccaggtaagaggacagcc

SEQ ID NO: 721734 - DNA, 25 bp, Homo sapien
agggaccaggtaagaggacagcctc

SEQ ID NO: 721735 - DNA, 25 bp, Homo sapien
agccccgctgatcggagggaagtta

SEQ ID NO: 721736 - DNA, 25 bp, Homo sapien
aggccaaggcaagctacatctgttc

SEQ ID NO: 721737 - DNA, 25 bp, Homo sapien
gtgggcggccgagtccccacagtgg

SEQ ID NO: 721738 - DNA, 25 bp, Homo sapien
cacagaactacacacgcaaggtaac

SEQ ID NO: 721739 - DNA, 25 bp, Homo sapien
cctagttctggcagaccatagccct

SEQ ID NO: 721740 - DNA, 25 bp, Homo sapien
cagctggaaggtctcctggtcggtc

SEQ ID NO: 721741 - DNA, 25 bp, Homo sapien
tggaaggtctcctggtcggtctcct

SEQ ID NO: 721742 - DNA, 25 bp, Homo sapien
aggtctcctggtcggtctcctcgtc

SEQ ID NO: 721743 - DNA, 25 bp, Homo sapien
tgtcgcggtcgatctccagctggaa

SEQ ID NO: 721744 - DNA, 25 bp, Homo sapien
cacgccactcgatgtcaaagtagca

SEQ ID NO: 721745 - DNA, 25 bp, Homo sapien
gtcacgccactcgatgtcaaagtag

SEQ ID NO: 721746 - DNA, 25 bp, Homo sapien
gccggtcacgccactcgatgtcaaa

SEQ ID NO: 721747 - DNA, 25 bp, Homo sapien
gccactcgatgtcaaagtagcagct

SEQ ID NO: 721748 - DNA, 25 bp, Homo sapien
gatgatggggcggttgatgagcttc

SEQ ID NO: 721749 - DNA, 25 bp, Homo sapien
gccgatgaagccatgctccccgcgg

SEQ ID NO: 721750 - DNA, 25 bp, Homo sapien
atgaagccatgctccccgcggaaca

SEQ ID NO: 721751 - DNA, 25 bp, Homo sapien
gctccccgcggaacacgatgatggg

SEQ ID NO: 721752 - DNA, 25 bp, Homo sapien
tgttgtaggcgccatcgttgaactc

SEQ ID NO: 721753 - DNA, 25 bp, Homo sapien
ctttgatgttgtaggcgccatcgtt

SEQ ID NO: 721754 - DNA, 25 bp, Homo sapien
taggcgccatcgttgaactccagct

SEQ ID NO: 721755 - DNA, 25 bp, Homo sapien
tttgatgttgtaggcgccatcgttg

SEQ ID NO: 721756 - DNA, 25 bp, Homo sapien
gggttccctgcccagcagctgccca

SEQ ID NO: 721757 - DNA, 25 bp, Homo sapien
cgaggggttccctgcccagcagctg

SEQ ID NO: 721758 - DNA, 25 bp, Homo sapien
aggggttccctgcccagcagctgcc

SEQ ID NO: 721759 - DNA, 25 bp, Homo sapien
ggttccctgcccagcagctgcccac

SEQ ID NO: 721760 - DNA, 25 bp, Homo sapien
tcctagaacgtgttctgctcggccg

SEQ ID NO: 721761 - DNA, 25 bp, Homo sapien
cgcacgtcctcctgtccatgatgga

SEQ ID NO: 721762 - DNA, 25 bp, Homo sapien
ccggaatgagccagggtccctatgg

SEQ ID NO: 721763 - DNA, 25 bp, Homo sapien
gacacatgaacaagggtcctagaac

SEQ ID NO: 721764 - DNA, 25 bp, Homo sapien
ccttgatggccaccttgttatagtc

SEQ ID NO: 721765 - DNA, 25 bp, Homo sapien
tagcgcccgcccaccttgatggcca

SEQ ID NO: 721766 - DNA, 25 bp, Homo sapien
cacggtttccgccgaggccttcagg

SEQ ID NO: 721767 - DNA, 25 bp, Homo sapien
gccttcaggacgcctgcgtggtcgc

SEQ ID NO: 721768 - DNA, 25 bp, Homo sapien
gggagaggcaaaagattccagttac

SEQ ID NO: 721769 - DNA, 25 bp, Homo sapien
aaaacaccacaagggtcagtcctag

SEQ ID NO: 721770 - DNA, 25 bp, Homo sapien
tgacaggcttgggacatgtgcccag

SEQ ID NO: 721771 - DNA, 25 bp, Homo sapien
ggcaggagccgccatgtgggcaggg

SEQ ID NO: 721772 - DNA, 25 bp, Homo sapien
cagatcactcgctactacagccagg

SEQ ID NO: 721773 - DNA, 25 bp, Homo sapien
accaccttggcagaacgtgcagcgg

SEQ ID NO: 721774 - DNA, 25 bp, Homo sapien
ccagtcaggctagggtgaaaggaaa

SEQ ID NO: 721775 - DNA, 25 bp, Homo sapien
gggacgcctccagcaataatatttc

SEQ ID NO: 721776 - DNA, 25 bp, Homo sapien
acgcctggcttcatccacccgggag

SEQ ID NO: 721777 - DNA, 25 bp, Homo sapien
gacgcctggcttcatccacccggga

SEQ ID NO: 721778 - DNA, 25 bp, Homo sapien
cggctcaccccagggctcccggagg

SEQ ID NO: 721779 - DNA, 25 bp, Homo sapien
gcggctcaccccagggctcccggag

SEQ ID NO: 721780 - DNA, 25 bp, Homo sapien
ggcggctcaccccagggctcccgga

SEQ ID NO: 721781 - DNA, 25 bp, Homo sapien
ccggcggctcaccccagggctcccg

SEQ ID NO: 721782 - DNA, 25 bp, Homo sapien
tttgaagctactatcatgggcgttt

SEQ ID NO: 721783 - DNA, 25 bp, Homo sapien
gtttgaagctactatcatgggcgtt

SEQ ID NO: 721784 - DNA, 25 bp, Homo sapien
agctgaactatataggcgttagcca

SEQ ID NO: 721785 - DNA, 25 bp, Homo sapien
ctcagacctaggagcagcgcccgta

SEQ ID NO: 721786 - DNA, 25 bp, Homo sapien
ggagcagcgcccgtaccccgccagg

SEQ ID NO: 721787 - DNA, 25 bp, Homo sapien
gccgatgccctcagacctaggagca

SEQ ID NO: 721788 - DNA, 25 bp, Homo sapien
agacctaggagcagcgcccgtaccc

SEQ ID NO: 721789 - DNA, 25 bp, Homo sapien
ggacggcgctgctcagctgggcagt

SEQ ID NO: 721790 - DNA, 25 bp, Homo sapien
gcccctagtaggtgccacagagaaa

SEQ ID NO: 721791 - DNA, 25 bp, Homo sapien
taggtgccacagagaaaccggcacc

SEQ ID NO: 721792 - DNA, 25 bp, Homo sapien
ctgtgcacgtgccctgagtgtagct

SEQ ID NO: 721793 - DNA, 25 bp, Homo sapien
tagccgtaaagtgggaatcgccgca

SEQ ID NO: 721794 - DNA, 25 bp, Homo sapien
ttagccgtaaagtgggaatcgccgc

SEQ ID NO: 721795 - DNA, 25 bp, Homo sapien
ccgtaaagtgggaatcgccgcagca

SEQ ID NO: 721796 - DNA, 25 bp, Homo sapien
taaagtgggaatcgccgcagcatct

SEQ ID NO: 721797 - DNA, 25 bp, Homo sapien
tcatctaggctggtgtgaagctaac

SEQ ID NO: 721798 - DNA, 25 bp, Homo sapien
caggccacgagctctgttctcagga

SEQ ID NO: 721799 - DNA, 25 bp, Homo sapien
cagtatggcatacctgggcctggca

SEQ ID NO: 721800 - DNA, 25 bp, Homo sapien
gaaggtgccagttaaacccgcagga

SEQ ID NO: 721801 - DNA, 25 bp, Homo sapien
aaataattccgtttcaactactgtg

SEQ ID NO: 721802 - DNA, 25 bp, Homo sapien
tcatatgtaactgggacttttgtaa

SEQ ID NO: 721803 - DNA, 25 bp, Homo sapien
tgtgtaaaaagcctgtatcatatgt

SEQ ID NO: 721804 - DNA, 25 bp, Homo sapien
caactactgtgtgtaaaaagcctgt

SEQ ID NO: 721805 - DNA, 25 bp, Homo sapien
aggcgggcaccgtcattcgctgcca

SEQ ID NO: 721806 - DNA, 25 bp, Homo sapien
accgtcattcgctgccattggcttc

SEQ ID NO: 721807 - DNA, 25 bp, Homo sapien
gactaaagtgggctctaagatctaa

SEQ ID NO: 721808 - DNA, 25 bp, Homo sapien
tcgggagtttgagtccccgtctcta

SEQ ID NO: 721809 - DNA, 25 bp, Homo sapien
tctaccttgatattcacatggaggc

SEQ ID NO: 721810 - DNA, 25 bp, Homo sapien
tcttcatgccttgctcagaacacgt

SEQ ID NO: 721811 - DNA, 25 bp, Homo sapien
gcagatagaaccaatctccagggag

SEQ ID NO: 721812 - DNA, 25 bp, Homo sapien
tgcttgggcactttgcaactcttga

SEQ ID NO: 721813 - DNA, 25 bp, Homo sapien
tgtagccgccatagttaacagttgg

SEQ ID NO: 721814 - DNA, 25 bp, Homo sapien
tgggaatagaaatagtgtagccgcc

SEQ ID NO: 721815 - DNA, 25 bp, Homo sapien
tttaaccacaattcacaccagccaa

SEQ ID NO: 721816 - DNA, 25 bp, Homo sapien
cagcagttccgctctcaggtactca

SEQ ID NO: 721817 - DNA, 25 bp, Homo sapien
taagttcaggctactgaggagaccg

SEQ ID NO: 721818 - DNA, 25 bp, Homo sapien
gagtgagacccaatcccttcgaaaa

SEQ ID NO: 721819 - DNA, 25 bp, Homo sapien
gaggagaccgccatgagctatgctg

SEQ ID NO: 721820 - DNA, 25 bp, Homo sapien
aaaacctaagcctacaagctgggca

SEQ ID NO: 721821 - DNA, 25 bp, Homo sapien
tgagccattcgcagctctccaggaa

SEQ ID NO: 721822 - DNA, 25 bp, Homo sapien
caggaagcagacatcctgcacagct

SEQ ID NO: 721823 - DNA, 25 bp, Homo sapien
tccaggaagcagacatcctgcacag

SEQ ID NO: 721824 - DNA, 25 bp, Homo sapien
gaagcagacatcctgcacagctgca

SEQ ID NO: 721825 - DNA, 25 bp, Homo sapien
tggccttctctgttccagactcatg

SEQ ID NO: 721826 - DNA, 25 bp, Homo sapien
tgctcaccaggaagaccacagcagc

SEQ ID NO: 721827 - DNA, 25 bp, Homo sapien
tcactggccttctctgttccagact

SEQ ID NO: 721828 - DNA, 25 bp, Homo sapien
ttctctgttccagactcatgctcca

SEQ ID NO: 721829 - DNA, 25 bp, Homo sapien
tagaagaatctcaataaccactgac

SEQ ID NO: 721830 - DNA, 25 bp, Homo sapien
gacacattggtctccggaggtccag

SEQ ID NO: 721831 - DNA, 25 bp, Homo sapien
ggcatttggtgttgtagaggacaca

SEQ ID NO: 721832 - DNA, 25 bp, Homo sapien
gctggtgaccagtgcggtactgccc

SEQ ID NO: 721833 - DNA, 25 bp, Homo sapien
ggccggaccacagcttgccctgttc

SEQ ID NO: 721834 - DNA, 25 bp, Homo sapien
ggctggccggaccacagcttgccct

SEQ ID NO: 721835 - DNA, 25 bp, Homo sapien
tggccggaccacagcttgccctgtt

SEQ ID NO: 721836 - DNA, 25 bp, Homo sapien
ctggccggaccacagcttgccctgt

SEQ ID NO: 721837 - DNA, 25 bp, Homo sapien
gtgtgcaccagtgcgctcagcgcct

SEQ ID NO: 721838 - DNA, 25 bp, Homo sapien
cagcctcgttacacttgttacggtg

SEQ ID NO: 721839 - DNA, 25 bp, Homo sapien
cacttgttacggtgtgtgtgcacca

SEQ ID NO: 721840 - DNA, 25 bp, Homo sapien
ttacacttgttacggtgtgtgtgca

SEQ ID NO: 721841 - DNA, 25 bp, Homo sapien
gttgaggaatgggactcgtccttga

SEQ ID NO: 721842 - DNA, 25 bp, Homo sapien
gaggaatgggactcgtccttgacac

SEQ ID NO: 721843 - DNA, 25 bp, Homo sapien
tgaggaatgggactcgtccttgaca

SEQ ID NO: 721844 - DNA, 25 bp, Homo sapien
gaatgggactcgtccttgacacttc

SEQ ID NO: 721845 - DNA, 25 bp, Homo sapien
taagccggagtgttgaagctgagca

SEQ ID NO: 721846 - DNA, 25 bp, Homo sapien
agttgcaaccagtgaggcttgggcc

SEQ ID NO: 721847 - DNA, 25 bp, Homo sapien
atggctgttgatgagatgccatggc

SEQ ID NO: 721848 - DNA, 25 bp, Homo sapien
cagtgtggtctggtaagttgcaacc

SEQ ID NO: 721849 - DNA, 25 bp, Homo sapien
aaagtgaaaattgtcaaaacggctg

SEQ ID NO: 721850 - DNA, 25 bp, Homo sapien
aagtgaaaattgtcaaaacggctgt

SEQ ID NO: 721851 - DNA, 25 bp, Homo sapien
agtgaaaattgtcaaaacggctgtt

SEQ ID NO: 721852 - DNA, 25 bp, Homo sapien
caaagtgaaaattgtcaaaacggct

SEQ ID NO: 721853 - DNA, 25 bp, Homo sapien
tatgatgttgtttctctatagagga

SEQ ID NO: 721854 - DNA, 25 bp, Homo sapien
cttactatggctattctgacctggc

SEQ ID NO: 721855 - DNA, 25 bp, Homo sapien
ctgacctggctttcaatgcactaat

SEQ ID NO: 721856 - DNA, 25 bp, Homo sapien
tccattctggaatttgcgttcgatt

SEQ ID NO: 721857 - DNA, 25 bp, Homo sapien
tatccccagagttcagtagttctgc

SEQ ID NO: 721858 - DNA, 25 bp, Homo sapien
aatagtcactgtcctgaagttgctg

SEQ ID NO: 721859 - DNA, 25 bp, Homo sapien
gctttggccccatcaataacttctg

SEQ ID NO: 721860 - DNA, 25 bp, Homo sapien
gctacccagatttaacatatgttca

SEQ ID NO: 721861 - DNA, 25 bp, Homo sapien
tggctacaagcactcgccaccaagc

SEQ ID NO: 721862 - DNA, 25 bp, Homo sapien
ctcctggctacaagcactcgccacc

SEQ ID NO: 721863 - DNA, 25 bp, Homo sapien
tcagcctcctggctacaagcactcg

SEQ ID NO: 721864 - DNA, 25 bp, Homo sapien
acgcctggccgattttcagtctttt

SEQ ID NO: 721865 - DNA, 25 bp, Homo sapien
gatctcagcgtctaggtcaactttg

SEQ ID NO: 721866 - DNA, 25 bp, Homo sapien
gcaccggttgtctcctacatgccat

SEQ ID NO: 721867 - DNA, 25 bp, Homo sapien
cccctaggtactgttggctcttgtt

SEQ ID NO: 721868 - DNA, 25 bp, Homo sapien
gatcccatcgactctaactctgcag

SEQ ID NO: 721869 - DNA, 25 bp, Homo sapien
tgagtgaggcagatcgaaagttgat

SEQ ID NO: 721870 - DNA, 25 bp, Homo sapien
aagaagggttaggtgtgagtgaggc

SEQ ID NO: 721871 - DNA, 25 bp, Homo sapien
tttagatttttaccctgattagagc

SEQ ID NO: 721872 - DNA, 25 bp, Homo sapien
ataaaagagaactcctgaagcccct

SEQ ID NO: 721873 - DNA, 25 bp, Homo sapien
agaagaagcactgtgacgtagaggg

SEQ ID NO: 721874 - DNA, 25 bp, Homo sapien
gcctcacagtggccctcacatgcac

SEQ ID NO: 721875 - DNA, 25 bp, Homo sapien
gggcctcacagtggccctcacatgc

SEQ ID NO: 721876 - DNA, 25 bp, Homo sapien
ccctcacatgcacctggctccagcc

SEQ ID NO: 721877 - DNA, 25 bp, Homo sapien
aatttctgacaaatccgacagggct

SEQ ID NO: 721878 - DNA, 25 bp, Homo sapien
agaaatttctgacaaatccgacagg

SEQ ID NO: 721879 - DNA, 25 bp, Homo sapien
agcgtgcgcggcgtgcgggttacag

SEQ ID NO: 721880 - DNA, 25 bp, Homo sapien
cggcgtgcgggttacagaaatttct

SEQ ID NO: 721881 - DNA, 25 bp, Homo sapien
ttctgctcccggtggaacaggacca

SEQ ID NO: 721882 - DNA, 25 bp, Homo sapien
gcgtgttccgcgaaagttggcgact

SEQ ID NO: 721883 - DNA, 25 bp, Homo sapien
acaggaccagggatccaagactctg

SEQ ID NO: 721884 - DNA, 25 bp, Homo sapien
gctgtccccgcgtcgaggtggttct

SEQ ID NO: 721885 - DNA, 25 bp, Homo sapien
ctgaggagtaagcggcgcggtagcg

SEQ ID NO: 721886 - DNA, 25 bp, Homo sapien
ctgcctggctagccggcgacttgag

SEQ ID NO: 721887 - DNA, 25 bp, Homo sapien
ctagccggcgacttgagtgacgagt

SEQ ID NO: 721888 - DNA, 25 bp, Homo sapien
agtgacgagtgagtgtcggctgcgg

SEQ ID NO: 721889 - DNA, 25 bp, Homo sapien
ctgtgcgcaggcgcgaggtgacgcc

SEQ ID NO: 721890 - DNA, 25 bp, Homo sapien
gcgctgtgcgcaggcgcgaggtgac

SEQ ID NO: 721891 - DNA, 25 bp, Homo sapien
ggcgctgtgcgcaggcgcgaggtga

SEQ ID NO: 721892 - DNA, 25 bp, Homo sapien
ggggcgctgtgcgcaggcgcgaggt

SEQ ID NO: 721893 - DNA, 25 bp, Homo sapien
cgcctttggccgtaactgcatggaa

SEQ ID NO: 721894 - DNA, 25 bp, Homo sapien
caatgaagccgtgccgtgatgactc

SEQ ID NO: 721895 - DNA, 25 bp, Homo sapien
gaataatggcggtcctccactgctg

SEQ ID NO: 721896 - DNA, 25 bp, Homo sapien
tcttgggaacaaaatgacgatggac

SEQ ID NO: 721897 - DNA, 25 bp, Homo sapien
ctcccagaaccccccacgacgccat

SEQ ID NO: 721898 - DNA, 25 bp, Homo sapien
tgcacaagcttccagaggacggtgg

SEQ ID NO: 721899 - DNA, 25 bp, Homo sapien
tgtcagtcgccgtaggaagagtctg

SEQ ID NO: 721900 - DNA, 25 bp, Homo sapien
gaagtgcgggcattgcagtcctgca

SEQ ID NO: 721901 - DNA, 25 bp, Homo sapien
tgcacctcaaaacactgcgtaaaag

SEQ ID NO: 721902 - DNA, 25 bp, Homo sapien
cccaccactggctgcgatcgggggt

SEQ ID NO: 721903 - DNA, 25 bp, Homo sapien
gcagaactggctcatgtcctcgtgt

SEQ ID NO: 721904 - DNA, 25 bp, Homo sapien
cagcagaactggctcatgtcctcgt

SEQ ID NO: 721905 - DNA, 25 bp, Homo sapien
gaactggctcatgtcctcgtgtctg

SEQ ID NO: 721906 - DNA, 25 bp, Homo sapien
aactggctcatgtcctcgtgtctgc

SEQ ID NO: 721907 - DNA, 25 bp, Homo sapien
ccttgctgttgtgggaaagcaggta

SEQ ID NO: 721908 - DNA, 25 bp, Homo sapien
ggttcttccttgctgttgtgggaaa

SEQ ID NO: 721909 - DNA, 25 bp, Homo sapien
cttccttgctgttgtgggaaagcag

SEQ ID NO: 721910 - DNA, 25 bp, Homo sapien
ttcttccttgctgttgtgggaaagc

SEQ ID NO: 721911 - DNA, 25 bp, Homo sapien
ctggaacagcacatggctgattaat

SEQ ID NO: 721912 - DNA, 25 bp, Homo sapien
ggaacagcacatggctgattaatgt

SEQ ID NO: 721913 - DNA, 25 bp, Homo sapien
cacatggctgattaatgtggagtgg

SEQ ID NO: 721914 - DNA, 25 bp, Homo sapien
tgattaatgtggagtggttggcact

SEQ ID NO: 721915 - DNA, 25 bp, Homo sapien
gccacgtccccgaatgacagtgacc

SEQ ID NO: 721916 - DNA, 25 bp, Homo sapien
ccacgtccccgaatgacagtgaccc

SEQ ID NO: 721917 - DNA, 25 bp, Homo sapien
gaggaccacggggaagtcttcctca

SEQ ID NO: 721918 - DNA, 25 bp, Homo sapien
ttatacaactaagaaaaagagttca

SEQ ID NO: 721919 - DNA, 25 bp, Homo sapien
caactaagaaaaagagttcatgtaa

SEQ ID NO: 721920 - DNA, 25 bp, Homo sapien
tacaactaagaaaaagagttcatgt

SEQ ID NO: 721921 - DNA, 25 bp, Homo sapien
tatacaactaagaaaaagagttcat

SEQ ID NO: 721922 - DNA, 25 bp, Homo sapien
agaaacggttaaaggatttgtgctg

SEQ ID NO: 721923 - DNA, 25 bp, Homo sapien
aacggttaaaggatttgtgctgagc

SEQ ID NO: 721924 - DNA, 25 bp, Homo sapien
acggttaaaggatttgtgctgagcc

SEQ ID NO: 721925 - DNA, 25 bp, Homo sapien
gaaacggttaaaggatttgtgctga

SEQ ID NO: 721926 - DNA, 25 bp, Homo sapien
ctgggaagctccacgtccttatctc

SEQ ID NO: 721927 - DNA, 25 bp, Homo sapien
cccctgctccaaactggagatcaca

SEQ ID NO: 721928 - DNA, 25 bp, Homo sapien
tgggaagctccacgtccttatctct

SEQ ID NO: 721929 - DNA, 25 bp, Homo sapien
cctgctccaaactggagatcacagc

SEQ ID NO: 721930 - DNA, 25 bp, Homo sapien
aggagcctcatcccccggccccctg

SEQ ID NO: 721931 - DNA, 25 bp, Homo sapien
cagcctctccaaatgctaagattac

SEQ ID NO: 721932 - DNA, 25 bp, Homo sapien
ctcagcctctccaaatgctaagatt

SEQ ID NO: 721933 - DNA, 25 bp, Homo sapien
ccaccacacctggtgtatctttatt

SEQ ID NO: 721934 - DNA, 25 bp, Homo sapien
accacacctggtgtatctttattga

SEQ ID NO: 721935 - DNA, 25 bp, Homo sapien
caggtgccagccaccgtacccagct

SEQ ID NO: 721936 - DNA, 25 bp, Homo sapien
gattacaggtgccagccaccgtacc

SEQ ID NO: 721937 - DNA, 25 bp, Homo sapien
gggattacaggtgccagccaccgta

SEQ ID NO: 721938 - DNA, 25 bp, Homo sapien
ttacaggtgccagccaccgtaccca

SEQ ID NO: 721939 - DNA, 25 bp, Homo sapien
ccaagctggagtgtactggagtgat

SEQ ID NO: 721940 - DNA, 25 bp, Homo sapien
aagctggagtgtactggagtgatct

SEQ ID NO: 721941 - DNA, 25 bp, Homo sapien
ctagaaaaaataacacaaacttgtg

SEQ ID NO: 721942 - DNA, 25 bp, Homo sapien
ggagtgatcttggctcactccaact

SEQ ID NO: 721943 - DNA, 25 bp, Homo sapien
cacgtgtgcggacctgctgttttga

SEQ ID NO: 721944 - DNA, 25 bp, Homo sapien
tgaagtccaggttacacatcaaact

SEQ ID NO: 721945 - DNA, 25 bp, Homo sapien
tcatgaagctcatttccggtccagt

SEQ ID NO: 721946 - DNA, 25 bp, Homo sapien
tcctcctcgccaggtaggcgttagg

SEQ ID NO: 721947 - DNA, 25 bp, Homo sapien
tttcaagtttcgaacagagaagaag

SEQ ID NO: 721948 - DNA, 25 bp, Homo sapien
gtttcaagtttcgaacagagaagaa

SEQ ID NO: 721949 - DNA, 25 bp, Homo sapien
tcaagtttcgaacagagaagaagtt

SEQ ID NO: 721950 - DNA, 25 bp, Homo sapien
caagtttcgaacagagaagaagttt

SEQ ID NO: 721951 - DNA, 25 bp, Homo sapien
gcaggaactccctcgtcacagctta

SEQ ID NO: 721952 - DNA, 25 bp, Homo sapien
ggaactccctcgtcacagcttaaag

SEQ ID NO: 721953 - DNA, 25 bp, Homo sapien
agctgcaggaactccctcgtcacag

SEQ ID NO: 721954 - DNA, 25 bp, Homo sapien
tgagctgcaggaactccctcgtcac

SEQ ID NO: 721955 - DNA, 25 bp, Homo sapien
tgtaccctgaggtccgatctgcagc

SEQ ID NO: 721956 - DNA, 25 bp, Homo sapien
tccctgtttgtcagggcaaagcttc

SEQ ID NO: 721957 - DNA, 25 bp, Homo sapien
ttcactgcacgcagaggacttctcc

SEQ ID NO: 721958 - DNA, 25 bp, Homo sapien
cacacaggcgtgtcttccggaagat

SEQ ID NO: 721959 - DNA, 25 bp, Homo sapien
cgtgtgagtcctctgacgcaggatg

SEQ ID NO: 721960 - DNA, 25 bp, Homo sapien
tctgacgcaggatgaggtgtgactt

SEQ ID NO: 721961 - DNA, 25 bp, Homo sapien
cgcgacttgtgggaggttttctcac

SEQ ID NO: 721962 - DNA, 25 bp, Homo sapien
tgggagcgaaggtgctcgatgaggc

SEQ ID NO: 721963 - DNA, 25 bp, Homo sapien
gagtcctgggagcagctttcccgca

SEQ ID NO: 721964 - DNA, 25 bp, Homo sapien
caggagtcctgggagcagctttccc

SEQ ID NO: 721965 - DNA, 25 bp, Homo sapien
agtcctgggagcagctttcccgcac

SEQ ID NO: 721966 - DNA, 25 bp, Homo sapien
ggcaggagtcctgggagcagctttc

SEQ ID NO: 721967 - DNA, 25 bp, Homo sapien
gatgtccctcctagaggttcggcga

SEQ ID NO: 721968 - DNA, 25 bp, Homo sapien
gactttgtgacgatcccacggtctc

SEQ ID NO: 721969 - DNA, 25 bp, Homo sapien
tcggcgacctcgtgatgtgactttg

SEQ ID NO: 721970 - DNA, 25 bp, Homo sapien
tctccctcgtgtggatcccgtggtg

SEQ ID NO: 721971 - DNA, 25 bp, Homo sapien
tctgtctgtagcacacttggaacac

SEQ ID NO: 721972 - DNA, 25 bp, Homo sapien
tccctctgggatgttctcacgcttt

SEQ ID NO: 721973 - DNA, 25 bp, Homo sapien
cgtattgccagaaaatggagtccta

SEQ ID NO: 721974 - DNA, 25 bp, Homo sapien
gggctctgtaatacgtgatgacaaa

SEQ ID NO: 721975 - DNA, 25 bp, Homo sapien
tatatatgtatttggtacagacagg

SEQ ID NO: 721976 - DNA, 25 bp, Homo sapien
aaaaatattgtgcaaccaggctggg

SEQ ID NO: 721977 - DNA, 25 bp, Homo sapien
catcaaaaatattgtgcaaccaggc

SEQ ID NO: 721978 - DNA, 25 bp, Homo sapien
caaaaatattgtgcaaccaggctgg

SEQ ID NO: 721979 - DNA, 25 bp, Homo sapien
tcaaaaatattgtgcaaccaggctg

SEQ ID NO: 721980 - DNA, 25 bp, Homo sapien
tatgtagcatcgatcaacgaacgag

SEQ ID NO: 721981 - DNA, 25 bp, Homo sapien
cacggtccacgtgaagagtgaatga

SEQ ID NO: 721982 - DNA, 25 bp, Homo sapien
taaagtggctctttgtgggtcggcc

SEQ ID NO: 721983 - DNA, 25 bp, Homo sapien
cctggtgggcgggatttcatcaatc

SEQ ID NO: 721984 - DNA, 25 bp, Homo sapien
aatgcattacccaagtactgagcaa

SEQ ID NO: 721985 - DNA, 25 bp, Homo sapien
cattacccaagtactgagcaactct

SEQ ID NO: 721986 - DNA, 25 bp, Homo sapien
tgcattacccaagtactgagcaact

SEQ ID NO: 721987 - DNA, 25 bp, Homo sapien
ttacccaagtactgagcaactctct

SEQ ID NO: 721988 - DNA, 25 bp, Homo sapien
cagagccttcttttgaatacatgcc

SEQ ID NO: 721989 - DNA, 25 bp, Homo sapien
taagtgacgggacagaatatccaaa

SEQ ID NO: 721990 - DNA, 25 bp, Homo sapien
tcagtcatttgcataggcagccgta

SEQ ID NO: 721991 - DNA, 25 bp, Homo sapien
tacagcagcccgagagatgcaatgt

SEQ ID NO: 721992 - DNA, 25 bp, Homo sapien
cagcactgagcacgtccgtgatgct

SEQ ID NO: 721993 - DNA, 25 bp, Homo sapien
gcactgagcacgtccgtgatgctca

SEQ ID NO: 721994 - DNA, 25 bp, Homo sapien
tcagcactgagcacgtccgtgatgc

SEQ ID NO: 721995 - DNA, 25 bp, Homo sapien
cactgagcacgtccgtgatgctcat

SEQ ID NO: 721996 - DNA, 25 bp, Homo sapien
tacccgctctggtcgttgtctatga

SEQ ID NO: 721997 - DNA, 25 bp, Homo sapien
tatgaaccggaaaacatccttcacc

SEQ ID NO: 721998 - DNA, 25 bp, Homo sapien
ctggtcgttgtctatgaaccggaaa

SEQ ID NO: 721999 - DNA, 25 bp, Homo sapien
cgttgtctatgaaccggaaaacatc

SEQ ID NO: 722000 - DNA, 25 bp, Homo sapien
atcattatccgccgcagccatcaag

SEQ ID NO: 722001 - DNA, 25 bp, Homo sapien
agttctctggcaccactctcaaact

SEQ ID NO: 722002 - DNA, 25 bp, Homo sapien
ccatctccatcattatccgccgcag

SEQ ID NO: 722003 - DNA, 25 bp, Homo sapien
aggacttggtttctgactcggtcag

SEQ ID NO: 722004 - DNA, 25 bp, Homo sapien
cttcctgagctagagtgttttatgc

SEQ ID NO: 722005 - DNA, 25 bp, Homo sapien
aagccctcacggatgcttcctgagc

SEQ ID NO: 722006 - DNA, 25 bp, Homo sapien
tcacggatgcttcctgagctagagt

SEQ ID NO: 722007 - DNA, 25 bp, Homo sapien
agctagagtgttttatgctacgtac

SEQ ID NO: 722008 - DNA, 25 bp, Homo sapien
gaaggaccatcatatgttctgctga

SEQ ID NO: 722009 - DNA, 25 bp, Homo sapien
cccttggcgggctaatgtccaataa

SEQ ID NO: 722010 - DNA, 25 bp, Homo sapien
taggattcggcctatggaagactca

SEQ ID NO: 722011 - DNA, 25 bp, Homo sapien
gagggcttcctacgcatgccaatgg

SEQ ID NO: 722012 - DNA, 25 bp, Homo sapien
caggagtgactccctcgtgacctca

SEQ ID NO: 722013 - DNA, 25 bp, Homo sapien
aggagtgactccctcgtgacctcac

SEQ ID NO: 722014 - DNA, 25 bp, Homo sapien
ggagtgactccctcgtgacctcact

SEQ ID NO: 722015 - DNA, 25 bp, Homo sapien
ttaggtgaatcgccttagagccagg

SEQ ID NO: 722016 - DNA, 25 bp, Homo sapien
taggtgaatcgccttagagccagga

SEQ ID NO: 722017 - DNA, 25 bp, Homo sapien
tagaagttagacgttttgcacaaag

SEQ ID NO: 722018 - DNA, 25 bp, Homo sapien
taattaagattctgactcccagcac

SEQ ID NO: 722019 - DNA, 25 bp, Homo sapien
tgcacaaagaatttgcgaactcaaa

SEQ ID NO: 722020 - DNA, 25 bp, Homo sapien
ccagcacaatgggaattcgaatcaa

SEQ ID NO: 722021 - DNA, 25 bp, Homo sapien
gagacagcagccaccggctaaaaca

SEQ ID NO: 722022 - DNA, 25 bp, Homo sapien
gccaccggctaaaacaccgcacttc

SEQ ID NO: 722023 - DNA, 25 bp, Homo sapien
tcccacggcccgcccagagacagca

SEQ ID NO: 722024 - DNA, 25 bp, Homo sapien
aaacaccgcacttccgcctccgtcg

SEQ ID NO: 722025 - DNA, 25 bp, Homo sapien
cggccccggccgccgctgcagccat

SEQ ID NO: 722026 - DNA, 25 bp, Homo sapien
ccgctcccggccccggccgccgctg

SEQ ID NO: 722027 - DNA, 25 bp, Homo sapien
ctcccggccccggccgccgctgcag

SEQ ID NO: 722028 - DNA, 25 bp, Homo sapien
ctgggccgcccagggcccgctcccg

SEQ ID NO: 722029 - DNA, 25 bp, Homo sapien
ctgtccttcgcgcggcccgaagcgc

SEQ ID NO: 722030 - DNA, 25 bp, Homo sapien
tgtccttcgcgcggcccgaagcgcg

SEQ ID NO: 722031 - DNA, 25 bp, Homo sapien
tgtacaatagcttcacacaatccga

SEQ ID NO: 722032 - DNA, 25 bp, Homo sapien
cacacaatccgacatttctaatctt

SEQ ID NO: 722033 - DNA, 25 bp, Homo sapien
gcttcacacaatccgacatttctaa

SEQ ID NO: 722034 - DNA, 25 bp, Homo sapien
caatagcttcacacaatccgacatt

SEQ ID NO: 722035 - DNA, 25 bp, Homo sapien
aattttcttctggttcattgaagaa

SEQ ID NO: 722036 - DNA, 25 bp, Homo sapien
ttctggttcattgaagaactgtctg

SEQ ID NO: 722037 - DNA, 25 bp, Homo sapien
tctgtgtatgtaaagattttgcagg

SEQ ID NO: 722038 - DNA, 25 bp, Homo sapien
tgttcttctgtgtatgtaaagattt

SEQ ID NO: 722039 - DNA, 25 bp, Homo sapien
gatattcaataactggttttccatc

SEQ ID NO: 722040 - DNA, 25 bp, Homo sapien
tttcaattataggattccgaacaac

SEQ ID NO: 722041 - DNA, 25 bp, Homo sapien
tgtcccacaatagttgcgtgctgaa

SEQ ID NO: 722042 - DNA, 25 bp, Homo sapien
ggtacactaactcttggccaaacag

SEQ ID NO: 722043 - DNA, 25 bp, Homo sapien
gcacacagctcagttcaagggaaaa

SEQ ID NO: 722044 - DNA, 25 bp, Homo sapien
tgcagacgcgaaaacacagcacaca

SEQ ID NO: 722045 - DNA, 25 bp, Homo sapien
gcagcaccgagctataaaccttgtc

SEQ ID NO: 722046 - DNA, 25 bp, Homo sapien
gacacattcctactataaggctgag

SEQ ID NO: 722047 - DNA, 25 bp, Homo sapien
tgtgccctgcctcactgaaactttt

SEQ ID NO: 722048 - DNA, 25 bp, Homo sapien
taggcataaacctcactacctgttt

SEQ ID NO: 722049 - DNA, 25 bp, Homo sapien
tccttgagcacatagacacactttt

SEQ ID NO: 722050 - DNA, 25 bp, Homo sapien
ccgatggaagaatttctctaatctt

SEQ ID NO: 722051 - DNA, 25 bp, Homo sapien
gatggaagaatttctctaatctttc

SEQ ID NO: 722052 - DNA, 25 bp, Homo sapien
gaagcttgacgcctccgtcttccat

SEQ ID NO: 722053 - DNA, 25 bp, Homo sapien
tttcagaagcttgacgcctccgtct

SEQ ID NO: 722054 - DNA, 25 bp, Homo sapien
cattttatccaacgggaagaagctg

SEQ ID NO: 722055 - DNA, 25 bp, Homo sapien
gattccaccaaaaatgtcaagtagg

SEQ ID NO: 722056 - DNA, 25 bp, Homo sapien
cagatgagctgatcgttatagagaa

SEQ ID NO: 722057 - DNA, 25 bp, Homo sapien
ggtcacatgactgcaaatgtagcgt

SEQ ID NO: 722058 - DNA, 25 bp, Homo sapien
caaatcaccctagttctgctttaaa

SEQ ID NO: 722059 - DNA, 25 bp, Homo sapien
ttgaacccaaatcaccctagttctg

SEQ ID NO: 722060 - DNA, 25 bp, Homo sapien
gaacccaaatcaccctagttctgct

SEQ ID NO: 722061 - DNA, 25 bp, Homo sapien
cccaaatcaccctagttctgcttta

SEQ ID NO: 722062 - DNA, 25 bp, Homo sapien
ttgctgcagccaccgattcccaggc

SEQ ID NO: 722063 - DNA, 25 bp, Homo sapien
cttgctgcagccaccgattcccagg

SEQ ID NO: 722064 - DNA, 25 bp, Homo sapien
tttgtataaaattctcatgtcatct

SEQ ID NO: 722065 - DNA, 25 bp, Homo sapien
ttattggagaatcccttcctgctaa

SEQ ID NO: 722066 - DNA, 25 bp, Homo sapien
gctcttattggagaatcccttcctg

SEQ ID NO: 722067 - DNA, 25 bp, Homo sapien
catagtgttgaagatttcctggcat

SEQ ID NO: 722068 - DNA, 25 bp, Homo sapien
ctggcatttctgctcttattggaga

SEQ ID NO: 722069 - DNA, 25 bp, Homo sapien
catctggatcattgaggttcaaggg

SEQ ID NO: 722070 - DNA, 25 bp, Homo sapien
ttcataagtgtcatctgtatttaca

SEQ ID NO: 722071 - DNA, 25 bp, Homo sapien
gctcttcataagtgtcatctgtatt

SEQ ID NO: 722072 - DNA, 25 bp, Homo sapien
ttataaacgattaaatggagctctt

SEQ ID NO: 722073 - DNA, 25 bp, Homo sapien
tgagtgtaggatgaaggtctcagtt

SEQ ID NO: 722074 - DNA, 25 bp, Homo sapien
cagccatatttaacaatgagggaac

SEQ ID NO: 722075 - DNA, 25 bp, Homo sapien
tgtcctcggaatcatgtttctttcg

SEQ ID NO: 722076 - DNA, 25 bp, Homo sapien
taatgtctggtgctggatatgaaac

SEQ ID NO: 722077 - DNA, 25 bp, Homo sapien
taaacattttcctgtcgacacaggg

SEQ ID NO: 722078 - DNA, 25 bp, Homo sapien
gcatggcaaagaactctacgctcaa

SEQ ID NO: 722079 - DNA, 25 bp, Homo sapien
ttaagagaggctgagcagaacacca

SEQ ID NO: 722080 - DNA, 25 bp, Homo sapien
agactgcccattccatgatgcgagg

SEQ ID NO: 722081 - DNA, 25 bp, Homo sapien
gcaaacccgacaacacaacatggag

SEQ ID NO: 722082 - DNA, 25 bp, Homo sapien
tatgacattagacctagcaaccgac

SEQ ID NO: 722083 - DNA, 25 bp, Homo sapien
tcataaagcacacagccgcactcat

SEQ ID NO: 722084 - DNA, 25 bp, Homo sapien
cattacgtagcactcatgggccagg

SEQ ID NO: 722085 - DNA, 25 bp, Homo sapien
tatctcaccgtgaaaagctgaccga

SEQ ID NO: 722086 - DNA, 25 bp, Homo sapien
gctgaaatcagacaaaggcgcgtac

SEQ ID NO: 722087 - DNA, 25 bp, Homo sapien
cactctactgctgactagcgggaaa

SEQ ID NO: 722088 - DNA, 25 bp, Homo sapien
tttactgtgcgacgctgaacaacag

SEQ ID NO: 722089 - DNA, 25 bp, Homo sapien
taagattcattttactgtgcgacgc

SEQ ID NO: 722090 - DNA, 25 bp, Homo sapien
agtattcaaacgaaaacttcactgg

SEQ ID NO: 722091 - DNA, 25 bp, Homo sapien
gcgacgctgaacaacagtattcaaa

SEQ ID NO: 722092 - DNA, 25 bp, Homo sapien
gatgctgtccagtcttcggcaaaaa

SEQ ID NO: 722093 - DNA, 25 bp, Homo sapien
gggcccaacgatgctgtccagtctt

SEQ ID NO: 722094 - DNA, 25 bp, Homo sapien
aaatccaacgttgggtggacagagg

SEQ ID NO: 722095 - DNA, 25 bp, Homo sapien
tccagtcttcggcaaaaatccaacg

SEQ ID NO: 722096 - DNA, 25 bp, Homo sapien
ttgagtttccaggaacatgtaaaga

SEQ ID NO: 722097 - DNA, 25 bp, Homo sapien
gggtactcatgaaatactctacgtc

SEQ ID NO: 722098 - DNA, 25 bp, Homo sapien
atactctacgtccaggcaaagaaag

SEQ ID NO: 722099 - DNA, 25 bp, Homo sapien
aacgtggaggattgagtttccagga

SEQ ID NO: 722100 - DNA, 25 bp, Homo sapien
aagtttcacgggaacctcgccattg

SEQ ID NO: 722101 - DNA, 25 bp, Homo sapien
gacatcactgtaaaacgcagtcgcc

SEQ ID NO: 722102 - DNA, 25 bp, Homo sapien
tgagggaagcctacgacactatgta

SEQ ID NO: 722103 - DNA, 25 bp, Homo sapien
tgagtgtcccgtggaaattaacctg

SEQ ID NO: 722104 - DNA, 25 bp, Homo sapien
aaaacatgtcacgaagacagtagca

SEQ ID NO: 722105 - DNA, 25 bp, Homo sapien
catgtcacgaagacagtagcactcg

SEQ ID NO: 722106 - DNA, 25 bp, Homo sapien
tcacgaagacagtagcactcgggcc

SEQ ID NO: 722107 - DNA, 25 bp, Homo sapien
gcactcgggccggatacaactagat

SEQ ID NO: 722108 - DNA, 25 bp, Homo sapien
gaactgtgctcttctcggcgagatt

SEQ ID NO: 722109 - DNA, 25 bp, Homo sapien
gttgatgtcaccgagaatcttcatt

SEQ ID NO: 722110 - DNA, 25 bp, Homo sapien
atcttcattaaatccgggtgcacgg

SEQ ID NO: 722111 - DNA, 25 bp, Homo sapien
gctgggcgttttcctcatgtgaact

SEQ ID NO: 722112 - DNA, 25 bp, Homo sapien
ccagactgtgagaataagcgttcca

SEQ ID NO: 722113 - DNA, 25 bp, Homo sapien
taagcgttccaaaccaagaacagga

SEQ ID NO: 722114 - DNA, 25 bp, Homo sapien
tcgttactcatacggccagactgtg

SEQ ID NO: 722115 - DNA, 25 bp, Homo sapien
gcaagacgagggtcaaaatgcaatc

SEQ ID NO: 722116 - DNA, 25 bp, Homo sapien
tgattcaaaataacatagagctccc

SEQ ID NO: 722117 - DNA, 25 bp, Homo sapien
ataacatagagctcccgccgatcag

SEQ ID NO: 722118 - DNA, 25 bp, Homo sapien
tcaaaataacatagagctcccgccg

SEQ ID NO: 722119 - DNA, 25 bp, Homo sapien
gagctcccgccgatcagacttcttt

SEQ ID NO: 722120 - DNA, 25 bp, Homo sapien
tcatagttttccaaggaacagaaaa

SEQ ID NO: 722121 - DNA, 25 bp, Homo sapien
tcctgaaataccaaatcctacttac

SEQ ID NO: 722122 - DNA, 25 bp, Homo sapien
tgctacaggaaggtcttgtcatagt

SEQ ID NO: 722123 - DNA, 25 bp, Homo sapien
gaggcacctgcttagaatctcaaca

SEQ ID NO: 722124 - DNA, 25 bp, Homo sapien
gagaaactgcaaagtgcccgggaca

SEQ ID NO: 722125 - DNA, 25 bp, Homo sapien
catcctgggacaactaatggaacaa

SEQ ID NO: 722126 - DNA, 25 bp, Homo sapien
cctcaggagttttgagcctatcaac

SEQ ID NO: 722127 - DNA, 25 bp, Homo sapien
aaagaaacggacagcaaccttgagc

SEQ ID NO: 722128 - DNA, 25 bp, Homo sapien
aagatgttgttgaactgcgttgcac

SEQ ID NO: 722129 - DNA, 25 bp, Homo sapien
gttgaactgcgttgcacaaagtttc

SEQ ID NO: 722130 - DNA, 25 bp, Homo sapien
agaagatgttgttgaactgcgttgc

SEQ ID NO: 722131 - DNA, 25 bp, Homo sapien
tgttgttgaactgcgttgcacaaag

SEQ ID NO: 722132 - DNA, 25 bp, Homo sapien
gtcctgaatgcagtccgtcatatga

SEQ ID NO: 722133 - DNA, 25 bp, Homo sapien
gtcatatgaccactaacttgcatgt

SEQ ID NO: 722134 - DNA, 25 bp, Homo sapien
aacttgcatgtgaccaaatgtttgc

SEQ ID NO: 722135 - DNA, 25 bp, Homo sapien
tatgctctcggtgagccgtcatccg

SEQ ID NO: 722136 - DNA, 25 bp, Homo sapien
taaaaacctcagatcagcagaccga

SEQ ID NO: 722137 - DNA, 25 bp, Homo sapien
tctaaaaacctcagatcagcagacc

SEQ ID NO: 722138 - DNA, 25 bp, Homo sapien
tcagatcagcagaccgagtcgaaat

SEQ ID NO: 722139 - DNA, 25 bp, Homo sapien
aacctcagatcagcagaccgagtcg

SEQ ID NO: 722140 - DNA, 25 bp, Homo sapien
tattttccagtaaaatattcacata

SEQ ID NO: 722141 - DNA, 25 bp, Homo sapien
caatttattagtcttattttccagt

SEQ ID NO: 722142 - DNA, 25 bp, Homo sapien
gtcttattttccagtaaaatattca

SEQ ID NO: 722143 - DNA, 25 bp, Homo sapien
cttattttccagtaaaatattcaca

SEQ ID NO: 722144 - DNA, 25 bp, Homo sapien
ggagagagactcaacaccaaaccag

SEQ ID NO: 722145 - DNA, 25 bp, Homo sapien
aggagagagactcaacaccaaacca

SEQ ID NO: 722146 - DNA, 25 bp, Homo sapien
caggagagagactcaacaccaaacc

SEQ ID NO: 722147 - DNA, 25 bp, Homo sapien
tcacggagctggtggccagtgtaat

SEQ ID NO: 722148 - DNA, 25 bp, Homo sapien
ggtcacggagctggtggccagtgta

SEQ ID NO: 722149 - DNA, 25 bp, Homo sapien
ctgggtcacggagctggtggccagt

SEQ ID NO: 722150 - DNA, 25 bp, Homo sapien
tgggtcacggagctggtggccagtg

SEQ ID NO: 722151 - DNA, 25 bp, Homo sapien
gtgtgtacatgtggttctagcttct

SEQ ID NO: 722152 - DNA, 25 bp, Homo sapien
gtgtacatgtggttctagcttcttg

SEQ ID NO: 722153 - DNA, 25 bp, Homo sapien
acatgtggttctagcttcttgggag

SEQ ID NO: 722154 - DNA, 25 bp, Homo sapien
gtacatgtggttctagcttcttggg

SEQ ID NO: 722155 - DNA, 25 bp, Homo sapien
ctgcaaaattaaaacatcagccgac

SEQ ID NO: 722156 - DNA, 25 bp, Homo sapien
tctgcaaaattaaaacatcagccga

SEQ ID NO: 722157 - DNA, 25 bp, Homo sapien
ccatctctgcaaaattaaaacatca

SEQ ID NO: 722158 - DNA, 25 bp, Homo sapien
tctctgcaaaattaaaacatcagcc

SEQ ID NO: 722159 - DNA, 25 bp, Homo sapien
ttggcccactgcatctcaggtttcc

SEQ ID NO: 722160 - DNA, 25 bp, Homo sapien
caggtttcctacatggctggattac

SEQ ID NO: 722161 - DNA, 25 bp, Homo sapien
acatggctggattacgggagttcga

SEQ ID NO: 722162 - DNA, 25 bp, Homo sapien
ggcccactgcatctcaggtttccta

SEQ ID NO: 722163 - DNA, 25 bp, Homo sapien
aaggaggatgtgaccgtgtccccat

SEQ ID NO: 722164 - DNA, 25 bp, Homo sapien
cagtgctcaaggagccggcagacgt

SEQ ID NO: 722165 - DNA, 25 bp, Homo sapien
ggcacgtgctgtaagatttcctgag

SEQ ID NO: 722166 - DNA, 25 bp, Homo sapien
gacatgactatgaggtggacatcac

SEQ ID NO: 722167 - DNA, 25 bp, Homo sapien
gaccaagtgctttccggacaagccg

SEQ ID NO: 722168 - DNA, 25 bp, Homo sapien
caggaccaagtgctttccggacaag

SEQ ID NO: 722169 - DNA, 25 bp, Homo sapien
cgcatcaggaccaagtgctttccgg

SEQ ID NO: 722170 - DNA, 25 bp, Homo sapien
tgctttccggacaagccgtaatttc

SEQ ID NO: 722171 - DNA, 25 bp, Homo sapien
taactcatgactgcatgggacccgc

SEQ ID NO: 722172 - DNA, 25 bp, Homo sapien
tgggacccgccagtaattgttattg

SEQ ID NO: 722173 - DNA, 25 bp, Homo sapien
tgcagaaccagaggatctagtaact

SEQ ID NO: 722174 - DNA, 25 bp, Homo sapien
taagcacagagagcacacgtacatg

SEQ ID NO: 722175 - DNA, 25 bp, Homo sapien
aggtcacgacggagaccggccacct

SEQ ID NO: 722176 - DNA, 25 bp, Homo sapien
cgctcagaaaccgtcagaggtcacg

SEQ ID NO: 722177 - DNA, 25 bp, Homo sapien
ggtagcgcgtgccaaaggccaacgc

SEQ ID NO: 722178 - DNA, 25 bp, Homo sapien
tcagaaaccgtcagaggtcacgacg

SEQ ID NO: 722179 - DNA, 25 bp, Homo sapien
ctgcacgtggccagcgcccggcgct

SEQ ID NO: 722180 - DNA, 25 bp, Homo sapien
cagcgcccggcgctgggccgtagct

SEQ ID NO: 722181 - DNA, 25 bp, Homo sapien
gggagccggtacatgcaggtgggaa

SEQ ID NO: 722182 - DNA, 25 bp, Homo sapien
gccgtagctcctgccgtgcacgttg

SEQ ID NO: 722183 - DNA, 25 bp, Homo sapien
ttacaaaagcacaatcacagcggcc

SEQ ID NO: 722184 - DNA, 25 bp, Homo sapien
tatctacgaaaaagaagccagggct

SEQ ID NO: 722185 - DNA, 25 bp, Homo sapien
tctaccctgctggtgagcggtgagc

SEQ ID NO: 722186 - DNA, 25 bp, Homo sapien
gtgagcgagcgcataaaccagtata

SEQ ID NO: 722187 - DNA, 25 bp, Homo sapien
ggtcaggagttcgagaggacaacat

SEQ ID NO: 722188 - DNA, 25 bp, Homo sapien
ggagttcgagaggacaacatgatga

SEQ ID NO: 722189 - DNA, 25 bp, Homo sapien
tcaggagttcgagaggacaacatga

SEQ ID NO: 722190 - DNA, 25 bp, Homo sapien
caggagttcgagaggacaacatgat

SEQ ID NO: 722191 - DNA, 25 bp, Homo sapien
ccaggtaggcagatcatctgacgtc

SEQ ID NO: 722192 - DNA, 25 bp, Homo sapien
ggaggtccaggtaggcagatcatct

SEQ ID NO: 722193 - DNA, 25 bp, Homo sapien
aagaagacattatgggctgggtgtg

SEQ ID NO: 722194 - DNA, 25 bp, Homo sapien
ggtccaggtaggcagatcatctgac

SEQ ID NO: 722195 - DNA, 25 bp, Homo sapien
tggttaaagtcgtgggctcatccgc

SEQ ID NO: 722196 - DNA, 25 bp, Homo sapien
gaattcaagtccagcgcattggtgg

SEQ ID NO: 722197 - DNA, 25 bp, Homo sapien
taaaatatcatcttggcgggactca

SEQ ID NO: 722198 - DNA, 25 bp, Homo sapien
tcttggagaggccatcaactgcagc

SEQ ID NO: 722199 - DNA, 25 bp, Homo sapien
cagtggcccacgggtacagaagcca

SEQ ID NO: 722200 - DNA, 25 bp, Homo sapien
agtggcccacgggtacagaagccag

SEQ ID NO: 722201 - DNA, 25 bp, Homo sapien
ggggatgggcctgtcataatccaaa

SEQ ID NO: 722202 - DNA, 25 bp, Homo sapien
agggggatgggcctgtcataatcca

SEQ ID NO: 722203 - DNA, 25 bp, Homo sapien
gacaggaccctgaagtgctcacaga

SEQ ID NO: 722204 - DNA, 25 bp, Homo sapien
ggttttcaggcacgctcttgaccga

SEQ ID NO: 722205 - DNA, 25 bp, Homo sapien
gaatcccagctgatagtcttggcgg

SEQ ID NO: 722206 - DNA, 25 bp, Homo sapien
tcttgaccgaggagtgcgtgtgcac

SEQ ID NO: 722207 - DNA, 25 bp, Homo sapien
gctggaggcggctgtgaaattattc

SEQ ID NO: 722208 - DNA, 25 bp, Homo sapien
gatgaattagctgctcacaccgaga

SEQ ID NO: 722209 - DNA, 25 bp, Homo sapien
gaagcagattgaagcagacactccc

SEQ ID NO: 722210 - DNA, 25 bp, Homo sapien
tgattagcgtcacagggtgtctgaa

SEQ ID NO: 722211 - DNA, 25 bp, Homo sapien
gccctgagggaagtactcgcacagt

SEQ ID NO: 722212 - DNA, 25 bp, Homo sapien
ttttgcagacgaacaagggcatctt

SEQ ID NO: 722213 - DNA, 25 bp, Homo sapien
gatgcaaatcgctatgtggccagta

SEQ ID NO: 722214 - DNA, 25 bp, Homo sapien
tagtacagctaacccttgaacagtg

SEQ ID NO: 722215 - DNA, 25 bp, Homo sapien
tatctataagggttgcgttgacagc

SEQ ID NO: 722216 - DNA, 25 bp, Homo sapien
tcatggagcggaaaacagcggcttt

SEQ ID NO: 722217 - DNA, 25 bp, Homo sapien
ggtgagttcattcccagcgagccaa

SEQ ID NO: 722218 - DNA, 25 bp, Homo sapien
gaaacgtgcaatgttcccttcgcct

SEQ ID NO: 722219 - DNA, 25 bp, Homo sapien
ttgagggccgtgttaaaaggagcca

SEQ ID NO: 722220 - DNA, 25 bp, Homo sapien
cattggctggcactgtcacactgca

SEQ ID NO: 722221 - DNA, 25 bp, Homo sapien
cctcatccacctctgcacattggct

SEQ ID NO: 722222 - DNA, 25 bp, Homo sapien
gcctccgatctgctggagtacagac

SEQ ID NO: 722223 - DNA, 25 bp, Homo sapien
aaagactctgactctaatacaagtc

SEQ ID NO: 722224 - DNA, 25 bp, Homo sapien
ttactgataataggcatgaaagagc

SEQ ID NO: 722225 - DNA, 25 bp, Homo sapien
ctgataataggcatgaaagagcacc

SEQ ID NO: 722226 - DNA, 25 bp, Homo sapien
tctgactctaatacaagtcccctta

SEQ ID NO: 722227 - DNA, 25 bp, Homo sapien
gatgcttttattgacacttgacaac

SEQ ID NO: 722228 - DNA, 25 bp, Homo sapien
gcttttattgacacttgacaactgg

SEQ ID NO: 722229 - DNA, 25 bp, Homo sapien
tttattgacacttgacaactggcct

SEQ ID NO: 722230 - DNA, 25 bp, Homo sapien
tgatgcttttattgacacttgacaa

SEQ ID NO: 722231 - DNA, 25 bp, Homo sapien
gaaggacgcctcatcatttcattcc

SEQ ID NO: 722232 - DNA, 25 bp, Homo sapien
gcagtcatcacggtagatggcgtat

SEQ ID NO: 722233 - DNA, 25 bp, Homo sapien
taccgcagaaattgatgtgtgctcc

SEQ ID NO: 722234 - DNA, 25 bp, Homo sapien
ggtcttcctctagaaggtaccgcag

SEQ ID NO: 722235 - DNA, 25 bp, Homo sapien
tagggtatagttggtacaatgcttc

SEQ ID NO: 722236 - DNA, 25 bp, Homo sapien
taaccatatgcctagtctctgaaac

SEQ ID NO: 722237 - DNA, 25 bp, Homo sapien
cttgttaaagatgtcagagtgcccc

SEQ ID NO: 722238 - DNA, 25 bp, Homo sapien
tagtaagcctttacaagacttgtta

SEQ ID NO: 722239 - DNA, 25 bp, Homo sapien
aaattgtgaatcctggccaggcggg

SEQ ID NO: 722240 - DNA, 25 bp, Homo sapien
ttgttcaaattgtgaatcctggcca

SEQ ID NO: 722241 - DNA, 25 bp, Homo sapien
gtaatcccaggcatgggattttggg

SEQ ID NO: 722242 - DNA, 25 bp, Homo sapien
ttaaatgctgaggaaaatatgaagc

SEQ ID NO: 722243 - DNA, 25 bp, Homo sapien
agtacacagtcattggaccaccggg

SEQ ID NO: 722244 - DNA, 25 bp, Homo sapien
tgcgcagtacacagtcattggacca

SEQ ID NO: 722245 - DNA, 25 bp, Homo sapien
cgcagtacacagtcattggaccacc

SEQ ID NO: 722246 - DNA, 25 bp, Homo sapien
ctgcgcagtacacagtcattggacc

SEQ ID NO: 722247 - DNA, 25 bp, Homo sapien
acctccccgggtagtgctgaagagt

SEQ ID NO: 722248 - DNA, 25 bp, Homo sapien
tcagcactctattgggaatttccag

SEQ ID NO: 722249 - DNA, 25 bp, Homo sapien
tgtctgtatgtctgccgggggctca

SEQ ID NO: 722250 - DNA, 25 bp, Homo sapien
tagtgctgaagagtgtgcccgatgg

SEQ ID NO: 722251 - DNA, 25 bp, Homo sapien
tggctaggcctttagatgtccaggt

SEQ ID NO: 722252 - DNA, 25 bp, Homo sapien
ttctcatggctaggcctttagatgt

SEQ ID NO: 722253 - DNA, 25 bp, Homo sapien
tcatggctaggcctttagatgtcca

SEQ ID NO: 722254 - DNA, 25 bp, Homo sapien
taggcctttagatgtccaggtcaaa

SEQ ID NO: 722255 - DNA, 25 bp, Homo sapien
ccacagcgaaggccggtaggaaact

SEQ ID NO: 722256 - DNA, 25 bp, Homo sapien
gccaaccccacagcgaaggccggta

SEQ ID NO: 722257 - DNA, 25 bp, Homo sapien
ctgggggccaaccccacagcgaagg

SEQ ID NO: 722258 - DNA, 25 bp, Homo sapien
cacagcgaaggccggtaggaaactt

SEQ ID NO: 722259 - DNA, 25 bp, Homo sapien
acttcaggggaaaatgttgttatgg

SEQ ID NO: 722260 - DNA, 25 bp, Homo sapien
cttcaggggaaaatgttgttatgga

SEQ ID NO: 722261 - DNA, 25 bp, Homo sapien
tgttatggaattggtcagtttcagt

SEQ ID NO: 722262 - DNA, 25 bp, Homo sapien
ttgttatggaattggtcagtttcag

SEQ ID NO: 722263 - DNA, 25 bp, Homo sapien
tctcaggagtacctcgatcgtagtg

SEQ ID NO: 722264 - DNA, 25 bp, Homo sapien
cagaagtaatctgttgctggcggag

SEQ ID NO: 722265 - DNA, 25 bp, Homo sapien
tagtgcagtcttctctcatgatggc

SEQ ID NO: 722266 - DNA, 25 bp, Homo sapien
gatggcttcatagagtttcgagtga

SEQ ID NO: 722267 - DNA, 25 bp, Homo sapien
catcactgtgggtatgtttgagaga

SEQ ID NO: 722268 - DNA, 25 bp, Homo sapien
ggccgtgagcttagtgggttcacca

SEQ ID NO: 722269 - DNA, 25 bp, Homo sapien
gagatgacatgaatggtcttccagt

SEQ ID NO: 722270 - DNA, 25 bp, Homo sapien
tgtctcattctcataagggccgtga

SEQ ID NO: 722271 - DNA, 25 bp, Homo sapien
ggtcagcaccgtgccgtaacaggca

SEQ ID NO: 722272 - DNA, 25 bp, Homo sapien
cagcaccgtgccgtaacaggcagag

SEQ ID NO: 722273 - DNA, 25 bp, Homo sapien
tcagcaccgtgccgtaacaggcaga

SEQ ID NO: 722274 - DNA, 25 bp, Homo sapien
gcaccgtgccgtaacaggcagagca

SEQ ID NO: 722275 - DNA, 25 bp, Homo sapien
tgagtgttcacttgagctccgtgcg

SEQ ID NO: 722276 - DNA, 25 bp, Homo sapien
gctccgtgcgcacacaagatgcgga

SEQ ID NO: 722277 - DNA, 25 bp, Homo sapien
cacagttgacgtttgctccataggc

SEQ ID NO: 722278 - DNA, 25 bp, Homo sapien
cattaatagcattgacatcggcacc

SEQ ID NO: 722279 - DNA, 25 bp, Homo sapien
cccttgtagtcctgggcgttgactt

SEQ ID NO: 722280 - DNA, 25 bp, Homo sapien
tttggctccgtgagtgagtagcaga

SEQ ID NO: 722281 - DNA, 25 bp, Homo sapien
tggatggctgtttggcccttgtagt

SEQ ID NO: 722282 - DNA, 25 bp, Homo sapien
agattgatgattgcctctctgcctc

SEQ ID NO: 722283 - DNA, 25 bp, Homo sapien
tggccagaagtgccgtatctcttac

SEQ ID NO: 722284 - DNA, 25 bp, Homo sapien
attccttggttattggtcattctca

SEQ ID NO: 722285 - DNA, 25 bp, Homo sapien
ggttattggtcattctcagaggata

SEQ ID NO: 722286 - DNA, 25 bp, Homo sapien
ccttggttattggtcattctcagag

SEQ ID NO: 722287 - DNA, 25 bp, Homo sapien
ttggttattggtcattctcagagga

SEQ ID NO: 722288 - DNA, 25 bp, Homo sapien
tgcgattgctttattagggtgtccc

SEQ ID NO: 722289 - DNA, 25 bp, Homo sapien
cttttgcagataccctgtagggata

SEQ ID NO: 722290 - DNA, 25 bp, Homo sapien
ccatattgtcactgggaggaattgc

SEQ ID NO: 722291 - DNA, 25 bp, Homo sapien
tgtcccttaagaggcggaattctgg

SEQ ID NO: 722292 - DNA, 25 bp, Homo sapien
gacatgtctagccagaaaatgcagt

SEQ ID NO: 722293 - DNA, 25 bp, Homo sapien
cagtttgagtggctgaaagtccctc

SEQ ID NO: 722294 - DNA, 25 bp, Homo sapien
gaatcagtagtttgtacatttggga

SEQ ID NO: 722295 - DNA, 25 bp, Homo sapien
gatgtcacaggtgataggtgaagca

SEQ ID NO: 722296 - DNA, 25 bp, Homo sapien
tattgcagacttagaggtaaactct

SEQ ID NO: 722297 - DNA, 25 bp, Homo sapien
tagtgctgacagaaatgctcattta

SEQ ID NO: 722298 - DNA, 25 bp, Homo sapien
tcctctgtggagtataagtactttt

SEQ ID NO: 722299 - DNA, 25 bp, Homo sapien
caggtgctctgagtactgctataat

SEQ ID NO: 722300 - DNA, 25 bp, Homo sapien
tctgccagttcaattgtggaacagc

SEQ ID NO: 722301 - DNA, 25 bp, Homo sapien
agtagcagctcatccattatctttg

SEQ ID NO: 722302 - DNA, 25 bp, Homo sapien
acgctttggagaatctgacactgaa

SEQ ID NO: 722303 - DNA, 25 bp, Homo sapien
taacaagtcggtgaagtacaccacc

SEQ ID NO: 722304 - DNA, 25 bp, Homo sapien
ggagctagacttccaacactatctg

SEQ ID NO: 722305 - DNA, 25 bp, Homo sapien
tgaaaagctcttagtccggctgact

SEQ ID NO: 722306 - DNA, 25 bp, Homo sapien
cagcctagagcttcttaggagctag

SEQ ID NO: 722307 - DNA, 25 bp, Homo sapien
aacattcccgttcttcagcctagag

SEQ ID NO: 722308 - DNA, 25 bp, Homo sapien
tcttgtgcgggagctgtgctaatct

SEQ ID NO: 722309 - DNA, 25 bp, Homo sapien
tcattcttgtgcgggagctgtgcta

SEQ ID NO: 722310 - DNA, 25 bp, Homo sapien
gtttcattcttgtgcgggagctgtg

SEQ ID NO: 722311 - DNA, 25 bp, Homo sapien
attcttgtgcgggagctgtgctaat

SEQ ID NO: 722312 - DNA, 25 bp, Homo sapien
gctagcaccgacagaagattctctc

SEQ ID NO: 722313 - DNA, 25 bp, Homo sapien
gttagccgctgaacgctagcaccga

SEQ ID NO: 722314 - DNA, 25 bp, Homo sapien
gctgaacgctagcaccgacagaaga

SEQ ID NO: 722315 - DNA, 25 bp, Homo sapien
ctccgttagccgctgaacgctagca

SEQ ID NO: 722316 - DNA, 25 bp, Homo sapien
gagcgaggcgcgattggctgtccgg

SEQ ID NO: 722317 - DNA, 25 bp, Homo sapien
tgggcaaggagcgaggcgcgattgg

SEQ ID NO: 722318 - DNA, 25 bp, Homo sapien
cgcgattggctgtccggcggacgag

SEQ ID NO: 722319 - DNA, 25 bp, Homo sapien
cggggtggacggcaatggctgtggg

SEQ ID NO: 722320 - DNA, 25 bp, Homo sapien
tagcccaccagagagcatgcgccat

SEQ ID NO: 722321 - DNA, 25 bp, Homo sapien
ctagcccaccagagagcatgcgcca

SEQ ID NO: 722322 - DNA, 25 bp, Homo sapien
acctccgcaggccgccgtccgaaga

SEQ ID NO: 722323 - DNA, 25 bp, Homo sapien
gacctccgcaggccgccgtccgaag

SEQ ID NO: 722324 - DNA, 25 bp, Homo sapien
ccgacctccgcaggccgccgtccga

SEQ ID NO: 722325 - DNA, 25 bp, Homo sapien
cgacctccgcaggccgccgtccgaa

SEQ ID NO: 722326 - DNA, 25 bp, Homo sapien
ggagcgaacccgcagtccacgtagg

SEQ ID NO: 722327 - DNA, 25 bp, Homo sapien
aggtttcctcgtgaacagcagggag

SEQ ID NO: 722328 - DNA, 25 bp, Homo sapien
tccacgtaggcgcagtcggctttca

SEQ ID NO: 722329 - DNA, 25 bp, Homo sapien
tcggctttcagcagcgcgatcaccc

SEQ ID NO: 722330 - DNA, 25 bp, Homo sapien
atgcttggaacacttcaggcttcaa

SEQ ID NO: 722331 - DNA, 25 bp, Homo sapien
ctatgcttggaacacttcaggcttc

SEQ ID NO: 722332 - DNA, 25 bp, Homo sapien
tatgcttggaacacttcaggcttca

SEQ ID NO: 722333 - DNA, 25 bp, Homo sapien
gacagtggataccaagaatagtccc

SEQ ID NO: 722334 - DNA, 25 bp, Homo sapien
aagacagtggataccaagaatagtc

SEQ ID NO: 722335 - DNA, 25 bp, Homo sapien
cagtggataccaagaatagtcccta

SEQ ID NO: 722336 - DNA, 25 bp, Homo sapien
aaaaagacagtggataccaagaata

SEQ ID NO: 722337 - DNA, 25 bp, Homo sapien
tgagcattctatggctcacagcaaa

SEQ ID NO: 722338 - DNA, 25 bp, Homo sapien
gagtcagcctttcttcgctcaacaa

SEQ ID NO: 722339 - DNA, 25 bp, Homo sapien
gattaaggacctggtattctgtgct

SEQ ID NO: 722340 - DNA, 25 bp, Homo sapien
ggtcttccaaaaaccgtcagatcac

SEQ ID NO: 722341 - DNA, 25 bp, Homo sapien
ctccgagaaatcctccgcttcgtgg

SEQ ID NO: 722342 - DNA, 25 bp, Homo sapien
aacggacttggctccgagaaatcct

SEQ ID NO: 722343 - DNA, 25 bp, Homo sapien
gaaatcctccgcttcgtgggcttcg

SEQ ID NO: 722344 - DNA, 25 bp, Homo sapien
ggcttcgccctctgcaactaccttg

SEQ ID NO: 722345 - DNA, 25 bp, Homo sapien
ccggcagagggagcgcgctgattgg

SEQ ID NO: 722346 - DNA, 25 bp, Homo sapien
ctgcgcgccggcgaaagggctcctt

SEQ ID NO: 722347 - DNA, 25 bp, Homo sapien
accccagatgcgtttccagaagcgg

SEQ ID NO: 722348 - DNA, 25 bp, Homo sapien
ggctttcgcctcgtcctgcgcttga

SEQ ID NO: 722349 - DNA, 25 bp, Homo sapien
ctcggcgctcgctccatccccctcg

SEQ ID NO: 722350 - DNA, 25 bp, Homo sapien
cggcgctcgctccatccccctcggc

SEQ ID NO: 722351 - DNA, 25 bp, Homo sapien
tcggcgctcgctccatccccctcgg

SEQ ID NO: 722352 - DNA, 25 bp, Homo sapien
gctcggcgctcgctccatccccctc

SEQ ID NO: 722353 - DNA, 25 bp, Homo sapien
ccaggctggtgtaatttttaactag

SEQ ID NO: 722354 - DNA, 25 bp, Homo sapien
agtttctgaactcaagtagaaatag

SEQ ID NO: 722355 - DNA, 25 bp, Homo sapien
ttaactagggtaagattatcaccca

SEQ ID NO: 722356 - DNA, 25 bp, Homo sapien
caatgaactaagaaaactgaattga

SEQ ID NO: 722357 - DNA, 25 bp, Homo sapien
ttcagaagctttgtcaactatggtc

SEQ ID NO: 722358 - DNA, 25 bp, Homo sapien
cagaagctttgtcaactatggtcat

SEQ ID NO: 722359 - DNA, 25 bp, Homo sapien
agattcagaagctttgtcaactatg

SEQ ID NO: 722360 - DNA, 25 bp, Homo sapien
gattcagaagctttgtcaactatgg

SEQ ID NO: 722361 - DNA, 25 bp, Homo sapien
aggtgagactgcctcggagctgcca

SEQ ID NO: 722362 - DNA, 25 bp, Homo sapien
tccaggtgagactgcctcggagctg

SEQ ID NO: 722363 - DNA, 25 bp, Homo sapien
gtctccaggtgagactgcctcggag

SEQ ID NO: 722364 - DNA, 25 bp, Homo sapien
agactgcctcggagctgccaggctg

SEQ ID NO: 722365 - DNA, 25 bp, Homo sapien
aataaactacagcaccaggtactgg

SEQ ID NO: 722366 - DNA, 25 bp, Homo sapien
ggtacagatgaactcgaataaacta

SEQ ID NO: 722367 - DNA, 25 bp, Homo sapien
gatggttttgatttatcaggtacag

SEQ ID NO: 722368 - DNA, 25 bp, Homo sapien
caggtactggtcctaaagaaagtgt

SEQ ID NO: 722369 - DNA, 25 bp, Homo sapien
caatgatctggtttctccagtaaac

SEQ ID NO: 722370 - DNA, 25 bp, Homo sapien
tcaatgatctggtttctccagtaaa

SEQ ID NO: 722371 - DNA, 25 bp, Homo sapien
aatgatctggtttctccagtaaaca

SEQ ID NO: 722372 - DNA, 25 bp, Homo sapien
tgatctggtttctccagtaaacaaa

SEQ ID NO: 722373 - DNA, 25 bp, Homo sapien
tagcatgtaattggcaagaggtggt

SEQ ID NO: 722374 - DNA, 25 bp, Homo sapien
cttctcagatgggaaaagaactttc

SEQ ID NO: 722375 - DNA, 25 bp, Homo sapien
tgagtttgttgccacttaagacaaa

SEQ ID NO: 722376 - DNA, 25 bp, Homo sapien
ttctgtggaggagcgatgccatcac

SEQ ID NO: 722377 - DNA, 25 bp, Homo sapien
cacctatggagatggctaaaactga

SEQ ID NO: 722378 - DNA, 25 bp, Homo sapien
taaaacactgcaatcccttctggaa

SEQ ID NO: 722379 - DNA, 25 bp, Homo sapien
gaaaacatgtcctaacaaaggcttg

SEQ ID NO: 722380 - DNA, 25 bp, Homo sapien
ttaaaacacctacagcacaacgaat

SEQ ID NO: 722381 - DNA, 25 bp, Homo sapien
tggggtgccaacggaggctgagtgg

SEQ ID NO: 722382 - DNA, 25 bp, Homo sapien
ctggggtgccaacggaggctgagtg

SEQ ID NO: 722383 - DNA, 25 bp, Homo sapien
actgctggaattgtaagaattatta

SEQ ID NO: 722384 - DNA, 25 bp, Homo sapien
tcagcgttcgtgcaagcctttgcta

SEQ ID NO: 722385 - DNA, 25 bp, Homo sapien
ccaggaggcaaaactcctctgccct

SEQ ID NO: 722386 - DNA, 25 bp, Homo sapien
ttagaggtagcaaagggctcagcgt

SEQ ID NO: 722387 - DNA, 25 bp, Homo sapien
ttctaacaaacctaagtgataagta

SEQ ID NO: 722388 - DNA, 25 bp, Homo sapien
tctaacaaacctaagtgataagtat

SEQ ID NO: 722389 - DNA, 25 bp, Homo sapien
acatcatacaaaagccttctgcatg

SEQ ID NO: 722390 - DNA, 25 bp, Homo sapien
acacatcatacaaaagccttctgca

SEQ ID NO: 722391 - DNA, 25 bp, Homo sapien
cacatcatacaaaagccttctgcat

SEQ ID NO: 722392 - DNA, 25 bp, Homo sapien
ctcattgatgacaaacattggttta

SEQ ID NO: 722393 - DNA, 25 bp, Homo sapien
agtgcctgggtaatatgtgcttgca

SEQ ID NO: 722394 - DNA, 25 bp, Homo sapien
gccgcatctcattgatgacaaacat

SEQ ID NO: 722395 - DNA, 25 bp, Homo sapien
taacgtccccaggattactgagtgc

SEQ ID NO: 722396 - DNA, 25 bp, Homo sapien
tatccaccaatttgctaagctctga

SEQ ID NO: 722397 - DNA, 25 bp, Homo sapien
catgtgtaaacaatccaaacctgcc

SEQ ID NO: 722398 - DNA, 25 bp, Homo sapien
aattacccagttagatgccagatta

SEQ ID NO: 722399 - DNA, 25 bp, Homo sapien
gtctatcaataatgccaagggccaa

SEQ ID NO: 722400 - DNA, 25 bp, Homo sapien
cacagcagctagagtttctgagagt

SEQ ID NO: 722401 - DNA, 25 bp, Homo sapien
tacaaacgtgacaacttcatgactg

SEQ ID NO: 722402 - DNA, 25 bp, Homo sapien
cattgggtaccagtctacggcccag

SEQ ID NO: 722403 - DNA, 25 bp, Homo sapien
tacaccattaaaagtccacagcagc

SEQ ID NO: 722404 - DNA, 25 bp, Homo sapien
attgctgccattcaagcatgctttc

SEQ ID NO: 722405 - DNA, 25 bp, Homo sapien
gccattcaagcatgctttctgcata

SEQ ID NO: 722406 - DNA, 25 bp, Homo sapien
ccaaaacggaagtgcctagctatac

SEQ ID NO: 722407 - DNA, 25 bp, Homo sapien
ttctgcatagcatcaacagtgtatt

SEQ ID NO: 722408 - DNA, 25 bp, Homo sapien
tagatcttaggtatcctccaaatat

SEQ ID NO: 722409 - DNA, 25 bp, Homo sapien
atcctccaaatatctgacaaacaag

SEQ ID NO: 722410 - DNA, 25 bp, Homo sapien
ctctagatcttaggtatcctccaaa

SEQ ID NO: 722411 - DNA, 25 bp, Homo sapien
cctccaaatatctgacaaacaagag

SEQ ID NO: 722412 - DNA, 25 bp, Homo sapien
acgcccttgcaatttaaacatttga

SEQ ID NO: 722413 - DNA, 25 bp, Homo sapien
ccaatgttatatcaagatatggatc

SEQ ID NO: 722414 - DNA, 25 bp, Homo sapien
caagatatggatcaaaagtatctga

SEQ ID NO: 722415 - DNA, 25 bp, Homo sapien
atctgaaacgcccttgcaatttaaa

SEQ ID NO: 722416 - DNA, 25 bp, Homo sapien
tgctgcacttgtacgagttttctcc

SEQ ID NO: 722417 - DNA, 25 bp, Homo sapien
ttgtacgagttttctccatcaagct

SEQ ID NO: 722418 - DNA, 25 bp, Homo sapien
gctgttccggcttcacaaactgctc

SEQ ID NO: 722419 - DNA, 25 bp, Homo sapien
aatgccttgttgacactctgagcag

SEQ ID NO: 722420 - DNA, 25 bp, Homo sapien
tttgcaaaacgtttcagagaaagtg

SEQ ID NO: 722421 - DNA, 25 bp, Homo sapien
gtgaacctctttgaagctggaacca

SEQ ID NO: 722422 - DNA, 25 bp, Homo sapien
tgtaagaacattagaggatctatgg

SEQ ID NO: 722423 - DNA, 25 bp, Homo sapien
tgaagctggaaccatctttttacac

SEQ ID NO: 722424 - DNA, 25 bp, Homo sapien
attcaggtagagggtacttagagct

SEQ ID NO: 722425 - DNA, 25 bp, Homo sapien
tacttagagcttcctaggaggggag

SEQ ID NO: 722426 - DNA, 25 bp, Homo sapien
gcacagatcattccacatattcagg

SEQ ID NO: 722427 - DNA, 25 bp, Homo sapien
caggagaaacatttccgagggcaca

SEQ ID NO: 722428 - DNA, 25 bp, Homo sapien
gccgaatatcaagatactcagggta

SEQ ID NO: 722429 - DNA, 25 bp, Homo sapien
cagcactgcatacaagacgtagaca

SEQ ID NO: 722430 - DNA, 25 bp, Homo sapien
gacaattggctctccgttgggttga

SEQ ID NO: 722431 - DNA, 25 bp, Homo sapien
ccgttgggttgagacatatatggcc

SEQ ID NO: 722432 - DNA, 25 bp, Homo sapien
atatttttacctcgggtattcacat

SEQ ID NO: 722433 - DNA, 25 bp, Homo sapien
acaatagttaatagcaaatctgcac

SEQ ID NO: 722434 - DNA, 25 bp, Homo sapien
tctccctaccccaagaatgctactg

SEQ ID NO: 722435 - DNA, 25 bp, Homo sapien
tgctactgctgtcttatagcatgta

SEQ ID NO: 722436 - DNA, 25 bp, Homo sapien
tcactggtagatacaatggagtcat

SEQ ID NO: 722437 - DNA, 25 bp, Homo sapien
taggcttgttggctgagtaccgatc

SEQ ID NO: 722438 - DNA, 25 bp, Homo sapien
ctgagtaccgatctaatatcactgg

SEQ ID NO: 722439 - DNA, 25 bp, Homo sapien
tttgataccagaggccattgctagc

SEQ ID NO: 722440 - DNA, 25 bp, Homo sapien
tctggcaatttgttttcatgacaat

SEQ ID NO: 722441 - DNA, 25 bp, Homo sapien
gaaaatctggcaatttgttttcatg

SEQ ID NO: 722442 - DNA, 25 bp, Homo sapien
cagaaaatctggcaatttgttttca

SEQ ID NO: 722443 - DNA, 25 bp, Homo sapien
tggcaatttgttttcatgacaatac

SEQ ID NO: 722444 - DNA, 25 bp, Homo sapien
ctgtgctccaggttgggaggtgctg

SEQ ID NO: 722445 - DNA, 25 bp, Homo sapien
tgtgctccaggttgggaggtgctgg

SEQ ID NO: 722446 - DNA, 25 bp, Homo sapien
aagctgtggtccgataaagcctggc

SEQ ID NO: 722447 - DNA, 25 bp, Homo sapien
taaagcctggcgcagcctgtttgtt

SEQ ID NO: 722448 - DNA, 25 bp, Homo sapien
ctttatcatgtgagagggaagctgt

SEQ ID NO: 722449 - DNA, 25 bp, Homo sapien
tgttggtgacaacccgctgactgat

SEQ ID NO: 722450 - DNA, 25 bp, Homo sapien
tagccctgttgacactggaattccc

SEQ ID NO: 722451 - DNA, 25 bp, Homo sapien
tgaagcattaacaggactagccctg

SEQ ID NO: 722452 - DNA, 25 bp, Homo sapien
taggactcgacatggaactgcttgg

SEQ ID NO: 722453 - DNA, 25 bp, Homo sapien
gcttggcgtgtctttcaatggtcca

SEQ ID NO: 722454 - DNA, 25 bp, Homo sapien
cactggcgaacaggcaacttgttgt

SEQ ID NO: 722455 - DNA, 25 bp, Homo sapien
ggatcactgaggacctattaactga

SEQ ID NO: 722456 - DNA, 25 bp, Homo sapien
gttaggttgagactgacactggcga

SEQ ID NO: 722457 - DNA, 25 bp, Homo sapien
cgttcgaggtagactgtactgcaga

SEQ ID NO: 722458 - DNA, 25 bp, Homo sapien
ttactttactagaaactgacatcgt

SEQ ID NO: 722459 - DNA, 25 bp, Homo sapien
tttactagaaactgacatcgtagat

SEQ ID NO: 722460 - DNA, 25 bp, Homo sapien
actttactagaaactgacatcgtag

SEQ ID NO: 722461 - DNA, 25 bp, Homo sapien
gttactttactagaaactgacatcg

SEQ ID NO: 722462 - DNA, 25 bp, Homo sapien
tctgcactattagcaccgtttaggg

SEQ ID NO: 722463 - DNA, 25 bp, Homo sapien
gatttgccattcatcacgggctggg

SEQ ID NO: 722464 - DNA, 25 bp, Homo sapien
tcttgaagctcgtgcggagtggcct

SEQ ID NO: 722465 - DNA, 25 bp, Homo sapien
gagtgggagctcacaatcgtaccaa

SEQ ID NO: 722466 - DNA, 25 bp, Homo sapien
tgggagagacagcaaaggagcaggc

SEQ ID NO: 722467 - DNA, 25 bp, Homo sapien
ctgggagagacagcaaaggagcagg

SEQ ID NO: 722468 - DNA, 25 bp, Homo sapien
ggagagacagcaaaggagcaggcat

SEQ ID NO: 722469 - DNA, 25 bp, Homo sapien
agagacagcaaaggagcaggcatca

SEQ ID NO: 722470 - DNA, 25 bp, Homo sapien
ctcatttcatccgtcgagcctttca

SEQ ID NO: 722471 - DNA, 25 bp, Homo sapien
catttcatccgtcgagcctttcagt

SEQ ID NO: 722472 - DNA, 25 bp, Homo sapien
atccgtcgagcctttcagtttgttg

SEQ ID NO: 722473 - DNA, 25 bp, Homo sapien
ttcatccgtcgagcctttcagtttg

SEQ ID NO: 722474 - DNA, 25 bp, Homo sapien
tcggcgtcgcggtcctcgggagggc

SEQ ID NO: 722475 - DNA, 25 bp, Homo sapien
tcccaggcgccttctttggtagcgg

SEQ ID NO: 722476 - DNA, 25 bp, Homo sapien
cctccagggattcggcggcggggct

SEQ ID NO: 722477 - DNA, 25 bp, Homo sapien
caggctgaggctcggcgtcgcggtc

SEQ ID NO: 722478 - DNA, 25 bp, Homo sapien
ggtgaacaaggagtggctgctcgca

SEQ ID NO: 722479 - DNA, 25 bp, Homo sapien
tgggacaacgggctcgcatcgcctg

SEQ ID NO: 722480 - DNA, 25 bp, Homo sapien
ttaagctcccgggatcacacaggtc

SEQ ID NO: 722481 - DNA, 25 bp, Homo sapien
accgcgcaggcggagccggactcaa

SEQ ID NO: 722482 - DNA, 25 bp, Homo sapien
ctctgggatgggtcctgagcgtccc

SEQ ID NO: 722483 - DNA, 25 bp, Homo sapien
taggctcagcgtccccttccgggtg

SEQ ID NO: 722484 - DNA, 25 bp, Homo sapien
tggcggccgctctgcggcctcgggt

SEQ ID NO: 722485 - DNA, 25 bp, Homo sapien
ctcgggtgcgcccaagctctgggat

SEQ ID NO: 722486 - DNA, 25 bp, Homo sapien
tgcggtagtggcctcggtccacctt

SEQ ID NO: 722487 - DNA, 25 bp, Homo sapien
gccggtgacggtggccctcagtctt

SEQ ID NO: 722488 - DNA, 25 bp, Homo sapien
cctttctgaggctgccgattttctc

SEQ ID NO: 722489 - DNA, 25 bp, Homo sapien
gcgtggcggtcctggcggtcgcgct

SEQ ID NO: 722490 - DNA, 25 bp, Homo sapien
gccacgctcgccctcggtgtagtgg

SEQ ID NO: 722491 - DNA, 25 bp, Homo sapien
caccccgctccggtgtcgggagtgg

SEQ ID NO: 722492 - DNA, 25 bp, Homo sapien
ctgtcatggtagtaccggcacctgt

SEQ ID NO: 722493 - DNA, 25 bp, Homo sapien
tcgccctcggtgtagtggtgtctga

SEQ ID NO: 722494 - DNA, 25 bp, Homo sapien
ctcgcggccgccgtggaagggcttc

SEQ ID NO: 722495 - DNA, 25 bp, Homo sapien
gaggttacagttgtctccggctaca

SEQ ID NO: 722496 - DNA, 25 bp, Homo sapien
cgtgttcgtgaaaccgatcagagag

SEQ ID NO: 722497 - DNA, 25 bp, Homo sapien
tccggctacaagtgcagttctgtcg

SEQ ID NO: 722498 - DNA, 25 bp, Homo sapien
cactgtcgtgtctccgtttccggga

SEQ ID NO: 722499 - DNA, 25 bp, Homo sapien
tctcacggaaaggtccgacgccttc

SEQ ID NO: 722500 - DNA, 25 bp, Homo sapien
gccatactcaaagagacgacacctg

SEQ ID NO: 722501 - DNA, 25 bp, Homo sapien
catccctgctttccatccgtaagtg

SEQ ID NO: 722502 - DNA, 25 bp, Homo sapien
tgggcgacagtctccaagctggtga

SEQ ID NO: 722503 - DNA, 25 bp, Homo sapien
tcctgtgtcacttaggccttcaata

SEQ ID NO: 722504 - DNA, 25 bp, Homo sapien
gccttcaataaacgctaagggctta

SEQ ID NO: 722505 - DNA, 25 bp, Homo sapien
ggcttaactgtgcaacggaaccaca

SEQ ID NO: 722506 - DNA, 25 bp, Homo sapien
gctgtacgttccagggctttggtga

SEQ ID NO: 722507 - DNA, 25 bp, Homo sapien
agccctgaagattcgtcaaaagccc

SEQ ID NO: 722508 - DNA, 25 bp, Homo sapien
gggcagccctgaagattcgtcaaaa

SEQ ID NO: 722509 - DNA, 25 bp, Homo sapien
gcagccctgaagattcgtcaaaagc

SEQ ID NO: 722510 - DNA, 25 bp, Homo sapien
cagggcagccctgaagattcgtcaa

SEQ ID NO: 722511 - DNA, 25 bp, Homo sapien
tgttttgaggctgagttttcaatca

SEQ ID NO: 722512 - DNA, 25 bp, Homo sapien
tttgttttgaggctgagttttcaat

SEQ ID NO: 722513 - DNA, 25 bp, Homo sapien
gttttgaggctgagttttcaatcac

SEQ ID NO: 722514 - DNA, 25 bp, Homo sapien
tttttgttttgaggctgagttttca

SEQ ID NO: 722515 - DNA, 25 bp, Homo sapien
gatggcttctgttgaacgcgttgaa

SEQ ID NO: 722516 - DNA, 25 bp, Homo sapien
ggtagaaagtgttcgtccattcgga

SEQ ID NO: 722517 - DNA, 25 bp, Homo sapien
cacggtattttacaatggtcagcag

SEQ ID NO: 722518 - DNA, 25 bp, Homo sapien
gaagcaccacgcagattggaacaga

SEQ ID NO: 722519 - DNA, 25 bp, Homo sapien
agggaccaagcagacaacggagact

SEQ ID NO: 722520 - DNA, 25 bp, Homo sapien
caagagacgctgtatcaaaaagtgt

SEQ ID NO: 722521 - DNA, 25 bp, Homo sapien
catggtctcccggttggtcttgcac

SEQ ID NO: 722522 - DNA, 25 bp, Homo sapien
tgtaactagaaactcgaagggacca

SEQ ID NO: 722523 - DNA, 25 bp, Homo sapien
tcctcagctggtggaaagggtgtga

SEQ ID NO: 722524 - DNA, 25 bp, Homo sapien
tgagacacggtgtgacgggcacagg

SEQ ID NO: 722525 - DNA, 25 bp, Homo sapien
aacatcaaggaagggtgagacacgg

SEQ ID NO: 722526 - DNA, 25 bp, Homo sapien
ataaacatcaaggaagggtgagaca

SEQ ID NO: 722527 - DNA, 25 bp, Homo sapien
tctaagtttgtggaaggctagtgcc

SEQ ID NO: 722528 - DNA, 25 bp, Homo sapien
tccctgttactccattgtggctgga

SEQ ID NO: 722529 - DNA, 25 bp, Homo sapien
tatgtaaagcttcactggcagcacc

SEQ ID NO: 722530 - DNA, 25 bp, Homo sapien
tcatttcaggcaacaggataaatcc

SEQ ID NO: 722531 - DNA, 25 bp, Homo sapien
acaggtgtcggctgccttttcacag

SEQ ID NO: 722532 - DNA, 25 bp, Homo sapien
ctggccagtcacaggtgtcggctgc

SEQ ID NO: 722533 - DNA, 25 bp, Homo sapien
agtcacaggtgtcggctgccttttc

SEQ ID NO: 722534 - DNA, 25 bp, Homo sapien
ccagtcacaggtgtcggctgccttt

SEQ ID NO: 722535 - DNA, 25 bp, Homo sapien
acccatctggagtggaagccaggtc

SEQ ID NO: 722536 - DNA, 25 bp, Homo sapien
tagagcttctcctgggcgccacagt

SEQ ID NO: 722537 - DNA, 25 bp, Homo sapien
tctggagtggaagccaggtctagac

SEQ ID NO: 722538 - DNA, 25 bp, Homo sapien
agccaggtctagacagggagagtta

SEQ ID NO: 722539 - DNA, 25 bp, Homo sapien
tctgttggtgatcgtggaaattgtg

SEQ ID NO: 722540 - DNA, 25 bp, Homo sapien
gttctgttggtgatcgtggaaattg

SEQ ID NO: 722541 - DNA, 25 bp, Homo sapien
tgggttctgttggtgatcgtggaaa

SEQ ID NO: 722542 - DNA, 25 bp, Homo sapien
attttgggttctgttggtgatcgtg

SEQ ID NO: 722543 - DNA, 25 bp, Homo sapien
ttcccactgcttccaccgctcccca

SEQ ID NO: 722544 - DNA, 25 bp, Homo sapien
tgcttccaccgctccccactttttc

SEQ ID NO: 722545 - DNA, 25 bp, Homo sapien
gagtctgggggcttctctctttgca

SEQ ID NO: 722546 - DNA, 25 bp, Homo sapien
ttttccttctcaggagaggagtctg

SEQ ID NO: 722547 - DNA, 25 bp, Homo sapien
caaacagtagttatggtagaagcca

SEQ ID NO: 722548 - DNA, 25 bp, Homo sapien
catttaactcttggctgttgtaagt

SEQ ID NO: 722549 - DNA, 25 bp, Homo sapien
gggcacaagattacaagaacacatt

SEQ ID NO: 722550 - DNA, 25 bp, Homo sapien
caatgcaagataaggagagagagga

SEQ ID NO: 722551 - DNA, 25 bp, Homo sapien
aatcttaattacaggctgccggtgc

SEQ ID NO: 722552 - DNA, 25 bp, Homo sapien
tgaagtggttcatcatcaaggtgcc

SEQ ID NO: 722553 - DNA, 25 bp, Homo sapien
ttttgctgaaagacgcgatgcagcc

SEQ ID NO: 722554 - DNA, 25 bp, Homo sapien
ttggcacccgtcatggcatttggcg

SEQ ID NO: 722555 - DNA, 25 bp, Homo sapien
cttcaggggccaggtctacagcctt

SEQ ID NO: 722556 - DNA, 25 bp, Homo sapien
cccaccgcgggcagaggcggggcat

SEQ ID NO: 722557 - DNA, 25 bp, Homo sapien
gctgcgcggcctcacgccccgccca

SEQ ID NO: 722558 - DNA, 25 bp, Homo sapien
cttccccagcgcagacgccgccggc

SEQ ID NO: 722559 - DNA, 25 bp, Homo sapien
ttcatccagcagtggtaacaaatat

SEQ ID NO: 722560 - DNA, 25 bp, Homo sapien
ccagcagtggtaacaaatattgttg

SEQ ID NO: 722561 - DNA, 25 bp, Homo sapien
ctttccggaatgttcacattcttga

SEQ ID NO: 722562 - DNA, 25 bp, Homo sapien
ttcgcttttttgacatggccacacc

SEQ ID NO: 722563 - DNA, 25 bp, Homo sapien
tcagagggtcacagcactcggcggc

SEQ ID NO: 722564 - DNA, 25 bp, Homo sapien
actcggcggccacccagcaattaga

SEQ ID NO: 722565 - DNA, 25 bp, Homo sapien
gctgggtgacgtgtctcagagggtc

SEQ ID NO: 722566 - DNA, 25 bp, Homo sapien
acccagcaattagaaagctgccttg

SEQ ID NO: 722567 - DNA, 25 bp, Homo sapien
ctacagcttgtgagacaattggtgc

SEQ ID NO: 722568 - DNA, 25 bp, Homo sapien
cctacagcttgtgagacaattggtg

SEQ ID NO: 722569 - DNA, 25 bp, Homo sapien
acagcttgtgagacaattggtgctt

SEQ ID NO: 722570 - DNA, 25 bp, Homo sapien
tacagcttgtgagacaattggtgct

SEQ ID NO: 722571 - DNA, 25 bp, Homo sapien
ttctttctggccttgccaagagggc

SEQ ID NO: 722572 - DNA, 25 bp, Homo sapien
tggccttgccaagagggctcccaga

SEQ ID NO: 722573 - DNA, 25 bp, Homo sapien
ttctggccttgccaagagggctccc

SEQ ID NO: 722574 - DNA, 25 bp, Homo sapien
ctttctggccttgccaagagggctc

SEQ ID NO: 722575 - DNA, 25 bp, Homo sapien
ggagacggggctcactccgttgccc

SEQ ID NO: 722576 - DNA, 25 bp, Homo sapien
tccgttgcccaggttggagtgcagt

SEQ ID NO: 722577 - DNA, 25 bp, Homo sapien
tttggagacggggctcactccgttg

SEQ ID NO: 722578 - DNA, 25 bp, Homo sapien
gcgatcttagctctctgcaacccct

SEQ ID NO: 722579 - DNA, 25 bp, Homo sapien
ggcgaaattttagctgcaccccggc

SEQ ID NO: 722580 - DNA, 25 bp, Homo sapien
taaactaagttattagcaaaggcga

SEQ ID NO: 722581 - DNA, 25 bp, Homo sapien
tatgtcttgcagattcatggcggaa

SEQ ID NO: 722582 - DNA, 25 bp, Homo sapien
acacgatgacaaatcaggatgctat

SEQ ID NO: 722583 - DNA, 25 bp, Homo sapien
ggtgaagattgtaggcaaaggacat

SEQ ID NO: 722584 - DNA, 25 bp, Homo sapien
acaattttcatagcagggtgaagat

SEQ ID NO: 722585 - DNA, 25 bp, Homo sapien
tagcagggtgaagattgtaggcaaa

SEQ ID NO: 722586 - DNA, 25 bp, Homo sapien
tttcatagcagggtgaagattgtag

SEQ ID NO: 722587 - DNA, 25 bp, Homo sapien
cacctttaggtctaggcaaaactga

SEQ ID NO: 722588 - DNA, 25 bp, Homo sapien
caggaacacctttaggtctaggcaa

SEQ ID NO: 722589 - DNA, 25 bp, Homo sapien
acacctttaggtctaggcaaaactg

SEQ ID NO: 722590 - DNA, 25 bp, Homo sapien
cttcgtcaggaacacctttaggtct

SEQ ID NO: 722591 - DNA, 25 bp, Homo sapien
aggttgagtagcggtgaatacagga

SEQ ID NO: 722592 - DNA, 25 bp, Homo sapien
tcaggttgagtagcggtgaatacag

SEQ ID NO: 722593 - DNA, 25 bp, Homo sapien
ttgagtagcggtgaatacaggagct

SEQ ID NO: 722594 - DNA, 25 bp, Homo sapien
ctcaggttgagtagcggtgaataca

SEQ ID NO: 722595 - DNA, 25 bp, Homo sapien
taaggccattcagttgttgctgtta

SEQ ID NO: 722596 - DNA, 25 bp, Homo sapien
aaggccattcagttgttgctgttac

SEQ ID NO: 722597 - DNA, 25 bp, Homo sapien
ttaaggccattcagttgttgctgtt

SEQ ID NO: 722598 - DNA, 25 bp, Homo sapien
tcggctccggccgcggggcgtggca

SEQ ID NO: 722599 - DNA, 25 bp, Homo sapien
ctccggccgcggggcgtggcagccg

SEQ ID NO: 722600 - DNA, 25 bp, Homo sapien
tccggccgcggggcgtggcagccgc

SEQ ID NO: 722601 - DNA, 25 bp, Homo sapien
ggctccggccgcggggcgtggcagc

SEQ ID NO: 722602 - DNA, 25 bp, Homo sapien
gccaccacccaaagctgaggaaaac

SEQ ID NO: 722603 - DNA, 25 bp, Homo sapien
ccaaagctgaggaaaactgcagaga

SEQ ID NO: 722604 - DNA, 25 bp, Homo sapien
gccctccgcggactggaagccgatg

SEQ ID NO: 722605 - DNA, 25 bp, Homo sapien
gagaaacaggaaatggccgctccac

SEQ ID NO: 722606 - DNA, 25 bp, Homo sapien
cagggccgctcgctgggccgcggcg

SEQ ID NO: 722607 - DNA, 25 bp, Homo sapien
cgctgggccgcggcggcggcggcag

SEQ ID NO: 722608 - DNA, 25 bp, Homo sapien
gggccgcggcggcggcggcagggcg

SEQ ID NO: 722609 - DNA, 25 bp, Homo sapien
ctgggccgcggcggcggcggcaggg

SEQ ID NO: 722610 - DNA, 25 bp, Homo sapien
ccaccaccacacacttgatggcctg

SEQ ID NO: 722611 - DNA, 25 bp, Homo sapien
ccgtctcccaccaccacacacttga

SEQ ID NO: 722612 - DNA, 25 bp, Homo sapien
gtctcccaccaccacacacttgatg

SEQ ID NO: 722613 - DNA, 25 bp, Homo sapien
ccaccacacacttgatggcctgcat

SEQ ID NO: 722614 - DNA, 25 bp, Homo sapien
cgcgattttgctcgggttacactga

SEQ ID NO: 722615 - DNA, 25 bp, Homo sapien
gctcgggttacactgagattcttgt

SEQ ID NO: 722616 - DNA, 25 bp, Homo sapien
ctgagacgcgcgattttgctcgggt

SEQ ID NO: 722617 - DNA, 25 bp, Homo sapien
ctatacaagcaacgctgagacgcgc

SEQ ID NO: 722618 - DNA, 25 bp, Homo sapien
ggaaatgcattggttgtgtaactga

SEQ ID NO: 722619 - DNA, 25 bp, Homo sapien
ggttgtgtaactgatcagtaggcaa

SEQ ID NO: 722620 - DNA, 25 bp, Homo sapien
aactgatcagtaggcaagttttacc

SEQ ID NO: 722621 - DNA, 25 bp, Homo sapien
tagggatatattctccaggaaatgc

SEQ ID NO: 722622 - DNA, 25 bp, Homo sapien
ctgagatcgcatcacagcactccat

SEQ ID NO: 722623 - DNA, 25 bp, Homo sapien
agatcgcatcacagcactccatcct

SEQ ID NO: 722624 - DNA, 25 bp, Homo sapien
tcgcatcacagcactccatcctggg

SEQ ID NO: 722625 - DNA, 25 bp, Homo sapien
tgagatcgcatcacagcactccatc

SEQ ID NO: 722626 - DNA, 25 bp, Homo sapien
ggaaggaaatgttccatcagtaaga

SEQ ID NO: 722627 - DNA, 25 bp, Homo sapien
tccatcagtaagaaaaaatttcagt

SEQ ID NO: 722628 - DNA, 25 bp, Homo sapien
gaaggaaggaaatgttccatcagta

SEQ ID NO: 722629 - DNA, 25 bp, Homo sapien
aggaaggaaggaaatgttccatcag

SEQ ID NO: 722630 - DNA, 25 bp, Homo sapien
gccactagagctaccctctgcaggg

SEQ ID NO: 722631 - DNA, 25 bp, Homo sapien
catgtacttatgttgctcattttca

SEQ ID NO: 722632 - DNA, 25 bp, Homo sapien
tcattttcagcaagagagctagctg

SEQ ID NO: 722633 - DNA, 25 bp, Homo sapien
ttgttgggtttttcatgtacttatg

SEQ ID NO: 722634 - DNA, 25 bp, Homo sapien
aacattggcagaataattgtcaaag

SEQ ID NO: 722635 - DNA, 25 bp, Homo sapien
atctgtcataatcttcttgtccagc

SEQ ID NO: 722636 - DNA, 25 bp, Homo sapien
gattcaccggttttccatctaccat

SEQ ID NO: 722637 - DNA, 25 bp, Homo sapien
tgtttgcggataggatagggggcgt

SEQ ID NO: 722638 - DNA, 25 bp, Homo sapien
cagctgtatcccataagcccagatt

SEQ ID NO: 722639 - DNA, 25 bp, Homo sapien
gcaaacctgccttcaaactaattgg

SEQ ID NO: 722640 - DNA, 25 bp, Homo sapien
cacttagttgtctgatacagaagca

SEQ ID NO: 722641 - DNA, 25 bp, Homo sapien
tgattctgtggtacaaaaatgtcac

SEQ ID NO: 722642 - DNA, 25 bp, Homo sapien
tgatacacaagtaaaaccgctgctt

SEQ ID NO: 722643 - DNA, 25 bp, Homo sapien
gagaggatgccaatgttaaatgacc

SEQ ID NO: 722644 - DNA, 25 bp, Homo sapien
taagcagtcttggatgagctacatc

SEQ ID NO: 722645 - DNA, 25 bp, Homo sapien
gataagaaatcttccaactggtcct

SEQ ID NO: 722646 - DNA, 25 bp, Homo sapien
gcaatcagggaccacattccatgta

SEQ ID NO: 722647 - DNA, 25 bp, Homo sapien
tctgaacagacttagcccgacagag

SEQ ID NO: 722648 - DNA, 25 bp, Homo sapien
tgaatggtctgaacagacttagccc

SEQ ID NO: 722649 - DNA, 25 bp, Homo sapien
gaagaaatgaatggtctgaacagac

SEQ ID NO: 722650 - DNA, 25 bp, Homo sapien
cttttggagaacgaagaagaaatga

SEQ ID NO: 722651 - DNA, 25 bp, Homo sapien
tcaactaagaatggcgactacctgc

SEQ ID NO: 722652 - DNA, 25 bp, Homo sapien
gactagggcgggaaagtcacttgaa

SEQ ID NO: 722653 - DNA, 25 bp, Homo sapien
gaaacaactggcatgacgcactggg

SEQ ID NO: 722654 - DNA, 25 bp, Homo sapien
catggaggctcagcatctcagcgaa

SEQ ID NO: 722655 - DNA, 25 bp, Homo sapien
ccatgggagaggatcatcgagaacc

SEQ ID NO: 722656 - DNA, 25 bp, Homo sapien
acacacacgacaggagcgagcagtt

SEQ ID NO: 722657 - DNA, 25 bp, Homo sapien
aagagcctctgatcgtatctgtggc

SEQ ID NO: 722658 - DNA, 25 bp, Homo sapien
ggtgccaaatctttaccatgggaga

SEQ ID NO: 722659 - DNA, 25 bp, Homo sapien
tcttccacctagttctgggagactg

SEQ ID NO: 722660 - DNA, 25 bp, Homo sapien
gacactaagacctccaattctgggc

SEQ ID NO: 722661 - DNA, 25 bp, Homo sapien
catggacaaattttagaagtgacac

SEQ ID NO: 722662 - DNA, 25 bp, Homo sapien
gcattatcaaaatcagcactgttgc

SEQ ID NO: 722663 - DNA, 25 bp, Homo sapien
tatatccttaccgtacgtttctcca

SEQ ID NO: 722664 - DNA, 25 bp, Homo sapien
tgtctttgccccgggaggttatatc

SEQ ID NO: 722665 - DNA, 25 bp, Homo sapien
tcacttgggaggagaagatcacagt

SEQ ID NO: 722666 - DNA, 25 bp, Homo sapien
gatcaggaggatcagaccagaccct

SEQ ID NO: 722667 - DNA, 25 bp, Homo sapien
caacaaggttagtcctgctccggct

SEQ ID NO: 722668 - DNA, 25 bp, Homo sapien
gcgcatgcacaagctcgtccaagaa

SEQ ID NO: 722669 - DNA, 25 bp, Homo sapien
caaatgatgcaggactcacaaggga

SEQ ID NO: 722670 - DNA, 25 bp, Homo sapien
gggaaaagcaaattaagaacacatc

SEQ ID NO: 722671 - DNA, 25 bp, Homo sapien
gatgcaggactcacaagggaaaagc

SEQ ID NO: 722672 - DNA, 25 bp, Homo sapien
ttgcacggacattttcaaatgatgc

SEQ ID NO: 722673 - DNA, 25 bp, Homo sapien
tttatttctgagaggatcattctat

SEQ ID NO: 722674 - DNA, 25 bp, Homo sapien
gagaggatcattctataacttacat

SEQ ID NO: 722675 - DNA, 25 bp, Homo sapien
tctgagaggatcattctataactta

SEQ ID NO: 722676 - DNA, 25 bp, Homo sapien
gatcattctataacttacatacaca

SEQ ID NO: 722677 - DNA, 25 bp, Homo sapien
cacggaggcttcaggtggttcccac

SEQ ID NO: 722678 - DNA, 25 bp, Homo sapien
ggagttcctcccaaagcaaatagat

SEQ ID NO: 722679 - DNA, 25 bp, Homo sapien
aatccacgtattaggccgggcatag

SEQ ID NO: 722680 - DNA, 25 bp, Homo sapien
cattagcaagctaggactcccggat

SEQ ID NO: 722681 - DNA, 25 bp, Homo sapien
ttagccatggctagaccctgcggat

SEQ ID NO: 722682 - DNA, 25 bp, Homo sapien
ccttagccatggctagaccctgcgg

SEQ ID NO: 722683 - DNA, 25 bp, Homo sapien
gccatggctagaccctgcggatagg

SEQ ID NO: 722684 - DNA, 25 bp, Homo sapien
agccatggctagaccctgcggatag

SEQ ID NO: 722685 - DNA, 25 bp, Homo sapien
caaggaggaggaaaaacacaggatt

SEQ ID NO: 722686 - DNA, 25 bp, Homo sapien
ggaggaggaaaaacacaggattcca

SEQ ID NO: 722687 - DNA, 25 bp, Homo sapien
ctacaataaaagaggtacaaggagg

SEQ ID NO: 722688 - DNA, 25 bp, Homo sapien
ggaggaaaaacacaggattccatac

SEQ ID NO: 722689 - DNA, 25 bp, Homo sapien
tggttccccaagagtacaccaggcc

SEQ ID NO: 722690 - DNA, 25 bp, Homo sapien
tgagtgggagacacacaccctcctt

SEQ ID NO: 722691 - DNA, 25 bp, Homo sapien
aggaaacacgaccacacggcaatgt

SEQ ID NO: 722692 - DNA, 25 bp, Homo sapien
aacgctgacgttaagacccacaggg

SEQ ID NO: 722693 - DNA, 25 bp, Homo sapien
ttgaggcctcgctgtgtgagcgccg

SEQ ID NO: 722694 - DNA, 25 bp, Homo sapien
ggcagaggactgctcggatcgcttc

SEQ ID NO: 722695 - DNA, 25 bp, Homo sapien
gactgctcggatcgcttcgtcaaac

SEQ ID NO: 722696 - DNA, 25 bp, Homo sapien
gtgtgagcgccgagcactccaggta

SEQ ID NO: 722697 - DNA, 25 bp, Homo sapien
caaaaagttggcattgagtgcgaag

SEQ ID NO: 722698 - DNA, 25 bp, Homo sapien
tgagcaaagcgtacaaaggttccaa

SEQ ID NO: 722699 - DNA, 25 bp, Homo sapien
agtgcgaaggctccaccgttgtttt

SEQ ID NO: 722700 - DNA, 25 bp, Homo sapien
tttgagcaaagcgtacaaaggttcc

SEQ ID NO: 722701 - DNA, 25 bp, Homo sapien
tttaatagaatgtgagtctgaactc

SEQ ID NO: 722702 - DNA, 25 bp, Homo sapien
tagaatgtgagtctgaactcttaca

SEQ ID NO: 722703 - DNA, 25 bp, Homo sapien
aatagaatgtgagtctgaactctta

SEQ ID NO: 722704 - DNA, 25 bp, Homo sapien
tagggctaaattttaatagaatgtg

SEQ ID NO: 722705 - DNA, 25 bp, Homo sapien
tcactggtgagttcaatggcaacgc

SEQ ID NO: 722706 - DNA, 25 bp, Homo sapien
tgttcaaaatctccgcaaaagctgg

SEQ ID NO: 722707 - DNA, 25 bp, Homo sapien
caaagttcagtgctcggtgttctcg

SEQ ID NO: 722708 - DNA, 25 bp, Homo sapien
taggcaaagcgactacaggaggcgt

SEQ ID NO: 722709 - DNA, 25 bp, Homo sapien
gaggagttcccatgacgccaaaaca

SEQ ID NO: 722710 - DNA, 25 bp, Homo sapien
gatggatcccttggctgtctgagga

SEQ ID NO: 722711 - DNA, 25 bp, Homo sapien
tgctccagaagtgcgggaatccagg

SEQ ID NO: 722712 - DNA, 25 bp, Homo sapien
cacgctcaggtgataggacgactcc

SEQ ID NO: 722713 - DNA, 25 bp, Homo sapien
cgaccaggaagtcctgacacagcct

SEQ ID NO: 722714 - DNA, 25 bp, Homo sapien
gaccaggaagtcctgacacagcctc

SEQ ID NO: 722715 - DNA, 25 bp, Homo sapien
gcgaccaggaagtcctgacacagcc

SEQ ID NO: 722716 - DNA, 25 bp, Homo sapien
cagggcactctatgctgttgctgga

SEQ ID NO: 722717 - DNA, 25 bp, Homo sapien
gatgtctaagaaagcaaatggctgc

SEQ ID NO: 722718 - DNA, 25 bp, Homo sapien
tgatcagattctgggctaggactct

SEQ ID NO: 722719 - DNA, 25 bp, Homo sapien
gagagccgggaggaattgcaccctc

SEQ ID NO: 722720 - DNA, 25 bp, Homo sapien
gaagaatcttgcgagtggtcgcgca

SEQ ID NO: 722721 - DNA, 25 bp, Homo sapien
tccaagcgcggtttctgggtcaaag

SEQ ID NO: 722722 - DNA, 25 bp, Homo sapien
tcgcgcactgcaataaacccaaggt

SEQ ID NO: 722723 - DNA, 25 bp, Homo sapien
tcagtgtgcccctttgctaaacagg

SEQ ID NO: 722724 - DNA, 25 bp, Homo sapien
tatgccagttcacaaaagactccag

SEQ ID NO: 722725 - DNA, 25 bp, Homo sapien
taattggactccaaacctgtgtggc

SEQ ID NO: 722726 - DNA, 25 bp, Homo sapien
tgtaagccttagtacagagatgccc

SEQ ID NO: 722727 - DNA, 25 bp, Homo sapien
ttgttaagaagtgctgtcagggccg

SEQ ID NO: 722728 - DNA, 25 bp, Homo sapien
cagcctgggtctctaggctagctaa

SEQ ID NO: 722729 - DNA, 25 bp, Homo sapien
ggcctgaagcgtccctccttataaa

SEQ ID NO: 722730 - DNA, 25 bp, Homo sapien
gaaaatttcggtcaggtgtagtggc

SEQ ID NO: 722731 - DNA, 25 bp, Homo sapien
gaacgggatatgagtcccacacctg

SEQ ID NO: 722732 - DNA, 25 bp, Homo sapien
tatgccctggctaagagaagagcag

SEQ ID NO: 722733 - DNA, 25 bp, Homo sapien
ggtcagttttgccagaaggttcaca

SEQ ID NO: 722734 - DNA, 25 bp, Homo sapien
ggttcacaaccctccttaggcgcag

SEQ ID NO: 722735 - DNA, 25 bp, Homo sapien
gaaactggttctggcaggagtccct

SEQ ID NO: 722736 - DNA, 25 bp, Homo sapien
gacatcttagcaagggtgcctgcga

SEQ ID NO: 722737 - DNA, 25 bp, Homo sapien
tgcaaatctgatacacctggcgcat

SEQ ID NO: 722738 - DNA, 25 bp, Homo sapien
tgtcccaagggtgctgaagaatcca

SEQ ID NO: 722739 - DNA, 25 bp, Homo sapien
caacaaaagctctgtagggctgcag

SEQ ID NO: 722740 - DNA, 25 bp, Homo sapien
tgggtgtggcggcatgcgcctgtaa

SEQ ID NO: 722741 - DNA, 25 bp, Homo sapien
tctcagctactggggaggctgaggc

SEQ ID NO: 722742 - DNA, 25 bp, Homo sapien
agctactggggaggctgaggcagga

SEQ ID NO: 722743 - DNA, 25 bp, Homo sapien
tactggggaggctgaggcaggagaa

SEQ ID NO: 722744 - DNA, 25 bp, Homo sapien
tatataactgggactaaacgagcta

SEQ ID NO: 722745 - DNA, 25 bp, Homo sapien
tctatgaaggtatggtatgccatcc

SEQ ID NO: 722746 - DNA, 25 bp, Homo sapien
tcaagccgtgggaaattacagagtc

SEQ ID NO: 722747 - DNA, 25 bp, Homo sapien
taacaaggaacgaaagcaggactcc

SEQ ID NO: 722748 - DNA, 25 bp, Homo sapien
tgctgaagatctggaagacgcgctc

SEQ ID NO: 722749 - DNA, 25 bp, Homo sapien
ccttaagtgttgtgtgggcatcacc

SEQ ID NO: 722750 - DNA, 25 bp, Homo sapien
caggaaacccgcgaatcaatgggac

SEQ ID NO: 722751 - DNA, 25 bp, Homo sapien
tgaacttgagctgtcggagcgcacc

SEQ ID NO: 722752 - DNA, 25 bp, Homo sapien
cagggaaaatttggcagagtccggg

SEQ ID NO: 722753 - DNA, 25 bp, Homo sapien
catgaacattttccggctgactggg

SEQ ID NO: 722754 - DNA, 25 bp, Homo sapien
acgtcgcgggcgatctcgccatctt

SEQ ID NO: 722755 - DNA, 25 bp, Homo sapien
agttcggccacgtccctggccacgt

SEQ ID NO: 722756 - DNA, 25 bp, Homo sapien
gaatggtaaaatcttcagaccccta

SEQ ID NO: 722757 - DNA, 25 bp, Homo sapien
gcccggtcagacgttcacttttcta

SEQ ID NO: 722758 - DNA, 25 bp, Homo sapien
ccttatcttgagtgaggcaatcaga

SEQ ID NO: 722759 - DNA, 25 bp, Homo sapien
ccgtctcgtactccttaagtgctgg

SEQ ID NO: 722760 - DNA, 25 bp, Homo sapien
cacagtctagtctgatgctgattca

SEQ ID NO: 722761 - DNA, 25 bp, Homo sapien
ggttagcaggagatattattttcat

SEQ ID NO: 722762 - DNA, 25 bp, Homo sapien
tgaaatcactttgatggactgccag

SEQ ID NO: 722763 - DNA, 25 bp, Homo sapien
tatgtaatggattgtatctaccttc

SEQ ID NO: 722764 - DNA, 25 bp, Homo sapien
catgtccctgtcaaagagacattcc

SEQ ID NO: 722765 - DNA, 25 bp, Homo sapien
ccgtcccagtgctcatgatcaccat

SEQ ID NO: 722766 - DNA, 25 bp, Homo sapien
gggacatcatactccttttaatatg

SEQ ID NO: 722767 - DNA, 25 bp, Homo sapien
ctccttttaatatggcaggggctcc

SEQ ID NO: 722768 - DNA, 25 bp, Homo sapien
caggcctggaccacattagggctac

SEQ ID NO: 722769 - DNA, 25 bp, Homo sapien
aatggacggtccataggactgggcc

SEQ ID NO: 722770 - DNA, 25 bp, Homo sapien
taatgacattattccccggtaggtc

SEQ ID NO: 722771 - DNA, 25 bp, Homo sapien
tgtcagccgtctatgcagagcttga

SEQ ID NO: 722772 - DNA, 25 bp, Homo sapien
ggtaagcccgtgagtattgagcctc

SEQ ID NO: 722773 - DNA, 25 bp, Homo sapien
tgcatcatggtaagcccgtgagtat

SEQ ID NO: 722774 - DNA, 25 bp, Homo sapien
agggcagacgctgtggcttggaagt

SEQ ID NO: 722775 - DNA, 25 bp, Homo sapien
tggcttggaagtgccgtcttgtcta

SEQ ID NO: 722776 - DNA, 25 bp, Homo sapien
tatgaaactccttaccaacaggatg

SEQ ID NO: 722777 - DNA, 25 bp, Homo sapien
tttatgaaactccttaccaacagga

SEQ ID NO: 722778 - DNA, 25 bp, Homo sapien
gaaactccttaccaacaggatgcct

SEQ ID NO: 722779 - DNA, 25 bp, Homo sapien
actccttaccaacaggatgccttct

SEQ ID NO: 722780 - DNA, 25 bp, Homo sapien
gcgatacgagacttcctgcgggctc

SEQ ID NO: 722781 - DNA, 25 bp, Homo sapien
tcccgggcgcgatacgagacttcct

SEQ ID NO: 722782 - DNA, 25 bp, Homo sapien
cgggcgcgatacgagacttcctgcg

SEQ ID NO: 722783 - DNA, 25 bp, Homo sapien
tacgagacttcctgcgggctcgtga

SEQ ID NO: 722784 - DNA, 25 bp, Homo sapien
tgacggtcctgggacagcccaagct

SEQ ID NO: 722785 - DNA, 25 bp, Homo sapien
actgacggtcctgggacagcccaag

SEQ ID NO: 722786 - DNA, 25 bp, Homo sapien
aggagactgacggtcctgggacagc

SEQ ID NO: 722787 - DNA, 25 bp, Homo sapien
agactgacggtcctgggacagccca

SEQ ID NO: 722788 - DNA, 25 bp, Homo sapien
cgggcctggtcggagatttccctgg

SEQ ID NO: 722789 - DNA, 25 bp, Homo sapien
tcctgggcgggcctggtcggagatt

SEQ ID NO: 722790 - DNA, 25 bp, Homo sapien
tggtagggggacgtggagtgcagca

SEQ ID NO: 722791 - DNA, 25 bp, Homo sapien
cagcaggctcggaggggacaccggg

SEQ ID NO: 722792 - DNA, 25 bp, Homo sapien
caacacccacataagacgacaagag

SEQ ID NO: 722793 - DNA, 25 bp, Homo sapien
agacgacaagagttgcagtcaaagg

SEQ ID NO: 722794 - DNA, 25 bp, Homo sapien
gagacagatcaattcaacacccaca

SEQ ID NO: 722795 - DNA, 25 bp, Homo sapien
gcagagacagatcaattcaacaccc

SEQ ID NO: 722796 - DNA, 25 bp, Homo sapien
tggttgggtaattttcagccggcag

SEQ ID NO: 722797 - DNA, 25 bp, Homo sapien
tcacagataattcaaacagcagctc

SEQ ID NO: 722798 - DNA, 25 bp, Homo sapien
gctgccggacatggttcttccagga

SEQ ID NO: 722799 - DNA, 25 bp, Homo sapien
gggtaattttcagccggcagctctg

SEQ ID NO: 722800 - DNA, 25 bp, Homo sapien
gggtgattcagggtacccagcctac

SEQ ID NO: 722801 - DNA, 25 bp, Homo sapien
ggggtgattcagggtacccagccta

SEQ ID NO: 722802 - DNA, 25 bp, Homo sapien
tctagactttaatgacatctcaaag

SEQ ID NO: 722803 - DNA, 25 bp, Homo sapien
tctcagacatcaactcccaaatggc

SEQ ID NO: 722804 - DNA, 25 bp, Homo sapien
ttcttaggcacacataacagaggcc

SEQ ID NO: 722805 - DNA, 25 bp, Homo sapien
gaaagagtgtgactatctgctactg

SEQ ID NO: 722806 - DNA, 25 bp, Homo sapien
aagaacaagacccatcagcaccgaa

SEQ ID NO: 722807 - DNA, 25 bp, Homo sapien
tggccaggcctttcaagctatgggt

SEQ ID NO: 722808 - DNA, 25 bp, Homo sapien
agcaccgaagccaggtagaacaaga

SEQ ID NO: 722809 - DNA, 25 bp, Homo sapien
tcgagcagacgcagataagaacaag

SEQ ID NO: 722810 - DNA, 25 bp, Homo sapien
cagtgccatccaaggatcatcctta

SEQ ID NO: 722811 - DNA, 25 bp, Homo sapien
ccagtgccatccaaggatcatcctt

SEQ ID NO: 722812 - DNA, 25 bp, Homo sapien
agtgccatccaaggatcatccttac

SEQ ID NO: 722813 - DNA, 25 bp, Homo sapien
tcaacgaactaaatccatcaatgat

SEQ ID NO: 722814 - DNA, 25 bp, Homo sapien
cagaggctgtggaatatcccacaac

SEQ ID NO: 722815 - DNA, 25 bp, Homo sapien
aagcaccaccgcaagaggactttca

SEQ ID NO: 722816 - DNA, 25 bp, Homo sapien
ttctctcaaagcaccaccgcaagag

SEQ ID NO: 722817 - DNA, 25 bp, Homo sapien
tgaagcaatccatgcacggctctct

SEQ ID NO: 722818 - DNA, 25 bp, Homo sapien
aatgaagcaatccatgcacggctct

SEQ ID NO: 722819 - DNA, 25 bp, Homo sapien
agcaatccatgcacggctctctgaa

SEQ ID NO: 722820 - DNA, 25 bp, Homo sapien
gaagcaatccatgcacggctctctg

SEQ ID NO: 722821 - DNA, 25 bp, Homo sapien
aagaaaacaggcatggcttgttcat

SEQ ID NO: 722822 - DNA, 25 bp, Homo sapien
aagaaggtaatgcaaggacaactcc

SEQ ID NO: 722823 - DNA, 25 bp, Homo sapien
gacagtagccaaatacttcccaggt

SEQ ID NO: 722824 - DNA, 25 bp, Homo sapien
aacaggtttacacctagcagcagat

SEQ ID NO: 722825 - DNA, 25 bp, Homo sapien
tataaaccatcccttgcaagaccag

SEQ ID NO: 722826 - DNA, 25 bp, Homo sapien
gtgcttggatcgagctggtttcctt

SEQ ID NO: 722827 - DNA, 25 bp, Homo sapien
gcttggatcgagctggtttccttaa

SEQ ID NO: 722828 - DNA, 25 bp, Homo sapien
tgcttggatcgagctggtttcctta

SEQ ID NO: 722829 - DNA, 25 bp, Homo sapien
agtgcttggatcgagctggtttcct

SEQ ID NO: 722830 - DNA, 25 bp, Homo sapien
ctggagtcacgagagccacactcac

SEQ ID NO: 722831 - DNA, 25 bp, Homo sapien
ccgctggagtcacgagagccacact

SEQ ID NO: 722832 - DNA, 25 bp, Homo sapien
ggaggtgccgctggagtcacgagag

SEQ ID NO: 722833 - DNA, 25 bp, Homo sapien
gtgccgctggagtcacgagagccac

SEQ ID NO: 722834 - DNA, 25 bp, Homo sapien
gggtgaactggctctgctttcggat

SEQ ID NO: 722835 - DNA, 25 bp, Homo sapien
tggctctgctttcggattcaggaaa

SEQ ID NO: 722836 - DNA, 25 bp, Homo sapien
aactggctctgctttcggattcagg

SEQ ID NO: 722837 - DNA, 25 bp, Homo sapien
gctctgctttcggattcaggaaaca

SEQ ID NO: 722838 - DNA, 25 bp, Homo sapien
tgcccagagatgaggactgtctact

SEQ ID NO: 722839 - DNA, 25 bp, Homo sapien
cagcacgggtctagaatcttgggcc

SEQ ID NO: 722840 - DNA, 25 bp, Homo sapien
catgtcctgccacgtggcgagggaa

SEQ ID NO: 722841 - DNA, 25 bp, Homo sapien
aacatccgcagaaacaacttgtggg

SEQ ID NO: 722842 - DNA, 25 bp, Homo sapien
gagattttcataatctgtccactgg

SEQ ID NO: 722843 - DNA, 25 bp, Homo sapien
gatggtgcttgacgagacaaggaca

SEQ ID NO: 722844 - DNA, 25 bp, Homo sapien
gacaccgcacacctgctgagatttt

SEQ ID NO: 722845 - DNA, 25 bp, Homo sapien
tgcttgacgagacaaggacaccgca

SEQ ID NO: 722846 - DNA, 25 bp, Homo sapien
cacagtgatggtcgaaacggtgcac

SEQ ID NO: 722847 - DNA, 25 bp, Homo sapien
gaaaagtggtgctcacaatggcgac

SEQ ID NO: 722848 - DNA, 25 bp, Homo sapien
tcaagacgtagatgaggaagtacct

SEQ ID NO: 722849 - DNA, 25 bp, Homo sapien
gaggtgtccaaggtcatcgatgtaa

SEQ ID NO: 722850 - DNA, 25 bp, Homo sapien
tcctgtgggatgaatgaagtgttca

SEQ ID NO: 722851 - DNA, 25 bp, Homo sapien
ttcctgtgggatgaatgaagtgttc

SEQ ID NO: 722852 - DNA, 25 bp, Homo sapien
cctgtgggatgaatgaagtgttcac

SEQ ID NO: 722853 - DNA, 25 bp, Homo sapien
ctgtgggatgaatgaagtgttcaca

SEQ ID NO: 722854 - DNA, 25 bp, Homo sapien
ctcgttagtagtctggttggtggcc

SEQ ID NO: 722855 - DNA, 25 bp, Homo sapien
gaagctcagaaccacgacaaagccc

SEQ ID NO: 722856 - DNA, 25 bp, Homo sapien
cagcatgaagacaatccgtggaaaa

SEQ ID NO: 722857 - DNA, 25 bp, Homo sapien
aaccacgacaaagcccagcatgaag

SEQ ID NO: 722858 - DNA, 25 bp, Homo sapien
aggccacaaggggacaacgctggca

SEQ ID NO: 722859 - DNA, 25 bp, Homo sapien
acaaggggacaacgctggcaccagg

SEQ ID NO: 722860 - DNA, 25 bp, Homo sapien
aggggacaacgctggcaccaggccc

SEQ ID NO: 722861 - DNA, 25 bp, Homo sapien
gccacaaggggacaacgctggcacc

SEQ ID NO: 722862 - DNA, 25 bp, Homo sapien
aagatctcttgaaggttgctccgaa

SEQ ID NO: 722863 - DNA, 25 bp, Homo sapien
tcttcctctcatgacatggaaaggc

SEQ ID NO: 722864 - DNA, 25 bp, Homo sapien
aggttgctccgaagcccatgggagt

SEQ ID NO: 722865 - DNA, 25 bp, Homo sapien
tgggagtgaatgttccggtggactt

SEQ ID NO: 722866 - DNA, 25 bp, Homo sapien
catgcccagagtttagagacaccaa

SEQ ID NO: 722867 - DNA, 25 bp, Homo sapien
ccatgcttggaaaacgaggatccac

SEQ ID NO: 722868 - DNA, 25 bp, Homo sapien
gcacatcacacaggtcagagacacg

SEQ ID NO: 722869 - DNA, 25 bp, Homo sapien
ggacttcagagatgcccggtttcaa

SEQ ID NO: 722870 - DNA, 25 bp, Homo sapien
caagacctcgtttctggcagtcatg

SEQ ID NO: 722871 - DNA, 25 bp, Homo sapien
acaagcccatactggccggaaggca

SEQ ID NO: 722872 - DNA, 25 bp, Homo sapien
ggaaggtgcctgatgtacaagccca

SEQ ID NO: 722873 - DNA, 25 bp, Homo sapien
gagaaaggacttgaatgtggctaga

SEQ ID NO: 722874 - DNA, 25 bp, Homo sapien
agagctgccgctggttgatttcacg

SEQ ID NO: 722875 - DNA, 25 bp, Homo sapien
gctccttggcctagcaaggtgcaga

SEQ ID NO: 722876 - DNA, 25 bp, Homo sapien
ggtgctttccaccagcaagaattgg

SEQ ID NO: 722877 - DNA, 25 bp, Homo sapien
tcggccagcggacttgggttccctg

SEQ ID NO: 722878 - DNA, 25 bp, Homo sapien
agcaggcgcccgaaggtccgactgc

SEQ ID NO: 722879 - DNA, 25 bp, Homo sapien
aacaaagaggcgcgacccgggcctg

SEQ ID NO: 722880 - DNA, 25 bp, Homo sapien
gaatgccgggcacggagacggcggc

SEQ ID NO: 722881 - DNA, 25 bp, Homo sapien
cgcgcagccgaacagcggccgaatg

SEQ ID NO: 722882 - DNA, 25 bp, Homo sapien
ccgcgccgagcgcgtctcacttccg

SEQ ID NO: 722883 - DNA, 25 bp, Homo sapien
cgcgccgagcgcgtctcacttccgc

SEQ ID NO: 722884 - DNA, 25 bp, Homo sapien
cccgcgccgagcgcgtctcacttcc

SEQ ID NO: 722885 - DNA, 25 bp, Homo sapien
gcatcgcggcgcagcagcgagtggc

SEQ ID NO: 722886 - DNA, 25 bp, Homo sapien
gcacctggaacacgaactcctccag

SEQ ID NO: 722887 - DNA, 25 bp, Homo sapien
gcgctcagcgcatcgcggcgcagca

SEQ ID NO: 722888 - DNA, 25 bp, Homo sapien
gtggtacaacacctccttggcggcg

SEQ ID NO: 722889 - DNA, 25 bp, Homo sapien
ctggaaataattgcacatgatttca

SEQ ID NO: 722890 - DNA, 25 bp, Homo sapien
attgcacatgatttcaagaagttga

SEQ ID NO: 722891 - DNA, 25 bp, Homo sapien
tggaaataattgcacatgatttcaa

SEQ ID NO: 722892 - DNA, 25 bp, Homo sapien
acatgatttcaagaagttgaagctc

SEQ ID NO: 722893 - DNA, 25 bp, Homo sapien
taatctgccgaacagagtccttggt

SEQ ID NO: 722894 - DNA, 25 bp, Homo sapien
aaataatctgccgaacagagtcctt

SEQ ID NO: 722895 - DNA, 25 bp, Homo sapien
tctgccgaacagagtccttggtttg

SEQ ID NO: 722896 - DNA, 25 bp, Homo sapien
gaaaaaataatctgccgaacagagt

SEQ ID NO: 722897 - DNA, 25 bp, Homo sapien
caacaagctcatccggctgtcatcg

SEQ ID NO: 722898 - DNA, 25 bp, Homo sapien
aacaccgggattcgacacacagcca

SEQ ID NO: 722899 - DNA, 25 bp, Homo sapien
catccggctgtcatcggctttgttc

SEQ ID NO: 722900 - DNA, 25 bp, Homo sapien
tccaacaccgggattcgacacacag

SEQ ID NO: 722901 - DNA, 25 bp, Homo sapien
tacaagggccttggctaacctcaca

SEQ ID NO: 722902 - DNA, 25 bp, Homo sapien
tctcgggctggcactgaatatctgc

SEQ ID NO: 722903 - DNA, 25 bp, Homo sapien
tgacaggtcatagagcgcggtaacg

SEQ ID NO: 722904 - DNA, 25 bp, Homo sapien
ttcagcgtctgaatggatcccggca

SEQ ID NO: 722905 - DNA, 25 bp, Homo sapien
ttgggtcctcaaaaatccaggtgac

SEQ ID NO: 722906 - DNA, 25 bp, Homo sapien
gacaatcatttcaagcaagtccata

SEQ ID NO: 722907 - DNA, 25 bp, Homo sapien
caatcatttcaagcaagtccatagg

SEQ ID NO: 722908 - DNA, 25 bp, Homo sapien
cttgggtcctcaaaaatccaggtga

SEQ ID NO: 722909 - DNA, 25 bp, Homo sapien
cacgcccgggtcctttgtgaccttg

SEQ ID NO: 722910 - DNA, 25 bp, Homo sapien
gggtgagctctaagaatcctattgg

SEQ ID NO: 722911 - DNA, 25 bp, Homo sapien
ccagcggatcaatccaacgagcggg

SEQ ID NO: 722912 - DNA, 25 bp, Homo sapien
gattggccgcaatcggagtatttaa

SEQ ID NO: 722913 - DNA, 25 bp, Homo sapien
ccatgtggtcgaagaggatcagccc

SEQ ID NO: 722914 - DNA, 25 bp, Homo sapien
ctgttgatctcctctaccagcggga

SEQ ID NO: 722915 - DNA, 25 bp, Homo sapien
ggtccagcgagagctcaatctcctg

SEQ ID NO: 722916 - DNA, 25 bp, Homo sapien
gggttcagttcatccgccaacctgt

SEQ ID NO: 722917 - DNA, 25 bp, Homo sapien
ctccagcctgggcaaagaagcgaga

SEQ ID NO: 722918 - DNA, 25 bp, Homo sapien
ccagcctgggcaaagaagcgagact

SEQ ID NO: 722919 - DNA, 25 bp, Homo sapien
agcctgggcaaagaagcgagactcc

SEQ ID NO: 722920 - DNA, 25 bp, Homo sapien
actccagcctgggcaaagaagcgag

SEQ ID NO: 722921 - DNA, 25 bp, Homo sapien
ttattatggggcagcctggagcaca

SEQ ID NO: 722922 - DNA, 25 bp, Homo sapien
cctggagcacaaggttctcaggtca

SEQ ID NO: 722923 - DNA, 25 bp, Homo sapien
gcagcctggagcacaaggttctcag

SEQ ID NO: 722924 - DNA, 25 bp, Homo sapien
cagcctggagcacaaggttctcagg

SEQ ID NO: 722925 - DNA, 25 bp, Homo sapien
gacaaaggggctcgccctgtcttgc

SEQ ID NO: 722926 - DNA, 25 bp, Homo sapien
gggctcgccctgtcttgcctccctc

SEQ ID NO: 722927 - DNA, 25 bp, Homo sapien
ggcccagctaggagtcctgaggata

SEQ ID NO: 722928 - DNA, 25 bp, Homo sapien
ccagctaggagtcctgaggatactt

SEQ ID NO: 722929 - DNA, 25 bp, Homo sapien
gcaaggagtaggatgagaaattcac

SEQ ID NO: 722930 - DNA, 25 bp, Homo sapien
ggatgagaaattcacaaacaccact

SEQ ID NO: 722931 - DNA, 25 bp, Homo sapien
actgcgtttgtggaggtctccacgt

SEQ ID NO: 722932 - DNA, 25 bp, Homo sapien
tctccacgtggcaaggagtaggatg

SEQ ID NO: 722933 - DNA, 25 bp, Homo sapien
caccttccgggttcaagtgattctc

SEQ ID NO: 722934 - DNA, 25 bp, Homo sapien
ccgggattacaggtgcgcaccacca

SEQ ID NO: 722935 - DNA, 25 bp, Homo sapien
agtgccatgctcttggctcactgaa

SEQ ID NO: 722936 - DNA, 25 bp, Homo sapien
ctcactgaaacctccaccttccggg

SEQ ID NO: 722937 - DNA, 25 bp, Homo sapien
tgtcagccgcccgaatgaatagctg

SEQ ID NO: 722938 - DNA, 25 bp, Homo sapien
tacagttgcgaccacaactcagtgc

SEQ ID NO: 722939 - DNA, 25 bp, Homo sapien
gatgcacgccaccatatttggccaa

SEQ ID NO: 722940 - DNA, 25 bp, Homo sapien
cccaggtagtacagttgcgaccaca

SEQ ID NO: 722941 - DNA, 25 bp, Homo sapien
ctggtgcattcggtgcccaaagttc

SEQ ID NO: 722942 - DNA, 25 bp, Homo sapien
gctggtctgtcacagactgaacccc

SEQ ID NO: 722943 - DNA, 25 bp, Homo sapien
tgggtaagtaacttagcaagagatt

SEQ ID NO: 722944 - DNA, 25 bp, Homo sapien
tgaggcagtaaacagagggtatgtg

SEQ ID NO: 722945 - DNA, 25 bp, Homo sapien
cttttggaggccgactgcttgacgc

SEQ ID NO: 722946 - DNA, 25 bp, Homo sapien
tcaacgtggctttccaacgctgggt

SEQ ID NO: 722947 - DNA, 25 bp, Homo sapien
cagtcagaacctctcttggccgggt

SEQ ID NO: 722948 - DNA, 25 bp, Homo sapien
gaaagagtttctcacggcccttgcc

SEQ ID NO: 722949 - DNA, 25 bp, Homo sapien
ccttgcaaacgaccccgaaattcag

SEQ ID NO: 722950 - DNA, 25 bp, Homo sapien
gctggccttgcaaacgaccccgaaa

SEQ ID NO: 722951 - DNA, 25 bp, Homo sapien
gcaaacgaccccgaaattcagagtc

SEQ ID NO: 722952 - DNA, 25 bp, Homo sapien
gccttgcaaacgaccccgaaattca

SEQ ID NO: 722953 - DNA, 25 bp, Homo sapien
gacacacagaacagctggccacagt

SEQ ID NO: 722954 - DNA, 25 bp, Homo sapien
acagtctcctcagagccgagaatga

SEQ ID NO: 722955 - DNA, 25 bp, Homo sapien
caggaccccacaggcgaggatgcgt

SEQ ID NO: 722956 - DNA, 25 bp, Homo sapien
ctctgcggctctctgctgcgctggg

SEQ ID NO: 722957 - DNA, 25 bp, Homo sapien
ggagcgcggcgtgaggcgactgctg

SEQ ID NO: 722958 - DNA, 25 bp, Homo sapien
aaggtcacgccggagatgaaggtgt

SEQ ID NO: 722959 - DNA, 25 bp, Homo sapien
ggacccgagatcaccagctggagga

SEQ ID NO: 722960 - DNA, 25 bp, Homo sapien
gcgactgctgcacgggacccgagat

SEQ ID NO: 722961 - DNA, 25 bp, Homo sapien
tcgtcttcacgaggaaagaggccag

SEQ ID NO: 722962 - DNA, 25 bp, Homo sapien
taagcttgtggtcactacgcagcct

SEQ ID NO: 722963 - DNA, 25 bp, Homo sapien
tcgaaaggcttcgtccagcgagagc

SEQ ID NO: 722964 - DNA, 25 bp, Homo sapien
taaaaatgcacgcagcaggctctcg

SEQ ID NO: 722965 - DNA, 25 bp, Homo sapien
gggacacgatgcggcggcccctggg

SEQ ID NO: 722966 - DNA, 25 bp, Homo sapien
gggctggccggtgccgagcgcagcg

SEQ ID NO: 722967 - DNA, 25 bp, Homo sapien
tggccggtgccgagcgcagcgcgcg

SEQ ID NO: 722968 - DNA, 25 bp, Homo sapien
gctggccggtgccgagcgcagcgcg

SEQ ID NO: 722969 - DNA, 25 bp, Homo sapien
cagaagttggtggagactctccggc

SEQ ID NO: 722970 - DNA, 25 bp, Homo sapien
agcagaggctgcgaggtgaaggcca

SEQ ID NO: 722971 - DNA, 25 bp, Homo sapien
cgcctccatccagaaagagccagga

SEQ ID NO: 722972 - DNA, 25 bp, Homo sapien
ctttctgggcactccggagggtcca

SEQ ID NO: 722973 - DNA, 25 bp, Homo sapien
agcatttcctgctcccgggcagcct

SEQ ID NO: 722974 - DNA, 25 bp, Homo sapien
ggagcatttcctgctcccgggcagc

SEQ ID NO: 722975 - DNA, 25 bp, Homo sapien
ctggtggagcatttcctgctcccgg

SEQ ID NO: 722976 - DNA, 25 bp, Homo sapien
gtggagcatttcctgctcccgggca

SEQ ID NO: 722977 - DNA, 25 bp, Homo sapien
tctggggccaaagagagactgtcca

SEQ ID NO: 722978 - DNA, 25 bp, Homo sapien
gaaagctagagtcaccaaagggaca

SEQ ID NO: 722979 - DNA, 25 bp, Homo sapien
cagcccttcacaagggaggaaagct

SEQ ID NO: 722980 - DNA, 25 bp, Homo sapien
agacacaactgtgggtatcagccct

SEQ ID NO: 722981 - DNA, 25 bp, Homo sapien
caagacattgaagttccagcacgaa

SEQ ID NO: 722982 - DNA, 25 bp, Homo sapien
tccatcctggcggtcagaccccgat

SEQ ID NO: 722983 - DNA, 25 bp, Homo sapien
acgaaggtctcggtggctggcccca

SEQ ID NO: 722984 - DNA, 25 bp, Homo sapien
gggcccccatcctcaagacattgaa

SEQ ID NO: 722985 - DNA, 25 bp, Homo sapien
cagccacaccttaaataaatgaaat

SEQ ID NO: 722986 - DNA, 25 bp, Homo sapien
cttacagccacaccttaaataaatg

SEQ ID NO: 722987 - DNA, 25 bp, Homo sapien
agccacaccttaaataaatgaaatt

SEQ ID NO: 722988 - DNA, 25 bp, Homo sapien
tacagccacaccttaaataaatgaa

SEQ ID NO: 722989 - DNA, 25 bp, Homo sapien
tggggccgagactgctggccgctgt

SEQ ID NO: 722990 - DNA, 25 bp, Homo sapien
ctcctcctgactctcgctcccaccg

SEQ ID NO: 722991 - DNA, 25 bp, Homo sapien
tggccgctgtggactgctgttcctc

SEQ ID NO: 722992 - DNA, 25 bp, Homo sapien
tgctggccgctgtggactgctgttc

SEQ ID NO: 722993 - DNA, 25 bp, Homo sapien
gctcgggctgctgttctaactgctg

SEQ ID NO: 722994 - DNA, 25 bp, Homo sapien
cacttgctgtggctgtaactgttgc

SEQ ID NO: 722995 - DNA, 25 bp, Homo sapien
tgcttgctgcgtctgtaactgctcc

SEQ ID NO: 722996 - DNA, 25 bp, Homo sapien
cggccgggtttcctcagcgatttca

SEQ ID NO: 722997 - DNA, 25 bp, Homo sapien
aggtccaccggcatgagctccagct

SEQ ID NO: 722998 - DNA, 25 bp, Homo sapien
caggtccaccggcatgagctccagc

SEQ ID NO: 722999 - DNA, 25 bp, Homo sapien
cccaggtccaccggcatgagctcca

SEQ ID NO: 723000 - DNA, 25 bp, Homo sapien
gaccccaggtccaccggcatgagct

SEQ ID NO: 723001 - DNA, 25 bp, Homo sapien
ctagctccaccggggtcagctccag

SEQ ID NO: 723002 - DNA, 25 bp, Homo sapien
gagctctcgctgaagcgcttggcgc

SEQ ID NO: 723003 - DNA, 25 bp, Homo sapien
gaggagacgctgaagcgcttgccac

SEQ ID NO: 723004 - DNA, 25 bp, Homo sapien
ttcgagtgctgcgagaagcccttgc

SEQ ID NO: 723005 - DNA, 25 bp, Homo sapien
tggtgcgtcaccagattcgagtgct

SEQ ID NO: 723006 - DNA, 25 bp, Homo sapien
cttgtgtcggaagcgctcgccacag

SEQ ID NO: 723007 - DNA, 25 bp, Homo sapien
ttgtgtcggaagcgctcgccacagt

SEQ ID NO: 723008 - DNA, 25 bp, Homo sapien
tgtcggaagcgctcgccacagtcct

SEQ ID NO: 723009 - DNA, 25 bp, Homo sapien
gtgtcggaagcgctcgccacagtcc

SEQ ID NO: 723010 - DNA, 25 bp, Homo sapien
cgcgccgtgcagctggcgctcgtgg

SEQ ID NO: 723011 - DNA, 25 bp, Homo sapien
gtctgcgggcgcagtggctgtagcg

SEQ ID NO: 723012 - DNA, 25 bp, Homo sapien
ggctgtagcggcctgctccgcgcgg

SEQ ID NO: 723013 - DNA, 25 bp, Homo sapien
gctggcgctcgtggcggcggatctg

SEQ ID NO: 723014 - DNA, 25 bp, Homo sapien
cccgggtcaaggagcttttcaggtg

SEQ ID NO: 723015 - DNA, 25 bp, Homo sapien
ccgggtcaaggagcttttcaggtgg

SEQ ID NO: 723016 - DNA, 25 bp, Homo sapien
ggccaggcagccccgatcacggccc

SEQ ID NO: 723017 - DNA, 25 bp, Homo sapien
ccagggatattccaggacgcctcca

SEQ ID NO: 723018 - DNA, 25 bp, Homo sapien
tattttctcagggaatccggaagat

SEQ ID NO: 723019 - DNA, 25 bp, Homo sapien
tgtcattaatcgtctcgccactggg

SEQ ID NO: 723020 - DNA, 25 bp, Homo sapien
ggtccacttctcttttggcggatgg

SEQ ID NO: 723021 - DNA, 25 bp, Homo sapien
ccctcaaagggcagacaaacgtgtc

SEQ ID NO: 723022 - DNA, 25 bp, Homo sapien
tctacatagtgcaaacaagtttgct

SEQ ID NO: 723023 - DNA, 25 bp, Homo sapien
ccttggtcagtttctacatagtgca

SEQ ID NO: 723024 - DNA, 25 bp, Homo sapien
tccccgaatttctccttgcgatcat

SEQ ID NO: 723025 - DNA, 25 bp, Homo sapien
tcaccaggatcgaagattttccacg

SEQ ID NO: 723026 - DNA, 25 bp, Homo sapien
gaattatacccaccctgatgaattt

SEQ ID NO: 723027 - DNA, 25 bp, Homo sapien
ggcgttttcatcagaattataccca

SEQ ID NO: 723028 - DNA, 25 bp, Homo sapien
aacacaggcgttttcatcagaatta

SEQ ID NO: 723029 - DNA, 25 bp, Homo sapien
tttcatcagaattatacccaccctg

SEQ ID NO: 723030 - DNA, 25 bp, Homo sapien
ttccacccggagcaggacttcctgg

SEQ ID NO: 723031 - DNA, 25 bp, Homo sapien
aggacttcctggcttggatttgcac

SEQ ID NO: 723032 - DNA, 25 bp, Homo sapien
gatttgcacatcgacccggtgagcg

SEQ ID NO: 723033 - DNA, 25 bp, Homo sapien
acatcgacccggtgagcgctctgac

SEQ ID NO: 723034 - DNA, 25 bp, Homo sapien
aagctgcctccgatgcccgccggag

SEQ ID NO: 723035 - DNA, 25 bp, Homo sapien
gatgcccgccggagcccctggttcc

SEQ ID NO: 723036 - DNA, 25 bp, Homo sapien
ccaagaagctgcctccgatgcccgc

SEQ ID NO: 723037 - DNA, 25 bp, Homo sapien
cgatgcccgccggagcccctggttc

SEQ ID NO: 723038 - DNA, 25 bp, Homo sapien
ttccagaggacattaatgcgggctg

SEQ ID NO: 723039 - DNA, 25 bp, Homo sapien
cttggagagctctcccagaaggccc

SEQ ID NO: 723040 - DNA, 25 bp, Homo sapien
ggagagctctcccagaaggccctct

SEQ ID NO: 723041 - DNA, 25 bp, Homo sapien
tccagaggacattaatgcgggctgg

SEQ ID NO: 723042 - DNA, 25 bp, Homo sapien
tccacagcctggtgcgggagaaatc

SEQ ID NO: 723043 - DNA, 25 bp, Homo sapien
cggcccctgggtagcatctgagaag

SEQ ID NO: 723044 - DNA, 25 bp, Homo sapien
cctgggtagcatctgagaagcatga

SEQ ID NO: 723045 - DNA, 25 bp, Homo sapien
acagtggggctaccccggagctcct

SEQ ID NO: 723046 - DNA, 25 bp, Homo sapien
ccagacgacttggtgaacgtggtaa

SEQ ID NO: 723047 - DNA, 25 bp, Homo sapien
cttcccacaaggcaccagcaactgc

SEQ ID NO: 723048 - DNA, 25 bp, Homo sapien
tggtaaagagcattgctcccaaacg

SEQ ID NO: 723049 - DNA, 25 bp, Homo sapien
cccaaacgtcgtctcagatattctt

SEQ ID NO: 723050 - DNA, 25 bp, Homo sapien
agagtcaggtcaagcaggaagtgac

SEQ ID NO: 723051 - DNA, 25 bp, Homo sapien
tgtgaagagtcaggtcaagcaggaa

SEQ ID NO: 723052 - DNA, 25 bp, Homo sapien
tgaagagtcaggtcaagcaggaagt

SEQ ID NO: 723053 - DNA, 25 bp, Homo sapien
atgtgaagagtcaggtcaagcagga

SEQ ID NO: 723054 - DNA, 25 bp, Homo sapien
acatgtgtaaaatgtagcaggtgtg

SEQ ID NO: 723055 - DNA, 25 bp, Homo sapien
acacatgtgtaaaatgtagcaggtg

SEQ ID NO: 723056 - DNA, 25 bp, Homo sapien
cacatgtgtaaaatgtagcaggtgt

SEQ ID NO: 723057 - DNA, 25 bp, Homo sapien
aacacatgtgtaaaatgtagcaggt

SEQ ID NO: 723058 - DNA, 25 bp, Homo sapien
gagtgagtgatgcattaaggccatg

SEQ ID NO: 723059 - DNA, 25 bp, Homo sapien
gggcagcagacttcaacacacggat

SEQ ID NO: 723060 - DNA, 25 bp, Homo sapien
gaactacaccatgggtctcagggca

SEQ ID NO: 723061 - DNA, 25 bp, Homo sapien
tcaacacacggatttctgagtgagt

SEQ ID NO: 723062 - DNA, 25 bp, Homo sapien
ctgggcagagctccccttcactcgg

SEQ ID NO: 723063 - DNA, 25 bp, Homo sapien
cagggactgaacattgactgggcag

SEQ ID NO: 723064 - DNA, 25 bp, Homo sapien
agggactgaacattgactgggcaga

SEQ ID NO: 723065 - DNA, 25 bp, Homo sapien
ttgcttcttgctccaacagcactgc

SEQ ID NO: 723066 - DNA, 25 bp, Homo sapien
tgcttcttgctccaacagcactgct

SEQ ID NO: 723067 - DNA, 25 bp, Homo sapien
cctacgagtgagttttgcttcttgc

SEQ ID NO: 723068 - DNA, 25 bp, Homo sapien
cgggccctacgagtgagttttgctt

SEQ ID NO: 723069 - DNA, 25 bp, Homo sapien
ctgatccgtcaggttcagtaggaag

SEQ ID NO: 723070 - DNA, 25 bp, Homo sapien
gaaggtgcaattgcccccaggcact

SEQ ID NO: 723071 - DNA, 25 bp, Homo sapien
cgtcaggttcagtaggaaggtgcaa

SEQ ID NO: 723072 - DNA, 25 bp, Homo sapien
tccgtcaggttcagtaggaaggtgc

SEQ ID NO: 723073 - DNA, 25 bp, Homo sapien
gaccccgcgctacacaaagtgacgg

SEQ ID NO: 723074 - DNA, 25 bp, Homo sapien
acgggagcgccctcgacactcgtgg

SEQ ID NO: 723075 - DNA, 25 bp, Homo sapien
cctggccaggtctcggaggtgaccc

SEQ ID NO: 723076 - DNA, 25 bp, Homo sapien
tgcagagacctagacgatgacagcc

SEQ ID NO: 723077 - DNA, 25 bp, Homo sapien
aagacagccgagcagcccaccgggg

SEQ ID NO: 723078 - DNA, 25 bp, Homo sapien
gaagacagccgagcagcccaccggg

SEQ ID NO: 723079 - DNA, 25 bp, Homo sapien
gacagccgagcagcccaccggggct

SEQ ID NO: 723080 - DNA, 25 bp, Homo sapien
agaagacagccgagcagcccaccgg

SEQ ID NO: 723081 - DNA, 25 bp, Homo sapien
gtccacccacggatgaccagagaag

SEQ ID NO: 723082 - DNA, 25 bp, Homo sapien
acccacggatgaccagagaaggtgg

SEQ ID NO: 723083 - DNA, 25 bp, Homo sapien
gaagtccacccacggatgaccagag

SEQ ID NO: 723084 - DNA, 25 bp, Homo sapien
tcccaagaagtccacccacggatga

SEQ ID NO: 723085 - DNA, 25 bp, Homo sapien
caggaagccggcaggtcaggcttct

SEQ ID NO: 723086 - DNA, 25 bp, Homo sapien
ggaagccggcaggtcaggcttcttc

SEQ ID NO: 723087 - DNA, 25 bp, Homo sapien
ccaggaagccggcaggtcaggcttc

SEQ ID NO: 723088 - DNA, 25 bp, Homo sapien
aggaagccggcaggtcaggcttctt

SEQ ID NO: 723089 - DNA, 25 bp, Homo sapien
tgcaggcacttgcaaggcacaacgg

SEQ ID NO: 723090 - DNA, 25 bp, Homo sapien
ggaacgccaagaggtctcagcacag

SEQ ID NO: 723091 - DNA, 25 bp, Homo sapien
tggtcctcaacacacatgaaccagg

SEQ ID NO: 723092 - DNA, 25 bp, Homo sapien
cacacatgaaccaggccagcaggga

SEQ ID NO: 723093 - DNA, 25 bp, Homo sapien
ccttttcaccaagaactacgtgcct

SEQ ID NO: 723094 - DNA, 25 bp, Homo sapien
ccatcaagacattctgtacccagaa

SEQ ID NO: 723095 - DNA, 25 bp, Homo sapien
gcccctccgcgtgacccctgggatg

SEQ ID NO: 723096 - DNA, 25 bp, Homo sapien
caagaactacgtgcctggtgtgaac

SEQ ID NO: 723097 - DNA, 25 bp, Homo sapien
cgccgccatcctccctgggagcgag

SEQ ID NO: 723098 - DNA, 25 bp, Homo sapien
gggagtcgggagtcgtgtggagcgc

SEQ ID NO: 723099 - DNA, 25 bp, Homo sapien
gagtcgtgtggagcgccgccatcct

SEQ ID NO: 723100 - DNA, 25 bp, Homo sapien
tccctgggagcgagcctccacgtgg

SEQ ID NO: 723101 - DNA, 25 bp, Homo sapien
ttcctggtcagggtcgcactctgac

SEQ ID NO: 723102 - DNA, 25 bp, Homo sapien
cctccacctgcgcatcctgcactac

SEQ ID NO: 723103 - DNA, 25 bp, Homo sapien
tgcgcatcctgcactacctctgcca

SEQ ID NO: 723104 - DNA, 25 bp, Homo sapien
acctgcgcatcctgcactacctctg

SEQ ID NO: 723105 - DNA, 25 bp, Homo sapien
tccacctgcgcatcctgcactacct

SEQ ID NO: 723106 - DNA, 25 bp, Homo sapien
gcatcaccaccacggctaagtcgct

SEQ ID NO: 723107 - DNA, 25 bp, Homo sapien
ctggggacttggcatcaccaccacg

SEQ ID NO: 723108 - DNA, 25 bp, Homo sapien
ggctaagtcgctcctgggtccccaa

SEQ ID NO: 723109 - DNA, 25 bp, Homo sapien
cccaacgccggacactcctcctctg

SEQ ID NO: 723110 - DNA, 25 bp, Homo sapien
cctcatccctaggagtggctggagc

SEQ ID NO: 723111 - DNA, 25 bp, Homo sapien
cacccagccgtcagcaaatcatcct

SEQ ID NO: 723112 - DNA, 25 bp, Homo sapien
aggtcctcatccctaggagtggctg

SEQ ID NO: 723113 - DNA, 25 bp, Homo sapien
gccgtcagcaaatcatcctcgtcct

SEQ ID NO: 723114 - DNA, 25 bp, Homo sapien
gcagcagcaactaaaccgagcgtgg

SEQ ID NO: 723115 - DNA, 25 bp, Homo sapien
gctcaagccagtgcaatggccatgt

SEQ ID NO: 723116 - DNA, 25 bp, Homo sapien
tgaacgacccagctcgtagggcaga

SEQ ID NO: 723117 - DNA, 25 bp, Homo sapien
caagctcaaagacggtgaacgaccc

SEQ ID NO: 723118 - DNA, 25 bp, Homo sapien
gccacatcttcaaacgtcaccagct

SEQ ID NO: 723119 - DNA, 25 bp, Homo sapien
ggacacgagaatcccatagttctcc

SEQ ID NO: 723120 - DNA, 25 bp, Homo sapien
gcatgacttcctggtagaggccccg

SEQ ID NO: 723121 - DNA, 25 bp, Homo sapien
atcccatagttctcctgcatgactt

SEQ ID NO: 723122 - DNA, 25 bp, Homo sapien
gggctgggcccagcatccacctttg

SEQ ID NO: 723123 - DNA, 25 bp, Homo sapien
tgggcccagcatccacctttggaaa

SEQ ID NO: 723124 - DNA, 25 bp, Homo sapien
gtcagacagctaagaccctggcagc

SEQ ID NO: 723125 - DNA, 25 bp, Homo sapien
ctgggatttgaaaagcgccccgtca

SEQ ID NO: 723126 - DNA, 25 bp, Homo sapien
caggtcggggactatctgggaccca

SEQ ID NO: 723127 - DNA, 25 bp, Homo sapien
tgtgtagacgccagtgacgatgtct

SEQ ID NO: 723128 - DNA, 25 bp, Homo sapien
gacgccagtgacgatgtctccttcc

SEQ ID NO: 723129 - DNA, 25 bp, Homo sapien
gttccagccggaagatcagatcggg

SEQ ID NO: 723130 - DNA, 25 bp, Homo sapien
aggcgcagtcagaggcaccaggtac

SEQ ID NO: 723131 - DNA, 25 bp, Homo sapien
ggcgcagtcagaggcaccaggtacc

SEQ ID NO: 723132 - DNA, 25 bp, Homo sapien
tgcagagctctctgacgctaggagc

SEQ ID NO: 723133 - DNA, 25 bp, Homo sapien
aggaggaacggctagcactgtgcca

SEQ ID NO: 723134 - DNA, 25 bp, Homo sapien
gaaaacacatctatgaggtgctcca

SEQ ID NO: 723135 - DNA, 25 bp, Homo sapien
caacgcagggcagggtatcattttt

SEQ ID NO: 723136 - DNA, 25 bp, Homo sapien
gcccctcaggtagctctcaaacccc

SEQ ID NO: 723137 - DNA, 25 bp, Homo sapien
acgaccatccgcaggggatgcagga

SEQ ID NO: 723138 - DNA, 25 bp, Homo sapien
aggccacaagggtactgttgcccgg

SEQ ID NO: 723139 - DNA, 25 bp, Homo sapien
ctgccagccccaacacgacgaccat

SEQ ID NO: 723140 - DNA, 25 bp, Homo sapien
gacacgcccaagtccataggcatta

SEQ ID NO: 723141 - DNA, 25 bp, Homo sapien
acaagggtgacacgcccaagtccat

SEQ ID NO: 723142 - DNA, 25 bp, Homo sapien
actggccccacacattggtgcttgg

SEQ ID NO: 723143 - DNA, 25 bp, Homo sapien
tctcgggcgcagcttctgcactggc

SEQ ID NO: 723144 - DNA, 25 bp, Homo sapien
cacaaaggtccctacacctgggagg

SEQ ID NO: 723145 - DNA, 25 bp, Homo sapien
ggcatcaccaaagccgggcatttac

SEQ ID NO: 723146 - DNA, 25 bp, Homo sapien
gagggtgctcgtcggcatcaccaaa

SEQ ID NO: 723147 - DNA, 25 bp, Homo sapien
agaatcccaccaacacaactgcagg

SEQ ID NO: 723148 - DNA, 25 bp, Homo sapien
ggtgcagtgccaaggccctcaggcc

SEQ ID NO: 723149 - DNA, 25 bp, Homo sapien
agtggctggtgcagtgccaaggccc

SEQ ID NO: 723150 - DNA, 25 bp, Homo sapien
ctggtgcagtgccaaggccctcagg

SEQ ID NO: 723151 - DNA, 25 bp, Homo sapien
tggctggtgcagtgccaaggccctc

SEQ ID NO: 723152 - DNA, 25 bp, Homo sapien
tcctcctcgtggtcctctatgtcgt

SEQ ID NO: 723153 - DNA, 25 bp, Homo sapien
ggagtctgcgccgaatccgagtcgt

SEQ ID NO: 723154 - DNA, 25 bp, Homo sapien
tctatgtcgtccgtccagaaccagg

SEQ ID NO: 723155 - DNA, 25 bp, Homo sapien
tctgcgccgaatccgagtcgtcggg

SEQ ID NO: 723156 - DNA, 25 bp, Homo sapien
aaaggcttcgcttcagagccgtcgg

SEQ ID NO: 723157 - DNA, 25 bp, Homo sapien
ggcgacagcaggttcgcacccggct

SEQ ID NO: 723158 - DNA, 25 bp, Homo sapien
aacgcccagggcgacagcaggttcg

SEQ ID NO: 723159 - DNA, 25 bp, Homo sapien
gcaggaaaggcttcgcttcagagcc

SEQ ID NO: 723160 - DNA, 25 bp, Homo sapien
cgggaagaccttgccgcacacgtcg

SEQ ID NO: 723161 - DNA, 25 bp, Homo sapien
cggtgcgggaagaccttgccgcaca

SEQ ID NO: 723162 - DNA, 25 bp, Homo sapien
tggccagccgcgagcggtgcgggaa

SEQ ID NO: 723163 - DNA, 25 bp, Homo sapien
ttgccgcacacgtcgcacgtggtct

SEQ ID NO: 723164 - DNA, 25 bp, Homo sapien
ctggtggatggccaagtgcgagcgg

SEQ ID NO: 723165 - DNA, 25 bp, Homo sapien
atggccaagtgcgagcggtacacga

SEQ ID NO: 723166 - DNA, 25 bp, Homo sapien
agtgcgagcggtacacgaagccctt

SEQ ID NO: 723167 - DNA, 25 bp, Homo sapien
caagtgcgagcggtacacgaagccc

SEQ ID NO: 723168 - DNA, 25 bp, Homo sapien
gccgctcgccagtatggatgcgtcg

SEQ ID NO: 723169 - DNA, 25 bp, Homo sapien
tcggtgcgtaaccaggtgcgacttg

SEQ ID NO: 723170 - DNA, 25 bp, Homo sapien
acttgtagacgaagcgcttgccgca

SEQ ID NO: 723171 - DNA, 25 bp, Homo sapien
tgcgtgaccaggtaggagcggcgcc

SEQ ID NO: 723172 - DNA, 25 bp, Homo sapien
gcctggtgccgtgccagcgccgagc

SEQ ID NO: 723173 - DNA, 25 bp, Homo sapien
cgcctggtgccgtgccagcgccgag

SEQ ID NO: 723174 - DNA, 25 bp, Homo sapien
cctggtgccgtgccagcgccgagct

SEQ ID NO: 723175 - DNA, 25 bp, Homo sapien
ctggtgccgtgccagcgccgagctc

SEQ ID NO: 723176 - DNA, 25 bp, Homo sapien
cagcccccgccgcgtcggtggcgct

SEQ ID NO: 723177 - DNA, 25 bp, Homo sapien
gaagtcggcgcgcaggcggaaggcc

SEQ ID NO: 723178 - DNA, 25 bp, Homo sapien
cgtcggtggcgctggaagtcggcgc

SEQ ID NO: 723179 - DNA, 25 bp, Homo sapien
ggacagcagtgcgggcggtcggccg

SEQ ID NO: 723180 - DNA, 25 bp, Homo sapien
ggcggccgccgtctcgccgggctcc

SEQ ID NO: 723181 - DNA, 25 bp, Homo sapien
cggccgccgtctcgccgggctcccg

SEQ ID NO: 723182 - DNA, 25 bp, Homo sapien
cgcggcggccgccgtctcgccgggc

SEQ ID NO: 723183 - DNA, 25 bp, Homo sapien
ctggcccagggtccgtgtcctcggg

SEQ ID NO: 723184 - DNA, 25 bp, Homo sapien
tctccgtccgcctcgccaacttcag

SEQ ID NO: 723185 - DNA, 25 bp, Homo sapien
ccgtccgcctcgccaacttcagatc

SEQ ID NO: 723186 - DNA, 25 bp, Homo sapien
gtccgcctcgccaacttcagatccc

SEQ ID NO: 723187 - DNA, 25 bp, Homo sapien
tccgcctcgccaacttcagatccct

SEQ ID NO: 723188 - DNA, 25 bp, Homo sapien
ccgctgggggtgggcgccgccaccg

SEQ ID NO: 723189 - DNA, 25 bp, Homo sapien
tgccgctgggggtgggcgccgccac

SEQ ID NO: 723190 - DNA, 25 bp, Homo sapien
tgggggtgggcgccgccaccgccgc

SEQ ID NO: 723191 - DNA, 25 bp, Homo sapien
cttgccgctgggggtgggcgccgcc

SEQ ID NO: 723192 - DNA, 25 bp, Homo sapien
atcgggaagctgtccgggtgcagcc

SEQ ID NO: 723193 - DNA, 25 bp, Homo sapien
cggaagtcgggtaggcccaggatcg

SEQ ID NO: 723194 - DNA, 25 bp, Homo sapien
tcgggaagctgtccgggtgcagcca

SEQ ID NO: 723195 - DNA, 25 bp, Homo sapien
gcagccgctctcggaagtcgggtag

SEQ ID NO: 723196 - DNA, 25 bp, Homo sapien
atggcgggcccgaacgcgcgcaggc

SEQ ID NO: 723197 - DNA, 25 bp, Homo sapien
ccgccgccgccgaaagggtcgcacg

SEQ ID NO: 723198 - DNA, 25 bp, Homo sapien
agcagacccccgatggcgggcccga

SEQ ID NO: 723199 - DNA, 25 bp, Homo sapien
cagcccggtaccctccaccagggag

SEQ ID NO: 723200 - DNA, 25 bp, Homo sapien
ggtgcgagccgtacacgaagctctt

SEQ ID NO: 723201 - DNA, 25 bp, Homo sapien
cagcaccgagcgctgcgaaaagcgc

SEQ ID NO: 723202 - DNA, 25 bp, Homo sapien
tcaagtgcgcgcgacggctgaaccc

SEQ ID NO: 723203 - DNA, 25 bp, Homo sapien
tgcgtgcgccgatgccgcttgaagt

SEQ ID NO: 723204 - DNA, 25 bp, Homo sapien
tgcgtcttcatgtgggtgagcaagt

SEQ ID NO: 723205 - DNA, 25 bp, Homo sapien
tcttcatgtgggtgagcaagtgcga

SEQ ID NO: 723206 - DNA, 25 bp, Homo sapien
gtggctccgcggtgcgtcttcatgt

SEQ ID NO: 723207 - DNA, 25 bp, Homo sapien
tggctccgcggtgcgtcttcatgtg

SEQ ID NO: 723208 - DNA, 25 bp, Homo sapien
cactggacggccccttggcggccgc

SEQ ID NO: 723209 - DNA, 25 bp, Homo sapien
gcactggacggccccttggcggccg

SEQ ID NO: 723210 - DNA, 25 bp, Homo sapien
cggcactggacggccccttggcggc

SEQ ID NO: 723211 - DNA, 25 bp, Homo sapien
gccggcactggacggccccttggcg

SEQ ID NO: 723212 - DNA, 25 bp, Homo sapien
ctccagcagggcgctgccgcgctca

SEQ ID NO: 723213 - DNA, 25 bp, Homo sapien
tccagcagggcgctgccgcgctcac

SEQ ID NO: 723214 - DNA, 25 bp, Homo sapien
gcgaacgcggcctggtgctcggagc

SEQ ID NO: 723215 - DNA, 25 bp, Homo sapien
cctggtgctcggagccgaagcttgt

SEQ ID NO: 723216 - DNA, 25 bp, Homo sapien
agccgaagcttgtgccgcccgcgaa

SEQ ID NO: 723217 - DNA, 25 bp, Homo sapien
tgctcggagccgaagcttgtgccgc

SEQ ID NO: 723218 - DNA, 25 bp, Homo sapien
tgcgctgctgtcggccccgggcccc

SEQ ID NO: 723219 - DNA, 25 bp, Homo sapien
gcaggctgcgctgctgtcggccccg

SEQ ID NO: 723220 - DNA, 25 bp, Homo sapien
gctgcgctgctgtcggccccgggcc

SEQ ID NO: 723221 - DNA, 25 bp, Homo sapien
aggctgcgctgctgtcggccccggg

SEQ ID NO: 723222 - DNA, 25 bp, Homo sapien
tatccgcagacgacaagtttcaagt

SEQ ID NO: 723223 - DNA, 25 bp, Homo sapien
taaaccttcgggacagactcggatg

SEQ ID NO: 723224 - DNA, 25 bp, Homo sapien
tgagggagacgaaagtaccaaggac

SEQ ID NO: 723225 - DNA, 25 bp, Homo sapien
gaataaggcttcaaactccctcagg

SEQ ID NO: 723226 - DNA, 25 bp, Homo sapien
ggaaagatccttcgaccaacctcag

SEQ ID NO: 723227 - DNA, 25 bp, Homo sapien
tcacagtggccccaaaagcgtgagg

SEQ ID NO: 723228 - DNA, 25 bp, Homo sapien
ggtctattagggaatgcagctgcac

SEQ ID NO: 723229 - DNA, 25 bp, Homo sapien
ttccatgggcccagtccagagggta

SEQ ID NO: 723230 - DNA, 25 bp, Homo sapien
agaaacaagttggacctgaggccgc

SEQ ID NO: 723231 - DNA, 25 bp, Homo sapien
ttcccaggagtggcgacagcatgga

SEQ ID NO: 723232 - DNA, 25 bp, Homo sapien
ccaaggaatacggtgggcatgggca

SEQ ID NO: 723233 - DNA, 25 bp, Homo sapien
gggccatcctaggacccattctaat

SEQ ID NO: 723234 - DNA, 25 bp, Homo sapien
aaatattaggttgctctggccgggc

SEQ ID NO: 723235 - DNA, 25 bp, Homo sapien
tcagatctgatcgtgggctaccatg

SEQ ID NO: 723236 - DNA, 25 bp, Homo sapien
caaccaatcagctttaagggaggca

SEQ ID NO: 723237 - DNA, 25 bp, Homo sapien
gattgctctgttctgatgcctccag

SEQ ID NO: 723238 - DNA, 25 bp, Homo sapien
taagtatttggctggacagtcaact

SEQ ID NO: 723239 - DNA, 25 bp, Homo sapien
tgagggaccctctaagtgccacctt

SEQ ID NO: 723240 - DNA, 25 bp, Homo sapien
tcacaagtcactagggtttaattcc

SEQ ID NO: 723241 - DNA, 25 bp, Homo sapien
acagtcaactataagttctatcggg

SEQ ID NO: 723242 - DNA, 25 bp, Homo sapien
aagccgcaagcgcctgcgcacaaag

SEQ ID NO: 723243 - DNA, 25 bp, Homo sapien
tgccgcgacacaggcccgggcagga

SEQ ID NO: 723244 - DNA, 25 bp, Homo sapien
agcacgaccccgcaggcgaagcgca

SEQ ID NO: 723245 - DNA, 25 bp, Homo sapien
gaagcgcacggtcagccccgcgaag

SEQ ID NO: 723246 - DNA, 25 bp, Homo sapien
gctcctctaagagcatggaaacctg

SEQ ID NO: 723247 - DNA, 25 bp, Homo sapien
tgctcctctaagagcatggaaacct

SEQ ID NO: 723248 - DNA, 25 bp, Homo sapien
tcctctaagagcatggaaacctgtt

SEQ ID NO: 723249 - DNA, 25 bp, Homo sapien
cctctaagagcatggaaacctgttc

SEQ ID NO: 723250 - DNA, 25 bp, Homo sapien
aatatgcatctcgattttcctggct

SEQ ID NO: 723251 - DNA, 25 bp, Homo sapien
cacatgagtcatactaacaggctat

SEQ ID NO: 723252 - DNA, 25 bp, Homo sapien
cactatgacttggtgacttcccact

SEQ ID NO: 723253 - DNA, 25 bp, Homo sapien
ggcttccctttatcaggtctcttaa

SEQ ID NO: 723254 - DNA, 25 bp, Homo sapien
tgatggtggctaccttctcaaggaa

SEQ ID NO: 723255 - DNA, 25 bp, Homo sapien
gaactctgggagctgatgtggcact

SEQ ID NO: 723256 - DNA, 25 bp, Homo sapien
tcagtgaagtgggactcctggcaaa

SEQ ID NO: 723257 - DNA, 25 bp, Homo sapien
gaaggttgacttctcacactcgtta

SEQ ID NO: 723258 - DNA, 25 bp, Homo sapien
tggtaagttgtcatttctggaaggt

SEQ ID NO: 723259 - DNA, 25 bp, Homo sapien
tcagtgagggctgacttcacaaggg

SEQ ID NO: 723260 - DNA, 25 bp, Homo sapien
gctgacttcacaagggttttaccag

SEQ ID NO: 723261 - DNA, 25 bp, Homo sapien
gattgacttatctggtgatcagtga

SEQ ID NO: 723262 - DNA, 25 bp, Homo sapien
ggggtttctcttctcgatgcattat

SEQ ID NO: 723263 - DNA, 25 bp, Homo sapien
aaacgtttcttacagtcactacata

SEQ ID NO: 723264 - DNA, 25 bp, Homo sapien
tgatggactcttaggactgagctat

SEQ ID NO: 723265 - DNA, 25 bp, Homo sapien
tacagtcactacatacataaagctt

SEQ ID NO: 723266 - DNA, 25 bp, Homo sapien
ggactgagctatgacaaaaacgttt

SEQ ID NO: 723267 - DNA, 25 bp, Homo sapien
tctgatgatgactgaagtttgattt

SEQ ID NO: 723268 - DNA, 25 bp, Homo sapien
gagttctctgatgatgactgaagtt

SEQ ID NO: 723269 - DNA, 25 bp, Homo sapien
tctctgatgatgactgaagtttgat

SEQ ID NO: 723270 - DNA, 25 bp, Homo sapien
gttctctgatgatgactgaagtttg

SEQ ID NO: 723271 - DNA, 25 bp, Homo sapien
aggtttggtttcacatggaaggatt

SEQ ID NO: 723272 - DNA, 25 bp, Homo sapien
aaagttcttccacacgcagtacatt

SEQ ID NO: 723273 - DNA, 25 bp, Homo sapien
aagaaagttcttccacacgcagtac

SEQ ID NO: 723274 - DNA, 25 bp, Homo sapien
gaaagttcttccacacgcagtacat

SEQ ID NO: 723275 - DNA, 25 bp, Homo sapien
atgtgtgttttctctaataatcagc

SEQ ID NO: 723276 - DNA, 25 bp, Homo sapien
tctctaataatcagcaaattgtgac

SEQ ID NO: 723277 - DNA, 25 bp, Homo sapien
tttctctaataatcagcaaattgtg

SEQ ID NO: 723278 - DNA, 25 bp, Homo sapien
gtgtgttttctctaataatcagcaa

SEQ ID NO: 723279 - DNA, 25 bp, Homo sapien
tacacaatgaggattgaattcatat

SEQ ID NO: 723280 - DNA, 25 bp, Homo sapien
gaattttgttgtttactgagacttg

SEQ ID NO: 723281 - DNA, 25 bp, Homo sapien
aattttgttgtttactgagacttga

SEQ ID NO: 723282 - DNA, 25 bp, Homo sapien
ctgatacacaatgaggattgaattc

SEQ ID NO: 723283 - DNA, 25 bp, Homo sapien
ttcattgcatccacagggtttctcc

SEQ ID NO: 723284 - DNA, 25 bp, Homo sapien
cacagggtttctccccagtgtgagt

SEQ ID NO: 723285 - DNA, 25 bp, Homo sapien
agggtttctccccagtgtgagttct

SEQ ID NO: 723286 - DNA, 25 bp, Homo sapien
attcattgcatccacagggtttctc

SEQ ID NO: 723287 - DNA, 25 bp, Homo sapien
tccttgttgtagaaggacttctcac

SEQ ID NO: 723288 - DNA, 25 bp, Homo sapien
gggcatccttgttgtagaaggactt

SEQ ID NO: 723289 - DNA, 25 bp, Homo sapien
gcatccttgttgtagaaggacttct

SEQ ID NO: 723290 - DNA, 25 bp, Homo sapien
gagggcatccttgttgtagaaggac

SEQ ID NO: 723291 - DNA, 25 bp, Homo sapien
ttcagataggatttttcacactcat

SEQ ID NO: 723292 - DNA, 25 bp, Homo sapien
tacatttgtaaggtttctctccagt

SEQ ID NO: 723293 - DNA, 25 bp, Homo sapien
tctccagtgtgagttctctggtgta

SEQ ID NO: 723294 - DNA, 25 bp, Homo sapien
ccagtgtgagttctctggtgtataa

SEQ ID NO: 723295 - DNA, 25 bp, Homo sapien
ctgttagggttgatttatggtgaaa

SEQ ID NO: 723296 - DNA, 25 bp, Homo sapien
ttcattacatacatggggtctcttt

SEQ ID NO: 723297 - DNA, 25 bp, Homo sapien
gaagtttgacttcatagaaaaggcc

SEQ ID NO: 723298 - DNA, 25 bp, Homo sapien
gtttgacttcatagaaaaggccttc

SEQ ID NO: 723299 - DNA, 25 bp, Homo sapien
catttataaggcttctccccatatg

SEQ ID NO: 723300 - DNA, 25 bp, Homo sapien
ttataaggcttctccccatatgagt

SEQ ID NO: 723301 - DNA, 25 bp, Homo sapien
taaggcttctccccatatgagttct

SEQ ID NO: 723302 - DNA, 25 bp, Homo sapien
cttcatatagaaagattttctacat

SEQ ID NO: 723303 - DNA, 25 bp, Homo sapien
gttcctcccatatatgtatcctctg

SEQ ID NO: 723304 - DNA, 25 bp, Homo sapien
cttgtgtggtgtattttcgatgatg

SEQ ID NO: 723305 - DNA, 25 bp, Homo sapien
ggtgtattttcgatgatgtttagca

SEQ ID NO: 723306 - DNA, 25 bp, Homo sapien
tttcttgtgtggtgtattttcgatg

SEQ ID NO: 723307 - DNA, 25 bp, Homo sapien
tctctggtgaatggtcaagggtgac

SEQ ID NO: 723308 - DNA, 25 bp, Homo sapien
gcacagtgaggtgtgatttcataca

SEQ ID NO: 723309 - DNA, 25 bp, Homo sapien
tcattacactcaaaagggttcttcc

SEQ ID NO: 723310 - DNA, 25 bp, Homo sapien
gaaggagacccctacattatttaca

SEQ ID NO: 723311 - DNA, 25 bp, Homo sapien
taggttttggccctcaggacgtgag

SEQ ID NO: 723312 - DNA, 25 bp, Homo sapien
tacctggaagctgcaagtccctggg

SEQ ID NO: 723313 - DNA, 25 bp, Homo sapien
cagagttgcctagatgcctgtcagg

SEQ ID NO: 723314 - DNA, 25 bp, Homo sapien
taaagccggcaggtaaacagtcaac

SEQ ID NO: 723315 - DNA, 25 bp, Homo sapien
tctgctggcggagtttggttatcca

SEQ ID NO: 723316 - DNA, 25 bp, Homo sapien
cacagggcccaattctagacataaa

SEQ ID NO: 723317 - DNA, 25 bp, Homo sapien
ttgatttacagtggtcacagggccc

SEQ ID NO: 723318 - DNA, 25 bp, Homo sapien
gcagacattgccgagtgactttcta

SEQ ID NO: 723319 - DNA, 25 bp, Homo sapien
tgtaatagatgtgggaaggcttctc

SEQ ID NO: 723320 - DNA, 25 bp, Homo sapien
tggaaaccatgattataacaagacc

SEQ ID NO: 723321 - DNA, 25 bp, Homo sapien
aagtcaaacaccttgtacatcagag

SEQ ID NO: 723322 - DNA, 25 bp, Homo sapien
tacatgtcaccatggattggaactg

SEQ ID NO: 723323 - DNA, 25 bp, Homo sapien
cacacaggtgtgaaactctacaagt

SEQ ID NO: 723324 - DNA, 25 bp, Homo sapien
gaagtcagcacttaatgaccatcag

SEQ ID NO: 723325 - DNA, 25 bp, Homo sapien
gaattcagccctcatgagacatcag

SEQ ID NO: 723326 - DNA, 25 bp, Homo sapien
tgtgggaaatgcttctgccgcaagt

SEQ ID NO: 723327 - DNA, 25 bp, Homo sapien
ctgtacatcagacatctcatatgga

SEQ ID NO: 723328 - DNA, 25 bp, Homo sapien
tgtcggacctcactgtacatcagac

SEQ ID NO: 723329 - DNA, 25 bp, Homo sapien
ttctccagatgtcggacctcactgt

SEQ ID NO: 723330 - DNA, 25 bp, Homo sapien
tccagatgtcggacctcactgtaca

SEQ ID NO: 723331 - DNA, 25 bp, Homo sapien
gaatcgaattccagtcacttctgtt

SEQ ID NO: 723332 - DNA, 25 bp, Homo sapien
ttttctgtgcttgccactcccaaga

SEQ ID NO: 723333 - DNA, 25 bp, Homo sapien
tacttcagagctatccaggtgtgtt

SEQ ID NO: 723334 - DNA, 25 bp, Homo sapien
tatatgctctatgaacctgaatctc

SEQ ID NO: 723335 - DNA, 25 bp, Homo sapien
tgaaagcgattagagcagcagccag

SEQ ID NO: 723336 - DNA, 25 bp, Homo sapien
ttgcccatggagtgagaatggctgt

SEQ ID NO: 723337 - DNA, 25 bp, Homo sapien
gatgcaaacagttggaggtgtccca

SEQ ID NO: 723338 - DNA, 25 bp, Homo sapien
ttctcagggaaatagctcgtcagcc

SEQ ID NO: 723339 - DNA, 25 bp, Homo sapien
tgaggcgagtctaccacctgaggtc

SEQ ID NO: 723340 - DNA, 25 bp, Homo sapien
tgagctctccggtaaggcaggactg

SEQ ID NO: 723341 - DNA, 25 bp, Homo sapien
tggtctacgagatgctacaggaagc

SEQ ID NO: 723342 - DNA, 25 bp, Homo sapien
taaaaccaaattcctagcccagcgc

SEQ ID NO: 723343 - DNA, 25 bp, Homo sapien
cttttatgtaatgtagttggcagtt

SEQ ID NO: 723344 - DNA, 25 bp, Homo sapien
accacactccacgtccatttcaact

SEQ ID NO: 723345 - DNA, 25 bp, Homo sapien
cactccacgtccatttcaactttta

SEQ ID NO: 723346 - DNA, 25 bp, Homo sapien
ccacgtccatttcaacttttatgta

SEQ ID NO: 723347 - DNA, 25 bp, Homo sapien
ctgttggggcccctcgtggccactg

SEQ ID NO: 723348 - DNA, 25 bp, Homo sapien
gccactgttctcctggtacttttca

SEQ ID NO: 723349 - DNA, 25 bp, Homo sapien
actgttctcctggtacttttcagtc

SEQ ID NO: 723350 - DNA, 25 bp, Homo sapien
cgtggccactgttctcctggtactt

SEQ ID NO: 723351 - DNA, 25 bp, Homo sapien
aatgaagcgggaggtgatgcacgct

SEQ ID NO: 723352 - DNA, 25 bp, Homo sapien
gaggtgatgcacgcttttcaacaac

SEQ ID NO: 723353 - DNA, 25 bp, Homo sapien
agaatgaagcgggaggtgatgcacg

SEQ ID NO: 723354 - DNA, 25 bp, Homo sapien
gtgatgcacgcttttcaacaaccag

SEQ ID NO: 723355 - DNA, 25 bp, Homo sapien
ggcgaagtggaagcaggcacgtctg

SEQ ID NO: 723356 - DNA, 25 bp, Homo sapien
gcctcaggaaacggacagtcatggc

SEQ ID NO: 723357 - DNA, 25 bp, Homo sapien
gcgaagtggaagcaggcacgtctgg

SEQ ID NO: 723358 - DNA, 25 bp, Homo sapien
caggaaacggacagtcatggcagaa

SEQ ID NO: 723359 - DNA, 25 bp, Homo sapien
ggattgactatttgctgtcatgaca

SEQ ID NO: 723360 - DNA, 25 bp, Homo sapien
tatgtattacacttatagctacatg

SEQ ID NO: 723361 - DNA, 25 bp, Homo sapien
gaaggccgatcccaagctagaggtt

SEQ ID NO: 723362 - DNA, 25 bp, Homo sapien
cacttatagctacatgatagtcccc

SEQ ID NO: 723363 - DNA, 25 bp, Homo sapien
tgcacgcccgtagatctccagttat

SEQ ID NO: 723364 - DNA, 25 bp, Homo sapien
gcacgcccgtagatctccagttata

SEQ ID NO: 723365 - DNA, 25 bp, Homo sapien
cagcgtattttagccgggccagacc

SEQ ID NO: 723366 - DNA, 25 bp, Homo sapien
actatcttgttcttagactgttgtt

SEQ ID NO: 723367 - DNA, 25 bp, Homo sapien
tgttgggcaagttggtcctgaacac

SEQ ID NO: 723368 - DNA, 25 bp, Homo sapien
ttgggcaagttggtcctgaacacct

SEQ ID NO: 723369 - DNA, 25 bp, Homo sapien
ggagggcagtgtctcaatcttgact

SEQ ID NO: 723370 - DNA, 25 bp, Homo sapien
tgccatgttgggcaagttggtcctg

SEQ ID NO: 723371 - DNA, 25 bp, Homo sapien
tcaggtgtcgggacgctgctgggct

SEQ ID NO: 723372 - DNA, 25 bp, Homo sapien
ggtcaggtgtcgggacgctgctggg

SEQ ID NO: 723373 - DNA, 25 bp, Homo sapien
caggtgtcgggacgctgctgggctg

SEQ ID NO: 723374 - DNA, 25 bp, Homo sapien
cccggtcaggtgtcgggacgctgct

SEQ ID NO: 723375 - DNA, 25 bp, Homo sapien
cccaggacaagggccggactctatt

SEQ ID NO: 723376 - DNA, 25 bp, Homo sapien
tggtcccaggacaagggccggactc

SEQ ID NO: 723377 - DNA, 25 bp, Homo sapien
catgtgcgaacacgcacccagggag

SEQ ID NO: 723378 - DNA, 25 bp, Homo sapien
tgtgcgaacacgcacccagggagag

SEQ ID NO: 723379 - DNA, 25 bp, Homo sapien
gcatgtgcgaacacgcacccaggga

SEQ ID NO: 723380 - DNA, 25 bp, Homo sapien
gcgcatgtgcgaacacgcacccagg

SEQ ID NO: 723381 - DNA, 25 bp, Homo sapien
gcctaggcgctcagcgtccagcccc

SEQ ID NO: 723382 - DNA, 25 bp, Homo sapien
cggcccgtgcgaaccctggcccaca

SEQ ID NO: 723383 - DNA, 25 bp, Homo sapien
tggcctaggcgctcagcgtccagcc

SEQ ID NO: 723384 - DNA, 25 bp, Homo sapien
gctggcctaggcgctcagcgtccag

SEQ ID NO: 723385 - DNA, 25 bp, Homo sapien
tggcgcgcgtctgctcgcgaggtcc

SEQ ID NO: 723386 - DNA, 25 bp, Homo sapien
ttgtccacctcaccaaggctgttct

SEQ ID NO: 723387 - DNA, 25 bp, Homo sapien
ctggggctccccagaggccggggcg

SEQ ID NO: 723388 - DNA, 25 bp, Homo sapien
gcgaggtcccctcttgtccacctca

SEQ ID NO: 723389 - DNA, 25 bp, Homo sapien
gagaacagagatgctgacggacgtt

SEQ ID NO: 723390 - DNA, 25 bp, Homo sapien
agaacagagatgctgacggacgttt

SEQ ID NO: 723391 - DNA, 25 bp, Homo sapien
cctgcattactaccagtctccaggg

SEQ ID NO: 723392 - DNA, 25 bp, Homo sapien
aaattagccaggcgcagtgtcacat

SEQ ID NO: 723393 - DNA, 25 bp, Homo sapien
gctgaggcacaagaatcctttgaac

SEQ ID NO: 723394 - DNA, 25 bp, Homo sapien
tagccaggcgcagtgtcacatgcct

SEQ ID NO: 723395 - DNA, 25 bp, Homo sapien
gtagtcccagctactcaggaggctg

SEQ ID NO: 723396 - DNA, 25 bp, Homo sapien
ttggaaacgtgcagagactgtggct

SEQ ID NO: 723397 - DNA, 25 bp, Homo sapien
tcttggaaacgtgcagagactgtgg

SEQ ID NO: 723398 - DNA, 25 bp, Homo sapien
gctgctcttggaaacgtgcagagac

SEQ ID NO: 723399 - DNA, 25 bp, Homo sapien
cgtgcagagactgtggctggtagac

SEQ ID NO: 723400 - DNA, 25 bp, Homo sapien
tggaagtaacagatgtcaaaggcag

SEQ ID NO: 723401 - DNA, 25 bp, Homo sapien
gtatcagtttggaagtaacagatgt

SEQ ID NO: 723402 - DNA, 25 bp, Homo sapien
gggctagaaaatgcccgctggattc

SEQ ID NO: 723403 - DNA, 25 bp, Homo sapien
agagagactccatggagaaagtatc

SEQ ID NO: 723404 - DNA, 25 bp, Homo sapien
gtgtcgattatacacgcggtagacg

SEQ ID NO: 723405 - DNA, 25 bp, Homo sapien
tacacgcggtagacgtcattcacga

SEQ ID NO: 723406 - DNA, 25 bp, Homo sapien
attatacacgcggtagacgtcattc

SEQ ID NO: 723407 - DNA, 25 bp, Homo sapien
cgcggtagacgtcattcacgagtct

SEQ ID NO: 723408 - DNA, 25 bp, Homo sapien
tctgggaatacctcctaaatctgaa

SEQ ID NO: 723409 - DNA, 25 bp, Homo sapien
caaagatcaggatcaagcggaatgc

SEQ ID NO: 723410 - DNA, 25 bp, Homo sapien
taggaatgaacctggtacagctgct

SEQ ID NO: 723411 - DNA, 25 bp, Homo sapien
gcggaatgcttgaatacctctggta

SEQ ID NO: 723412 - DNA, 25 bp, Homo sapien
gaggtctcaggacgcctttgtcaga

SEQ ID NO: 723413 - DNA, 25 bp, Homo sapien
tcttcctggtttgaatggcagtcca

SEQ ID NO: 723414 - DNA, 25 bp, Homo sapien
gaaaaggcctctcgcagtctggaaa

SEQ ID NO: 723415 - DNA, 25 bp, Homo sapien
cgtgtctgggatgctgaacccctca

SEQ ID NO: 723416 - DNA, 25 bp, Homo sapien
gtgagattagttggctgaggcaaaa

SEQ ID NO: 723417 - DNA, 25 bp, Homo sapien
aaacacttttgtgtttggggatgtg

SEQ ID NO: 723418 - DNA, 25 bp, Homo sapien
tttggggatgtgagattagttggct

SEQ ID NO: 723419 - DNA, 25 bp, Homo sapien
gggatgtgagattagttggctgagg

SEQ ID NO: 723420 - DNA, 25 bp, Homo sapien
ggcacaactttcttattaattttca

SEQ ID NO: 723421 - DNA, 25 bp, Homo sapien
gcacaactttcttattaattttcac

SEQ ID NO: 723422 - DNA, 25 bp, Homo sapien
acaactttcttattaattttcacag

SEQ ID NO: 723423 - DNA, 25 bp, Homo sapien
caggggcacaactttcttattaatt

SEQ ID NO: 723424 - DNA, 25 bp, Homo sapien
gctgtgcttcatgatgtaactgctt

SEQ ID NO: 723425 - DNA, 25 bp, Homo sapien
tgatgtaactgctttattcgtttag

SEQ ID NO: 723426 - DNA, 25 bp, Homo sapien
ttttcttagttcatcttcggctgct

SEQ ID NO: 723427 - DNA, 25 bp, Homo sapien
ttagttcatcttcggctgcttgatt

SEQ ID NO: 723428 - DNA, 25 bp, Homo sapien
tcttagttcatcttcggctgcttga

SEQ ID NO: 723429 - DNA, 25 bp, Homo sapien
ttcttagttcatcttcggctgcttg

SEQ ID NO: 723430 - DNA, 25 bp, Homo sapien
atggattttccgcagtatcagcgcg

SEQ ID NO: 723431 - DNA, 25 bp, Homo sapien
tatcagcgcggtgacgacaagaaat

SEQ ID NO: 723432 - DNA, 25 bp, Homo sapien
caagaaatggctctgttaaagcagc

SEQ ID NO: 723433 - DNA, 25 bp, Homo sapien
catggacgttttctggttctcacct

SEQ ID NO: 723434 - DNA, 25 bp, Homo sapien
gagaaattgacactgtcattctcag

SEQ ID NO: 723435 - DNA, 25 bp, Homo sapien
cacacgagaaattgacactgtcatt

SEQ ID NO: 723436 - DNA, 25 bp, Homo sapien
attgacactgtcattctcagttcca

SEQ ID NO: 723437 - DNA, 25 bp, Homo sapien
cttcacacgagaaattgacactgtc

SEQ ID NO: 723438 - DNA, 25 bp, Homo sapien
gatatcctcattcagtttggttatt

SEQ ID NO: 723439 - DNA, 25 bp, Homo sapien
tattataaatcccaggttaaactga

SEQ ID NO: 723440 - DNA, 25 bp, Homo sapien
tgaagatatcctcattcagtttggt

SEQ ID NO: 723441 - DNA, 25 bp, Homo sapien
tatgaagatatcctcattcagtttg

SEQ ID NO: 723442 - DNA, 25 bp, Homo sapien
tctcgtccgtggcatgctggtccac

SEQ ID NO: 723443 - DNA, 25 bp, Homo sapien
tcgaagttatacttctcgtccgtgg

SEQ ID NO: 723444 - DNA, 25 bp, Homo sapien
tatacttctcgtccgtggcatgctg

SEQ ID NO: 723445 - DNA, 25 bp, Homo sapien
cagcatctcgaagttatacttctcg

SEQ ID NO: 723446 - DNA, 25 bp, Homo sapien
tcattaacagcagttaagttgagag

SEQ ID NO: 723447 - DNA, 25 bp, Homo sapien
attaacagcagttaagttgagagtc

SEQ ID NO: 723448 - DNA, 25 bp, Homo sapien
cattaacagcagttaagttgagagt

SEQ ID NO: 723449 - DNA, 25 bp, Homo sapien
gaatacaattttgagaaaaatccat

SEQ ID NO: 723450 - DNA, 25 bp, Homo sapien
agaatacaattttgagaaaaatcca

SEQ ID NO: 723451 - DNA, 25 bp, Homo sapien
aatacaattttgagaaaaatccatg

SEQ ID NO: 723452 - DNA, 25 bp, Homo sapien
atacaattttgagaaaaatccatga

SEQ ID NO: 723453 - DNA, 25 bp, Homo sapien
agtttagccctttcagtgactggag

SEQ ID NO: 723454 - DNA, 25 bp, Homo sapien
tggcaaggaaatcagtttagccctt

SEQ ID NO: 723455 - DNA, 25 bp, Homo sapien
ttgactcgggaaggccggcacatga

SEQ ID NO: 723456 - DNA, 25 bp, Homo sapien
ggcacatgaccccagggctgtcgct

SEQ ID NO: 723457 - DNA, 25 bp, Homo sapien
ggctctggaggcaaacatctgcttg

SEQ ID NO: 723458 - DNA, 25 bp, Homo sapien
gctgtcgctcagcatgaagatcagt

SEQ ID NO: 723459 - DNA, 25 bp, Homo sapien
agctgggctgagaccttcctcgact

SEQ ID NO: 723460 - DNA, 25 bp, Homo sapien
gagaccttcctcgactgcaagcttg

SEQ ID NO: 723461 - DNA, 25 bp, Homo sapien
tcctcgactgcaagcttgagcagct

SEQ ID NO: 723462 - DNA, 25 bp, Homo sapien
ggctgagaccttcctcgactgcaag

SEQ ID NO: 723463 - DNA, 25 bp, Homo sapien
ttaacagaggtaacaaaagagcaat

SEQ ID NO: 723464 - DNA, 25 bp, Homo sapien
gacgctgcacgtagctctctgtgta

SEQ ID NO: 723465 - DNA, 25 bp, Homo sapien
caataattatgagttcaaggtcaca

SEQ ID NO: 723466 - DNA, 25 bp, Homo sapien
cacagacgacacagatgctcagcta

SEQ ID NO: 723467 - DNA, 25 bp, Homo sapien
tgccccaaaacgctgttttaggcca

SEQ ID NO: 723468 - DNA, 25 bp, Homo sapien
catttcctgccccaaaacgctgttt

SEQ ID NO: 723469 - DNA, 25 bp, Homo sapien
cttgtcatttcctgccccaaaacgc

SEQ ID NO: 723470 - DNA, 25 bp, Homo sapien
gtcatttcctgccccaaaacgctgt

SEQ ID NO: 723471 - DNA, 25 bp, Homo sapien
cgcccagcccctattaggtctttat

SEQ ID NO: 723472 - DNA, 25 bp, Homo sapien
tctgcccttgagtcatttcatctaa

SEQ ID NO: 723473 - DNA, 25 bp, Homo sapien
ccaagaaacactgtggctagaagtc

SEQ ID NO: 723474 - DNA, 25 bp, Homo sapien
tgggccctcttctaattaaactctg

SEQ ID NO: 723475 - DNA, 25 bp, Homo sapien
ttgggactgtggcactcccgggacc

SEQ ID NO: 723476 - DNA, 25 bp, Homo sapien
ggacacaagcctgaagcccaatgtc

SEQ ID NO: 723477 - DNA, 25 bp, Homo sapien
agggctcgccatgtgccaagcacag

SEQ ID NO: 723478 - DNA, 25 bp, Homo sapien
ttttaaagggctgtcaggttattca

SEQ ID NO: 723479 - DNA, 25 bp, Homo sapien
cacaatggttcaacgttttagtagt

SEQ ID NO: 723480 - DNA, 25 bp, Homo sapien
gacacaatggttcaacgttttagta

SEQ ID NO: 723481 - DNA, 25 bp, Homo sapien
gttttttgacgtcagaatggcagct

SEQ ID NO: 723482 - DNA, 25 bp, Homo sapien
ttagtagttttttgacgtcagaatg

SEQ ID NO: 723483 - DNA, 25 bp, Homo sapien
cccaggttggcgatgtgtctcatgg

SEQ ID NO: 723484 - DNA, 25 bp, Homo sapien
cttcatctcgcttgtgttaagagca

SEQ ID NO: 723485 - DNA, 25 bp, Homo sapien
gtgttaagagcagtcccaatcatca

SEQ ID NO: 723486 - DNA, 25 bp, Homo sapien
ccccatgtgggtgatcagtttcttc

SEQ ID NO: 723487 - DNA, 25 bp, Homo sapien
taaaaccaattattccatacagtga

SEQ ID NO: 723488 - DNA, 25 bp, Homo sapien
aacataaaaatctgcgataaaacca

SEQ ID NO: 723489 - DNA, 25 bp, Homo sapien
tttgaaaaggttctcaagatcactt

SEQ ID NO: 723490 - DNA, 25 bp, Homo sapien
tgcaagcaatgctccatctggtttg

SEQ ID NO: 723491 - DNA, 25 bp, Homo sapien
atgcccagcccaagtgttcttattt

SEQ ID NO: 723492 - DNA, 25 bp, Homo sapien
catgcccagcccaagtgttcttatt

SEQ ID NO: 723493 - DNA, 25 bp, Homo sapien
tttataaaatgtgttcttgcctgga

SEQ ID NO: 723494 - DNA, 25 bp, Homo sapien
ataaaatgtgttcttgcctggacac

SEQ ID NO: 723495 - DNA, 25 bp, Homo sapien
tgtttcaaatagtgacccctgtccc

SEQ ID NO: 723496 - DNA, 25 bp, Homo sapien
ggacagcattttgcgaccttggccg

SEQ ID NO: 723497 - DNA, 25 bp, Homo sapien
cttggccgcacagaggaatgtttca

SEQ ID NO: 723498 - DNA, 25 bp, Homo sapien
tattcccagaaccattcaaggccag

SEQ ID NO: 723499 - DNA, 25 bp, Homo sapien
tctgtgtccggagtgttggaatccc

SEQ ID NO: 723500 - DNA, 25 bp, Homo sapien
ttgaaggactcacccaatggactgg

SEQ ID NO: 723501 - DNA, 25 bp, Homo sapien
gaatccctgttctagagactgcttg

SEQ ID NO: 723502 - DNA, 25 bp, Homo sapien
taatgcccaccgctgatgtgacagg

SEQ ID NO: 723503 - DNA, 25 bp, Homo sapien
cagagaccggtttcgcggaacacaa

SEQ ID NO: 723504 - DNA, 25 bp, Homo sapien
gtaaattagtcccacagtgctggtt

SEQ ID NO: 723505 - DNA, 25 bp, Homo sapien
caccagagaccggtttcgcggaaca

SEQ ID NO: 723506 - DNA, 25 bp, Homo sapien
atttattaccctacagtatgtaaat

SEQ ID NO: 723507 - DNA, 25 bp, Homo sapien
ggtgttgccgggctctcggcgtccc

SEQ ID NO: 723508 - DNA, 25 bp, Homo sapien
gttgccgggctctcggcgtcccaga

SEQ ID NO: 723509 - DNA, 25 bp, Homo sapien
ggctccggtctccaggcaaccgcgg

SEQ ID NO: 723510 - DNA, 25 bp, Homo sapien
gctgaggtgttgccgggctctcggc

SEQ ID NO: 723511 - DNA, 25 bp, Homo sapien
cgagcttttcggtcttctgtcagtg

SEQ ID NO: 723512 - DNA, 25 bp, Homo sapien
cctgggcttaaggagaggccatctc

SEQ ID NO: 723513 - DNA, 25 bp, Homo sapien
catctctctcctgtgtctacggtga

SEQ ID NO: 723514 - DNA, 25 bp, Homo sapien
caagccaatttcgtttctcagtgcg

SEQ ID NO: 723515 - DNA, 25 bp, Homo sapien
gagtgcctctcatatgccggacaag

SEQ ID NO: 723516 - DNA, 25 bp, Homo sapien
gcgtttccagcgcatggttgcttga

SEQ ID NO: 723517 - DNA, 25 bp, Homo sapien
accggtgtgctggagttgcgtttcc

SEQ ID NO: 723518 - DNA, 25 bp, Homo sapien
tatttccagcgcatcgttgctcgag

SEQ ID NO: 723519 - DNA, 25 bp, Homo sapien
ttgagtgattatctcgtccctttcc

SEQ ID NO: 723520 - DNA, 25 bp, Homo sapien
ataaattgagtgattatctcgtccc

SEQ ID NO: 723521 - DNA, 25 bp, Homo sapien
tgattatctcgtccctttcctgttt

SEQ ID NO: 723522 - DNA, 25 bp, Homo sapien
tatctcgtccctttcctgttttcaa

SEQ ID NO: 723523 - DNA, 25 bp, Homo sapien
gatctcagcacgttgaagggccaag

SEQ ID NO: 723524 - DNA, 25 bp, Homo sapien
ggccacgtagtgagatgccacctct

SEQ ID NO: 723525 - DNA, 25 bp, Homo sapien
atcagcctaggccacgtagtgagat

SEQ ID NO: 723526 - DNA, 25 bp, Homo sapien
acctgcgatctcagcacgttgaagg

SEQ ID NO: 723527 - DNA, 25 bp, Homo sapien
ccttgggaagatccaatggttactt

SEQ ID NO: 723528 - DNA, 25 bp, Homo sapien
tggttacttgaatcaaatgatttct

SEQ ID NO: 723529 - DNA, 25 bp, Homo sapien
tttctttggttcagagctgcttgtt

SEQ ID NO: 723530 - DNA, 25 bp, Homo sapien
gatccaatggttacttgaatcaaat

SEQ ID NO: 723531 - DNA, 25 bp, Homo sapien
agacttctccccttttttgtctgct

SEQ ID NO: 723532 - DNA, 25 bp, Homo sapien
ctagattatcagagagagatgaggg

SEQ ID NO: 723533 - DNA, 25 bp, Homo sapien
gcagacttctccccttttttgtctg

SEQ ID NO: 723534 - DNA, 25 bp, Homo sapien
agagagatgagggagagcgggcaga

SEQ ID NO: 723535 - DNA, 25 bp, Homo sapien
tggtgttgccatcttgtttggaaaa

SEQ ID NO: 723536 - DNA, 25 bp, Homo sapien
tgcctagtggtgttgccatcttgtt

SEQ ID NO: 723537 - DNA, 25 bp, Homo sapien
ctcttgcctagtggtgttgccatct

SEQ ID NO: 723538 - DNA, 25 bp, Homo sapien
cttgcctagtggtgttgccatcttg

SEQ ID NO: 723539 - DNA, 25 bp, Homo sapien
ttcacttcgttgagctgcattccca

SEQ ID NO: 723540 - DNA, 25 bp, Homo sapien
ggtcagaatggactcttcgtattgg

SEQ ID NO: 723541 - DNA, 25 bp, Homo sapien
ttccactatgagtttggtcagaatg

SEQ ID NO: 723542 - DNA, 25 bp, Homo sapien
tggcatcttcgttctgctgaacgtt

SEQ ID NO: 723543 - DNA, 25 bp, Homo sapien
tacaaccgccttgaaaggctgcgaa

SEQ ID NO: 723544 - DNA, 25 bp, Homo sapien
cctcatacagcccacgaaccttttc

SEQ ID NO: 723545 - DNA, 25 bp, Homo sapien
gccttgaaaggctgcgaagccttct

SEQ ID NO: 723546 - DNA, 25 bp, Homo sapien
acgataggtacaaccgccttgaaag

SEQ ID NO: 723547 - DNA, 25 bp, Homo sapien
atccatcggcccaaatataagtccc

SEQ ID NO: 723548 - DNA, 25 bp, Homo sapien
tccatgcatgagtccttctgaaaac

SEQ ID NO: 723549 - DNA, 25 bp, Homo sapien
tttaatccatcggcccaaatataag

SEQ ID NO: 723550 - DNA, 25 bp, Homo sapien
ccctgtccatgcatgagtccttctg

SEQ ID NO: 723551 - DNA, 25 bp, Homo sapien
ccagggaacgcgctctgcccaggac

SEQ ID NO: 723552 - DNA, 25 bp, Homo sapien
agcacccagcagcatcggattctct

SEQ ID NO: 723553 - DNA, 25 bp, Homo sapien
gcacccagcagcatcggattctctt

SEQ ID NO: 723554 - DNA, 25 bp, Homo sapien
ctgccagggaacgcgctctgcccag

SEQ ID NO: 723555 - DNA, 25 bp, Homo sapien
tgtacacgccgtggttcatcgggac

SEQ ID NO: 723556 - DNA, 25 bp, Homo sapien
ggtgctgcacttgaacatcccgaat

SEQ ID NO: 723557 - DNA, 25 bp, Homo sapien
cattgcaccagtggccgatgtagga

SEQ ID NO: 723558 - DNA, 25 bp, Homo sapien
gaatccgttcctcatgccgttgacc

SEQ ID NO: 723559 - DNA, 25 bp, Homo sapien
taccaacacgtaccctcttgattgt

SEQ ID NO: 723560 - DNA, 25 bp, Homo sapien
cagtctccctcgtaccaacacgtac

SEQ ID NO: 723561 - DNA, 25 bp, Homo sapien
caacacgtaccctcttgattgtaat

SEQ ID NO: 723562 - DNA, 25 bp, Homo sapien
tcgtaccaacacgtaccctcttgat

SEQ ID NO: 723563 - DNA, 25 bp, Homo sapien
cttcccactggccttcgtatatatt

SEQ ID NO: 723564 - DNA, 25 bp, Homo sapien
tgtactcttcgttggtggtcagcca

SEQ ID NO: 723565 - DNA, 25 bp, Homo sapien
cactggccttcgtatatatttccag

SEQ ID NO: 723566 - DNA, 25 bp, Homo sapien
caccgcccggtgtactcttcgttgg

SEQ ID NO: 723567 - DNA, 25 bp, Homo sapien
gcagtttctctctttacccggatcc

SEQ ID NO: 723568 - DNA, 25 bp, Homo sapien
acaaagcagtttctctctttacccg

SEQ ID NO: 723569 - DNA, 25 bp, Homo sapien
gccatcagaaatgcacaaagcagtt

SEQ ID NO: 723570 - DNA, 25 bp, Homo sapien
tgaaaagaaagcacactgccatcag

SEQ ID NO: 723571 - DNA, 25 bp, Homo sapien
tgggaactgcggattctctttagaa

SEQ ID NO: 723572 - DNA, 25 bp, Homo sapien
gaactgcggattctctttagaaacc

SEQ ID NO: 723573 - DNA, 25 bp, Homo sapien
gggaactgcggattctctttagaaa

SEQ ID NO: 723574 - DNA, 25 bp, Homo sapien
ggaactgcggattctctttagaaac

SEQ ID NO: 723575 - DNA, 25 bp, Homo sapien
cataataaaacttgccacgtccgtg

SEQ ID NO: 723576 - DNA, 25 bp, Homo sapien
gaaacccattctccatcatacatgg

SEQ ID NO: 723577 - DNA, 25 bp, Homo sapien
acgtccgtgacgatatccatttaca

SEQ ID NO: 723578 - DNA, 25 bp, Homo sapien
tccatttacaaactcccctatgtat

SEQ ID NO: 723579 - DNA, 25 bp, Homo sapien
ggtccaggcagctgatgaattcaac

SEQ ID NO: 723580 - DNA, 25 bp, Homo sapien
cacacgcccgttcttgaaagttaat

SEQ ID NO: 723581 - DNA, 25 bp, Homo sapien
ggagaatgcgccttcgtacacacgc

SEQ ID NO: 723582 - DNA, 25 bp, Homo sapien
tcaacttcaagatccggaaacccag

SEQ ID NO: 723583 - DNA, 25 bp, Homo sapien
gttggactgtctcagggtacatgtc

SEQ ID NO: 723584 - DNA, 25 bp, Homo sapien
ctttcactgccatcaagctttctga

SEQ ID NO: 723585 - DNA, 25 bp, Homo sapien
tgctcgatcccaacacagaatgact

SEQ ID NO: 723586 - DNA, 25 bp, Homo sapien
tttagatccagctcaatgctcgatc

SEQ ID NO: 723587 - DNA, 25 bp, Homo sapien
gaaagtcatacgtggattaagaaca

SEQ ID NO: 723588 - DNA, 25 bp, Homo sapien
ggaagaaagtcatacgtggattaag

SEQ ID NO: 723589 - DNA, 25 bp, Homo sapien
catacgtggattaagaacaaaagac

SEQ ID NO: 723590 - DNA, 25 bp, Homo sapien
gtcatacgtggattaagaacaaaag

SEQ ID NO: 723591 - DNA, 25 bp, Homo sapien
tctccagaagtgaagctttgtcatc

SEQ ID NO: 723592 - DNA, 25 bp, Homo sapien
ggtattatccagagagtggccgcat

SEQ ID NO: 723593 - DNA, 25 bp, Homo sapien
tatttcttaagacggcatattccac

SEQ ID NO: 723594 - DNA, 25 bp, Homo sapien
tcctgtccatatcagcaagagttag

SEQ ID NO: 723595 - DNA, 25 bp, Homo sapien
aagatgtgaaggatctggaacactc

SEQ ID NO: 723596 - DNA, 25 bp, Homo sapien
caaaagatgtgaaggatctggaaca

SEQ ID NO: 723597 - DNA, 25 bp, Homo sapien
aaaagatgtgaaggatctggaacac

SEQ ID NO: 723598 - DNA, 25 bp, Homo sapien
gatgtgaaggatctggaacactcac

SEQ ID NO: 723599 - DNA, 25 bp, Homo sapien
atgataaatgtggtacgccaaatgc

SEQ ID NO: 723600 - DNA, 25 bp, Homo sapien
aatggatttcttcaactggtatgtc

SEQ ID NO: 723601 - DNA, 25 bp, Homo sapien
atgcaggaggtaattcaaaaatgtt

SEQ ID NO: 723602 - DNA, 25 bp, Homo sapien
tggaattcttcatgataaatgtggt

SEQ ID NO: 723603 - DNA, 25 bp, Homo sapien
aggcatttggacgaatgttctcggt

SEQ ID NO: 723604 - DNA, 25 bp, Homo sapien
tttggacgaatgttctcggtcatca

SEQ ID NO: 723605 - DNA, 25 bp, Homo sapien
aatgttctcggtcatcagttttgta

SEQ ID NO: 723606 - DNA, 25 bp, Homo sapien
ggacgaatgttctcggtcatcagtt

SEQ ID NO: 723607 - DNA, 25 bp, Homo sapien
gggtctgcagtaagcgagataaatc

SEQ ID NO: 723608 - DNA, 25 bp, Homo sapien
ctcatagagtagagcgtccgctgtt

SEQ ID NO: 723609 - DNA, 25 bp, Homo sapien
gcatccagaggaagtgtctcatctt

SEQ ID NO: 723610 - DNA, 25 bp, Homo sapien
tctcatcttcatcgtaggctcgtgg

SEQ ID NO: 723611 - DNA, 25 bp, Homo sapien
tccatcatatatgaaacgattatcc

SEQ ID NO: 723612 - DNA, 25 bp, Homo sapien
gattatcctctgctatgacctccat

SEQ ID NO: 723613 - DNA, 25 bp, Homo sapien
caaagttgctgtcaattccatcata

SEQ ID NO: 723614 - DNA, 25 bp, Homo sapien
ccataaatgtagctgctgttaattc

SEQ ID NO: 723615 - DNA, 25 bp, Homo sapien
gcaaagcttaagagagcttcaaaga

SEQ ID NO: 723616 - DNA, 25 bp, Homo sapien
gatttagtcatttggtcagtaacac

SEQ ID NO: 723617 - DNA, 25 bp, Homo sapien
tggaacatttgtataggatttagtc

SEQ ID NO: 723618 - DNA, 25 bp, Homo sapien
atgcaaagcttaagagagcttcaaa

SEQ ID NO: 723619 - DNA, 25 bp, Homo sapien
ctaattctaagatattatgtgttac

SEQ ID NO: 723620 - DNA, 25 bp, Homo sapien
ttaacatcaggcgagagttctaact

SEQ ID NO: 723621 - DNA, 25 bp, Homo sapien
ttttgttaacatcaggcgagagttc

SEQ ID NO: 723622 - DNA, 25 bp, Homo sapien
catgaccgcgctgggactcttgttc

SEQ ID NO: 723623 - DNA, 25 bp, Homo sapien
tgagcagcatccgattcgtggctca

SEQ ID NO: 723624 - DNA, 25 bp, Homo sapien
tgagaaaaaggtgatcccttttcca

SEQ ID NO: 723625 - DNA, 25 bp, Homo sapien
tgacttacagacttcttgatcttgg

SEQ ID NO: 723626 - DNA, 25 bp, Homo sapien
ctcagatgagaaaaaggtgatccct

SEQ ID NO: 723627 - DNA, 25 bp, Homo sapien
cattttggagactctttcatgactt

SEQ ID NO: 723628 - DNA, 25 bp, Homo sapien
tctcgatcatccttgggtctctcat

SEQ ID NO: 723629 - DNA, 25 bp, Homo sapien
ctctcgatcatccttgggtctctca

SEQ ID NO: 723630 - DNA, 25 bp, Homo sapien
tcgatcatccttgggtctctcatat

SEQ ID NO: 723631 - DNA, 25 bp, Homo sapien
gatcatccttgggtctctcatattt

SEQ ID NO: 723632 - DNA, 25 bp, Homo sapien
gatagcttcttcacgtttatacgca

SEQ ID NO: 723633 - DNA, 25 bp, Homo sapien
tattgacccacgtgttgaactcttc

SEQ ID NO: 723634 - DNA, 25 bp, Homo sapien
catgaaagagcgtgttcacaaagaa

SEQ ID NO: 723635 - DNA, 25 bp, Homo sapien
gggcctgtgctgtgctacgtaacct

SEQ ID NO: 723636 - DNA, 25 bp, Homo sapien
cttgcttccagttcgtcatcttcca

SEQ ID NO: 723637 - DNA, 25 bp, Homo sapien
tgcttccagttcgtcatcttccatc

SEQ ID NO: 723638 - DNA, 25 bp, Homo sapien
gcttccagttcgtcatcttccatct

SEQ ID NO: 723639 - DNA, 25 bp, Homo sapien
ttccagttcgtcatcttccatcttc

SEQ ID NO: 723640 - DNA, 25 bp, Homo sapien
cacctcatagtcatgtctcttggcc

SEQ ID NO: 723641 - DNA, 25 bp, Homo sapien
gatgacacgtctgccggctccttga

SEQ ID NO: 723642 - DNA, 25 bp, Homo sapien
tgagaggatgacacgtctgccggct

SEQ ID NO: 723643 - DNA, 25 bp, Homo sapien
tcctccttgggagggtccagtatga

SEQ ID NO: 723644 - DNA, 25 bp, Homo sapien
tggatggggacacggtcacatcctc

SEQ ID NO: 723645 - DNA, 25 bp, Homo sapien
tcaggaaatcttacagcacgtgcca

SEQ ID NO: 723646 - DNA, 25 bp, Homo sapien
gaactcccgtaatccagccatgtag

SEQ ID NO: 723647 - DNA, 25 bp, Homo sapien
gccatgtaggaaacctgagatgcag

SEQ ID NO: 723648 - DNA, 25 bp, Homo sapien
caccacggtcggctgatgttttaat

SEQ ID NO: 723649 - DNA, 25 bp, Homo sapien
taatgcaagcctgatctaaactgtg

SEQ ID NO: 723650 - DNA, 25 bp, Homo sapien
agatgccccacgtgtacactgtgtg

SEQ ID NO: 723651 - DNA, 25 bp, Homo sapien
cattgtgcgcactagaaacatcagt

SEQ ID NO: 723652 - DNA, 25 bp, Homo sapien
aatacctgtgttagtcattgtgcgc

SEQ ID NO: 723653 - DNA, 25 bp, Homo sapien
taaaaacatatcttttgtagggaga

SEQ ID NO: 723654 - DNA, 25 bp, Homo sapien
ataaaaacatatcttttgtagggag

SEQ ID NO: 723655 - DNA, 25 bp, Homo sapien
aaaacatatcttttgtagggagaag

SEQ ID NO: 723656 - DNA, 25 bp, Homo sapien
tctgttccttggaaaactatgacaa

SEQ ID NO: 723657 - DNA, 25 bp, Homo sapien
gaacaaatcatgactgttgagattc

SEQ ID NO: 723658 - DNA, 25 bp, Homo sapien
gaaaactatgacaagaccttcctgt

SEQ ID NO: 723659 - DNA, 25 bp, Homo sapien
tatgacaagaccttcctgtagcaca

SEQ ID NO: 723660 - DNA, 25 bp, Homo sapien
agacagcagtggtacctctctcggg

SEQ ID NO: 723661 - DNA, 25 bp, Homo sapien
tatagaggcatagagaggagccctg

SEQ ID NO: 723662 - DNA, 25 bp, Homo sapien
tagtcagcagtagagtgtgggcatc

SEQ ID NO: 723663 - DNA, 25 bp, Homo sapien
tttcacggtgagataggtcttcgcc

SEQ ID NO: 723664 - DNA, 25 bp, Homo sapien
tttggaagacagtgaaaaattggtg

SEQ ID NO: 723665 - DNA, 25 bp, Homo sapien
agttaaccatttatgcccagtgttc

SEQ ID NO: 723666 - DNA, 25 bp, Homo sapien
tctatattgaaagccctcctaaagt

SEQ ID NO: 723667 - DNA, 25 bp, Homo sapien
tatgcacccaatctcactaatacct

SEQ ID NO: 723668 - DNA, 25 bp, Homo sapien
gaggcttttgcagaagtttctcggg

SEQ ID NO: 723669 - DNA, 25 bp, Homo sapien
tgttgaatgccttacttggtcggat

SEQ ID NO: 723670 - DNA, 25 bp, Homo sapien
gaaactgtggtatacacacccagtg

SEQ ID NO: 723671 - DNA, 25 bp, Homo sapien
cactgggaggccgagttgcacagat

SEQ ID NO: 723672 - DNA, 25 bp, Homo sapien
tatacacacattgatggctgctttg

SEQ ID NO: 723673 - DNA, 25 bp, Homo sapien
cagccaccacttagcatttacattt

SEQ ID NO: 723674 - DNA, 25 bp, Homo sapien
gaatggtgtggtggcgtcagcgatg

SEQ ID NO: 723675 - DNA, 25 bp, Homo sapien
tcaccccatgctgaaccctttcatc

SEQ ID NO: 723676 - DNA, 25 bp, Homo sapien
attcaaagcgccctgcggaggctgc

SEQ ID NO: 723677 - DNA, 25 bp, Homo sapien
gtcagcgatgtacgctgtggtcacc

SEQ ID NO: 723678 - DNA, 25 bp, Homo sapien
tgctgagtgcgatggcctatgactg

SEQ ID NO: 723679 - DNA, 25 bp, Homo sapien
gcatgctgctgagtgcgatggccta

SEQ ID NO: 723680 - DNA, 25 bp, Homo sapien
tatagaaggcatgctgctgagtgcg

SEQ ID NO: 723681 - DNA, 25 bp, Homo sapien
tagaaggcatgctgctgagtgcgat

SEQ ID NO: 723682 - DNA, 25 bp, Homo sapien
agagaggcatgctcctgagtgtgat

SEQ ID NO: 723683 - DNA, 25 bp, Homo sapien
gatggcatatgaccggtttgtagcc

SEQ ID NO: 723684 - DNA, 25 bp, Homo sapien
agcatggaagagaggcatgctcctg

SEQ ID NO: 723685 - DNA, 25 bp, Homo sapien
gagtgtgatggcatatgaccggttt

SEQ ID NO: 723686 - DNA, 25 bp, Homo sapien
tctgtatcgctgtctgggtggccac

SEQ ID NO: 723687 - DNA, 25 bp, Homo sapien
tgagaagcatgcagcgcatgctcgg

SEQ ID NO: 723688 - DNA, 25 bp, Homo sapien
gccctagtagaacgggctcctctgg

SEQ ID NO: 723689 - DNA, 25 bp, Homo sapien
gccagtgtgccgcagaggtgcttgt

SEQ ID NO: 723690 - DNA, 25 bp, Homo sapien
gggtacactgtacaagcgatgatgt

SEQ ID NO: 723691 - DNA, 25 bp, Homo sapien
tgccaatgtccgttttgccactcat

SEQ ID NO: 723692 - DNA, 25 bp, Homo sapien
aagggtctccgcctggtctcttggt

SEQ ID NO: 723693 - DNA, 25 bp, Homo sapien
actctgacccacactcttggtgcca

SEQ ID NO: 723694 - DNA, 25 bp, Homo sapien
acggagagtgcatgccgcccagctt

SEQ ID NO: 723695 - DNA, 25 bp, Homo sapien
cctgaacggagagtgcatgccgccc

SEQ ID NO: 723696 - DNA, 25 bp, Homo sapien
tgaacggagagtgcatgccgcccag

SEQ ID NO: 723697 - DNA, 25 bp, Homo sapien
agtgcatgccgcccagcttcatgaa

SEQ ID NO: 723698 - DNA, 25 bp, Homo sapien
gctggccactcgcagagacacatca

SEQ ID NO: 723699 - DNA, 25 bp, Homo sapien
agcagggctggccactcgcagagac

SEQ ID NO: 723700 - DNA, 25 bp, Homo sapien
gccactcgcagagacacatcaccag

SEQ ID NO: 723701 - DNA, 25 bp, Homo sapien
gggctggccactcgcagagacacat

SEQ ID NO: 723702 - DNA, 25 bp, Homo sapien
gattggccaggtgcccgtcacacca

SEQ ID NO: 723703 - DNA, 25 bp, Homo sapien
ttctcattgagactgtggcagggtg

SEQ ID NO: 723704 - DNA, 25 bp, Homo sapien
tcacaccaagcccaagtgttccagg

SEQ ID NO: 723705 - DNA, 25 bp, Homo sapien
tgaggagaatacagattggccaggt

SEQ ID NO: 723706 - DNA, 25 bp, Homo sapien
gccagcaggatggagaagtcttcgt

SEQ ID NO: 723707 - DNA, 25 bp, Homo sapien
tttctaaagctgccagcaggatgga

SEQ ID NO: 723708 - DNA, 25 bp, Homo sapien
agcaggatggagaagtcttcgtcct

SEQ ID NO: 723709 - DNA, 25 bp, Homo sapien
ttctaaagctgccagcaggatggag

SEQ ID NO: 723710 - DNA, 25 bp, Homo sapien
gtgtccatcaagagtcagttgctca

SEQ ID NO: 723711 - DNA, 25 bp, Homo sapien
ttatacagacgagagaaggaaggtt

SEQ ID NO: 723712 - DNA, 25 bp, Homo sapien
ctgttatacagacgagagaaggaag

SEQ ID NO: 723713 - DNA, 25 bp, Homo sapien
ggaaggttgtgtccatcaagagtca

SEQ ID NO: 723714 - DNA, 25 bp, Homo sapien
gaagcaggggctagtcctcggcctc

SEQ ID NO: 723715 - DNA, 25 bp, Homo sapien
gcctccagccaaggggtgctgacct

SEQ ID NO: 723716 - DNA, 25 bp, Homo sapien
ggcagctgtaatactccgtcagagg

SEQ ID NO: 723717 - DNA, 25 bp, Homo sapien
ctagaagcaggggctagtcctcggc

SEQ ID NO: 723718 - DNA, 25 bp, Homo sapien
aagttcacggcacacgcaggcaaat

SEQ ID NO: 723719 - DNA, 25 bp, Homo sapien
cactggagaacgtgtgcagacagac

SEQ ID NO: 723720 - DNA, 25 bp, Homo sapien
acggcacacgcaggcaaatagcacc

SEQ ID NO: 723721 - DNA, 25 bp, Homo sapien
caggccactggagaacgtgtgcaga

SEQ ID NO: 723722 - DNA, 25 bp, Homo sapien
tcttcatgtttcaccagctcattta

SEQ ID NO: 723723 - DNA, 25 bp, Homo sapien
tttcttcatgtttcaccagctcatt

SEQ ID NO: 723724 - DNA, 25 bp, Homo sapien
ctcaaagaccaggccattttcttca

SEQ ID NO: 723725 - DNA, 25 bp, Homo sapien
aagaccaggccattttcttcatgtt

SEQ ID NO: 723726 - DNA, 25 bp, Homo sapien
atccgagctgctgcgattaccgcag

SEQ ID NO: 723727 - DNA, 25 bp, Homo sapien
tcccatccgagctgctgcgattacc

SEQ ID NO: 723728 - DNA, 25 bp, Homo sapien
catccgagctgctgcgattaccgca

SEQ ID NO: 723729 - DNA, 25 bp, Homo sapien
tcatcccatccgagctgctgcgatt

SEQ ID NO: 723730 - DNA, 25 bp, Homo sapien
gacatggctcggtgccctccagctg

SEQ ID NO: 723731 - DNA, 25 bp, Homo sapien
acggactaaagagggcgaagcccat

SEQ ID NO: 723732 - DNA, 25 bp, Homo sapien
agggcgaagcccatgaactctgtga

SEQ ID NO: 723733 - DNA, 25 bp, Homo sapien
aggatgacatggctcggtgccctcc

SEQ ID NO: 723734 - DNA, 25 bp, Homo sapien
aatctagagggcagctgcagtggct

SEQ ID NO: 723735 - DNA, 25 bp, Homo sapien
aaaatctagagggcagctgcagtgg

SEQ ID NO: 723736 - DNA, 25 bp, Homo sapien
aaaaaatctagagggcagctgcagt

SEQ ID NO: 723737 - DNA, 25 bp, Homo sapien
aaaaaaaatctagagggcagctgca

SEQ ID NO: 723738 - DNA, 25 bp, Homo sapien
gaaagtccagagatagcagcactgg

SEQ ID NO: 723739 - DNA, 25 bp, Homo sapien
taagctcagctagtaaacaagtcca

SEQ ID NO: 723740 - DNA, 25 bp, Homo sapien
gggtccagcctctggtgagtttcac

SEQ ID NO: 723741 - DNA, 25 bp, Homo sapien
tcaaggagaattctagcctcaggac

SEQ ID NO: 723742 - DNA, 25 bp, Homo sapien
tagccacgagtctaactttcagcag

SEQ ID NO: 723743 - DNA, 25 bp, Homo sapien
tttcagcagctaaaaaccctattcg

SEQ ID NO: 723744 - DNA, 25 bp, Homo sapien
aaggacttagtctggtctctagcca

SEQ ID NO: 723745 - DNA, 25 bp, Homo sapien
cacagggtgtatctatgtctggaca

SEQ ID NO: 723746 - DNA, 25 bp, Homo sapien
aaaatgctttacaaaaaagcaaatg

SEQ ID NO: 723747 - DNA, 25 bp, Homo sapien
atgctttacaaaaaagcaaatgctg

SEQ ID NO: 723748 - DNA, 25 bp, Homo sapien
gctttacaaaaaagcaaatgctgag

SEQ ID NO: 723749 - DNA, 25 bp, Homo sapien
gaaagagaaataaaatgctttacaa

SEQ ID NO: 723750 - DNA, 25 bp, Homo sapien
taggaagaactttcgggacacaata

SEQ ID NO: 723751 - DNA, 25 bp, Homo sapien
cagcctttgcaacatgggaccctgc

SEQ ID NO: 723752 - DNA, 25 bp, Homo sapien
tatttcgggcattgcaaagcagggc

SEQ ID NO: 723753 - DNA, 25 bp, Homo sapien
ggaataatgtcctcctacgtggaaa

SEQ ID NO: 723754 - DNA, 25 bp, Homo sapien
gagtttcacctttctccagtccagc

SEQ ID NO: 723755 - DNA, 25 bp, Homo sapien
gcccaaatttgagctccttgtagaa

SEQ ID NO: 723756 - DNA, 25 bp, Homo sapien
tgtgtgtcccagcatggagagttat

SEQ ID NO: 723757 - DNA, 25 bp, Homo sapien
tgcacatgttgtactggaccgctaa

SEQ ID NO: 723758 - DNA, 25 bp, Homo sapien
caaacagaagaaaggtatcagagat

SEQ ID NO: 723759 - DNA, 25 bp, Homo sapien
cgtgaagcataaacaagtatgaata

SEQ ID NO: 723760 - DNA, 25 bp, Homo sapien
tatgaatagctgaatcaatcaaaca

SEQ ID NO: 723761 - DNA, 25 bp, Homo sapien
tgacgaattgacagaaggagacttc

SEQ ID NO: 723762 - DNA, 25 bp, Homo sapien
aggcagcatgtaagccaggaaggct

SEQ ID NO: 723763 - DNA, 25 bp, Homo sapien
aaacctgacctggagtgtggacctt

SEQ ID NO: 723764 - DNA, 25 bp, Homo sapien
gaaggctgcctctatagcatgtgct

SEQ ID NO: 723765 - DNA, 25 bp, Homo sapien
tatatagctggtaagtagggaaggc

SEQ ID NO: 723766 - DNA, 25 bp, Homo sapien
ctgtgtttgcttaagagaaacttcc

SEQ ID NO: 723767 - DNA, 25 bp, Homo sapien
tgttcactttcattccacgtaagat

SEQ ID NO: 723768 - DNA, 25 bp, Homo sapien
aagctggaatggttgacttctgtgt

SEQ ID NO: 723769 - DNA, 25 bp, Homo sapien
gaaacttccactttcattgcctcat

SEQ ID NO: 723770 - DNA, 25 bp, Homo sapien
agcaaaccagaacttaatatttgga

SEQ ID NO: 723771 - DNA, 25 bp, Homo sapien
ctgatttgtcctgaatatgcctcct

SEQ ID NO: 723772 - DNA, 25 bp, Homo sapien
caaaccagaacttaatatttggact

SEQ ID NO: 723773 - DNA, 25 bp, Homo sapien
taagcaaaccagaacttaatatttg

SEQ ID NO: 723774 - DNA, 25 bp, Homo sapien
gatctgcccttatgacagaatacag

SEQ ID NO: 723775 - DNA, 25 bp, Homo sapien
taaggtgtctggttgcaagaaacag

SEQ ID NO: 723776 - DNA, 25 bp, Homo sapien
tttggaaagccattaggaatctggg

SEQ ID NO: 723777 - DNA, 25 bp, Homo sapien
cagctcccaagcatacaaattgtac

SEQ ID NO: 723778 - DNA, 25 bp, Homo sapien
gcatacaggttgaagaagtttcaca

SEQ ID NO: 723779 - DNA, 25 bp, Homo sapien
ctttgagggcctaatgcaaatgtga

SEQ ID NO: 723780 - DNA, 25 bp, Homo sapien
aatcagaacactactagcaccccag

SEQ ID NO: 723781 - DNA, 25 bp, Homo sapien
ccagttgtactgtcattccaggtag

SEQ ID NO: 723782 - DNA, 25 bp, Homo sapien
caggcttccgtccttaagtatactg

SEQ ID NO: 723783 - DNA, 25 bp, Homo sapien
cagaaatgagttgtaatggtggcca

SEQ ID NO: 723784 - DNA, 25 bp, Homo sapien
ctagcttggtgccttatctatcagg

SEQ ID NO: 723785 - DNA, 25 bp, Homo sapien
agttgtaatggtggccaaaaactct

SEQ ID NO: 723786 - DNA, 25 bp, Homo sapien
cgctaaaaggtttccatgtgcacgg

SEQ ID NO: 723787 - DNA, 25 bp, Homo sapien
catggttcgagatggctgctgtaac

SEQ ID NO: 723788 - DNA, 25 bp, Homo sapien
gcacggcaacctcatggttcgagat

SEQ ID NO: 723789 - DNA, 25 bp, Homo sapien
ccccgctaaaaggtttccatgtgca

SEQ ID NO: 723790 - DNA, 25 bp, Homo sapien
aatcagaaagttagctacgaaggag

SEQ ID NO: 723791 - DNA, 25 bp, Homo sapien
cagaaagttagctacgaaggagtca

SEQ ID NO: 723792 - DNA, 25 bp, Homo sapien
agttagctacgaaggagtcagagaa

SEQ ID NO: 723793 - DNA, 25 bp, Homo sapien
gaaagttagctacgaaggagtcaga

SEQ ID NO: 723794 - DNA, 25 bp, Homo sapien
actgctgccactcaaattcttctcc

SEQ ID NO: 723795 - DNA, 25 bp, Homo sapien
tgccactcaaattcttctccttccc

SEQ ID NO: 723796 - DNA, 25 bp, Homo sapien
caccactgctgccactcaaattctt

SEQ ID NO: 723797 - DNA, 25 bp, Homo sapien
tgctgccactcaaattcttctcctt

SEQ ID NO: 723798 - DNA, 25 bp, Homo sapien
gaagtttgcacccatctcctcctca

SEQ ID NO: 723799 - DNA, 25 bp, Homo sapien
tcagaagtttgcacccatctcctcc

SEQ ID NO: 723800 - DNA, 25 bp, Homo sapien
cagaagtttgcacccatctcctcct

SEQ ID NO: 723801 - DNA, 25 bp, Homo sapien
aagtttgcacccatctcctcctcac

SEQ ID NO: 723802 - DNA, 25 bp, Homo sapien
ttttttaccactcctcaggcaattg

SEQ ID NO: 723803 - DNA, 25 bp, Homo sapien
ttttaccactcctcaggcaattgct

SEQ ID NO: 723804 - DNA, 25 bp, Homo sapien
ttaccactcctcaggcaattgcttt

SEQ ID NO: 723805 - DNA, 25 bp, Homo sapien
tgttttttaccactcctcaggcaat

SEQ ID NO: 723806 - DNA, 25 bp, Homo sapien
tgtgtacccaggaatgagttgcatg

SEQ ID NO: 723807 - DNA, 25 bp, Homo sapien
gacacacgccctctatttcatcttt

SEQ ID NO: 723808 - DNA, 25 bp, Homo sapien
ctttggacatgtacttcgacacacg

SEQ ID NO: 723809 - DNA, 25 bp, Homo sapien
tgtacccaggaatgagttgcatgta

SEQ ID NO: 723810 - DNA, 25 bp, Homo sapien
tcatacatcatagacccgttaacat

SEQ ID NO: 723811 - DNA, 25 bp, Homo sapien
ttagagttagctcttcatacatcat

SEQ ID NO: 723812 - DNA, 25 bp, Homo sapien
tagctcttcatacatcatagacccg

SEQ ID NO: 723813 - DNA, 25 bp, Homo sapien
gacccgttaacattaatgttccaca

SEQ ID NO: 723814 - DNA, 25 bp, Homo sapien
aacttctcaggcactgtttggtcct

SEQ ID NO: 723815 - DNA, 25 bp, Homo sapien
ttctcaggcactgtttggtccttct

SEQ ID NO: 723816 - DNA, 25 bp, Homo sapien
cttctcaggcactgtttggtccttc

SEQ ID NO: 723817 - DNA, 25 bp, Homo sapien
acttctcaggcactgtttggtcctt

SEQ ID NO: 723818 - DNA, 25 bp, Homo sapien
ttcattgctgtttagccagtaggga

SEQ ID NO: 723819 - DNA, 25 bp, Homo sapien
tacactgcataagcaatttcattgc

SEQ ID NO: 723820 - DNA, 25 bp, Homo sapien
tcattgctgtttagccagtagggat

SEQ ID NO: 723821 - DNA, 25 bp, Homo sapien
ttatctgtacactgcataagcaatt

SEQ ID NO: 723822 - DNA, 25 bp, Homo sapien
accactttggtaagcccaatccagg

SEQ ID NO: 723823 - DNA, 25 bp, Homo sapien
gtcaactaaaaatggatggctctcc

SEQ ID NO: 723824 - DNA, 25 bp, Homo sapien
ctcaaagccctctgttgcagaattc

SEQ ID NO: 723825 - DNA, 25 bp, Homo sapien
agcctttttgtagccaccactttgg

SEQ ID NO: 723826 - DNA, 25 bp, Homo sapien
acattttcatggctcgccaacaggt

SEQ ID NO: 723827 - DNA, 25 bp, Homo sapien
aagggggcggttcaattctgctttg

SEQ ID NO: 723828 - DNA, 25 bp, Homo sapien
ggcggttcaattctgctttgatgta

SEQ ID NO: 723829 - DNA, 25 bp, Homo sapien
catggctcgccaacaggtctgtcta

SEQ ID NO: 723830 - DNA, 25 bp, Homo sapien
caggtctggactatccacttctgga

SEQ ID NO: 723831 - DNA, 25 bp, Homo sapien
tggagggccaacttaccaggtctgg

SEQ ID NO: 723832 - DNA, 25 bp, Homo sapien
taatagtgtaggacaccagaggtgc

SEQ ID NO: 723833 - DNA, 25 bp, Homo sapien
cagaggtgcctaggtccatggttgc

SEQ ID NO: 723834 - DNA, 25 bp, Homo sapien
cttatcctggaaaattacttgctag

SEQ ID NO: 723835 - DNA, 25 bp, Homo sapien
tacttgctagaaacaatactggacc

SEQ ID NO: 723836 - DNA, 25 bp, Homo sapien
tcttggcacacaacagcctcgaata

SEQ ID NO: 723837 - DNA, 25 bp, Homo sapien
tccattgagcaaagattagaaccct

SEQ ID NO: 723838 - DNA, 25 bp, Homo sapien
tctgtcagcacttcggttctgtggg

SEQ ID NO: 723839 - DNA, 25 bp, Homo sapien
gggcaatggccggaagagcttctta

SEQ ID NO: 723840 - DNA, 25 bp, Homo sapien
tataggcacatttcgtctttggttc

SEQ ID NO: 723841 - DNA, 25 bp, Homo sapien
gctgagaaccgagataatgatacca

SEQ ID NO: 723842 - DNA, 25 bp, Homo sapien
gtaaggttatgcactagcttcaaga

SEQ ID NO: 723843 - DNA, 25 bp, Homo sapien
tgtaaggttatgcactagcttcaag

SEQ ID NO: 723844 - DNA, 25 bp, Homo sapien
taaggttatgcactagcttcaagac

SEQ ID NO: 723845 - DNA, 25 bp, Homo sapien
gcacgctccgccctaatgcgaaggg

SEQ ID NO: 723846 - DNA, 25 bp, Homo sapien
gggatacggcgacgtgaggaagcgg

SEQ ID NO: 723847 - DNA, 25 bp, Homo sapien
ccttgcggcttgtgtctgctactct

SEQ ID NO: 723848 - DNA, 25 bp, Homo sapien
tcggatcttgcacgagcagtagatt

SEQ ID NO: 723849 - DNA, 25 bp, Homo sapien
atcagctgcggctccctctcgcccc

SEQ ID NO: 723850 - DNA, 25 bp, Homo sapien
ctgacatcagctgcggctccctctc

SEQ ID NO: 723851 - DNA, 25 bp, Homo sapien
gacatcagctgcggctccctctcgc

SEQ ID NO: 723852 - DNA, 25 bp, Homo sapien
catcagctgcggctccctctcgccc

SEQ ID NO: 723853 - DNA, 25 bp, Homo sapien
gcgaaggtgcccaacacctgggcgc

SEQ ID NO: 723854 - DNA, 25 bp, Homo sapien
cgcccagtccggcgggacccacagg

SEQ ID NO: 723855 - DNA, 25 bp, Homo sapien
ggcgcggcagccgagtggctccccg

SEQ ID NO: 723856 - DNA, 25 bp, Homo sapien
gctccccggcgaaggtgcccaacac

SEQ ID NO: 723857 - DNA, 25 bp, Homo sapien
acgtatctgcttcactctgcggcag

SEQ ID NO: 723858 - DNA, 25 bp, Homo sapien
aagctagacccaagcaagctccagg

SEQ ID NO: 723859 - DNA, 25 bp, Homo sapien
tgcggcagggaaacttaaagaaata

SEQ ID NO: 723860 - DNA, 25 bp, Homo sapien
tgatgatccaagctagacccaagca

SEQ ID NO: 723861 - DNA, 25 bp, Homo sapien
cccgaaataggtatacagagacttt

SEQ ID NO: 723862 - DNA, 25 bp, Homo sapien
gcatggcatttctaataaacctctg

SEQ ID NO: 723863 - DNA, 25 bp, Homo sapien
caggtatttaacctcacacgggagg

SEQ ID NO: 723864 - DNA, 25 bp, Homo sapien
aaacctctgcaagcgttgtaagatc

SEQ ID NO: 723865 - DNA, 25 bp, Homo sapien
tacagactactacccttctcagaaa

SEQ ID NO: 723866 - DNA, 25 bp, Homo sapien
taaaaagaattatgaccaagtagag

SEQ ID NO: 723867 - DNA, 25 bp, Homo sapien
cctccaaaaagtaggagagaacact

SEQ ID NO: 723868 - DNA, 25 bp, Homo sapien
tattctgagtatgtaaggatggttc

SEQ ID NO: 723869 - DNA, 25 bp, Homo sapien
tttggaaacaatagagcggcacagc

SEQ ID NO: 723870 - DNA, 25 bp, Homo sapien
tggacagcctctaaagattgagaca

SEQ ID NO: 723871 - DNA, 25 bp, Homo sapien
aacacagaggacatatggacacaaa

SEQ ID NO: 723872 - DNA, 25 bp, Homo sapien
tagttttgctaatgacacagggaag

SEQ ID NO: 723873 - DNA, 25 bp, Homo sapien
acactgctaaagacttaacccatac

SEQ ID NO: 723874 - DNA, 25 bp, Homo sapien
cacactgctaaagacttaacccata

SEQ ID NO: 723875 - DNA, 25 bp, Homo sapien
aacacactgctaaagacttaaccca

SEQ ID NO: 723876 - DNA, 25 bp, Homo sapien
acacactgctaaagacttaacccat

SEQ ID NO: 723877 - DNA, 25 bp, Homo sapien
caagtgcttccaaacctgatgtgta

SEQ ID NO: 723878 - DNA, 25 bp, Homo sapien
gatttccaagcttgacaactgaggt

SEQ ID NO: 723879 - DNA, 25 bp, Homo sapien
tcagatacaaaagaactcccgggac

SEQ ID NO: 723880 - DNA, 25 bp, Homo sapien
gatgtgtaatcagaatcgcttgagg

SEQ ID NO: 723881 - DNA, 25 bp, Homo sapien
ttcaagttcagaaaggtaggccttc

SEQ ID NO: 723882 - DNA, 25 bp, Homo sapien
cttcaagttcagaaaggtaggcctt

SEQ ID NO: 723883 - DNA, 25 bp, Homo sapien
gcaggatgttataaaatcaaagctg

SEQ ID NO: 723884 - DNA, 25 bp, Homo sapien
aattagcaggatgttataaaatcaa

SEQ ID NO: 723885 - DNA, 25 bp, Homo sapien
ttagcaggatgttataaaatcaaag

SEQ ID NO: 723886 - DNA, 25 bp, Homo sapien
tagcaggatgttataaaatcaaagc

SEQ ID NO: 723887 - DNA, 25 bp, Homo sapien
taaaagaaatcctattgctgatcca

SEQ ID NO: 723888 - DNA, 25 bp, Homo sapien
aagaaatcctattgctgatccacag

SEQ ID NO: 723889 - DNA, 25 bp, Homo sapien
gaaatcctattgctgatccacagag

SEQ ID NO: 723890 - DNA, 25 bp, Homo sapien
cataaaagaaatcctattgctgatc

SEQ ID NO: 723891 - DNA, 25 bp, Homo sapien
tctagatgattctgtccattatcat

SEQ ID NO: 723892 - DNA, 25 bp, Homo sapien
ttgcatgaggatcattatgaagaac

SEQ ID NO: 723893 - DNA, 25 bp, Homo sapien
cattatcatctgaatgccttgcatg

SEQ ID NO: 723894 - DNA, 25 bp, Homo sapien
agttcatttgtccttctagatgatt

SEQ ID NO: 723895 - DNA, 25 bp, Homo sapien
aagaattctaactttctgatagagg

SEQ ID NO: 723896 - DNA, 25 bp, Homo sapien
tgttacaacgctgggcccaagtagc

SEQ ID NO: 723897 - DNA, 25 bp, Homo sapien
ttccagtatagttgatctctgcctt

SEQ ID NO: 723898 - DNA, 25 bp, Homo sapien
ttctctaggttttgagggccggtca

SEQ ID NO: 723899 - DNA, 25 bp, Homo sapien
attgacatagtaataaaatttctaa

SEQ ID NO: 723900 - DNA, 25 bp, Homo sapien
ttgacatagtaataaaatttctaaa

SEQ ID NO: 723901 - DNA, 25 bp, Homo sapien
tattgacatagtaataaaatttcta

SEQ ID NO: 723902 - DNA, 25 bp, Homo sapien
tgacatagtaataaaatttctaaac

SEQ ID NO: 723903 - DNA, 25 bp, Homo sapien
acatggttgtagaatcaacatagtg

SEQ ID NO: 723904 - DNA, 25 bp, Homo sapien
acgaggtattctaactcatacatgg

SEQ ID NO: 723905 - DNA, 25 bp, Homo sapien
tatacgttcaggtaaggtaggttga

SEQ ID NO: 723906 - DNA, 25 bp, Homo sapien
tacgttcaggtaaggtaggttgata

SEQ ID NO: 723907 - DNA, 25 bp, Homo sapien
ttattactaacatggtgcagtgtag

SEQ ID NO: 723908 - DNA, 25 bp, Homo sapien
ccagtgttctatgtcagaaatgcag

SEQ ID NO: 723909 - DNA, 25 bp, Homo sapien
gacaataacacagatggtcagaaaa

SEQ ID NO: 723910 - DNA, 25 bp, Homo sapien
cagtgcagtgctagacatattacct

SEQ ID NO: 723911 - DNA, 25 bp, Homo sapien
ttaaagtgtggttttattaatgcac

SEQ ID NO: 723912 - DNA, 25 bp, Homo sapien
tgcacttcagggtaagtgccagtct

SEQ ID NO: 723913 - DNA, 25 bp, Homo sapien
gggtatcatttatagcatactgcaa

SEQ ID NO: 723914 - DNA, 25 bp, Homo sapien
tctggaagaaatactaccaattata

SEQ ID NO: 723915 - DNA, 25 bp, Homo sapien
gtatataatatagtcaaggcccatg

SEQ ID NO: 723916 - DNA, 25 bp, Homo sapien
acttagtaattcctgagagtggcac

SEQ ID NO: 723917 - DNA, 25 bp, Homo sapien
gaatggtattcaagagtggctaaac

SEQ ID NO: 723918 - DNA, 25 bp, Homo sapien
tacagaatgctatgaacggtttgag

SEQ ID NO: 723919 - DNA, 25 bp, Homo sapien
gcatttaacaacatcctgggcaagt

SEQ ID NO: 723920 - DNA, 25 bp, Homo sapien
taagaaagacacctgcagagtttgc

SEQ ID NO: 723921 - DNA, 25 bp, Homo sapien
taagtagggcaagtatctcgagagc

SEQ ID NO: 723922 - DNA, 25 bp, Homo sapien
gattattaatttgcagggccccgca

SEQ ID NO: 723923 - DNA, 25 bp, Homo sapien
tggaacggtcaggaaagtctggtct

SEQ ID NO: 723924 - DNA, 25 bp, Homo sapien
tattctggaacggtcaggaaagtct

SEQ ID NO: 723925 - DNA, 25 bp, Homo sapien
tctggaacggtcaggaaagtctggt

SEQ ID NO: 723926 - DNA, 25 bp, Homo sapien
ttctggaacggtcaggaaagtctgg

SEQ ID NO: 723927 - DNA, 25 bp, Homo sapien
cagagcagtagcctggtaagggtgg

SEQ ID NO: 723928 - DNA, 25 bp, Homo sapien
ctggaaacaggtagcaaagagggca

SEQ ID NO: 723929 - DNA, 25 bp, Homo sapien
attccactggagcttggccgctctc

SEQ ID NO: 723930 - DNA, 25 bp, Homo sapien
agtactatctggaccctttctttca

SEQ ID NO: 723931 - DNA, 25 bp, Homo sapien
cacgccgggccaaacactcctgatt

SEQ ID NO: 723932 - DNA, 25 bp, Homo sapien
atacatcatgccataggatgaagtt

SEQ ID NO: 723933 - DNA, 25 bp, Homo sapien
catcatgccataggatgaagttaat

SEQ ID NO: 723934 - DNA, 25 bp, Homo sapien
tcatgccataggatgaagttaattt

SEQ ID NO: 723935 - DNA, 25 bp, Homo sapien
cttgtgtatatagaatagcttgggt

SEQ ID NO: 723936 - DNA, 25 bp, Homo sapien
aatagcttgggttggatcttgagag

SEQ ID NO: 723937 - DNA, 25 bp, Homo sapien
gaatagcttgggttggatcttgaga

SEQ ID NO: 723938 - DNA, 25 bp, Homo sapien
atagcttgggttggatcttgagaga

SEQ ID NO: 723939 - DNA, 25 bp, Homo sapien
cagctccatgtaggtataatcattt

SEQ ID NO: 723940 - DNA, 25 bp, Homo sapien
agctccatgtaggtataatcatttc

SEQ ID NO: 723941 - DNA, 25 bp, Homo sapien
tgtttctggctgattctagctgcag

SEQ ID NO: 723942 - DNA, 25 bp, Homo sapien
cagtcatctcaacttatggccacag

SEQ ID NO: 723943 - DNA, 25 bp, Homo sapien
gacacagtctctcacatgctcaagg

SEQ ID NO: 723944 - DNA, 25 bp, Homo sapien
ataactgctgctcccggtgacacag

SEQ ID NO: 723945 - DNA, 25 bp, Homo sapien
tgtcatcagtgtccctggttctttc

SEQ ID NO: 723946 - DNA, 25 bp, Homo sapien
tagggttgatgcacctcaacaatgt

SEQ ID NO: 723947 - DNA, 25 bp, Homo sapien
catcagtgtccctggttctttcttt

SEQ ID NO: 723948 - DNA, 25 bp, Homo sapien
aaatctcttaataatggttctaggg

SEQ ID NO: 723949 - DNA, 25 bp, Homo sapien
gctgctgcacaatgtagagtgtcca

SEQ ID NO: 723950 - DNA, 25 bp, Homo sapien
gctgcacaatgtagagtgtccatga

SEQ ID NO: 723951 - DNA, 25 bp, Homo sapien
cacaatgtagagtgtccatgaagtc

SEQ ID NO: 723952 - DNA, 25 bp, Homo sapien
ctgtggctgctgcacaatgtagagt

SEQ ID NO: 723953 - DNA, 25 bp, Homo sapien
agcatcaggaccactcacaaggcag

SEQ ID NO: 723954 - DNA, 25 bp, Homo sapien
gctcctcctgtccttagtcatgctg

SEQ ID NO: 723955 - DNA, 25 bp, Homo sapien
ttctgaggctttgtcccctgctgtg

SEQ ID NO: 723956 - DNA, 25 bp, Homo sapien
cttcctcgtggctgcaagataccta

SEQ ID NO: 723957 - DNA, 25 bp, Homo sapien
tgtatatacactgtcctgcacctgc

SEQ ID NO: 723958 - DNA, 25 bp, Homo sapien
tagactttctggctcaaccataccc

SEQ ID NO: 723959 - DNA, 25 bp, Homo sapien
taaccaagatctgaggcctgaggtt

SEQ ID NO: 723960 - DNA, 25 bp, Homo sapien
tgctcttacaactgaccaataggtg

SEQ ID NO: 723961 - DNA, 25 bp, Homo sapien
tggacacttagtctcagccatgttg

SEQ ID NO: 723962 - DNA, 25 bp, Homo sapien
gatcatctcgatatgcccttgaccg

SEQ ID NO: 723963 - DNA, 25 bp, Homo sapien
gcggtgaacaagacgagaagctcct

SEQ ID NO: 723964 - DNA, 25 bp, Homo sapien
gaggataaacattccaataggcagc

SEQ ID NO: 723965 - DNA, 25 bp, Homo sapien
ctcaggaaccaaaggcgtgcatact

SEQ ID NO: 723966 - DNA, 25 bp, Homo sapien
gaggtagcagaaaacggtctccagc

SEQ ID NO: 723967 - DNA, 25 bp, Homo sapien
gagcaaggcaacaccctaccatgtg

SEQ ID NO: 723968 - DNA, 25 bp, Homo sapien
gagaaaagctccctgcatggaggag

SEQ ID NO: 723969 - DNA, 25 bp, Homo sapien
gcctcaccacggagtaacctagtat

SEQ ID NO: 723970 - DNA, 25 bp, Homo sapien
tatttccccttgttagactgagaga

SEQ ID NO: 723971 - DNA, 25 bp, Homo sapien
acatgggagagagccgtcttacaaa

SEQ ID NO: 723972 - DNA, 25 bp, Homo sapien
gctgtgagcaagtcaccatgttagg

SEQ ID NO: 723973 - DNA, 25 bp, Homo sapien
tcagaacttagcagtgctgagcaaa

SEQ ID NO: 723974 - DNA, 25 bp, Homo sapien
caaaatggcctgcttgacttggctg

SEQ ID NO: 723975 - DNA, 25 bp, Homo sapien
cgggaggatccacatccaaaatggc

SEQ ID NO: 723976 - DNA, 25 bp, Homo sapien
gagaactgtgtgaaagctataggta

SEQ ID NO: 723977 - DNA, 25 bp, Homo sapien
ttccatgagtgtcagttcctcctga

SEQ ID NO: 723978 - DNA, 25 bp, Homo sapien
tcagttcctcctgaccactggattc

SEQ ID NO: 723979 - DNA, 25 bp, Homo sapien
gaccactggattccaaggaaagcct

SEQ ID NO: 723980 - DNA, 25 bp, Homo sapien
tcccggtgtggccatcttccatgag

SEQ ID NO: 723981 - DNA, 25 bp, Homo sapien
ggacagtagccaacaagccttttgt

SEQ ID NO: 723982 - DNA, 25 bp, Homo sapien
tggacagtagccaacaagccttttg

SEQ ID NO: 723983 - DNA, 25 bp, Homo sapien
tagaataggtctggacagtagccaa

SEQ ID NO: 723984 - DNA, 25 bp, Homo sapien
gacagtagccaacaagccttttgtt

SEQ ID NO: 723985 - DNA, 25 bp, Homo sapien
gttttcggtcatgcaaatatgaaca

SEQ ID NO: 723986 - DNA, 25 bp, Homo sapien
cactactcttaaccagcacattctg

SEQ ID NO: 723987 - DNA, 25 bp, Homo sapien
ggaaaatcactggaccctgaattga

SEQ ID NO: 723988 - DNA, 25 bp, Homo sapien
ggtgtgttttcggtcatgcaaatat

SEQ ID NO: 723989 - DNA, 25 bp, Homo sapien
cagggaatcaggggccaattagagg

SEQ ID NO: 723990 - DNA, 25 bp, Homo sapien
aggatgcatccaaggaagttgtcaa

SEQ ID NO: 723991 - DNA, 25 bp, Homo sapien
aatcaggggccaattagagggatcg

SEQ ID NO: 723992 - DNA, 25 bp, Homo sapien
gccaattagagggatcggctgtagg

SEQ ID NO: 723993 - DNA, 25 bp, Homo sapien
atggtacacaatccaggtcttcttg

SEQ ID NO: 723994 - DNA, 25 bp, Homo sapien
cctttccacactgcctctatgcacc

SEQ ID NO: 723995 - DNA, 25 bp, Homo sapien
aggtcttcttgctgtgggcccagcg

SEQ ID NO: 723996 - DNA, 25 bp, Homo sapien
tccacactgcctctatgcaccacat

SEQ ID NO: 723997 - DNA, 25 bp, Homo sapien
tggttgcagagtgaggggccaaaag

SEQ ID NO: 723998 - DNA, 25 bp, Homo sapien
ctggttgcagagtgaggggccaaaa

SEQ ID NO: 723999 - DNA, 25 bp, Homo sapien
gaggggccaaaagccttctctgtgt

SEQ ID NO: 724000 - DNA, 25 bp, Homo sapien
gggccaaaagccttctctgtgtagg

SEQ ID NO: 724001 - DNA, 25 bp, Homo sapien
ggtgacggtgggcatgggtggccca

SEQ ID NO: 724002 - DNA, 25 bp, Homo sapien
attggtgacggtgggcatgggtggc

SEQ ID NO: 724003 - DNA, 25 bp, Homo sapien
aatgtaattggtgacggtgggcatg

SEQ ID NO: 724004 - DNA, 25 bp, Homo sapien
tgtaattggtgacggtgggcatggg

SEQ ID NO: 724005 - DNA, 25 bp, Homo sapien
ggctgataatgcctttcacaatcca

SEQ ID NO: 724006 - DNA, 25 bp, Homo sapien
caatccagccttcatcctgtttcag

SEQ ID NO: 724007 - DNA, 25 bp, Homo sapien
tgataatgcctttcacaatccagcc

SEQ ID NO: 724008 - DNA, 25 bp, Homo sapien
cagggctgataatgcctttcacaat

SEQ ID NO: 724009 - DNA, 25 bp, Homo sapien
tctgagcgtgccctctggcttgtaa

SEQ ID NO: 724010 - DNA, 25 bp, Homo sapien
tatcctctaattctgagcgtgccct

SEQ ID NO: 724011 - DNA, 25 bp, Homo sapien
ccatcctatcctctaattctgagcg

SEQ ID NO: 724012 - DNA, 25 bp, Homo sapien
tggcttgtaaggatgttttcggtga

SEQ ID NO: 724013 - DNA, 25 bp, Homo sapien
tgttgcccagagtgttgcagtggta

SEQ ID NO: 724014 - DNA, 25 bp, Homo sapien
actgtgtctggccagtatattattt

SEQ ID NO: 724015 - DNA, 25 bp, Homo sapien
cccaaagtgtttggggtgtgagcca

SEQ ID NO: 724016 - DNA, 25 bp, Homo sapien
gcccagagtgttgcagtggtacaat

SEQ ID NO: 724017 - DNA, 25 bp, Homo sapien
tatcaggacccatctaatgtggtga

SEQ ID NO: 724018 - DNA, 25 bp, Homo sapien
gtctgattggatagcattcacctct

SEQ ID NO: 724019 - DNA, 25 bp, Homo sapien
tctactctgaaagttataggaagcc

SEQ ID NO: 724020 - DNA, 25 bp, Homo sapien
cctgacgtatcagtaatgcacaaat

SEQ ID NO: 724021 - DNA, 25 bp, Homo sapien
ccctccatagctatagcatcctgaa

SEQ ID NO: 724022 - DNA, 25 bp, Homo sapien
cctccatagctatagcatcctgaat

SEQ ID NO: 724023 - DNA, 25 bp, Homo sapien
ccatagctatagcatcctgaatttc

SEQ ID NO: 724024 - DNA, 25 bp, Homo sapien
tccatagctatagcatcctgaattt

SEQ ID NO: 724025 - DNA, 25 bp, Homo sapien
aagctctctgattcaggaatttggg

SEQ ID NO: 724026 - DNA, 25 bp, Homo sapien
cttgcagagtgtagcataaatgggc

SEQ ID NO: 724027 - DNA, 25 bp, Homo sapien
gagtgtagcataaatgggcacagcc

SEQ ID NO: 724028 - DNA, 25 bp, Homo sapien
tgtagcataaatgggcacagccaga

SEQ ID NO: 724029 - DNA, 25 bp, Homo sapien
cacctggaatttagtaggagcacca

SEQ ID NO: 724030 - DNA, 25 bp, Homo sapien
aatttagtaggagcaccatgattca

SEQ ID NO: 724031 - DNA, 25 bp, Homo sapien
gggacacctggaatttagtaggagc

SEQ ID NO: 724032 - DNA, 25 bp, Homo sapien
cctggaatttagtaggagcaccatg

SEQ ID NO: 724033 - DNA, 25 bp, Homo sapien
ccacacagagagcttgatccgtgca

SEQ ID NO: 724034 - DNA, 25 bp, Homo sapien
cacacagagagcttgatccgtgcat

SEQ ID NO: 724035 - DNA, 25 bp, Homo sapien
caggagcccggacgcgggcaagatg

SEQ ID NO: 724036 - DNA, 25 bp, Homo sapien
cgaaagcgccggtgcaccccgcagg

SEQ ID NO: 724037 - DNA, 25 bp, Homo sapien
gggagtttcccagcgcgagccccgc

SEQ ID NO: 724038 - DNA, 25 bp, Homo sapien
cccgtgacctggaccactgggctgg

SEQ ID NO: 724039 - DNA, 25 bp, Homo sapien
aagcaggaatctgagtccgactctc

SEQ ID NO: 724040 - DNA, 25 bp, Homo sapien
gagacaggccgtttaagaagtatag

SEQ ID NO: 724041 - DNA, 25 bp, Homo sapien
tacaacgggaacagggcacgttgct

SEQ ID NO: 724042 - DNA, 25 bp, Homo sapien
ggcgcgattaccctacagcgcggaa

SEQ ID NO: 724043 - DNA, 25 bp, Homo sapien
atgtgtgaggtttcattcatcctct

SEQ ID NO: 724044 - DNA, 25 bp, Homo sapien
gcaaagtccacaacatgtgtgaggt

SEQ ID NO: 724045 - DNA, 25 bp, Homo sapien
tttgctaacctattcagcaaagtcc

SEQ ID NO: 724046 - DNA, 25 bp, Homo sapien
ttcagcaaagtccacaacatgtgtg

SEQ ID NO: 724047 - DNA, 25 bp, Homo sapien
gcatcttcgaggagatgcactgcac

SEQ ID NO: 724048 - DNA, 25 bp, Homo sapien
gagcggtttcaagaaatttccacca

SEQ ID NO: 724049 - DNA, 25 bp, Homo sapien
catcagcatcttcgaggagatgcac

SEQ ID NO: 724050 - DNA, 25 bp, Homo sapien
cgtggcaaattacgagagcggtttc

SEQ ID NO: 724051 - DNA, 25 bp, Homo sapien
cttcccatcagtgatttctcagcaa

SEQ ID NO: 724052 - DNA, 25 bp, Homo sapien
ctcacttcccatcagtgatttctca

SEQ ID NO: 724053 - DNA, 25 bp, Homo sapien
acttcccatcagtgatttctcagca

SEQ ID NO: 724054 - DNA, 25 bp, Homo sapien
cacttcccatcagtgatttctcagc

SEQ ID NO: 724055 - DNA, 25 bp, Homo sapien
tactgatgtgatcaaagggtccact

SEQ ID NO: 724056 - DNA, 25 bp, Homo sapien
caaagggtccactcaggtccattca

SEQ ID NO: 724057 - DNA, 25 bp, Homo sapien
gtttactgatgtgatcaaagggtcc

SEQ ID NO: 724058 - DNA, 25 bp, Homo sapien
gatgtgatcaaagggtccactcagg

SEQ ID NO: 724059 - DNA, 25 bp, Homo sapien
tcaacatggtgtggtgcccataaaa

SEQ ID NO: 724060 - DNA, 25 bp, Homo sapien
tcagataaacgtaaagatccagctt

SEQ ID NO: 724061 - DNA, 25 bp, Homo sapien
cataaaatatcaggtttggtaccgc

SEQ ID NO: 724062 - DNA, 25 bp, Homo sapien
cagtaatgtagctgcagagtcttca

SEQ ID NO: 724063 - DNA, 25 bp, Homo sapien
cacgatcgtggaaatatgggtctac

SEQ ID NO: 724064 - DNA, 25 bp, Homo sapien
ttaaagatgtaattgggctccaggc

SEQ ID NO: 724065 - DNA, 25 bp, Homo sapien
ggttcagtttcatccccaatgggag

SEQ ID NO: 724066 - DNA, 25 bp, Homo sapien
catagaaggaagcaacacgatcgtg

SEQ ID NO: 724067 - DNA, 25 bp, Homo sapien
gttgcctggagatttctgatccata

SEQ ID NO: 724068 - DNA, 25 bp, Homo sapien
aattgatttaattcctgcataaacc

SEQ ID NO: 724069 - DNA, 25 bp, Homo sapien
tacaattgatttaattcctgcataa

SEQ ID NO: 724070 - DNA, 25 bp, Homo sapien
cctttgttgcctggagatttctgat

SEQ ID NO: 724071 - DNA, 25 bp, Homo sapien
tgccctactgtcctttattctgcct

SEQ ID NO: 724072 - DNA, 25 bp, Homo sapien
tttctaaccacaaccacatagcctt

SEQ ID NO: 724073 - DNA, 25 bp, Homo sapien
agggtcaagtgaaccactctcttgc

SEQ ID NO: 724074 - DNA, 25 bp, Homo sapien
tttttcacaacctcgcagtgtcttc

SEQ ID NO: 724075 - DNA, 25 bp, Homo sapien
attaacagtagggatacattctgag

SEQ ID NO: 724076 - DNA, 25 bp, Homo sapien
acgcaatttcgttgttgtatgaaca

SEQ ID NO: 724077 - DNA, 25 bp, Homo sapien
gaatagagaacaatccagtcatgag

SEQ ID NO: 724078 - DNA, 25 bp, Homo sapien
cacctgggctacatgggcctgttgc

SEQ ID NO: 724079 - DNA, 25 bp, Homo sapien
taacttctcggccataattttatga

SEQ ID NO: 724080 - DNA, 25 bp, Homo sapien
gttttacagagaactatgttgacac

SEQ ID NO: 724081 - DNA, 25 bp, Homo sapien
gagaactatgttgacacatttagaa

SEQ ID NO: 724082 - DNA, 25 bp, Homo sapien
tagtgtaaatatgaactatgccaca

SEQ ID NO: 724083 - DNA, 25 bp, Homo sapien
cattcaggatttggattgctcggcg

SEQ ID NO: 724084 - DNA, 25 bp, Homo sapien
aaaaatggccccacgtctacatccg

SEQ ID NO: 724085 - DNA, 25 bp, Homo sapien
tcttgtacaagggagttcaaaaatg

SEQ ID NO: 724086 - DNA, 25 bp, Homo sapien
tctttatccacccacaaagctgtaa

SEQ ID NO: 724087 - DNA, 25 bp, Homo sapien
gaatgtttgactcagagaagtcttc

SEQ ID NO: 724088 - DNA, 25 bp, Homo sapien
gtatcaccctttcaagttatagcaa

SEQ ID NO: 724089 - DNA, 25 bp, Homo sapien
tccctattgttagtatgggtgttta

SEQ ID NO: 724090 - DNA, 25 bp, Homo sapien
tggattttgtatagaacaatttact

SEQ ID NO: 724091 - DNA, 25 bp, Homo sapien
gctaccacattgagattcagatctc

SEQ ID NO: 724092 - DNA, 25 bp, Homo sapien
cattgctaccacattgagattcaga

SEQ ID NO: 724093 - DNA, 25 bp, Homo sapien
cccgataaagccattgctaccacat

SEQ ID NO: 724094 - DNA, 25 bp, Homo sapien
tcatccgtataacccgataaagcca

SEQ ID NO: 724095 - DNA, 25 bp, Homo sapien
tacgggttatttagctgtaatcgca

SEQ ID NO: 724096 - DNA, 25 bp, Homo sapien
caaaactccatcgtaagatcctgtt

SEQ ID NO: 724097 - DNA, 25 bp, Homo sapien
aaacatgacacacaaatacgggtta

SEQ ID NO: 724098 - DNA, 25 bp, Homo sapien
gatcctgtttcacttgtcagaaatg

SEQ ID NO: 724099 - DNA, 25 bp, Homo sapien
taaggaatttacaagcaaatgccac

SEQ ID NO: 724100 - DNA, 25 bp, Homo sapien
ctgagtatcactaaggaatttacaa

SEQ ID NO: 724101 - DNA, 25 bp, Homo sapien
gcaaatgccactctgtcacgtactg

SEQ ID NO: 724102 - DNA, 25 bp, Homo sapien
gtcacgtactgcaactttgttttca

SEQ ID NO: 724103 - DNA, 25 bp, Homo sapien
tagtaaggcctgtaagcaaaattcc

SEQ ID NO: 724104 - DNA, 25 bp, Homo sapien
aacttgctgtttgaacatctccagt

SEQ ID NO: 724105 - DNA, 25 bp, Homo sapien
gaacatctccagttctatcaacata

SEQ ID NO: 724106 - DNA, 25 bp, Homo sapien
tatcaacataactctccattaagtc

SEQ ID NO: 724107 - DNA, 25 bp, Homo sapien
caagctgggttccactaatgacata

SEQ ID NO: 724108 - DNA, 25 bp, Homo sapien
tttatatatcatacctgcccaggga

SEQ ID NO: 724109 - DNA, 25 bp, Homo sapien
gctggctcctaatgagaataaagaa

SEQ ID NO: 724110 - DNA, 25 bp, Homo sapien
taaacagtgatacgaataccctttg

SEQ ID NO: 724111 - DNA, 25 bp, Homo sapien
taaaacgaaaacatgaattatttca

SEQ ID NO: 724112 - DNA, 25 bp, Homo sapien
tttaaaatctcctggctaggccaga

SEQ ID NO: 724113 - DNA, 25 bp, Homo sapien
aatctcctggctaggccagagactt

SEQ ID NO: 724114 - DNA, 25 bp, Homo sapien
tgtttaaaatctcctggctaggcca

SEQ ID NO: 724115 - DNA, 25 bp, Homo sapien
aactgggatccaacttactcctgtg

SEQ ID NO: 724116 - DNA, 25 bp, Homo sapien
tataattctcaatccagtactgaac

SEQ ID NO: 724117 - DNA, 25 bp, Homo sapien
tcagctcgtttatgccaaaacctcc

SEQ ID NO: 724118 - DNA, 25 bp, Homo sapien
tctttaagaacatctaaaggtgaac

SEQ ID NO: 724119 - DNA, 25 bp, Homo sapien
tgactaaaacctctgccctgatgag

SEQ ID NO: 724120 - DNA, 25 bp, Homo sapien
tgagacaaagcgcacatcgaggaag

SEQ ID NO: 724121 - DNA, 25 bp, Homo sapien
gaagtggttttcgacagccaggaca

SEQ ID NO: 724122 - DNA, 25 bp, Homo sapien
gactttagatttcgttggtgagcca

SEQ ID NO: 724123 - DNA, 25 bp, Homo sapien
ccactgcaactgacccttctctcat

SEQ ID NO: 724124 - DNA, 25 bp, Homo sapien
actgcaactgacccttctctcatgt

SEQ ID NO: 724125 - DNA, 25 bp, Homo sapien
cactgcaactgacccttctctcatg

SEQ ID NO: 724126 - DNA, 25 bp, Homo sapien
ctgcaactgacccttctctcatgta

SEQ ID NO: 724127 - DNA, 25 bp, Homo sapien
gcttcctgaggcttatggtccaaaa

SEQ ID NO: 724128 - DNA, 25 bp, Homo sapien
gaggaaggtgcaagtaactctcagt

SEQ ID NO: 724129 - DNA, 25 bp, Homo sapien
gaaaggatctccagtccagaggaag

SEQ ID NO: 724130 - DNA, 25 bp, Homo sapien
tagatggaaaaataatcgctaagcc

SEQ ID NO: 724131 - DNA, 25 bp, Homo sapien
gggattgacttggcaatgcgggctc

SEQ ID NO: 724132 - DNA, 25 bp, Homo sapien
cagatggttgtagataggtggcatt

SEQ ID NO: 724133 - DNA, 25 bp, Homo sapien
gatggttgtagataggtggcattat

SEQ ID NO: 724134 - DNA, 25 bp, Homo sapien
tgggattgacttggcaatgcgggct

SEQ ID NO: 724135 - DNA, 25 bp, Homo sapien
taccaggcccagtttacaagtgaat

SEQ ID NO: 724136 - DNA, 25 bp, Homo sapien
tagatgaagcgaaactgaatgacag

SEQ ID NO: 724137 - DNA, 25 bp, Homo sapien
taacattcaaggaacaggtagggct

SEQ ID NO: 724138 - DNA, 25 bp, Homo sapien
tctatcaagggacaggtaattctca

SEQ ID NO: 724139 - DNA, 25 bp, Homo sapien
gacaccatgtaaaccagttgttaaa

SEQ ID NO: 724140 - DNA, 25 bp, Homo sapien
ctgaaccaactaagcatatgtccag

SEQ ID NO: 724141 - DNA, 25 bp, Homo sapien
tccaccgtgcctgcaattatgacac

SEQ ID NO: 724142 - DNA, 25 bp, Homo sapien
gcaattatgacaccatgtaaaccag

SEQ ID NO: 724143 - DNA, 25 bp, Homo sapien
gatatctaatcacgacatgttcaca

SEQ ID NO: 724144 - DNA, 25 bp, Homo sapien
ggtataaatgctgtatcaaccagga

SEQ ID NO: 724145 - DNA, 25 bp, Homo sapien
taattgcgtgactacataaaaagct

SEQ ID NO: 724146 - DNA, 25 bp, Homo sapien
tgtaaacatatcctctccccgaata

SEQ ID NO: 724147 - DNA, 25 bp, Homo sapien
tatctatctataatgcaacttttca

SEQ ID NO: 724148 - DNA, 25 bp, Homo sapien
aaatccaaattagacagacatacat

SEQ ID NO: 724149 - DNA, 25 bp, Homo sapien
gctgtacgcacacttttgggctcaa

SEQ ID NO: 724150 - DNA, 25 bp, Homo sapien
tgtgcccacctgtttacttatatct

SEQ ID NO: 724151 - DNA, 25 bp, Homo sapien
atttacacgtgcatgccgacacagg

SEQ ID NO: 724152 - DNA, 25 bp, Homo sapien
tatccaactgcatacatttacacgt

SEQ ID NO: 724153 - DNA, 25 bp, Homo sapien
taccagattccctgttgtatccaac

SEQ ID NO: 724154 - DNA, 25 bp, Homo sapien
ttatggctggacagtctctgcaggt

SEQ ID NO: 724155 - DNA, 25 bp, Homo sapien
tctgagctatgaaggacacctacta

SEQ ID NO: 724156 - DNA, 25 bp, Homo sapien
cacacttgaagggttctcttaaggt

SEQ ID NO: 724157 - DNA, 25 bp, Homo sapien
agaaagctccacacttgaagggttc

SEQ ID NO: 724158 - DNA, 25 bp, Homo sapien
tgaaggacacctactagaaagctcc

SEQ ID NO: 724159 - DNA, 25 bp, Homo sapien
tctatacttcgatgtttattttggc

SEQ ID NO: 724160 - DNA, 25 bp, Homo sapien
caacctgctgaacagaactcatgtc

SEQ ID NO: 724161 - DNA, 25 bp, Homo sapien
tctagagtgttcataatttcaacca

SEQ ID NO: 724162 - DNA, 25 bp, Homo sapien
taggctcaaagtctgttcttggctc

SEQ ID NO: 724163 - DNA, 25 bp, Homo sapien
aaatcaggacggaatttgacagcac

SEQ ID NO: 724164 - DNA, 25 bp, Homo sapien
taaactgcatgtttgggcttcacag

SEQ ID NO: 724165 - DNA, 25 bp, Homo sapien
gaaaagactgtcatgcaggtgagac

SEQ ID NO: 724166 - DNA, 25 bp, Homo sapien
agttcagtccctctgcatatggcag

SEQ ID NO: 724167 - DNA, 25 bp, Homo sapien
ttatctagaatctgcagaggtccac

SEQ ID NO: 724168 - DNA, 25 bp, Homo sapien
gattttcactatgcgcagatgtctc

SEQ ID NO: 724169 - DNA, 25 bp, Homo sapien
gaaatgtcaattgtcaggcctcatg

SEQ ID NO: 724170 - DNA, 25 bp, Homo sapien
tacagttccgtcacgtatgcttggc

SEQ ID NO: 724171 - DNA, 25 bp, Homo sapien
ttcagctgagagatatatcattggc

SEQ ID NO: 724172 - DNA, 25 bp, Homo sapien
tggttcttggacctttggactccag

SEQ ID NO: 724173 - DNA, 25 bp, Homo sapien
gctaccctggttctcaggacctcgg

SEQ ID NO: 724174 - DNA, 25 bp, Homo sapien
acatgttctcatgccttcagctgag

SEQ ID NO: 724175 - DNA, 25 bp, Homo sapien
ggatacagtcatgcaaataacagct

SEQ ID NO: 724176 - DNA, 25 bp, Homo sapien
aatctcatgattgaagcttcccagc

SEQ ID NO: 724177 - DNA, 25 bp, Homo sapien
ttttagtaagaagtggacagggcat

SEQ ID NO: 724178 - DNA, 25 bp, Homo sapien
ccaagatgtaggacaagggaccact

SEQ ID NO: 724179 - DNA, 25 bp, Homo sapien
gctttggacttgaagctactgctaa

SEQ ID NO: 724180 - DNA, 25 bp, Homo sapien
gtgatatcaccaaatcgatgtcttg

SEQ ID NO: 724181 - DNA, 25 bp, Homo sapien
tattactgcttatagaaatgctgga

SEQ ID NO: 724182 - DNA, 25 bp, Homo sapien
catgctgacagttaagtactcaaac

SEQ ID NO: 724183 - DNA, 25 bp, Homo sapien
tagtttactcagacgtgacggacgc

SEQ ID NO: 724184 - DNA, 25 bp, Homo sapien
ggcgctcttttatggcacggaaaca

SEQ ID NO: 724185 - DNA, 25 bp, Homo sapien
gttctaaattccagtgcccgtcgcc

SEQ ID NO: 724186 - DNA, 25 bp, Homo sapien
aaacctcgtttcctcgttgtgatcg

SEQ ID NO: 724187 - DNA, 25 bp, Homo sapien
agtcaccgccgggaatcctgtgatc

SEQ ID NO: 724188 - DNA, 25 bp, Homo sapien
cggagcttcacaccccacttccggg

SEQ ID NO: 724189 - DNA, 25 bp, Homo sapien
ggtcaagtcaccgccgggaatcctg

SEQ ID NO: 724190 - DNA, 25 bp, Homo sapien
cgccgggaatcctgtgatcgcagaa

SEQ ID NO: 724191 - DNA, 25 bp, Homo sapien
gctcttttgactctgttcgcgggaa

SEQ ID NO: 724192 - DNA, 25 bp, Homo sapien
ttaagcttgtctcccctagtactgg

SEQ ID NO: 724193 - DNA, 25 bp, Homo sapien
taagtgcttctattggctgccaaca

SEQ ID NO: 724194 - DNA, 25 bp, Homo sapien
acgcagctaagggagtaaatcgacc

SEQ ID NO: 724195 - DNA, 25 bp, Homo sapien
tattacagggtacgcaccaaggctc

SEQ ID NO: 724196 - DNA, 25 bp, Homo sapien
tctagaatactcctggcaaggccgc

SEQ ID NO: 724197 - DNA, 25 bp, Homo sapien
gcttcgggtcacaagatgagccagg

SEQ ID NO: 724198 - DNA, 25 bp, Homo sapien
tgtggagggcaacgacagaaagact

SEQ ID NO: 724199 - DNA, 25 bp, Homo sapien
ttttagattccggaggctttctgaa

SEQ ID NO: 724200 - DNA, 25 bp, Homo sapien
tctctggtactgagggctttttaga

SEQ ID NO: 724201 - DNA, 25 bp, Homo sapien
ctttttagattccggaggctttctg

SEQ ID NO: 724202 - DNA, 25 bp, Homo sapien
ttagattccggaggctttctgaaga

SEQ ID NO: 724203 - DNA, 25 bp, Homo sapien
tagagagtaagtcgtggagccacga

SEQ ID NO: 724204 - DNA, 25 bp, Homo sapien
ccacgaagccaacccaaagggtctg

SEQ ID NO: 724205 - DNA, 25 bp, Homo sapien
ttaacagcacgtcactggagagcct

SEQ ID NO: 724206 - DNA, 25 bp, Homo sapien
cccagggtcagcacttttaacagca

SEQ ID NO: 724207 - DNA, 25 bp, Homo sapien
tatgcattggttgcatgcaatgaat

SEQ ID NO: 724208 - DNA, 25 bp, Homo sapien
tactaagattaccagaaagacattc

SEQ ID NO: 724209 - DNA, 25 bp, Homo sapien
aaagatcaatgtgtaaacccaataa

SEQ ID NO: 724210 - DNA, 25 bp, Homo sapien
tcaggtcttccaaccctatatgaat

SEQ ID NO: 724211 - DNA, 25 bp, Homo sapien
tcttgttacccaggccagagttcag

SEQ ID NO: 724212 - DNA, 25 bp, Homo sapien
cagagttcagtggcacattctcagc

SEQ ID NO: 724213 - DNA, 25 bp, Homo sapien
aggccagagttcagtggcacattct

SEQ ID NO: 724214 - DNA, 25 bp, Homo sapien
gccagagttcagtggcacattctca

SEQ ID NO: 724215 - DNA, 25 bp, Homo sapien
gctattggagtgtacttgaaagcca

SEQ ID NO: 724216 - DNA, 25 bp, Homo sapien
cagatggagtggcttgtcaaatttt

SEQ ID NO: 724217 - DNA, 25 bp, Homo sapien
accagaattttcgtattatagtcca

SEQ ID NO: 724218 - DNA, 25 bp, Homo sapien
tcaccggagcacatttcagaaatca

SEQ ID NO: 724219 - DNA, 25 bp, Homo sapien
ttgatgacccttttgtgattaaaga

SEQ ID NO: 724220 - DNA, 25 bp, Homo sapien
gacaatctataagttaaactggcat

SEQ ID NO: 724221 - DNA, 25 bp, Homo sapien
tgatgaatactgtttagaatctgcc

SEQ ID NO: 724222 - DNA, 25 bp, Homo sapien
tttttcaattgatgacccttttgtg

SEQ ID NO: 724223 - DNA, 25 bp, Homo sapien
ctctgtttataaataagttcgactg

SEQ ID NO: 724224 - DNA, 25 bp, Homo sapien
caagcatagtacttagagccagatg

SEQ ID NO: 724225 - DNA, 25 bp, Homo sapien
gacatgtacccaccaatatattaac

SEQ ID NO: 724226 - DNA, 25 bp, Homo sapien
cgactgtttcatcttgaactctaat

SEQ ID NO: 724227 - DNA, 25 bp, Homo sapien
aatcccttaaccatgccgaattttg

SEQ ID NO: 724228 - DNA, 25 bp, Homo sapien
ggcaatgctttaagtcaacaccaac

SEQ ID NO: 724229 - DNA, 25 bp, Homo sapien
ggtgacttctgacaaaccattctta

SEQ ID NO: 724230 - DNA, 25 bp, Homo sapien
ctgacttgaattaatgacgacccac

SEQ ID NO: 724231 - DNA, 25 bp, Homo sapien
tgatactgagtgagagaggcaaatt

SEQ ID NO: 724232 - DNA, 25 bp, Homo sapien
tacatagagcaatatagatgagacc

SEQ ID NO: 724233 - DNA, 25 bp, Homo sapien
tgtgagacacagatcaaggtgtttt

SEQ ID NO: 724234 - DNA, 25 bp, Homo sapien
tgtacatacattgtgagtgactcga

SEQ ID NO: 724235 - DNA, 25 bp, Homo sapien
gctttatgacattggctaagagaga

SEQ ID NO: 724236 - DNA, 25 bp, Homo sapien
gaagggactttttaaatcagactga

SEQ ID NO: 724237 - DNA, 25 bp, Homo sapien
ttaaaatcggatcgctataccacac

SEQ ID NO: 724238 - DNA, 25 bp, Homo sapien
aatagcctcataaagtaggagaacc

SEQ ID NO: 724239 - DNA, 25 bp, Homo sapien
gctacccactaaagaaacacgaggc

SEQ ID NO: 724240 - DNA, 25 bp, Homo sapien
tcctagaccatgcagtaagaccaaa

SEQ ID NO: 724241 - DNA, 25 bp, Homo sapien
aataagcctttagccaaccaggagc

SEQ ID NO: 724242 - DNA, 25 bp, Homo sapien
ccgcgcgcggccctagaatattttt

SEQ ID NO: 724243 - DNA, 25 bp, Homo sapien
taaaggctcaagtccaagtcaaact

SEQ ID NO: 724244 - DNA, 25 bp, Homo sapien
tgggcttgccagagagattagtcac

SEQ ID NO: 724245 - DNA, 25 bp, Homo sapien
tcagttgctgcgatacaagtgcaga

SEQ ID NO: 724246 - DNA, 25 bp, Homo sapien
tgaaatcccttgtgagactctactg

SEQ ID NO: 724247 - DNA, 25 bp, Homo sapien
atggtacaaacgtggtggcttaaca

SEQ ID NO: 724248 - DNA, 25 bp, Homo sapien
tgtggtggcatcatttcgatctctg

SEQ ID NO: 724249 - DNA, 25 bp, Homo sapien
tcaagttgtcagtagggctaagctc

SEQ ID NO: 724250 - DNA, 25 bp, Homo sapien
gctctggtggtttcttgcaatcctt

SEQ ID NO: 724251 - DNA, 25 bp, Homo sapien
tgtagtttcccgctgacctgaacca

SEQ ID NO: 724252 - DNA, 25 bp, Homo sapien
tctatctggaactaacagctctagg

SEQ ID NO: 724253 - DNA, 25 bp, Homo sapien
tactaacagacaccctatggatctc

SEQ ID NO: 724254 - DNA, 25 bp, Homo sapien
tccagatggagtgacccaaactttc

SEQ ID NO: 724255 - DNA, 25 bp, Homo sapien
gagtattaaactcacacaaaggtcc

SEQ ID NO: 724256 - DNA, 25 bp, Homo sapien
gtattaaactcacacaaaggtccca

SEQ ID NO: 724257 - DNA, 25 bp, Homo sapien
aggagtattaaactcacacaaaggt

SEQ ID NO: 724258 - DNA, 25 bp, Homo sapien
attaaactcacacaaaggtcccaca

SEQ ID NO: 724259 - DNA, 25 bp, Homo sapien
ggaggtggaaaattgaactgtgatc

SEQ ID NO: 724260 - DNA, 25 bp, Homo sapien
catcaaattgggaggtggaaaattg

SEQ ID NO: 724261 - DNA, 25 bp, Homo sapien
aggtggaaaattgaactgtgatctg

SEQ ID NO: 724262 - DNA, 25 bp, Homo sapien
aattgaactgtgatctgaagatcca

SEQ ID NO: 724263 - DNA, 25 bp, Homo sapien
ccagaggcctggtgacctctggtga

SEQ ID NO: 724264 - DNA, 25 bp, Homo sapien
gttgttttcagattgtttcccacca

SEQ ID NO: 724265 - DNA, 25 bp, Homo sapien
gaggcctggtgacctctggtgaccc

SEQ ID NO: 724266 - DNA, 25 bp, Homo sapien
cctctggtgacccaggttgttttca

SEQ ID NO: 724267 - DNA, 25 bp, Homo sapien
cactatcaaatttccgctgaccact

SEQ ID NO: 724268 - DNA, 25 bp, Homo sapien
aggagaaacaagcttaaccactaca

SEQ ID NO: 724269 - DNA, 25 bp, Homo sapien
gagaaacaagcttaaccactacact

SEQ ID NO: 724270 - DNA, 25 bp, Homo sapien
ccactacactatcaaatttccgctg

SEQ ID NO: 724271 - DNA, 25 bp, Homo sapien
gggcggatcatgatgtcaagagatc

SEQ ID NO: 724272 - DNA, 25 bp, Homo sapien
tgaaaccccgtctctactgaaaata

SEQ ID NO: 724273 - DNA, 25 bp, Homo sapien
cggatcatgatgtcaagagatcaag

SEQ ID NO: 724274 - DNA, 25 bp, Homo sapien
accatcctggccaacatggtgaaac

SEQ ID NO: 724275 - DNA, 25 bp, Homo sapien
tgaaatggactctagctgggcagtt

SEQ ID NO: 724276 - DNA, 25 bp, Homo sapien
ggaagtcaaagactgacaagcagct

SEQ ID NO: 724277 - DNA, 25 bp, Homo sapien
tccagatttgggcaaatgggtataa

SEQ ID NO: 724278 - DNA, 25 bp, Homo sapien
caagcagcttagtagagcctgacag

SEQ ID NO: 724279 - DNA, 25 bp, Homo sapien
aatgcctacctcataagtatactgg

SEQ ID NO: 724280 - DNA, 25 bp, Homo sapien
ctccgccatgttctagctgtgtgat

SEQ ID NO: 724281 - DNA, 25 bp, Homo sapien
tacatacagttaagagcactctgca

SEQ ID NO: 724282 - DNA, 25 bp, Homo sapien
taaaatgggccgtcattaaagaagc

SEQ ID NO: 724283 - DNA, 25 bp, Homo sapien
caccacaccgggcccgtacactgtt

SEQ ID NO: 724284 - DNA, 25 bp, Homo sapien
cacaccgggcccgtacactgttggt

SEQ ID NO: 724285 - DNA, 25 bp, Homo sapien
accacaccgggcccgtacactgttg

SEQ ID NO: 724286 - DNA, 25 bp, Homo sapien
acaccgggcccgtacactgttggtg

SEQ ID NO: 724287 - DNA, 25 bp, Homo sapien
ttccaacaagttgcttatatccact

SEQ ID NO: 724288 - DNA, 25 bp, Homo sapien
atttgtcttccaacaagttgcttat

SEQ ID NO: 724289 - DNA, 25 bp, Homo sapien
caacaagttgcttatatccactgta

SEQ ID NO: 724290 - DNA, 25 bp, Homo sapien
gcttatatccactgtataacttcat

SEQ ID NO: 724291 - DNA, 25 bp, Homo sapien
aacatgccacactatcaggactccg

SEQ ID NO: 724292 - DNA, 25 bp, Homo sapien
tgccacactatcaggactccgtcgt

SEQ ID NO: 724293 - DNA, 25 bp, Homo sapien
tccagaacatgccacactatcagga

SEQ ID NO: 724294 - DNA, 25 bp, Homo sapien
actatcaggactccgtcgtaggaca

SEQ ID NO: 724295 - DNA, 25 bp, Homo sapien
gaaagttggttgcaaaggtggtgag

SEQ ID NO: 724296 - DNA, 25 bp, Homo sapien
agttggttgcaaaggtggtgagcag

SEQ ID NO: 724297 - DNA, 25 bp, Homo sapien
ggagaagcgggaagagtgtgatcat

SEQ ID NO: 724298 - DNA, 25 bp, Homo sapien
cagtgagaggaaagttggttgcaaa

SEQ ID NO: 724299 - DNA, 25 bp, Homo sapien
gataagtagggctgactgcctgaga

SEQ ID NO: 724300 - DNA, 25 bp, Homo sapien
tggaacagtcactactaataatgaa

SEQ ID NO: 724301 - DNA, 25 bp, Homo sapien
ctgcctgagaacagcggttccagtt

SEQ ID NO: 724302 - DNA, 25 bp, Homo sapien
agtttggaacagtcactactaataa

SEQ ID NO: 724303 - DNA, 25 bp, Homo sapien
aacaagagttgtgttcttctgattc

SEQ ID NO: 724304 - DNA, 25 bp, Homo sapien
gaaacaagagttgtgttcttctgat

SEQ ID NO: 724305 - DNA, 25 bp, Homo sapien
tggaaacaagagttgtgttcttctg

SEQ ID NO: 724306 - DNA, 25 bp, Homo sapien
caagagttgtgttcttctgattcat

SEQ ID NO: 724307 - DNA, 25 bp, Homo sapien
tcttgtggaccagaatgatagcagt

SEQ ID NO: 724308 - DNA, 25 bp, Homo sapien
tgtaccctaccatctaaagttctcg

SEQ ID NO: 724309 - DNA, 25 bp, Homo sapien
tccatttcacgaggcaggcacctct

SEQ ID NO: 724310 - DNA, 25 bp, Homo sapien
aagcaaatgtttttgtgagcccaga

SEQ ID NO: 724311 - DNA, 25 bp, Homo sapien
tgaggactcagtttgcaaacagaaa

SEQ ID NO: 724312 - DNA, 25 bp, Homo sapien
gatggcctgattctcagtgttttct

SEQ ID NO: 724313 - DNA, 25 bp, Homo sapien
cagaaaaagcaccagctatcaagct

SEQ ID NO: 724314 - DNA, 25 bp, Homo sapien
gtttgccatttagaatggatggcct

SEQ ID NO: 724315 - DNA, 25 bp, Homo sapien
agccacccaaagtactgggattaca

SEQ ID NO: 724316 - DNA, 25 bp, Homo sapien
ctggccttgtgatttgcccgcctca

SEQ ID NO: 724317 - DNA, 25 bp, Homo sapien
gggattacagggatgagccgccacg

SEQ ID NO: 724318 - DNA, 25 bp, Homo sapien
actcctggccttgtgatttgcccgc

SEQ ID NO: 724319 - DNA, 25 bp, Homo sapien
taattggttaagacatggcttgccc

SEQ ID NO: 724320 - DNA, 25 bp, Homo sapien
tctacgaaccaaaaagtgcgccctc

SEQ ID NO: 724321 - DNA, 25 bp, Homo sapien
tgtttgtaagccacgcggtttatgg

SEQ ID NO: 724322 - DNA, 25 bp, Homo sapien
gacacgctcgttcagcatcagagaa

SEQ ID NO: 724323 - DNA, 25 bp, Homo sapien
ctctatgtccgaagttttgcctctt

SEQ ID NO: 724324 - DNA, 25 bp, Homo sapien
ctcttgctgtcattctttgctcatc

SEQ ID NO: 724325 - DNA, 25 bp, Homo sapien
gttggcctctatgtccgaagttttg

SEQ ID NO: 724326 - DNA, 25 bp, Homo sapien
tggcctctatgtccgaagttttgcc

SEQ ID NO: 724327 - DNA, 25 bp, Homo sapien
tcctcggaggcataagtaatcatag

SEQ ID NO: 724328 - DNA, 25 bp, Homo sapien
tttagcacttgggaaggcactccct

SEQ ID NO: 724329 - DNA, 25 bp, Homo sapien
cactgactttcagcagaccacttgt

SEQ ID NO: 724330 - DNA, 25 bp, Homo sapien
cctgtattcaggcacctatggcata

SEQ ID NO: 724331 - DNA, 25 bp, Homo sapien
gagtagtaaccaaagtctgtatcac

SEQ ID NO: 724332 - DNA, 25 bp, Homo sapien
tcacatgggattcacaaatctcaag

SEQ ID NO: 724333 - DNA, 25 bp, Homo sapien
caaagtctgtatcacatgggattca

SEQ ID NO: 724334 - DNA, 25 bp, Homo sapien
attctttgaggagtagtaaccaaag

SEQ ID NO: 724335 - DNA, 25 bp, Homo sapien
gaaagagatgagtcagtcacacatg

SEQ ID NO: 724336 - DNA, 25 bp, Homo sapien
tccaatgagggaagataagggcctg

SEQ ID NO: 724337 - DNA, 25 bp, Homo sapien
tgtgaccaaggagatccagaagctg

SEQ ID NO: 724338 - DNA, 25 bp, Homo sapien
cacacatgacttgagggtgccttgc

SEQ ID NO: 724339 - DNA, 25 bp, Homo sapien
tcacatgtcaggatagttgccgata

SEQ ID NO: 724340 - DNA, 25 bp, Homo sapien
agtgtatctgttctcctgtagtctg

SEQ ID NO: 724341 - DNA, 25 bp, Homo sapien
tccacaacgttgctgagtgtatctg

SEQ ID NO: 724342 - DNA, 25 bp, Homo sapien
tatgcctcatgtgtgtagtaactct

SEQ ID NO: 724343 - DNA, 25 bp, Homo sapien
cctttcttatgtctacagcttgttc

SEQ ID NO: 724344 - DNA, 25 bp, Homo sapien
cacctttcttatgtctacagcttgt

SEQ ID NO: 724345 - DNA, 25 bp, Homo sapien
tcttatgtctacagcttgttctaaa

SEQ ID NO: 724346 - DNA, 25 bp, Homo sapien
ttcttatgtctacagcttgttctaa

SEQ ID NO: 724347 - DNA, 25 bp, Homo sapien
catagagtgatcattttgagcaaac

SEQ ID NO: 724348 - DNA, 25 bp, Homo sapien
tggccttgagacacacctatcttga

SEQ ID NO: 724349 - DNA, 25 bp, Homo sapien
tgtttttgctaactctcacttggcc

SEQ ID NO: 724350 - DNA, 25 bp, Homo sapien
ggttggccagaaaaccatagagtga

SEQ ID NO: 724351 - DNA, 25 bp, Homo sapien
tctttagtgaataccctagaaatgt

SEQ ID NO: 724352 - DNA, 25 bp, Homo sapien
cctatatttgtagttatgtcaccct

SEQ ID NO: 724353 - DNA, 25 bp, Homo sapien
tcttgtgaccctctatctctggtaa

SEQ ID NO: 724354 - DNA, 25 bp, Homo sapien
catcttgttatgcttcgtctccctt

SEQ ID NO: 724355 - DNA, 25 bp, Homo sapien
gagaagcacttcaggaaaggaacca

SEQ ID NO: 724356 - DNA, 25 bp, Homo sapien
ccagctgaacgtacatacaagtgca

SEQ ID NO: 724357 - DNA, 25 bp, Homo sapien
ggaaaaatcttctctactagccaac

SEQ ID NO: 724358 - DNA, 25 bp, Homo sapien
tatttctacctgcttgtgctccgtg

SEQ ID NO: 724359 - DNA, 25 bp, Homo sapien
ctgccctcttggcagcagggtgagt

SEQ ID NO: 724360 - DNA, 25 bp, Homo sapien
agtctccaaggaggctgcctgccct

SEQ ID NO: 724361 - DNA, 25 bp, Homo sapien
gctgcctgccctcttggcagcaggg

SEQ ID NO: 724362 - DNA, 25 bp, Homo sapien
ctcttggcagcagggtgagtgccat

SEQ ID NO: 724363 - DNA, 25 bp, Homo sapien
ctatacactggtttatatagaaaaa

SEQ ID NO: 724364 - DNA, 25 bp, Homo sapien
aagggcttctctatacactggttta

SEQ ID NO: 724365 - DNA, 25 bp, Homo sapien
cttctctatacactggtttatatag

SEQ ID NO: 724366 - DNA, 25 bp, Homo sapien
ttaaagggcttctctatacactggt

SEQ ID NO: 724367 - DNA, 25 bp, Homo sapien
tatcctcgggtcagccaagagtgca

SEQ ID NO: 724368 - DNA, 25 bp, Homo sapien
gctaattatcctcgggtcagccaag

SEQ ID NO: 724369 - DNA, 25 bp, Homo sapien
cagccaagagtgcaggtatgagtaa

SEQ ID NO: 724370 - DNA, 25 bp, Homo sapien
tgcaggtatgagtaatgacaccacc

SEQ ID NO: 724371 - DNA, 25 bp, Homo sapien
gaatctgcagctggacgagatctgg

SEQ ID NO: 724372 - DNA, 25 bp, Homo sapien
gagaaggaactcgtcacaaagcatc

SEQ ID NO: 724373 - DNA, 25 bp, Homo sapien
aaagcacatgcctataagagtggtc

SEQ ID NO: 724374 - DNA, 25 bp, Homo sapien
tgaagaaacatatatgggccagtag

SEQ ID NO: 724375 - DNA, 25 bp, Homo sapien
tacgttgtgtctttggttataaatg

SEQ ID NO: 724376 - DNA, 25 bp, Homo sapien
cttagactgtaagtctaaaggagaa

SEQ ID NO: 724377 - DNA, 25 bp, Homo sapien
agactgtaagtctaaaggagaagaa

SEQ ID NO: 724378 - DNA, 25 bp, Homo sapien
cgttgtgtctttggttataaatgct

SEQ ID NO: 724379 - DNA, 25 bp, Homo sapien
agggtgaacggcacatcgctcagga

SEQ ID NO: 724380 - DNA, 25 bp, Homo sapien
tcataggagagtaagtggtcgggaa

SEQ ID NO: 724381 - DNA, 25 bp, Homo sapien
gataagttttcgctgccatcatagg

SEQ ID NO: 724382 - DNA, 25 bp, Homo sapien
tcgctcaggagctcggccattaatg

SEQ ID NO: 724383 - DNA, 25 bp, Homo sapien
cagagcactgaattttcaagagtga

SEQ ID NO: 724384 - DNA, 25 bp, Homo sapien
ttatgaatcacagagcactgaattt

SEQ ID NO: 724385 - DNA, 25 bp, Homo sapien
gaatcacagagcactgaattttcaa

SEQ ID NO: 724386 - DNA, 25 bp, Homo sapien
tcacagagcactgaattttcaagag

SEQ ID NO: 724387 - DNA, 25 bp, Homo sapien
tgaggaccttaaacagtgaaacggc

SEQ ID NO: 724388 - DNA, 25 bp, Homo sapien
gctgtagtgactgaaaaatgccaca

SEQ ID NO: 724389 - DNA, 25 bp, Homo sapien
tgagagaccatctgaaggaatcgag

SEQ ID NO: 724390 - DNA, 25 bp, Homo sapien
tacaaaccagagaggagacttcaca

SEQ ID NO: 724391 - DNA, 25 bp, Homo sapien
tggtcagagagcacactgaagtagc

SEQ ID NO: 724392 - DNA, 25 bp, Homo sapien
taaggagagcaaatggcaaccgagg

SEQ ID NO: 724393 - DNA, 25 bp, Homo sapien
ggtgggaacacaacgattattcacg

SEQ ID NO: 724394 - DNA, 25 bp, Homo sapien
tcagaaaaccgaaatgggccactcc

SEQ ID NO: 724395 - DNA, 25 bp, Homo sapien
gaaatgctctgttgtctgactccct

SEQ ID NO: 724396 - DNA, 25 bp, Homo sapien
gcagtgagctttcgctaatgagaag

SEQ ID NO: 724397 - DNA, 25 bp, Homo sapien
tctggcctgggtagtgacttgcaag

SEQ ID NO: 724398 - DNA, 25 bp, Homo sapien
ctggcagcagtcctaagttggaacc

SEQ ID NO: 724399 - DNA, 25 bp, Homo sapien
aacccagatgtcagacactggattg

SEQ ID NO: 724400 - DNA, 25 bp, Homo sapien
tgcctcagagttatagccaacacct

SEQ ID NO: 724401 - DNA, 25 bp, Homo sapien
cagatgtcagacactggattgtaca

SEQ ID NO: 724402 - DNA, 25 bp, Homo sapien
tctccaatgtgcctcagagttatag

SEQ ID NO: 724403 - DNA, 25 bp, Homo sapien
tctttgctagcctcccgaatgttcc

SEQ ID NO: 724404 - DNA, 25 bp, Homo sapien
cttctttgctagcctcccgaatgtt

SEQ ID NO: 724405 - DNA, 25 bp, Homo sapien
tgctagcctcccgaatgttcccagc

SEQ ID NO: 724406 - DNA, 25 bp, Homo sapien
tttgctagcctcccgaatgttccca

SEQ ID NO: 724407 - DNA, 25 bp, Homo sapien
caaaatcagattgcagaagttgaca

SEQ ID NO: 724408 - DNA, 25 bp, Homo sapien
tagaggtgggccgagtataaaccag

SEQ ID NO: 724409 - DNA, 25 bp, Homo sapien
ggaggttctaatgagggacgcaaaa

SEQ ID NO: 724410 - DNA, 25 bp, Homo sapien
agctgagattgtgcgattgtgccat

SEQ ID NO: 724411 - DNA, 25 bp, Homo sapien
agcctgggtgccagtgcaagactcc

SEQ ID NO: 724412 - DNA, 25 bp, Homo sapien
gcctgggtgccagtgcaagactccg

SEQ ID NO: 724413 - DNA, 25 bp, Homo sapien
gctttggctctgttgatacatgcct

SEQ ID NO: 724414 - DNA, 25 bp, Homo sapien
cacgggactcaaataaacactttag

SEQ ID NO: 724415 - DNA, 25 bp, Homo sapien
gaacgatctcacctagaccctagca

SEQ ID NO: 724416 - DNA, 25 bp, Homo sapien
tcaaatgatataagacacgggactc

SEQ ID NO: 724417 - DNA, 25 bp, Homo sapien
gagaggagcgaagctctccttaaaa

SEQ ID NO: 724418 - DNA, 25 bp, Homo sapien
gacctgtctaaagtcatgcctgttt

SEQ ID NO: 724419 - DNA, 25 bp, Homo sapien
cacctactctgtctaagaattccaa

SEQ ID NO: 724420 - DNA, 25 bp, Homo sapien
aagttcagtattttactgggtggcg

SEQ ID NO: 724421 - DNA, 25 bp, Homo sapien
tcgagtacagagtgtcttgtctgcc

SEQ ID NO: 724422 - DNA, 25 bp, Homo sapien
gctgtaagtgaaagtgctattcttc

SEQ ID NO: 724423 - DNA, 25 bp, Homo sapien
ggaagtccagcagcaaaccagaatg

SEQ ID NO: 724424 - DNA, 25 bp, Homo sapien
tatttcggatataattggtttcgag

SEQ ID NO: 724425 - DNA, 25 bp, Homo sapien
ctgctcatggctctaagctccaaca

SEQ ID NO: 724426 - DNA, 25 bp, Homo sapien
ggttgatagactgccctcaaaaata

SEQ ID NO: 724427 - DNA, 25 bp, Homo sapien
taagtattctatttccaaagatgtg

SEQ ID NO: 724428 - DNA, 25 bp, Homo sapien
tatgtatttatggttgatagactgc

SEQ ID NO: 724429 - DNA, 25 bp, Homo sapien
gagcaatgaataattaagtattcta

SEQ ID NO: 724430 - DNA, 25 bp, Homo sapien
gtatatctgctgcaaaaccaatcaa

SEQ ID NO: 724431 - DNA, 25 bp, Homo sapien
caaatttgtgtatcaccctgtgtgt

SEQ ID NO: 724432 - DNA, 25 bp, Homo sapien
tagtatatctgctgcaaaaccaatc

SEQ ID NO: 724433 - DNA, 25 bp, Homo sapien
aatttgtgtatcaccctgtgtgtgc

SEQ ID NO: 724434 - DNA, 25 bp, Homo sapien
gctgccattattgtagtctccgatc

SEQ ID NO: 724435 - DNA, 25 bp, Homo sapien
taactgctgggaccttttgctgcca

SEQ ID NO: 724436 - DNA, 25 bp, Homo sapien
catgttctacctggattttacggcc

SEQ ID NO: 724437 - DNA, 25 bp, Homo sapien
atctggattcagacaaagagggaca

SEQ ID NO: 724438 - DNA, 25 bp, Homo sapien
gattattcatcacaaagggacagct

SEQ ID NO: 724439 - DNA, 25 bp, Homo sapien
gcaatgttgcctatggaaagagctc

SEQ ID NO: 724440 - DNA, 25 bp, Homo sapien
gaaagagctcttgaccattcgtaag

SEQ ID NO: 724441 - DNA, 25 bp, Homo sapien
taaaatgacagcaacctttgaaggc

SEQ ID NO: 724442 - DNA, 25 bp, Homo sapien
tgcaatgatccgacgatctgccaca

SEQ ID NO: 724443 - DNA, 25 bp, Homo sapien
taacaggcttttcatctgtgctccc

SEQ ID NO: 724444 - DNA, 25 bp, Homo sapien
tgatccgacgatctgccacacaatc

SEQ ID NO: 724445 - DNA, 25 bp, Homo sapien
tgtgctccctgcaatgatccgacga

SEQ ID NO: 724446 - DNA, 25 bp, Homo sapien
tttactgcatagatcgttcggtgac

SEQ ID NO: 724447 - DNA, 25 bp, Homo sapien
tgtctccatacgcacatatgcctga

SEQ ID NO: 724448 - DNA, 25 bp, Homo sapien
tcgcattgttaatcctcagaaccac

SEQ ID NO: 724449 - DNA, 25 bp, Homo sapien
gttgcccatagctacagtgtatcca

SEQ ID NO: 724450 - DNA, 25 bp, Homo sapien
gttctttgcaaatatcattgtccat

SEQ ID NO: 724451 - DNA, 25 bp, Homo sapien
tacaaagattttggatgactatcaa

SEQ ID NO: 724452 - DNA, 25 bp, Homo sapien
ccttgtgtgttcagacgagaaagca

SEQ ID NO: 724453 - DNA, 25 bp, Homo sapien
caattaatgtaaggatcttcatcag

SEQ ID NO: 724454 - DNA, 25 bp, Homo sapien
caatgtcaaattggtctgctcgtgg

SEQ ID NO: 724455 - DNA, 25 bp, Homo sapien
aggacccggcagctgccgcagcgag

SEQ ID NO: 724456 - DNA, 25 bp, Homo sapien
cgaatggcaactaattcgccccagc

SEQ ID NO: 724457 - DNA, 25 bp, Homo sapien
aatggcaactaattcgccccagccg

SEQ ID NO: 724458 - DNA, 25 bp, Homo sapien
tccgaatggcaactaattcgcccca

SEQ ID NO: 724459 - DNA, 25 bp, Homo sapien
agaaagggcctcgaggtgctggcgc

SEQ ID NO: 724460 - DNA, 25 bp, Homo sapien
ggaaggctgcgaaaacaaacgtcca

SEQ ID NO: 724461 - DNA, 25 bp, Homo sapien
cgcacgggagaacccggcagctgca

SEQ ID NO: 724462 - DNA, 25 bp, Homo sapien
cgctccaggcatcgtgctgacaggg

SEQ ID NO: 724463 - DNA, 25 bp, Homo sapien
caccgtggcgcggatgggctgcagc

SEQ ID NO: 724464 - DNA, 25 bp, Homo sapien
cggcgacgggcggacgcgtgggact

SEQ ID NO: 724465 - DNA, 25 bp, Homo sapien
gtagggcaccgtggcgcggatgggc

SEQ ID NO: 724466 - DNA, 25 bp, Homo sapien
ctgccccgcaagagctggtagggca

SEQ ID NO: 724467 - DNA, 25 bp, Homo sapien
cggcccttggcccgcggcgcctgct

SEQ ID NO: 724468 - DNA, 25 bp, Homo sapien
cccttggcccgcggcgcctgctcgg

SEQ ID NO: 724469 - DNA, 25 bp, Homo sapien
ggcggcccttggcccgcggcgcctg

SEQ ID NO: 724470 - DNA, 25 bp, Homo sapien
ggcgcctgctcggccggggctgcgg

SEQ ID NO: 724471 - DNA, 25 bp, Homo sapien
gggctccgtctctcaggtgagctgc

SEQ ID NO: 724472 - DNA, 25 bp, Homo sapien
cgagccggggctccgtctctcaggt

SEQ ID NO: 724473 - DNA, 25 bp, Homo sapien
tccgtctctcaggtgagctgctcct

SEQ ID NO: 724474 - DNA, 25 bp, Homo sapien
tgcacacgggcgagccggggctccg

SEQ ID NO: 724475 - DNA, 25 bp, Homo sapien
gaggacgggagggttgggctcgcta

SEQ ID NO: 724476 - DNA, 25 bp, Homo sapien
gcccgaagaggctgaagtttccacg

SEQ ID NO: 724477 - DNA, 25 bp, Homo sapien
cacaccttcgataatgcactagcaa

SEQ ID NO: 724478 - DNA, 25 bp, Homo sapien
taaaagtcgcttttcagttcgctcc

SEQ ID NO: 724479 - DNA, 25 bp, Homo sapien
gcactagcaaagagaagcccgaaga

SEQ ID NO: 724480 - DNA, 25 bp, Homo sapien
ttccagtgcaggagtgctctgatgc

SEQ ID NO: 724481 - DNA, 25 bp, Homo sapien
tatccttacatcgaaactaatgcca

SEQ ID NO: 724482 - DNA, 25 bp, Homo sapien
gaaaatctccggtagagcacaaact

SEQ ID NO: 724483 - DNA, 25 bp, Homo sapien
tactatcccggtagttacaggcacg

SEQ ID NO: 724484 - DNA, 25 bp, Homo sapien
tattcctcccaatgcatacagatta

SEQ ID NO: 724485 - DNA, 25 bp, Homo sapien
tcttgctgctcatgtactcatccca

SEQ ID NO: 724486 - DNA, 25 bp, Homo sapien
acagattacaggatgtatttcttgc

SEQ ID NO: 724487 - DNA, 25 bp, Homo sapien
agtgcaggagcatattcctcccaat

SEQ ID NO: 724488 - DNA, 25 bp, Homo sapien
tgcactgttgaagcgaaatcactaa

SEQ ID NO: 724489 - DNA, 25 bp, Homo sapien
tgttgcagcaattgccgaaacttct

SEQ ID NO: 724490 - DNA, 25 bp, Homo sapien
tggtcattattagggcgatcacgtt

SEQ ID NO: 724491 - DNA, 25 bp, Homo sapien
tgatggagcatgtaattcctaggcc

SEQ ID NO: 724492 - DNA, 25 bp, Homo sapien
tactacattactacacaagaagcca

SEQ ID NO: 724493 - DNA, 25 bp, Homo sapien
tgtcacttcccattctagctcagca

SEQ ID NO: 724494 - DNA, 25 bp, Homo sapien
ccaaagtttcaggtaaatggtgaca

SEQ ID NO: 724495 - DNA, 25 bp, Homo sapien
gatatttagacaaagccaattcctc

SEQ ID NO: 724496 - DNA, 25 bp, Homo sapien
tgctgctcagtgtgcaaattgacaa

SEQ ID NO: 724497 - DNA, 25 bp, Homo sapien
tgacaaccacattgcccacagtagt

SEQ ID NO: 724498 - DNA, 25 bp, Homo sapien
gctcagtgtgcaaattgacaaccac

SEQ ID NO: 724499 - DNA, 25 bp, Homo sapien
gcaaattgacaaccacattgcccac

SEQ ID NO: 724500 - DNA, 25 bp, Homo sapien
ctgtgaataaggcaataactgtaat

SEQ ID NO: 724501 - DNA, 25 bp, Homo sapien
gcaataactgtaatattttattttg

SEQ ID NO: 724502 - DNA, 25 bp, Homo sapien
tgtgaataaggcaataactgtaata

SEQ ID NO: 724503 - DNA, 25 bp, Homo sapien
tccatgaccagtccctgtaggatca

SEQ ID NO: 724504 - DNA, 25 bp, Homo sapien
cctgtaggatcaacagtttgtatga

SEQ ID NO: 724505 - DNA, 25 bp, Homo sapien
ttgtatgataaaatacctttgtata

SEQ ID NO: 724506 - DNA, 25 bp, Homo sapien
gtaggatcaacagtttgtatgataa

SEQ ID NO: 724507 - DNA, 25 bp, Homo sapien
tgatcaccatacaatcctaggccaa

SEQ ID NO: 724508 - DNA, 25 bp, Homo sapien
ttgatcaccatacaatcctaggcca

SEQ ID NO: 724509 - DNA, 25 bp, Homo sapien
gatcaccatacaatcctaggccaaa

SEQ ID NO: 724510 - DNA, 25 bp, Homo sapien
cttgatcaccatacaatcctaggcc

SEQ ID NO: 724511 - DNA, 25 bp, Homo sapien
tacaaagtccttgtcaacaaaggtc

SEQ ID NO: 724512 - DNA, 25 bp, Homo sapien
agtccttgtcaacaaaggtctcatt

SEQ ID NO: 724513 - DNA, 25 bp, Homo sapien
atatggtacaaagtccttgtcaaca

SEQ ID NO: 724514 - DNA, 25 bp, Homo sapien
ctgatatcctgatatggtacaaagt

SEQ ID NO: 724515 - DNA, 25 bp, Homo sapien
ataaatcaggaatgtcatcaaaatg

SEQ ID NO: 724516 - DNA, 25 bp, Homo sapien
ctggtgattgatcagggattaataa

SEQ ID NO: 724517 - DNA, 25 bp, Homo sapien
ggtgattgatcagggattaataaat

SEQ ID NO: 724518 - DNA, 25 bp, Homo sapien
tcaggaatgtcatcaaaatggacca

SEQ ID NO: 724519 - DNA, 25 bp, Homo sapien
gctgaccttcgtttgaaatgatcaa

SEQ ID NO: 724520 - DNA, 25 bp, Homo sapien
ttcggctgaccttcgtttgaaatga

SEQ ID NO: 724521 - DNA, 25 bp, Homo sapien
tcatttgtgtcaactctaccactct

SEQ ID NO: 724522 - DNA, 25 bp, Homo sapien
tacttcttcggctgaccttcgtttg

SEQ ID NO: 724523 - DNA, 25 bp, Homo sapien
tccagtcccagataacttcacaact

SEQ ID NO: 724524 - DNA, 25 bp, Homo sapien
ctttgtatactcctttaaatcactc

SEQ ID NO: 724525 - DNA, 25 bp, Homo sapien
ttcctttgtatactcctttaaatca

SEQ ID NO: 724526 - DNA, 25 bp, Homo sapien
ttgtatactcctttaaatcactctt

SEQ ID NO: 724527 - DNA, 25 bp, Homo sapien
tcctttgtatactcctttaaatcac

SEQ ID NO: 724528 - DNA, 25 bp, Homo sapien
ctagtacaacattatattttgcctc

SEQ ID NO: 724529 - DNA, 25 bp, Homo sapien
ttctcatacttatctggattaatat

SEQ ID NO: 724530 - DNA, 25 bp, Homo sapien
tacttcagagcagtgatgggttttc

SEQ ID NO: 724531 - DNA, 25 bp, Homo sapien
cttttacttcagagcagtgatgggt

SEQ ID NO: 724532 - DNA, 25 bp, Homo sapien
accaaactccaaactttctcatact

SEQ ID NO: 724533 - DNA, 25 bp, Homo sapien
actataatggccattcctctcttgc

SEQ ID NO: 724534 - DNA, 25 bp, Homo sapien
atggccattcctctcttgcgatcag

SEQ ID NO: 724535 - DNA, 25 bp, Homo sapien
cgatcagctacgacttcagttctga

SEQ ID NO: 724536 - DNA, 25 bp, Homo sapien
ctctttcataaagatgtctggtatt

SEQ ID NO: 724537 - DNA, 25 bp, Homo sapien
tcatctgtacttagatttttcttta

SEQ ID NO: 724538 - DNA, 25 bp, Homo sapien
catctgtacttagatttttctttat

SEQ ID NO: 724539 - DNA, 25 bp, Homo sapien
gatttttctttggatttctgcttca

SEQ ID NO: 724540 - DNA, 25 bp, Homo sapien
tttctttggatttctgcttcagtct

SEQ ID NO: 724541 - DNA, 25 bp, Homo sapien
gggcaagtgtcctaaagactagcta

SEQ ID NO: 724542 - DNA, 25 bp, Homo sapien
tacaacacgtacttcattaaacagg

SEQ ID NO: 724543 - DNA, 25 bp, Homo sapien
tataactcctagacagacaatgttc

SEQ ID NO: 724544 - DNA, 25 bp, Homo sapien
caggaatatccgcataaagacatta

SEQ ID NO: 724545 - DNA, 25 bp, Homo sapien
tagggtgcgcatgctattactctct

SEQ ID NO: 724546 - DNA, 25 bp, Homo sapien
cattcaggaatatgtctagttgggt

SEQ ID NO: 724547 - DNA, 25 bp, Homo sapien
tacgaagtgagcaaatcctaagtca

SEQ ID NO: 724548 - DNA, 25 bp, Homo sapien
ccagggattatccagtgattgctga

SEQ ID NO: 724549 - DNA, 25 bp, Homo sapien
cattgagccagcacctttgaaggag

SEQ ID NO: 724550 - DNA, 25 bp, Homo sapien
ttgaaaggacatacggaaaggacat

SEQ ID NO: 724551 - DNA, 25 bp, Homo sapien
catgtgtgtgtaacaggagtccctc

SEQ ID NO: 724552 - DNA, 25 bp, Homo sapien
gagtccctcaagaaatgaccaaagg

SEQ ID NO: 724553 - DNA, 25 bp, Homo sapien
gggccatagtggtatcagcatctgt

SEQ ID NO: 724554 - DNA, 25 bp, Homo sapien
tccctatgaataatgaaagcatgcc

SEQ ID NO: 724555 - DNA, 25 bp, Homo sapien
tgggagcactagagccttgaagaca

SEQ ID NO: 724556 - DNA, 25 bp, Homo sapien
gacagcaaaggaatgtacccaggct

SEQ ID NO: 724557 - DNA, 25 bp, Homo sapien
tctgtgacactgttatagcaatacg

SEQ ID NO: 724558 - DNA, 25 bp, Homo sapien
cctttctacctctgtcatgggatga

SEQ ID NO: 724559 - DNA, 25 bp, Homo sapien
tgggaccaataagaggcaattaggc

SEQ ID NO: 724560 - DNA, 25 bp, Homo sapien
tgttattagagctaggtcaaccctc

SEQ ID NO: 724561 - DNA, 25 bp, Homo sapien
gaaatgaccatatggctgccctgca

SEQ ID NO: 724562 - DNA, 25 bp, Homo sapien
ttcagataagtgacaggaaggacac

SEQ ID NO: 724563 - DNA, 25 bp, Homo sapien
gaaccctaccacagaagcaatctag

SEQ ID NO: 724564 - DNA, 25 bp, Homo sapien
tgaagctctctcagtgtgggtagaa

SEQ ID NO: 724565 - DNA, 25 bp, Homo sapien
gcagtgtttggtccttgcgataatt

SEQ ID NO: 724566 - DNA, 25 bp, Homo sapien
ccacatccttgcaaaggtcatgaac

SEQ ID NO: 724567 - DNA, 25 bp, Homo sapien
gtttggtccttgcgataatttgctc

SEQ ID NO: 724568 - DNA, 25 bp, Homo sapien
catgcagtgtttggtccttgcgata

SEQ ID NO: 724569 - DNA, 25 bp, Homo sapien
gctccccaccctatgagaggccctg

SEQ ID NO: 724570 - DNA, 25 bp, Homo sapien
tgaaattttccctgtgaccaaaagc

SEQ ID NO: 724571 - DNA, 25 bp, Homo sapien
gaaattttccctgtgaccaaaagca

SEQ ID NO: 724572 - DNA, 25 bp, Homo sapien
ggtcctgttattgtatccaaagagg

SEQ ID NO: 724573 - DNA, 25 bp, Homo sapien
tagtgaacatgaggatcccgtggcc

SEQ ID NO: 724574 - DNA, 25 bp, Homo sapien
tgtactagaggtccgaacttgctga

SEQ ID NO: 724575 - DNA, 25 bp, Homo sapien
ggaggttcgccttattgtactagag

SEQ ID NO: 724576 - DNA, 25 bp, Homo sapien
gtgcagggtaataagctgattttga

SEQ ID NO: 724577 - DNA, 25 bp, Homo sapien
cagaagaagtgcagggtaataagct

SEQ ID NO: 724578 - DNA, 25 bp, Homo sapien
atcaaaacagaagaagtgcagggta

SEQ ID NO: 724579 - DNA, 25 bp, Homo sapien
gaagtgcagggtaataagctgattt

SEQ ID NO: 724580 - DNA, 25 bp, Homo sapien
atcaaaagcttggagatccttccaa

SEQ ID NO: 724581 - DNA, 25 bp, Homo sapien
ttttcaagaacggtgcaaactcttc

SEQ ID NO: 724582 - DNA, 25 bp, Homo sapien
tatggtcaagaactcagataatcat

SEQ ID NO: 724583 - DNA, 25 bp, Homo sapien
ccatgtaatatagactgatgtgcta

SEQ ID NO: 724584 - DNA, 25 bp, Homo sapien
tacatactccattcatctaacgtcg

SEQ ID NO: 724585 - DNA, 25 bp, Homo sapien
cagtcttcggacatgaaactctaat

SEQ ID NO: 724586 - DNA, 25 bp, Homo sapien
gaatctaactcctctagaaggatgg

SEQ ID NO: 724587 - DNA, 25 bp, Homo sapien
tgtccagatctctaactgtccaggc

SEQ ID NO: 724588 - DNA, 25 bp, Homo sapien
ttagtggttgccataaaaggcaata

SEQ ID NO: 724589 - DNA, 25 bp, Homo sapien
ggttgccataaaaggcaatagacag

SEQ ID NO: 724590 - DNA, 25 bp, Homo sapien
gtggttgccataaaaggcaatagac

SEQ ID NO: 724591 - DNA, 25 bp, Homo sapien
tagtggttgccataaaaggcaatag

SEQ ID NO: 724592 - DNA, 25 bp, Homo sapien
gatcgtacagccgaaaaaccaaaga

SEQ ID NO: 724593 - DNA, 25 bp, Homo sapien
gatgatcgtacagccgaaaaaccaa

SEQ ID NO: 724594 - DNA, 25 bp, Homo sapien
ttggatgatcgtacagccgaaaaac

SEQ ID NO: 724595 - DNA, 25 bp, Homo sapien
ctatttggatgatcgtacagccgaa

SEQ ID NO: 724596 - DNA, 25 bp, Homo sapien
tctccaaagtccagactatgaaatt

SEQ ID NO: 724597 - DNA, 25 bp, Homo sapien
tatgaaatttctttccaacctctag

SEQ ID NO: 724598 - DNA, 25 bp, Homo sapien
ccaaagtccagactatgaaatttct

SEQ ID NO: 724599 - DNA, 25 bp, Homo sapien
agtctccaaagtccagactatgaaa

SEQ ID NO: 724600 - DNA, 25 bp, Homo sapien
tccaactggtctgttattctgtcca

SEQ ID NO: 724601 - DNA, 25 bp, Homo sapien
tgaacaatgcagaactaaaacctat

SEQ ID NO: 724602 - DNA, 25 bp, Homo sapien
caattggagggcagtgttctataca

SEQ ID NO: 724603 - DNA, 25 bp, Homo sapien
tttcctttcatatcagcaagcagcc

SEQ ID NO: 724604 - DNA, 25 bp, Homo sapien
ctcttttagttgatcagcactcccc

SEQ ID NO: 724605 - DNA, 25 bp, Homo sapien
tcccccatgacgcagaacgctgatg

SEQ ID NO: 724606 - DNA, 25 bp, Homo sapien
aacgctgatgtgacctcttttctgc

SEQ ID NO: 724607 - DNA, 25 bp, Homo sapien
cgcagaacgctgatgtgacctcttt

SEQ ID NO: 724608 - DNA, 25 bp, Homo sapien
aaaagtgtcattacattcaggaaat

SEQ ID NO: 724609 - DNA, 25 bp, Homo sapien
tgtcctaaccttactgaaagaggta

SEQ ID NO: 724610 - DNA, 25 bp, Homo sapien
cattcaggaaatactaaggtaatct

SEQ ID NO: 724611 - DNA, 25 bp, Homo sapien
tctactaggaccaaaacaggttaca

SEQ ID NO: 724612 - DNA, 25 bp, Homo sapien
gactaataaagctgttggccctctc

SEQ ID NO: 724613 - DNA, 25 bp, Homo sapien
gaaaaggagtagcaccagatcacga

SEQ ID NO: 724614 - DNA, 25 bp, Homo sapien
gaaatgctatgcgacagagctaggg

SEQ ID NO: 724615 - DNA, 25 bp, Homo sapien
taatggttgccttctgtggaaaaca

SEQ ID NO: 724616 - DNA, 25 bp, Homo sapien
tcctagttgtggttagttaagcttc

SEQ ID NO: 724617 - DNA, 25 bp, Homo sapien
gttaagcttcatgaatctgtagatt

SEQ ID NO: 724618 - DNA, 25 bp, Homo sapien
tgtggttagttaagcttcatgaatc

SEQ ID NO: 724619 - DNA, 25 bp, Homo sapien
tgtctcttttctcctatgaggcttt

SEQ ID NO: 724620 - DNA, 25 bp, Homo sapien
catgtacctgctataaatccaacca

SEQ ID NO: 724621 - DNA, 25 bp, Homo sapien
tcttcttagtaacttagcaactgct

SEQ ID NO: 724622 - DNA, 25 bp, Homo sapien
gcaactgctctagggattataatgt

SEQ ID NO: 724623 - DNA, 25 bp, Homo sapien
ctttcagcctgaagatttgctttaa

SEQ ID NO: 724624 - DNA, 25 bp, Homo sapien
tctaggattagtccctggtgcctgg

SEQ ID NO: 724625 - DNA, 25 bp, Homo sapien
tcctggatggtgctaattatcgtag

SEQ ID NO: 724626 - DNA, 25 bp, Homo sapien
tacaggcgtgagtttcctcaacata

SEQ ID NO: 724627 - DNA, 25 bp, Homo sapien
gagaattctcttgattaccagacaa

SEQ ID NO: 724628 - DNA, 25 bp, Homo sapien
ggtcagagaggattcctgatattat

SEQ ID NO: 724629 - DNA, 25 bp, Homo sapien
tctttctctgcataggcatatccag

SEQ ID NO: 724630 - DNA, 25 bp, Homo sapien
cattctcaatagcatctgttattgc

SEQ ID NO: 724631 - DNA, 25 bp, Homo sapien
cctgttttccacgtctatgtcttct

SEQ ID NO: 724632 - DNA, 25 bp, Homo sapien
ctgtttgttaatcccttgttaggtg

SEQ ID NO: 724633 - DNA, 25 bp, Homo sapien
tggacgtcattatgataggatctca

SEQ ID NO: 724634 - DNA, 25 bp, Homo sapien
tgttgttggatggaactggacgtca

SEQ ID NO: 724635 - DNA, 25 bp, Homo sapien
tccttctatcctctagttccacgag

SEQ ID NO: 724636 - DNA, 25 bp, Homo sapien
tcacttaacgtaatgacatccatgt

SEQ ID NO: 724637 - DNA, 25 bp, Homo sapien
tgtgaccccgggatagtctctgtgg

SEQ ID NO: 724638 - DNA, 25 bp, Homo sapien
ggacagtacttatgacctgaaaaaa

SEQ ID NO: 724639 - DNA, 25 bp, Homo sapien
tgcctgactttgaaaggacagtact

SEQ ID NO: 724640 - DNA, 25 bp, Homo sapien
tataatccctcttatttattgctgg

SEQ ID NO: 724641 - DNA, 25 bp, Homo sapien
tgcttcctttacaatccgaatgtct

SEQ ID NO: 724642 - DNA, 25 bp, Homo sapien
ctggctagaatctcctgtacagtaa

SEQ ID NO: 724643 - DNA, 25 bp, Homo sapien
catataggattatgtcttcggtgaa

SEQ ID NO: 724644 - DNA, 25 bp, Homo sapien
taaaagtggtgacaagatgacagtg

SEQ ID NO: 724645 - DNA, 25 bp, Homo sapien
tatgtgtgccaatactatactaact

SEQ ID NO: 724646 - DNA, 25 bp, Homo sapien
tttctctatggtgagagctaggact

SEQ ID NO: 724647 - DNA, 25 bp, Homo sapien
taggattatgattcactgaaagctg

SEQ ID NO: 724648 - DNA, 25 bp, Homo sapien
actatattaatgtaggttcacagga

SEQ ID NO: 724649 - DNA, 25 bp, Homo sapien
aaattaggcacccaacctcttctgg

SEQ ID NO: 724650 - DNA, 25 bp, Homo sapien
gaagtctgaaattaggcacccaacc

SEQ ID NO: 724651 - DNA, 25 bp, Homo sapien
cagcatacaaaattcgtggctgaca

SEQ ID NO: 724652 - DNA, 25 bp, Homo sapien
gagcattctgctgtaagtctgttgg

SEQ ID NO: 724653 - DNA, 25 bp, Homo sapien
cttgagtctttacgtgtctttagca

SEQ ID NO: 724654 - DNA, 25 bp, Homo sapien
tttgtagtctcagttgtggaactgt

SEQ ID NO: 724655 - DNA, 25 bp, Homo sapien
tgttaacttacctagttgctttgta

SEQ ID NO: 724656 - DNA, 25 bp, Homo sapien
cagttaggtggatttcttgtaagca

SEQ ID NO: 724657 - DNA, 25 bp, Homo sapien
gtgacttcattggtgttctgttcca

SEQ ID NO: 724658 - DNA, 25 bp, Homo sapien
gaattatactgaatatgtaggtggc

SEQ ID NO: 724659 - DNA, 25 bp, Homo sapien
aagactgctttcaccatttgggctt

SEQ ID NO: 724660 - DNA, 25 bp, Homo sapien
gatgacccatttagtgctgtcagtg

SEQ ID NO: 724661 - DNA, 25 bp, Homo sapien
tgtaaatagatgtgctatatcatcc

SEQ ID NO: 724662 - DNA, 25 bp, Homo sapien
tggcttaaatcatcagctgcagctg

SEQ ID NO: 724663 - DNA, 25 bp, Homo sapien
tccactttataaagtacaagcacaa

SEQ ID NO: 724664 - DNA, 25 bp, Homo sapien
gtacaagcacaatagacatagcata

SEQ ID NO: 724665 - DNA, 25 bp, Homo sapien
catcaggagtacattcctacttaag

SEQ ID NO: 724666 - DNA, 25 bp, Homo sapien
cgtagatgttagctgactgatcagg

SEQ ID NO: 724667 - DNA, 25 bp, Homo sapien
tggtgaagctcttgtctcgtagatg

SEQ ID NO: 724668 - DNA, 25 bp, Homo sapien
atatagcaatgaagtgagtcacatg

SEQ ID NO: 724669 - DNA, 25 bp, Homo sapien
tcacaggcaaccataataggcattt

SEQ ID NO: 724670 - DNA, 25 bp, Homo sapien
aatcatcagttttctggtcacaggc

SEQ ID NO: 724671 - DNA, 25 bp, Homo sapien
ccttcattctatttattgtcaatca

SEQ ID NO: 724672 - DNA, 25 bp, Homo sapien
tgcagatttatacaacaagaatcac

SEQ ID NO: 724673 - DNA, 25 bp, Homo sapien
caggtggatcagcagttgaagacca

SEQ ID NO: 724674 - DNA, 25 bp, Homo sapien
ggtggatcagcagttgaagaccagc

SEQ ID NO: 724675 - DNA, 25 bp, Homo sapien
ggcaggtggatcagcagttgaagac

SEQ ID NO: 724676 - DNA, 25 bp, Homo sapien
gtggatcagcagttgaagaccagcc

SEQ ID NO: 724677 - DNA, 25 bp, Homo sapien
tgtgacgactactctgtttactgcg

SEQ ID NO: 724678 - DNA, 25 bp, Homo sapien
ggtgactggcgatctttctccttac

SEQ ID NO: 724679 - DNA, 25 bp, Homo sapien
tactgcgttgtagttgctgcctcag

SEQ ID NO: 724680 - DNA, 25 bp, Homo sapien
gactgattgttatatggttgccatg

SEQ ID NO: 724681 - DNA, 25 bp, Homo sapien
ccccattgttgttgaagagttaact

SEQ ID NO: 724682 - DNA, 25 bp, Homo sapien
taagtgactattttacgttatcggc

SEQ ID NO: 724683 - DNA, 25 bp, Homo sapien
tatcggcaaggcttctgtgcaacag

SEQ ID NO: 724684 - DNA, 25 bp, Homo sapien
cagtacgctgttagtaggttaagtt

SEQ ID NO: 724685 - DNA, 25 bp, Homo sapien
cagggcacacgcgaaacagatgatt

SEQ ID NO: 724686 - DNA, 25 bp, Homo sapien
tattccttctacattgcagggcaca

SEQ ID NO: 724687 - DNA, 25 bp, Homo sapien
gaaacagatgattttggcactgata

SEQ ID NO: 724688 - DNA, 25 bp, Homo sapien
actgatatatttgacagtggcatag

SEQ ID NO: 724689 - DNA, 25 bp, Homo sapien
cacagctaattaagtggcatcagag

SEQ ID NO: 724690 - DNA, 25 bp, Homo sapien
cttcaaaggctaaagaccaagcttg

SEQ ID NO: 724691 - DNA, 25 bp, Homo sapien
tgtacctgtaggtcagcacatccca

SEQ ID NO: 724692 - DNA, 25 bp, Homo sapien
aactcttcaaggacagcgggagtcc

SEQ ID NO: 724693 - DNA, 25 bp, Homo sapien
aagggctaccatcctgggattccgg

SEQ ID NO: 724694 - DNA, 25 bp, Homo sapien
gaagtggagctcttcgaccatctgg

SEQ ID NO: 724695 - DNA, 25 bp, Homo sapien
aatcttctgttgagcaagggctacc

SEQ ID NO: 724696 - DNA, 25 bp, Homo sapien
aatgctgcgagtactactgctccgg

SEQ ID NO: 724697 - DNA, 25 bp, Homo sapien
gttctgtacacaccgggccctttca

SEQ ID NO: 724698 - DNA, 25 bp, Homo sapien
tggactttctaaatctccagtctca

SEQ ID NO: 724699 - DNA, 25 bp, Homo sapien
gcctaaatagtggactttctaaatc

SEQ ID NO: 724700 - DNA, 25 bp, Homo sapien
tttcttactgttctgtacacaccgg

SEQ ID NO: 724701 - DNA, 25 bp, Homo sapien
gggactcaacttacattccaaggcc

SEQ ID NO: 724702 - DNA, 25 bp, Homo sapien
tttagatcagcattcagcaaagagt

SEQ ID NO: 724703 - DNA, 25 bp, Homo sapien
caaagttaacaccttgtgagaatac

SEQ ID NO: 724704 - DNA, 25 bp, Homo sapien
aattgtaatgaaccaagacatcagc

SEQ ID NO: 724705 - DNA, 25 bp, Homo sapien
ccattaaaatacgagtagcttctga

SEQ ID NO: 724706 - DNA, 25 bp, Homo sapien
ttgccttacaaagcagcacgcttta

SEQ ID NO: 724707 - DNA, 25 bp, Homo sapien
catggtaatcttaattgagtctctc

SEQ ID NO: 724708 - DNA, 25 bp, Homo sapien
taaatatgcctgctcaggagattca

SEQ ID NO: 724709 - DNA, 25 bp, Homo sapien
tgccacaccatagaacataaaaagg

SEQ ID NO: 724710 - DNA, 25 bp, Homo sapien
tattaactagtgattgaaagctctt

SEQ ID NO: 724711 - DNA, 25 bp, Homo sapien
actactgcccctatgctttgaccag

SEQ ID NO: 724712 - DNA, 25 bp, Homo sapien
ctttgaccagtctcctttattgcaa

SEQ ID NO: 724713 - DNA, 25 bp, Homo sapien
caaagaccttcactcgctcacatcc

SEQ ID NO: 724714 - DNA, 25 bp, Homo sapien
aagcatacttgggtaacggtgagct

SEQ ID NO: 724715 - DNA, 25 bp, Homo sapien
tttgggagatgaagcatacttgggt

SEQ ID NO: 724716 - DNA, 25 bp, Homo sapien
tcccgtttgaacatgtagctgttgt

SEQ ID NO: 724717 - DNA, 25 bp, Homo sapien
caattcaacagaggttgggtccaca

SEQ ID NO: 724718 - DNA, 25 bp, Homo sapien
cactggaacaaaggcatgagggcat

SEQ ID NO: 724719 - DNA, 25 bp, Homo sapien
cgttcccaggagctaagccatcagc

SEQ ID NO: 724720 - DNA, 25 bp, Homo sapien
tgtctttaagctagtcacacacgga

SEQ ID NO: 724721 - DNA, 25 bp, Homo sapien
tgatccggttgggatgaaattaacc

SEQ ID NO: 724722 - DNA, 25 bp, Homo sapien
gacagaaagctgatccggttgggat

SEQ ID NO: 724723 - DNA, 25 bp, Homo sapien
cagaaagctgatccggttgggatga

SEQ ID NO: 724724 - DNA, 25 bp, Homo sapien
aaagctgatccggttgggatgaaat

SEQ ID NO: 724725 - DNA, 25 bp, Homo sapien
catggagcccgctgtgctggtgtca

SEQ ID NO: 724726 - DNA, 25 bp, Homo sapien
catcagaaagagacgtaaaggaaac

SEQ ID NO: 724727 - DNA, 25 bp, Homo sapien
ggtcagagttgccaaagctgagctc

SEQ ID NO: 724728 - DNA, 25 bp, Homo sapien
aaggaaacccgggatgagagctgct

SEQ ID NO: 724729 - DNA, 25 bp, Homo sapien
ttagatgatcacatagttctgagca

SEQ ID NO: 724730 - DNA, 25 bp, Homo sapien
cactttaggcgcagatgaaacaact

SEQ ID NO: 724731 - DNA, 25 bp, Homo sapien
tcaaatactgttcagcgcaatggct

SEQ ID NO: 724732 - DNA, 25 bp, Homo sapien
aataggagttccgtccctgccaaga

SEQ ID NO: 724733 - DNA, 25 bp, Homo sapien
gaagtacctgaagctaggccatagg

SEQ ID NO: 724734 - DNA, 25 bp, Homo sapien
gagcaatcaggagaaagggttaggg

SEQ ID NO: 724735 - DNA, 25 bp, Homo sapien
cacagatttggaggagcaatcagga

SEQ ID NO: 724736 - DNA, 25 bp, Homo sapien
ttctattccttgatgtcaccatttt

SEQ ID NO: 724737 - DNA, 25 bp, Homo sapien
gctgcactggccacagatttggagg

SEQ ID NO: 724738 - DNA, 25 bp, Homo sapien
tgttaggattctcccaccgagccaa

SEQ ID NO: 724739 - DNA, 25 bp, Homo sapien
aaactatgccatgttaggattctcc

SEQ ID NO: 724740 - DNA, 25 bp, Homo sapien
accgagccaaagttcactctaccaa

SEQ ID NO: 724741 - DNA, 25 bp, Homo sapien
tcactctaccaagccttctcttaag

SEQ ID NO: 724742 - DNA, 25 bp, Homo sapien
agtgtgaggatgttgggaccgtttt

SEQ ID NO: 724743 - DNA, 25 bp, Homo sapien
tgtgaggatgttgggaccgttttct

SEQ ID NO: 724744 - DNA, 25 bp, Homo sapien
gtgtgaggatgttgggaccgttttc

SEQ ID NO: 724745 - DNA, 25 bp, Homo sapien
cctgaactgtggcaccccaaggatc

SEQ ID NO: 724746 - DNA, 25 bp, Homo sapien
tgagagtttcctccgctgtcttccg

SEQ ID NO: 724747 - DNA, 25 bp, Homo sapien
gtcttccgtccatggcacaaacaga

SEQ ID NO: 724748 - DNA, 25 bp, Homo sapien
tcttgctgatatatctggccctgaa

SEQ ID NO: 724749 - DNA, 25 bp, Homo sapien
ctcctcttaggaatgcgttcatgtc

SEQ ID NO: 724750 - DNA, 25 bp, Homo sapien
gaaaaatataatgcttcgagtctgc

SEQ ID NO: 724751 - DNA, 25 bp, Homo sapien
tcttaggaatgcgttcatgtcatac

SEQ ID NO: 724752 - DNA, 25 bp, Homo sapien
tgcttcgagtctgcctcttttttcc

SEQ ID NO: 724753 - DNA, 25 bp, Homo sapien
gaattcaagtagaagatatctgttt

SEQ ID NO: 724754 - DNA, 25 bp, Homo sapien
aattcaagtagaagatatctgtttt

SEQ ID NO: 724755 - DNA, 25 bp, Homo sapien
cacccatggcaaagcgcagctctgg

SEQ ID NO: 724756 - DNA, 25 bp, Homo sapien
cccgggcttcggctctccccgctgg

SEQ ID NO: 724757 - DNA, 25 bp, Homo sapien
tggccggccttatgcctggctgatt

SEQ ID NO: 724758 - DNA, 25 bp, Homo sapien
ctctgggcggtgtcctttggcttca

SEQ ID NO: 724759 - DNA, 25 bp, Homo sapien
tgtgttccttcacggtattcttttg

SEQ ID NO: 724760 - DNA, 25 bp, Homo sapien
agccttgtgttccttcacggtattc

SEQ ID NO: 724761 - DNA, 25 bp, Homo sapien
ccgaattctgagatgccgttgccat

SEQ ID NO: 724762 - DNA, 25 bp, Homo sapien
tcttttgttttaccgaattctgaga

SEQ ID NO: 724763 - DNA, 25 bp, Homo sapien
caggactgaagtgcaagctctgggc

SEQ ID NO: 724764 - DNA, 25 bp, Homo sapien
tctccgtgagagactggggcaccga

SEQ ID NO: 724765 - DNA, 25 bp, Homo sapien
tccacacacaattgaatgatgttcc

SEQ ID NO: 724766 - DNA, 25 bp, Homo sapien
cagcagctacattcgctctggcaca

SEQ ID NO: 724767 - DNA, 25 bp, Homo sapien
ggtgagaatgaaccatgtggagctc

SEQ ID NO: 724768 - DNA, 25 bp, Homo sapien
cctaaggtgaggatatgcctggcac

SEQ ID NO: 724769 - DNA, 25 bp, Homo sapien
cagagggaacaacctgtgccaatgc

SEQ ID NO: 724770 - DNA, 25 bp, Homo sapien
ggtcttcaggaaggacacttggctg

SEQ ID NO: 724771 - DNA, 25 bp, Homo sapien
caaaggatcctctgcaaattgcccc

SEQ ID NO: 724772 - DNA, 25 bp, Homo sapien
ggaaagtagacatcacaaaggccag

SEQ ID NO: 724773 - DNA, 25 bp, Homo sapien
tcagggacccaaagctgaggctcat

SEQ ID NO: 724774 - DNA, 25 bp, Homo sapien
gaaaggtttgcggtcataagaggaa

SEQ ID NO: 724775 - DNA, 25 bp, Homo sapien
tctttgagcagatcttaattattgg

SEQ ID NO: 724776 - DNA, 25 bp, Homo sapien
ttgagcagatcttaattattggtgc

SEQ ID NO: 724777 - DNA, 25 bp, Homo sapien
tcttaattattggtgcaactgcttt

SEQ ID NO: 724778 - DNA, 25 bp, Homo sapien
gcagatcttaattattggtgcaact

SEQ ID NO: 724779 - DNA, 25 bp, Homo sapien
tgtgctaaacactcagaatcccaag

SEQ ID NO: 724780 - DNA, 25 bp, Homo sapien
gagaaaccctgagatgcttcatgga

SEQ ID NO: 724781 - DNA, 25 bp, Homo sapien
tatgtgccatgagctacacactgtg

SEQ ID NO: 724782 - DNA, 25 bp, Homo sapien
gacacaggtggtaatgcagcccagg

SEQ ID NO: 724783 - DNA, 25 bp, Homo sapien
cgcgggcggcgcgtgataggcgagt

SEQ ID NO: 724784 - DNA, 25 bp, Homo sapien
gctgacgtcggatgagtgatccgga

SEQ ID NO: 724785 - DNA, 25 bp, Homo sapien
tgatccggagggacgctccgaccgc

SEQ ID NO: 724786 - DNA, 25 bp, Homo sapien
gggcggcgcgtgataggcgagtcgc

SEQ ID NO: 724787 - DNA, 25 bp, Homo sapien
gctgcgctgcggtgcgcacgggctc

SEQ ID NO: 724788 - DNA, 25 bp, Homo sapien
gcgtctgctggagggtagaagcggg

SEQ ID NO: 724789 - DNA, 25 bp, Homo sapien
gcggcggtaggtagccgggcggcga

SEQ ID NO: 724790 - DNA, 25 bp, Homo sapien
gtcgctccggcgggcgtctgctgga

SEQ ID NO: 724791 - DNA, 25 bp, Homo sapien
tgacgcaaacgctatggccacgtgg

SEQ ID NO: 724792 - DNA, 25 bp, Homo sapien
tttaacctggaagcaagcagtaggc

SEQ ID NO: 724793 - DNA, 25 bp, Homo sapien
tgaagtctcctgtcctctaaagcta

SEQ ID NO: 724794 - DNA, 25 bp, Homo sapien
aggcactacgcacagcacagaggga

SEQ ID NO: 724795 - DNA, 25 bp, Homo sapien
gacctttattctcgaagctcaaact

SEQ ID NO: 724796 - DNA, 25 bp, Homo sapien
aaacttgatttccaggtacagcagg

SEQ ID NO: 724797 - DNA, 25 bp, Homo sapien
tattctcgaagctcaaacttgattt

SEQ ID NO: 724798 - DNA, 25 bp, Homo sapien
tttattctcgaagctcaaacttgat

SEQ ID NO: 724799 - DNA, 25 bp, Homo sapien
gaaaagtactcattgtggtgatgga

SEQ ID NO: 724800 - DNA, 25 bp, Homo sapien
cacagtcatcgttttcaccttggaa

SEQ ID NO: 724801 - DNA, 25 bp, Homo sapien
gaaaactgcgtaatcagttgcagct

SEQ ID NO: 724802 - DNA, 25 bp, Homo sapien
gaagccacttttagcctctgtaaca

SEQ ID NO: 724803 - DNA, 25 bp, Homo sapien
ggttctcactagcaccttactggtg

SEQ ID NO: 724804 - DNA, 25 bp, Homo sapien
tagccattctccttagaaactgttt

SEQ ID NO: 724805 - DNA, 25 bp, Homo sapien
aaactgtttcgggttctcactagca

SEQ ID NO: 724806 - DNA, 25 bp, Homo sapien
gatcccatcattcaatagccattct

SEQ ID NO: 724807 - DNA, 25 bp, Homo sapien
cactctcccttatatcaacccctct

SEQ ID NO: 724808 - DNA, 25 bp, Homo sapien
tggtggttggatacaaggatgaacc

SEQ ID NO: 724809 - DNA, 25 bp, Homo sapien
gcccctggctgcaaatcaagaggca

SEQ ID NO: 724810 - DNA, 25 bp, Homo sapien
cctataaataggtttcactttggag

SEQ ID NO: 724811 - DNA, 25 bp, Homo sapien
ttctgaagatgcctgaccacagaag

SEQ ID NO: 724812 - DNA, 25 bp, Homo sapien
cttgctgtaaggctgcttctgaaga

SEQ ID NO: 724813 - DNA, 25 bp, Homo sapien
ttgctgtaaggctgcttctgaagat

SEQ ID NO: 724814 - DNA, 25 bp, Homo sapien
tgaccacagaagccaacaagtgcat

SEQ ID NO: 724815 - DNA, 25 bp, Homo sapien
ctccactgaggtgggggtgtgacat

SEQ ID NO: 724816 - DNA, 25 bp, Homo sapien
cctttcctccactgaggtgggggtg

SEQ ID NO: 724817 - DNA, 25 bp, Homo sapien
cttcccctttcctccactgaggtgg

SEQ ID NO: 724818 - DNA, 25 bp, Homo sapien
ccttcccctttcctccactgaggtg

SEQ ID NO: 724819 - DNA, 25 bp, Homo sapien
cagccacaggcaacgttcaagcaat

SEQ ID NO: 724820 - DNA, 25 bp, Homo sapien
gccacaggcaacgttcaagcaattc

SEQ ID NO: 724821 - DNA, 25 bp, Homo sapien
cacagccacaggcaacgttcaagca

SEQ ID NO: 724822 - DNA, 25 bp, Homo sapien
ctggagaagtaataattaccaaggg

SEQ ID NO: 724823 - DNA, 25 bp, Homo sapien
tcctgagaaagagcccgtccttacg

SEQ ID NO: 724824 - DNA, 25 bp, Homo sapien
tgagcatcacaaaagttgacccaac

SEQ ID NO: 724825 - DNA, 25 bp, Homo sapien
gaatgagagatgtgttctgggcata

SEQ ID NO: 724826 - DNA, 25 bp, Homo sapien
agcagtgcgttaattgggagtacaa

SEQ ID NO: 724827 - DNA, 25 bp, Homo sapien
ccatgcacctatcagagtgggatct

SEQ ID NO: 724828 - DNA, 25 bp, Homo sapien
tccagatggcatagctacaaaatag

SEQ ID NO: 724829 - DNA, 25 bp, Homo sapien
gcacaaaggacgtgtaacttccacc

SEQ ID NO: 724830 - DNA, 25 bp, Homo sapien
tgggatcttgcgacccgatgaggcc

SEQ ID NO: 724831 - DNA, 25 bp, Homo sapien
tcaagaccctcaatgtgccaggact

SEQ ID NO: 724832 - DNA, 25 bp, Homo sapien
tttcaaccttttgtgcgcttgtccg

SEQ ID NO: 724833 - DNA, 25 bp, Homo sapien
taccagccatgtgtacctctccagg

SEQ ID NO: 724834 - DNA, 25 bp, Homo sapien
gcgcttgtccgttcatctgacagaa

SEQ ID NO: 724835 - DNA, 25 bp, Homo sapien
tcatcattggcaactgatgggagaa

SEQ ID NO: 724836 - DNA, 25 bp, Homo sapien
ataagcaggatgttcccctgcagcc

SEQ ID NO: 724837 - DNA, 25 bp, Homo sapien
tacagagataataagcaggatgttc

SEQ ID NO: 724838 - DNA, 25 bp, Homo sapien
caaaaaacctcatcattggcaactg

SEQ ID NO: 724839 - DNA, 25 bp, Homo sapien
ggcacttcgcactactctcgttgaa

SEQ ID NO: 724840 - DNA, 25 bp, Homo sapien
acttctatggtttgcacgtgtctcc

SEQ ID NO: 724841 - DNA, 25 bp, Homo sapien
cgttagcaagtgagacgcacatagc

SEQ ID NO: 724842 - DNA, 25 bp, Homo sapien
taacacggtgcttgctcattcaacc

SEQ ID NO: 724843 - DNA, 25 bp, Homo sapien
tccatctgaagccacctcaggctgg

SEQ ID NO: 724844 - DNA, 25 bp, Homo sapien
cacaaagctctaggatgggggcaaa

SEQ ID NO: 724845 - DNA, 25 bp, Homo sapien
gatacccaaaattatctctctcgag

SEQ ID NO: 724846 - DNA, 25 bp, Homo sapien
tcacattttcgggtatttacagcag

SEQ ID NO: 724847 - DNA, 25 bp, Homo sapien
tctggaggatagtgatgaccctctt

SEQ ID NO: 724848 - DNA, 25 bp, Homo sapien
ttttcaggcaaacagtgtaagctgt

SEQ ID NO: 724849 - DNA, 25 bp, Homo sapien
actaggtggtgtctcagtagagatc

SEQ ID NO: 724850 - DNA, 25 bp, Homo sapien
tcaaatccaatcacgcctttctaat

SEQ ID NO: 724851 - DNA, 25 bp, Homo sapien
ttttcataagggcacaaatcctatt

SEQ ID NO: 724852 - DNA, 25 bp, Homo sapien
agctctggtttgtctctccctgttt

SEQ ID NO: 724853 - DNA, 25 bp, Homo sapien
cataagggcacaaatcctattggat

SEQ ID NO: 724854 - DNA, 25 bp, Homo sapien
ccaaaggctagaagttcagggtcaa

SEQ ID NO: 724855 - DNA, 25 bp, Homo sapien
aactaagaaattggaagttgcttca

SEQ ID NO: 724856 - DNA, 25 bp, Homo sapien
caactaagaaattggaagttgcttc

SEQ ID NO: 724857 - DNA, 25 bp, Homo sapien
ctaagaaattggaagttgcttcatc

SEQ ID NO: 724858 - DNA, 25 bp, Homo sapien
gtcaactaagaaattggaagttgct

SEQ ID NO: 724859 - DNA, 25 bp, Homo sapien
ttcagcaacagtggagtaatatgat

SEQ ID NO: 724860 - DNA, 25 bp, Homo sapien
cagcaacagtggagtaatatgatgc

SEQ ID NO: 724861 - DNA, 25 bp, Homo sapien
gcaacagtggagtaatatgatgcat

SEQ ID NO: 724862 - DNA, 25 bp, Homo sapien
taaattcagcaacagtggagtaata

SEQ ID NO: 724863 - DNA, 25 bp, Homo sapien
actctgactgacattgctcttgttc

SEQ ID NO: 724864 - DNA, 25 bp, Homo sapien
tgactgacattgctcttgttcagac

SEQ ID NO: 724865 - DNA, 25 bp, Homo sapien
tctgactgacattgctcttgttcag

SEQ ID NO: 724866 - DNA, 25 bp, Homo sapien
actgacattgctcttgttcagacac

SEQ ID NO: 724867 - DNA, 25 bp, Homo sapien
tcgcgctgctttggctcgtgcatgg

SEQ ID NO: 724868 - DNA, 25 bp, Homo sapien
gtgccgtccatcatccctttctttg

SEQ ID NO: 724869 - DNA, 25 bp, Homo sapien
ttccaggtgccgtccatcatccctt

SEQ ID NO: 724870 - DNA, 25 bp, Homo sapien
cctcgcgctgctttggctcgtgcat

SEQ ID NO: 724871 - DNA, 25 bp, Homo sapien
ttattatagttgtacattcttctat

SEQ ID NO: 724872 - DNA, 25 bp, Homo sapien
tattatagttgtacattcttctata

SEQ ID NO: 724873 - DNA, 25 bp, Homo sapien
tgcaaagccagttaacacagaaaac

SEQ ID NO: 724874 - DNA, 25 bp, Homo sapien
tcaaaaacttgcaagtgactgcaaa

SEQ ID NO: 724875 - DNA, 25 bp, Homo sapien
gttatcacacatgccggaatacatc

SEQ ID NO: 724876 - DNA, 25 bp, Homo sapien
gaaaaccttgtcaccttaagtatgc

SEQ ID NO: 724877 - DNA, 25 bp, Homo sapien
gctttgtagataaatccaatacagt

SEQ ID NO: 724878 - DNA, 25 bp, Homo sapien
tttgtagataaatccaatacagtat

SEQ ID NO: 724879 - DNA, 25 bp, Homo sapien
ctttgtagataaatccaatacagta

SEQ ID NO: 724880 - DNA, 25 bp, Homo sapien
gggaaatctgatggacctcacttta

SEQ ID NO: 724881 - DNA, 25 bp, Homo sapien
gaacaaactgacctaatgcgtctcc

SEQ ID NO: 724882 - DNA, 25 bp, Homo sapien
taagtggagtggacaagcaaaagct

SEQ ID NO: 724883 - DNA, 25 bp, Homo sapien
tcctaattagataccctagggtgac

SEQ ID NO: 724884 - DNA, 25 bp, Homo sapien
gatctggaacgattgttctttccaa

SEQ ID NO: 724885 - DNA, 25 bp, Homo sapien
tattgagtcctgatgatctggaacg

SEQ ID NO: 724886 - DNA, 25 bp, Homo sapien
ttcatcacatattgagtcctgatga

SEQ ID NO: 724887 - DNA, 25 bp, Homo sapien
tgttctttccaaatgaggtggtttc

SEQ ID NO: 724888 - DNA, 25 bp, Homo sapien
caaagtgagagtcattatactctgc

SEQ ID NO: 724889 - DNA, 25 bp, Homo sapien
cctgttgacaaagcccctgtcaaag

SEQ ID NO: 724890 - DNA, 25 bp, Homo sapien
ggtttgtatacttcattcctttcca

SEQ ID NO: 724891 - DNA, 25 bp, Homo sapien
cattatactctgcataaggtttgta

SEQ ID NO: 724892 - DNA, 25 bp, Homo sapien
gctggagctctcaggtattgtacca

SEQ ID NO: 724893 - DNA, 25 bp, Homo sapien
ggctgggtatcatccatcatgttgc

SEQ ID NO: 724894 - DNA, 25 bp, Homo sapien
caatatgtctgccatgattgatggg

SEQ ID NO: 724895 - DNA, 25 bp, Homo sapien
cttctgttactgtcacatttgtgcc

SEQ ID NO: 724896 - DNA, 25 bp, Homo sapien
tcatgatgtgatcccaaaatgatac

SEQ ID NO: 724897 - DNA, 25 bp, Homo sapien
tcccttgtgccccagtgaaagtcac

SEQ ID NO: 724898 - DNA, 25 bp, Homo sapien
gctgagtaattgctttgcaactttg

SEQ ID NO: 724899 - DNA, 25 bp, Homo sapien
cagcacacacacatagagttatcat

SEQ ID NO: 724900 - DNA, 25 bp, Homo sapien
gcttgttccaatgtaaccccaatgt

SEQ ID NO: 724901 - DNA, 25 bp, Homo sapien
tgttccaatgtaaccccaatgttct

SEQ ID NO: 724902 - DNA, 25 bp, Homo sapien
ttgttccaatgtaaccccaatgttc

SEQ ID NO: 724903 - DNA, 25 bp, Homo sapien
ggcttgttccaatgtaaccccaatg

SEQ ID NO: 724904 - DNA, 25 bp, Homo sapien
ccatcaacaaatgcttcagtgccaa

SEQ ID NO: 724905 - DNA, 25 bp, Homo sapien
caccaaatattaggatatagaggca

SEQ ID NO: 724906 - DNA, 25 bp, Homo sapien
gccaggttctgcaataactttctcc

SEQ ID NO: 724907 - DNA, 25 bp, Homo sapien
caatagagactctacggccaggttc

SEQ ID NO: 724908 - DNA, 25 bp, Homo sapien
aaaccaataatgagacactgtttgc

SEQ ID NO: 724909 - DNA, 25 bp, Homo sapien
caggctgtagcctgacacaaggctg

SEQ ID NO: 724910 - DNA, 25 bp, Homo sapien
aaggaaaccaataatgagacactgt

SEQ ID NO: 724911 - DNA, 25 bp, Homo sapien
ttagaactgtgggtgacaagttgct

SEQ ID NO: 724912 - DNA, 25 bp, Homo sapien
gacggatccctagaaggcttaacta

SEQ ID NO: 724913 - DNA, 25 bp, Homo sapien
caagcttcctgtttgtggagacgga

SEQ ID NO: 724914 - DNA, 25 bp, Homo sapien
gcagaaaaacatcacccttggaaga

SEQ ID NO: 724915 - DNA, 25 bp, Homo sapien
catcgcagtgatactatgaagccca

SEQ ID NO: 724916 - DNA, 25 bp, Homo sapien
caccatgtagaagctgtgtccttca

SEQ ID NO: 724917 - DNA, 25 bp, Homo sapien
tgcaccatgtagaagctgtgtcctt

SEQ ID NO: 724918 - DNA, 25 bp, Homo sapien
atgcaccatgtagaagctgtgtcct

SEQ ID NO: 724919 - DNA, 25 bp, Homo sapien
accatgtagaagctgtgtccttcag

SEQ ID NO: 724920 - DNA, 25 bp, Homo sapien
taaaggtaatttatatgctcagcct

SEQ ID NO: 724921 - DNA, 25 bp, Homo sapien
tcatttattctactaggtgaagaca

SEQ ID NO: 724922 - DNA, 25 bp, Homo sapien
gggtcatcgcccgaaaatcataatt

SEQ ID NO: 724923 - DNA, 25 bp, Homo sapien
ggtagggtagttttagttatgctca

SEQ ID NO: 724924 - DNA, 25 bp, Homo sapien
acgcgcctggcctttagcagaattc

SEQ ID NO: 724925 - DNA, 25 bp, Homo sapien
ggcctttagcagaattcttaaatgt

SEQ ID NO: 724926 - DNA, 25 bp, Homo sapien
ttttgctagtggaaggaaggattat

SEQ ID NO: 724927 - DNA, 25 bp, Homo sapien
atattttgctagtggaaggaaggat

SEQ ID NO: 724928 - DNA, 25 bp, Homo sapien
cgggggagccgcagactgccagcca

SEQ ID NO: 724929 - DNA, 25 bp, Homo sapien
gggggagccgcagactgccagccat

SEQ ID NO: 724930 - DNA, 25 bp, Homo sapien
ctgccagccattcagctcgagacag

SEQ ID NO: 724931 - DNA, 25 bp, Homo sapien
gccggcctcgagcgccgacgccggg

SEQ ID NO: 724932 - DNA, 25 bp, Homo sapien
ctcgagcgccgacgccgggcgcctc

SEQ ID NO: 724933 - DNA, 25 bp, Homo sapien
gcagccgggagtcgcgtagggcggg

SEQ ID NO: 724934 - DNA, 25 bp, Homo sapien
agcagccgggagtcgcgtagggcgg

SEQ ID NO: 724935 - DNA, 25 bp, Homo sapien
gggacaagtggctcccgcggtgtct

SEQ ID NO: 724936 - DNA, 25 bp, Homo sapien
gcggtgtcttcggtggccgcagcgc

SEQ ID NO: 724937 - DNA, 25 bp, Homo sapien
aaacagatccggctctcaggctctc

SEQ ID NO: 724938 - DNA, 25 bp, Homo sapien
cgtagggaagatcgcaaagcccagg

SEQ ID NO: 724939 - DNA, 25 bp, Homo sapien
gcagagccgcggcttggcacgccta

SEQ ID NO: 724940 - DNA, 25 bp, Homo sapien
ctctggagcgctttgggtttccggc

SEQ ID NO: 724941 - DNA, 25 bp, Homo sapien
gtggtcgtggtttctccgcagagcc

SEQ ID NO: 724942 - DNA, 25 bp, Homo sapien
cacccggggacgctctggagcgctt

SEQ ID NO: 724943 - DNA, 25 bp, Homo sapien
ggtggggtggcgagaatctggagcc

SEQ ID NO: 724944 - DNA, 25 bp, Homo sapien
gggtggggtggcgagaatctggagc

SEQ ID NO: 724945 - DNA, 25 bp, Homo sapien
gagcctgcggcacacggagcagctg

SEQ ID NO: 724946 - DNA, 25 bp, Homo sapien
gcctgcggcacacggagcagctgta

SEQ ID NO: 724947 - DNA, 25 bp, Homo sapien
gacgaacagtccaggactctcggct

SEQ ID NO: 724948 - DNA, 25 bp, Homo sapien
cacagctgcctgaggatggtggaaa

SEQ ID NO: 724949 - DNA, 25 bp, Homo sapien
cggcagacgagagcagtccgagttt

SEQ ID NO: 724950 - DNA, 25 bp, Homo sapien
gacactggcctttcggaagaaaaga

SEQ ID NO: 724951 - DNA, 25 bp, Homo sapien
cggacggactgggactgccagcgct

SEQ ID NO: 724952 - DNA, 25 bp, Homo sapien
ggacggactgggactgccagcgctg

SEQ ID NO: 724953 - DNA, 25 bp, Homo sapien
ggactgggactgccagcgctggcac

SEQ ID NO: 724954 - DNA, 25 bp, Homo sapien
acggactgggactgccagcgctggc

SEQ ID NO: 724955 - DNA, 25 bp, Homo sapien
agagaggggaatgcgccgggctgct

SEQ ID NO: 724956 - DNA, 25 bp, Homo sapien
gggagagaggggaatgcgccgggct

SEQ ID NO: 724957 - DNA, 25 bp, Homo sapien
aggggaatgcgccgggctgctgcac

SEQ ID NO: 724958 - DNA, 25 bp, Homo sapien
agaggggaatgcgccgggctgctgc

SEQ ID NO: 724959 - DNA, 25 bp, Homo sapien
gagaagctactcgggcctggcgtct

SEQ ID NO: 724960 - DNA, 25 bp, Homo sapien
gtctccatgctcgagcgcagacggg

SEQ ID NO: 724961 - DNA, 25 bp, Homo sapien
gctgcctcgtccagctttggcggag

SEQ ID NO: 724962 - DNA, 25 bp, Homo sapien
ctcaggattggttcgcgggagccaa

SEQ ID NO: 724963 - DNA, 25 bp, Homo sapien
tgtaccctccgggaacagcggaggc

SEQ ID NO: 724964 - DNA, 25 bp, Homo sapien
gaacagcggaggcaaagggtacgta

SEQ ID NO: 724965 - DNA, 25 bp, Homo sapien
ccaggtgtaccctccgggaacagcg

SEQ ID NO: 724966 - DNA, 25 bp, Homo sapien
ccctccgggaacagcggaggcaaag

SEQ ID NO: 724967 - DNA, 25 bp, Homo sapien
caggcttgttctctttcctaaccag

SEQ ID NO: 724968 - DNA, 25 bp, Homo sapien
gccaggcttgttctctttcctaacc

SEQ ID NO: 724969 - DNA, 25 bp, Homo sapien
tccctgccgtcccttcctcgtgccc

SEQ ID NO: 724970 - DNA, 25 bp, Homo sapien
gcttgttctctttcctaaccagcgc

SEQ ID NO: 724971 - DNA, 25 bp, Homo sapien
gccaaagggtacagccggtcgctaa

SEQ ID NO: 724972 - DNA, 25 bp, Homo sapien
gagccaaagggtacagccggtcgct

SEQ ID NO: 724973 - DNA, 25 bp, Homo sapien
ttcgagccaaagggtacagccggtc

SEQ ID NO: 724974 - DNA, 25 bp, Homo sapien
tcgagccaaagggtacagccggtcg

SEQ ID NO: 724975 - DNA, 25 bp, Homo sapien
aggttaggcttgacaatcaagcggg

SEQ ID NO: 724976 - DNA, 25 bp, Homo sapien
ctgagaccagcaagcgcgcggtccg

SEQ ID NO: 724977 - DNA, 25 bp, Homo sapien
tgaaaagcgagtaaatccagcgcct

SEQ ID NO: 724978 - DNA, 25 bp, Homo sapien
aattagacatcccatgactacgcgg

SEQ ID NO: 724979 - DNA, 25 bp, Homo sapien
ctttacagagcaaggagcgctctca

SEQ ID NO: 724980 - DNA, 25 bp, Homo sapien
acagagcaaggagcgctctcagcag

SEQ ID NO: 724981 - DNA, 25 bp, Homo sapien
cactttacagagcaaggagcgctct

SEQ ID NO: 724982 - DNA, 25 bp, Homo sapien
ttacagagcaaggagcgctctcagc

SEQ ID NO: 724983 - DNA, 25 bp, Homo sapien
gcgtctcaaacttccttggcggtgc

SEQ ID NO: 724984 - DNA, 25 bp, Homo sapien
tcccgcgtctcaaacttccttggcg

SEQ ID NO: 724985 - DNA, 25 bp, Homo sapien
tctcccgcgtctcaaacttccttgg

SEQ ID NO: 724986 - DNA, 25 bp, Homo sapien
ccgcgtctcaaacttccttggcggt

SEQ ID NO: 724987 - DNA, 25 bp, Homo sapien
aggaggaaaagcacgtaccagcacg

SEQ ID NO: 724988 - DNA, 25 bp, Homo sapien
aaagcacgtaccagcacgcagcctg

SEQ ID NO: 724989 - DNA, 25 bp, Homo sapien
tgcaggaggaaaagcacgtaccagc

SEQ ID NO: 724990 - DNA, 25 bp, Homo sapien
aggaaaagcacgtaccagcacgcag

SEQ ID NO: 724991 - DNA, 25 bp, Homo sapien
cgaggacgctgatgcgcagcgccct

SEQ ID NO: 724992 - DNA, 25 bp, Homo sapien
ctctggcgtccgcggctgctacggt

SEQ ID NO: 724993 - DNA, 25 bp, Homo sapien
cccaaggtgtcctgtgggcgaggac

SEQ ID NO: 724994 - DNA, 25 bp, Homo sapien
cggctgctacggtcaggcgataaag

SEQ ID NO: 724995 - DNA, 25 bp, Homo sapien
cttttggattggctgccctggcttt

SEQ ID NO: 724996 - DNA, 25 bp, Homo sapien
gctgttcttttggattggctgccct

SEQ ID NO: 724997 - DNA, 25 bp, Homo sapien
ttttggattggctgccctggctttc

SEQ ID NO: 724998 - DNA, 25 bp, Homo sapien
aaaggctgttcttttggattggctg

SEQ ID NO: 724999 - DNA, 25 bp, Homo sapien
gcttgttgttgagaacgcagcgcat

SEQ ID NO: 725000 - DNA, 25 bp, Homo sapien
cagcataatttgcacactgaatggt

SEQ ID NO: 725001 - DNA, 25 bp, Homo sapien
ctaaacggtaattgaatcagcataa

SEQ ID NO: 725002 - DNA, 25 bp, Homo sapien
gcgcattagaataaatccagcactg

SEQ ID NO: 725003 - DNA, 25 bp, Homo sapien
ggtgaagctgacaagcaccttggta

SEQ ID NO: 725004 - DNA, 25 bp, Homo sapien
ggttattacccggacaatgctgtca

SEQ ID NO: 725005 - DNA, 25 bp, Homo sapien
catctctttgccaatgcgaggctcc

SEQ ID NO: 725006 - DNA, 25 bp, Homo sapien
gcaatatccaaatgctttcggcact

SEQ ID NO: 725007 - DNA, 25 bp, Homo sapien
ggtagctcagctcatatgccagatc

SEQ ID NO: 725008 - DNA, 25 bp, Homo sapien
taaggttgaaaagctaacaccaggc

SEQ ID NO: 725009 - DNA, 25 bp, Homo sapien
caaggcaggattaaacacctcaggg

SEQ ID NO: 725010 - DNA, 25 bp, Homo sapien
ttgtgaaagacgcaaaaactctgcc

SEQ ID NO: 725011 - DNA, 25 bp, Homo sapien
tcgttggagccaagtgaattcagtg

SEQ ID NO: 725012 - DNA, 25 bp, Homo sapien
tctcctagccagtctttcacaatgc

SEQ ID NO: 725013 - DNA, 25 bp, Homo sapien
ccttaagaattgcagtgagggatct

SEQ ID NO: 725014 - DNA, 25 bp, Homo sapien
gctctctgttatggccaggtcctcg

SEQ ID NO: 725015 - DNA, 25 bp, Homo sapien
tgctggaagcacatgggaacctggt

SEQ ID NO: 725016 - DNA, 25 bp, Homo sapien
tcatattcataaggactgtgctgga

SEQ ID NO: 725017 - DNA, 25 bp, Homo sapien
tctggctgtaatcgtaaaggtaact

SEQ ID NO: 725018 - DNA, 25 bp, Homo sapien
ggatttgagaagttaagcttgccca

SEQ ID NO: 725019 - DNA, 25 bp, Homo sapien
gtgaaagatgatactgctgcaaaat

SEQ ID NO: 725020 - DNA, 25 bp, Homo sapien
ggtgaaagatgatactgctgcaaaa

SEQ ID NO: 725021 - DNA, 25 bp, Homo sapien
tgaccttgcaaggatcaggtgtacc

SEQ ID NO: 725022 - DNA, 25 bp, Homo sapien
ttgcaaggatcaggtgtaccattcc

SEQ ID NO: 725023 - DNA, 25 bp, Homo sapien
cctaatgaccttgcaaggatcaggt

SEQ ID NO: 725024 - DNA, 25 bp, Homo sapien
taccattccagagaattgtccttct

SEQ ID NO: 725025 - DNA, 25 bp, Homo sapien
gcagatgtcattccaataagacctc

SEQ ID NO: 725026 - DNA, 25 bp, Homo sapien
ttaaacctgcaattccattcatcat

SEQ ID NO: 725027 - DNA, 25 bp, Homo sapien
ccctgatatgtcatgtctggcctgg

SEQ ID NO: 725028 - DNA, 25 bp, Homo sapien
acttggaccagactcaaggtcccac

SEQ ID NO: 725029 - DNA, 25 bp, Homo sapien
ttttatagagtcatgccccatatgg

SEQ ID NO: 725030 - DNA, 25 bp, Homo sapien
tggcataagattcccagctagtctt

SEQ ID NO: 725031 - DNA, 25 bp, Homo sapien
gaaactgtggacatttgctgtccca

SEQ ID NO: 725032 - DNA, 25 bp, Homo sapien
caggtcatccgccagggaagtactt

SEQ ID NO: 725033 - DNA, 25 bp, Homo sapien
ggctttcagccccactaggtgctaa

SEQ ID NO: 725034 - DNA, 25 bp, Homo sapien
tcctttgtatatgaacaattttccc

SEQ ID NO: 725035 - DNA, 25 bp, Homo sapien
agccccactaggtgctaaagctgag

SEQ ID NO: 725036 - DNA, 25 bp, Homo sapien
cactaggtgctaaagctgagctcct

SEQ ID NO: 725037 - DNA, 25 bp, Homo sapien
tgcaccctgggcattggctctctct

SEQ ID NO: 725038 - DNA, 25 bp, Homo sapien
tccacttctcactaaagttctaaac

SEQ ID NO: 725039 - DNA, 25 bp, Homo sapien
tgcaaacctgtttgagtgggaataa

SEQ ID NO: 725040 - DNA, 25 bp, Homo sapien
ggctctctctatagtcgttcatgat

SEQ ID NO: 725041 - DNA, 25 bp, Homo sapien
cattgcatttgtcccaagaaagaac

SEQ ID NO: 725042 - DNA, 25 bp, Homo sapien
tgccaaggagattacacagtgtggt

SEQ ID NO: 725043 - DNA, 25 bp, Homo sapien
gtaaagacccatgatacccaaaatg

SEQ ID NO: 725044 - DNA, 25 bp, Homo sapien
tgatgatatcgcatagctaacacac

SEQ ID NO: 725045 - DNA, 25 bp, Homo sapien
cccagggaaggcagttatagagtta

SEQ ID NO: 725046 - DNA, 25 bp, Homo sapien
caacaaggttcaattggaaagctca

SEQ ID NO: 725047 - DNA, 25 bp, Homo sapien
cctatccccaaactgcactgaggag

SEQ ID NO: 725048 - DNA, 25 bp, Homo sapien
gctgtgtctgactatggaattggca

SEQ ID NO: 725049 - DNA, 25 bp, Homo sapien
agttctgagaaatagggacccatag

SEQ ID NO: 725050 - DNA, 25 bp, Homo sapien
agtccacgtgcttaaggagaaagag

SEQ ID NO: 725051 - DNA, 25 bp, Homo sapien
cttttagtcactgagagctttggca

SEQ ID NO: 725052 - DNA, 25 bp, Homo sapien
tcctttgtttgccagtgaagtccac

SEQ ID NO: 725053 - DNA, 25 bp, Homo sapien
tatggtcccatctgatactcctcca

SEQ ID NO: 725054 - DNA, 25 bp, Homo sapien
tatccgtgtctgtccgattgtctgc

SEQ ID NO: 725055 - DNA, 25 bp, Homo sapien
agctgggtctgactgttctatggtc

SEQ ID NO: 725056 - DNA, 25 bp, Homo sapien
gtgtctgtatccgtgtctgtccgat

SEQ ID NO: 725057 - DNA, 25 bp, Homo sapien
tgctttgccatgacctgcgctgggc

SEQ ID NO: 725058 - DNA, 25 bp, Homo sapien
ggtggccagtggagacactgtgggc

SEQ ID NO: 725059 - DNA, 25 bp, Homo sapien
ctttgccatgacctgcgctgggcct

SEQ ID NO: 725060 - DNA, 25 bp, Homo sapien
atgacctgcgctgggcctggatgtc

SEQ ID NO: 725061 - DNA, 25 bp, Homo sapien
taggcctccagagagcatgatttac

SEQ ID NO: 725062 - DNA, 25 bp, Homo sapien
gcatcccttctgtgataggcctcca

SEQ ID NO: 725063 - DNA, 25 bp, Homo sapien
ggtcgattgttcctgatgagcattc

SEQ ID NO: 725064 - DNA, 25 bp, Homo sapien
tggaatctcattagttggcatccct

SEQ ID NO: 725065 - DNA, 25 bp, Homo sapien
caccagtaagggcttgaccgtaaga

SEQ ID NO: 725066 - DNA, 25 bp, Homo sapien
gctctgtcactaagttggcttagaa

SEQ ID NO: 725067 - DNA, 25 bp, Homo sapien
ggtaggaaatagtcagggttgctct

SEQ ID NO: 725068 - DNA, 25 bp, Homo sapien
catctggagctgtctacaccagtaa

SEQ ID NO: 725069 - DNA, 25 bp, Homo sapien
gttagcatttctgcataagcccata

SEQ ID NO: 725070 - DNA, 25 bp, Homo sapien
aaatttgtagcagggttagcatttc

SEQ ID NO: 725071 - DNA, 25 bp, Homo sapien
ctaaaggacacaattggaataaaca

SEQ ID NO: 725072 - DNA, 25 bp, Homo sapien
gcccatatactttagagtgatgagt

SEQ ID NO: 725073 - DNA, 25 bp, Homo sapien
cattcaacctgtaccatgctttcag

SEQ ID NO: 725074 - DNA, 25 bp, Homo sapien
cagatggctacattcaacctgtacc

SEQ ID NO: 725075 - DNA, 25 bp, Homo sapien
gataactctgatacatcagacagga

SEQ ID NO: 725076 - DNA, 25 bp, Homo sapien
gatacatcagacaggacatcacaga

SEQ ID NO: 725077 - DNA, 25 bp, Homo sapien
catgcaaagcatgtatatcccattt

SEQ ID NO: 725078 - DNA, 25 bp, Homo sapien
tcatgcaaagcatgtatatcccatt

SEQ ID NO: 725079 - DNA, 25 bp, Homo sapien
gcaaagcatgtatatcccatttatt

SEQ ID NO: 725080 - DNA, 25 bp, Homo sapien
ttcttcatgcaaagcatgtatatcc

SEQ ID NO: 725081 - DNA, 25 bp, Homo sapien
tctaagggtgattcgttcaaatccc

SEQ ID NO: 725082 - DNA, 25 bp, Homo sapien
gaatcacttacaggcggtgttttgt

SEQ ID NO: 725083 - DNA, 25 bp, Homo sapien
cgggcttctgtaatgcatccttaga

SEQ ID NO: 725084 - DNA, 25 bp, Homo sapien
tctgtaatgcatccttagaatcact

SEQ ID NO: 725085 - DNA, 25 bp, Homo sapien
ttccttcttgaattcaagtccttgt

SEQ ID NO: 725086 - DNA, 25 bp, Homo sapien
tgaagactcttatctaacccgtgtg

SEQ ID NO: 725087 - DNA, 25 bp, Homo sapien
cacccgtagtcttttgcattgtaat

SEQ ID NO: 725088 - DNA, 25 bp, Homo sapien
tagtggctcctaagtcagactctgt

SEQ ID NO: 725089 - DNA, 25 bp, Homo sapien
gtaattacaagcctgccatttccct

SEQ ID NO: 725090 - DNA, 25 bp, Homo sapien
gctgtccacaagcctgggctagatt

SEQ ID NO: 725091 - DNA, 25 bp, Homo sapien
ctttggtcttgcatcaccattttcc

SEQ ID NO: 725092 - DNA, 25 bp, Homo sapien
cacaagcctgggctagattttgctt

SEQ ID NO: 725093 - DNA, 25 bp, Homo sapien
gtccacaagcctgggctagattttg

SEQ ID NO: 725094 - DNA, 25 bp, Homo sapien
ggttcatattcttagctacatctat

SEQ ID NO: 725095 - DNA, 25 bp, Homo sapien
tttgattcacaatcaatattttagg

SEQ ID NO: 725096 - DNA, 25 bp, Homo sapien
tagctacatctattttaatagtgaa

SEQ ID NO: 725097 - DNA, 25 bp, Homo sapien
tatggttcatattcttagctacatc

SEQ ID NO: 725098 - DNA, 25 bp, Homo sapien
cagaaagaataccagctgaagctgt

SEQ ID NO: 725099 - DNA, 25 bp, Homo sapien
aaagaataccagctgaagctgtcat

SEQ ID NO: 725100 - DNA, 25 bp, Homo sapien
cacagaaagaataccagctgaagct

SEQ ID NO: 725101 - DNA, 25 bp, Homo sapien
gaaagaataccagctgaagctgtca

SEQ ID NO: 725102 - DNA, 25 bp, Homo sapien
caggagtcggctgatagacaagtct

SEQ ID NO: 725103 - DNA, 25 bp, Homo sapien
tttgccacgaaaagtctgtgacagg

SEQ ID NO: 725104 - DNA, 25 bp, Homo sapien
caccgttcgttaaattggcacatgt

SEQ ID NO: 725105 - DNA, 25 bp, Homo sapien
gccagtcccagaggtcttgctcaga

SEQ ID NO: 725106 - DNA, 25 bp, Homo sapien
ccagttatcaacaggttcagcttca

SEQ ID NO: 725107 - DNA, 25 bp, Homo sapien
gctgacagatacattcccttgacca

SEQ ID NO: 725108 - DNA, 25 bp, Homo sapien
caatcacggtttgttgtgccaagtc

SEQ ID NO: 725109 - DNA, 25 bp, Homo sapien
aaatgtcccattgccatgatctaca

SEQ ID NO: 725110 - DNA, 25 bp, Homo sapien
cagatcaccttaaagggcttggagc

SEQ ID NO: 725111 - DNA, 25 bp, Homo sapien
gatcaccttaaagggcttggagcag

SEQ ID NO: 725112 - DNA, 25 bp, Homo sapien
agatcaccttaaagggcttggagca

SEQ ID NO: 725113 - DNA, 25 bp, Homo sapien
acagatcaccttaaagggcttggag

SEQ ID NO: 725114 - DNA, 25 bp, Homo sapien
ccgagggaaagtaaggtgtgtcact

SEQ ID NO: 725115 - DNA, 25 bp, Homo sapien
tcatcccgagggaaagtaaggtgtg

SEQ ID NO: 725116 - DNA, 25 bp, Homo sapien
gtagtcagggcacactttctgtacc

SEQ ID NO: 725117 - DNA, 25 bp, Homo sapien
tttctgtaccagtttataatctgta

SEQ ID NO: 725118 - DNA, 25 bp, Homo sapien
gaaagccctctcaacaggaatcatg

SEQ ID NO: 725119 - DNA, 25 bp, Homo sapien
tcttctttgaggtaacagccctgtc

SEQ ID NO: 725120 - DNA, 25 bp, Homo sapien
taacttacatggtgtctgccaggca

SEQ ID NO: 725121 - DNA, 25 bp, Homo sapien
gccagttgacaagagcagcagtgta

SEQ ID NO: 725122 - DNA, 25 bp, Homo sapien
caggtctggtagatggctcctgcat

SEQ ID NO: 725123 - DNA, 25 bp, Homo sapien
catgagacttttgacacccctttcc

SEQ ID NO: 725124 - DNA, 25 bp, Homo sapien
tcaagtttatgccactctgctacaa

SEQ ID NO: 725125 - DNA, 25 bp, Homo sapien
ggcctctttggtactctgggctcca

SEQ ID NO: 725126 - DNA, 25 bp, Homo sapien
ttagaaagccacacaatgtagcggg

SEQ ID NO: 725127 - DNA, 25 bp, Homo sapien
gggaacttcaacgtcatactgacag

SEQ ID NO: 725128 - DNA, 25 bp, Homo sapien
taactttcgggcaaacaaatcaaga

SEQ ID NO: 725129 - DNA, 25 bp, Homo sapien
cagcattagacagaccatcaaggca

SEQ ID NO: 725130 - DNA, 25 bp, Homo sapien
gagtaagggagtagcatagcactgg

SEQ ID NO: 725131 - DNA, 25 bp, Homo sapien
ttgacataattagcccttcacccat

SEQ ID NO: 725132 - DNA, 25 bp, Homo sapien
tctttccaagcctaacttagtaaca

SEQ ID NO: 725133 - DNA, 25 bp, Homo sapien
gggagattcaggctcattaattcct

SEQ ID NO: 725134 - DNA, 25 bp, Homo sapien
agccctgactttgcaacttctgtta

SEQ ID NO: 725135 - DNA, 25 bp, Homo sapien
tgcaacttctgttatcagtgttttc

SEQ ID NO: 725136 - DNA, 25 bp, Homo sapien
acctccatctgggccacgagccagc

SEQ ID NO: 725137 - DNA, 25 bp, Homo sapien
acgagccagccctgactttgcaact

SEQ ID NO: 725138 - DNA, 25 bp, Homo sapien
atgtttggcattccctaatctaccc

SEQ ID NO: 725139 - DNA, 25 bp, Homo sapien
atggatgtttggcattccctaatct

SEQ ID NO: 725140 - DNA, 25 bp, Homo sapien
ggatgtttggcattccctaatctac

SEQ ID NO: 725141 - DNA, 25 bp, Homo sapien
tcatggatgtttggcattccctaat

SEQ ID NO: 725142 - DNA, 25 bp, Homo sapien
cctataatgtcagaaaattgttgcc

SEQ ID NO: 725143 - DNA, 25 bp, Homo sapien
caaaaatggtgtacgcagagcttca

SEQ ID NO: 725144 - DNA, 25 bp, Homo sapien
ttgccaaaaatggtgtacgcagagc

SEQ ID NO: 725145 - DNA, 25 bp, Homo sapien
cgagatttgtcacctataatgtcag

SEQ ID NO: 725146 - DNA, 25 bp, Homo sapien
gtattgatagccaactatatgttct

SEQ ID NO: 725147 - DNA, 25 bp, Homo sapien
tattgatagccaactatatgttctt

SEQ ID NO: 725148 - DNA, 25 bp, Homo sapien
agtattgatagccaactatatgttc

SEQ ID NO: 725149 - DNA, 25 bp, Homo sapien
taagtattgatagccaactatatgt

SEQ ID NO: 725150 - DNA, 25 bp, Homo sapien
gtcagccgtgcttctttctcaatgt

SEQ ID NO: 725151 - DNA, 25 bp, Homo sapien
ccgtgcttctttctcaatgtttaac

SEQ ID NO: 725152 - DNA, 25 bp, Homo sapien
tctcaatgtttaacttaaaactaga

SEQ ID NO: 725153 - DNA, 25 bp, Homo sapien
ctgtcagccgtgcttctttctcaat

SEQ ID NO: 725154 - DNA, 25 bp, Homo sapien
cggaccagaacgcatggttggattt

SEQ ID NO: 725155 - DNA, 25 bp, Homo sapien
ggttctgcggaccagaacgcatggt

SEQ ID NO: 725156 - DNA, 25 bp, Homo sapien
ccagaacgcatggttggatttggtg

SEQ ID NO: 725157 - DNA, 25 bp, Homo sapien
ttctgcggaccagaacgcatggttg

SEQ ID NO: 725158 - DNA, 25 bp, Homo sapien
ccactggggtccttgacagcctcac

SEQ ID NO: 725159 - DNA, 25 bp, Homo sapien
cactggggtccttgacagcctcacc

SEQ ID NO: 725160 - DNA, 25 bp, Homo sapien
cccactggggtccttgacagcctca

SEQ ID NO: 725161 - DNA, 25 bp, Homo sapien
ccccactggggtccttgacagcctc

SEQ ID NO: 725162 - DNA, 25 bp, Homo sapien
tgactgacacaataggccatggctg

SEQ ID NO: 725163 - DNA, 25 bp, Homo sapien
taagcacgttaagcacagtcgcagc

SEQ ID NO: 725164 - DNA, 25 bp, Homo sapien
ccagcgtctcccataaggcttgata

SEQ ID NO: 725165 - DNA, 25 bp, Homo sapien
tgtggtgtagccacttaagtgccct

SEQ ID NO: 725166 - DNA, 25 bp, Homo sapien
gaagaaattaatcggaattctactg

SEQ ID NO: 725167 - DNA, 25 bp, Homo sapien
tgtgcttcccatttgaagaaattaa

SEQ ID NO: 725168 - DNA, 25 bp, Homo sapien
gaattctactgtcagggaaatctct

SEQ ID NO: 725169 - DNA, 25 bp, Homo sapien
taatcggaattctactgtcagggaa

SEQ ID NO: 725170 - DNA, 25 bp, Homo sapien
cagagtttctcagggccccttcaaa

SEQ ID NO: 725171 - DNA, 25 bp, Homo sapien
taatggaagctcactgtaacacgtt

SEQ ID NO: 725172 - DNA, 25 bp, Homo sapien
gtaacacgttgatcaagctctgtgg

SEQ ID NO: 725173 - DNA, 25 bp, Homo sapien
cacagatagtgtgcactgtagccag

SEQ ID NO: 725174 - DNA, 25 bp, Homo sapien
ctgaaccttgtggatgcatttttca

SEQ ID NO: 725175 - DNA, 25 bp, Homo sapien
cttgtggatgcatttttcactaaga

SEQ ID NO: 725176 - DNA, 25 bp, Homo sapien
gaaccttgtggatgcatttttcact

SEQ ID NO: 725177 - DNA, 25 bp, Homo sapien
aaccttgtggatgcatttttcacta

SEQ ID NO: 725178 - DNA, 25 bp, Homo sapien
agcaacagactttgatataagttca

SEQ ID NO: 725179 - DNA, 25 bp, Homo sapien
catttttctgggtttgagatattaa

SEQ ID NO: 725180 - DNA, 25 bp, Homo sapien
ttcttccagaattaactcatttttc

SEQ ID NO: 725181 - DNA, 25 bp, Homo sapien
gagatattaaacaagcaacacccag

SEQ ID NO: 725182 - DNA, 25 bp, Homo sapien
caaagatgtagataccatccacaat

SEQ ID NO: 725183 - DNA, 25 bp, Homo sapien
tcaaagatgtagataccatccacaa

SEQ ID NO: 725184 - DNA, 25 bp, Homo sapien
aaagatgtagataccatccacaatt

SEQ ID NO: 725185 - DNA, 25 bp, Homo sapien
gatcattgaggatcaatgaaaactt

SEQ ID NO: 725186 - DNA, 25 bp, Homo sapien
gtgatcattgaggatcaatgaaaac

SEQ ID NO: 725187 - DNA, 25 bp, Homo sapien
gctatgtgatcattgaggatcaatg

SEQ ID NO: 725188 - DNA, 25 bp, Homo sapien
cattgaggatcaatgaaaacttcat

SEQ ID NO: 725189 - DNA, 25 bp, Homo sapien
acagcagcacaaccaacacctagtg

SEQ ID NO: 725190 - DNA, 25 bp, Homo sapien
tcagacaagccattgaacacagcag

SEQ ID NO: 725191 - DNA, 25 bp, Homo sapien
tgttgatggatatgccactaaagaa

SEQ ID NO: 725192 - DNA, 25 bp, Homo sapien
taacatccgtgctttctcagacaag

SEQ ID NO: 725193 - DNA, 25 bp, Homo sapien
ccctttgctagggtaagactgatga

SEQ ID NO: 725194 - DNA, 25 bp, Homo sapien
tagctccctggaggaattgtactcc

SEQ ID NO: 725195 - DNA, 25 bp, Homo sapien
tatagaaccatgaagcacagtccca

SEQ ID NO: 725196 - DNA, 25 bp, Homo sapien
gatcacaaccctgaaaatctcttag

SEQ ID NO: 725197 - DNA, 25 bp, Homo sapien
agctgaagaggcctgccgtggtgcc

SEQ ID NO: 725198 - DNA, 25 bp, Homo sapien
gatgttctgtgccattacactttaa

SEQ ID NO: 725199 - DNA, 25 bp, Homo sapien
tacactttaatagtcctgctgaatc

SEQ ID NO: 725200 - DNA, 25 bp, Homo sapien
aatatcatacaaggctgtggctttt

SEQ ID NO: 725201 - DNA, 25 bp, Homo sapien
tactgagaatttcgtcttccaagaa

SEQ ID NO: 725202 - DNA, 25 bp, Homo sapien
ttaccctctcgctcaaaatgaagag

SEQ ID NO: 725203 - DNA, 25 bp, Homo sapien
ttttgggcaagagttggtggcacac

SEQ ID NO: 725204 - DNA, 25 bp, Homo sapien
gagttggtggcacacaaatacatac

SEQ ID NO: 725205 - DNA, 25 bp, Homo sapien
aacttcaaaaccagcctctgtctat

SEQ ID NO: 725206 - DNA, 25 bp, Homo sapien
caaaaccagcctctgtctattaacc

SEQ ID NO: 725207 - DNA, 25 bp, Homo sapien
ttcaaaaccagcctctgtctattaa

SEQ ID NO: 725208 - DNA, 25 bp, Homo sapien
aaaccagcctctgtctattaaccac

SEQ ID NO: 725209 - DNA, 25 bp, Homo sapien
gctgctctgtgtaaacacatcggta

SEQ ID NO: 725210 - DNA, 25 bp, Homo sapien
cacatcggtagtatgagattctcat

SEQ ID NO: 725211 - DNA, 25 bp, Homo sapien
gattctcattgcttgcctcctctgc

SEQ ID NO: 725212 - DNA, 25 bp, Homo sapien
gaaaattttgtgatactgtacacct

SEQ ID NO: 725213 - DNA, 25 bp, Homo sapien
gtcgactacaggcaacctgtttaac

SEQ ID NO: 725214 - DNA, 25 bp, Homo sapien
ttctgtctgggtaaattagggttgc

SEQ ID NO: 725215 - DNA, 25 bp, Homo sapien
taaattagggttgcgtacgcagatc

SEQ ID NO: 725216 - DNA, 25 bp, Homo sapien
aatttctgcctgaaatttgtcgact

SEQ ID NO: 725217 - DNA, 25 bp, Homo sapien
aacttgtgaggaaataatttgaagc

SEQ ID NO: 725218 - DNA, 25 bp, Homo sapien
tggacttgggataagttcaaacttg

SEQ ID NO: 725219 - DNA, 25 bp, Homo sapien
ttgggataagttcaaacttgtgagg

SEQ ID NO: 725220 - DNA, 25 bp, Homo sapien
aaacttgtgaggaaataatttgaag

SEQ ID NO: 725221 - DNA, 25 bp, Homo sapien
cattatctgatgtattgatttgcag

SEQ ID NO: 725222 - DNA, 25 bp, Homo sapien
atgtattgatttgcagagggtgcat

SEQ ID NO: 725223 - DNA, 25 bp, Homo sapien
tctgatgtattgatttgcagagggt

SEQ ID NO: 725224 - DNA, 25 bp, Homo sapien
tgatgtattgatttgcagagggtgc

SEQ ID NO: 725225 - DNA, 25 bp, Homo sapien
catttttgctcttgccctactacct

SEQ ID NO: 725226 - DNA, 25 bp, Homo sapien
actaccttcacactcatgaatgtgg

SEQ ID NO: 725227 - DNA, 25 bp, Homo sapien
acccatttttgctcttgccctacta

SEQ ID NO: 725228 - DNA, 25 bp, Homo sapien
atgaatgtggcagatgcaaggatgc

SEQ ID NO: 725229 - DNA, 25 bp, Homo sapien
aaaaactaccactggagcagccgca

SEQ ID NO: 725230 - DNA, 25 bp, Homo sapien
tcagcaggtaaaaaactaccactgg

SEQ ID NO: 725231 - DNA, 25 bp, Homo sapien
agccagctctgcattgacagaatat

SEQ ID NO: 725232 - DNA, 25 bp, Homo sapien
cattgacagaatatcctacccttat

SEQ ID NO: 725233 - DNA, 25 bp, Homo sapien
gaaattcatgcaacttctccgagtc

SEQ ID NO: 725234 - DNA, 25 bp, Homo sapien
cattaattttgctatcttacatcca

SEQ ID NO: 725235 - DNA, 25 bp, Homo sapien
ttaggaaattcatgcaacttctccg

SEQ ID NO: 725236 - DNA, 25 bp, Homo sapien
tccatgcacattaagcagaattaac

SEQ ID NO: 725237 - DNA, 25 bp, Homo sapien
tgggttaggcctcaatctcagaaac

SEQ ID NO: 725238 - DNA, 25 bp, Homo sapien
aggtgggttaggcctcaatctcaga

SEQ ID NO: 725239 - DNA, 25 bp, Homo sapien
cctgtgagggatggatttgtggagg

SEQ ID NO: 725240 - DNA, 25 bp, Homo sapien
tgtggaggtgggttaggcctcaatc

SEQ ID NO: 725241 - DNA, 25 bp, Homo sapien
tcactcattcaatagaacttttttg

SEQ ID NO: 725242 - DNA, 25 bp, Homo sapien
cattcaatagaacttttttgccatc

SEQ ID NO: 725243 - DNA, 25 bp, Homo sapien
ttcaatagaacttttttgccatctc

SEQ ID NO: 725244 - DNA, 25 bp, Homo sapien
ctcattcaatagaacttttttgcca

SEQ ID NO: 725245 - DNA, 25 bp, Homo sapien
gcagcggcaaatgtctgtagagctg

SEQ ID NO: 725246 - DNA, 25 bp, Homo sapien
tccccaaatttcacgtcataaccaa

SEQ ID NO: 725247 - DNA, 25 bp, Homo sapien
tatgctttttcccttgtacaggcta

SEQ ID NO: 725248 - DNA, 25 bp, Homo sapien
ccttgtacaggctaccacccgaggg

SEQ ID NO: 725249 - DNA, 25 bp, Homo sapien
ctagaagtgcaaacgtaagtgatgc

SEQ ID NO: 725250 - DNA, 25 bp, Homo sapien
gaggagcatcacctttataagcaaa

SEQ ID NO: 725251 - DNA, 25 bp, Homo sapien
ggtctgttgccagaggagcatcacc

SEQ ID NO: 725252 - DNA, 25 bp, Homo sapien
tgggtctgttgccagaggagcatca

SEQ ID NO: 725253 - DNA, 25 bp, Homo sapien
gagcatcacctttataagcaaagag

SEQ ID NO: 725254 - DNA, 25 bp, Homo sapien
tctgtctctacaaaagaattaaaaa

SEQ ID NO: 725255 - DNA, 25 bp, Homo sapien
actctgtctctacaaaagaattaaa

SEQ ID NO: 725256 - DNA, 25 bp, Homo sapien
tctaggcaacatagtaagactctgt

SEQ ID NO: 725257 - DNA, 25 bp, Homo sapien
cagtctaggcaacatagtaagactc

SEQ ID NO: 725258 - DNA, 25 bp, Homo sapien
taagtagtagctggagtgtgaaacc

SEQ ID NO: 725259 - DNA, 25 bp, Homo sapien
gagataacggcagcatgaagttcag

SEQ ID NO: 725260 - DNA, 25 bp, Homo sapien
cgatgagtaacttaggacttggtgc

SEQ ID NO: 725261 - DNA, 25 bp, Homo sapien
tcagagaggctgatacattggaagc

SEQ ID NO: 725262 - DNA, 25 bp, Homo sapien
aaagagcatgtctacattgactttc

SEQ ID NO: 725263 - DNA, 25 bp, Homo sapien
gagcatgtctacattgactttccag

SEQ ID NO: 725264 - DNA, 25 bp, Homo sapien
aaaaagagcatgtctacattgactt

SEQ ID NO: 725265 - DNA, 25 bp, Homo sapien
gtctacattgactttccaggaggaa

SEQ ID NO: 725266 - DNA, 25 bp, Homo sapien
tgtgaatgcaatcatctatcagaag

SEQ ID NO: 725267 - DNA, 25 bp, Homo sapien
atgtgaatgcaatcatctatcagaa

SEQ ID NO: 725268 - DNA, 25 bp, Homo sapien
gattaatacaggtactccagtccca

SEQ ID NO: 725269 - DNA, 25 bp, Homo sapien
tgagtgagccccagttcaacagagt

SEQ ID NO: 725270 - DNA, 25 bp, Homo sapien
gctcataaatgtgaagctcaagagg

SEQ ID NO: 725271 - DNA, 25 bp, Homo sapien
ctgtgagttcgagaaaggaaggctt

SEQ ID NO: 725272 - DNA, 25 bp, Homo sapien
ctgactgctgtcattcgctgaacaa

SEQ ID NO: 725273 - DNA, 25 bp, Homo sapien
tgctgtcattcgctgaacaatgata

SEQ ID NO: 725274 - DNA, 25 bp, Homo sapien
taatatctacacctttaataacctg

SEQ ID NO: 725275 - DNA, 25 bp, Homo sapien
tgtcattcgctgaacaatgatacat

SEQ ID NO: 725276 - DNA, 25 bp, Homo sapien
tcatccacttcattggttctgctga

SEQ ID NO: 725277 - DNA, 25 bp, Homo sapien
atgtgaagtatggctacaatgttta

SEQ ID NO: 725278 - DNA, 25 bp, Homo sapien
atccacttcattggttctgctgaga

SEQ ID NO: 725279 - DNA, 25 bp, Homo sapien
tgtgaagtatggctacaatgtttac

SEQ ID NO: 725280 - DNA, 25 bp, Homo sapien
ggcagtaattagcagcaggtttttc

SEQ ID NO: 725281 - DNA, 25 bp, Homo sapien
cagtaattagcagcaggtttttcca

SEQ ID NO: 725282 - DNA, 25 bp, Homo sapien
atggcagtaattagcagcaggtttt

SEQ ID NO: 725283 - DNA, 25 bp, Homo sapien
tcaatggcagtaattagcagcaggt

SEQ ID NO: 725284 - DNA, 25 bp, Homo sapien
agaacttctcgtgtttctcctccac

SEQ ID NO: 725285 - DNA, 25 bp, Homo sapien
ctgagaacttctcgtgtttctcctc

SEQ ID NO: 725286 - DNA, 25 bp, Homo sapien
gaacttctcgtgtttctcctccaca

SEQ ID NO: 725287 - DNA, 25 bp, Homo sapien
gagaacttctcgtgtttctcctcca

SEQ ID NO: 725288 - DNA, 25 bp, Homo sapien
taaatctttcactcgcttgctgctg

SEQ ID NO: 725289 - DNA, 25 bp, Homo sapien
tgctgtactccttcgtcagcttcat

SEQ ID NO: 725290 - DNA, 25 bp, Homo sapien
ttgagtaggttctgacaatgccggg

SEQ ID NO: 725291 - DNA, 25 bp, Homo sapien
tctgctcgaattaggccacctaggg

SEQ ID NO: 725292 - DNA, 25 bp, Homo sapien
tcagggatttgccactctagcggca

SEQ ID NO: 725293 - DNA, 25 bp, Homo sapien
cacatgcactatggatctgtgctcc

SEQ ID NO: 725294 - DNA, 25 bp, Homo sapien
tagcggcattctggtgttactggga

SEQ ID NO: 725295 - DNA, 25 bp, Homo sapien
tgctcggcattaaactctgtaggga

SEQ ID NO: 725296 - DNA, 25 bp, Homo sapien
tacttgacagtttggtctagtttta

SEQ ID NO: 725297 - DNA, 25 bp, Homo sapien
tgacagtttggtctagttttaaagc

SEQ ID NO: 725298 - DNA, 25 bp, Homo sapien
atacttgacagtttggtctagtttt

SEQ ID NO: 725299 - DNA, 25 bp, Homo sapien
cataattgtctgtagtaactagtcg

SEQ ID NO: 725300 - DNA, 25 bp, Homo sapien
taactagtcggatggacagtgcacc

SEQ ID NO: 725301 - DNA, 25 bp, Homo sapien
gcattccataactgtaagttaccac

SEQ ID NO: 725302 - DNA, 25 bp, Homo sapien
gttaccactatcattatcataattg

SEQ ID NO: 725303 - DNA, 25 bp, Homo sapien
accgtcgtttggttgttgtggtgct

SEQ ID NO: 725304 - DNA, 25 bp, Homo sapien
gtggcatctttccaattgccagaaa

SEQ ID NO: 725305 - DNA, 25 bp, Homo sapien
caattgccagaaatcacatgattct

SEQ ID NO: 725306 - DNA, 25 bp, Homo sapien
ctttccaattgccagaaatcacatg

SEQ ID NO: 725307 - DNA, 25 bp, Homo sapien
catctttccaattgccagaaatcac

SEQ ID NO: 725308 - DNA, 25 bp, Homo sapien
gccttctgctgggtatcaagcccat

SEQ ID NO: 725309 - DNA, 25 bp, Homo sapien
gcatttgccttctgctgggtatcaa

SEQ ID NO: 725310 - DNA, 25 bp, Homo sapien
tttgccttctgctgggtatcaagcc

SEQ ID NO: 725311 - DNA, 25 bp, Homo sapien
ttgccttctgctgggtatcaagccc

SEQ ID NO: 725312 - DNA, 25 bp, Homo sapien
aggtttcaccaagagatgctcccag

SEQ ID NO: 725313 - DNA, 25 bp, Homo sapien
gagatgctcccagtatgagactgga

SEQ ID NO: 725314 - DNA, 25 bp, Homo sapien
ttcaccaagagatgctcccagtatg

SEQ ID NO: 725315 - DNA, 25 bp, Homo sapien
ccaagagatgctcccagtatgagac

SEQ ID NO: 725316 - DNA, 25 bp, Homo sapien
agctaacagagccatagtattctgt

SEQ ID NO: 725317 - DNA, 25 bp, Homo sapien
ttttacctctgctatactgacttcc

SEQ ID NO: 725318 - DNA, 25 bp, Homo sapien
caaatacagctaacagagccatagt

SEQ ID NO: 725319 - DNA, 25 bp, Homo sapien
tcaaggtcgcagcacagacaaatac

SEQ ID NO: 725320 - DNA, 25 bp, Homo sapien
caaatccattgacttgggcctttac

SEQ ID NO: 725321 - DNA, 25 bp, Homo sapien
gctgccatggcatttgccacgggta

SEQ ID NO: 725322 - DNA, 25 bp, Homo sapien
tgacttgggcctttacttccaccat

SEQ ID NO: 725323 - DNA, 25 bp, Homo sapien
atccattgacttgggcctttacttc

SEQ ID NO: 725324 - DNA, 25 bp, Homo sapien
ggtggcgtccactatgtactcagta

SEQ ID NO: 725325 - DNA, 25 bp, Homo sapien
tccactatgtactcagtaccagcat

SEQ ID NO: 725326 - DNA, 25 bp, Homo sapien
gaaactggtggcgtccactatgtac

SEQ ID NO: 725327 - DNA, 25 bp, Homo sapien
gaagaaactggtggcgtccactatg

SEQ ID NO: 725328 - DNA, 25 bp, Homo sapien
ctctcctgcaggtgagcccgagcct

SEQ ID NO: 725329 - DNA, 25 bp, Homo sapien
tgacccttttggctctctcctgcag

SEQ ID NO: 725330 - DNA, 25 bp, Homo sapien
tcctgcaggtgagcccgagccttct

SEQ ID NO: 725331 - DNA, 25 bp, Homo sapien
atgacccttttggctctctcctgca

SEQ ID NO: 725332 - DNA, 25 bp, Homo sapien
ttctcatggttcataaccacaacga

SEQ ID NO: 725333 - DNA, 25 bp, Homo sapien
ggctcttatcctacttctcatggtt

SEQ ID NO: 725334 - DNA, 25 bp, Homo sapien
ctgacaacctcgaggctcttatcct

SEQ ID NO: 725335 - DNA, 25 bp, Homo sapien
ctcatggttcataaccacaacgaac

SEQ ID NO: 725336 - DNA, 25 bp, Homo sapien
ctggatggcagtgacggcaaggact

SEQ ID NO: 725337 - DNA, 25 bp, Homo sapien
atggcagtgacggcaaggactgtgg

SEQ ID NO: 725338 - DNA, 25 bp, Homo sapien
tctggatggcagtgacggcaaggac

SEQ ID NO: 725339 - DNA, 25 bp, Homo sapien
ggatggcagtgacggcaaggactgt

SEQ ID NO: 725340 - DNA, 25 bp, Homo sapien
gaccttgcctacacctttggtagct

SEQ ID NO: 725341 - DNA, 25 bp, Homo sapien
tacacctttggtagctccagtagat

SEQ ID NO: 725342 - DNA, 25 bp, Homo sapien
cacctttggtagctccagtagatgc

SEQ ID NO: 725343 - DNA, 25 bp, Homo sapien
ttgcctacacctttggtagctccag

SEQ ID NO: 725344 - DNA, 25 bp, Homo sapien
agccctctgatgcctgcttcatcac

SEQ ID NO: 725345 - DNA, 25 bp, Homo sapien
cttgagggagccctctgatgcctgc

SEQ ID NO: 725346 - DNA, 25 bp, Homo sapien
ggagccctctgatgcctgcttcatc

SEQ ID NO: 725347 - DNA, 25 bp, Homo sapien
tgagggagccctctgatgcctgctt

SEQ ID NO: 725348 - DNA, 25 bp, Homo sapien
taaagtcgggggagatgacttggtg

SEQ ID NO: 725349 - DNA, 25 bp, Homo sapien
aagtcgggggagatgacttggtgct

SEQ ID NO: 725350 - DNA, 25 bp, Homo sapien
tcgggggagatgacttggtgctcag

SEQ ID NO: 725351 - DNA, 25 bp, Homo sapien
agtgagtgtcgctgttaaagtcggg

SEQ ID NO: 725352 - DNA, 25 bp, Homo sapien
ttcttggaggccatgtgggtcatga

SEQ ID NO: 725353 - DNA, 25 bp, Homo sapien
aggccatgtgggtcatgaggttcac

SEQ ID NO: 725354 - DNA, 25 bp, Homo sapien
atgtgggtcatgaggttcaccaccc

SEQ ID NO: 725355 - DNA, 25 bp, Homo sapien
ccatgtgggtcatgaggttcaccac

SEQ ID NO: 725356 - DNA, 25 bp, Homo sapien
ccttttaatttcaggatctccatga

SEQ ID NO: 725357 - DNA, 25 bp, Homo sapien
caggatctccatgatgtgctcattt

SEQ ID NO: 725358 - DNA, 25 bp, Homo sapien
catcaaccccttttaatttcaggat

SEQ ID NO: 725359 - DNA, 25 bp, Homo sapien
taatttcaggatctccatgatgtgc

SEQ ID NO: 725360 - DNA, 25 bp, Homo sapien
cacagtgaaggacatggttgaaggc

SEQ ID NO: 725361 - DNA, 25 bp, Homo sapien
tttaccatcctcacaagttcttcag

SEQ ID NO: 725362 - DNA, 25 bp, Homo sapien
gaaagaatatggtttactatgtctc

SEQ ID NO: 725363 - DNA, 25 bp, Homo sapien
tatggtttactatgtctccatgatg

SEQ ID NO: 725364 - DNA, 25 bp, Homo sapien
aacagtgtctagcaactcaagttga

SEQ ID NO: 725365 - DNA, 25 bp, Homo sapien
gaacatagttgtatgtgctagaggt

SEQ ID NO: 725366 - DNA, 25 bp, Homo sapien
tttttggaagcatgttctgaatcaa

SEQ ID NO: 725367 - DNA, 25 bp, Homo sapien
aaattgccacaagagtatctgtgtt

SEQ ID NO: 725368 - DNA, 25 bp, Homo sapien
cagcaaagtgagaggactccaagat

SEQ ID NO: 725369 - DNA, 25 bp, Homo sapien
gaaagctgagactgggtattatgtg

SEQ ID NO: 725370 - DNA, 25 bp, Homo sapien
gaatttcactgaagcatacgcatgc

SEQ ID NO: 725371 - DNA, 25 bp, Homo sapien
tctgtgtctttacctccatgggtta

SEQ ID NO: 725372 - DNA, 25 bp, Homo sapien
tactttatccactagtatttgagga

SEQ ID NO: 725373 - DNA, 25 bp, Homo sapien
cttaaccagtgtgagacagcaagat

SEQ ID NO: 725374 - DNA, 25 bp, Homo sapien
tatttgaggagctccatagccagag

SEQ ID NO: 725375 - DNA, 25 bp, Homo sapien
catagccagagtgaatcttcttaac

SEQ ID NO: 725376 - DNA, 25 bp, Homo sapien
cctgctctttctggtgttttacaca

SEQ ID NO: 725377 - DNA, 25 bp, Homo sapien
tgctctttctggtgttttacacaga

SEQ ID NO: 725378 - DNA, 25 bp, Homo sapien
tctttctggtgttttacacagaatc

SEQ ID NO: 725379 - DNA, 25 bp, Homo sapien
tcctgctctttctggtgttttacac

SEQ ID NO: 725380 - DNA, 25 bp, Homo sapien
aaaatcttgctatttactgtgtcat

SEQ ID NO: 725381 - DNA, 25 bp, Homo sapien
cttatcagtaaggagggccatagaa

SEQ ID NO: 725382 - DNA, 25 bp, Homo sapien
agtcccttggcagtgttaaaatctt

SEQ ID NO: 725383 - DNA, 25 bp, Homo sapien
ggacagtcttgtgccattaacctca

SEQ ID NO: 725384 - DNA, 25 bp, Homo sapien
ccccagtttgtcattgaagccttta

SEQ ID NO: 725385 - DNA, 25 bp, Homo sapien
cattgaagcctttatattccaagga

SEQ ID NO: 725386 - DNA, 25 bp, Homo sapien
ctttccataccccagtttgtcattg

SEQ ID NO: 725387 - DNA, 25 bp, Homo sapien
tgaagcctttatattccaaggacat

SEQ ID NO: 725388 - DNA, 25 bp, Homo sapien
cagctgtacatatttgacccctatt

SEQ ID NO: 725389 - DNA, 25 bp, Homo sapien
aaagcttctgaagcccattttgata

SEQ ID NO: 725390 - DNA, 25 bp, Homo sapien
cagagctatctgatacatgtggagc

SEQ ID NO: 725391 - DNA, 25 bp, Homo sapien
ttgacccctattttgcacagttgca

SEQ ID NO: 725392 - DNA, 25 bp, Homo sapien
acagattgtgttgtatgatagtgcc

SEQ ID NO: 725393 - DNA, 25 bp, Homo sapien
tgaagaacacctagagagaaatggc

SEQ ID NO: 725394 - DNA, 25 bp, Homo sapien
ttgtatgatagtgcctgaagaacac

SEQ ID NO: 725395 - DNA, 25 bp, Homo sapien
gaggaccaaacagattgtgttgtat

SEQ ID NO: 725396 - DNA, 25 bp, Homo sapien
agccttcttagaggttgtccttttg

SEQ ID NO: 725397 - DNA, 25 bp, Homo sapien
tagcataagccttcttagaggttgt

SEQ ID NO: 725398 - DNA, 25 bp, Homo sapien
cataagccttcttagaggttgtcct

SEQ ID NO: 725399 - DNA, 25 bp, Homo sapien
cttcttagaggttgtccttttgtca

SEQ ID NO: 725400 - DNA, 25 bp, Homo sapien
gggctgagaagtgtttactgtaacc

SEQ ID NO: 725401 - DNA, 25 bp, Homo sapien
tactgtaaccaatgtgcaagctaca

SEQ ID NO: 725402 - DNA, 25 bp, Homo sapien
tgtgcaagctacaaagcggtaaggt

SEQ ID NO: 725403 - DNA, 25 bp, Homo sapien
acaaagcggtaaggttctttgacag

SEQ ID NO: 725404 - DNA, 25 bp, Homo sapien
tttatcatccattagatgcttcgcc

SEQ ID NO: 725405 - DNA, 25 bp, Homo sapien
tatcatccattagatgcttcgccat

SEQ ID NO: 725406 - DNA, 25 bp, Homo sapien
actttatcatccattagatgcttcg

SEQ ID NO: 725407 - DNA, 25 bp, Homo sapien
ttatcatccattagatgcttcgcca

SEQ ID NO: 725408 - DNA, 25 bp, Homo sapien
ttcactgggttgatcctcacaggtc

SEQ ID NO: 725409 - DNA, 25 bp, Homo sapien
tgcttgatcccaacgatgtaccttg

SEQ ID NO: 725410 - DNA, 25 bp, Homo sapien
cttggcccagtcgtccctcttgttt

SEQ ID NO: 725411 - DNA, 25 bp, Homo sapien
ggtcacttcacatggcaccttggcc

SEQ ID NO: 725412 - DNA, 25 bp, Homo sapien
gagatatctgctccagtaaggaaga

SEQ ID NO: 725413 - DNA, 25 bp, Homo sapien
cagtaaggaagagatgctgcatgca

SEQ ID NO: 725414 - DNA, 25 bp, Homo sapien
gctgcatgcaggcatattctttcag

SEQ ID NO: 725415 - DNA, 25 bp, Homo sapien
tgcatgcaggcatattctttcagaa

SEQ ID NO: 725416 - DNA, 25 bp, Homo sapien
cagggacatgtgtacttatcagaaa

SEQ ID NO: 725417 - DNA, 25 bp, Homo sapien
gggacatgtgtacttatcagaaaaa

SEQ ID NO: 725418 - DNA, 25 bp, Homo sapien
tgcagggacatgtgtacttatcaga

SEQ ID NO: 725419 - DNA, 25 bp, Homo sapien
agggggcagcgggatctgagaccac

SEQ ID NO: 725420 - DNA, 25 bp, Homo sapien
aagggggcagcgggatctgagacca

SEQ ID NO: 725421 - DNA, 25 bp, Homo sapien
gaagggggcagcgggatctgagacc

SEQ ID NO: 725422 - DNA, 25 bp, Homo sapien
gaccattgacatgcataacattctg

SEQ ID NO: 725423 - DNA, 25 bp, Homo sapien
tcacaagttcaagttacccatttga

SEQ ID NO: 725424 - DNA, 25 bp, Homo sapien
tacccatttgaacctgaccattgac

SEQ ID NO: 725425 - DNA, 25 bp, Homo sapien
tgctctccacggctttgcaaattgg

SEQ ID NO: 725426 - DNA, 25 bp, Homo sapien
agataagggagagagtaagtgtgga

SEQ ID NO: 725427 - DNA, 25 bp, Homo sapien
ggagagagtaagtgtggagaacagt

SEQ ID NO: 725428 - DNA, 25 bp, Homo sapien
ataagggagagagtaagtgtggaga

SEQ ID NO: 725429 - DNA, 25 bp, Homo sapien
tcggagataagggagagagtaagtg

SEQ ID NO: 725430 - DNA, 25 bp, Homo sapien
ctctatctataccaagggcttgctg

SEQ ID NO: 725431 - DNA, 25 bp, Homo sapien
tttcatccatggcttctctatctat

SEQ ID NO: 725432 - DNA, 25 bp, Homo sapien
ggcttctctatctataccaagggct

SEQ ID NO: 725433 - DNA, 25 bp, Homo sapien
catggcttctctatctataccaagg

SEQ ID NO: 725434 - DNA, 25 bp, Homo sapien
ccagtacaggatgatagtagagagg

SEQ ID NO: 725435 - DNA, 25 bp, Homo sapien
tgggggcctatccagtacaggatga

SEQ ID NO: 725436 - DNA, 25 bp, Homo sapien
tatccagtacaggatgatagtagag

SEQ ID NO: 725437 - DNA, 25 bp, Homo sapien
caggatgatagtagagaggaatgct

SEQ ID NO: 725438 - DNA, 25 bp, Homo sapien
tttgctctagcatgtcttcctcaag

SEQ ID NO: 725439 - DNA, 25 bp, Homo sapien
gttgtagtttttgctctagcatgtc

SEQ ID NO: 725440 - DNA, 25 bp, Homo sapien
gctctagcatgtcttcctcaagcat

SEQ ID NO: 725441 - DNA, 25 bp, Homo sapien
tagtttttgctctagcatgtcttcc

SEQ ID NO: 725442 - DNA, 25 bp, Homo sapien
ccccagggcaacaccttctttatgt

SEQ ID NO: 725443 - DNA, 25 bp, Homo sapien
agggcaacaccttctttatgtgggt

SEQ ID NO: 725444 - DNA, 25 bp, Homo sapien
gtaatttctctcagccagtccccag

SEQ ID NO: 725445 - DNA, 25 bp, Homo sapien
gcaacaccttctttatgtgggtaaa

SEQ ID NO: 725446 - DNA, 25 bp, Homo sapien
ttttccatctgaatctaacatcaaa

SEQ ID NO: 725447 - DNA, 25 bp, Homo sapien
gacgtaagtaccactgtagcagtcc

SEQ ID NO: 725448 - DNA, 25 bp, Homo sapien
cactgtagcagtccgtttcttttga

SEQ ID NO: 725449 - DNA, 25 bp, Homo sapien
ctggtgacgtaagtaccactgtagc

SEQ ID NO: 725450 - DNA, 25 bp, Homo sapien
taagtaccactgtagcagtccgttt

SEQ ID NO: 725451 - DNA, 25 bp, Homo sapien
aacacaggttgggtcattactatga

SEQ ID NO: 725452 - DNA, 25 bp, Homo sapien
aatatcggtgtaaagtgagaacaac

SEQ ID NO: 725453 - DNA, 25 bp, Homo sapien
tctatgtccacatgatgccatcaaa

SEQ ID NO: 725454 - DNA, 25 bp, Homo sapien
ttaggagcaagagaaaatatcggtg

SEQ ID NO: 725455 - DNA, 25 bp, Homo sapien
gcagtgctaccattcttctgatcag

SEQ ID NO: 725456 - DNA, 25 bp, Homo sapien
gagcgatgcacttatccccttccag

SEQ ID NO: 725457 - DNA, 25 bp, Homo sapien
agtacctccatgctcccggtttgca

SEQ ID NO: 725458 - DNA, 25 bp, Homo sapien
gacttcagtgcacccatccatctgg

SEQ ID NO: 725459 - DNA, 25 bp, Homo sapien
tcccgtctcagtaagcttcactttg

SEQ ID NO: 725460 - DNA, 25 bp, Homo sapien
caatacattgtagtcaagtttccat

SEQ ID NO: 725461 - DNA, 25 bp, Homo sapien
cttcactttggcctcgacagtcaat

SEQ ID NO: 725462 - DNA, 25 bp, Homo sapien
attcttggtaacggtttgacaacat

SEQ ID NO: 725463 - DNA, 25 bp, Homo sapien
cagtaaattgtctcaatatcttctg

SEQ ID NO: 725464 - DNA, 25 bp, Homo sapien
tcagtaaattgtctcaatatcttct

SEQ ID NO: 725465 - DNA, 25 bp, Homo sapien
aacacgcagtttatcccctgagtcc

SEQ ID NO: 725466 - DNA, 25 bp, Homo sapien
gaacacaacacgcagtttatcccct

SEQ ID NO: 725467 - DNA, 25 bp, Homo sapien
ccctgagtcctccttggtcatggag

SEQ ID NO: 725468 - DNA, 25 bp, Homo sapien
ttacacaaggaacacaacacgcagt

SEQ ID NO: 725469 - DNA, 25 bp, Homo sapien
gacatactcttgacgttaaatcccc

SEQ ID NO: 725470 - DNA, 25 bp, Homo sapien
taaatcccctattgtagccagtaag

SEQ ID NO: 725471 - DNA, 25 bp, Homo sapien
atggtgaccatcttcaacagacata

SEQ ID NO: 725472 - DNA, 25 bp, Homo sapien
aataatctcccgagcagtgaagcca

SEQ ID NO: 725473 - DNA, 25 bp, Homo sapien
aactcttcagaagcttatatgtaag

SEQ ID NO: 725474 - DNA, 25 bp, Homo sapien
ttagtgccctgttgtatgactgtcc

SEQ ID NO: 725475 - DNA, 25 bp, Homo sapien
taagacagaaaggtcctaagaaagc

SEQ ID NO: 725476 - DNA, 25 bp, Homo sapien
gactgtcctctatgaaactcttcag

SEQ ID NO: 725477 - DNA, 25 bp, Homo sapien
aacacaatcaagttgtcaacaggca

SEQ ID NO: 725478 - DNA, 25 bp, Homo sapien
acacaatcaagttgtcaacaggcat

SEQ ID NO: 725479 - DNA, 25 bp, Homo sapien
aaacacaatcaagttgtcaacaggc

SEQ ID NO: 725480 - DNA, 25 bp, Homo sapien
aagaaaacacaatcaagttgtcaac

SEQ ID NO: 725481 - DNA, 25 bp, Homo sapien
aagaaataggacaacaggcttaggg

SEQ ID NO: 725482 - DNA, 25 bp, Homo sapien
atcaacagccatgctaagaaatagg

SEQ ID NO: 725483 - DNA, 25 bp, Homo sapien
gacaacaggcttaggggcaaagaca

SEQ ID NO: 725484 - DNA, 25 bp, Homo sapien
catgctaagaaataggacaacaggc

SEQ ID NO: 725485 - DNA, 25 bp, Homo sapien
gggatccatgcaccttatcctagct

SEQ ID NO: 725486 - DNA, 25 bp, Homo sapien
cctagctcccctgatcagaactaga

SEQ ID NO: 725487 - DNA, 25 bp, Homo sapien
actagaatttagaacccaggtcatc

SEQ ID NO: 725488 - DNA, 25 bp, Homo sapien
ggctcaggggatccatgcaccttat

SEQ ID NO: 725489 - DNA, 25 bp, Homo sapien
gggcaatagggtaggattatcttct

SEQ ID NO: 725490 - DNA, 25 bp, Homo sapien
cttgacttggaacagtgccgtgtcc

SEQ ID NO: 725491 - DNA, 25 bp, Homo sapien
aacagcttgtccagtgtttcctgag

SEQ ID NO: 725492 - DNA, 25 bp, Homo sapien
ggattcccacaccaacatgggcaat

SEQ ID NO: 725493 - DNA, 25 bp, Homo sapien
gtttcttctactgaaacttgttcca

SEQ ID NO: 725494 - DNA, 25 bp, Homo sapien
ggttaggtgaagtttcttctactga

SEQ ID NO: 725495 - DNA, 25 bp, Homo sapien
gtgaagtttcttctactgaaacttg

SEQ ID NO: 725496 - DNA, 25 bp, Homo sapien
tttcttctactgaaacttgttccat

SEQ ID NO: 725497 - DNA, 25 bp, Homo sapien
taacagttgtgctacagtgtctccc

SEQ ID NO: 725498 - DNA, 25 bp, Homo sapien
gacgacatcacaagacagagtaaaa

SEQ ID NO: 725499 - DNA, 25 bp, Homo sapien
caatgatgacaccactagtcagacg

SEQ ID NO: 725500 - DNA, 25 bp, Homo sapien
taatttgaaccacgcacagtctaag

SEQ ID NO: 725501 - DNA, 25 bp, Homo sapien
actaggtggatcatcagtttctgta

SEQ ID NO: 725502 - DNA, 25 bp, Homo sapien
aactaggtggatcatcagtttctgt

SEQ ID NO: 725503 - DNA, 25 bp, Homo sapien
cgtaaaattgctatctgaagttcag

SEQ ID NO: 725504 - DNA, 25 bp, Homo sapien
atcgtaaaattgctatctgaagttc

SEQ ID NO: 725505 - DNA, 25 bp, Homo sapien
gtaaaattgctatctgaagttcagt

SEQ ID NO: 725506 - DNA, 25 bp, Homo sapien
ggaatcgtaaaattgctatctgaag

SEQ ID NO: 725507 - DNA, 25 bp, Homo sapien
cagatacctcgttgtaaaatactag

SEQ ID NO: 725508 - DNA, 25 bp, Homo sapien
tagaacatctagtttccgcctcaac

SEQ ID NO: 725509 - DNA, 25 bp, Homo sapien
taaatggaaacgcatattcagatac

SEQ ID NO: 725510 - DNA, 25 bp, Homo sapien
tccacactgaaagtctagcagctaa

SEQ ID NO: 725511 - DNA, 25 bp, Homo sapien
tgtttctgggagagctctgatttgc

SEQ ID NO: 725512 - DNA, 25 bp, Homo sapien
ctgggagagctctgatttgctgttt

SEQ ID NO: 725513 - DNA, 25 bp, Homo sapien
gggagagctctgatttgctgtttct

SEQ ID NO: 725514 - DNA, 25 bp, Homo sapien
tagcagctgcgtttctgtttctggg

SEQ ID NO: 725515 - DNA, 25 bp, Homo sapien
gtcactgaattctgaactgatggca

SEQ ID NO: 725516 - DNA, 25 bp, Homo sapien
tgtcactgaattctgaactgatggc

SEQ ID NO: 725517 - DNA, 25 bp, Homo sapien
gacactgttccgctgtgtagactat

SEQ ID NO: 725518 - DNA, 25 bp, Homo sapien
tgctgctactacactgtatgggtga

SEQ ID NO: 725519 - DNA, 25 bp, Homo sapien
tgggaattagagaataagggaacag

SEQ ID NO: 725520 - DNA, 25 bp, Homo sapien
tagactattgcttgctaaacaggtt

SEQ ID NO: 725521 - DNA, 25 bp, Homo sapien
gaggctgcatgatgcataaacagta

SEQ ID NO: 725522 - DNA, 25 bp, Homo sapien
ggctgcatgatgcataaacagtatg

SEQ ID NO: 725523 - DNA, 25 bp, Homo sapien
aggctgcatgatgcataaacagtat

SEQ ID NO: 725524 - DNA, 25 bp, Homo sapien
gctgcatgatgcataaacagtatgt

SEQ ID NO: 725525 - DNA, 25 bp, Homo sapien
tcagaggcagattgggccttccggt

SEQ ID NO: 725526 - DNA, 25 bp, Homo sapien
gatcacagggatcagcttgactctt

SEQ ID NO: 725527 - DNA, 25 bp, Homo sapien
gctctcacgtgatgaagctctggtt

SEQ ID NO: 725528 - DNA, 25 bp, Homo sapien
ggaggtatgatagcatcagctctca

SEQ ID NO: 725529 - DNA, 25 bp, Homo sapien
gcagaagaggtttgttacaggccat

SEQ ID NO: 725530 - DNA, 25 bp, Homo sapien
cttttctattgctgtgaatttccaa

SEQ ID NO: 725531 - DNA, 25 bp, Homo sapien
attgctgtgaatttccaactgcgaa

SEQ ID NO: 725532 - DNA, 25 bp, Homo sapien
ctgtgaatttccaactgcgaaacca

SEQ ID NO: 725533 - DNA, 25 bp, Homo sapien
tgctgtgaatttccaactgcgaaac

SEQ ID NO: 725534 - DNA, 25 bp, Homo sapien
ctgcgaatatagcaatccagagcat

SEQ ID NO: 725535 - DNA, 25 bp, Homo sapien
taagaacctgcgttagttggagaac

SEQ ID NO: 725536 - DNA, 25 bp, Homo sapien
gaacctgcgttagttggagaacagc

SEQ ID NO: 725537 - DNA, 25 bp, Homo sapien
aacctgcgttagttggagaacagca

SEQ ID NO: 725538 - DNA, 25 bp, Homo sapien
gtgataagaacctgcgttagttgga

SEQ ID NO: 725539 - DNA, 25 bp, Homo sapien
agcactgtgtacgtgtaggatgctt

SEQ ID NO: 725540 - DNA, 25 bp, Homo sapien
atagcactgtgtacgtgtaggatgc

SEQ ID NO: 725541 - DNA, 25 bp, Homo sapien
tgatagcactgtgtacgtgtaggat

SEQ ID NO: 725542 - DNA, 25 bp, Homo sapien
atgatagcactgtgtacgtgtagga

SEQ ID NO: 725543 - DNA, 25 bp, Homo sapien
cactgtgttgcaagtctatttgtat

SEQ ID NO: 725544 - DNA, 25 bp, Homo sapien
ggatgtttgctccacactgtgttgc

SEQ ID NO: 725545 - DNA, 25 bp, Homo sapien
cggttgggatgtttgctccacactg

SEQ ID NO: 725546 - DNA, 25 bp, Homo sapien
aagtctatttgtatttgctccggca

SEQ ID NO: 725547 - DNA, 25 bp, Homo sapien
gatttctctatcatcacctacacag

SEQ ID NO: 725548 - DNA, 25 bp, Homo sapien
tgcagcagcttgtaggtaattgatc

SEQ ID NO: 725549 - DNA, 25 bp, Homo sapien
tgtagttggctaggagattccctcc

SEQ ID NO: 725550 - DNA, 25 bp, Homo sapien
tctcccactggctataaaatactgc

SEQ ID NO: 725551 - DNA, 25 bp, Homo sapien
agctcaggagagagcgctacatctc

SEQ ID NO: 725552 - DNA, 25 bp, Homo sapien
tctcttacttcccaggaggaagaga

SEQ ID NO: 725553 - DNA, 25 bp, Homo sapien
ctctctcttacttcccaggaggaag

SEQ ID NO: 725554 - DNA, 25 bp, Homo sapien
gagagcgctacatctcctcctcttg

SEQ ID NO: 725555 - DNA, 25 bp, Homo sapien
tccctgtagttgttctcactgtttg

SEQ ID NO: 725556 - DNA, 25 bp, Homo sapien
taatccaagggtcactactcttaag

SEQ ID NO: 725557 - DNA, 25 bp, Homo sapien
gtaatccaagggtcactactcttaa

SEQ ID NO: 725558 - DNA, 25 bp, Homo sapien
acttttccctgtagttgttctcact

SEQ ID NO: 725559 - DNA, 25 bp, Homo sapien
catcctgatggccaccaattctcat

SEQ ID NO: 725560 - DNA, 25 bp, Homo sapien
cattactcagatgtgctattacagg

SEQ ID NO: 725561 - DNA, 25 bp, Homo sapien
tctattgtgttagtaagatctcccc

SEQ ID NO: 725562 - DNA, 25 bp, Homo sapien
cagatgtgctattacaggaataaag

SEQ ID NO: 725563 - DNA, 25 bp, Homo sapien
gcctttcaaagcattactcagatgt

SEQ ID NO: 725564 - DNA, 25 bp, Homo sapien
agagtcattccattagagagccaac

SEQ ID NO: 725565 - DNA, 25 bp, Homo sapien
gttataggcaagcacatcaaatagg

SEQ ID NO: 725566 - DNA, 25 bp, Homo sapien
gagagccaactaacatcagtacaga

SEQ ID NO: 725567 - DNA, 25 bp, Homo sapien
tacacttgtgccgtaagtgtggtca

SEQ ID NO: 725568 - DNA, 25 bp, Homo sapien
gcataagtcgccttggcagcactga

SEQ ID NO: 725569 - DNA, 25 bp, Homo sapien
agtgatggcctgcataagtcgcctt

SEQ ID NO: 725570 - DNA, 25 bp, Homo sapien
tcgccttggcagcactgatcatctc

SEQ ID NO: 725571 - DNA, 25 bp, Homo sapien
gcctgcataagtcgccttggcagca

SEQ ID NO: 725572 - DNA, 25 bp, Homo sapien
tggcatgtagccctggctccgataa

SEQ ID NO: 725573 - DNA, 25 bp, Homo sapien
gccctggctccgataaagaagaaag

SEQ ID NO: 725574 - DNA, 25 bp, Homo sapien
ggcgagttcaatgagctaggatttc

SEQ ID NO: 725575 - DNA, 25 bp, Homo sapien
cacccacgtaagagtaggtggtgct

SEQ ID NO: 725576 - DNA, 25 bp, Homo sapien
ttcaaactgggcacaggtaatggag

SEQ ID NO: 725577 - DNA, 25 bp, Homo sapien
gattgacacaccgaaagtgccaccc

SEQ ID NO: 725578 - DNA, 25 bp, Homo sapien
ctttggtaacctgaaactgagagtc

SEQ ID NO: 725579 - DNA, 25 bp, Homo sapien
actgggcacaggtaatggaggtata

SEQ ID NO: 725580 - DNA, 25 bp, Homo sapien
catggctgatgctcttattcagttc

SEQ ID NO: 725581 - DNA, 25 bp, Homo sapien
ctggacagccataagcaacagcttc

SEQ ID NO: 725582 - DNA, 25 bp, Homo sapien
gcaacagcttcatcatggctgatgc

SEQ ID NO: 725583 - DNA, 25 bp, Homo sapien
tgaatcttggggatactaatagaac

SEQ ID NO: 725584 - DNA, 25 bp, Homo sapien
gaggatggtcatgactccactagca

SEQ ID NO: 725585 - DNA, 25 bp, Homo sapien
ttcaggaggtatgcccgtgaattca

SEQ ID NO: 725586 - DNA, 25 bp, Homo sapien
tggtattacagttgatgaggatggt

SEQ ID NO: 725587 - DNA, 25 bp, Homo sapien
ggttcaggaggtatgcccgtgaatt

SEQ ID NO: 725588 - DNA, 25 bp, Homo sapien
gctcaaatggcccttattattagtg

SEQ ID NO: 725589 - DNA, 25 bp, Homo sapien
tattagtgatagtaattttattctc

SEQ ID NO: 725590 - DNA, 25 bp, Homo sapien
gcccttattattagtgatagtaatt

SEQ ID NO: 725591 - DNA, 25 bp, Homo sapien
tccttgctcaaatggcccttattat

SEQ ID NO: 725592 - DNA, 25 bp, Homo sapien
caagtgaattcttggatgacgcctt

SEQ ID NO: 725593 - DNA, 25 bp, Homo sapien
gttgaatgcataggactcaagtgaa

SEQ ID NO: 725594 - DNA, 25 bp, Homo sapien
gaattcttggatgacgccttgtccc

SEQ ID NO: 725595 - DNA, 25 bp, Homo sapien
tgaatgcataggactcaagtgaatt

SEQ ID NO: 725596 - DNA, 25 bp, Homo sapien
gattgggttgcaaagttcctccagc

SEQ ID NO: 725597 - DNA, 25 bp, Homo sapien
ggtgatgattgggttgcaaagttcc

SEQ ID NO: 725598 - DNA, 25 bp, Homo sapien
tcttggcagtccgattcttattgtg

SEQ ID NO: 725599 - DNA, 25 bp, Homo sapien
tggcagtccgattcttattgtgcca

SEQ ID NO: 725600 - DNA, 25 bp, Homo sapien
aacctcttcgatggtgggccctaag

SEQ ID NO: 725601 - DNA, 25 bp, Homo sapien
ctcttcgatggtgggccctaaggaa

SEQ ID NO: 725602 - DNA, 25 bp, Homo sapien
aatcaacctcttcgatggtgggccc

SEQ ID NO: 725603 - DNA, 25 bp, Homo sapien
ttaatcaacctcttcgatggtgggc

SEQ ID NO: 725604 - DNA, 25 bp, Homo sapien
gctacaaatttaggtccttcaaatg

SEQ ID NO: 725605 - DNA, 25 bp, Homo sapien
caagtattgagaatgcccagtaact

SEQ ID NO: 725606 - DNA, 25 bp, Homo sapien
aatgctacatctatacttgggttgg

SEQ ID NO: 725607 - DNA, 25 bp, Homo sapien
cagtaacttactatagcagcttaac

SEQ ID NO: 725608 - DNA, 25 bp, Homo sapien
gtagagtgcaccgaccagtcgacgg

SEQ ID NO: 725609 - DNA, 25 bp, Homo sapien
tgtacatagaaacccgcatagttgc

SEQ ID NO: 725610 - DNA, 25 bp, Homo sapien
ggatgtacatagaaacccgcatagt

SEQ ID NO: 725611 - DNA, 25 bp, Homo sapien
cgcatagttgcaagtagagtgcacc

SEQ ID NO: 725612 - DNA, 25 bp, Homo sapien
gacactgagcccgacggagatgaga

SEQ ID NO: 725613 - DNA, 25 bp, Homo sapien
ctgacactgagcccgacggagatga

SEQ ID NO: 725614 - DNA, 25 bp, Homo sapien
cactgagcccgacggagatgagacg

SEQ ID NO: 725615 - DNA, 25 bp, Homo sapien
ctgagcccgacggagatgagacgct

SEQ ID NO: 725616 - DNA, 25 bp, Homo sapien
cagcggtctgaaaggggcaacggca

SEQ ID NO: 725617 - DNA, 25 bp, Homo sapien
ccaaagttgttaaacagcggtctga

SEQ ID NO: 725618 - DNA, 25 bp, Homo sapien
agttgttaaacagcggtctgaaagg

SEQ ID NO: 725619 - DNA, 25 bp, Homo sapien
agcggtctgaaaggggcaacggcac

SEQ ID NO: 725620 - DNA, 25 bp, Homo sapien
cgacagcaggtcgttgtaggtgctc

SEQ ID NO: 725621 - DNA, 25 bp, Homo sapien
tgaccgacagcaggtcgttgtaggt

SEQ ID NO: 725622 - DNA, 25 bp, Homo sapien
tctatgaccgacagcaggtcgttgt

SEQ ID NO: 725623 - DNA, 25 bp, Homo sapien
tcctctatgaccgacagcaggtcgt

SEQ ID NO: 725624 - DNA, 25 bp, Homo sapien
gtttcgtgcgggcattgcactctgt

SEQ ID NO: 725625 - DNA, 25 bp, Homo sapien
ttcctgtttcgtgcgggcattgcac

SEQ ID NO: 725626 - DNA, 25 bp, Homo sapien
gggcttcctgtttcgtgcgggcatt

SEQ ID NO: 725627 - DNA, 25 bp, Homo sapien
gtgcgggcattgcactctgtctctg

SEQ ID NO: 725628 - DNA, 25 bp, Homo sapien
ggtagcaaaaagtccaatgagatac

SEQ ID NO: 725629 - DNA, 25 bp, Homo sapien
ctgtcgccatttcaattttaactga

SEQ ID NO: 725630 - DNA, 25 bp, Homo sapien
tgtcgccatttcaattttaactgaa

SEQ ID NO: 725631 - DNA, 25 bp, Homo sapien
gaaatgtgtttggtagcaaaaagtc

SEQ ID NO: 725632 - DNA, 25 bp, Homo sapien
aagtggccaatgtcgagtagctttg

SEQ ID NO: 725633 - DNA, 25 bp, Homo sapien
ctgcaagaagtggccaatgtcgagt

SEQ ID NO: 725634 - DNA, 25 bp, Homo sapien
caagaagtggccaatgtcgagtagc

SEQ ID NO: 725635 - DNA, 25 bp, Homo sapien
ggccaatgtcgagtagctttgggaa

SEQ ID NO: 725636 - DNA, 25 bp, Homo sapien
tctttatacacctcttgatgctccc

SEQ ID NO: 725637 - DNA, 25 bp, Homo sapien
caaagacttgaggatctgccttagt

SEQ ID NO: 725638 - DNA, 25 bp, Homo sapien
atctttatacacctcttgatgctcc

SEQ ID NO: 725639 - DNA, 25 bp, Homo sapien
gcttgcaaagacttgaggatctgcc

SEQ ID NO: 725640 - DNA, 25 bp, Homo sapien
tacaacgttgagtaaagcagcagat

SEQ ID NO: 725641 - DNA, 25 bp, Homo sapien
ataatgtagatggagagtcttttgc

SEQ ID NO: 725642 - DNA, 25 bp, Homo sapien
cagataatgtagatggagagtcttt

SEQ ID NO: 725643 - DNA, 25 bp, Homo sapien
tttttctacaacgttgagtaaagca

SEQ ID NO: 725644 - DNA, 25 bp, Homo sapien
attaatggtggagatatgacctgat

SEQ ID NO: 725645 - DNA, 25 bp, Homo sapien
gacagacatctctcaacctgaaata

SEQ ID NO: 725646 - DNA, 25 bp, Homo sapien
tgaaataagcattgctcctctcact

SEQ ID NO: 725647 - DNA, 25 bp, Homo sapien
taatggtggagatatgacctgatca

SEQ ID NO: 725648 - DNA, 25 bp, Homo sapien
tgaccgtgaacgatttctaagcctc

SEQ ID NO: 725649 - DNA, 25 bp, Homo sapien
cctgcttcaactggtgatgtggtaa

SEQ ID NO: 725650 - DNA, 25 bp, Homo sapien
ccggtaatgggactgtaaagatgcc

SEQ ID NO: 725651 - DNA, 25 bp, Homo sapien
tttctcaggaagagtgcacactgcc

SEQ ID NO: 725652 - DNA, 25 bp, Homo sapien
tacgagtgaggtcatgattgtactg

SEQ ID NO: 725653 - DNA, 25 bp, Homo sapien
gagtgaggtcatgattgtactgctc

SEQ ID NO: 725654 - DNA, 25 bp, Homo sapien
gaggtcatgattgtactgctcttct

SEQ ID NO: 725655 - DNA, 25 bp, Homo sapien
catacgagtgaggtcatgattgtac

SEQ ID NO: 725656 - DNA, 25 bp, Homo sapien
gagtctgtcgtctaattgcaacaca

SEQ ID NO: 725657 - DNA, 25 bp, Homo sapien
tgtcgtctaattgcaacacaattaa

SEQ ID NO: 725658 - DNA, 25 bp, Homo sapien
ttctaaattctgagtctgtcgtcta

SEQ ID NO: 725659 - DNA, 25 bp, Homo sapien
attctgagtctgtcgtctaattgca

SEQ ID NO: 725660 - DNA, 25 bp, Homo sapien
ctgattgtcacaaggatactgcttc

SEQ ID NO: 725661 - DNA, 25 bp, Homo sapien
attgtcacaaggatactgcttccct

SEQ ID NO: 725662 - DNA, 25 bp, Homo sapien
tgtcacaaggatactgcttcccttc

SEQ ID NO: 725663 - DNA, 25 bp, Homo sapien
gattgtcacaaggatactgcttccc

SEQ ID NO: 725664 - DNA, 25 bp, Homo sapien
gttctagttccttgacccgctcctc

SEQ ID NO: 725665 - DNA, 25 bp, Homo sapien
tgtttgtccccaatgaaatgctgct

SEQ ID NO: 725666 - DNA, 25 bp, Homo sapien
gacccgctcctcattctcaagttga

SEQ ID NO: 725667 - DNA, 25 bp, Homo sapien
gcttttgcccttcttgcagggtgaa

SEQ ID NO: 725668 - DNA, 25 bp, Homo sapien
gcagtatttgggtggcccaaaatta

SEQ ID NO: 725669 - DNA, 25 bp, Homo sapien
caccaggctgtgtgctgcttcagtc

SEQ ID NO: 725670 - DNA, 25 bp, Homo sapien
gaaagtgaaggaatctagggcagta

SEQ ID NO: 725671 - DNA, 25 bp, Homo sapien
taagatcacttaacagctccctccg

SEQ ID NO: 725672 - DNA, 25 bp, Homo sapien
cttatcctttcggaaacgcctctga

SEQ ID NO: 725673 - DNA, 25 bp, Homo sapien
tgcagtggctagataaggccatccc

SEQ ID NO: 725674 - DNA, 25 bp, Homo sapien
gcctgcctggattacagctaaattt

SEQ ID NO: 725675 - DNA, 25 bp, Homo sapien
gaagtgttgtaattaactggcacac

SEQ ID NO: 725676 - DNA, 25 bp, Homo sapien
tgtgagagcagttatatcggcagtg

SEQ ID NO: 725677 - DNA, 25 bp, Homo sapien
tatcggcagtgtcatgcaaggcacc

SEQ ID NO: 725678 - DNA, 25 bp, Homo sapien
aagtcaatgaatatcactcggtctg

SEQ ID NO: 725679 - DNA, 25 bp, Homo sapien
ggcaccagtagacaacctgtgaata

SEQ ID NO: 725680 - DNA, 25 bp, Homo sapien
cagagttgttcagtggcagttgaat

SEQ ID NO: 725681 - DNA, 25 bp, Homo sapien
tgttgcagccagagttgttcagtgg

SEQ ID NO: 725682 - DNA, 25 bp, Homo sapien
ttgcagccagagttgttcagtggca

SEQ ID NO: 725683 - DNA, 25 bp, Homo sapien
tcagtggcagttgaataactctcct

SEQ ID NO: 725684 - DNA, 25 bp, Homo sapien
tgcctagggctccaatacacatctt

SEQ ID NO: 725685 - DNA, 25 bp, Homo sapien
tggagctttccctacataaagcttg

SEQ ID NO: 725686 - DNA, 25 bp, Homo sapien
ggctgcctagggctccaatacacat

SEQ ID NO: 725687 - DNA, 25 bp, Homo sapien
aagcttggggctcttatttgcattc

SEQ ID NO: 725688 - DNA, 25 bp, Homo sapien
ttgtgacaacagtccagtaggcagg

SEQ ID NO: 725689 - DNA, 25 bp, Homo sapien
aagccatgaacttccttagtctcag

SEQ ID NO: 725690 - DNA, 25 bp, Homo sapien
agttgtatagatctgtgctataggc

SEQ ID NO: 725691 - DNA, 25 bp, Homo sapien
gaagcgctttagaaagccatgaact

SEQ ID NO: 725692 - DNA, 25 bp, Homo sapien
gctggtatgaatagtagggatatcc

SEQ ID NO: 725693 - DNA, 25 bp, Homo sapien
catggctctgggaaagtcaccctgg

SEQ ID NO: 725694 - DNA, 25 bp, Homo sapien
ccctggctgtagagtgttttcataa

SEQ ID NO: 725695 - DNA, 25 bp, Homo sapien
actgttgaagtggttcagtcatggc

SEQ ID NO: 725696 - DNA, 25 bp, Homo sapien
agctgtcatcagggccccaggaatc

SEQ ID NO: 725697 - DNA, 25 bp, Homo sapien
cagctgtcatcagggccccaggaat

SEQ ID NO: 725698 - DNA, 25 bp, Homo sapien
agcattggaatactgatgatagggc

SEQ ID NO: 725699 - DNA, 25 bp, Homo sapien
gagcattggaatactgatgataggg

SEQ ID NO: 725700 - DNA, 25 bp, Homo sapien
ttgagcattggaatactgatgatag

SEQ ID NO: 725701 - DNA, 25 bp, Homo sapien
tgagcattggaatactgatgatagg

SEQ ID NO: 725702 - DNA, 25 bp, Homo sapien
tagatctcctattttttcccctgac

SEQ ID NO: 725703 - DNA, 25 bp, Homo sapien
ctagatctcctattttttcccctga

SEQ ID NO: 725704 - DNA, 25 bp, Homo sapien
gtgactagatctcctattttttccc

SEQ ID NO: 725705 - DNA, 25 bp, Homo sapien
ctagtgactagatctcctatttttt

SEQ ID NO: 725706 - DNA, 25 bp, Homo sapien
tctgtcatcagtcaagggtttgagg

SEQ ID NO: 725707 - DNA, 25 bp, Homo sapien
catcagtcaagggtttgagggcttt

SEQ ID NO: 725708 - DNA, 25 bp, Homo sapien
ggaggtatacaacttggtcttcaca

SEQ ID NO: 725709 - DNA, 25 bp, Homo sapien
aatcctcaaacatttgacttctctc

SEQ ID NO: 725710 - DNA, 25 bp, Homo sapien
ctctgagagcaggatccacggcata

SEQ ID NO: 725711 - DNA, 25 bp, Homo sapien
catgacgtacagagttgggcctgtg

SEQ ID NO: 725712 - DNA, 25 bp, Homo sapien
gaaatagtgatctggcatgctctga

SEQ ID NO: 725713 - DNA, 25 bp, Homo sapien
tccacggcatatattttaatggaca

SEQ ID NO: 725714 - DNA, 25 bp, Homo sapien
aatttgtgtcttgttgccttcagtg

SEQ ID NO: 725715 - DNA, 25 bp, Homo sapien
gaaatttgtgtcttgttgccttcag

SEQ ID NO: 725716 - DNA, 25 bp, Homo sapien
tcctgaaatttgtgtcttgttgcct

SEQ ID NO: 725717 - DNA, 25 bp, Homo sapien
gtgtcttgttgccttcagtgaagca

SEQ ID NO: 725718 - DNA, 25 bp, Homo sapien
gagtgcgggtgccaacttcatagtc

SEQ ID NO: 725719 - DNA, 25 bp, Homo sapien
tctgtagtctggttgagctgcccct

SEQ ID NO: 725720 - DNA, 25 bp, Homo sapien
ccagagtgatgcttgcagtgctctc

SEQ ID NO: 725721 - DNA, 25 bp, Homo sapien
tacagaaggctacttgagtgcgggt

SEQ ID NO: 725722 - DNA, 25 bp, Homo sapien
ctaccacctcgtatttcttgggtct

SEQ ID NO: 725723 - DNA, 25 bp, Homo sapien
caatttttacaagaagcgttacagc

SEQ ID NO: 725724 - DNA, 25 bp, Homo sapien
tcttgggtctcacaaggagttacca

SEQ ID NO: 725725 - DNA, 25 bp, Homo sapien
tacagcctgcagtgaataattgtcc

SEQ ID NO: 725726 - DNA, 25 bp, Homo sapien
tgcagcaagttggatgacagttgag

SEQ ID NO: 725727 - DNA, 25 bp, Homo sapien
gatgacagttgagttagtgttttcc

SEQ ID NO: 725728 - DNA, 25 bp, Homo sapien
tgtgttgtagttagtgccagggctc

SEQ ID NO: 725729 - DNA, 25 bp, Homo sapien
tgacgggtggttaactgcagcaagt

SEQ ID NO: 725730 - DNA, 25 bp, Homo sapien
taaagggcaaacagcatctcaagtg

SEQ ID NO: 725731 - DNA, 25 bp, Homo sapien
gcccttagcaaagtgatcaaaccag

SEQ ID NO: 725732 - DNA, 25 bp, Homo sapien
ttggtatcaccagaagaccttagat

SEQ ID NO: 725733 - DNA, 25 bp, Homo sapien
tttcagcagaattgtcagcctaagg

SEQ ID NO: 725734 - DNA, 25 bp, Homo sapien
tttgtaacctgagccaaaccatgct

SEQ ID NO: 725735 - DNA, 25 bp, Homo sapien
tgtctgtggtacagctgcccaggtt

SEQ ID NO: 725736 - DNA, 25 bp, Homo sapien
tagcctgctgctacagactgctagg

SEQ ID NO: 725737 - DNA, 25 bp, Homo sapien
ggaaatggccatagcctctgtctgt

SEQ ID NO: 725738 - DNA, 25 bp, Homo sapien
ggcagtagaccgtttctgacaggct

SEQ ID NO: 725739 - DNA, 25 bp, Homo sapien
cctgctctgcgctggcagtagaccg

SEQ ID NO: 725740 - DNA, 25 bp, Homo sapien
gcattgggcacaacctgaggctccc

SEQ ID NO: 725741 - DNA, 25 bp, Homo sapien
tgccgcattgggcacaacctgaggc

SEQ ID NO: 725742 - DNA, 25 bp, Homo sapien
tctgtgctgtcttacacagtaacca

SEQ ID NO: 725743 - DNA, 25 bp, Homo sapien
gaggttgcatttaagttgggtatac

SEQ ID NO: 725744 - DNA, 25 bp, Homo sapien
ttggtcactgtatcctttagcccag

SEQ ID NO: 725745 - DNA, 25 bp, Homo sapien
ctacagtattagataagcaaagctc

SEQ ID NO: 725746 - DNA, 25 bp, Homo sapien
aatgaattgacatgaaggagatgtg

SEQ ID NO: 725747 - DNA, 25 bp, Homo sapien
gcagcaaatgtgtatacggtgacat

SEQ ID NO: 725748 - DNA, 25 bp, Homo sapien
ggctctccaaggtctatggaaatca

SEQ ID NO: 725749 - DNA, 25 bp, Homo sapien
gatgtgatacacagcacaaggctct

SEQ ID NO: 725750 - DNA, 25 bp, Homo sapien
ttctcctcgtgaggtggcaccgcca

SEQ ID NO: 725751 - DNA, 25 bp, Homo sapien
ctcagaggccgatgggtctcaaggt

SEQ ID NO: 725752 - DNA, 25 bp, Homo sapien
tgtcctactgagacacggccggtag

SEQ ID NO: 725753 - DNA, 25 bp, Homo sapien
gtctcaaggtgatcgtccttctcct

SEQ ID NO: 725754 - DNA, 25 bp, Homo sapien
tgcaaggagacatcgtgacttcttt

SEQ ID NO: 725755 - DNA, 25 bp, Homo sapien
tgtgcaaggagacatcgtgacttct

SEQ ID NO: 725756 - DNA, 25 bp, Homo sapien
ctgtgcaaggagacatcgtgacttc

SEQ ID NO: 725757 - DNA, 25 bp, Homo sapien
aaggagacatcgtgacttctttctg

SEQ ID NO: 725758 - DNA, 25 bp, Homo sapien
aacaccttagggatgcgagtccggg

SEQ ID NO: 725759 - DNA, 25 bp, Homo sapien
catcctccactaatggtgacatggg

SEQ ID NO: 725760 - DNA, 25 bp, Homo sapien
tctttctgctacaaacaccttaggg

SEQ ID NO: 725761 - DNA, 25 bp, Homo sapien
agagagggaaaaccgcggctggcct

SEQ ID NO: 725762 - DNA, 25 bp, Homo sapien
cttactagcatttgagtctagtctc

SEQ ID NO: 725763 - DNA, 25 bp, Homo sapien
tttgagtctagtctcttttccagtc

SEQ ID NO: 725764 - DNA, 25 bp, Homo sapien
gagtctagtctcttttccagtcctt

SEQ ID NO: 725765 - DNA, 25 bp, Homo sapien
tactagcatttgagtctagtctctt

SEQ ID NO: 725766 - DNA, 25 bp, Homo sapien
gggtatgcagtgattaaccatgggt

SEQ ID NO: 725767 - DNA, 25 bp, Homo sapien
caggggtatgcagtgattaaccatg

SEQ ID NO: 725768 - DNA, 25 bp, Homo sapien
tctgctatttgtgcggcagatgagc

SEQ ID NO: 725769 - DNA, 25 bp, Homo sapien
gggttctgctatttgtgcggcagat

SEQ ID NO: 725770 - DNA, 25 bp, Homo sapien
cttgtcgggagtcaaaggtcgttgt

SEQ ID NO: 725771 - DNA, 25 bp, Homo sapien
tgtgaattgcttgtcgggagtcaaa

SEQ ID NO: 725772 - DNA, 25 bp, Homo sapien
attttgtacttgtttgggttagcag

SEQ ID NO: 725773 - DNA, 25 bp, Homo sapien
catatgagtatgatctccagtagca

SEQ ID NO: 725774 - DNA, 25 bp, Homo sapien
gccatgggctggcttatcagctcca

SEQ ID NO: 725775 - DNA, 25 bp, Homo sapien
gctgcacttgcatgcaccttcgtag

SEQ ID NO: 725776 - DNA, 25 bp, Homo sapien
gggctggcttatcagctccagccag

SEQ ID NO: 725777 - DNA, 25 bp, Homo sapien
tgtgctgcacttgcatgcaccttcg

SEQ ID NO: 725778 - DNA, 25 bp, Homo sapien
taggtttgatatacagcatagtttt

SEQ ID NO: 725779 - DNA, 25 bp, Homo sapien
gataggtttgatatacagcatagtt

SEQ ID NO: 725780 - DNA, 25 bp, Homo sapien
ttgataggtttgatatacagcatag

SEQ ID NO: 725781 - DNA, 25 bp, Homo sapien
aggtttgatatacagcatagttttc

SEQ ID NO: 725782 - DNA, 25 bp, Homo sapien
aaactgccaccatcctagtagcctt

SEQ ID NO: 725783 - DNA, 25 bp, Homo sapien
taggattttggagacatctgttggt

SEQ ID NO: 725784 - DNA, 25 bp, Homo sapien
tcttttaggacaatggaaacatttc

SEQ ID NO: 725785 - DNA, 25 bp, Homo sapien
tctgctcttttaggacaatggaaac

SEQ ID NO: 725786 - DNA, 25 bp, Homo sapien
ttgtgcagagccaggcagatgattg

SEQ ID NO: 725787 - DNA, 25 bp, Homo sapien
tgagtcactcacagtatgtaattct

SEQ ID NO: 725788 - DNA, 25 bp, Homo sapien
gtcttgccaaatacaggagagcagg

SEQ ID NO: 725789 - DNA, 25 bp, Homo sapien
ccaggcagatgattgatagtgaagt

SEQ ID NO: 725790 - DNA, 25 bp, Homo sapien
agcccctttttgcagttcatgtctt

SEQ ID NO: 725791 - DNA, 25 bp, Homo sapien
ttcaccttccctttcttgcctccgc

SEQ ID NO: 725792 - DNA, 25 bp, Homo sapien
ctccgcttccctctcctaacaccgt

SEQ ID NO: 725793 - DNA, 25 bp, Homo sapien
ttatttcatgtactgatcagcagtt

SEQ ID NO: 725794 - DNA, 25 bp, Homo sapien
atgacttttccctatggtctcacca

SEQ ID NO: 725795 - DNA, 25 bp, Homo sapien
cctatggtctcaccaacaaacaatg

SEQ ID NO: 725796 - DNA, 25 bp, Homo sapien
tgctttttgcactatgtcctgacta

SEQ ID NO: 725797 - DNA, 25 bp, Homo sapien
tgtcctgactatcattccataccag

SEQ ID NO: 725798 - DNA, 25 bp, Homo sapien
gccacagcagtctctagcagcttca

SEQ ID NO: 725799 - DNA, 25 bp, Homo sapien
tggccacagcagtctctagcagctt

SEQ ID NO: 725800 - DNA, 25 bp, Homo sapien
gtggccacagcagtctctagcagct

SEQ ID NO: 725801 - DNA, 25 bp, Homo sapien
agtggccacagcagtctctagcagc

SEQ ID NO: 725802 - DNA, 25 bp, Homo sapien
tatattgaatgggtgcatgggagaa

SEQ ID NO: 725803 - DNA, 25 bp, Homo sapien
ccgctcctttgcaggggtacatcag

SEQ ID NO: 725804 - DNA, 25 bp, Homo sapien
ttttatcataattcttctgggtctg

SEQ ID NO: 725805 - DNA, 25 bp, Homo sapien
caggggtacatcagttctctgtaaa

SEQ ID NO: 725806 - DNA, 25 bp, Homo sapien
ccaacaatgtataagggtgtccctt

SEQ ID NO: 725807 - DNA, 25 bp, Homo sapien
tatatatgaagcagtaggtagctct

SEQ ID NO: 725808 - DNA, 25 bp, Homo sapien
ctttaactgggttgagatactatct

SEQ ID NO: 725809 - DNA, 25 bp, Homo sapien
agccactttaactgggttgagatac

SEQ ID NO: 725810 - DNA, 25 bp, Homo sapien
tcaagtgaagcagtgagaatggaga

SEQ ID NO: 725811 - DNA, 25 bp, Homo sapien
aggaacaaagaaatctgtaactggt

SEQ ID NO: 725812 - DNA, 25 bp, Homo sapien
gatcaattagttataaacaccactt

SEQ ID NO: 725813 - DNA, 25 bp, Homo sapien
tgtgatcaattagttataaacacca

SEQ ID NO: 725814 - DNA, 25 bp, Homo sapien
gccattaccagagttgaagtgtcag

SEQ ID NO: 725815 - DNA, 25 bp, Homo sapien
tgttaatcctctattctgttggcga

SEQ ID NO: 725816 - DNA, 25 bp, Homo sapien
cattcagcaagtagggaaggtaatt

SEQ ID NO: 725817 - DNA, 25 bp, Homo sapien
ggatctctccctctaaattacagca

SEQ ID NO: 725818 - DNA, 25 bp, Homo sapien
atccgggccctcctgccgcaagctg

SEQ ID NO: 725819 - DNA, 25 bp, Homo sapien
ccgtagtgtctcattgcagataatt

SEQ ID NO: 725820 - DNA, 25 bp, Homo sapien
tattaaagacagtcgcatccgggcc

SEQ ID NO: 725821 - DNA, 25 bp, Homo sapien
gactttggaagtccgtagtgtctca

SEQ ID NO: 725822 - DNA, 25 bp, Homo sapien
gaaagtgcctgtctggtcaatcgaa

SEQ ID NO: 725823 - DNA, 25 bp, Homo sapien
attcccctcagaaatatgcatggca

SEQ ID NO: 725824 - DNA, 25 bp, Homo sapien
tgcatggcacggcaatgaaggcatt

SEQ ID NO: 725825 - DNA, 25 bp, Homo sapien
tccgaccaggtcaggacgaacatat

SEQ ID NO: 725826 - DNA, 25 bp, Homo sapien
cgacagcgtaacacaggaagcagct

SEQ ID NO: 725827 - DNA, 25 bp, Homo sapien
accttagcggcaagaggcccgacct

SEQ ID NO: 725828 - DNA, 25 bp, Homo sapien
aaaccgcagccgctgaccttagcgg

SEQ ID NO: 725829 - DNA, 25 bp, Homo sapien
ttttaacttctgcttgtctgcgaca

SEQ ID NO: 725830 - DNA, 25 bp, Homo sapien
gacatagactttacagactccactg

SEQ ID NO: 725831 - DNA, 25 bp, Homo sapien
tagcctataaggtccatgtcagaga

SEQ ID NO: 725832 - DNA, 25 bp, Homo sapien
catagcctataaggtccatgtcaga

SEQ ID NO: 725833 - DNA, 25 bp, Homo sapien
tcagagaattggacatagactttac

SEQ ID NO: 725834 - DNA, 25 bp, Homo sapien
actgatatactgcataggattttta

SEQ ID NO: 725835 - DNA, 25 bp, Homo sapien
ctgatatactgcataggatttttag

SEQ ID NO: 725836 - DNA, 25 bp, Homo sapien
tgatatactgcataggatttttaga

SEQ ID NO: 725837 - DNA, 25 bp, Homo sapien
tactgatatactgcataggattttt

SEQ ID NO: 725838 - DNA, 25 bp, Homo sapien
ttctctctacagaaactaattcttc

SEQ ID NO: 725839 - DNA, 25 bp, Homo sapien
tcaccataccttgtagaattttcta

SEQ ID NO: 725840 - DNA, 25 bp, Homo sapien
gatagtaacacataatcaccatacc

SEQ ID NO: 725841 - DNA, 25 bp, Homo sapien
ctgtcacacactgatagtaacacat

SEQ ID NO: 725842 - DNA, 25 bp, Homo sapien
tctcagactcacttaaaactaggat

SEQ ID NO: 725843 - DNA, 25 bp, Homo sapien
tttctcagactcacttaaaactagg

SEQ ID NO: 725844 - DNA, 25 bp, Homo sapien
acgtttctcagactcacttaaaact

SEQ ID NO: 725845 - DNA, 25 bp, Homo sapien
gactcacttaaaactaggattatag

SEQ ID NO: 725846 - DNA, 25 bp, Homo sapien
agtagaattagacccttctttcttg

SEQ ID NO: 725847 - DNA, 25 bp, Homo sapien
ctatttaaaaccggcgcgcagccag

SEQ ID NO: 725848 - DNA, 25 bp, Homo sapien
tggccggagaagacctccggcccag

SEQ ID NO: 725849 - DNA, 25 bp, Homo sapien
gacaggggcgctcccaagagtagcc

SEQ ID NO: 725850 - DNA, 25 bp, Homo sapien
gcgagggcggctgcctcagacaata

SEQ ID NO: 725851 - DNA, 25 bp, Homo sapien
gccgcgaagacaagtccgaaagatg

SEQ ID NO: 725852 - DNA, 25 bp, Homo sapien
actggggccgcgaagacaagtccga

SEQ ID NO: 725853 - DNA, 25 bp, Homo sapien
gggccgcgaagacaagtccgaaaga

SEQ ID NO: 725854 - DNA, 25 bp, Homo sapien
ccaggcagcgccgaggtcggggact

SEQ ID NO: 725855 - DNA, 25 bp, Homo sapien
aatccgtgaggtggtcgtttggaga

SEQ ID NO: 725856 - DNA, 25 bp, Homo sapien
aaggaatccgtgaggtggtcgtttg

SEQ ID NO: 725857 - DNA, 25 bp, Homo sapien
cgtgaggtggtcgtttggagaagac

SEQ ID NO: 725858 - DNA, 25 bp, Homo sapien
tccgtgaggtggtcgtttggagaag

SEQ ID NO: 725859 - DNA, 25 bp, Homo sapien
ccgcagaggcctcggatacacttac

SEQ ID NO: 725860 - DNA, 25 bp, Homo sapien
gccgcagaggcctcggatacactta

SEQ ID NO: 725861 - DNA, 25 bp, Homo sapien
tcgccgcagaggcctcggatacact

SEQ ID NO: 725862 - DNA, 25 bp, Homo sapien
ctctcgccgcagaggcctcggatac

SEQ ID NO: 725863 - DNA, 25 bp, Homo sapien
ttcattcccgcggaccatggagggc

SEQ ID NO: 725864 - DNA, 25 bp, Homo sapien
ggcgagggtccaccaatcctgcttt

SEQ ID NO: 725865 - DNA, 25 bp, Homo sapien
aaaacaagcgggcttcattcccgcg

SEQ ID NO: 725866 - DNA, 25 bp, Homo sapien
caccggccctgacttctagaatggc

SEQ ID NO: 725867 - DNA, 25 bp, Homo sapien
ctccaactttaaaatcactgtcatc

SEQ ID NO: 725868 - DNA, 25 bp, Homo sapien
gtcatctgaactatcataatcaaga

SEQ ID NO: 725869 - DNA, 25 bp, Homo sapien
tctccaactttaaaatcactgtcat

SEQ ID NO: 725870 - DNA, 25 bp, Homo sapien
atctgaactatcataatcaagagct

SEQ ID NO: 725871 - DNA, 25 bp, Homo sapien
aaccaactaaatgggagataaagag

SEQ ID NO: 725872 - DNA, 25 bp, Homo sapien
taccaaatatcagcaaaccaactaa

SEQ ID NO: 725873 - DNA, 25 bp, Homo sapien
aataccaaatatcagcaaaccaact

SEQ ID NO: 725874 - DNA, 25 bp, Homo sapien
ataccaaatatcagcaaaccaacta

SEQ ID NO: 725875 - DNA, 25 bp, Homo sapien
ttcttcagaatcactacaggaacct

SEQ ID NO: 725876 - DNA, 25 bp, Homo sapien
tccactgtcctttgaagcatcttca

SEQ ID NO: 725877 - DNA, 25 bp, Homo sapien
tcagaatcactacaggaaccttctc

SEQ ID NO: 725878 - DNA, 25 bp, Homo sapien
ttctccactgtcctttgaagcatct

SEQ ID NO: 725879 - DNA, 25 bp, Homo sapien
ctgcagaatttttaagttgttcttc

SEQ ID NO: 725880 - DNA, 25 bp, Homo sapien
ttcctctgcagaatttttaagttgt

SEQ ID NO: 725881 - DNA, 25 bp, Homo sapien
ttcttcctctgcagaatttttaagt

SEQ ID NO: 725882 - DNA, 25 bp, Homo sapien
tgcagaatttttaagttgttcttct

SEQ ID NO: 725883 - DNA, 25 bp, Homo sapien
cattttaattaattgtttttctgat

SEQ ID NO: 725884 - DNA, 25 bp, Homo sapien
ttttaattaattgtttttctgatga

SEQ ID NO: 725885 - DNA, 25 bp, Homo sapien
ttaattgtttttctgatgatagtac

SEQ ID NO: 725886 - DNA, 25 bp, Homo sapien
taattaattgtttttctgatgatag

SEQ ID NO: 725887 - DNA, 25 bp, Homo sapien
ctctctttccttctctttctccttt

SEQ ID NO: 725888 - DNA, 25 bp, Homo sapien
ttctctctttccttctctttctcct

SEQ ID NO: 725889 - DNA, 25 bp, Homo sapien
tctctctttccttctctttctcctt

SEQ ID NO: 725890 - DNA, 25 bp, Homo sapien
tctttctaggtctttctccattttc

SEQ ID NO: 725891 - DNA, 25 bp, Homo sapien
gcagaagcagccacattctcagata

SEQ ID NO: 725892 - DNA, 25 bp, Homo sapien
gcagcagaagcagccacattctcag

SEQ ID NO: 725893 - DNA, 25 bp, Homo sapien
agcagaagcagccacattctcagat

SEQ ID NO: 725894 - DNA, 25 bp, Homo sapien
agcagcagaagcagccacattctca

SEQ ID NO: 725895 - DNA, 25 bp, Homo sapien
ggatgtgttaacagcaggaggactt

SEQ ID NO: 725896 - DNA, 25 bp, Homo sapien
ggggatgtgttaacagcaggaggac

SEQ ID NO: 725897 - DNA, 25 bp, Homo sapien
tgtcgtagtgggaacagaaggggat

SEQ ID NO: 725898 - DNA, 25 bp, Homo sapien
gaaggggatgtgttaacagcaggag

SEQ ID NO: 725899 - DNA, 25 bp, Homo sapien
tccagaagtggtcggtttcgtcgaa

SEQ ID NO: 725900 - DNA, 25 bp, Homo sapien
ccatttttttggctcgctgacttgt

SEQ ID NO: 725901 - DNA, 25 bp, Homo sapien
ggttccatttttttggctcgctgac

SEQ ID NO: 725902 - DNA, 25 bp, Homo sapien
tgtcatagtcatccatgtcattcag

SEQ ID NO: 725903 - DNA, 25 bp, Homo sapien
tacagtaggtcgccaatcattgtca

SEQ ID NO: 725904 - DNA, 25 bp, Homo sapien
taggtcgccaatcattgtcatcctc

SEQ ID NO: 725905 - DNA, 25 bp, Homo sapien
acagtaggtcgccaatcattgtcat

SEQ ID NO: 725906 - DNA, 25 bp, Homo sapien
agtaggtcgccaatcattgtcatcc

SEQ ID NO: 725907 - DNA, 25 bp, Homo sapien
ctctttctgagacgcagatctccct

SEQ ID NO: 725908 - DNA, 25 bp, Homo sapien
ccctctttctgagacgcagatctcc

SEQ ID NO: 725909 - DNA, 25 bp, Homo sapien
ttccctctttctgagacgcagatct

SEQ ID NO: 725910 - DNA, 25 bp, Homo sapien
tctttctgagacgcagatctccctt

SEQ ID NO: 725911 - DNA, 25 bp, Homo sapien
ttcatcatcctcattgtctccatca

SEQ ID NO: 725912 - DNA, 25 bp, Homo sapien
cttcatcatcctcattgtctccatc

SEQ ID NO: 725913 - DNA, 25 bp, Homo sapien
gtttctgctaagaactttactcttc

SEQ ID NO: 725914 - DNA, 25 bp, Homo sapien
tagggtcaggctatcattggtcagt

SEQ ID NO: 725915 - DNA, 25 bp, Homo sapien
tggcagggctactatgatcttcatc

SEQ ID NO: 725916 - DNA, 25 bp, Homo sapien
catcagcactgtttctgctaagaac

SEQ ID NO: 725917 - DNA, 25 bp, Homo sapien
gttttcataatgcactcagcaccat

SEQ ID NO: 725918 - DNA, 25 bp, Homo sapien
atgcactcagcaccattcagcagtc

SEQ ID NO: 725919 - DNA, 25 bp, Homo sapien
tttgttttcataatgcactcagcac

SEQ ID NO: 725920 - DNA, 25 bp, Homo sapien
tttcataatgcactcagcaccattc

SEQ ID NO: 725921 - DNA, 25 bp, Homo sapien
ccagttttgactcttctcaagaatc

SEQ ID NO: 725922 - DNA, 25 bp, Homo sapien
ctccagttttgactcttctcaagaa

SEQ ID NO: 725923 - DNA, 25 bp, Homo sapien
gctccagttttgactcttctcaaga

SEQ ID NO: 725924 - DNA, 25 bp, Homo sapien
cagttttgactcttctcaagaatca

SEQ ID NO: 725925 - DNA, 25 bp, Homo sapien
taatgccacaattgtcacactgaat

SEQ ID NO: 725926 - DNA, 25 bp, Homo sapien
aacacagcaaatcagaatatggtcc

SEQ ID NO: 725927 - DNA, 25 bp, Homo sapien
gaattatttcatcagcgtcctcact

SEQ ID NO: 725928 - DNA, 25 bp, Homo sapien
cttcatggactgtaatgccacaatt

SEQ ID NO: 725929 - DNA, 25 bp, Homo sapien
aaacaccatgaaatattgtagaacc

SEQ ID NO: 725930 - DNA, 25 bp, Homo sapien
ttgtagaaccaccttagtacaaatg

SEQ ID NO: 725931 - DNA, 25 bp, Homo sapien
aaccgaaacaccatgaaatattgta

SEQ ID NO: 725932 - DNA, 25 bp, Homo sapien
aatattgtagaaccaccttagtaca

SEQ ID NO: 725933 - DNA, 25 bp, Homo sapien
tatgagacagaaactcaaggactgt

SEQ ID NO: 725934 - DNA, 25 bp, Homo sapien
taaaggtgactaaacagacatgacg

SEQ ID NO: 725935 - DNA, 25 bp, Homo sapien
tcatatgcttcctaatacgatgcac

SEQ ID NO: 725936 - DNA, 25 bp, Homo sapien
ttccgtggtattccggccaaaagca

SEQ ID NO: 725937 - DNA, 25 bp, Homo sapien
ctactcccaggaatctgaaccacac

SEQ ID NO: 725938 - DNA, 25 bp, Homo sapien
tctcaaaggatgatccttcccatct

SEQ ID NO: 725939 - DNA, 25 bp, Homo sapien
ttctaaaccaatgtctctcaaagga

SEQ ID NO: 725940 - DNA, 25 bp, Homo sapien
catcgtccacattgcagagttcctt

SEQ ID NO: 725941 - DNA, 25 bp, Homo sapien
agcatgacatcgtccacattgcaga

SEQ ID NO: 725942 - DNA, 25 bp, Homo sapien
gttaacagtgattccctatgcaaag

SEQ ID NO: 725943 - DNA, 25 bp, Homo sapien
cagagagtcctgctattagcgtgaa

SEQ ID NO: 725944 - DNA, 25 bp, Homo sapien
ccaagcccaactgggagatgttttc

SEQ ID NO: 725945 - DNA, 25 bp, Homo sapien
tcagggtatgggatctcagagagtc

SEQ ID NO: 725946 - DNA, 25 bp, Homo sapien
caacaacatgcttgtgttcactgag

SEQ ID NO: 725947 - DNA, 25 bp, Homo sapien
catgcttgtgttcactgaggaagtt

SEQ ID NO: 725948 - DNA, 25 bp, Homo sapien
tgcttgtgttcactgaggaagttaa

SEQ ID NO: 725949 - DNA, 25 bp, Homo sapien
caacatgcttgtgttcactgaggaa

SEQ ID NO: 725950 - DNA, 25 bp, Homo sapien
tgactactataccatcatcaagttt

SEQ ID NO: 725951 - DNA, 25 bp, Homo sapien
caagcttgactactataccatcatc

SEQ ID NO: 725952 - DNA, 25 bp, Homo sapien
gaaacaagcttgactactataccat

SEQ ID NO: 725953 - DNA, 25 bp, Homo sapien
aacaagcttgactactataccatca

SEQ ID NO: 725954 - DNA, 25 bp, Homo sapien
tatatacgcacacaatctgaaagtc

SEQ ID NO: 725955 - DNA, 25 bp, Homo sapien
tcaaggtaaatcacagcagttcact

SEQ ID NO: 725956 - DNA, 25 bp, Homo sapien
tccacacaagtaggcaattaccaag

SEQ ID NO: 725957 - DNA, 25 bp, Homo sapien
gaataaagcccttaaggagctatcc

SEQ ID NO: 725958 - DNA, 25 bp, Homo sapien
aggtcttggtgccaagttctaaggg

SEQ ID NO: 725959 - DNA, 25 bp, Homo sapien
taaaatagcaaccatcccaacatcc

SEQ ID NO: 725960 - DNA, 25 bp, Homo sapien
gggcatccaaagtaacacgcaataa

SEQ ID NO: 725961 - DNA, 25 bp, Homo sapien
taaactgatgacattaaataagcca

SEQ ID NO: 725962 - DNA, 25 bp, Homo sapien
gaaggcactgccctaatgtaaaaca

SEQ ID NO: 725963 - DNA, 25 bp, Homo sapien
ggaaggcactgccctaatgtaaaac

SEQ ID NO: 725964 - DNA, 25 bp, Homo sapien
tggacatacactaacttattatcaa

SEQ ID NO: 725965 - DNA, 25 bp, Homo sapien
cactaacttattatcaaatttccct

SEQ ID NO: 725966 - DNA, 25 bp, Homo sapien
acaatgaagtacacttctctactga

SEQ ID NO: 725967 - DNA, 25 bp, Homo sapien
aacaatgaagtacacttctctactg

SEQ ID NO: 725968 - DNA, 25 bp, Homo sapien
caatgaagtacacttctctactgat

SEQ ID NO: 725969 - DNA, 25 bp, Homo sapien
gaaaattccatcctgattaggacac

SEQ ID NO: 725970 - DNA, 25 bp, Homo sapien
gctgaactcataatagagtcactct

SEQ ID NO: 725971 - DNA, 25 bp, Homo sapien
taggacacagttcacagctaggaga

SEQ ID NO: 725972 - DNA, 25 bp, Homo sapien
gaaacaccacatttacaggcatcac

SEQ ID NO: 725973 - DNA, 25 bp, Homo sapien
gaaccaacataattaggacattaac

SEQ ID NO: 725974 - DNA, 25 bp, Homo sapien
caaatgaaagtgtgtaatcataaac

SEQ ID NO: 725975 - DNA, 25 bp, Homo sapien
gcaatcaaatgaaagtgtgtaatca

SEQ ID NO: 725976 - DNA, 25 bp, Homo sapien
gaaagtgtgtaatcataaacagaag

SEQ ID NO: 725977 - DNA, 25 bp, Homo sapien
ccttctccatctgtatcccactggt

SEQ ID NO: 725978 - DNA, 25 bp, Homo sapien
ttctccatctgtatcccactggtca

SEQ ID NO: 725979 - DNA, 25 bp, Homo sapien
ccatctgtatcccactggtcattta

SEQ ID NO: 725980 - DNA, 25 bp, Homo sapien
ctccatctgtatcccactggtcatt

SEQ ID NO: 725981 - DNA, 25 bp, Homo sapien
ggaagaggcagagcgtgatctccac

SEQ ID NO: 725982 - DNA, 25 bp, Homo sapien
cccctcttatattggagaggaagag

SEQ ID NO: 725983 - DNA, 25 bp, Homo sapien
gatctccacgaaatacaaaaggttg

SEQ ID NO: 725984 - DNA, 25 bp, Homo sapien
tagtcaccaaccctagatggtagtc

SEQ ID NO: 725985 - DNA, 25 bp, Homo sapien
tactggtcgtaatttgtcaatatct

SEQ ID NO: 725986 - DNA, 25 bp, Homo sapien
cttggcaccatatttggaatagttc

SEQ ID NO: 725987 - DNA, 25 bp, Homo sapien
catttccgttagtgttactggtcgt

SEQ ID NO: 725988 - DNA, 25 bp, Homo sapien
aaggctactccaggaacatacaggg

SEQ ID NO: 725989 - DNA, 25 bp, Homo sapien
tttgctgcatagattcatccttcct

SEQ ID NO: 725990 - DNA, 25 bp, Homo sapien
ccgtgcccggctggcaagttcttaa

SEQ ID NO: 725991 - DNA, 25 bp, Homo sapien
gaagtttgctgcatagattcatcct

SEQ ID NO: 725992 - DNA, 25 bp, Homo sapien
agtttgctgcatagattcatccttc

SEQ ID NO: 725993 - DNA, 25 bp, Homo sapien
catcagagataacccaagttcagct

SEQ ID NO: 725994 - DNA, 25 bp, Homo sapien
cattcagccaatagaagcccactgc

SEQ ID NO: 725995 - DNA, 25 bp, Homo sapien
tagacatcagataacgtaactggac

SEQ ID NO: 725996 - DNA, 25 bp, Homo sapien
cacactattgaagtgggcatctctg

SEQ ID NO: 725997 - DNA, 25 bp, Homo sapien
cacatggaaataggctctgcacatc

SEQ ID NO: 725998 - DNA, 25 bp, Homo sapien
gcatcacagctaatgcaaaccccag

SEQ ID NO: 725999 - DNA, 25 bp, Homo sapien
ttccgccgctgcctctgaaagcaga

SEQ ID NO: 726000 - DNA, 25 bp, Homo sapien
caaaccccagttctagcaaagcgag

SEQ ID NO: 726001 - DNA, 25 bp, Homo sapien
taacagcctatataaaaccaccatg

SEQ ID NO: 726002 - DNA, 25 bp, Homo sapien
gaaatagaaggcaagatatgctcac

SEQ ID NO: 726003 - DNA, 25 bp, Homo sapien
ccctagaatgtctaaagagtataaa

SEQ ID NO: 726004 - DNA, 25 bp, Homo sapien
ccaacttgatatagtcttttgaaaa

SEQ ID NO: 726005 - DNA, 25 bp, Homo sapien
ctcaccaatgagataaaggactatg

SEQ ID NO: 726006 - DNA, 25 bp, Homo sapien
cataacatgctttgactattcttaa

SEQ ID NO: 726007 - DNA, 25 bp, Homo sapien
aaggactatgtcagaaggctataca

SEQ ID NO: 726008 - DNA, 25 bp, Homo sapien
ctaataaagcatgttgtgtcataac

SEQ ID NO: 726009 - DNA, 25 bp, Homo sapien
tctacagaacagagtacagcaatgt

SEQ ID NO: 726010 - DNA, 25 bp, Homo sapien
aactcccgggtatatgtgatcctct

SEQ ID NO: 726011 - DNA, 25 bp, Homo sapien
gaaactaccatatggcttacttgga

SEQ ID NO: 726012 - DNA, 25 bp, Homo sapien
aagttgtagtcagcataactgagcc

SEQ ID NO: 726013 - DNA, 25 bp, Homo sapien
actttctgtctaacctatctgcatg

SEQ ID NO: 726014 - DNA, 25 bp, Homo sapien
taggactgtagagccaagtagtttt

SEQ ID NO: 726015 - DNA, 25 bp, Homo sapien
tatctgcatgttgcttacaataagc

SEQ ID NO: 726016 - DNA, 25 bp, Homo sapien
cattttacaataggactgtagagcc

SEQ ID NO: 726017 - DNA, 25 bp, Homo sapien
ccatgagttctgctttccgcataag

SEQ ID NO: 726018 - DNA, 25 bp, Homo sapien
cataagtttacgaatagctgaagca

SEQ ID NO: 726019 - DNA, 25 bp, Homo sapien
tctggtagatcgagctagttctgct

SEQ ID NO: 726020 - DNA, 25 bp, Homo sapien
gatatctgtactgatccccatgagt

SEQ ID NO: 726021 - DNA, 25 bp, Homo sapien
atgatatatgcagcatggctaataa

SEQ ID NO: 726022 - DNA, 25 bp, Homo sapien
taaacatccctctatgatatatgca

SEQ ID NO: 726023 - DNA, 25 bp, Homo sapien
ataaacatccctctatgatatatgc

SEQ ID NO: 726024 - DNA, 25 bp, Homo sapien
tatatgcagcatggctaataaattt

SEQ ID NO: 726025 - DNA, 25 bp, Homo sapien
tttgttcagccatattttcctgaat

SEQ ID NO: 726026 - DNA, 25 bp, Homo sapien
ttcctgaatttgaatcatgcgcata

SEQ ID NO: 726027 - DNA, 25 bp, Homo sapien
cctgaatttgaatcatgcgcatatt

SEQ ID NO: 726028 - DNA, 25 bp, Homo sapien
aatttgaatcatgcgcatatttctc

SEQ ID NO: 726029 - DNA, 25 bp, Homo sapien
ctgtgattctgcctagtaaagccca

SEQ ID NO: 726030 - DNA, 25 bp, Homo sapien
ttctgcctagtaaagcccatattcc

SEQ ID NO: 726031 - DNA, 25 bp, Homo sapien
ttgtagttcttctaaagattcacat

SEQ ID NO: 726032 - DNA, 25 bp, Homo sapien
tattccttgtccttcacttcgaagt

SEQ ID NO: 726033 - DNA, 25 bp, Homo sapien
tggtgggcccacatctgttcaacca

SEQ ID NO: 726034 - DNA, 25 bp, Homo sapien
gcaaaattgccggtatattcaactt

SEQ ID NO: 726035 - DNA, 25 bp, Homo sapien
cttgggtgctcgcaaaattgccggt

SEQ ID NO: 726036 - DNA, 25 bp, Homo sapien
tactgcaggaagagtagatgtcttt

SEQ ID NO: 726037 - DNA, 25 bp, Homo sapien
aagtactgcaggaagagtagatgtc

SEQ ID NO: 726038 - DNA, 25 bp, Homo sapien
tgtagtttacaggtatcacacaata

SEQ ID NO: 726039 - DNA, 25 bp, Homo sapien
ggtaatgtagtttacaggtatcaca

SEQ ID NO: 726040 - DNA, 25 bp, Homo sapien
atccttgtaagaggaggatccagac

SEQ ID NO: 726041 - DNA, 25 bp, Homo sapien
ccagacatccaagatggtaatgtag

SEQ ID NO: 726042 - DNA, 25 bp, Homo sapien
aacttcatttaaggagagaactgca

SEQ ID NO: 726043 - DNA, 25 bp, Homo sapien
gctgagcagtatcaggagggtccat

SEQ ID NO: 726044 - DNA, 25 bp, Homo sapien
gactatccagtgtttagcttccacc

SEQ ID NO: 726045 - DNA, 25 bp, Homo sapien
gctgcagaaactctcacatgctgga

SEQ ID NO: 726046 - DNA, 25 bp, Homo sapien
atagttattagagtagaatatgata

SEQ ID NO: 726047 - DNA, 25 bp, Homo sapien
tagttattagagtagaatatgatat

SEQ ID NO: 726048 - DNA, 25 bp, Homo sapien
tccttgaaaacagtgctggtactgg

SEQ ID NO: 726049 - DNA, 25 bp, Homo sapien
catccaaatctagaactagtgtctc

SEQ ID NO: 726050 - DNA, 25 bp, Homo sapien
tctccttgaaaacagtgctggtact

SEQ ID NO: 726051 - DNA, 25 bp, Homo sapien
ctagaactagtgtctccttgaaaac

SEQ ID NO: 726052 - DNA, 25 bp, Homo sapien
ggttctggtggcacatcctgtggaa

SEQ ID NO: 726053 - DNA, 25 bp, Homo sapien
taatctgcctccttgatcgtttggt

SEQ ID NO: 726054 - DNA, 25 bp, Homo sapien
tgtttcttatcggaatcttcttggg

SEQ ID NO: 726055 - DNA, 25 bp, Homo sapien
catctggtagggtttccatggccat

SEQ ID NO: 726056 - DNA, 25 bp, Homo sapien
tgtatctcccttgtggaaaggaaga

SEQ ID NO: 726057 - DNA, 25 bp, Homo sapien
tcagctcaagcaaggaaagtatgcc

SEQ ID NO: 726058 - DNA, 25 bp, Homo sapien
aaactccttgttaccatgctgcagg

SEQ ID NO: 726059 - DNA, 25 bp, Homo sapien
tattctcaagttggtagaggcccct

SEQ ID NO: 726060 - DNA, 25 bp, Homo sapien
cctgaaattactggtcatggactct

SEQ ID NO: 726061 - DNA, 25 bp, Homo sapien
gtaatactgaactgtgggcacaaaa

SEQ ID NO: 726062 - DNA, 25 bp, Homo sapien
taatttccctctatatgataactcc

SEQ ID NO: 726063 - DNA, 25 bp, Homo sapien
gtttcactgaccaaaatctgtaaga

SEQ ID NO: 726064 - DNA, 25 bp, Homo sapien
gaacattcccaagctagagtaggta

SEQ ID NO: 726065 - DNA, 25 bp, Homo sapien
gacagctgagatcaaggaacattcc

SEQ ID NO: 726066 - DNA, 25 bp, Homo sapien
tgcagaccactgttccctagagact

SEQ ID NO: 726067 - DNA, 25 bp, Homo sapien
gaaatatccaccaatcacagcacag

SEQ ID NO: 726068 - DNA, 25 bp, Homo sapien
tcctcaggaacgaagcttcgttttc

SEQ ID NO: 726069 - DNA, 25 bp, Homo sapien
tcaggaacgaagcttcgttttcgtc

SEQ ID NO: 726070 - DNA, 25 bp, Homo sapien
aacgaagcttcgttttcgtcctctg

SEQ ID NO: 726071 - DNA, 25 bp, Homo sapien
agcttcgttttcgtcctctggttct

SEQ ID NO: 726072 - DNA, 25 bp, Homo sapien
atttctcaaagttaagactgtgtaa

SEQ ID NO: 726073 - DNA, 25 bp, Homo sapien
ctcaaagttaagactgtgtaaaagt

SEQ ID NO: 726074 - DNA, 25 bp, Homo sapien
ttctcaaagttaagactgtgtaaaa

SEQ ID NO: 726075 - DNA, 25 bp, Homo sapien
tctcaaagttaagactgtgtaaaag

SEQ ID NO: 726076 - DNA, 25 bp, Homo sapien
agttcccttgcaagttgcacattca

SEQ ID NO: 726077 - DNA, 25 bp, Homo sapien
tcagttcttaaatcttcagccttgg

SEQ ID NO: 726078 - DNA, 25 bp, Homo sapien
ccttgggcttcttttgcaacacaga

SEQ ID NO: 726079 - DNA, 25 bp, Homo sapien
agccttgggcttcttttgcaacaca

SEQ ID NO: 726080 - DNA, 25 bp, Homo sapien
aaagacaaggttttagcatccaact

SEQ ID NO: 726081 - DNA, 25 bp, Homo sapien
taagaaaggtcttatcctgcaattg

SEQ ID NO: 726082 - DNA, 25 bp, Homo sapien
tatagaactttcatcccctaaagac

SEQ ID NO: 726083 - DNA, 25 bp, Homo sapien
taattccctgtgttaaacaggcaga

SEQ ID NO: 726084 - DNA, 25 bp, Homo sapien
ttctttatttcgtaagggagaagca

SEQ ID NO: 726085 - DNA, 25 bp, Homo sapien
taaaatcaacctaggccatcttttc

SEQ ID NO: 726086 - DNA, 25 bp, Homo sapien
ctttatttcgtaagggagaagcatt

SEQ ID NO: 726087 - DNA, 25 bp, Homo sapien
atcaacctaggccatcttttcacct

SEQ ID NO: 726088 - DNA, 25 bp, Homo sapien
gaactgtaagaacttttgtgacact

SEQ ID NO: 726089 - DNA, 25 bp, Homo sapien
aatggattcccttacaaagtccctg

SEQ ID NO: 726090 - DNA, 25 bp, Homo sapien
tgtcctttgaaagtctgatgcctct

SEQ ID NO: 726091 - DNA, 25 bp, Homo sapien
gcctctggaccgttgggaaaagcca

SEQ ID NO: 726092 - DNA, 25 bp, Homo sapien
ttcaggatagctcccaacacactct

SEQ ID NO: 726093 - DNA, 25 bp, Homo sapien
gtcagaattattcaggtgtatctcc

SEQ ID NO: 726094 - DNA, 25 bp, Homo sapien
aacacactctacatgaactacctca

SEQ ID NO: 726095 - DNA, 25 bp, Homo sapien
ctgaacttggaactacttactactt

SEQ ID NO: 726096 - DNA, 25 bp, Homo sapien
tgtttacagaccaaattgacaccct

SEQ ID NO: 726097 - DNA, 25 bp, Homo sapien
gatgctatttaagagggctcatgga

SEQ ID NO: 726098 - DNA, 25 bp, Homo sapien
ggaggatgcactgacaagccagatt

SEQ ID NO: 726099 - DNA, 25 bp, Homo sapien
ggagaatctggcaagcatttgatag

SEQ ID NO: 726100 - DNA, 25 bp, Homo sapien
ttggatacctgtcacctacaaacct

SEQ ID NO: 726101 - DNA, 25 bp, Homo sapien
cctgtcacctacaaacctaatgttg

SEQ ID NO: 726102 - DNA, 25 bp, Homo sapien
tgaaatgtgatcccactttaggggg

SEQ ID NO: 726103 - DNA, 25 bp, Homo sapien
cacctacaaacctaatgttgaaatg

SEQ ID NO: 726104 - DNA, 25 bp, Homo sapien
tttcatgcacgctgaagagagaagc

SEQ ID NO: 726105 - DNA, 25 bp, Homo sapien
taatgacacacatgccacctagaga

SEQ ID NO: 726106 - DNA, 25 bp, Homo sapien
tgagaaaactggctcgcagagaggt

SEQ ID NO: 726107 - DNA, 25 bp, Homo sapien
tggtgcaaaacttctcaactgagga

SEQ ID NO: 726108 - DNA, 25 bp, Homo sapien
atgccatactgactgagaaacttca

SEQ ID NO: 726109 - DNA, 25 bp, Homo sapien
caatttccattcccttaattgaaat

SEQ ID NO: 726110 - DNA, 25 bp, Homo sapien
tttccattcccttaattgaaattgc

SEQ ID NO: 726111 - DNA, 25 bp, Homo sapien
tgatgccatactgactgagaaactt

SEQ ID NO: 726112 - DNA, 25 bp, Homo sapien
aactggatacagactagaggtactc

SEQ ID NO: 726113 - DNA, 25 bp, Homo sapien
tattgcaacggtccaggagagagtt

SEQ ID NO: 726114 - DNA, 25 bp, Homo sapien
tgaacccaaataactaggctccaga

SEQ ID NO: 726115 - DNA, 25 bp, Homo sapien
ggagggccttataagccatgctata

SEQ ID NO: 726116 - DNA, 25 bp, Homo sapien
ttcctgctgtaccttcaatatccac

SEQ ID NO: 726117 - DNA, 25 bp, Homo sapien
gacgcagtcatttacttaaagcaaa

SEQ ID NO: 726118 - DNA, 25 bp, Homo sapien
tcaatatccactgaaagacgcagtc

SEQ ID NO: 726119 - DNA, 25 bp, Homo sapien
gcaaaggtcggaaaattagaattga

SEQ ID NO: 726120 - DNA, 25 bp, Homo sapien
ctaattctttcaggtgttccattct

SEQ ID NO: 726121 - DNA, 25 bp, Homo sapien
caggtgttccattcttacagagcat

SEQ ID NO: 726122 - DNA, 25 bp, Homo sapien
taattctttcaggtgttccattctt

SEQ ID NO: 726123 - DNA, 25 bp, Homo sapien
tttcaggtgttccattcttacagag

SEQ ID NO: 726124 - DNA, 25 bp, Homo sapien
ttagctgggatgaaggtaaccacaa

SEQ ID NO: 726125 - DNA, 25 bp, Homo sapien
tagcctgtgactcaactaaaccaag

SEQ ID NO: 726126 - DNA, 25 bp, Homo sapien
catcttgaggctctgctacatggta

SEQ ID NO: 726127 - DNA, 25 bp, Homo sapien
tacacagaggtatttcagtcagcaa

SEQ ID NO: 726128 - DNA, 25 bp, Homo sapien
aacaaactctgggatgacggagata

SEQ ID NO: 726129 - DNA, 25 bp, Homo sapien
gaaatctgaagccttgtggtacact

SEQ ID NO: 726130 - DNA, 25 bp, Homo sapien
aacaggtgtgcccttttcaggcgta

SEQ ID NO: 726131 - DNA, 25 bp, Homo sapien
gtacaaatgacgaaaagcactctgg

SEQ ID NO: 726132 - DNA, 25 bp, Homo sapien
taaaggtctcctacccctgagagtc

SEQ ID NO: 726133 - DNA, 25 bp, Homo sapien
gaaaaaggcctacactcaagaacca

SEQ ID NO: 726134 - DNA, 25 bp, Homo sapien
taaagctgccataggaaaaagggca

SEQ ID NO: 726135 - DNA, 25 bp, Homo sapien
tactcctacaggagtgacaggaaac

SEQ ID NO: 726136 - DNA, 25 bp, Homo sapien
gcagttgacttgtgttccctcaggc

SEQ ID NO: 726137 - DNA, 25 bp, Homo sapien
ttactggcagttgacttgtgttccc

SEQ ID NO: 726138 - DNA, 25 bp, Homo sapien
actactgctattactataaagctga

SEQ ID NO: 726139 - DNA, 25 bp, Homo sapien
agctgaaggtagtgattactggcag

SEQ ID NO: 726140 - DNA, 25 bp, Homo sapien
taaagagtaattatgcaggatgatc

SEQ ID NO: 726141 - DNA, 25 bp, Homo sapien
gaactttgcatgactgggaaaacca

SEQ ID NO: 726142 - DNA, 25 bp, Homo sapien
aaaccatgtgattaaggaagacctc

SEQ ID NO: 726143 - DNA, 25 bp, Homo sapien
tgcatatactcagacaccgaaaaag

SEQ ID NO: 726144 - DNA, 25 bp, Homo sapien
tgaaatacccgtaaatgaactggaa

SEQ ID NO: 726145 - DNA, 25 bp, Homo sapien
gaactgtcaggtctgtattagcatt

SEQ ID NO: 726146 - DNA, 25 bp, Homo sapien
gtaagtggaactgtcaggtctgtat

SEQ ID NO: 726147 - DNA, 25 bp, Homo sapien
gatatgaaatacccgtaaatgaact

SEQ ID NO: 726148 - DNA, 25 bp, Homo sapien
gcttttaatagtgttaaaaggctgc

SEQ ID NO: 726149 - DNA, 25 bp, Homo sapien
ataattggcaacaaccaaatagagc

SEQ ID NO: 726150 - DNA, 25 bp, Homo sapien
ggcaacaaccaaatagagcttttaa

SEQ ID NO: 726151 - DNA, 25 bp, Homo sapien
ccaaatagagcttttaatagtgtta

SEQ ID NO: 726152 - DNA, 25 bp, Homo sapien
gccaaactgaataacctccaaagaa

SEQ ID NO: 726153 - DNA, 25 bp, Homo sapien
taaagcgttactgaggagagctatc

SEQ ID NO: 726154 - DNA, 25 bp, Homo sapien
ggagagctatcatgccaaactgaat

SEQ ID NO: 726155 - DNA, 25 bp, Homo sapien
acagacaaataaagcgttactgagg

SEQ ID NO: 726156 - DNA, 25 bp, Homo sapien
tatccaaacctgacaagcaaaaggc

SEQ ID NO: 726157 - DNA, 25 bp, Homo sapien
tgttcaatcacaacagggagtagca

SEQ ID NO: 726158 - DNA, 25 bp, Homo sapien
tattaagtcccacaggcttcagtaa

SEQ ID NO: 726159 - DNA, 25 bp, Homo sapien
attgcctccgaggatgagctgtggc

SEQ ID NO: 726160 - DNA, 25 bp, Homo sapien
acagaaagcttatattaaaacaata

SEQ ID NO: 726161 - DNA, 25 bp, Homo sapien
cacagaaagcttatattaaaacaat

SEQ ID NO: 726162 - DNA, 25 bp, Homo sapien
aacacagaaagcttatattaaaaca

SEQ ID NO: 726163 - DNA, 25 bp, Homo sapien
acacagaaagcttatattaaaacaa

SEQ ID NO: 726164 - DNA, 25 bp, Homo sapien
tagtcaataatctttgtacttccct

SEQ ID NO: 726165 - DNA, 25 bp, Homo sapien
ctggtaggttgtatagtcaataatc

SEQ ID NO: 726166 - DNA, 25 bp, Homo sapien
cagctggtaggttgtatagtcaata

SEQ ID NO: 726167 - DNA, 25 bp, Homo sapien
tttctttcagctggtaggttgtata

SEQ ID NO: 726168 - DNA, 25 bp, Homo sapien
gacaatttacatgtataagtgcaat

SEQ ID NO: 726169 - DNA, 25 bp, Homo sapien
tccaaattacatgttgacaatttac

SEQ ID NO: 726170 - DNA, 25 bp, Homo sapien
aatattcaacatacttctgccgttg

SEQ ID NO: 726171 - DNA, 25 bp, Homo sapien
ccgaaaagatgtccaaaaccacatt

SEQ ID NO: 726172 - DNA, 25 bp, Homo sapien
ttcttaggactagcaccaaatgtgg

SEQ ID NO: 726173 - DNA, 25 bp, Homo sapien
cagtgataccaaaacaaggcctaag

SEQ ID NO: 726174 - DNA, 25 bp, Homo sapien
tagttggaccgattatggacacgga

SEQ ID NO: 726175 - DNA, 25 bp, Homo sapien
cagccagagttcagcaacagtaata

SEQ ID NO: 726176 - DNA, 25 bp, Homo sapien
gatgagtgaattgtgaacacaggct

SEQ ID NO: 726177 - DNA, 25 bp, Homo sapien
aatagtgctgtttccatagtcagtg

SEQ ID NO: 726178 - DNA, 25 bp, Homo sapien
gttcttaatgtggtgttccaggcca

SEQ ID NO: 726179 - DNA, 25 bp, Homo sapien
tatctagaggaaatctaagggacct

SEQ ID NO: 726180 - DNA, 25 bp, Homo sapien
gactaacgtggagggcttgaaccta

SEQ ID NO: 726181 - DNA, 25 bp, Homo sapien
tacgcaaatctattaacaggtagcg

SEQ ID NO: 726182 - DNA, 25 bp, Homo sapien
tatttcatcgaatgcctaagaggcc

SEQ ID NO: 726183 - DNA, 25 bp, Homo sapien
cagttagctatatctgtggcagcca

SEQ ID NO: 726184 - DNA, 25 bp, Homo sapien
ttagtatatgattaagaatagcacc

SEQ ID NO: 726185 - DNA, 25 bp, Homo sapien
aaactggatgcttaaagaagtatca

SEQ ID NO: 726186 - DNA, 25 bp, Homo sapien
cactgtacacattaacactatagag

SEQ ID NO: 726187 - DNA, 25 bp, Homo sapien
cattattaaataggaaggcaatgtc

SEQ ID NO: 726188 - DNA, 25 bp, Homo sapien
ggaatcccaattataagataaaagc

SEQ ID NO: 726189 - DNA, 25 bp, Homo sapien
tgtcatctcaggtcatcagtaagaa

SEQ ID NO: 726190 - DNA, 25 bp, Homo sapien
taacatatgctgctacaggtctagc

SEQ ID NO: 726191 - DNA, 25 bp, Homo sapien
tcagccttttgtccttggaatgagg

SEQ ID NO: 726192 - DNA, 25 bp, Homo sapien
ggtagtgcgccagagttcagattgc

SEQ ID NO: 726193 - DNA, 25 bp, Homo sapien
ttcattagccaaaatttcgattaaa

SEQ ID NO: 726194 - DNA, 25 bp, Homo sapien
tcattagccaaaatttcgattaaac

SEQ ID NO: 726195 - DNA, 25 bp, Homo sapien
tactatgacagttctagctacagga

SEQ ID NO: 726196 - DNA, 25 bp, Homo sapien
gaccaataggaccaacagtacttta

SEQ ID NO: 726197 - DNA, 25 bp, Homo sapien
tgttcaaatacctgttgttctggca

SEQ ID NO: 726198 - DNA, 25 bp, Homo sapien
tttgcatcagttggaataacaagac

SEQ ID NO: 726199 - DNA, 25 bp, Homo sapien
ctattcttcgtttcagacaatctca

SEQ ID NO: 726200 - DNA, 25 bp, Homo sapien
tattcttcgtttcagacaatctcat

SEQ ID NO: 726201 - DNA, 25 bp, Homo sapien
aagaatcacattcctgacatatcca

SEQ ID NO: 726202 - DNA, 25 bp, Homo sapien
tgaagaatcacattcctgacatatc

SEQ ID NO: 726203 - DNA, 25 bp, Homo sapien
ccatccgtagcctgtctgtttagga

SEQ ID NO: 726204 - DNA, 25 bp, Homo sapien
catccgtagcctgtctgtttaggag

SEQ ID NO: 726205 - DNA, 25 bp, Homo sapien
agtgatctgtttgggctttcggagc

SEQ ID NO: 726206 - DNA, 25 bp, Homo sapien
tatgttacaataatagagaatacgt

SEQ ID NO: 726207 - DNA, 25 bp, Homo sapien
taattggttattctgttagctaaca

SEQ ID NO: 726208 - DNA, 25 bp, Homo sapien
cattctcaagtgtgttaagttagca

SEQ ID NO: 726209 - DNA, 25 bp, Homo sapien
atggcgtgatctcggttcactgcaa

SEQ ID NO: 726210 - DNA, 25 bp, Homo sapien
cctcatgatccacctccctcgacct

SEQ ID NO: 726211 - DNA, 25 bp, Homo sapien
cgcccaggttggcatgcaatggcgt

SEQ ID NO: 726212 - DNA, 25 bp, Homo sapien
gattagaggcactcgccaccatgtc

SEQ ID NO: 726213 - DNA, 25 bp, Homo sapien
ctaacaatgtgccttcctaacgcat

SEQ ID NO: 726214 - DNA, 25 bp, Homo sapien
tccactcagagtccaaagacccatt

SEQ ID NO: 726215 - DNA, 25 bp, Homo sapien
cttcctaacgcatttccactcagag

SEQ ID NO: 726216 - DNA, 25 bp, Homo sapien
taacgcatttccactcagagtccaa

SEQ ID NO: 726217 - DNA, 25 bp, Homo sapien
ttccactaggagtatcttttcacaa

SEQ ID NO: 726218 - DNA, 25 bp, Homo sapien
tatttaggcgatattttcacaattg

SEQ ID NO: 726219 - DNA, 25 bp, Homo sapien
tgtcctttatcttaactctcagcat

SEQ ID NO: 726220 - DNA, 25 bp, Homo sapien
gtgagaatagtttaattccactagg

SEQ ID NO: 726221 - DNA, 25 bp, Homo sapien
caaaattcaagagtccaacatttta

SEQ ID NO: 726222 - DNA, 25 bp, Homo sapien
ctctgctcattccagcctccgcttc

SEQ ID NO: 726223 - DNA, 25 bp, Homo sapien
tagctttaaagtttatcaaaattca

SEQ ID NO: 726224 - DNA, 25 bp, Homo sapien
cccagccaactttctagctttaaag

SEQ ID NO: 726225 - DNA, 25 bp, Homo sapien
cattcatcttcccacaccataccat

SEQ ID NO: 726226 - DNA, 25 bp, Homo sapien
tcttcccacaccataccatagcacc

SEQ ID NO: 726227 - DNA, 25 bp, Homo sapien
ttcatcttcccacaccataccatag

SEQ ID NO: 726228 - DNA, 25 bp, Homo sapien
catcttcccacaccataccatagca

SEQ ID NO: 726229 - DNA, 25 bp, Homo sapien
taaagcttcaacattgtcacaagga

SEQ ID NO: 726230 - DNA, 25 bp, Homo sapien
tgaaacagctaaataacgaagagag

SEQ ID NO: 726231 - DNA, 25 bp, Homo sapien
tagggacattgctatcttagggaag

SEQ ID NO: 726232 - DNA, 25 bp, Homo sapien
cagcacttagcctgcttataaaaga

SEQ ID NO: 726233 - DNA, 25 bp, Homo sapien
gaattaggtattggtcaggttcact

SEQ ID NO: 726234 - DNA, 25 bp, Homo sapien
ccaaaaattatagttcagccagcat

SEQ ID NO: 726235 - DNA, 25 bp, Homo sapien
caatagatgtgctatttccactgct

SEQ ID NO: 726236 - DNA, 25 bp, Homo sapien
ttccctgtggacatgtgcagctgaa

SEQ ID NO: 726237 - DNA, 25 bp, Homo sapien
caataggtttatctcttacagcagg

SEQ ID NO: 726238 - DNA, 25 bp, Homo sapien
ccaatcaattctgtgtggcctgagg

SEQ ID NO: 726239 - DNA, 25 bp, Homo sapien
ttccgtatattacaaggtgctgtca

SEQ ID NO: 726240 - DNA, 25 bp, Homo sapien
caagctttgaatcaggttagaactg

SEQ ID NO: 726241 - DNA, 25 bp, Homo sapien
cataagaagtatccacatggcagcc

SEQ ID NO: 726242 - DNA, 25 bp, Homo sapien
cagtaatgcttgtgtgatacccaag

SEQ ID NO: 726243 - DNA, 25 bp, Homo sapien
cctttggttggtgagaagtaactct

SEQ ID NO: 726244 - DNA, 25 bp, Homo sapien
tgtagagctgtcacacacaaaagca

SEQ ID NO: 726245 - DNA, 25 bp, Homo sapien
tcttgaagtgatctgtcacttaatt

SEQ ID NO: 726246 - DNA, 25 bp, Homo sapien
taaatcatagataaggaacaatata

SEQ ID NO: 726247 - DNA, 25 bp, Homo sapien
ataaatcatagataaggaacaatat

SEQ ID NO: 726248 - DNA, 25 bp, Homo sapien
aatcatagataaggaacaatataaa

SEQ ID NO: 726249 - DNA, 25 bp, Homo sapien
gctttggtgtcagacaaatcttatt

SEQ ID NO: 726250 - DNA, 25 bp, Homo sapien
tattggtttgactctgtgaaaggca

SEQ ID NO: 726251 - DNA, 25 bp, Homo sapien
tgaatcctgctttggcacttaacta

SEQ ID NO: 726252 - DNA, 25 bp, Homo sapien
tctacatgagcacagcagaaaatgc

SEQ ID NO: 726253 - DNA, 25 bp, Homo sapien
tgcctctgttcgtctttataaccag

SEQ ID NO: 726254 - DNA, 25 bp, Homo sapien
ctctgttcgtctttataaccagcaa

SEQ ID NO: 726255 - DNA, 25 bp, Homo sapien
tatgcctctgttcgtctttataacc

SEQ ID NO: 726256 - DNA, 25 bp, Homo sapien
tttatgcctctgttcgtctttataa

SEQ ID NO: 726257 - DNA, 25 bp, Homo sapien
tctggataagacatgtatggaagcc

SEQ ID NO: 726258 - DNA, 25 bp, Homo sapien
taccggcgacatgaactgattctgg

SEQ ID NO: 726259 - DNA, 25 bp, Homo sapien
tatcatggtagaccctaccggcgac

SEQ ID NO: 726260 - DNA, 25 bp, Homo sapien
tgtgaggacacaatacttcgagact

SEQ ID NO: 726261 - DNA, 25 bp, Homo sapien
gacactcaacctgttctaactgctg

SEQ ID NO: 726262 - DNA, 25 bp, Homo sapien
aaaatgaagggagacggtgcagaca

SEQ ID NO: 726263 - DNA, 25 bp, Homo sapien
taactgctggtagctacggaacaag

SEQ ID NO: 726264 - DNA, 25 bp, Homo sapien
cagaaaatatgctagtgctgcacaa

SEQ ID NO: 726265 - DNA, 25 bp, Homo sapien
ttttcttgttttcccactgtgagca

SEQ ID NO: 726266 - DNA, 25 bp, Homo sapien
ttcttgttttcccactgtgagcata

SEQ ID NO: 726267 - DNA, 25 bp, Homo sapien
cttgttttcccactgtgagcataga

SEQ ID NO: 726268 - DNA, 25 bp, Homo sapien
cattttcttgttttcccactgtgag

SEQ ID NO: 726269 - DNA, 25 bp, Homo sapien
gaagctggataaaggcaaatgggaa

SEQ ID NO: 726270 - DNA, 25 bp, Homo sapien
aatggctacctaatgaaagtttcct

SEQ ID NO: 726271 - DNA, 25 bp, Homo sapien
taaaatggcaacactacaggaagct

SEQ ID NO: 726272 - DNA, 25 bp, Homo sapien
gaatgacaagacttggaactatcac

SEQ ID NO: 726273 - DNA, 25 bp, Homo sapien
ctggaaagtagacaggcttacctct

SEQ ID NO: 726274 - DNA, 25 bp, Homo sapien
taatttctaggcacagatggaccat

SEQ ID NO: 726275 - DNA, 25 bp, Homo sapien
gtgacagccctgacaagtttgacat

SEQ ID NO: 726276 - DNA, 25 bp, Homo sapien
tgaaagaagaccctggctacatgga

SEQ ID NO: 726277 - DNA, 25 bp, Homo sapien
gatggagcctttatcacacggacag

SEQ ID NO: 726278 - DNA, 25 bp, Homo sapien
gacttcccggtttaacatgcttggc

SEQ ID NO: 726279 - DNA, 25 bp, Homo sapien
taaatgcatgccttctaacactgcc

SEQ ID NO: 726280 - DNA, 25 bp, Homo sapien
gacagtctactaagtttctccaccg

SEQ ID NO: 726281 - DNA, 25 bp, Homo sapien
aagtggtggcctcataattcatagc

SEQ ID NO: 726282 - DNA, 25 bp, Homo sapien
tcaacacacccaagtacaaaacagt

SEQ ID NO: 726283 - DNA, 25 bp, Homo sapien
tacagtttcaattctaagtggtggc

SEQ ID NO: 726284 - DNA, 25 bp, Homo sapien
taactgacataaaggtactcttctg

SEQ ID NO: 726285 - DNA, 25 bp, Homo sapien
taccaccatatgttatctgaagatc

SEQ ID NO: 726286 - DNA, 25 bp, Homo sapien
ggtctaaaataggaagcatgtgcat

SEQ ID NO: 726287 - DNA, 25 bp, Homo sapien
ttgtaccaccatatgttatctgaag

SEQ ID NO: 726288 - DNA, 25 bp, Homo sapien
gaagatcagtgaggtctaaaatagg

SEQ ID NO: 726289 - DNA, 25 bp, Homo sapien
gcatctgtagaactatgaactactg

SEQ ID NO: 726290 - DNA, 25 bp, Homo sapien
tctaataatcctaaacacaaatggt

SEQ ID NO: 726291 - DNA, 25 bp, Homo sapien
taattgctaagacacttcatgtgct

SEQ ID NO: 726292 - DNA, 25 bp, Homo sapien
catctagtatactttcttgacaggt

SEQ ID NO: 726293 - DNA, 25 bp, Homo sapien
ttatctgctattacataagctgcaa

SEQ ID NO: 726294 - DNA, 25 bp, Homo sapien
tctgctattacataagctgcaaact

SEQ ID NO: 726295 - DNA, 25 bp, Homo sapien
aaattttatctgctattacataagc

SEQ ID NO: 726296 - DNA, 25 bp, Homo sapien
tattacataagctgcaaacttttca

SEQ ID NO: 726297 - DNA, 25 bp, Homo sapien
tctgttctcaaatttgagttaagaa

SEQ ID NO: 726298 - DNA, 25 bp, Homo sapien
tactctaaaatatacgaattccaaa

SEQ ID NO: 726299 - DNA, 25 bp, Homo sapien
tgtctctgttctcaaatttgagtta

SEQ ID NO: 726300 - DNA, 25 bp, Homo sapien
taaatgtgttaacagttaggttaca

SEQ ID NO: 726301 - DNA, 25 bp, Homo sapien
gcagcttggaaattagaaccgggga

SEQ ID NO: 726302 - DNA, 25 bp, Homo sapien
cagcttggaaattagaaccggggag

SEQ ID NO: 726303 - DNA, 25 bp, Homo sapien
catctgtgggctctagttgttttcc

SEQ ID NO: 726304 - DNA, 25 bp, Homo sapien
tgttttcctgacatgcgtactgaga

SEQ ID NO: 726305 - DNA, 25 bp, Homo sapien
tctttgctccaaaattcatccaggg

SEQ ID NO: 726306 - DNA, 25 bp, Homo sapien
gaattcattagtccagggatcccat

SEQ ID NO: 726307 - DNA, 25 bp, Homo sapien
tagcatgttacggagcacacagaat

SEQ ID NO: 726308 - DNA, 25 bp, Homo sapien
catccttgttccatgataacttggt

SEQ ID NO: 726309 - DNA, 25 bp, Homo sapien
tgtgactcacactaacagtttcatt

SEQ ID NO: 726310 - DNA, 25 bp, Homo sapien
gaagaaataggtgcttccatccttg

SEQ ID NO: 726311 - DNA, 25 bp, Homo sapien
cacagtgttacacctagtataggcc

SEQ ID NO: 726312 - DNA, 25 bp, Homo sapien
tatcaacgtttataaggactctccc

SEQ ID NO: 726313 - DNA, 25 bp, Homo sapien
ttacaggctgacttacagtcacagt

SEQ ID NO: 726314 - DNA, 25 bp, Homo sapien
gaagatagttcggttcagtaagtaa

SEQ ID NO: 726315 - DNA, 25 bp, Homo sapien
aagcttctctagaggctgatctaag

SEQ ID NO: 726316 - DNA, 25 bp, Homo sapien
gttctctgatatccgataagctcca

SEQ ID NO: 726317 - DNA, 25 bp, Homo sapien
agatgttctctgatatccgataagc

SEQ ID NO: 726318 - DNA, 25 bp, Homo sapien
caagatgttctctgatatccgataa

SEQ ID NO: 726319 - DNA, 25 bp, Homo sapien
gctcaagatgttctctgatatccga

SEQ ID NO: 726320 - DNA, 25 bp, Homo sapien
cagcacccgggcacaagggcgactt

SEQ ID NO: 726321 - DNA, 25 bp, Homo sapien
ccgggcacaagggcgactttgtcca

SEQ ID NO: 726322 - DNA, 25 bp, Homo sapien
cgggcacaagggcgactttgtccat

SEQ ID NO: 726323 - DNA, 25 bp, Homo sapien
cacccgggcacaagggcgactttgt

SEQ ID NO: 726324 - DNA, 25 bp, Homo sapien
tttaaggagctagtgtggccctgtg

SEQ ID NO: 726325 - DNA, 25 bp, Homo sapien
ttttaaggagctagtgtggccctgt

SEQ ID NO: 726326 - DNA, 25 bp, Homo sapien
ctagccatgtcgtctatgagaactt

SEQ ID NO: 726327 - DNA, 25 bp, Homo sapien
cgtctatgagaacttgaaggtctgt

SEQ ID NO: 726328 - DNA, 25 bp, Homo sapien
caagcagttctcactaaacgaagga

SEQ ID NO: 726329 - DNA, 25 bp, Homo sapien
gattgtctcctatggtgtaaaccca

SEQ ID NO: 726330 - DNA, 25 bp, Homo sapien
caatattcccctaggttcataccag

SEQ ID NO: 726331 - DNA, 25 bp, Homo sapien
taaaagactggcatcctgtagaaca

SEQ ID NO: 726332 - DNA, 25 bp, Homo sapien
cagacttccagggtgtagtcacacc

SEQ ID NO: 726333 - DNA, 25 bp, Homo sapien
cccagacttccagggtgtagtcaca

SEQ ID NO: 726334 - DNA, 25 bp, Homo sapien
tctatcccagacttccagggtgtag

SEQ ID NO: 726335 - DNA, 25 bp, Homo sapien
gtcctctatcccagacttccagggt

SEQ ID NO: 726336 - DNA, 25 bp, Homo sapien
tcttttgctgccgatactccacaac

SEQ ID NO: 726337 - DNA, 25 bp, Homo sapien
ttttgctgccgatactccacaactt

SEQ ID NO: 726338 - DNA, 25 bp, Homo sapien
tcctcttttgctgccgatactccac

SEQ ID NO: 726339 - DNA, 25 bp, Homo sapien
ttgctgccgatactccacaacttac

SEQ ID NO: 726340 - DNA, 25 bp, Homo sapien
cacagttaacagtcatccggctatg

SEQ ID NO: 726341 - DNA, 25 bp, Homo sapien
caaacagctgtggaccactcgggca

SEQ ID NO: 726342 - DNA, 25 bp, Homo sapien
cagctgtcaagtagaaggtcgcaca

SEQ ID NO: 726343 - DNA, 25 bp, Homo sapien
tccggctatgggcttccaaacagct

SEQ ID NO: 726344 - DNA, 25 bp, Homo sapien
tattgactgccctttgttcaaggct

SEQ ID NO: 726345 - DNA, 25 bp, Homo sapien
gacaaatctccatgggtcttttgca

SEQ ID NO: 726346 - DNA, 25 bp, Homo sapien
caagatgctgccgattagaagacaa

SEQ ID NO: 726347 - DNA, 25 bp, Homo sapien
ccatgtcttttgagtagaactattg

SEQ ID NO: 726348 - DNA, 25 bp, Homo sapien
tcccttacctacaagaatagatgcc

SEQ ID NO: 726349 - DNA, 25 bp, Homo sapien
gatttgagctccttcgctgtagaga

SEQ ID NO: 726350 - DNA, 25 bp, Homo sapien
gagatttagccctactgtaccaaag

SEQ ID NO: 726351 - DNA, 25 bp, Homo sapien
caaagccagagatatgggaattatc

SEQ ID NO: 726352 - DNA, 25 bp, Homo sapien
cagcaaagtgtcctaagacagctgc

SEQ ID NO: 726353 - DNA, 25 bp, Homo sapien
gactccaactgaaaaagcctctgtg

SEQ ID NO: 726354 - DNA, 25 bp, Homo sapien
gacagctgctaatttaaaggcagaa

SEQ ID NO: 726355 - DNA, 25 bp, Homo sapien
taattataagcgactcagtgacaga

SEQ ID NO: 726356 - DNA, 25 bp, Homo sapien
aagtctatatgagatacttcagcca

SEQ ID NO: 726357 - DNA, 25 bp, Homo sapien
agtctatatgagatacttcagccaa

SEQ ID NO: 726358 - DNA, 25 bp, Homo sapien
gtctatatgagatacttcagccaaa

SEQ ID NO: 726359 - DNA, 25 bp, Homo sapien
cccgtggtcttatggttgaagcgtg

SEQ ID NO: 726360 - DNA, 25 bp, Homo sapien
cacccgtggtcttatggttgaagcg

SEQ ID NO: 726361 - DNA, 25 bp, Homo sapien
caccacccgtggtcttatggttgaa

SEQ ID NO: 726362 - DNA, 25 bp, Homo sapien
ccacccgtggtcttatggttgaagc

SEQ ID NO: 726363 - DNA, 25 bp, Homo sapien
gtggtccgattgaaataacactggc

SEQ ID NO: 726364 - DNA, 25 bp, Homo sapien
taggatgaatcgcacattgctgaag

SEQ ID NO: 726365 - DNA, 25 bp, Homo sapien
tgaattacaaaggtggtccgattga

SEQ ID NO: 726366 - DNA, 25 bp, Homo sapien
tgatacataggatgaatcgcacatt

SEQ ID NO: 726367 - DNA, 25 bp, Homo sapien
caagtataatagagacgctacaaac

SEQ ID NO: 726368 - DNA, 25 bp, Homo sapien
aagagcatcatagctggattaatgc

SEQ ID NO: 726369 - DNA, 25 bp, Homo sapien
tctaacacatctctagaccacaagt

SEQ ID NO: 726370 - DNA, 25 bp, Homo sapien
gagttctaagacaaatggactacta

SEQ ID NO: 726371 - DNA, 25 bp, Homo sapien
agctgacagcaggatgccatttgta

SEQ ID NO: 726372 - DNA, 25 bp, Homo sapien
taaccaggcgtcatgagctgacagc

SEQ ID NO: 726373 - DNA, 25 bp, Homo sapien
gagaaaataaccaggcgtcatgagc

SEQ ID NO: 726374 - DNA, 25 bp, Homo sapien
taaatgtgcccccagattggttgac

SEQ ID NO: 726375 - DNA, 25 bp, Homo sapien
aaagttatctgggtatcagcttcag

SEQ ID NO: 726376 - DNA, 25 bp, Homo sapien
caatgaactggtaagcacctgactg

SEQ ID NO: 726377 - DNA, 25 bp, Homo sapien
tcagtaggatccacaccaaaggtat

SEQ ID NO: 726378 - DNA, 25 bp, Homo sapien
gtaagcaggtcccagtgagtctcag

SEQ ID NO: 726379 - DNA, 25 bp, Homo sapien
aatttgggtccaaggcaacagtgcc

SEQ ID NO: 726380 - DNA, 25 bp, Homo sapien
ccattctgcaaaaagtcgccggagt

SEQ ID NO: 726381 - DNA, 25 bp, Homo sapien
caaggaagcttggatcacagatcac

SEQ ID NO: 726382 - DNA, 25 bp, Homo sapien
gaatgcccaagatatgaaggctttc

SEQ ID NO: 726383 - DNA, 25 bp, Homo sapien
aaacaggctgttctacatttttgca

SEQ ID NO: 726384 - DNA, 25 bp, Homo sapien
caggctgttctacatttttgcatgc

SEQ ID NO: 726385 - DNA, 25 bp, Homo sapien
cattctgtgaacaactgaagcaaac

SEQ ID NO: 726386 - DNA, 25 bp, Homo sapien
ccaccattctgtgaacaactgaagc

SEQ ID NO: 726387 - DNA, 25 bp, Homo sapien
tttattcagtttacttgagaatggc

SEQ ID NO: 726388 - DNA, 25 bp, Homo sapien
tattcagtttacttgagaatggcag

SEQ ID NO: 726389 - DNA, 25 bp, Homo sapien
ttattcagtttacttgagaatggca

SEQ ID NO: 726390 - DNA, 25 bp, Homo sapien
gctttattcagtttacttgagaatg

SEQ ID NO: 726391 - DNA, 25 bp, Homo sapien
gaagcatcccatttcttcaaacctc

SEQ ID NO: 726392 - DNA, 25 bp, Homo sapien
gagaagcatcccatttcttcaaacc

SEQ ID NO: 726393 - DNA, 25 bp, Homo sapien
ctactctgagaagcatcccatttct

SEQ ID NO: 726394 - DNA, 25 bp, Homo sapien
tttcttcaaacctcttcccacctgc

SEQ ID NO: 726395 - DNA, 25 bp, Homo sapien
ttgagaatatactagaccatctggt

SEQ ID NO: 726396 - DNA, 25 bp, Homo sapien
gcaatgccaaccgtattttcagctc

SEQ ID NO: 726397 - DNA, 25 bp, Homo sapien
gaccatctggtactataaaaacgtg

SEQ ID NO: 726398 - DNA, 25 bp, Homo sapien
gaaggtattcatcaaattataggtg

SEQ ID NO: 726399 - DNA, 25 bp, Homo sapien
tacgtgcacccgtggactgaagggt

SEQ ID NO: 726400 - DNA, 25 bp, Homo sapien
atttcttcggtcttgccagtcactg

SEQ ID NO: 726401 - DNA, 25 bp, Homo sapien
gaaatatttcacctccatactctgt

SEQ ID NO: 726402 - DNA, 25 bp, Homo sapien
tactctgtatttcttcggtcttgcc

SEQ ID NO: 726403 - DNA, 25 bp, Homo sapien
tataatggagaatggctgcagatca

SEQ ID NO: 726404 - DNA, 25 bp, Homo sapien
ggctgcagatcaagggcaatcattt

SEQ ID NO: 726405 - DNA, 25 bp, Homo sapien
gaaaccaatatcctctataatggag

SEQ ID NO: 726406 - DNA, 25 bp, Homo sapien
gagaccatctcatttcaatacgctg

SEQ ID NO: 726407 - DNA, 25 bp, Homo sapien
agcatccccaatgcacgggcacggc

SEQ ID NO: 726408 - DNA, 25 bp, Homo sapien
ccaacccctttggcaatcttcttca

SEQ ID NO: 726409 - DNA, 25 bp, Homo sapien
accagcatccccaatgcacgggcac

SEQ ID NO: 726410 - DNA, 25 bp, Homo sapien
ccaccagcatccccaatgcacgggc

SEQ ID NO: 726411 - DNA, 25 bp, Homo sapien
ctgacagaaaaatgggcaattgact

SEQ ID NO: 726412 - DNA, 25 bp, Homo sapien
gaaaaatgggcaattgacttaaata

SEQ ID NO: 726413 - DNA, 25 bp, Homo sapien
cagaaaaatgggcaattgacttaaa

SEQ ID NO: 726414 - DNA, 25 bp, Homo sapien
gacagaaaaatgggcaattgactta

SEQ ID NO: 726415 - DNA, 25 bp, Homo sapien
tccctcacaaattactctaaatggt

SEQ ID NO: 726416 - DNA, 25 bp, Homo sapien
gcaactgaagtgtctccaatctccc

SEQ ID NO: 726417 - DNA, 25 bp, Homo sapien
ccaaagcagctgatgggcaactgaa

SEQ ID NO: 726418 - DNA, 25 bp, Homo sapien
tccaccatggtgattgactccaaag

SEQ ID NO: 726419 - DNA, 25 bp, Homo sapien
cctcagctggtcaccattgtgagtt

SEQ ID NO: 726420 - DNA, 25 bp, Homo sapien
caccattgtgagtttgggttagaca

SEQ ID NO: 726421 - DNA, 25 bp, Homo sapien
cattgtgagtttgggttagacaaca

SEQ ID NO: 726422 - DNA, 25 bp, Homo sapien
tgagtttgggttagacaacagaaac

SEQ ID NO: 726423 - DNA, 25 bp, Homo sapien
tgctttagcgccagcttctccacca

SEQ ID NO: 726424 - DNA, 25 bp, Homo sapien
gctttagcgccagcttctccaccat

SEQ ID NO: 726425 - DNA, 25 bp, Homo sapien
atgctttagcgccagcttctccacc

SEQ ID NO: 726426 - DNA, 25 bp, Homo sapien
tgaacacagttgagcttccatcgcc

SEQ ID NO: 726427 - DNA, 25 bp, Homo sapien
tccttgccatgaacactagctactt

SEQ ID NO: 726428 - DNA, 25 bp, Homo sapien
catcgcctgtcggaaattaatccct

SEQ ID NO: 726429 - DNA, 25 bp, Homo sapien
tagctacttctaaatctccaggaca

SEQ ID NO: 726430 - DNA, 25 bp, Homo sapien
aaaaacaaaggcagttgagactctg

SEQ ID NO: 726431 - DNA, 25 bp, Homo sapien
agatttacgttttcggtaggcatag

SEQ ID NO: 726432 - DNA, 25 bp, Homo sapien
gaatagtgctcactggtgttaactg

SEQ ID NO: 726433 - DNA, 25 bp, Homo sapien
ccagaaagttgaatagtagatttac

SEQ ID NO: 726434 - DNA, 25 bp, Homo sapien
gagcttagcatgcatcattgtctca

SEQ ID NO: 726435 - DNA, 25 bp, Homo sapien
cattaactgaactaagagcttagca

SEQ ID NO: 726436 - DNA, 25 bp, Homo sapien
gaagcctgcagcctaaaagtgttaa

SEQ ID NO: 726437 - DNA, 25 bp, Homo sapien
gagtgtctatgtgatgcttaaagca

SEQ ID NO: 726438 - DNA, 25 bp, Homo sapien
gggagagcctgttctaaagctgacg

SEQ ID NO: 726439 - DNA, 25 bp, Homo sapien
cagtaccatacagaagggagagcct

SEQ ID NO: 726440 - DNA, 25 bp, Homo sapien
gctgacgtgggtctcaatagtacat

SEQ ID NO: 726441 - DNA, 25 bp, Homo sapien
cattccacaccacaagacagtgagg

SEQ ID NO: 726442 - DNA, 25 bp, Homo sapien
aaactgcctcttttcatgtgggatg

SEQ ID NO: 726443 - DNA, 25 bp, Homo sapien
ggcgcttaaccagtattgccataga

SEQ ID NO: 726444 - DNA, 25 bp, Homo sapien
gaagacatctgtgccaagagtggca

SEQ ID NO: 726445 - DNA, 25 bp, Homo sapien
tatattagtgcagcacgataggcgc

SEQ ID NO: 726446 - DNA, 25 bp, Homo sapien
agacttccaaagattccttgcatgg

SEQ ID NO: 726447 - DNA, 25 bp, Homo sapien
tctcttcaagtcaggtctgttagac

SEQ ID NO: 726448 - DNA, 25 bp, Homo sapien
gcatggctagtataaatcttcttgt

SEQ ID NO: 726449 - DNA, 25 bp, Homo sapien
cttctcttcaagtcaggtctgttag

SEQ ID NO: 726450 - DNA, 25 bp, Homo sapien
taagtcagaggagttaaaggccaag

SEQ ID NO: 726451 - DNA, 25 bp, Homo sapien
ggttccagccaagtgtcatcagaag

SEQ ID NO: 726452 - DNA, 25 bp, Homo sapien
tgggagactaattcaagggacttac

SEQ ID NO: 726453 - DNA, 25 bp, Homo sapien
tcaacctagtgaaggaggttccagc

SEQ ID NO: 726454 - DNA, 25 bp, Homo sapien
ccccgaccccataacaggccgcagt

SEQ ID NO: 726455 - DNA, 25 bp, Homo sapien
ccgaccccataacaggccgcagtgt

SEQ ID NO: 726456 - DNA, 25 bp, Homo sapien
cgaccccataacaggccgcagtgtg

SEQ ID NO: 726457 - DNA, 25 bp, Homo sapien
tcccccgaccccataacaggccgca

SEQ ID NO: 726458 - DNA, 25 bp, Homo sapien
tatctgggatgtgctatgttaccca

SEQ ID NO: 726459 - DNA, 25 bp, Homo sapien
gggcaacacgaaagcttactttgga

SEQ ID NO: 726460 - DNA, 25 bp, Homo sapien
cacataacagtcatattggctttgt

SEQ ID NO: 726461 - DNA, 25 bp, Homo sapien
tgtcttcttacgaaagacataagag

SEQ ID NO: 726462 - DNA, 25 bp, Homo sapien
ggcagcctgaaacatagataccaca

SEQ ID NO: 726463 - DNA, 25 bp, Homo sapien
tacttgcaacaccagatgatgatct

SEQ ID NO: 726464 - DNA, 25 bp, Homo sapien
tagaagtggccaagaaaggatgagt

SEQ ID NO: 726465 - DNA, 25 bp, Homo sapien
ggcagttatcctccaaccttgctga

SEQ ID NO: 726466 - DNA, 25 bp, Homo sapien
cttgtagtagtgaatacttgttacc

SEQ ID NO: 726467 - DNA, 25 bp, Homo sapien
tcggaaaactgttcgttcttcatcc

SEQ ID NO: 726468 - DNA, 25 bp, Homo sapien
gaatacttgttacccactccctctg

SEQ ID NO: 726469 - DNA, 25 bp, Homo sapien
tgcatttccaaatcggaaaactgtt

SEQ ID NO: 726470 - DNA, 25 bp, Homo sapien
ccttggagcgtgcaacaagacagcc

SEQ ID NO: 726471 - DNA, 25 bp, Homo sapien
ggcgcagatgccaattagtcccttg

SEQ ID NO: 726472 - DNA, 25 bp, Homo sapien
tctgttcctgtcttgtaggtggaag

SEQ ID NO: 726473 - DNA, 25 bp, Homo sapien
gaagactcacaaatggcgcagatgc

SEQ ID NO: 726474 - DNA, 25 bp, Homo sapien
gaaagaattgcaagtgaggattgga

SEQ ID NO: 726475 - DNA, 25 bp, Homo sapien
aaggaggtacaagagatcttcttga

SEQ ID NO: 726476 - DNA, 25 bp, Homo sapien
tcttgaaagatgaaccacatgaaag

SEQ ID NO: 726477 - DNA, 25 bp, Homo sapien
agaattgcaagtgaggattggagac

SEQ ID NO: 726478 - DNA, 25 bp, Homo sapien
atggtcatatagagaaatcacagtc

SEQ ID NO: 726479 - DNA, 25 bp, Homo sapien
tggtaaaacacaaagagctctaagg

SEQ ID NO: 726480 - DNA, 25 bp, Homo sapien
tgtatataactagcacactaatggt

SEQ ID NO: 726481 - DNA, 25 bp, Homo sapien
tcacagtcccagacatcaaggaagc

SEQ ID NO: 726482 - DNA, 25 bp, Homo sapien
gaaactgctgtctgttgaatgtggc

SEQ ID NO: 726483 - DNA, 25 bp, Homo sapien
catttccgggtgatttcaggtggcc

SEQ ID NO: 726484 - DNA, 25 bp, Homo sapien
tatattctttgatgtccttgagggt

SEQ ID NO: 726485 - DNA, 25 bp, Homo sapien
atttgaatgtaataaggcactgtgg

SEQ ID NO: 726486 - DNA, 25 bp, Homo sapien
agagttttcacttgaggtgggcttg

SEQ ID NO: 726487 - DNA, 25 bp, Homo sapien
tagagttttcacttgaggtgggctt

SEQ ID NO: 726488 - DNA, 25 bp, Homo sapien
catagccttaaatggaaagctgcct

SEQ ID NO: 726489 - DNA, 25 bp, Homo sapien
tgttctgcacatgtttattgaccca

SEQ ID NO: 726490 - DNA, 25 bp, Homo sapien
tatcaattacacacaagttttgggc

SEQ ID NO: 726491 - DNA, 25 bp, Homo sapien
tattgacccacattgtagaagtgct

SEQ ID NO: 726492 - DNA, 25 bp, Homo sapien
tacctccagggtaaaagttgagaca

SEQ ID NO: 726493 - DNA, 25 bp, Homo sapien
gacaaatcactatcctgcacttcat

SEQ ID NO: 726494 - DNA, 25 bp, Homo sapien
tgagacaaatcactatcctgcactt

SEQ ID NO: 726495 - DNA, 25 bp, Homo sapien
aaagttgagacaaatcactatcctg

SEQ ID NO: 726496 - DNA, 25 bp, Homo sapien
ctgaaacaattacatcatatttcct

SEQ ID NO: 726497 - DNA, 25 bp, Homo sapien
gaaacaattacatcatatttccttt

SEQ ID NO: 726498 - DNA, 25 bp, Homo sapien
aattacatcatatttccttttaagg

SEQ ID NO: 726499 - DNA, 25 bp, Homo sapien
catggttacttcttcctgaaacaat

SEQ ID NO: 726500 - DNA, 25 bp, Homo sapien
cctttgatgctgtgttacctgtgga

SEQ ID NO: 726501 - DNA, 25 bp, Homo sapien
gacatcacagacaaagcctttgatg

SEQ ID NO: 726502 - DNA, 25 bp, Homo sapien
tcaagaagcagccaagtaaaccctg

SEQ ID NO: 726503 - DNA, 25 bp, Homo sapien
cctgtggaattggtatcgatatctc

SEQ ID NO: 726504 - DNA, 25 bp, Homo sapien
gaccacttgtattgagctggaacct

SEQ ID NO: 726505 - DNA, 25 bp, Homo sapien
cttgtattgagctggaacctttgga

SEQ ID NO: 726506 - DNA, 25 bp, Homo sapien
tttggttgtcattctggaccacttg

SEQ ID NO: 726507 - DNA, 25 bp, Homo sapien
cattctggaccacttgtattgagct

SEQ ID NO: 726508 - DNA, 25 bp, Homo sapien
gaagttgcctggctacttgcaattt

SEQ ID NO: 726509 - DNA, 25 bp, Homo sapien
gttgcctggctacttgcaattttgt

SEQ ID NO: 726510 - DNA, 25 bp, Homo sapien
tggggaagttgcctggctacttgca

SEQ ID NO: 726511 - DNA, 25 bp, Homo sapien
tgtaggcccagttggggaagttgcc

SEQ ID NO: 726512 - DNA, 25 bp, Homo sapien
ggtacacccaattgcttgacatgag

SEQ ID NO: 726513 - DNA, 25 bp, Homo sapien
aactgctaagctctatggaagtaga

SEQ ID NO: 726514 - DNA, 25 bp, Homo sapien
gaaatacactgggactgtggtcaga

SEQ ID NO: 726515 - DNA, 25 bp, Homo sapien
tagactaagacaccggaaacagacc

SEQ ID NO: 726516 - DNA, 25 bp, Homo sapien
attttgatgtaagctgctgctgatc

SEQ ID NO: 726517 - DNA, 25 bp, Homo sapien
gatgtaagctgctgctgatctaaag

SEQ ID NO: 726518 - DNA, 25 bp, Homo sapien
ttgatgtaagctgctgctgatctaa

SEQ ID NO: 726519 - DNA, 25 bp, Homo sapien
gtaagctgctgctgatctaaagtac

SEQ ID NO: 726520 - DNA, 25 bp, Homo sapien
agcctccacagcaggcatttcatcc

SEQ ID NO: 726521 - DNA, 25 bp, Homo sapien
gcctccacagcaggcatttcatcca

SEQ ID NO: 726522 - DNA, 25 bp, Homo sapien
cctccacagcaggcatttcatccat

SEQ ID NO: 726523 - DNA, 25 bp, Homo sapien
cattatatcagccagatcaatccca

SEQ ID NO: 726524 - DNA, 25 bp, Homo sapien
cacagtcattatatcagccagatca

SEQ ID NO: 726525 - DNA, 25 bp, Homo sapien
cagtcattatatcagccagatcaat

SEQ ID NO: 726526 - DNA, 25 bp, Homo sapien
tatcagccagatcaatcccattgcc

SEQ ID NO: 726527 - DNA, 25 bp, Homo sapien
ctactgattccaggaactgcgtgag

SEQ ID NO: 726528 - DNA, 25 bp, Homo sapien
gcacctgaacataaaatggcacctt

SEQ ID NO: 726529 - DNA, 25 bp, Homo sapien
gaactgcgtgagtgtagtaaattta

SEQ ID NO: 726530 - DNA, 25 bp, Homo sapien
atggcacctttgcacagagtttctg

SEQ ID NO: 726531 - DNA, 25 bp, Homo sapien
aataaaatagacttctggggacaag

SEQ ID NO: 726532 - DNA, 25 bp, Homo sapien
tttgtagcaaacacatgaaccatgt

SEQ ID NO: 726533 - DNA, 25 bp, Homo sapien
ataggatttttacatcgaagtaggg

SEQ ID NO: 726534 - DNA, 25 bp, Homo sapien
tacatcgaagtaggggtttcagaat

SEQ ID NO: 726535 - DNA, 25 bp, Homo sapien
agatggcctcagactttttaatcag

SEQ ID NO: 726536 - DNA, 25 bp, Homo sapien
ggtgactgtatcttcccagggcaca

SEQ ID NO: 726537 - DNA, 25 bp, Homo sapien
tcttaggtatgaagtgctgcagaac

SEQ ID NO: 726538 - DNA, 25 bp, Homo sapien
tattataactatggcagatggcctc

SEQ ID NO: 726539 - DNA, 25 bp, Homo sapien
ctaactctccttctactaattgtgg

SEQ ID NO: 726540 - DNA, 25 bp, Homo sapien
tctaactctccttctactaattgtg

SEQ ID NO: 726541 - DNA, 25 bp, Homo sapien
tcttccttgatgtctaactctcctt

SEQ ID NO: 726542 - DNA, 25 bp, Homo sapien
ccatttgaccaaatggttagtttgt

SEQ ID NO: 726543 - DNA, 25 bp, Homo sapien
gtccctcagtttcatgccatttgac

SEQ ID NO: 726544 - DNA, 25 bp, Homo sapien
cagtttcatgccatttgaccaaatg

SEQ ID NO: 726545 - DNA, 25 bp, Homo sapien
tcatgccatttgaccaaatggttag

SEQ ID NO: 726546 - DNA, 25 bp, Homo sapien
tccttgatcagtctcttataatgtc

SEQ ID NO: 726547 - DNA, 25 bp, Homo sapien
taatgtctccataggattgtctgct

SEQ ID NO: 726548 - DNA, 25 bp, Homo sapien
aaatgttgatttgttcctatcccat

SEQ ID NO: 726549 - DNA, 25 bp, Homo sapien
ggattgtctgcttgagttccaaatg

SEQ ID NO: 726550 - DNA, 25 bp, Homo sapien
tctctatgcactgtgcttcatttgt

SEQ ID NO: 726551 - DNA, 25 bp, Homo sapien
tgcactgtgcttcatttgttcccat

SEQ ID NO: 726552 - DNA, 25 bp, Homo sapien
tttctctatgcactgtgcttcattt

SEQ ID NO: 726553 - DNA, 25 bp, Homo sapien
ctatgcactgtgcttcatttgttcc

SEQ ID NO: 726554 - DNA, 25 bp, Homo sapien
gccgggacctgccattctgcgagga

SEQ ID NO: 726555 - DNA, 25 bp, Homo sapien
ctgaggacagttgcctccggagccg

SEQ ID NO: 726556 - DNA, 25 bp, Homo sapien
cattctgcgaggaatggcagcggca

SEQ ID NO: 726557 - DNA, 25 bp, Homo sapien
aggacagttgcctccggagccgccg

SEQ ID NO: 726558 - DNA, 25 bp, Homo sapien
tgttatataatgaattcccacttgg

SEQ ID NO: 726559 - DNA, 25 bp, Homo sapien
tgattggcgcttcccacgaatgcgt

SEQ ID NO: 726560 - DNA, 25 bp, Homo sapien
gctgctgttagcagagtatgtccag

SEQ ID NO: 726561 - DNA, 25 bp, Homo sapien
tcccacttggtgaattgattggcgc

SEQ ID NO: 726562 - DNA, 25 bp, Homo sapien
cgaatggtcaatactgctgattcat

SEQ ID NO: 726563 - DNA, 25 bp, Homo sapien
ttgggcacatggagttctcaaattt

SEQ ID NO: 726564 - DNA, 25 bp, Homo sapien
agctttttgggcacatggagttctc

SEQ ID NO: 726565 - DNA, 25 bp, Homo sapien
tcagctcagttctaagtaataaacg

SEQ ID NO: 726566 - DNA, 25 bp, Homo sapien
cacagcgagcagttttcttgacagc

SEQ ID NO: 726567 - DNA, 25 bp, Homo sapien
tgaagtgggattgaatttaaccaag

SEQ ID NO: 726568 - DNA, 25 bp, Homo sapien
gaatttaaccaaggcaaggctgata

SEQ ID NO: 726569 - DNA, 25 bp, Homo sapien
aaggctgatattaaagaggtgcaca

SEQ ID NO: 726570 - DNA, 25 bp, Homo sapien
atttccttccagctagctcagttgc

SEQ ID NO: 726571 - DNA, 25 bp, Homo sapien
cctctgctgctactgttctggcact

SEQ ID NO: 726572 - DNA, 25 bp, Homo sapien
ggaaggatacagttgctgcaaatgc

SEQ ID NO: 726573 - DNA, 25 bp, Homo sapien
ttatttccttccagctagctcagtt

SEQ ID NO: 726574 - DNA, 25 bp, Homo sapien
ccagctgtatttagatagaatttca

SEQ ID NO: 726575 - DNA, 25 bp, Homo sapien
cagctgtatttagatagaatttcat

SEQ ID NO: 726576 - DNA, 25 bp, Homo sapien
agtccagctgtatttagatagaatt

SEQ ID NO: 726577 - DNA, 25 bp, Homo sapien
tccagctgtatttagatagaatttc

SEQ ID NO: 726578 - DNA, 25 bp, Homo sapien
gaagtcatcactgacttgatagcat

SEQ ID NO: 726579 - DNA, 25 bp, Homo sapien
tcctgaagtcatcactgacttgata

SEQ ID NO: 726580 - DNA, 25 bp, Homo sapien
gtctgcaattcttggtttcctgaag

SEQ ID NO: 726581 - DNA, 25 bp, Homo sapien
tgaagtcatcactgacttgatagca

SEQ ID NO: 726582 - DNA, 25 bp, Homo sapien
ctgggtttcttcaagataattctgt

SEQ ID NO: 726583 - DNA, 25 bp, Homo sapien
gtttcttcaagataattctgtttca

SEQ ID NO: 726584 - DNA, 25 bp, Homo sapien
tctgtttcatacagctatcttttga

SEQ ID NO: 726585 - DNA, 25 bp, Homo sapien
tgacatagtcctttgtcaataaagg

SEQ ID NO: 726586 - DNA, 25 bp, Homo sapien
catagtcctttgtcaataaaggctt

SEQ ID NO: 726587 - DNA, 25 bp, Homo sapien
tcctctaattgttgacatagtcctt

SEQ ID NO: 726588 - DNA, 25 bp, Homo sapien
taattgttgacatagtcctttgtca

SEQ ID NO: 726589 - DNA, 25 bp, Homo sapien
caagactgttaagagcacttctcgg

SEQ ID NO: 726590 - DNA, 25 bp, Homo sapien
agactgttaagagcacttctcggag

SEQ ID NO: 726591 - DNA, 25 bp, Homo sapien
gacaagactgttaagagcacttctc

SEQ ID NO: 726592 - DNA, 25 bp, Homo sapien
ctcgacaagactgttaagagcactt

SEQ ID NO: 726593 - DNA, 25 bp, Homo sapien
tgcacagatgggatagcccctgaca

SEQ ID NO: 726594 - DNA, 25 bp, Homo sapien
ggctacatgtgaatattggccagga

SEQ ID NO: 726595 - DNA, 25 bp, Homo sapien
gtggcccagatgggctggtttccca

SEQ ID NO: 726596 - DNA, 25 bp, Homo sapien
ttaaaggggctgaagttgatcctgg

SEQ ID NO: 726597 - DNA, 25 bp, Homo sapien
cagggtattgagtatgtccatctcc

SEQ ID NO: 726598 - DNA, 25 bp, Homo sapien
ccctaattcacaatgtgactgcatt

SEQ ID NO: 726599 - DNA, 25 bp, Homo sapien
gaaagtgctacggactggattgtgt

SEQ ID NO: 726600 - DNA, 25 bp, Homo sapien
tagtaacactcctgtgctattaaac

SEQ ID NO: 726601 - DNA, 25 bp, Homo sapien
ggtctctctttaagtataactttgc

SEQ ID NO: 726602 - DNA, 25 bp, Homo sapien
taactttgccatcattaaaatgttc

SEQ ID NO: 726603 - DNA, 25 bp, Homo sapien
ggtgagtggcccacccacaagcctg

SEQ ID NO: 726604 - DNA, 25 bp, Homo sapien
agtgggacatgggagactatggttg

SEQ ID NO: 726605 - DNA, 25 bp, Homo sapien
gatgtgtacgtccaacacaccactg

SEQ ID NO: 726606 - DNA, 25 bp, Homo sapien
atttcttagtgtggcgtactggtac

SEQ ID NO: 726607 - DNA, 25 bp, Homo sapien
cgtgttcaacagtcagttctccaga

SEQ ID NO: 726608 - DNA, 25 bp, Homo sapien
ttctgtgacattaagatcagtggtc

SEQ ID NO: 726609 - DNA, 25 bp, Homo sapien
tgataaccatgaatagctacaaact

SEQ ID NO: 726610 - DNA, 25 bp, Homo sapien
tatgataaccatgaatagctacaaa

SEQ ID NO: 726611 - DNA, 25 bp, Homo sapien
catatgataaccatgaatagctaca

SEQ ID NO: 726612 - DNA, 25 bp, Homo sapien
gataaccatgaatagctacaaactg

SEQ ID NO: 726613 - DNA, 25 bp, Homo sapien
gatacagccagtccagattaatgtt

SEQ ID NO: 726614 - DNA, 25 bp, Homo sapien
tgcctggagaagcagacttccctgc

SEQ ID NO: 726615 - DNA, 25 bp, Homo sapien
gagaagcagacttccctgctcgctg

SEQ ID NO: 726616 - DNA, 25 bp, Homo sapien
cagattaatgttattgcctggagaa

SEQ ID NO: 726617 - DNA, 25 bp, Homo sapien
gagtcacaagtacgcagtagtcatt

SEQ ID NO: 726618 - DNA, 25 bp, Homo sapien
agatttgagtcacaagtacgcagta

SEQ ID NO: 726619 - DNA, 25 bp, Homo sapien
cacaagtacgcagtagtcatttggc

SEQ ID NO: 726620 - DNA, 25 bp, Homo sapien
agtacgcagtagtcatttggctttt

SEQ ID NO: 726621 - DNA, 25 bp, Homo sapien
gcttgatccatgctgacagaaagga

SEQ ID NO: 726622 - DNA, 25 bp, Homo sapien
ggcttgatccatgctgacagaaagg

SEQ ID NO: 726623 - DNA, 25 bp, Homo sapien
gggcttgatccatgctgacagaaag

SEQ ID NO: 726624 - DNA, 25 bp, Homo sapien
ggggcttgatccatgctgacagaaa

SEQ ID NO: 726625 - DNA, 25 bp, Homo sapien
tcatcttgtactacattacagtcag

SEQ ID NO: 726626 - DNA, 25 bp, Homo sapien
tcttgtactacattacagtcagaga

SEQ ID NO: 726627 - DNA, 25 bp, Homo sapien
aatgtatcctccacaagggctgcat

SEQ ID NO: 726628 - DNA, 25 bp, Homo sapien
ggctgcatattgcagggtattgaac

SEQ ID NO: 726629 - DNA, 25 bp, Homo sapien
caggattgatgacttggagtaggtc

SEQ ID NO: 726630 - DNA, 25 bp, Homo sapien
ataggtgggtgtcgcacatgaatat

SEQ ID NO: 726631 - DNA, 25 bp, Homo sapien
gtaggtcttggatgtggaataggtg

SEQ ID NO: 726632 - DNA, 25 bp, Homo sapien
ggtgtcgcacatgaatatcttatgc

SEQ ID NO: 726633 - DNA, 25 bp, Homo sapien
aaaatacactgcctcgaggatgctg

SEQ ID NO: 726634 - DNA, 25 bp, Homo sapien
gatgctgtcagtctgctgatgacta

SEQ ID NO: 726635 - DNA, 25 bp, Homo sapien
gctgatgactatggcgaagcaatgg

SEQ ID NO: 726636 - DNA, 25 bp, Homo sapien
tacagctttctccactctggatttt

SEQ ID NO: 726637 - DNA, 25 bp, Homo sapien
cctccagggctgtatcatgaaccat

SEQ ID NO: 726638 - DNA, 25 bp, Homo sapien
catcagcatcttcgactttaaagcc

SEQ ID NO: 726639 - DNA, 25 bp, Homo sapien
gatgatcttcatgagcaatccttca

SEQ ID NO: 726640 - DNA, 25 bp, Homo sapien
taaagcctaagtgtgatttttgtgt

SEQ ID NO: 726641 - DNA, 25 bp, Homo sapien
catttaaagcgtgaaagtaactcat

SEQ ID NO: 726642 - DNA, 25 bp, Homo sapien
tttgcagtagcgtcctcctcaagct

SEQ ID NO: 726643 - DNA, 25 bp, Homo sapien
cctgtttttgcagtagcgtcctcct

SEQ ID NO: 726644 - DNA, 25 bp, Homo sapien
gctgtacatttaaagcgtgaaagta

SEQ ID NO: 726645 - DNA, 25 bp, Homo sapien
cagggacataggtctgcaaaaggtt

SEQ ID NO: 726646 - DNA, 25 bp, Homo sapien
tcttcaccagggacataggtctgca

SEQ ID NO: 726647 - DNA, 25 bp, Homo sapien
caccagggacataggtctgcaaaag

SEQ ID NO: 726648 - DNA, 25 bp, Homo sapien
ttcaccagggacataggtctgcaaa

SEQ ID NO: 726649 - DNA, 25 bp, Homo sapien
gggttgaaagatagtgcttccccat

SEQ ID NO: 726650 - DNA, 25 bp, Homo sapien
ctttgttgacttggggttgaaagat

SEQ ID NO: 726651 - DNA, 25 bp, Homo sapien
tgacttggggttgaaagatagtgct

SEQ ID NO: 726652 - DNA, 25 bp, Homo sapien
cttggggttgaaagatagtgcttcc

SEQ ID NO: 726653 - DNA, 25 bp, Homo sapien
tagaaaggtagccaggtgcctggtt

SEQ ID NO: 726654 - DNA, 25 bp, Homo sapien
tgatccccatgtggggataatctct

SEQ ID NO: 726655 - DNA, 25 bp, Homo sapien
taaacctctgagtacctgctgatcc

SEQ ID NO: 726656 - DNA, 25 bp, Homo sapien
ttccttaaacctctgagtacctgct

SEQ ID NO: 726657 - DNA, 25 bp, Homo sapien
tctcttcagtgccagtaatagtgac

SEQ ID NO: 726658 - DNA, 25 bp, Homo sapien
ggtcccataatctacttctcctgtg

SEQ ID NO: 726659 - DNA, 25 bp, Homo sapien
tgccagtaatagtgacagtcacagc

SEQ ID NO: 726660 - DNA, 25 bp, Homo sapien
catgggtcccataatctacttctcc

SEQ ID NO: 726661 - DNA, 25 bp, Homo sapien
cttgcagggatcagaagcaggaggc

SEQ ID NO: 726662 - DNA, 25 bp, Homo sapien
ttgcagggatcagaagcaggaggca

SEQ ID NO: 726663 - DNA, 25 bp, Homo sapien
cggcttgcagggatcagaagcagga

SEQ ID NO: 726664 - DNA, 25 bp, Homo sapien
cacaggaccggcgacggctgcactg

SEQ ID NO: 726665 - DNA, 25 bp, Homo sapien
cgagcgtgcagtacagaacaggagt

SEQ ID NO: 726666 - DNA, 25 bp, Homo sapien
tatggattccgagggtggctactgc

SEQ ID NO: 726667 - DNA, 25 bp, Homo sapien
tagaacctgctagggctctgggaca

SEQ ID NO: 726668 - DNA, 25 bp, Homo sapien
tctttctgagctctatattctttca

SEQ ID NO: 726669 - DNA, 25 bp, Homo sapien
atctttctgagctctatattctttc

SEQ ID NO: 726670 - DNA, 25 bp, Homo sapien
ctttctgagctctatattctttcat

SEQ ID NO: 726671 - DNA, 25 bp, Homo sapien
ggcagacaagcacatttagcatctc

SEQ ID NO: 726672 - DNA, 25 bp, Homo sapien
atctccttcataccgctccatccca

SEQ ID NO: 726673 - DNA, 25 bp, Homo sapien
cctttccatggaacctcaccttggg

SEQ ID NO: 726674 - DNA, 25 bp, Homo sapien
attttaggtagtggagatggcagac

SEQ ID NO: 726675 - DNA, 25 bp, Homo sapien
tgcatcgtgattgccttgcttccat

SEQ ID NO: 726676 - DNA, 25 bp, Homo sapien
caacacaacatgctagaaggtggtt

SEQ ID NO: 726677 - DNA, 25 bp, Homo sapien
cgggaaccttccttgtctaatcttg

SEQ ID NO: 726678 - DNA, 25 bp, Homo sapien
ctgcatacagtttttcaagaaagga

SEQ ID NO: 726679 - DNA, 25 bp, Homo sapien
gaagaaattgtgatgattttctccc

SEQ ID NO: 726680 - DNA, 25 bp, Homo sapien
tttctcccattggcaattctgtttt

SEQ ID NO: 726681 - DNA, 25 bp, Homo sapien
cattggcaattctgtttttcccctg

SEQ ID NO: 726682 - DNA, 25 bp, Homo sapien
ttctggggaagaaattgtgatgatt

SEQ ID NO: 726683 - DNA, 25 bp, Homo sapien
ttctgataatcgatttttactatca

SEQ ID NO: 726684 - DNA, 25 bp, Homo sapien
acattctgataatcgatttttacta

SEQ ID NO: 726685 - DNA, 25 bp, Homo sapien
cattctgataatcgatttttactat

SEQ ID NO: 726686 - DNA, 25 bp, Homo sapien
ctgataatcgatttttactatcatt

SEQ ID NO: 726687 - DNA, 25 bp, Homo sapien
ctgtaaacactttgccaggattctg

SEQ ID NO: 726688 - DNA, 25 bp, Homo sapien
ggccatttaagtgggtactgatgtc

SEQ ID NO: 726689 - DNA, 25 bp, Homo sapien
gagttttgccgaaatggccatttaa

SEQ ID NO: 726690 - DNA, 25 bp, Homo sapien
tcttctgcaagagaatccaactgta

SEQ ID NO: 726691 - DNA, 25 bp, Homo sapien
ggtaggataacgacggcatcagcag

SEQ ID NO: 726692 - DNA, 25 bp, Homo sapien
aagcgctgctgtaacctgcgtccgc

SEQ ID NO: 726693 - DNA, 25 bp, Homo sapien
tgtttgagcccagaggcgtcgatcg

SEQ ID NO: 726694 - DNA, 25 bp, Homo sapien
gagattgtgcgctcttcaggtttca

SEQ ID NO: 726695 - DNA, 25 bp, Homo sapien
ttcggcgcggacagggccgaggaca

SEQ ID NO: 726696 - DNA, 25 bp, Homo sapien
gacagggtcgtggagtccacagtcc

SEQ ID NO: 726697 - DNA, 25 bp, Homo sapien
gcgctgcgcagtcccgggctgcttc

SEQ ID NO: 726698 - DNA, 25 bp, Homo sapien
gaggacagggtcgtggagtccacag

SEQ ID NO: 726699 - DNA, 25 bp, Homo sapien
agcctcgctccggaaggggacctgg

SEQ ID NO: 726700 - DNA, 25 bp, Homo sapien
tcagcctcgctccggaaggggacct

SEQ ID NO: 726701 - DNA, 25 bp, Homo sapien
cagcctcgctccggaaggggacctg

SEQ ID NO: 726702 - DNA, 25 bp, Homo sapien
ggtacaacggggcatgttcaatccc

SEQ ID NO: 726703 - DNA, 25 bp, Homo sapien
tattgctacaaagagactcttgtta

SEQ ID NO: 726704 - DNA, 25 bp, Homo sapien
tattagagtcaggttgggatttgat

SEQ ID NO: 726705 - DNA, 25 bp, Homo sapien
ggcctgctatctgtcgagtgattct

SEQ ID NO: 726706 - DNA, 25 bp, Homo sapien
gccaaggttctgattatctagatga

SEQ ID NO: 726707 - DNA, 25 bp, Homo sapien
tattactccttaaaatattccaggc

SEQ ID NO: 726708 - DNA, 25 bp, Homo sapien
tgtttgtagttaagacaagggagga

SEQ ID NO: 726709 - DNA, 25 bp, Homo sapien
gctcttggttaaatcgctgctgaat

SEQ ID NO: 726710 - DNA, 25 bp, Homo sapien
tgtgactccatcataagcatcttct

SEQ ID NO: 726711 - DNA, 25 bp, Homo sapien
ccatcataagcatcttctttgcttg

SEQ ID NO: 726712 - DNA, 25 bp, Homo sapien
taagcatcttctttgcttgaatgca

SEQ ID NO: 726713 - DNA, 25 bp, Homo sapien
gtgactccatcataagcatcttctt

SEQ ID NO: 726714 - DNA, 25 bp, Homo sapien
tagggcaggtgacactatctcttcc

SEQ ID NO: 726715 - DNA, 25 bp, Homo sapien
cattatggacttcactattaaccag

SEQ ID NO: 726716 - DNA, 25 bp, Homo sapien
tcctgttccctgacaagtagggcag

SEQ ID NO: 726717 - DNA, 25 bp, Homo sapien
ccacatatggaaactgagagacatc

SEQ ID NO: 726718 - DNA, 25 bp, Homo sapien
ggtgtccattaagactctgatttgg

SEQ ID NO: 726719 - DNA, 25 bp, Homo sapien
tccattaagactctgatttggttgt

SEQ ID NO: 726720 - DNA, 25 bp, Homo sapien
cactggtgtccattaagactctgat

SEQ ID NO: 726721 - DNA, 25 bp, Homo sapien
agcttcactggtgtccattaagact

SEQ ID NO: 726722 - DNA, 25 bp, Homo sapien
taatctctgatcactatatggaatc

SEQ ID NO: 726723 - DNA, 25 bp, Homo sapien
tatggaatcaatgccaccagttggt

SEQ ID NO: 726724 - DNA, 25 bp, Homo sapien
tggaatcaatgccaccagttggttt

SEQ ID NO: 726725 - DNA, 25 bp, Homo sapien
cttcttggccttaatctctgatcac

SEQ ID NO: 726726 - DNA, 25 bp, Homo sapien
ttatagagtaaggatattggccctc

SEQ ID NO: 726727 - DNA, 25 bp, Homo sapien
tctattttgctttggaggttggcct

SEQ ID NO: 726728 - DNA, 25 bp, Homo sapien
gccactgtgatagaaatggcatcta

SEQ ID NO: 726729 - DNA, 25 bp, Homo sapien
ttcagtcactactgccaacaaagta

SEQ ID NO: 726730 - DNA, 25 bp, Homo sapien
tgaacatcataactgacataggctg

SEQ ID NO: 726731 - DNA, 25 bp, Homo sapien
caccaatgtatttcacgtcgataga

SEQ ID NO: 726732 - DNA, 25 bp, Homo sapien
taaattgtacgcttctgaacatcat

SEQ ID NO: 726733 - DNA, 25 bp, Homo sapien
tcgatagagcgagggaaaaggaaaa

SEQ ID NO: 726734 - DNA, 25 bp, Homo sapien
tgtttcatatcaagtggaccaataa

SEQ ID NO: 726735 - DNA, 25 bp, Homo sapien
aatggttatgttgtttaagcgtgcc

SEQ ID NO: 726736 - DNA, 25 bp, Homo sapien
gatgttttcaacttcgacagagtaa

SEQ ID NO: 726737 - DNA, 25 bp, Homo sapien
tgaaaattgaacttgggcagtgatg

SEQ ID NO: 726738 - DNA, 25 bp, Homo sapien
tacaaagtatttcatgattgattct

SEQ ID NO: 726739 - DNA, 25 bp, Homo sapien
tatgatatacaaagctgacattcat

SEQ ID NO: 726740 - DNA, 25 bp, Homo sapien
ccacctccttcaagttatatgatat

SEQ ID NO: 726741 - DNA, 25 bp, Homo sapien
acggctcgcgagcctcgacctactg

SEQ ID NO: 726742 - DNA, 25 bp, Homo sapien
taacggtaggtactgtgtaatcaat

SEQ ID NO: 726743 - DNA, 25 bp, Homo sapien
tctgctataacggtaggtactgtgt

SEQ ID NO: 726744 - DNA, 25 bp, Homo sapien
catttcctctgctataacggtaggt

SEQ ID NO: 726745 - DNA, 25 bp, Homo sapien
tacatataactcatttcctctgcta

SEQ ID NO: 726746 - DNA, 25 bp, Homo sapien
gacaataaaaagttattataaatca

SEQ ID NO: 726747 - DNA, 25 bp, Homo sapien
cattatttgacaataaaaagttatt

SEQ ID NO: 726748 - DNA, 25 bp, Homo sapien
caataaaaagttattataaatcaga

SEQ ID NO: 726749 - DNA, 25 bp, Homo sapien
acttcattatttgacaataaaaagt

SEQ ID NO: 726750 - DNA, 25 bp, Homo sapien
gagtactatgttatgcactttgatg

SEQ ID NO: 726751 - DNA, 25 bp, Homo sapien
agtactatgttatgcactttgatgg

SEQ ID NO: 726752 - DNA, 25 bp, Homo sapien
gtgaccatggttctcttatcataga

SEQ ID NO: 726753 - DNA, 25 bp, Homo sapien
gagtgagccctgtagacataattac

SEQ ID NO: 726754 - DNA, 25 bp, Homo sapien
tgtcagctaatggtcaaaacaccaa

SEQ ID NO: 726755 - DNA, 25 bp, Homo sapien
tccatagtgagactactttaacaca

SEQ ID NO: 726756 - DNA, 25 bp, Homo sapien
gacatactgatacctctcctgggat

SEQ ID NO: 726757 - DNA, 25 bp, Homo sapien
tcagactgccccaactgataagttg

SEQ ID NO: 726758 - DNA, 25 bp, Homo sapien
caaagtatgttgttgtcacagtaac

SEQ ID NO: 726759 - DNA, 25 bp, Homo sapien
tctgttcagagtggccaaagtatgt

SEQ ID NO: 726760 - DNA, 25 bp, Homo sapien
aactgtactcttagaagtgtaaact

SEQ ID NO: 726761 - DNA, 25 bp, Homo sapien
cattaacacagagtggagagttaca

SEQ ID NO: 726762 - DNA, 25 bp, Homo sapien
tacctcttcattgagagtataggaa

SEQ ID NO: 726763 - DNA, 25 bp, Homo sapien
agaactgcaggtccacatactttta

SEQ ID NO: 726764 - DNA, 25 bp, Homo sapien
tcagtagtgactggagctatgactt

SEQ ID NO: 726765 - DNA, 25 bp, Homo sapien
tcttccatgagtaatagactttcag

SEQ ID NO: 726766 - DNA, 25 bp, Homo sapien
aaagccatgcacagtttatttacag

SEQ ID NO: 726767 - DNA, 25 bp, Homo sapien
ggcttataagtgttaggcaatcact

SEQ ID NO: 726768 - DNA, 25 bp, Homo sapien
tatgagaaacttgttgtaatgagtc

SEQ ID NO: 726769 - DNA, 25 bp, Homo sapien
tgagtctgtaccactttatttgaca

SEQ ID NO: 726770 - DNA, 25 bp, Homo sapien
ttttatgccagatccaagctgtaac

SEQ ID NO: 726771 - DNA, 25 bp, Homo sapien
ctggaacctattcccagtctatggg

SEQ ID NO: 726772 - DNA, 25 bp, Homo sapien
attgataactgggtacctaacagtt

SEQ ID NO: 726773 - DNA, 25 bp, Homo sapien
aaaacatgtctacaccattctttag

SEQ ID NO: 726774 - DNA, 25 bp, Homo sapien
taatgacattcaattaaggatttct

SEQ ID NO: 726775 - DNA, 25 bp, Homo sapien
tacctaacagttgcaaaacatgtct

SEQ ID NO: 726776 - DNA, 25 bp, Homo sapien
taattgcttcactggcctaacaagg

SEQ ID NO: 726777 - DNA, 25 bp, Homo sapien
caatctgagtcagcagggatttcca

SEQ ID NO: 726778 - DNA, 25 bp, Homo sapien
taagtacgtgatcttcagccagtcc

SEQ ID NO: 726779 - DNA, 25 bp, Homo sapien
gcagatttggaagccctactacaga

SEQ ID NO: 726780 - DNA, 25 bp, Homo sapien
gaaagaactcgatttggtcaggaca

SEQ ID NO: 726781 - DNA, 25 bp, Homo sapien
aaagtgtgtgttcggactgctctcc

SEQ ID NO: 726782 - DNA, 25 bp, Homo sapien
tgtgtccaacaagtctatgagtgcc

SEQ ID NO: 726783 - DNA, 25 bp, Homo sapien
tcaaactttgtgactgggcaactcc

SEQ ID NO: 726784 - DNA, 25 bp, Homo sapien
cagttttgttgaatcacactcagta

SEQ ID NO: 726785 - DNA, 25 bp, Homo sapien
tgtttcacccataaaccaaagcagt

SEQ ID NO: 726786 - DNA, 25 bp, Homo sapien
cactaccctctaggccaatgttcag

SEQ ID NO: 726787 - DNA, 25 bp, Homo sapien
tgaagaagtgactgtacactaccct

SEQ ID NO: 726788 - DNA, 25 bp, Homo sapien
tttttaaaccagatacaggcttaca

SEQ ID NO: 726789 - DNA, 25 bp, Homo sapien
gttacccagtaaggacacaattaga

SEQ ID NO: 726790 - DNA, 25 bp, Homo sapien
ggttgttacagatatcagtgtggtc

SEQ ID NO: 726791 - DNA, 25 bp, Homo sapien
tcttgaatcatgtgacaatgccact

SEQ ID NO: 726792 - DNA, 25 bp, Homo sapien
gacattagtgggtgccaatccaacc

SEQ ID NO: 726793 - DNA, 25 bp, Homo sapien
ctgataggaacttttctccagggag

SEQ ID NO: 726794 - DNA, 25 bp, Homo sapien
tattcctgtgattgtccacctgagc

SEQ ID NO: 726795 - DNA, 25 bp, Homo sapien
caatccaacccttgtggtcttggca

SEQ ID NO: 726796 - DNA, 25 bp, Homo sapien
tgttagaacagcaagacgcagcggg

SEQ ID NO: 726797 - DNA, 25 bp, Homo sapien
tatcccacgaaaggactgggtgcac

SEQ ID NO: 726798 - DNA, 25 bp, Homo sapien
tacatccctgtagcttgactcctgg

SEQ ID NO: 726799 - DNA, 25 bp, Homo sapien
gcagacggattacgcgaaggctcta

SEQ ID NO: 726800 - DNA, 25 bp, Homo sapien
tgtggccatgtgctaaagcgtcctg

SEQ ID NO: 726801 - DNA, 25 bp, Homo sapien
gagctctgggaatcactggcaaata

SEQ ID NO: 726802 - DNA, 25 bp, Homo sapien
tttggctagtgtctaaatgcggtcc

SEQ ID NO: 726803 - DNA, 25 bp, Homo sapien
tcctgggacaactgtaagagctctg

SEQ ID NO: 726804 - DNA, 25 bp, Homo sapien
taaggcccacgatacctgaaattgt

SEQ ID NO: 726805 - DNA, 25 bp, Homo sapien
tgtttatgcatttggacacctcctg

SEQ ID NO: 726806 - DNA, 25 bp, Homo sapien
taatccagaaaattgggtgcccttg

SEQ ID NO: 726807 - DNA, 25 bp, Homo sapien
taactgtacactaagaaatctctgg

SEQ ID NO: 726808 - DNA, 25 bp, Homo sapien
ccgtggcaacctgaggtctccaaga

SEQ ID NO: 726809 - DNA, 25 bp, Homo sapien
gtcccgtggcaacctgaggtctcca

SEQ ID NO: 726810 - DNA, 25 bp, Homo sapien
ttgtcccgtggcaacctgaggtctc

SEQ ID NO: 726811 - DNA, 25 bp, Homo sapien
cttgtcccgtggcaacctgaggtct

SEQ ID NO: 726812 - DNA, 25 bp, Homo sapien
tagggaagcctttaatataaacaga

SEQ ID NO: 726813 - DNA, 25 bp, Homo sapien
aagagttgcatcagtagggaagcct

SEQ ID NO: 726814 - DNA, 25 bp, Homo sapien
tatcttctaaccattctttcatgca

SEQ ID NO: 726815 - DNA, 25 bp, Homo sapien
gaatatttagtacttgacctttatc

SEQ ID NO: 726816 - DNA, 25 bp, Homo sapien
cttaaatgctttatgcaatattctt

SEQ ID NO: 726817 - DNA, 25 bp, Homo sapien
taaatgctttatgcaatattcttct

SEQ ID NO: 726818 - DNA, 25 bp, Homo sapien
aatgctttatgcaatattcttctca

SEQ ID NO: 726819 - DNA, 25 bp, Homo sapien
atgctttatgcaatattcttctcat

SEQ ID NO: 726820 - DNA, 25 bp, Homo sapien
tggcaaagcaatcgttcttgaaaag

SEQ ID NO: 726821 - DNA, 25 bp, Homo sapien
ggcaaagcaatcgttcttgaaaagt

SEQ ID NO: 726822 - DNA, 25 bp, Homo sapien
gcttcttgctcttgtttagctctta

SEQ ID NO: 726823 - DNA, 25 bp, Homo sapien
tgctcttgtttagctcttaatttag

SEQ ID NO: 726824 - DNA, 25 bp, Homo sapien
ttcttgctcttgtttagctcttaat

SEQ ID NO: 726825 - DNA, 25 bp, Homo sapien
ttgcttcttgctcttgtttagctct

SEQ ID NO: 726826 - DNA, 25 bp, Homo sapien
gctccttaattgtaggttaccatta

SEQ ID NO: 726827 - DNA, 25 bp, Homo sapien
tcaccatgatttgagaagaggatgt

SEQ ID NO: 726828 - DNA, 25 bp, Homo sapien
aaatcttctttacaggtctgatcat

SEQ ID NO: 726829 - DNA, 25 bp, Homo sapien
tggctttacccaatgtttccttggc

SEQ ID NO: 726830 - DNA, 25 bp, Homo sapien
ttcctttaaatctgcaaccttttga

SEQ ID NO: 726831 - DNA, 25 bp, Homo sapien
ctttaaatctgcaaccttttgactt

SEQ ID NO: 726832 - DNA, 25 bp, Homo sapien
ccaggctgggcagctttactaccct

SEQ ID NO: 726833 - DNA, 25 bp, Homo sapien
caggctgggcagctttactaccctt

SEQ ID NO: 726834 - DNA, 25 bp, Homo sapien
tcactagcaaactttgttttcttgt

SEQ ID NO: 726835 - DNA, 25 bp, Homo sapien
cttgtcctgaaattgtacttttcct

SEQ ID NO: 726836 - DNA, 25 bp, Homo sapien
atcatgtgcatcatcactagcaaac

SEQ ID NO: 726837 - DNA, 25 bp, Homo sapien
tcttgtcctgaaattgtacttttcc

SEQ ID NO: 726838 - DNA, 25 bp, Homo sapien
tcctctttttcataggtccagttga

SEQ ID NO: 726839 - DNA, 25 bp, Homo sapien
cggttgtttggatgcaggttattct

SEQ ID NO: 726840 - DNA, 25 bp, Homo sapien
ctctttttcataggtccagttgaac

SEQ ID NO: 726841 - DNA, 25 bp, Homo sapien
ctgttttcggttgtttggatgcagg

SEQ ID NO: 726842 - DNA, 25 bp, Homo sapien
cttttagagagagaaaattgctttc

SEQ ID NO: 726843 - DNA, 25 bp, Homo sapien
agagagaaaattgctttccaaaagg

SEQ ID NO: 726844 - DNA, 25 bp, Homo sapien
tagagagagaaaattgctttccaaa

SEQ ID NO: 726845 - DNA, 25 bp, Homo sapien
tttagagagagaaaattgctttcca

SEQ ID NO: 726846 - DNA, 25 bp, Homo sapien
taaaggctcgtctctggagagggct

SEQ ID NO: 726847 - DNA, 25 bp, Homo sapien
aaactgttggtgagagaccccttga

SEQ ID NO: 726848 - DNA, 25 bp, Homo sapien
tctggagaaaccagcgagggatgac

SEQ ID NO: 726849 - DNA, 25 bp, Homo sapien
gaaaatttcgctctcaaaactgttg

SEQ ID NO: 726850 - DNA, 25 bp, Homo sapien
tatctctgcaatcctcccctcccca

SEQ ID NO: 726851 - DNA, 25 bp, Homo sapien
ttatctctgcaatcctcccctcccc

SEQ ID NO: 726852 - DNA, 25 bp, Homo sapien
atctctgcaatcctcccctccccac

SEQ ID NO: 726853 - DNA, 25 bp, Homo sapien
actgagtgaagcctgaaatcttgag

SEQ ID NO: 726854 - DNA, 25 bp, Homo sapien
gatccctgtgaagaattctgctgac

SEQ ID NO: 726855 - DNA, 25 bp, Homo sapien
tagacatccctatgcacattaagag

SEQ ID NO: 726856 - DNA, 25 bp, Homo sapien
ccaaaggaacatcattgctgcacca

SEQ ID NO: 726857 - DNA, 25 bp, Homo sapien
gaagtgcacatcacaaatatggcta

SEQ ID NO: 726858 - DNA, 25 bp, Homo sapien
agagagatgagtaacatagaagtgc

SEQ ID NO: 726859 - DNA, 25 bp, Homo sapien
gagggcatcctcttccacattttta

SEQ ID NO: 726860 - DNA, 25 bp, Homo sapien
tgagatccatgttgcatccgatgag

SEQ ID NO: 726861 - DNA, 25 bp, Homo sapien
gctgccattatgtccttcagcataa

SEQ ID NO: 726862 - DNA, 25 bp, Homo sapien
gcaaaagaatgttatcactgttttt

SEQ ID NO: 726863 - DNA, 25 bp, Homo sapien
tggtgacttctgtaaggtaaactaa

SEQ ID NO: 726864 - DNA, 25 bp, Homo sapien
tatgtccttcagcataaagaactgg

SEQ ID NO: 726865 - DNA, 25 bp, Homo sapien
gaggcagagaattcttctaaatgat

SEQ ID NO: 726866 - DNA, 25 bp, Homo sapien
tcttctaaatgattgttggaactta

SEQ ID NO: 726867 - DNA, 25 bp, Homo sapien
ctaaatgattgttggaacttagaat

SEQ ID NO: 726868 - DNA, 25 bp, Homo sapien
tttgaggcagagaattcttctaaat

SEQ ID NO: 726869 - DNA, 25 bp, Homo sapien
tacgataacctgacaaacttggaat

SEQ ID NO: 726870 - DNA, 25 bp, Homo sapien
cctgacaaacttggaattgctgtat

SEQ ID NO: 726871 - DNA, 25 bp, Homo sapien
ttctacgataacctgacaaacttgg

SEQ ID NO: 726872 - DNA, 25 bp, Homo sapien
tgtagacttttctacgataacctga

SEQ ID NO: 726873 - DNA, 25 bp, Homo sapien
catttggagttgagatcctgtcgtg

SEQ ID NO: 726874 - DNA, 25 bp, Homo sapien
gagttgagatcctgtcgtgaaggat

SEQ ID NO: 726875 - DNA, 25 bp, Homo sapien
cctgtcgtgaaggatattgcagcct

SEQ ID NO: 726876 - DNA, 25 bp, Homo sapien
gagactcatggtatattatgtgggg

SEQ ID NO: 726877 - DNA, 25 bp, Homo sapien
tgggattgacatatacaccccttgg

SEQ ID NO: 726878 - DNA, 25 bp, Homo sapien
tgctgggcaagtgaagcattgtttc

SEQ ID NO: 726879 - DNA, 25 bp, Homo sapien
tataaatttaggagctgtaacctcc

SEQ ID NO: 726880 - DNA, 25 bp, Homo sapien
taggatgattccttatgctgggcaa

SEQ ID NO: 726881 - DNA, 25 bp, Homo sapien
ggggtccttttcataagttgtctca

SEQ ID NO: 726882 - DNA, 25 bp, Homo sapien
cccaggagtggtaagtcgctggata

SEQ ID NO: 726883 - DNA, 25 bp, Homo sapien
aaatgagaggcttagcaatggcacg

SEQ ID NO: 726884 - DNA, 25 bp, Homo sapien
caatggcacgtgtctttgttcatga

SEQ ID NO: 726885 - DNA, 25 bp, Homo sapien
tctctggacccatcgttctaaagtg

SEQ ID NO: 726886 - DNA, 25 bp, Homo sapien
ggccatggggctttcgtcaaaatta

SEQ ID NO: 726887 - DNA, 25 bp, Homo sapien
ctgtttatcatctttcggtaactgg

SEQ ID NO: 726888 - DNA, 25 bp, Homo sapien
tcacaatgcttgtgggtgataaatc

SEQ ID NO: 726889 - DNA, 25 bp, Homo sapien
tctttcggtaactggtacccatgta

SEQ ID NO: 726890 - DNA, 25 bp, Homo sapien
aattgtcgacaacagtgctggagac

SEQ ID NO: 726891 - DNA, 25 bp, Homo sapien
gcaattgtcgacaacagtgctggag

SEQ ID NO: 726892 - DNA, 25 bp, Homo sapien
actaaagcaattgtcgacaacagtg

SEQ ID NO: 726893 - DNA, 25 bp, Homo sapien
aagcaattgtcgacaacagtgctgg

SEQ ID NO: 726894 - DNA, 25 bp, Homo sapien
ttcttccacacgatccataaatgca

SEQ ID NO: 726895 - DNA, 25 bp, Homo sapien
actgtatgcatcacgctgccttcta

SEQ ID NO: 726896 - DNA, 25 bp, Homo sapien
cacgatccataaatgcactgtatgc

SEQ ID NO: 726897 - DNA, 25 bp, Homo sapien
taaatgcactgtatgcatcacgctg

SEQ ID NO: 726898 - DNA, 25 bp, Homo sapien
ctgagctttttgcccctgtttcttc

SEQ ID NO: 726899 - DNA, 25 bp, Homo sapien
ccatttctcctctggacaccaacac

SEQ ID NO: 726900 - DNA, 25 bp, Homo sapien
agctttttgcccctgtttcttccat

SEQ ID NO: 726901 - DNA, 25 bp, Homo sapien
ttccatttctcctctggacaccaac

SEQ ID NO: 726902 - DNA, 25 bp, Homo sapien
tatttgaacatcagccacacagagg

SEQ ID NO: 726903 - DNA, 25 bp, Homo sapien
gaataatgcgcaaaaatgtcctcca

SEQ ID NO: 726904 - DNA, 25 bp, Homo sapien
caaatgaggcctctgtctaggacag

SEQ ID NO: 726905 - DNA, 25 bp, Homo sapien
tgctggacgctggttctcagaggac

SEQ ID NO: 726906 - DNA, 25 bp, Homo sapien
aatgataagatgcctcttatcagac

SEQ ID NO: 726907 - DNA, 25 bp, Homo sapien
caatgataagatgcctcttatcaga

SEQ ID NO: 726908 - DNA, 25 bp, Homo sapien
aggccacctgtggagccctttagta

SEQ ID NO: 726909 - DNA, 25 bp, Homo sapien
tgaatgcttgctgagctacagaact

SEQ ID NO: 726910 - DNA, 25 bp, Homo sapien
cagcaggcttgctctggatgaatgc

SEQ ID NO: 726911 - DNA, 25 bp, Homo sapien
catttataaagagtaagggtgcata

SEQ ID NO: 726912 - DNA, 25 bp, Homo sapien
gggaaatgcacgggagatgaacatt

SEQ ID NO: 726913 - DNA, 25 bp, Homo sapien
tgggaaatgcacgggagatgaacat

SEQ ID NO: 726914 - DNA, 25 bp, Homo sapien
ggaaatgcacgggagatgaacattc

SEQ ID NO: 726915 - DNA, 25 bp, Homo sapien
gatttctgtagaatccaggaaggtg

SEQ ID NO: 726916 - DNA, 25 bp, Homo sapien
aggaaggtgccagaattcatcaatg

SEQ ID NO: 726917 - DNA, 25 bp, Homo sapien
ctttggacattaacagaaagcacat

SEQ ID NO: 726918 - DNA, 25 bp, Homo sapien
tatcagcatttccactcatagttgc

SEQ ID NO: 726919 - DNA, 25 bp, Homo sapien
gatctaactttcacaaactaaatca

SEQ ID NO: 726920 - DNA, 25 bp, Homo sapien
agccttatgattggattctgatccc

SEQ ID NO: 726921 - DNA, 25 bp, Homo sapien
gatatacttgagtgtctcagagaag

SEQ ID NO: 726922 - DNA, 25 bp, Homo sapien
tcagagaagcttcttaaagtgtatt

SEQ ID NO: 726923 - DNA, 25 bp, Homo sapien
ttgatatacttgagtgtctcagaga

SEQ ID NO: 726924 - DNA, 25 bp, Homo sapien
gaagcttcttaaagtgtattagaaa

SEQ ID NO: 726925 - DNA, 25 bp, Homo sapien
ttttctgcagaaagcgctctgctca

SEQ ID NO: 726926 - DNA, 25 bp, Homo sapien
tgctcatctgttaagggcagtttaa

SEQ ID NO: 726927 - DNA, 25 bp, Homo sapien
tctgaaagaggatgtccataggctg

SEQ ID NO: 726928 - DNA, 25 bp, Homo sapien
gaataaataactctgaaggcctctg

SEQ ID NO: 726929 - DNA, 25 bp, Homo sapien
ggcaaccctctttcgctctgggcgc

SEQ ID NO: 726930 - DNA, 25 bp, Homo sapien
caaccctctttcgctctgggcgcct

SEQ ID NO: 726931 - DNA, 25 bp, Homo sapien
gcaaccctctttcgctctgggcgcc

SEQ ID NO: 726932 - DNA, 25 bp, Homo sapien
gctaagtgcccaggcgcgagttgac

SEQ ID NO: 726933 - DNA, 25 bp, Homo sapien
gcggaatcggcgtcccagaagtctt

SEQ ID NO: 726934 - DNA, 25 bp, Homo sapien
ggagcgcagcgctggcttccaagct

SEQ ID NO: 726935 - DNA, 25 bp, Homo sapien
gagttgacagaggagacgatcgctt

SEQ ID NO: 726936 - DNA, 25 bp, Homo sapien
ttggactaaaccgagagcagcagga

SEQ ID NO: 726937 - DNA, 25 bp, Homo sapien
gcaggaggaaccttattcgccgcca

SEQ ID NO: 726938 - DNA, 25 bp, Homo sapien
tattcgccgccactttatagtgttt

SEQ ID NO: 726939 - DNA, 25 bp, Homo sapien
tcctgcacgcgatgctccgggggac

SEQ ID NO: 726940 - DNA, 25 bp, Homo sapien
tcggctcgtcttggccgtgtgcagc

SEQ ID NO: 726941 - DNA, 25 bp, Homo sapien
ggtaggtgaagcctcggctcgtctt

SEQ ID NO: 726942 - DNA, 25 bp, Homo sapien
gaactcttcgtggtatagctcccgc

SEQ ID NO: 726943 - DNA, 25 bp, Homo sapien
taggcatccccgacgtagaagtcgc

SEQ ID NO: 726944 - DNA, 25 bp, Homo sapien
gccctcccctcgccggccttggtgc

SEQ ID NO: 726945 - DNA, 25 bp, Homo sapien
cccctcgccggccttggtgcgtcgg

SEQ ID NO: 726946 - DNA, 25 bp, Homo sapien
ctacgccctcccctcgccggccttg

SEQ ID NO: 726947 - DNA, 25 bp, Homo sapien
cctcccctcgccggccttggtgcgt

SEQ ID NO: 726948 - DNA, 25 bp, Homo sapien
gccagtgcccgaaagcaacaaataa

SEQ ID NO: 726949 - DNA, 25 bp, Homo sapien
aaaataagccagtgcccgaaagcaa

SEQ ID NO: 726950 - DNA, 25 bp, Homo sapien
ctgttttaaagaagcccagaacaat

SEQ ID NO: 726951 - DNA, 25 bp, Homo sapien
caataattcccgcaatcatagagaa

SEQ ID NO: 726952 - DNA, 25 bp, Homo sapien
taccagacccacaagcagcatggtg

SEQ ID NO: 726953 - DNA, 25 bp, Homo sapien
caagcagcatggtgcgggtagaatc

SEQ ID NO: 726954 - DNA, 25 bp, Homo sapien
ctgaggacgccagcttccgaatgaa

SEQ ID NO: 726955 - DNA, 25 bp, Homo sapien
gaatgaagcggagtttttgtctacc

SEQ ID NO: 726956 - DNA, 25 bp, Homo sapien
gagaataccataaagatgtagatgt

SEQ ID NO: 726957 - DNA, 25 bp, Homo sapien
tgagaataccataaagatgtagatg

SEQ ID NO: 726958 - DNA, 25 bp, Homo sapien
gaataccataaagatgtagatgtag

SEQ ID NO: 726959 - DNA, 25 bp, Homo sapien
agaataccataaagatgtagatgta

SEQ ID NO: 726960 - DNA, 25 bp, Homo sapien
attcttctgccgatttgggatccga

SEQ ID NO: 726961 - DNA, 25 bp, Homo sapien
ttctgccgatttgggatccgaaccc

SEQ ID NO: 726962 - DNA, 25 bp, Homo sapien
tgtcattcttctgccgatttgggat

SEQ ID NO: 726963 - DNA, 25 bp, Homo sapien
tgccgatttgggatccgaaccctaa

SEQ ID NO: 726964 - DNA, 25 bp, Homo sapien
tttgtagggaaaaggtctccatatg

SEQ ID NO: 726965 - DNA, 25 bp, Homo sapien
catgctttgctaattctcaaaaaag

SEQ ID NO: 726966 - DNA, 25 bp, Homo sapien
ctttgctaattctcaaaaaagtgtt

SEQ ID NO: 726967 - DNA, 25 bp, Homo sapien
ccaccatgctttgctaattctcaaa

SEQ ID NO: 726968 - DNA, 25 bp, Homo sapien
ggcttgccacccaaatagtcatcca

SEQ ID NO: 726969 - DNA, 25 bp, Homo sapien
tgaagttctctattctgcactggct

SEQ ID NO: 726970 - DNA, 25 bp, Homo sapien
cagaccgcctttgaaatagctaaca

SEQ ID NO: 726971 - DNA, 25 bp, Homo sapien
gctaacaaagtcattagactcatat

SEQ ID NO: 726972 - DNA, 25 bp, Homo sapien
tggagcgtgtttgatttcggaaatc

SEQ ID NO: 726973 - DNA, 25 bp, Homo sapien
gagggtattcctcacactttaactg

SEQ ID NO: 726974 - DNA, 25 bp, Homo sapien
actttaactgaacacgtgtggaggg

SEQ ID NO: 726975 - DNA, 25 bp, Homo sapien
cagtggggtgtgcagaacacttgct

SEQ ID NO: 726976 - DNA, 25 bp, Homo sapien
ggctgtcaggtcgttcgtaagaaca

SEQ ID NO: 726977 - DNA, 25 bp, Homo sapien
catgatttaatccagatgccacgcc

SEQ ID NO: 726978 - DNA, 25 bp, Homo sapien
ggtcaatgatgaagcagtcaccctt

SEQ ID NO: 726979 - DNA, 25 bp, Homo sapien
catgtaggagcctcttggctgtcag

SEQ ID NO: 726980 - DNA, 25 bp, Homo sapien
ttaactgtattcaccacatagcact

SEQ ID NO: 726981 - DNA, 25 bp, Homo sapien
tgtacatatttattggctacagagt

SEQ ID NO: 726982 - DNA, 25 bp, Homo sapien
tttgtactgggaacactcgaaatcc

SEQ ID NO: 726983 - DNA, 25 bp, Homo sapien
acatagcactatacaacagtagaac

SEQ ID NO: 726984 - DNA, 25 bp, Homo sapien
tcaaactgctttaatggctaacaaa

SEQ ID NO: 726985 - DNA, 25 bp, Homo sapien
tagtgaggactgatgagtacaaacc

SEQ ID NO: 726986 - DNA, 25 bp, Homo sapien
tggaatgactacacctcaacgaagg

SEQ ID NO: 726987 - DNA, 25 bp, Homo sapien
gaacagaggccaaagccgaaagctc

SEQ ID NO: 726988 - DNA, 25 bp, Homo sapien
tcctgagaagaatgcagtagtggct

SEQ ID NO: 726989 - DNA, 25 bp, Homo sapien
gataccgtgtcccacaattctaggg

SEQ ID NO: 726990 - DNA, 25 bp, Homo sapien
aatgactgagggtagcatccaagcc

SEQ ID NO: 726991 - DNA, 25 bp, Homo sapien
catcttaagcagtacggtgtgggtc

SEQ ID NO: 726992 - DNA, 25 bp, Homo sapien
gctggacgaataaatgaaaaagctt

SEQ ID NO: 726993 - DNA, 25 bp, Homo sapien
gctgctggacgaataaatgaaaaag

SEQ ID NO: 726994 - DNA, 25 bp, Homo sapien
gatgctgctggacgaataaatgaaa

SEQ ID NO: 726995 - DNA, 25 bp, Homo sapien
agatgctgctggacgaataaatgaa

SEQ ID NO: 726996 - DNA, 25 bp, Homo sapien
tttagaagaggagtgctgtttctat

SEQ ID NO: 726997 - DNA, 25 bp, Homo sapien
gtatctttttagaagaggagtgctg

SEQ ID NO: 726998 - DNA, 25 bp, Homo sapien
tctttttagaagaggagtgctgttt

SEQ ID NO: 726999 - DNA, 25 bp, Homo sapien
agaggagtgctgtttctatactaac

SEQ ID NO: 727000 - DNA, 25 bp, Homo sapien
tatttgttgcacgaggaaccacacc

SEQ ID NO: 727001 - DNA, 25 bp, Homo sapien
tccacgacaattagttcagaccttc

SEQ ID NO: 727002 - DNA, 25 bp, Homo sapien
tgtaccgaatgccagtagctacctg

SEQ ID NO: 727003 - DNA, 25 bp, Homo sapien
cctggtttgccttcagacgttcata

SEQ ID NO: 727004 - DNA, 25 bp, Homo sapien
tgacatactcggcattccatatgga

SEQ ID NO: 727005 - DNA, 25 bp, Homo sapien
ggctgacatactcggcattccatat

SEQ ID NO: 727006 - DNA, 25 bp, Homo sapien
caggctgacatactcggcattccat

SEQ ID NO: 727007 - DNA, 25 bp, Homo sapien
tactcggcattccatatggaagcca

SEQ ID NO: 727008 - DNA, 25 bp, Homo sapien
tttcctgttacttatgtctgctata

SEQ ID NO: 727009 - DNA, 25 bp, Homo sapien
gttacttatgtctgctataatgtca

SEQ ID NO: 727010 - DNA, 25 bp, Homo sapien
cttatgtctgctataatgtcatcat

SEQ ID NO: 727011 - DNA, 25 bp, Homo sapien
ggaagctctggcttttcccctaaga

SEQ ID NO: 727012 - DNA, 25 bp, Homo sapien
ccatacgaaaatttgtttggcagcc

SEQ ID NO: 727013 - DNA, 25 bp, Homo sapien
tttccatacgaaaatttgtttggca

SEQ ID NO: 727014 - DNA, 25 bp, Homo sapien
tccatacgaaaatttgtttggcagc

SEQ ID NO: 727015 - DNA, 25 bp, Homo sapien
catacgaaaatttgtttggcagccc

SEQ ID NO: 727016 - DNA, 25 bp, Homo sapien
cctctcttggggattagcatcttta

SEQ ID NO: 727017 - DNA, 25 bp, Homo sapien
tcttggaataattcatttgctgtag

SEQ ID NO: 727018 - DNA, 25 bp, Homo sapien
ctctcttggggattagcatctttac

SEQ ID NO: 727019 - DNA, 25 bp, Homo sapien
tggaataattcatttgctgtagaaa

SEQ ID NO: 727020 - DNA, 25 bp, Homo sapien
agattggtgtttcacctccttctgg

SEQ ID NO: 727021 - DNA, 25 bp, Homo sapien
ctgtttgaagattggtgtttcacct

SEQ ID NO: 727022 - DNA, 25 bp, Homo sapien
gaagattggtgtttcacctccttct

SEQ ID NO: 727023 - DNA, 25 bp, Homo sapien
gtttgaagattggtgtttcacctcc

SEQ ID NO: 727024 - DNA, 25 bp, Homo sapien
tctgtgacataaactttcccgaagc

SEQ ID NO: 727025 - DNA, 25 bp, Homo sapien
gaaccatcatccaccatattgtgct

SEQ ID NO: 727026 - DNA, 25 bp, Homo sapien
ctgccatctgcggagaactgtgtaa

SEQ ID NO: 727027 - DNA, 25 bp, Homo sapien
tgtgtaattttgaggcatcaaaggg

SEQ ID NO: 727028 - DNA, 25 bp, Homo sapien
gtagcagtcaccaccatagaattca

SEQ ID NO: 727029 - DNA, 25 bp, Homo sapien
cctctgggataggtgtagagtatga

SEQ ID NO: 727030 - DNA, 25 bp, Homo sapien
gagttttggtcaacttggatcctac

SEQ ID NO: 727031 - DNA, 25 bp, Homo sapien
ggatcctaccattgttttctacacg

SEQ ID NO: 727032 - DNA, 25 bp, Homo sapien
atccaactgaacagtcaggaacgca

SEQ ID NO: 727033 - DNA, 25 bp, Homo sapien
tgtcctccaagggaccgatccaact

SEQ ID NO: 727034 - DNA, 25 bp, Homo sapien
caagggaccgatccaactgaacagt

SEQ ID NO: 727035 - DNA, 25 bp, Homo sapien
gaccgatccaactgaacagtcagga

SEQ ID NO: 727036 - DNA, 25 bp, Homo sapien
tttctccggacttgaaagaggcgtg

SEQ ID NO: 727037 - DNA, 25 bp, Homo sapien
tcagtaggtgaacaggctctttgcc

SEQ ID NO: 727038 - DNA, 25 bp, Homo sapien
tccattcttgtaaataatgagcggt

SEQ ID NO: 727039 - DNA, 25 bp, Homo sapien
tctggtgatagatgccaggtttctc

SEQ ID NO: 727040 - DNA, 25 bp, Homo sapien
ccactattttgtggcagtttcagga

SEQ ID NO: 727041 - DNA, 25 bp, Homo sapien
tcttggatccttaaggttttgcact

SEQ ID NO: 727042 - DNA, 25 bp, Homo sapien
taggacacttgctacatactctgct

SEQ ID NO: 727043 - DNA, 25 bp, Homo sapien
ttttcctacccagatgtagccacta

SEQ ID NO: 727044 - DNA, 25 bp, Homo sapien
agtggtgaggtctggtagtcttttt

SEQ ID NO: 727045 - DNA, 25 bp, Homo sapien
ccgtaaagccgaggtggatggtctt

SEQ ID NO: 727046 - DNA, 25 bp, Homo sapien
tgggtttccagtagtggtgaggtct

SEQ ID NO: 727047 - DNA, 25 bp, Homo sapien
ttagagcagccgtaaagccgaggtg

SEQ ID NO: 727048 - DNA, 25 bp, Homo sapien
tcttcagctaaatcatcctgggtga

SEQ ID NO: 727049 - DNA, 25 bp, Homo sapien
atcatcttcagctaaatcatcctgg

SEQ ID NO: 727050 - DNA, 25 bp, Homo sapien
tgggtgaactctcctggaatctctt

SEQ ID NO: 727051 - DNA, 25 bp, Homo sapien
ctaaatcatcctgggtgaactctcc

SEQ ID NO: 727052 - DNA, 25 bp, Homo sapien
ttcattagcatctttgccaatccaa

SEQ ID NO: 727053 - DNA, 25 bp, Homo sapien
agcatctttgccaatccaaataaat

SEQ ID NO: 727054 - DNA, 25 bp, Homo sapien
tttctcaacttcattagcatctttg

SEQ ID NO: 727055 - DNA, 25 bp, Homo sapien
tctcaacttcattagcatctttgcc

SEQ ID NO: 727056 - DNA, 25 bp, Homo sapien
gagcaagccagacactcggtcataa

SEQ ID NO: 727057 - DNA, 25 bp, Homo sapien
gacactcggtcataatggtgcccgg

SEQ ID NO: 727058 - DNA, 25 bp, Homo sapien
ataatggtccatcgattgagcttac

SEQ ID NO: 727059 - DNA, 25 bp, Homo sapien
gtatttttgtaagacatggtggcaa

SEQ ID NO: 727060 - DNA, 25 bp, Homo sapien
tcatggccctgttttatgatgacaa

SEQ ID NO: 727061 - DNA, 25 bp, Homo sapien
ttttatgatgacaattggtgtcctc

SEQ ID NO: 727062 - DNA, 25 bp, Homo sapien
ggctcatggccctgttttatgatga

SEQ ID NO: 727063 - DNA, 25 bp, Homo sapien
ctcatggccctgttttatgatgaca

SEQ ID NO: 727064 - DNA, 25 bp, Homo sapien
acaactctgactaatggctaatgca

SEQ ID NO: 727065 - DNA, 25 bp, Homo sapien
aacagcaatgagataactgccttgt

SEQ ID NO: 727066 - DNA, 25 bp, Homo sapien
tagcaaccaattgttaaagccacct

SEQ ID NO: 727067 - DNA, 25 bp, Homo sapien
taagagctaatattggcccataacg

SEQ ID NO: 727068 - DNA, 25 bp, Homo sapien
tgtacatgtatctaagtggataaca

SEQ ID NO: 727069 - DNA, 25 bp, Homo sapien
tattaaacatgtactgtacatgtac

SEQ ID NO: 727070 - DNA, 25 bp, Homo sapien
atctaagtggataacaatacaattc

SEQ ID NO: 727071 - DNA, 25 bp, Homo sapien
catgtatctaagtggataacaatac

SEQ ID NO: 727072 - DNA, 25 bp, Homo sapien
tattcaatactaagggacagcagct

SEQ ID NO: 727073 - DNA, 25 bp, Homo sapien
tcagaattgggtcacatggtcataa

SEQ ID NO: 727074 - DNA, 25 bp, Homo sapien
tgccatagcaagaaaacgccttttt

SEQ ID NO: 727075 - DNA, 25 bp, Homo sapien
gaaatctcatgcctgcctggacggc

SEQ ID NO: 727076 - DNA, 25 bp, Homo sapien
catctttgccgtgatgcattcagaa

SEQ ID NO: 727077 - DNA, 25 bp, Homo sapien
caggagaatggtataggttttatgc

SEQ ID NO: 727078 - DNA, 25 bp, Homo sapien
cgcggatactgaagaaaaaccgtat

SEQ ID NO: 727079 - DNA, 25 bp, Homo sapien
cattcaaggatgttggtatccatgg

SEQ ID NO: 727080 - DNA, 25 bp, Homo sapien
tgggcaatgccaccatagactggta

SEQ ID NO: 727081 - DNA, 25 bp, Homo sapien
cagatgggaacactggcttctaggt

SEQ ID NO: 727082 - DNA, 25 bp, Homo sapien
gtatttaggccccatgcttgtgcgc

SEQ ID NO: 727083 - DNA, 25 bp, Homo sapien
tcatcaaagtagatcccacggtgcc

SEQ ID NO: 727084 - DNA, 25 bp, Homo sapien
aggcaaacgcgcagaacagaaaggg

SEQ ID NO: 727085 - DNA, 25 bp, Homo sapien
gggcagcggccagattggattttct

SEQ ID NO: 727086 - DNA, 25 bp, Homo sapien
cagattggattttctctccgcagcc

SEQ ID NO: 727087 - DNA, 25 bp, Homo sapien
tcctccatcagaacggcgaggcaaa

SEQ ID NO: 727088 - DNA, 25 bp, Homo sapien
cgccaggctgccctaacggtgctcg

SEQ ID NO: 727089 - DNA, 25 bp, Homo sapien
gtgctcgcccggcagctccacgcga

SEQ ID NO: 727090 - DNA, 25 bp, Homo sapien
ggaggcgtgggcgatggcagaggac

SEQ ID NO: 727091 - DNA, 25 bp, Homo sapien
ggcgtgggcgatggcagaggactgg

SEQ ID NO: 727092 - DNA, 25 bp, Homo sapien
ggggaggcgcgctgatacctgttcc

SEQ ID NO: 727093 - DNA, 25 bp, Homo sapien
attcagcgtctctcccagccgctgg

SEQ ID NO: 727094 - DNA, 25 bp, Homo sapien
ttcagcgtctctcccagccgctggg

SEQ ID NO: 727095 - DNA, 25 bp, Homo sapien
agccgctggggaggcgcgctgatac

SEQ ID NO: 727096 - DNA, 25 bp, Homo sapien
ccgaagtgggatcccttcaccctgt

SEQ ID NO: 727097 - DNA, 25 bp, Homo sapien
gcgcccgccgggataagcccatcct

SEQ ID NO: 727098 - DNA, 25 bp, Homo sapien
gctcttctccctcggcagggcgtgg

SEQ ID NO: 727099 - DNA, 25 bp, Homo sapien
gtccctccgcacacgaccggctctt

SEQ ID NO: 727100 - DNA, 25 bp, Homo sapien
tggcagttgccgcacgagaaacctt

SEQ ID NO: 727101 - DNA, 25 bp, Homo sapien
gagaaaccttggactcagactccga

SEQ ID NO: 727102 - DNA, 25 bp, Homo sapien
cattggcaggcgtttctacgcaggg

SEQ ID NO: 727103 - DNA, 25 bp, Homo sapien
cctaattggtgagggtaactgccgc

SEQ ID NO: 727104 - DNA, 25 bp, Homo sapien
ccttgcaaaataacaacgttctcac

SEQ ID NO: 727105 - DNA, 25 bp, Homo sapien
cccttgcaaaataacaacgttctca

SEQ ID NO: 727106 - DNA, 25 bp, Homo sapien
cagtatctggtctaagtggccgtaa

SEQ ID NO: 727107 - DNA, 25 bp, Homo sapien
gaacttactataacttgctgcgcta

SEQ ID NO: 727108 - DNA, 25 bp, Homo sapien
tgctgcgctaaacaaaccagacgag

SEQ ID NO: 727109 - DNA, 25 bp, Homo sapien
gaaagaacccagtcaccagtatctg

SEQ ID NO: 727110 - DNA, 25 bp, Homo sapien
ttggtttacaacttctcttggtagc

SEQ ID NO: 727111 - DNA, 25 bp, Homo sapien
tacaacttctcttggtagctgatcc

SEQ ID NO: 727112 - DNA, 25 bp, Homo sapien
tctcttcttggtttacaacttctct

SEQ ID NO: 727113 - DNA, 25 bp, Homo sapien
aatgtcccaaattgaaatgcttttc

SEQ ID NO: 727114 - DNA, 25 bp, Homo sapien
tggacaggatagaagtctggtctga

SEQ ID NO: 727115 - DNA, 25 bp, Homo sapien
cagttgtctttccagcacagtccaa

SEQ ID NO: 727116 - DNA, 25 bp, Homo sapien
tgcagcctgtataagacagttgtct

SEQ ID NO: 727117 - DNA, 25 bp, Homo sapien
ttgaactgcagcctgtataagacag

SEQ ID NO: 727118 - DNA, 25 bp, Homo sapien
aagacagttgtctttccagcacagt

SEQ ID NO: 727119 - DNA, 25 bp, Homo sapien
tcctttaggccatctcctatgattg

SEQ ID NO: 727120 - DNA, 25 bp, Homo sapien
cctttaggccatctcctatgattgc

SEQ ID NO: 727121 - DNA, 25 bp, Homo sapien
cttcctttaggccatctcctatgat

SEQ ID NO: 727122 - DNA, 25 bp, Homo sapien
ttcctttaggccatctcctatgatt

SEQ ID NO: 727123 - DNA, 25 bp, Homo sapien
caaaccacgctgtagacactcttct

SEQ ID NO: 727124 - DNA, 25 bp, Homo sapien
aaaccacgctgtagacactcttcta

SEQ ID NO: 727125 - DNA, 25 bp, Homo sapien
accacgctgtagacactcttctatt

SEQ ID NO: 727126 - DNA, 25 bp, Homo sapien
cacgctgtagacactcttctatttg

SEQ ID NO: 727127 - DNA, 25 bp, Homo sapien
tggcttccccaaatggtagtaccaa

SEQ ID NO: 727128 - DNA, 25 bp, Homo sapien
ctggtcaatttactatccttgcttg

SEQ ID NO: 727129 - DNA, 25 bp, Homo sapien
attcccacaactgtgttctggtcaa

SEQ ID NO: 727130 - DNA, 25 bp, Homo sapien
gagaagagaccactttaagaagcac

SEQ ID NO: 727131 - DNA, 25 bp, Homo sapien
ttaaagctcggaacacatacaggtt

SEQ ID NO: 727132 - DNA, 25 bp, Homo sapien
ttttcattctacagcgcatcaggta

SEQ ID NO: 727133 - DNA, 25 bp, Homo sapien
tataatcaggactggacagcccatg

SEQ ID NO: 727134 - DNA, 25 bp, Homo sapien
aaacctgtgtagaacgatgcatagc

SEQ ID NO: 727135 - DNA, 25 bp, Homo sapien
tacgtacttaggctacaaagggtca

SEQ ID NO: 727136 - DNA, 25 bp, Homo sapien
aactatgcactagaaaaggtgcgcc

SEQ ID NO: 727137 - DNA, 25 bp, Homo sapien
tatgggactaaatagcctagctggt

SEQ ID NO: 727138 - DNA, 25 bp, Homo sapien
tgtgtgacacaagaatcaaggttcc

SEQ ID NO: 727139 - DNA, 25 bp, Homo sapien
gattatcttttagacacatatacca

SEQ ID NO: 727140 - DNA, 25 bp, Homo sapien
tgtaatttccagaactcacttcaaa

SEQ ID NO: 727141 - DNA, 25 bp, Homo sapien
gataattaatgaaactagatgacag

SEQ ID NO: 727142 - DNA, 25 bp, Homo sapien
caaaataatctagaagtggaggaaa

SEQ ID NO: 727143 - DNA, 25 bp, Homo sapien
ccagcctgggtgacacagcaagacc

SEQ ID NO: 727144 - DNA, 25 bp, Homo sapien
actccagcctgggtgacacagcaag

SEQ ID NO: 727145 - DNA, 25 bp, Homo sapien
cagtgagtggtgatcatgccaatgc

SEQ ID NO: 727146 - DNA, 25 bp, Homo sapien
agtgagtggtgatcatgccaatgca

SEQ ID NO: 727147 - DNA, 25 bp, Homo sapien
agtttagcatttatatttactgcca

SEQ ID NO: 727148 - DNA, 25 bp, Homo sapien
cctcaactagattttcatatttcag

SEQ ID NO: 727149 - DNA, 25 bp, Homo sapien
catatttcagtttagcatttatatt

SEQ ID NO: 727150 - DNA, 25 bp, Homo sapien
tctaagcaaatcctcaactagattt

SEQ ID NO: 727151 - DNA, 25 bp, Homo sapien
taaacaggagaagcgtggtcctttc

SEQ ID NO: 727152 - DNA, 25 bp, Homo sapien
tggtaaacaggagaagcgtggtcct

SEQ ID NO: 727153 - DNA, 25 bp, Homo sapien
gcgtagtatacacgaggtactgctc

SEQ ID NO: 727154 - DNA, 25 bp, Homo sapien
tagtatacacgaggtactgctctgg

SEQ ID NO: 727155 - DNA, 25 bp, Homo sapien
atacacgaggtactgctctggtttc

SEQ ID NO: 727156 - DNA, 25 bp, Homo sapien
tagcgtagtatacacgaggtactgc

SEQ ID NO: 727157 - DNA, 25 bp, Homo sapien
gatttcacacacaactaaactgtct

SEQ ID NO: 727158 - DNA, 25 bp, Homo sapien
tgtcttttaaaacccgcataatgac

SEQ ID NO: 727159 - DNA, 25 bp, Homo sapien
tacttattgagtccccatgtaatgg

SEQ ID NO: 727160 - DNA, 25 bp, Homo sapien
tgattttaaggactgggtgaatcca

SEQ ID NO: 727161 - DNA, 25 bp, Homo sapien
tgctcaaacctgctgtactacccaa

SEQ ID NO: 727162 - DNA, 25 bp, Homo sapien
gaaactacagtgtactgctatactg

SEQ ID NO: 727163 - DNA, 25 bp, Homo sapien
tacccataaggaaacttgagtctca

SEQ ID NO: 727164 - DNA, 25 bp, Homo sapien
aaagtgtaagtattagtatccctgt

SEQ ID NO: 727165 - DNA, 25 bp, Homo sapien
ggttacagccctggcctcgctgcaa

SEQ ID NO: 727166 - DNA, 25 bp, Homo sapien
tagtagaccatcgtctaaagatgtg

SEQ ID NO: 727167 - DNA, 25 bp, Homo sapien
tctaaagatgtgaacggttacagcc

SEQ ID NO: 727168 - DNA, 25 bp, Homo sapien
tcacttgccagctggcgtagtagac

SEQ ID NO: 727169 - DNA, 25 bp, Homo sapien
caatagcctcacgaacatctgttat

SEQ ID NO: 727170 - DNA, 25 bp, Homo sapien
aataatagtcattccgactagtgtg

SEQ ID NO: 727171 - DNA, 25 bp, Homo sapien
caaaccgctttccatagaagttgaa

SEQ ID NO: 727172 - DNA, 25 bp, Homo sapien
tacattgccaccaaatatgcataag

SEQ ID NO: 727173 - DNA, 25 bp, Homo sapien
ccagcctgggcaatagagagagact

SEQ ID NO: 727174 - DNA, 25 bp, Homo sapien
tgagattgcaccattgtagtccagc

SEQ ID NO: 727175 - DNA, 25 bp, Homo sapien
gtccagcctgggcaatagagagaga

SEQ ID NO: 727176 - DNA, 25 bp, Homo sapien
gctgagattgcaccattgtagtcca

SEQ ID NO: 727177 - DNA, 25 bp, Homo sapien
gggcctgaagtgtcatcagtttcag

SEQ ID NO: 727178 - DNA, 25 bp, Homo sapien
gaacaccttcttcaaacgtatgatg

SEQ ID NO: 727179 - DNA, 25 bp, Homo sapien
cgtatgatgtagatattattcacag

SEQ ID NO: 727180 - DNA, 25 bp, Homo sapien
tattcacagatgttttgaatatgag

SEQ ID NO: 727181 - DNA, 25 bp, Homo sapien
tataatttctaataaccgatcagct

SEQ ID NO: 727182 - DNA, 25 bp, Homo sapien
taatttctaataaccgatcagcttt

SEQ ID NO: 727183 - DNA, 25 bp, Homo sapien
aatttctaataaccgatcagctttt

SEQ ID NO: 727184 - DNA, 25 bp, Homo sapien
tttctaataaccgatcagcttttac

SEQ ID NO: 727185 - DNA, 25 bp, Homo sapien
taactttggagttaactctggctga

SEQ ID NO: 727186 - DNA, 25 bp, Homo sapien
gaaggtagcctctaatagacaacag

SEQ ID NO: 727187 - DNA, 25 bp, Homo sapien
aaaggtccattcagataattgcagg

SEQ ID NO: 727188 - DNA, 25 bp, Homo sapien
tatgtaggaatggtgtcactacgac

SEQ ID NO: 727189 - DNA, 25 bp, Homo sapien
cacaagagggctgctcgtggatgcc

SEQ ID NO: 727190 - DNA, 25 bp, Homo sapien
gctgctcgtggatgccactgcacaa

SEQ ID NO: 727191 - DNA, 25 bp, Homo sapien
catgcagccctggttgttgacgagc

SEQ ID NO: 727192 - DNA, 25 bp, Homo sapien
agccagcgactgtttcctctcatgc

SEQ ID NO: 727193 - DNA, 25 bp, Homo sapien
gacaaaggctatgggatgtgacatt

SEQ ID NO: 727194 - DNA, 25 bp, Homo sapien
attaggttgggcttcacactgccac

SEQ ID NO: 727195 - DNA, 25 bp, Homo sapien
aggacaaaggctatgggatgtgaca

SEQ ID NO: 727196 - DNA, 25 bp, Homo sapien
aagagaagcaattaggttgggcttc

SEQ ID NO: 727197 - DNA, 25 bp, Homo sapien
caggttctcccctcttaggttcatg

SEQ ID NO: 727198 - DNA, 25 bp, Homo sapien
gaataattgccttagcacgttccag

SEQ ID NO: 727199 - DNA, 25 bp, Homo sapien
ggttcatgacccaagataaaaggag

SEQ ID NO: 727200 - DNA, 25 bp, Homo sapien
tcacaagtacataggtaatcatcag

SEQ ID NO: 727201 - DNA, 25 bp, Homo sapien
tcttgctagcgaacaatctattttg

SEQ ID NO: 727202 - DNA, 25 bp, Homo sapien
cttgctagcgaacaatctattttgt

SEQ ID NO: 727203 - DNA, 25 bp, Homo sapien
cgttcggtcccgttggtctatgtat

SEQ ID NO: 727204 - DNA, 25 bp, Homo sapien
ctccgttcggtcccgttggtctatg

SEQ ID NO: 727205 - DNA, 25 bp, Homo sapien
ttcggtcccgttggtctatgtatct

SEQ ID NO: 727206 - DNA, 25 bp, Homo sapien
ctgaggcctccgttcggtcccgttg

SEQ ID NO: 727207 - DNA, 25 bp, Homo sapien
aaacattggcagatgccacatggtg

SEQ ID NO: 727208 - DNA, 25 bp, Homo sapien
caaagggtgcaagcagtaaacattg

SEQ ID NO: 727209 - DNA, 25 bp, Homo sapien
aacattggcagatgccacatggtgt

SEQ ID NO: 727210 - DNA, 25 bp, Homo sapien
actaattcaaagggtgcaagcagta

SEQ ID NO: 727211 - DNA, 25 bp, Homo sapien
ccctctgcatgcctttcaacagcat

SEQ ID NO: 727212 - DNA, 25 bp, Homo sapien
taacttgttggcagctggtacccca

SEQ ID NO: 727213 - DNA, 25 bp, Homo sapien
acccatgtatcctcccagagatgag

SEQ ID NO: 727214 - DNA, 25 bp, Homo sapien
cataacatcctactggcccaaagtc

SEQ ID NO: 727215 - DNA, 25 bp, Homo sapien
gttggcattcccagataacttgttg

SEQ ID NO: 727216 - DNA, 25 bp, Homo sapien
ccaaagactgctccctttgacctgc

SEQ ID NO: 727217 - DNA, 25 bp, Homo sapien
ctccaaagactgctccctttgacct

SEQ ID NO: 727218 - DNA, 25 bp, Homo sapien
gctccaaagactgctccctttgacc

SEQ ID NO: 727219 - DNA, 25 bp, Homo sapien
tccaaagactgctccctttgacctg

SEQ ID NO: 727220 - DNA, 25 bp, Homo sapien
gaccagtccgcttcaggaggtacac

SEQ ID NO: 727221 - DNA, 25 bp, Homo sapien
agtccgcttcaggaggtacacacat

SEQ ID NO: 727222 - DNA, 25 bp, Homo sapien
actgaagaccagtccgcttcaggag

SEQ ID NO: 727223 - DNA, 25 bp, Homo sapien
aagaccagtccgcttcaggaggtac

SEQ ID NO: 727224 - DNA, 25 bp, Homo sapien
gatgggtagtggttgtccagaaggc

SEQ ID NO: 727225 - DNA, 25 bp, Homo sapien
ctgatgggtagtggttgtccagaag

SEQ ID NO: 727226 - DNA, 25 bp, Homo sapien
tgatgggtagtggttgtccagaagg

SEQ ID NO: 727227 - DNA, 25 bp, Homo sapien
atgggtagtggttgtccagaaggcc

SEQ ID NO: 727228 - DNA, 25 bp, Homo sapien
gagtcttgcttattcctggtaaccc

SEQ ID NO: 727229 - DNA, 25 bp, Homo sapien
ccatggatcagtgtttatgccctag

SEQ ID NO: 727230 - DNA, 25 bp, Homo sapien
tatgctagctttgagtgccaaaccc

SEQ ID NO: 727231 - DNA, 25 bp, Homo sapien
ggacaccccgctataaactactatg

SEQ ID NO: 727232 - DNA, 25 bp, Homo sapien
gcaaagttacgagcatgtccagagg

SEQ ID NO: 727233 - DNA, 25 bp, Homo sapien
caaagttacgagcatgtccagaggg

SEQ ID NO: 727234 - DNA, 25 bp, Homo sapien
tatatgagcatcttcacatatctcc

SEQ ID NO: 727235 - DNA, 25 bp, Homo sapien
gggaataaatcctatatgagcatct

SEQ ID NO: 727236 - DNA, 25 bp, Homo sapien
ggatcagtagcaggtaaccctgtca

SEQ ID NO: 727237 - DNA, 25 bp, Homo sapien
tgcacagccatctcacaggatcaga

SEQ ID NO: 727238 - DNA, 25 bp, Homo sapien
tcagacaactgactctggaagccag

SEQ ID NO: 727239 - DNA, 25 bp, Homo sapien
tgtgacatggcagaatcttgtgtcc

SEQ ID NO: 727240 - DNA, 25 bp, Homo sapien
ctggattgcgtcagccttggaacaa

SEQ ID NO: 727241 - DNA, 25 bp, Homo sapien
gaagccaaagtcttttacacatcac

SEQ ID NO: 727242 - DNA, 25 bp, Homo sapien
cttttacacatcactgccagattaa

SEQ ID NO: 727243 - DNA, 25 bp, Homo sapien
tggaacaaatcttccgaagccaaag

SEQ ID NO: 727244 - DNA, 25 bp, Homo sapien
gcaactagactcataataatcagta

SEQ ID NO: 727245 - DNA, 25 bp, Homo sapien
ctttttggaagcaactagactcata

SEQ ID NO: 727246 - DNA, 25 bp, Homo sapien
tctgtaatgagtgcctgtgcactgg

SEQ ID NO: 727247 - DNA, 25 bp, Homo sapien
tcatgtgcttgtctttaatcataag

SEQ ID NO: 727248 - DNA, 25 bp, Homo sapien
aaatatggggagaggaatggacagt

SEQ ID NO: 727249 - DNA, 25 bp, Homo sapien
ctggggcaaggaaggcaaaatatgg

SEQ ID NO: 727250 - DNA, 25 bp, Homo sapien
gcaaaatatggggagaggaatggac

SEQ ID NO: 727251 - DNA, 25 bp, Homo sapien
aaggaaggcaaaatatggggagagg

SEQ ID NO: 727252 - DNA, 25 bp, Homo sapien
agaaagtgacttgtaagttaccgat

SEQ ID NO: 727253 - DNA, 25 bp, Homo sapien
atgctttgagggtacgagagaagaa

SEQ ID NO: 727254 - DNA, 25 bp, Homo sapien
gtgacttgtaagttaccgatgcttt

SEQ ID NO: 727255 - DNA, 25 bp, Homo sapien
tgtaagttaccgatgctttgagggt

SEQ ID NO: 727256 - DNA, 25 bp, Homo sapien
tccatagttgtgaagtctttgtaac

SEQ ID NO: 727257 - DNA, 25 bp, Homo sapien
ttgtaactccggaagtacaatattg

SEQ ID NO: 727258 - DNA, 25 bp, Homo sapien
tgtctcccctcctaaagttataatc

SEQ ID NO: 727259 - DNA, 25 bp, Homo sapien
cagtggttcataactaacatacttc

SEQ ID NO: 727260 - DNA, 25 bp, Homo sapien
aatatgcttcagaagatcagtaata

SEQ ID NO: 727261 - DNA, 25 bp, Homo sapien
aaatatgcttcagaagatcagtaat

SEQ ID NO: 727262 - DNA, 25 bp, Homo sapien
tgacattttagaaacttttcagact

SEQ ID NO: 727263 - DNA, 25 bp, Homo sapien
ctgacattttagaaacttttcagac

SEQ ID NO: 727264 - DNA, 25 bp, Homo sapien
gctgacattttagaaacttttcaga

SEQ ID NO: 727265 - DNA, 25 bp, Homo sapien
gaaacttagaaatataggtaggaga

SEQ ID NO: 727266 - DNA, 25 bp, Homo sapien
aataaatcaccccagtctcatcact

SEQ ID NO: 727267 - DNA, 25 bp, Homo sapien
cagaaattgtaaaggcaattataaa

SEQ ID NO: 727268 - DNA, 25 bp, Homo sapien
aggagaataaatcaccccagtctca

SEQ ID NO: 727269 - DNA, 25 bp, Homo sapien
gcatttttatgtcttatcatcatct

SEQ ID NO: 727270 - DNA, 25 bp, Homo sapien
agcatttttatgtcttatcatcatc

SEQ ID NO: 727271 - DNA, 25 bp, Homo sapien
tgtgaggaaaagtgggggaaagaga

SEQ ID NO: 727272 - DNA, 25 bp, Homo sapien
taagtcagcttttctagaactatac

SEQ ID NO: 727273 - DNA, 25 bp, Homo sapien
cctactctcagaacaggatttaagt

SEQ ID NO: 727274 - DNA, 25 bp, Homo sapien
ttctagaactatacggattcctcat

SEQ ID NO: 727275 - DNA, 25 bp, Homo sapien
tgctcctactctcagaacaggattt

SEQ ID NO: 727276 - DNA, 25 bp, Homo sapien
cacttgctgctggttagaatagctt

SEQ ID NO: 727277 - DNA, 25 bp, Homo sapien
tagcttgcagttttcccaaggtcat

SEQ ID NO: 727278 - DNA, 25 bp, Homo sapien
caaggtcatgagttctaaagtaact

SEQ ID NO: 727279 - DNA, 25 bp, Homo sapien
gctgctggttagaatagcttgcagt

SEQ ID NO: 727280 - DNA, 25 bp, Homo sapien
ggtgacaataagtcttgtggaaaac

SEQ ID NO: 727281 - DNA, 25 bp, Homo sapien
acagacattgtctttaaagtcatct

SEQ ID NO: 727282 - DNA, 25 bp, Homo sapien
cagaattctcctctggcaatgggga

SEQ ID NO: 727283 - DNA, 25 bp, Homo sapien
gaaatgtcactatcccaagtctcag

SEQ ID NO: 727284 - DNA, 25 bp, Homo sapien
cactgtgcatgtctgctacacactt

SEQ ID NO: 727285 - DNA, 25 bp, Homo sapien
gccactgtgcatgtctgctacacac

SEQ ID NO: 727286 - DNA, 25 bp, Homo sapien
tgtgcatgtctgctacacactttaa

SEQ ID NO: 727287 - DNA, 25 bp, Homo sapien
gagccactgtgcatgtctgctacac

SEQ ID NO: 727288 - DNA, 25 bp, Homo sapien
gccaccttcttagcataaggatata

SEQ ID NO: 727289 - DNA, 25 bp, Homo sapien
ttgcccacttctcaaacctctaggg

SEQ ID NO: 727290 - DNA, 25 bp, Homo sapien
ttggagggcgtgcaacagggtgact

SEQ ID NO: 727291 - DNA, 25 bp, Homo sapien
tgaagcatcggtgggtgtgtgttac

SEQ ID NO: 727292 - DNA, 25 bp, Homo sapien
gaaatagcattcaaaatccatggga

SEQ ID NO: 727293 - DNA, 25 bp, Homo sapien
gggatagtttctcaagcccttgctc

SEQ ID NO: 727294 - DNA, 25 bp, Homo sapien
cgagattgtccgatgtaaagtggca

SEQ ID NO: 727295 - DNA, 25 bp, Homo sapien
tcctagtaaaccagtgcatgcttag

SEQ ID NO: 727296 - DNA, 25 bp, Homo sapien
catagccatagaagatattgagccc

SEQ ID NO: 727297 - DNA, 25 bp, Homo sapien
gaattccaatggtgatgcaaatccc

SEQ ID NO: 727298 - DNA, 25 bp, Homo sapien
caagagtgtgagagatatagtacca

SEQ ID NO: 727299 - DNA, 25 bp, Homo sapien
gaaaatcacacctaagcactatggc

SEQ ID NO: 727300 - DNA, 25 bp, Homo sapien
attctactgggatctgttctgtctg

SEQ ID NO: 727301 - DNA, 25 bp, Homo sapien
tctactgggatctgttctgtctggt

SEQ ID NO: 727302 - DNA, 25 bp, Homo sapien
ctgggatctgttctgtctggtgttt

SEQ ID NO: 727303 - DNA, 25 bp, Homo sapien
ctactgggatctgttctgtctggtg

SEQ ID NO: 727304 - DNA, 25 bp, Homo sapien
gaagtctgaagtcaatatgtccaca

SEQ ID NO: 727305 - DNA, 25 bp, Homo sapien
gagctttcaaggagaatctatccca

SEQ ID NO: 727306 - DNA, 25 bp, Homo sapien
cattttgtgcctaagtccttctgga

SEQ ID NO: 727307 - DNA, 25 bp, Homo sapien
ttgcacagggtataagcacttactg

SEQ ID NO: 727308 - DNA, 25 bp, Homo sapien
caaacaaacatgttagtctaggctt

SEQ ID NO: 727309 - DNA, 25 bp, Homo sapien
aacatgttagtctaggctttcacag

SEQ ID NO: 727310 - DNA, 25 bp, Homo sapien
agtaaaaggagtacactctgaaatc

SEQ ID NO: 727311 - DNA, 25 bp, Homo sapien
tcatgcccactaggtgacaaatttt

SEQ ID NO: 727312 - DNA, 25 bp, Homo sapien
aacagtctgtagcacctaaatataa

SEQ ID NO: 727313 - DNA, 25 bp, Homo sapien
tatttctaaaacgttatggtctgaa

SEQ ID NO: 727314 - DNA, 25 bp, Homo sapien
cattacagtgaggattaggtttcag

SEQ ID NO: 727315 - DNA, 25 bp, Homo sapien
acccaaggctattgatttctaacaa

SEQ ID NO: 727316 - DNA, 25 bp, Homo sapien
tctgttcactgttttactagtggaa

SEQ ID NO: 727317 - DNA, 25 bp, Homo sapien
gatgatgaatgcttctgttcactgt

SEQ ID NO: 727318 - DNA, 25 bp, Homo sapien
ttcactgttttactagtggaaagga

SEQ ID NO: 727319 - DNA, 25 bp, Homo sapien
ctgttttactagtggaaaggatggg

SEQ ID NO: 727320 - DNA, 25 bp, Homo sapien
cacagtgtgcctttccagtgaactc

SEQ ID NO: 727321 - DNA, 25 bp, Homo sapien
tatgtgggctctagaggtatgtcca

SEQ ID NO: 727322 - DNA, 25 bp, Homo sapien
gaggcactgtccacgagtgatgata

SEQ ID NO: 727323 - DNA, 25 bp, Homo sapien
gaactgcaacccaggctgctttgga

SEQ ID NO: 727324 - DNA, 25 bp, Homo sapien
cgtggtgtccacctctaagtgttca

SEQ ID NO: 727325 - DNA, 25 bp, Homo sapien
cctctaagtgttcagatcttagacc

SEQ ID NO: 727326 - DNA, 25 bp, Homo sapien
ggtgtccacctctaagtgttcagat

SEQ ID NO: 727327 - DNA, 25 bp, Homo sapien
ttcctcgtggtgtccacctctaagt

SEQ ID NO: 727328 - DNA, 25 bp, Homo sapien
cctttcgttaaactcagtgttgctc

SEQ ID NO: 727329 - DNA, 25 bp, Homo sapien
tcctttcgttaaactcagtgttgct

SEQ ID NO: 727330 - DNA, 25 bp, Homo sapien
ttcctttcgttaaactcagtgttgc

SEQ ID NO: 727331 - DNA, 25 bp, Homo sapien
tttcgttaaactcagtgttgctcat

SEQ ID NO: 727332 - DNA, 25 bp, Homo sapien
gaacatcttataccatgtgtgccta

SEQ ID NO: 727333 - DNA, 25 bp, Homo sapien
tatgttgaagatctggatttgcgag

SEQ ID NO: 727334 - DNA, 25 bp, Homo sapien
aaatttctgcccgtatagccatgat

SEQ ID NO: 727335 - DNA, 25 bp, Homo sapien
gcaatgcataggtggacttcactaa

SEQ ID NO: 727336 - DNA, 25 bp, Homo sapien
gccaatataagcatgtatttggata

SEQ ID NO: 727337 - DNA, 25 bp, Homo sapien
ccaatataagcatgtatttggatag

SEQ ID NO: 727338 - DNA, 25 bp, Homo sapien
ctgcattctctctgccaatataagc

SEQ ID NO: 727339 - DNA, 25 bp, Homo sapien
tgcattctctctgccaatataagca

SEQ ID NO: 727340 - DNA, 25 bp, Homo sapien
gagtaagaacagatagatgcagaga

SEQ ID NO: 727341 - DNA, 25 bp, Homo sapien
gatgcagagacttattaaagcaaat

SEQ ID NO: 727342 - DNA, 25 bp, Homo sapien
taatatcggaagagggtccgtccac

SEQ ID NO: 727343 - DNA, 25 bp, Homo sapien
ttctcctaaagtagattattcaaag

SEQ ID NO: 727344 - DNA, 25 bp, Homo sapien
ccctaatagagctaaagccttgccc

SEQ ID NO: 727345 - DNA, 25 bp, Homo sapien
ttccctaatagagctaaagccttgc

SEQ ID NO: 727346 - DNA, 25 bp, Homo sapien
tccctaatagagctaaagccttgcc

SEQ ID NO: 727347 - DNA, 25 bp, Homo sapien
tttctgcaactttagccttcttggt

SEQ ID NO: 727348 - DNA, 25 bp, Homo sapien
ccttcatcaggggacgtaggtccaa

SEQ ID NO: 727349 - DNA, 25 bp, Homo sapien
aacaatttatgaactgacacagcca

SEQ ID NO: 727350 - DNA, 25 bp, Homo sapien
tgtgtcgcaatgaatcccaactgct

SEQ ID NO: 727351 - DNA, 25 bp, Homo sapien
aactgctgccatgttctgctacctc

SEQ ID NO: 727352 - DNA, 25 bp, Homo sapien
tcacctcgcttatgttcactgtgca

SEQ ID NO: 727353 - DNA, 25 bp, Homo sapien
tatgtcggcctcgaccattatgcca

SEQ ID NO: 727354 - DNA, 25 bp, Homo sapien
ccagcaaatgtgtaacaaatcggcc

SEQ ID NO: 727355 - DNA, 25 bp, Homo sapien
tacgatggcagcataaaggtgtccc

SEQ ID NO: 727356 - DNA, 25 bp, Homo sapien
tccagcagcattttagcaccgttga

SEQ ID NO: 727357 - DNA, 25 bp, Homo sapien
taggcttagtagtttgcatacgtca

SEQ ID NO: 727358 - DNA, 25 bp, Homo sapien
tggccactgttttcactgattacct

SEQ ID NO: 727359 - DNA, 25 bp, Homo sapien
tacgtcatgtcagttatcccacaag

SEQ ID NO: 727360 - DNA, 25 bp, Homo sapien
tgcaacacttggatgacaggctgag

SEQ ID NO: 727361 - DNA, 25 bp, Homo sapien
tctgttctctatcgaagaccactgg

SEQ ID NO: 727362 - DNA, 25 bp, Homo sapien
gagacaggcacaccctctggatttg

SEQ ID NO: 727363 - DNA, 25 bp, Homo sapien
gaatgtcattaagatcactcacagc

SEQ ID NO: 727364 - DNA, 25 bp, Homo sapien
ctttttactgaatttgcctagcttt

SEQ ID NO: 727365 - DNA, 25 bp, Homo sapien
gctatgcaaatcattccaaatgaag

SEQ ID NO: 727366 - DNA, 25 bp, Homo sapien
gcaatcacaacctcagctatgcaaa

SEQ ID NO: 727367 - DNA, 25 bp, Homo sapien
cttctgtaaatagccgaggaacctc

SEQ ID NO: 727368 - DNA, 25 bp, Homo sapien
tcaacaaagagttactgtgcttcct

SEQ ID NO: 727369 - DNA, 25 bp, Homo sapien
cctttgcctttctgctgctgtagtg

SEQ ID NO: 727370 - DNA, 25 bp, Homo sapien
tgtgcttcctttgcctttctgctgc

SEQ ID NO: 727371 - DNA, 25 bp, Homo sapien
ttgcctttctgctgctgtagtgact

SEQ ID NO: 727372 - DNA, 25 bp, Homo sapien
caacttgaagtaagcactgtgttaa

SEQ ID NO: 727373 - DNA, 25 bp, Homo sapien
aatggcatacttttaggatatcttc

SEQ ID NO: 727374 - DNA, 25 bp, Homo sapien
ctggtcaaagaggtcaacttgaagt

SEQ ID NO: 727375 - DNA, 25 bp, Homo sapien
ctgtgttaatggcatacttttagga

SEQ ID NO: 727376 - DNA, 25 bp, Homo sapien
tttcaagagatctctttgaagtctg

SEQ ID NO: 727377 - DNA, 25 bp, Homo sapien
tcaagagatctctttgaagtctgac

SEQ ID NO: 727378 - DNA, 25 bp, Homo sapien
ctgtttcaagagatctctttgaagt

SEQ ID NO: 727379 - DNA, 25 bp, Homo sapien
tgtttcaagagatctctttgaagtc

SEQ ID NO: 727380 - DNA, 25 bp, Homo sapien
ctgcgtggctgaataggccttagaa

SEQ ID NO: 727381 - DNA, 25 bp, Homo sapien
cgtggctgaataggccttagaaaat

SEQ ID NO: 727382 - DNA, 25 bp, Homo sapien
cccatcatcctttcctatgtacatg

SEQ ID NO: 727383 - DNA, 25 bp, Homo sapien
taaggactcataatacatgaggcca

SEQ ID NO: 727384 - DNA, 25 bp, Homo sapien
tctgttaccgtgtcctcaggtgcaa

SEQ ID NO: 727385 - DNA, 25 bp, Homo sapien
cactgtgggccactaagtacctgag

SEQ ID NO: 727386 - DNA, 25 bp, Homo sapien
gcaaaccttgtgtggtggccttccc

SEQ ID NO: 727387 - DNA, 25 bp, Homo sapien
tagggagagcccttatgctccagag

SEQ ID NO: 727388 - DNA, 25 bp, Homo sapien
tgtgagtggctaggaaaaacagcag

SEQ ID NO: 727389 - DNA, 25 bp, Homo sapien
caaggcacactgaagtatgccttca

SEQ ID NO: 727390 - DNA, 25 bp, Homo sapien
gcagtggcagacagctcaacctggt

SEQ ID NO: 727391 - DNA, 25 bp, Homo sapien
gacagctcaacctggtatttggcaa

SEQ ID NO: 727392 - DNA, 25 bp, Homo sapien
aatgctccaatatttgaaacagcac

SEQ ID NO: 727393 - DNA, 25 bp, Homo sapien
catgatgtaagagcatttgtaatcc

SEQ ID NO: 727394 - DNA, 25 bp, Homo sapien
gaaaagagaatattacgtgtgccag

SEQ ID NO: 727395 - DNA, 25 bp, Homo sapien
ggccatcttatactgtaaacatgat

SEQ ID NO: 727396 - DNA, 25 bp, Homo sapien
tagggactacactgagactgaaaag

SEQ ID NO: 727397 - DNA, 25 bp, Homo sapien
aaaagtaggtaagttcgcatggtca

SEQ ID NO: 727398 - DNA, 25 bp, Homo sapien
catagtggctggcaagtggttaaca

SEQ ID NO: 727399 - DNA, 25 bp, Homo sapien
tataggcatagtgaatgagacgtca

SEQ ID NO: 727400 - DNA, 25 bp, Homo sapien
gaaggtcctataacttaggcagatt

SEQ ID NO: 727401 - DNA, 25 bp, Homo sapien
cagaaatagagacacaagaaggtcc

SEQ ID NO: 727402 - DNA, 25 bp, Homo sapien
gaatcattcttgagctaaaccctgt

SEQ ID NO: 727403 - DNA, 25 bp, Homo sapien
taacttttggcaatacctgtaggct

SEQ ID NO: 727404 - DNA, 25 bp, Homo sapien
aaggcttgacataccacaaacagca

SEQ ID NO: 727405 - DNA, 25 bp, Homo sapien
ttaattcaattacgtcttttggaga

SEQ ID NO: 727406 - DNA, 25 bp, Homo sapien
ctctgcgacctgctaatttagagca

SEQ ID NO: 727407 - DNA, 25 bp, Homo sapien
gcccctgagacgctttatttaattc

SEQ ID NO: 727408 - DNA, 25 bp, Homo sapien
tcacgctggcacaaaaacactatca

SEQ ID NO: 727409 - DNA, 25 bp, Homo sapien
ggcacaaaaacactatcatcgactg

SEQ ID NO: 727410 - DNA, 25 bp, Homo sapien
cgctggcacaaaaacactatcatcg

SEQ ID NO: 727411 - DNA, 25 bp, Homo sapien
gctggcacaaaaacactatcatcga

SEQ ID NO: 727412 - DNA, 25 bp, Homo sapien
aagcctttaattgtaaattgcacac

SEQ ID NO: 727413 - DNA, 25 bp, Homo sapien
taattgtaaattgcacacagctgtg

SEQ ID NO: 727414 - DNA, 25 bp, Homo sapien
cacttgattcactagtacaattgag

SEQ ID NO: 727415 - DNA, 25 bp, Homo sapien
caattgagctctgataaagccttta

SEQ ID NO: 727416 - DNA, 25 bp, Homo sapien
cctgagtgccatgtagcttgaggaa

SEQ ID NO: 727417 - DNA, 25 bp, Homo sapien
tagtgagatagatagccggcagttt

SEQ ID NO: 727418 - DNA, 25 bp, Homo sapien
gctccactggtgacatttggcctga

SEQ ID NO: 727419 - DNA, 25 bp, Homo sapien
ccaaaagagagtgaaggtagctata

SEQ ID NO: 727420 - DNA, 25 bp, Homo sapien
ggccttatagcatagcttaaaatct

SEQ ID NO: 727421 - DNA, 25 bp, Homo sapien
tagcatagcttaaaatctggtagtg

SEQ ID NO: 727422 - DNA, 25 bp, Homo sapien
tagcttaaaatctggtagtgtgatg

SEQ ID NO: 727423 - DNA, 25 bp, Homo sapien
tatagcatagcttaaaatctggtag

SEQ ID NO: 727424 - DNA, 25 bp, Homo sapien
tgtgccctcagtgacccatctaacg

SEQ ID NO: 727425 - DNA, 25 bp, Homo sapien
catctaacgtgcatttatgtgaggc

SEQ ID NO: 727426 - DNA, 25 bp, Homo sapien
gacccatctaacgtgcatttatgtg

SEQ ID NO: 727427 - DNA, 25 bp, Homo sapien
cctcagtgacccatctaacgtgcat

SEQ ID NO: 727428 - DNA, 25 bp, Homo sapien
tggtaccagcattcctttgaacatt

SEQ ID NO: 727429 - DNA, 25 bp, Homo sapien
cattttgtcatatctctgccagctt

SEQ ID NO: 727430 - DNA, 25 bp, Homo sapien
gaacatttggtagtattcggctatg

SEQ ID NO: 727431 - DNA, 25 bp, Homo sapien
gatgtgctaccggatttggttttca

SEQ ID NO: 727432 - DNA, 25 bp, Homo sapien
atgctttgttactgtagtcctttag

SEQ ID NO: 727433 - DNA, 25 bp, Homo sapien
gtataaagtcgggtaacgtgatgcc

SEQ ID NO: 727434 - DNA, 25 bp, Homo sapien
ctgttccattgatacatgtgcttgt

SEQ ID NO: 727435 - DNA, 25 bp, Homo sapien
tggtcacagatatgtggtttatttc

SEQ ID NO: 727436 - DNA, 25 bp, Homo sapien
catagtagtatattgggtcaccagt

SEQ ID NO: 727437 - DNA, 25 bp, Homo sapien
gttgcagaaatgatagatgcagcct

SEQ ID NO: 727438 - DNA, 25 bp, Homo sapien
gatgcagcctatcctagtttgacta

SEQ ID NO: 727439 - DNA, 25 bp, Homo sapien
tgttgtgggccataattacactgca

SEQ ID NO: 727440 - DNA, 25 bp, Homo sapien
tatgttgagctattcttgcatgcct

SEQ ID NO: 727441 - DNA, 25 bp, Homo sapien
gtgtatgttgagctattcttgcatg

SEQ ID NO: 727442 - DNA, 25 bp, Homo sapien
taacgtgtcgttgattttggtttgc

SEQ ID NO: 727443 - DNA, 25 bp, Homo sapien
aacgtgtcgttgattttggtttgct

SEQ ID NO: 727444 - DNA, 25 bp, Homo sapien
gtggctcagggatgtaggtacaaaa

SEQ ID NO: 727445 - DNA, 25 bp, Homo sapien
ttatagcttcggtgttttcctggaa

SEQ ID NO: 727446 - DNA, 25 bp, Homo sapien
tcctggaagttcaaagtggctgctg

SEQ ID NO: 727447 - DNA, 25 bp, Homo sapien
gggtcccgtgataacacatcagctg

SEQ ID NO: 727448 - DNA, 25 bp, Homo sapien
caacttttgcatcccctataaatgt

SEQ ID NO: 727449 - DNA, 25 bp, Homo sapien
ttttattgatcaggctaaatattcc

SEQ ID NO: 727450 - DNA, 25 bp, Homo sapien
tcaaacacatacttttaggagttta

SEQ ID NO: 727451 - DNA, 25 bp, Homo sapien
tgatcaggctaaatattccccgttt

SEQ ID NO: 727452 - DNA, 25 bp, Homo sapien
cctgtcgttggaaacgtctgagcat

SEQ ID NO: 727453 - DNA, 25 bp, Homo sapien
ttttaacaggattgatacagtgtca

SEQ ID NO: 727454 - DNA, 25 bp, Homo sapien
tcaacatcagtatgtggacattgca

SEQ ID NO: 727455 - DNA, 25 bp, Homo sapien
tgggcgactgacgtaggctccgtct

SEQ ID NO: 727456 - DNA, 25 bp, Homo sapien
tcaaagcaatttcactcaacatcag

SEQ ID NO: 727457 - DNA, 25 bp, Homo sapien
aatccccaaaatcatggcgtggacc

SEQ ID NO: 727458 - DNA, 25 bp, Homo sapien
caagaagcaccaactgactagtaaa

SEQ ID NO: 727459 - DNA, 25 bp, Homo sapien
gagtcagtctttagcattcacccct

SEQ ID NO: 727460 - DNA, 25 bp, Homo sapien
ggcgtggacctcagtgttagcccca

SEQ ID NO: 727461 - DNA, 25 bp, Homo sapien
ttccttttgcatgaaccaacatgaa

SEQ ID NO: 727462 - DNA, 25 bp, Homo sapien
ccaacatgaacttcactctttacca

SEQ ID NO: 727463 - DNA, 25 bp, Homo sapien
aacatgaacttcactctttaccaca

SEQ ID NO: 727464 - DNA, 25 bp, Homo sapien
caacatgaacttcactctttaccac

SEQ ID NO: 727465 - DNA, 25 bp, Homo sapien
agatgtttgatagctcactgtctcc

SEQ ID NO: 727466 - DNA, 25 bp, Homo sapien
tatccgtacaaggtcaaaaactcta

SEQ ID NO: 727467 - DNA, 25 bp, Homo sapien
gatgtattcaagtatcaggcaactt

SEQ ID NO: 727468 - DNA, 25 bp, Homo sapien
gacacaagactctgtgaaagtactg

SEQ ID NO: 727469 - DNA, 25 bp, Homo sapien
gactctgtcatagttaccctgttta

SEQ ID NO: 727470 - DNA, 25 bp, Homo sapien
ccataaggttctgaattgtccccga

SEQ ID NO: 727471 - DNA, 25 bp, Homo sapien
ttttccataaggttctgaattgtcc

SEQ ID NO: 727472 - DNA, 25 bp, Homo sapien
gaaggactctgtcatagttaccctg

SEQ ID NO: 727473 - DNA, 25 bp, Homo sapien
tcgcaagtgaatccaggtactcatg

SEQ ID NO: 727474 - DNA, 25 bp, Homo sapien
ggtactcatggtagccacgttttct

SEQ ID NO: 727475 - DNA, 25 bp, Homo sapien
cagatgaaagatgaagttctctaca

SEQ ID NO: 727476 - DNA, 25 bp, Homo sapien
tttctttaagacgatggctgagaca

SEQ ID NO: 727477 - DNA, 25 bp, Homo sapien
tgagcttcattccatctctttacat

SEQ ID NO: 727478 - DNA, 25 bp, Homo sapien
tgtttgagcttcattccatctcttt

SEQ ID NO: 727479 - DNA, 25 bp, Homo sapien
gcttcattccatctctttacattta

SEQ ID NO: 727480 - DNA, 25 bp, Homo sapien
catctctttacatttaaaacggaag

SEQ ID NO: 727481 - DNA, 25 bp, Homo sapien
taatctctaaggtaggtgatatggt

SEQ ID NO: 727482 - DNA, 25 bp, Homo sapien
gatactctttatgaatcatcttata

SEQ ID NO: 727483 - DNA, 25 bp, Homo sapien
gatgattgttgcactcactcaatgt

SEQ ID NO: 727484 - DNA, 25 bp, Homo sapien
aactgaattggtagtcattatgaga

SEQ ID NO: 727485 - DNA, 25 bp, Homo sapien
tgtaatggagcagccaactgtgctt

SEQ ID NO: 727486 - DNA, 25 bp, Homo sapien
tgtggaagctgtgtcagtttcttga

SEQ ID NO: 727487 - DNA, 25 bp, Homo sapien
acgtcagtgtaatggagcagccaac

SEQ ID NO: 727488 - DNA, 25 bp, Homo sapien
tttctgtggaagctgtgtcagtttc

SEQ ID NO: 727489 - DNA, 25 bp, Homo sapien
ccacttaatctttttggaccatggt

SEQ ID NO: 727490 - DNA, 25 bp, Homo sapien
atttctggagttttccacttaatct

SEQ ID NO: 727491 - DNA, 25 bp, Homo sapien
aatctttttggaccatggttgactg

SEQ ID NO: 727492 - DNA, 25 bp, Homo sapien
ttccacttaatctttttggaccatg

SEQ ID NO: 727493 - DNA, 25 bp, Homo sapien
aggggatcatggtctgatgccagtc

SEQ ID NO: 727494 - DNA, 25 bp, Homo sapien
taggggatcatggtctgatgccagt

SEQ ID NO: 727495 - DNA, 25 bp, Homo sapien
ttaggggatcatggtctgatgccag

SEQ ID NO: 727496 - DNA, 25 bp, Homo sapien
ggggatcatggtctgatgccagtca

SEQ ID NO: 727497 - DNA, 25 bp, Homo sapien
aagctggttttctttgctagatgag

SEQ ID NO: 727498 - DNA, 25 bp, Homo sapien
gctggttttctttgctagatgagag

SEQ ID NO: 727499 - DNA, 25 bp, Homo sapien
cttcaaagagaaaataagctggttt

SEQ ID NO: 727500 - DNA, 25 bp, Homo sapien
ataagctggttttctttgctagatg

SEQ ID NO: 727501 - DNA, 25 bp, Homo sapien
accactggtgtagtccaggagccca

SEQ ID NO: 727502 - DNA, 25 bp, Homo sapien
ctggtgtagtccaggagcccaaaag

SEQ ID NO: 727503 - DNA, 25 bp, Homo sapien
cactggtgtagtccaggagcccaaa

SEQ ID NO: 727504 - DNA, 25 bp, Homo sapien
aaccactggtgtagtccaggagccc

SEQ ID NO: 727505 - DNA, 25 bp, Homo sapien
cctatccctatgaattttcccctat

SEQ ID NO: 727506 - DNA, 25 bp, Homo sapien
tattttcctaatcggcctgtcatca

SEQ ID NO: 727507 - DNA, 25 bp, Homo sapien
caaattcctcaattaacaaggctat

SEQ ID NO: 727508 - DNA, 25 bp, Homo sapien
taatcggcctgtcatcaagtccaat

SEQ ID NO: 727509 - DNA, 25 bp, Homo sapien
ggctattattttcctaatcggcctg

SEQ ID NO: 727510 - DNA, 25 bp, Homo sapien
gacacttctaaaatggaatttggag

SEQ ID NO: 727511 - DNA, 25 bp, Homo sapien
gaatttggagtgttgtcaatgttac

SEQ ID NO: 727512 - DNA, 25 bp, Homo sapien
tcaagacacttctaaaatggaattt

SEQ ID NO: 727513 - DNA, 25 bp, Homo sapien
tggaatttggagtgttgtcaatgtt

SEQ ID NO: 727514 - DNA, 25 bp, Homo sapien
tatcagcctgaatgaggataaagta

SEQ ID NO: 727515 - DNA, 25 bp, Homo sapien
tctgagaaattcatgatgtcgctgc

SEQ ID NO: 727516 - DNA, 25 bp, Homo sapien
caaagctgtctgagaaattcatgat

SEQ ID NO: 727517 - DNA, 25 bp, Homo sapien
tcatgatgtcgctgcaatatcagcc

SEQ ID NO: 727518 - DNA, 25 bp, Homo sapien
tcatatggtctttcaaatttaattc

SEQ ID NO: 727519 - DNA, 25 bp, Homo sapien
gataaatactgtgcttcttcatatg

SEQ ID NO: 727520 - DNA, 25 bp, Homo sapien
tactgtgcttcttcatatggtcttt

SEQ ID NO: 727521 - DNA, 25 bp, Homo sapien
aatgttggttggataaatactgtgc

SEQ ID NO: 727522 - DNA, 25 bp, Homo sapien
ttggcaaacacggaaaggttggaca

SEQ ID NO: 727523 - DNA, 25 bp, Homo sapien
taaactgcagtaacctagtgacacc

SEQ ID NO: 727524 - DNA, 25 bp, Homo sapien
caccagattccctgtttagaagaaa

SEQ ID NO: 727525 - DNA, 25 bp, Homo sapien
tgtagcactttatgaactcttcagg

SEQ ID NO: 727526 - DNA, 25 bp, Homo sapien
ctggtacctcgtgccacagggaaac

SEQ ID NO: 727527 - DNA, 25 bp, Homo sapien
tagcacaaagcttgccctggtacct

SEQ ID NO: 727528 - DNA, 25 bp, Homo sapien
aaccagaaatatggagacaaggtct

SEQ ID NO: 727529 - DNA, 25 bp, Homo sapien
tatttgcgttctgctggcacagtta

SEQ ID NO: 727530 - DNA, 25 bp, Homo sapien
actgtttagtgatatgcagtcactg

SEQ ID NO: 727531 - DNA, 25 bp, Homo sapien
tagtgatatgcagtcactgagccat

SEQ ID NO: 727532 - DNA, 25 bp, Homo sapien
aaagctctagtactgtttagtgata

SEQ ID NO: 727533 - DNA, 25 bp, Homo sapien
tagtactgtttagtgatatgcagtc

SEQ ID NO: 727534 - DNA, 25 bp, Homo sapien
cagtaataaccaactagttacaatc

SEQ ID NO: 727535 - DNA, 25 bp, Homo sapien
tctttttctactgggacattagaat

SEQ ID NO: 727536 - DNA, 25 bp, Homo sapien
gactgggcccataccaattttcact

SEQ ID NO: 727537 - DNA, 25 bp, Homo sapien
gattgtctattatgggccagtcact

SEQ ID NO: 727538 - DNA, 25 bp, Homo sapien
acccacttcgtgtaaatgttattct

SEQ ID NO: 727539 - DNA, 25 bp, Homo sapien
aggtttccacactcagtctgtgtag

SEQ ID NO: 727540 - DNA, 25 bp, Homo sapien
catcacttctaaccctgtgatcaaa

SEQ ID NO: 727541 - DNA, 25 bp, Homo sapien
cagtctgtgtagtggataagatttc

SEQ ID NO: 727542 - DNA, 25 bp, Homo sapien
gataatcgttcaggtgttaaagaag

SEQ ID NO: 727543 - DNA, 25 bp, Homo sapien
tcctggataatcgttcaggtgttaa

SEQ ID NO: 727544 - DNA, 25 bp, Homo sapien
cgttcaggtgttaaagaagttgatt

SEQ ID NO: 727545 - DNA, 25 bp, Homo sapien
ttgtttcctggataatcgttcaggt

SEQ ID NO: 727546 - DNA, 25 bp, Homo sapien
ggataatttggttactgaagagaag

SEQ ID NO: 727547 - DNA, 25 bp, Homo sapien
ggtgattggataatttggttactga

SEQ ID NO: 727548 - DNA, 25 bp, Homo sapien
tcccgttgcttagctacaggattct

SEQ ID NO: 727549 - DNA, 25 bp, Homo sapien
actgaagagaagacatcccgttgct

SEQ ID NO: 727550 - DNA, 25 bp, Homo sapien
agggatccttggaagattttcaaca

SEQ ID NO: 727551 - DNA, 25 bp, Homo sapien
tcaacatttgatgacatagctcctt

SEQ ID NO: 727552 - DNA, 25 bp, Homo sapien
ttgatgacatagctccttggatgat

SEQ ID NO: 727553 - DNA, 25 bp, Homo sapien
cctggaggggtccataatgaagaat

SEQ ID NO: 727554 - DNA, 25 bp, Homo sapien
ttagtttgtatctttttgttgctgt

SEQ ID NO: 727555 - DNA, 25 bp, Homo sapien
tagtttgtatctttttgttgctgtt

SEQ ID NO: 727556 - DNA, 25 bp, Homo sapien
cactggttaggattcacaatggact

SEQ ID NO: 727557 - DNA, 25 bp, Homo sapien
gccttatgtcacttctcagggagca

SEQ ID NO: 727558 - DNA, 25 bp, Homo sapien
caatggactccaacagacttgaagc

SEQ ID NO: 727559 - DNA, 25 bp, Homo sapien
cctggagtgaactaggaagctgccc

SEQ ID NO: 727560 - DNA, 25 bp, Homo sapien
ttacattagactcttctgagtcagg

SEQ ID NO: 727561 - DNA, 25 bp, Homo sapien
cacaatgaatcttacattagactct

SEQ ID NO: 727562 - DNA, 25 bp, Homo sapien
cttctgtattgttgcttgatctttg

SEQ ID NO: 727563 - DNA, 25 bp, Homo sapien
ttcctgtgaagcacaatgaatctta

SEQ ID NO: 727564 - DNA, 25 bp, Homo sapien
taaaaggtagcgaagatagacaaag

SEQ ID NO: 727565 - DNA, 25 bp, Homo sapien
ccatttaaaaggtagcgaagataga

SEQ ID NO: 727566 - DNA, 25 bp, Homo sapien
tagcgaagatagacaaaggtgttgg

SEQ ID NO: 727567 - DNA, 25 bp, Homo sapien
gatttgtgattgatggtttgccaga

SEQ ID NO: 727568 - DNA, 25 bp, Homo sapien
tctgtccccttgatatttctgagag

SEQ ID NO: 727569 - DNA, 25 bp, Homo sapien
ctgccagtgaaggacccaagtttcc

SEQ ID NO: 727570 - DNA, 25 bp, Homo sapien
agtgacttggaagattctcccatct

SEQ ID NO: 727571 - DNA, 25 bp, Homo sapien
agatttgccaaaggagctgtcctcc

SEQ ID NO: 727572 - DNA, 25 bp, Homo sapien
ttgagactgttctgtagctgcaagt

SEQ ID NO: 727573 - DNA, 25 bp, Homo sapien
tgagactgttctgtagctgcaagtt

SEQ ID NO: 727574 - DNA, 25 bp, Homo sapien
cttgagactgttctgtagctgcaag

SEQ ID NO: 727575 - DNA, 25 bp, Homo sapien
gagactgttctgtagctgcaagtta

SEQ ID NO: 727576 - DNA, 25 bp, Homo sapien
gaaaacatgtcagcctagaggtagg

SEQ ID NO: 727577 - DNA, 25 bp, Homo sapien
tgatgtctgttgaataccaggcaac

SEQ ID NO: 727578 - DNA, 25 bp, Homo sapien
ttgcgttgccaagcccggataactt

SEQ ID NO: 727579 - DNA, 25 bp, Homo sapien
gaatggttactaagaggctcagcag

SEQ ID NO: 727580 - DNA, 25 bp, Homo sapien
ttcactaggaaaatgtatggactct

SEQ ID NO: 727581 - DNA, 25 bp, Homo sapien
gaaaatgtatggactctgagggtgt

SEQ ID NO: 727582 - DNA, 25 bp, Homo sapien
aatgtatggactctgagggtgtctg

SEQ ID NO: 727583 - DNA, 25 bp, Homo sapien
taggaaaatgtatggactctgaggg

SEQ ID NO: 727584 - DNA, 25 bp, Homo sapien
cgcttccctctttcatcagtttcat

SEQ ID NO: 727585 - DNA, 25 bp, Homo sapien
ttctacgcttccctctttcatcagt

SEQ ID NO: 727586 - DNA, 25 bp, Homo sapien
tacgcttccctctttcatcagtttc

SEQ ID NO: 727587 - DNA, 25 bp, Homo sapien
tctacgcttccctctttcatcagtt

SEQ ID NO: 727588 - DNA, 25 bp, Homo sapien
gctgctcttctacatattctttctt

SEQ ID NO: 727589 - DNA, 25 bp, Homo sapien
tgctgctcttctacatattctttct

SEQ ID NO: 727590 - DNA, 25 bp, Homo sapien
tgctcttctacatattctttcttca

SEQ ID NO: 727591 - DNA, 25 bp, Homo sapien
gctcttctacatattctttcttcat

SEQ ID NO: 727592 - DNA, 25 bp, Homo sapien
tgtctctggcataagatatatccca

SEQ ID NO: 727593 - DNA, 25 bp, Homo sapien
gcagcttcgagagaacgcaatcatt

SEQ ID NO: 727594 - DNA, 25 bp, Homo sapien
taaggctcttatgcataggctgtaa

SEQ ID NO: 727595 - DNA, 25 bp, Homo sapien
ctttcacaggtatattaaggctctt

SEQ ID NO: 727596 - DNA, 25 bp, Homo sapien
ctgtctcagctcttcagaaagtggg

SEQ ID NO: 727597 - DNA, 25 bp, Homo sapien
aacttcatcattctttcggatgcca

SEQ ID NO: 727598 - DNA, 25 bp, Homo sapien
cctggtacaagcctaacttcatcat

SEQ ID NO: 727599 - DNA, 25 bp, Homo sapien
tggtacaagcctaacttcatcattc

SEQ ID NO: 727600 - DNA, 25 bp, Homo sapien
attctttcggatgccatggatcgca

SEQ ID NO: 727601 - DNA, 25 bp, Homo sapien
ggtgaatgcctccatggacagctga

SEQ ID NO: 727602 - DNA, 25 bp, Homo sapien
aatctttttgtggtctttgtccagt

SEQ ID NO: 727603 - DNA, 25 bp, Homo sapien
atctttttgtggtctttgtccagtt

SEQ ID NO: 727604 - DNA, 25 bp, Homo sapien
gaatctttttgtggtctttgtccag

SEQ ID NO: 727605 - DNA, 25 bp, Homo sapien
agaatctttttgtggtctttgtcca

SEQ ID NO: 727606 - DNA, 25 bp, Homo sapien
aatcagttttaaagaccactatagc

SEQ ID NO: 727607 - DNA, 25 bp, Homo sapien
tgtgttttctggatccaaattcata

SEQ ID NO: 727608 - DNA, 25 bp, Homo sapien
cactatagcatcagtggactgtgtg

SEQ ID NO: 727609 - DNA, 25 bp, Homo sapien
ttttctggatccaaattcataggta

SEQ ID NO: 727610 - DNA, 25 bp, Homo sapien
caagcaagggacatgaattttgttc

SEQ ID NO: 727611 - DNA, 25 bp, Homo sapien
tatagaatctctgaatagctcgcta

SEQ ID NO: 727612 - DNA, 25 bp, Homo sapien
agcagggtatgttgtttcattcacc

SEQ ID NO: 727613 - DNA, 25 bp, Homo sapien
taagtggagcagttatcaagaaacc

SEQ ID NO: 727614 - DNA, 25 bp, Homo sapien
accttttactgctgtgttatgttga

SEQ ID NO: 727615 - DNA, 25 bp, Homo sapien
ttaaaccttttactgctgtgttatg

SEQ ID NO: 727616 - DNA, 25 bp, Homo sapien
cccattgatatgcatttaaaccttt

SEQ ID NO: 727617 - DNA, 25 bp, Homo sapien
tttttagacatggtacccattgata

SEQ ID NO: 727618 - DNA, 25 bp, Homo sapien
ttttgttcttgtttactgagaatga

SEQ ID NO: 727619 - DNA, 25 bp, Homo sapien
tttttgttcttgtttactgagaatg

SEQ ID NO: 727620 - DNA, 25 bp, Homo sapien
tatgggaagaacctgtcttcatagt

SEQ ID NO: 727621 - DNA, 25 bp, Homo sapien
tgccgtagcattcctcagtacttca

SEQ ID NO: 727622 - DNA, 25 bp, Homo sapien
tgtcttcatagtcactcagtagcca

SEQ ID NO: 727623 - DNA, 25 bp, Homo sapien
tgcaggcccatctgccgtagcattc

SEQ ID NO: 727624 - DNA, 25 bp, Homo sapien
aagccaaatagctggatgtcattgc

SEQ ID NO: 727625 - DNA, 25 bp, Homo sapien
caaatagctggatgtcattgctgtg

SEQ ID NO: 727626 - DNA, 25 bp, Homo sapien
ccaaatagctggatgtcattgctgt

SEQ ID NO: 727627 - DNA, 25 bp, Homo sapien
gccaaatagctggatgtcattgctg

SEQ ID NO: 727628 - DNA, 25 bp, Homo sapien
gtacaagcttcaaaactgtttctat

SEQ ID NO: 727629 - DNA, 25 bp, Homo sapien
gactacacgtacaagcttcaaaact

SEQ ID NO: 727630 - DNA, 25 bp, Homo sapien
tacaagcttcaaaactgtttctatt

SEQ ID NO: 727631 - DNA, 25 bp, Homo sapien
tcagactacacgtacaagcttcaaa

SEQ ID NO: 727632 - DNA, 25 bp, Homo sapien
ggttaaaatgcagttcccgctcaaa

SEQ ID NO: 727633 - DNA, 25 bp, Homo sapien
tacaggcgctgggttattccaggag

SEQ ID NO: 727634 - DNA, 25 bp, Homo sapien
gttgcaccctcagatagtacccatg

SEQ ID NO: 727635 - DNA, 25 bp, Homo sapien
ataggtgcgcgcgttgtgaactccg

SEQ ID NO: 727636 - DNA, 25 bp, Homo sapien
tgccactgaataagaacacaaggtc

SEQ ID NO: 727637 - DNA, 25 bp, Homo sapien
tgaaagttcacaagacgaggttccc

SEQ ID NO: 727638 - DNA, 25 bp, Homo sapien
tcttacagaggagctactttaggca

SEQ ID NO: 727639 - DNA, 25 bp, Homo sapien
cagttcgaaagtatgctatccttgc

SEQ ID NO: 727640 - DNA, 25 bp, Homo sapien
tctagtaggcaaggcatcatagtgc

SEQ ID NO: 727641 - DNA, 25 bp, Homo sapien
tggtgggctcctaagattacaatgg

SEQ ID NO: 727642 - DNA, 25 bp, Homo sapien
tactcacctgtttgtgttgatgccg

SEQ ID NO: 727643 - DNA, 25 bp, Homo sapien
tgatgccgatataaacaaacctgcg

SEQ ID NO: 727644 - DNA, 25 bp, Homo sapien
acagcagaataagcacaggtaagaa

SEQ ID NO: 727645 - DNA, 25 bp, Homo sapien
ggtaagaatgaagtttggcattttc

SEQ ID NO: 727646 - DNA, 25 bp, Homo sapien
acaggtaagaatgaagtttggcatt

SEQ ID NO: 727647 - DNA, 25 bp, Homo sapien
agcacaggtaagaatgaagtttggc

SEQ ID NO: 727648 - DNA, 25 bp, Homo sapien
aatagtacctgataccttaattctc

SEQ ID NO: 727649 - DNA, 25 bp, Homo sapien
tcatctcagagggatgttctttcct

SEQ ID NO: 727650 - DNA, 25 bp, Homo sapien
actggcctgcaatgttatcccctca

SEQ ID NO: 727651 - DNA, 25 bp, Homo sapien
aacattttatcatgcacatctcagc

SEQ ID NO: 727652 - DNA, 25 bp, Homo sapien
aaatggctctgttcgggaattggta

SEQ ID NO: 727653 - DNA, 25 bp, Homo sapien
tgtacaggtgtgtgacgataaacat

SEQ ID NO: 727654 - DNA, 25 bp, Homo sapien
gagtaaaaatggctctgttcgggaa

SEQ ID NO: 727655 - DNA, 25 bp, Homo sapien
ggtgtgtgacgataaacatagagta

SEQ ID NO: 727656 - DNA, 25 bp, Homo sapien
tatggcagggaagtaaatataagga

SEQ ID NO: 727657 - DNA, 25 bp, Homo sapien
ggtgtagttgcaacctccagagaag

SEQ ID NO: 727658 - DNA, 25 bp, Homo sapien
agcctagggctcagggaaatgatgc

SEQ ID NO: 727659 - DNA, 25 bp, Homo sapien
taaggatgtaaagagaactctgctg

SEQ ID NO: 727660 - DNA, 25 bp, Homo sapien
ttgtgctgatgtctgtgctggtgta

SEQ ID NO: 727661 - DNA, 25 bp, Homo sapien
taggtgacagggttgaagattgtct

SEQ ID NO: 727662 - DNA, 25 bp, Homo sapien
gctggtgtaagtgcttgacagtcct

SEQ ID NO: 727663 - DNA, 25 bp, Homo sapien
gacagggttgaagattgtcttgcaa

SEQ ID NO: 727664 - DNA, 25 bp, Homo sapien
tgctgggacgaacctggagtctcat

SEQ ID NO: 727665 - DNA, 25 bp, Homo sapien
taaatctctcctgatgctgctggga

SEQ ID NO: 727666 - DNA, 25 bp, Homo sapien
cagctgtgggaatcacaatgtcacc

SEQ ID NO: 727667 - DNA, 25 bp, Homo sapien
tagcagaaacttaggagcccagatt

SEQ ID NO: 727668 - DNA, 25 bp, Homo sapien
gaggccactgtggcataagcagggc

SEQ ID NO: 727669 - DNA, 25 bp, Homo sapien
agaggccactgtggcataagcaggg

SEQ ID NO: 727670 - DNA, 25 bp, Homo sapien
ggagggcaggcagtaaggagaggcc

SEQ ID NO: 727671 - DNA, 25 bp, Homo sapien
aggagggcaggcagtaaggagaggc

SEQ ID NO: 727672 - DNA, 25 bp, Homo sapien
ttctccatagttgccctctgaagtg

SEQ ID NO: 727673 - DNA, 25 bp, Homo sapien
ggtagaaactgcagaatccatggac

SEQ ID NO: 727674 - DNA, 25 bp, Homo sapien
atccatggacttcatggactttagg

SEQ ID NO: 727675 - DNA, 25 bp, Homo sapien
gcatcagcaggcttcaccctgccag

SEQ ID NO: 727676 - DNA, 25 bp, Homo sapien
gctcagtgctcctgcgtggtcatca

SEQ ID NO: 727677 - DNA, 25 bp, Homo sapien
tctgtaactgacaaaggcgtttgat

SEQ ID NO: 727678 - DNA, 25 bp, Homo sapien
tgcgtggtcatcaggtagttccctt

SEQ ID NO: 727679 - DNA, 25 bp, Homo sapien
tatacacaggcctgaaaagtgctgg

SEQ ID NO: 727680 - DNA, 25 bp, Homo sapien
ttataacattaaactgaacaaaagc

SEQ ID NO: 727681 - DNA, 25 bp, Homo sapien
aactgaacaaaagcaacgtcttcct

SEQ ID NO: 727682 - DNA, 25 bp, Homo sapien
ctagatagacacaaatggatttcag

SEQ ID NO: 727683 - DNA, 25 bp, Homo sapien
cattaaactgaacaaaagcaacgtc

SEQ ID NO: 727684 - DNA, 25 bp, Homo sapien
atcaatgtgtccaattttgacaatg

SEQ ID NO: 727685 - DNA, 25 bp, Homo sapien
aatcaatgtgtccaattttgacaat

SEQ ID NO: 727686 - DNA, 25 bp, Homo sapien
aaatggccagtagtggtggacttgc

SEQ ID NO: 727687 - DNA, 25 bp, Homo sapien
ctgtagatcaaatggccagtagtgg

SEQ ID NO: 727688 - DNA, 25 bp, Homo sapien
gatcaaatggccagtagtggtggac

SEQ ID NO: 727689 - DNA, 25 bp, Homo sapien
tcaaatggccagtagtggtggactt

SEQ ID NO: 727690 - DNA, 25 bp, Homo sapien
caggcatacttgaagtaactctttc

SEQ ID NO: 727691 - DNA, 25 bp, Homo sapien
taccatgttcaggttcggctttcag

SEQ ID NO: 727692 - DNA, 25 bp, Homo sapien
aagcatctgtgtcccagactatcaa

SEQ ID NO: 727693 - DNA, 25 bp, Homo sapien
ggctgtattcacgtttttcgcaaag

SEQ ID NO: 727694 - DNA, 25 bp, Homo sapien
tggagcaaaggtaacccagtcacca

SEQ ID NO: 727695 - DNA, 25 bp, Homo sapien
catgttagcacatggctctagcata

SEQ ID NO: 727696 - DNA, 25 bp, Homo sapien
cttttctggctatagagtggctaag

SEQ ID NO: 727697 - DNA, 25 bp, Homo sapien
gagaggcagaccacaaataagggct

SEQ ID NO: 727698 - DNA, 25 bp, Homo sapien
acagtgaacatctttgacgtgcaca

SEQ ID NO: 727699 - DNA, 25 bp, Homo sapien
tgtcatcagcaatgttggcacagtg

SEQ ID NO: 727700 - DNA, 25 bp, Homo sapien
tttgacgtgcacatccttgacattg

SEQ ID NO: 727701 - DNA, 25 bp, Homo sapien
gaagagtttcgctcaaagcctcatg

SEQ ID NO: 727702 - DNA, 25 bp, Homo sapien
tttagcctgtttggtgcagaatagt

SEQ ID NO: 727703 - DNA, 25 bp, Homo sapien
ctgatttagcctgtttggtgcagaa

SEQ ID NO: 727704 - DNA, 25 bp, Homo sapien
agcctgtttggtgcagaatagtcac

SEQ ID NO: 727705 - DNA, 25 bp, Homo sapien
gatttagcctgtttggtgcagaata

SEQ ID NO: 727706 - DNA, 25 bp, Homo sapien
atccagtacagggacatagccgtca

SEQ ID NO: 727707 - DNA, 25 bp, Homo sapien
tggcaagcaatgtgaactgtgtgac

SEQ ID NO: 727708 - DNA, 25 bp, Homo sapien
ctggcaagcaatgtgaactgtgtga

SEQ ID NO: 727709 - DNA, 25 bp, Homo sapien
acaatccagtacagggacatagccg

SEQ ID NO: 727710 - DNA, 25 bp, Homo sapien
tttttaccagactggcaatcaatct

SEQ ID NO: 727711 - DNA, 25 bp, Homo sapien
cagctttttaccagactggcaatca

SEQ ID NO: 727712 - DNA, 25 bp, Homo sapien
gctttttaccagactggcaatcaat

SEQ ID NO: 727713 - DNA, 25 bp, Homo sapien
ccagactggcaatcaatcttttcct

SEQ ID NO: 727714 - DNA, 25 bp, Homo sapien
tgtctcatagaacaaatagcaaaat

SEQ ID NO: 727715 - DNA, 25 bp, Homo sapien
cccacagcgactatctgtctcatag

SEQ ID NO: 727716 - DNA, 25 bp, Homo sapien
ctctcaacacaggagcttgccagga

SEQ ID NO: 727717 - DNA, 25 bp, Homo sapien
actcagaggatagtcagaaaagctc

SEQ ID NO: 727718 - DNA, 25 bp, Homo sapien
tctgtatctgtaactgaatagaggt

SEQ ID NO: 727719 - DNA, 25 bp, Homo sapien
tttgctgcagatgacccccactgat

SEQ ID NO: 727720 - DNA, 25 bp, Homo sapien
gaggttttccgtacagcatgttcta

SEQ ID NO: 727721 - DNA, 25 bp, Homo sapien
tggcactctggcctttagccaacaa

SEQ ID NO: 727722 - DNA, 25 bp, Homo sapien
atctcagctgtacaattgttatttg

SEQ ID NO: 727723 - DNA, 25 bp, Homo sapien
caatgaagttcatacgcattttgca

SEQ ID NO: 727724 - DNA, 25 bp, Homo sapien
ctagtaggtattctttgaaatgtgt

SEQ ID NO: 727725 - DNA, 25 bp, Homo sapien
tatttgagaaacagacctttctaat

SEQ ID NO: 727726 - DNA, 25 bp, Homo sapien
cgacactccccaggtggctattcat

SEQ ID NO: 727727 - DNA, 25 bp, Homo sapien
ctgaaccccggtggccactgcaatg

SEQ ID NO: 727728 - DNA, 25 bp, Homo sapien
gtggccactgcaatgccttccgaca

SEQ ID NO: 727729 - DNA, 25 bp, Homo sapien
tccgacactccccaggtggctattc

SEQ ID NO: 727730 - DNA, 25 bp, Homo sapien
gattttgcatcttagttggtgacat

SEQ ID NO: 727731 - DNA, 25 bp, Homo sapien
tttgcatcttagttggtgacatcat

SEQ ID NO: 727732 - DNA, 25 bp, Homo sapien
ggattttgcatcttagttggtgaca

SEQ ID NO: 727733 - DNA, 25 bp, Homo sapien
ttttgcatcttagttggtgacatca

SEQ ID NO: 727734 - DNA, 25 bp, Homo sapien
catgtgtaataagtgcctcttgcat

SEQ ID NO: 727735 - DNA, 25 bp, Homo sapien
tgctgaaaaacatgtgtaataagtg

SEQ ID NO: 727736 - DNA, 25 bp, Homo sapien
taaaataaacttgcaacatatgctg

SEQ ID NO: 727737 - DNA, 25 bp, Homo sapien
gaaaaacatgtgtaataagtgcctc

SEQ ID NO: 727738 - DNA, 25 bp, Homo sapien
ttaaattaataggagtggagctctg

SEQ ID NO: 727739 - DNA, 25 bp, Homo sapien
gcatatgacctcctgaatataggat

SEQ ID NO: 727740 - DNA, 25 bp, Homo sapien
gcagctgaagactgcatatgacctc

SEQ ID NO: 727741 - DNA, 25 bp, Homo sapien
ttttaaattaataggagtggagctc

SEQ ID NO: 727742 - DNA, 25 bp, Homo sapien
tgttagccatgccagttcaatcccc

SEQ ID NO: 727743 - DNA, 25 bp, Homo sapien
ttactcaagctgtattgaaatttcc

SEQ ID NO: 727744 - DNA, 25 bp, Homo sapien
agatgttcttgttgtaccactttgt

SEQ ID NO: 727745 - DNA, 25 bp, Homo sapien
acacagatgttcttgttgtaccact

SEQ ID NO: 727746 - DNA, 25 bp, Homo sapien
tcaactgctgcctccggtcataatc

SEQ ID NO: 727747 - DNA, 25 bp, Homo sapien
tctgtatgagaaatctcactacatc

SEQ ID NO: 727748 - DNA, 25 bp, Homo sapien
ttttctcaagaccactcaactgctg

SEQ ID NO: 727749 - DNA, 25 bp, Homo sapien
cataatcattgcgttcatgcttttg

SEQ ID NO: 727750 - DNA, 25 bp, Homo sapien
gcaccggtacattcattaagcccat

SEQ ID NO: 727751 - DNA, 25 bp, Homo sapien
ttctatcaagcaccggtacattcat

SEQ ID NO: 727752 - DNA, 25 bp, Homo sapien
gagagcctaactttctatcaagcac

SEQ ID NO: 727753 - DNA, 25 bp, Homo sapien
cttgaggagagcctaactttctatc

SEQ ID NO: 727754 - DNA, 25 bp, Homo sapien
tttcctcgaaaatcaataaagatga

SEQ ID NO: 727755 - DNA, 25 bp, Homo sapien
ttttcctcgaaaatcaataaagatg

SEQ ID NO: 727756 - DNA, 25 bp, Homo sapien
tgcaacccgcgcctcccagattcaa

SEQ ID NO: 727757 - DNA, 25 bp, Homo sapien
ccagattcaagcgattcccctgcct

SEQ ID NO: 727758 - DNA, 25 bp, Homo sapien
tgctatacatttggatgctttcatg

SEQ ID NO: 727759 - DNA, 25 bp, Homo sapien
tcctgtttggatgcgtctgtctgtg

SEQ ID NO: 727760 - DNA, 25 bp, Homo sapien
tgaaaacattgagggaattgcccat

SEQ ID NO: 727761 - DNA, 25 bp, Homo sapien
cacaacacgtcaaggaacctcctgt

SEQ ID NO: 727762 - DNA, 25 bp, Homo sapien
agagcctggttgggctttgaggtca

SEQ ID NO: 727763 - DNA, 25 bp, Homo sapien
taaatccattgaaactctgaagttg

SEQ ID NO: 727764 - DNA, 25 bp, Homo sapien
aggtcttaaatccattgaaactctg

SEQ ID NO: 727765 - DNA, 25 bp, Homo sapien
cattgaaactctgaagttgcttgga

SEQ ID NO: 727766 - DNA, 25 bp, Homo sapien
ctccaatactctccttctactgcca

SEQ ID NO: 727767 - DNA, 25 bp, Homo sapien
ttcctccaatactctccttctactg

SEQ ID NO: 727768 - DNA, 25 bp, Homo sapien
tccaatactctccttctactgccat

SEQ ID NO: 727769 - DNA, 25 bp, Homo sapien
ctttcctccaatactctccttctac

SEQ ID NO: 727770 - DNA, 25 bp, Homo sapien
aagcactgtacacttgatcaaccaa

SEQ ID NO: 727771 - DNA, 25 bp, Homo sapien
ctttggtagaccctggactcagtcc

SEQ ID NO: 727772 - DNA, 25 bp, Homo sapien
gccccatactttggtagaccctgga

SEQ ID NO: 727773 - DNA, 25 bp, Homo sapien
gggacatttgccaagccccatactt

SEQ ID NO: 727774 - DNA, 25 bp, Homo sapien
tcttaagattgtgttggccaacagc

SEQ ID NO: 727775 - DNA, 25 bp, Homo sapien
ggccaacagcactgattccctcgga

SEQ ID NO: 727776 - DNA, 25 bp, Homo sapien
tcatggtgaatcgtggaatatcgta

SEQ ID NO: 727777 - DNA, 25 bp, Homo sapien
tttcccttcagttgcacatctacca

SEQ ID NO: 727778 - DNA, 25 bp, Homo sapien
aaaggcttttgattcagccaatgac

SEQ ID NO: 727779 - DNA, 25 bp, Homo sapien
aggcttttgattcagccaatgacat

SEQ ID NO: 727780 - DNA, 25 bp, Homo sapien
aaggcttttgattcagccaatgaca

SEQ ID NO: 727781 - DNA, 25 bp, Homo sapien
ttgctgctgcacagttcactctggc

SEQ ID NO: 727782 - DNA, 25 bp, Homo sapien
tctgttccactgttgctgcccactg

SEQ ID NO: 727783 - DNA, 25 bp, Homo sapien
cactgggcaccattgctgctgcaca

SEQ ID NO: 727784 - DNA, 25 bp, Homo sapien
tgctgcacagttcactctggctggg

SEQ ID NO: 727785 - DNA, 25 bp, Homo sapien
gctttaggaactggtgtaccgcaga

SEQ ID NO: 727786 - DNA, 25 bp, Homo sapien
cattgactttcttaggtattgcttt

SEQ ID NO: 727787 - DNA, 25 bp, Homo sapien
gactttcttaggtattgctttagga

SEQ ID NO: 727788 - DNA, 25 bp, Homo sapien
tgtaccgcagatataaccaggcatc

SEQ ID NO: 727789 - DNA, 25 bp, Homo sapien
aatttcagccagatgcaccctgctg

SEQ ID NO: 727790 - DNA, 25 bp, Homo sapien
gaatttcagccagatgcaccctgct

SEQ ID NO: 727791 - DNA, 25 bp, Homo sapien
tgactgaatttcagccagatgcacc

SEQ ID NO: 727792 - DNA, 25 bp, Homo sapien
ctgaatttcagccagatgcaccctg

SEQ ID NO: 727793 - DNA, 25 bp, Homo sapien
aaatatcttcaacggcacaggttcc

SEQ ID NO: 727794 - DNA, 25 bp, Homo sapien
gtaaatatcttcaacggcacaggtt

SEQ ID NO: 727795 - DNA, 25 bp, Homo sapien
tgtaaatatcttcaacggcacaggt

SEQ ID NO: 727796 - DNA, 25 bp, Homo sapien
taaatatcttcaacggcacaggttc

SEQ ID NO: 727797 - DNA, 25 bp, Homo sapien
aggtttttgattgatttcgcttaga

SEQ ID NO: 727798 - DNA, 25 bp, Homo sapien
cgcttagaggaattagaggtgattt

SEQ ID NO: 727799 - DNA, 25 bp, Homo sapien
gaatcgaccaaacaaccagtccatt

SEQ ID NO: 727800 - DNA, 25 bp, Homo sapien
ttttctgccagaatcgaccaaacaa

SEQ ID NO: 727801 - DNA, 25 bp, Homo sapien
tctctggagaatatggtgctttctg

SEQ ID NO: 727802 - DNA, 25 bp, Homo sapien
gtccaaatgccagagtatatacttg

SEQ ID NO: 727803 - DNA, 25 bp, Homo sapien
ggagaatatggtgctttctgtagag

SEQ ID NO: 727804 - DNA, 25 bp, Homo sapien
tgaagtctgttacttgccagatctc

SEQ ID NO: 727805 - DNA, 25 bp, Homo sapien
tgcctactttgtcaggagccaccat

SEQ ID NO: 727806 - DNA, 25 bp, Homo sapien
aaccgtgaaagagggatgtgcctac

SEQ ID NO: 727807 - DNA, 25 bp, Homo sapien
caactgagtaattgatcattaaacc

SEQ ID NO: 727808 - DNA, 25 bp, Homo sapien
cagagaccaaaacttcaactgagta

SEQ ID NO: 727809 - DNA, 25 bp, Homo sapien
cagacaaagggagcgttgagtaaaa

SEQ ID NO: 727810 - DNA, 25 bp, Homo sapien
gacgacaatcttgttcattgaaggc

SEQ ID NO: 727811 - DNA, 25 bp, Homo sapien
gggagcagacgacaatcttgttcat

SEQ ID NO: 727812 - DNA, 25 bp, Homo sapien
gaaaaagttttcgaatggattgcca

SEQ ID NO: 727813 - DNA, 25 bp, Homo sapien
tgaggctctttggtcgctagacacg

SEQ ID NO: 727814 - DNA, 25 bp, Homo sapien
gctagacacggcctactggttgata

SEQ ID NO: 727815 - DNA, 25 bp, Homo sapien
tctttggtcgctagacacggcctac

SEQ ID NO: 727816 - DNA, 25 bp, Homo sapien
cacggcctactggttgataactttt

SEQ ID NO: 727817 - DNA, 25 bp, Homo sapien
ttcgtgttattacctcttcattatc

SEQ ID NO: 727818 - DNA, 25 bp, Homo sapien
cttcgtgttattacctcttcattat

SEQ ID NO: 727819 - DNA, 25 bp, Homo sapien
tcaggaatttggtgttaaccagcat

SEQ ID NO: 727820 - DNA, 25 bp, Homo sapien
ctggacagtggcatccctatgaaga

SEQ ID NO: 727821 - DNA, 25 bp, Homo sapien
acaggcattcaggaatttggtgtta

SEQ ID NO: 727822 - DNA, 25 bp, Homo sapien
catccctatgaagatattcatgttg

SEQ ID NO: 727823 - DNA, 25 bp, Homo sapien
gccttcttattatataactttggca

SEQ ID NO: 727824 - DNA, 25 bp, Homo sapien
tcagtcctctgggacttgtctgttg

SEQ ID NO: 727825 - DNA, 25 bp, Homo sapien
tagtttggcagaaatctcccactgt

SEQ ID NO: 727826 - DNA, 25 bp, Homo sapien
agggctttgccctcttagtttggca

SEQ ID NO: 727827 - DNA, 25 bp, Homo sapien
tcccatgatttgggctttgccaccc

SEQ ID NO: 727828 - DNA, 25 bp, Homo sapien
cccatgatttgggctttgccaccca

SEQ ID NO: 727829 - DNA, 25 bp, Homo sapien
atcccatgatttgggctttgccacc

SEQ ID NO: 727830 - DNA, 25 bp, Homo sapien
cctcaaaacccagtttccagcccat

SEQ ID NO: 727831 - DNA, 25 bp, Homo sapien
tcttcttcagtgtgcctctgaacca

SEQ ID NO: 727832 - DNA, 25 bp, Homo sapien
cttcagtgtgcctctgaaccacaca

SEQ ID NO: 727833 - DNA, 25 bp, Homo sapien
tcttcagtgtgcctctgaaccacac

SEQ ID NO: 727834 - DNA, 25 bp, Homo sapien
cttcttcagtgtgcctctgaaccac

SEQ ID NO: 727835 - DNA, 25 bp, Homo sapien
tcctatagtaatagaattctctctg

SEQ ID NO: 727836 - DNA, 25 bp, Homo sapien
ttcctatagtaatagaattctctct

SEQ ID NO: 727837 - DNA, 25 bp, Homo sapien
cctatagtaatagaattctctctgt

SEQ ID NO: 727838 - DNA, 25 bp, Homo sapien
ctgttcttgggaacaattcttatct

SEQ ID NO: 727839 - DNA, 25 bp, Homo sapien
ggtttgaagatagcccaagagacgg

SEQ ID NO: 727840 - DNA, 25 bp, Homo sapien
tatgcccgtgtgtctcgatccagag

SEQ ID NO: 727841 - DNA, 25 bp, Homo sapien
cagactatgtctcaaggtgtaagca

SEQ ID NO: 727842 - DNA, 25 bp, Homo sapien
gtagcagttacctaatcccggagag

SEQ ID NO: 727843 - DNA, 25 bp, Homo sapien
tctgcaactaaggtcacatatgcat

SEQ ID NO: 727844 - DNA, 25 bp, Homo sapien
aatctgcaactaaggtcacatatgc

SEQ ID NO: 727845 - DNA, 25 bp, Homo sapien
ttaatctgcaactaaggtcacatat

SEQ ID NO: 727846 - DNA, 25 bp, Homo sapien
gcaactaaggtcacatatgcatctt

SEQ ID NO: 727847 - DNA, 25 bp, Homo sapien
tctcctcaggaattcgatataatgg

SEQ ID NO: 727848 - DNA, 25 bp, Homo sapien
tctcaggatgaccaaaggcataact

SEQ ID NO: 727849 - DNA, 25 bp, Homo sapien
gaaatcaagggaggcatgtaaaact

SEQ ID NO: 727850 - DNA, 25 bp, Homo sapien
ggtcaatcatacttccatacagggt

SEQ ID NO: 727851 - DNA, 25 bp, Homo sapien
cactcatactcatagttaattgtat

SEQ ID NO: 727852 - DNA, 25 bp, Homo sapien
tcgaacactcatactcatagttaat

SEQ ID NO: 727853 - DNA, 25 bp, Homo sapien
ggtcgaacactcatactcatagtta

SEQ ID NO: 727854 - DNA, 25 bp, Homo sapien
gaacactcatactcatagttaattg

SEQ ID NO: 727855 - DNA, 25 bp, Homo sapien
cattcttttctagctgggtcccaac

SEQ ID NO: 727856 - DNA, 25 bp, Homo sapien
tcagatgctcccgacctagtggaaa

SEQ ID NO: 727857 - DNA, 25 bp, Homo sapien
ccagatccgtagtggaaagacacaa

SEQ ID NO: 727858 - DNA, 25 bp, Homo sapien
tcccaacagtatggtctggattcaa

SEQ ID NO: 727859 - DNA, 25 bp, Homo sapien
ttaatcatcccagtaagttccaatt

SEQ ID NO: 727860 - DNA, 25 bp, Homo sapien
agtaagttccaatttggacactctt

SEQ ID NO: 727861 - DNA, 25 bp, Homo sapien
taagttccaatttggacactcttca

SEQ ID NO: 727862 - DNA, 25 bp, Homo sapien
gtaagttccaatttggacactcttc

SEQ ID NO: 727863 - DNA, 25 bp, Homo sapien
ctttgatagcctctaacactcatcc

SEQ ID NO: 727864 - DNA, 25 bp, Homo sapien
ttgatagcctctaacactcatccag

SEQ ID NO: 727865 - DNA, 25 bp, Homo sapien
gatagcctctaacactcatccagtg

SEQ ID NO: 727866 - DNA, 25 bp, Homo sapien
tagcctctaacactcatccagtgca

SEQ ID NO: 727867 - DNA, 25 bp, Homo sapien
tcaattttcttcgctgacctcaaac

SEQ ID NO: 727868 - DNA, 25 bp, Homo sapien
tgcctatgtcccgaatggtaaagcc

SEQ ID NO: 727869 - DNA, 25 bp, Homo sapien
atgtcccgaatggtaaagcctaggt

SEQ ID NO: 727870 - DNA, 25 bp, Homo sapien
ctatgtcccgaatggtaaagcctag

SEQ ID NO: 727871 - DNA, 25 bp, Homo sapien
gcctatgtcccgaatggtaaagcct

SEQ ID NO: 727872 - DNA, 25 bp, Homo sapien
taagtacacactatccttgggaaag

SEQ ID NO: 727873 - DNA, 25 bp, Homo sapien
caagataatgggtgtctttggagag

SEQ ID NO: 727874 - DNA, 25 bp, Homo sapien
taatagttacattggtgtgtacact

SEQ ID NO: 727875 - DNA, 25 bp, Homo sapien
ggttctgatttgttagtaagaattc

SEQ ID NO: 727876 - DNA, 25 bp, Homo sapien
tgttggtaccaattaccaacagcct

SEQ ID NO: 727877 - DNA, 25 bp, Homo sapien
gtcccaaggctctatcaggtagaag

SEQ ID NO: 727878 - DNA, 25 bp, Homo sapien
cccttggatgtgtgcttttgcatgc

SEQ ID NO: 727879 - DNA, 25 bp, Homo sapien
ttctctctgaggaccttcccgtccc

SEQ ID NO: 727880 - DNA, 25 bp, Homo sapien
cgctgcagagattcaacaggagcag

SEQ ID NO: 727881 - DNA, 25 bp, Homo sapien
gtagagacaacatgctaccgccacc

SEQ ID NO: 727882 - DNA, 25 bp, Homo sapien
cgccaccgggctgaaacgctgcaga

SEQ ID NO: 727883 - DNA, 25 bp, Homo sapien
ctagagcctacactgctttagagtc

SEQ ID NO: 727884 - DNA, 25 bp, Homo sapien
aaactaagagcatcagccagccaaa

SEQ ID NO: 727885 - DNA, 25 bp, Homo sapien
ctgccagcaatgtgaacaaaactaa

SEQ ID NO: 727886 - DNA, 25 bp, Homo sapien
tgccagcaatgtgaacaaaactaag

SEQ ID NO: 727887 - DNA, 25 bp, Homo sapien
gcagcagttggggttggggtggaac

SEQ ID NO: 727888 - DNA, 25 bp, Homo sapien
atgtggcagcagttggggttggggt

SEQ ID NO: 727889 - DNA, 25 bp, Homo sapien
cagcagttggggttggggtggaaca

SEQ ID NO: 727890 - DNA, 25 bp, Homo sapien
tggcagcagttggggttggggtgga

SEQ ID NO: 727891 - DNA, 25 bp, Homo sapien
tggatgccgaaagtacatacagcag

SEQ ID NO: 727892 - DNA, 25 bp, Homo sapien
gaaagtacatacagcagacacgcag

SEQ ID NO: 727893 - DNA, 25 bp, Homo sapien
agacacgcagacacacggccatgtg

SEQ ID NO: 727894 - DNA, 25 bp, Homo sapien
tgcatggctgttggatgccgaaagt

SEQ ID NO: 727895 - DNA, 25 bp, Homo sapien
tctgtcactgtgctctttcccgaag

SEQ ID NO: 727896 - DNA, 25 bp, Homo sapien
gttcatccaggtataacttcctctg

SEQ ID NO: 727897 - DNA, 25 bp, Homo sapien
gaggccacgtcttactatctgttca

SEQ ID NO: 727898 - DNA, 25 bp, Homo sapien
tagctgaattatgactgaggccacg

SEQ ID NO: 727899 - DNA, 25 bp, Homo sapien
tcatcatcgaaagcaagagcttctg

SEQ ID NO: 727900 - DNA, 25 bp, Homo sapien
catcatcatcgaaagcaagagcttc

SEQ ID NO: 727901 - DNA, 25 bp, Homo sapien
catcatcgaaagcaagagcttctgt

SEQ ID NO: 727902 - DNA, 25 bp, Homo sapien
tcatcgaaagcaagagcttctgtgg

SEQ ID NO: 727903 - DNA, 25 bp, Homo sapien
tttccttggtttggatcatgtgttc

SEQ ID NO: 727904 - DNA, 25 bp, Homo sapien
ccttggtttggatcatgtgttctca

SEQ ID NO: 727905 - DNA, 25 bp, Homo sapien
cgtatttgttgcttcactgttttta

SEQ ID NO: 727906 - DNA, 25 bp, Homo sapien
ttagatcgtatttgttgcttcactg

SEQ ID NO: 727907 - DNA, 25 bp, Homo sapien
gaagagattgctgacatttgatacc

SEQ ID NO: 727908 - DNA, 25 bp, Homo sapien
tgtcccacagtgaatagtgacagcc

SEQ ID NO: 727909 - DNA, 25 bp, Homo sapien
gctgacatttgatacctgtcccaca

SEQ ID NO: 727910 - DNA, 25 bp, Homo sapien
tcactcacagttagataagcagcca

SEQ ID NO: 727911 - DNA, 25 bp, Homo sapien
gacacattttccgtatcagggtctg

SEQ ID NO: 727912 - DNA, 25 bp, Homo sapien
ccgtatcagggtctgtgaatgggat

SEQ ID NO: 727913 - DNA, 25 bp, Homo sapien
cattttccgtatcagggtctgtgaa

SEQ ID NO: 727914 - DNA, 25 bp, Homo sapien
ttccgtatcagggtctgtgaatggg

SEQ ID NO: 727915 - DNA, 25 bp, Homo sapien
cctggtacccaacagatctggtcca

SEQ ID NO: 727916 - DNA, 25 bp, Homo sapien
tcccagcaatgtgttcttatcacga

SEQ ID NO: 727917 - DNA, 25 bp, Homo sapien
cagttatattttatccatcccctgg

SEQ ID NO: 727918 - DNA, 25 bp, Homo sapien
tacacagtctgtgacctcctcatga

SEQ ID NO: 727919 - DNA, 25 bp, Homo sapien
ccaggattcaacatggagaagagtt

SEQ ID NO: 727920 - DNA, 25 bp, Homo sapien
gactaaaagcaatgatcaaggattg

SEQ ID NO: 727921 - DNA, 25 bp, Homo sapien
cttgctattctgatgaggagccgca

SEQ ID NO: 727922 - DNA, 25 bp, Homo sapien
ttttgcctaacaacaactagagact

SEQ ID NO: 727923 - DNA, 25 bp, Homo sapien
ccttcccgtgaaggtgaggattgga

SEQ ID NO: 727924 - DNA, 25 bp, Homo sapien
tcttggttgtcagtaacctctgact

SEQ ID NO: 727925 - DNA, 25 bp, Homo sapien
gtcagctttcaataagacacatcgt

SEQ ID NO: 727926 - DNA, 25 bp, Homo sapien
taaggcatctaccaatatgtcagct

SEQ ID NO: 727927 - DNA, 25 bp, Homo sapien
ctcttggaacgtaaataagcgtagt

SEQ ID NO: 727928 - DNA, 25 bp, Homo sapien
taagcgtagtttatcttcaaatccg

SEQ ID NO: 727929 - DNA, 25 bp, Homo sapien
tctgatactcaaaaaggcattttac

SEQ ID NO: 727930 - DNA, 25 bp, Homo sapien
ccgttaggagcaatgattattttct

SEQ ID NO: 727931 - DNA, 25 bp, Homo sapien
tacagcatgctgtgaccgtgctccg

SEQ ID NO: 727932 - DNA, 25 bp, Homo sapien
cgaaggcagctgatacggagcctgc

SEQ ID NO: 727933 - DNA, 25 bp, Homo sapien
tgttgtccctacaaatgccgaaggc

SEQ ID NO: 727934 - DNA, 25 bp, Homo sapien
caggctgagtcactccatgggaagc

SEQ ID NO: 727935 - DNA, 25 bp, Homo sapien
cttctagtacccatgcaaggcattc

SEQ ID NO: 727936 - DNA, 25 bp, Homo sapien
ctgctgctgtgacttttgcgtctac

SEQ ID NO: 727937 - DNA, 25 bp, Homo sapien
gcgtctactcttaatatgtctcttc

SEQ ID NO: 727938 - DNA, 25 bp, Homo sapien
tctttccttaaatgttagcagaatt

SEQ ID NO: 727939 - DNA, 25 bp, Homo sapien
catggagctgttttatgtcttgatc

SEQ ID NO: 727940 - DNA, 25 bp, Homo sapien
tttctccaagtgtcttcatggagct

SEQ ID NO: 727941 - DNA, 25 bp, Homo sapien
cttcatggagctgttttatgtcttg

SEQ ID NO: 727942 - DNA, 25 bp, Homo sapien
caagtgtcttcatggagctgtttta

SEQ ID NO: 727943 - DNA, 25 bp, Homo sapien
tccatttatcagtatggtttgtact

SEQ ID NO: 727944 - DNA, 25 bp, Homo sapien
tgaacaagtacctgtacgttaccat

SEQ ID NO: 727945 - DNA, 25 bp, Homo sapien
atgctgaacaagtacctgtacgtta

SEQ ID NO: 727946 - DNA, 25 bp, Homo sapien
catttatcagtatggtttgtactga

SEQ ID NO: 727947 - DNA, 25 bp, Homo sapien
tctggatcttggtattacctggaac

SEQ ID NO: 727948 - DNA, 25 bp, Homo sapien
ttccacgttatccactgggcattgc

SEQ ID NO: 727949 - DNA, 25 bp, Homo sapien
gcctccattctggatcttggtatta

SEQ ID NO: 727950 - DNA, 25 bp, Homo sapien
gacattctacttctttccacgttat

SEQ ID NO: 727951 - DNA, 25 bp, Homo sapien
ctgcattgaccccagatccaaagtt

SEQ ID NO: 727952 - DNA, 25 bp, Homo sapien
aagttggcacactcacgattccaat

SEQ ID NO: 727953 - DNA, 25 bp, Homo sapien
ctaaactggaatccacctgcattga

SEQ ID NO: 727954 - DNA, 25 bp, Homo sapien
ctcacgattccaatttcaggctttg

SEQ ID NO: 727955 - DNA, 25 bp, Homo sapien
ctgcagtaagttaaactggacatgg

SEQ ID NO: 727956 - DNA, 25 bp, Homo sapien
aaactggacatggttggcaaattga

SEQ ID NO: 727957 - DNA, 25 bp, Homo sapien
ctggacatggttggcaaattgagtg

SEQ ID NO: 727958 - DNA, 25 bp, Homo sapien
acatggttggcaaattgagtggctt

SEQ ID NO: 727959 - DNA, 25 bp, Homo sapien
agggggacgccaaagatgactttca

SEQ ID NO: 727960 - DNA, 25 bp, Homo sapien
tagaggagcggggatgaagtgggag

SEQ ID NO: 727961 - DNA, 25 bp, Homo sapien
gctccggaaacctacgtctttcagc

SEQ ID NO: 727962 - DNA, 25 bp, Homo sapien
gatgactttcaggctccggaaacct

SEQ ID NO: 727963 - DNA, 25 bp, Homo sapien
tgatagctagcttgagtgggagtct

SEQ ID NO: 727964 - DNA, 25 bp, Homo sapien
tgtgatagctagcttgagtgggagt

SEQ ID NO: 727965 - DNA, 25 bp, Homo sapien
atagctagcttgagtgggagtctgg

SEQ ID NO: 727966 - DNA, 25 bp, Homo sapien
gatagctagcttgagtgggagtctg

SEQ ID NO: 727967 - DNA, 25 bp, Homo sapien
agctgtatagccttgtctccctgtc

SEQ ID NO: 727968 - DNA, 25 bp, Homo sapien
taactggaccagcagttaaacagct

SEQ ID NO: 727969 - DNA, 25 bp, Homo sapien
tctcctcccctgtcttataactgga

SEQ ID NO: 727970 - DNA, 25 bp, Homo sapien
gcagttaaacagctgtatagccttg

SEQ ID NO: 727971 - DNA, 25 bp, Homo sapien
gatggttgctgaacaatgacccacc

SEQ ID NO: 727972 - DNA, 25 bp, Homo sapien
tacaattggtagaagtggcttcggc

SEQ ID NO: 727973 - DNA, 25 bp, Homo sapien
gacccaccaaggactacagttgtag

SEQ ID NO: 727974 - DNA, 25 bp, Homo sapien
caagccggaatgcagcaagagcgtc

SEQ ID NO: 727975 - DNA, 25 bp, Homo sapien
caatatttaactgcctttctacttc

SEQ ID NO: 727976 - DNA, 25 bp, Homo sapien
aatatttaactgcctttctacttca

SEQ ID NO: 727977 - DNA, 25 bp, Homo sapien
cccaatatttaactgcctttctact

SEQ ID NO: 727978 - DNA, 25 bp, Homo sapien
ccaatatttaactgcctttctactt

SEQ ID NO: 727979 - DNA, 25 bp, Homo sapien
cattttgatgcatactgcatgaggc

SEQ ID NO: 727980 - DNA, 25 bp, Homo sapien
tcttcaagttggatgcaggaaatgt

SEQ ID NO: 727981 - DNA, 25 bp, Homo sapien
tgagctgcacagtacatacatgatg

SEQ ID NO: 727982 - DNA, 25 bp, Homo sapien
tcaccgtaggatgaaacgaattggc

SEQ ID NO: 727983 - DNA, 25 bp, Homo sapien
gctatggggactgttccaccctccg

SEQ ID NO: 727984 - DNA, 25 bp, Homo sapien
caatggtcacttcacacccaagcat

SEQ ID NO: 727985 - DNA, 25 bp, Homo sapien
agcacagcaatggtcacttcacacc

SEQ ID NO: 727986 - DNA, 25 bp, Homo sapien
ttccaccctccgcattccaagatct

SEQ ID NO: 727987 - DNA, 25 bp, Homo sapien
tataatccaggacttagcttcagaa

SEQ ID NO: 727988 - DNA, 25 bp, Homo sapien
cagttgaagagttgctcctgaggct

SEQ ID NO: 727989 - DNA, 25 bp, Homo sapien
tcctgaggcttagtcttgagccagg

SEQ ID NO: 727990 - DNA, 25 bp, Homo sapien
gccaggtggtgtatcttataatcca

SEQ ID NO: 727991 - DNA, 25 bp, Homo sapien
gagcagcttcgtttatcagcagcac

SEQ ID NO: 727992 - DNA, 25 bp, Homo sapien
agcagcttcgtttatcagcagcacc

SEQ ID NO: 727993 - DNA, 25 bp, Homo sapien
ttctccccacagatatgattgtgga

SEQ ID NO: 727994 - DNA, 25 bp, Homo sapien
tccccacagatatgattgtggagga

SEQ ID NO: 727995 - DNA, 25 bp, Homo sapien
tctccccacagatatgattgtggag

SEQ ID NO: 727996 - DNA, 25 bp, Homo sapien
ccccacagatatgattgtggaggaa

SEQ ID NO: 727997 - DNA, 25 bp, Homo sapien
agagtcttggcgttatcagcagggt

SEQ ID NO: 727998 - DNA, 25 bp, Homo sapien
tcttggcgttatcagcagggtgtgt

SEQ ID NO: 727999 - DNA, 25 bp, Homo sapien
ctaaagagtcttggcgttatcagca

SEQ ID NO: 728000 - DNA, 25 bp, Homo sapien
agtcttggcgttatcagcagggtgt

SEQ ID NO: 728001 - DNA, 25 bp, Homo sapien
ttggttgttctctgatatcaccata

SEQ ID NO: 728002 - DNA, 25 bp, Homo sapien
gttgctgcaattgttatgattgttt

SEQ ID NO: 728003 - DNA, 25 bp, Homo sapien
ctttggttgttctctgatatcacca

SEQ ID NO: 728004 - DNA, 25 bp, Homo sapien
tggttgttctctgatatcaccataa

SEQ ID NO: 728005 - DNA, 25 bp, Homo sapien
aacagtcctttgtcatgaaagatga

SEQ ID NO: 728006 - DNA, 25 bp, Homo sapien
actgtttattgtaatggcaacctgc

SEQ ID NO: 728007 - DNA, 25 bp, Homo sapien
cctgcatagcaccagagcgagaggt

SEQ ID NO: 728008 - DNA, 25 bp, Homo sapien
tctctgagaggctctgctaatgtca

SEQ ID NO: 728009 - DNA, 25 bp, Homo sapien
taagcggaaagtggcataacctgga

SEQ ID NO: 728010 - DNA, 25 bp, Homo sapien
gaaaggtaagcggaaagtggcataa

SEQ ID NO: 728011 - DNA, 25 bp, Homo sapien
aggtaagcggaaagtggcataacct

SEQ ID NO: 728012 - DNA, 25 bp, Homo sapien
ccagaaaggtaagcggaaagtggca

SEQ ID NO: 728013 - DNA, 25 bp, Homo sapien
cataaacgcaaagcctttccataag

SEQ ID NO: 728014 - DNA, 25 bp, Homo sapien
agccacaaatcaggcccctcaaatt

SEQ ID NO: 728015 - DNA, 25 bp, Homo sapien
ttcacataaacgcaaagcctttcca

SEQ ID NO: 728016 - DNA, 25 bp, Homo sapien
agttcacgtggatgacgcagccaca

SEQ ID NO: 728017 - DNA, 25 bp, Homo sapien
caaaggtagcactctggtaactgag

SEQ ID NO: 728018 - DNA, 25 bp, Homo sapien
ctttggttgtaaatccatgctgtgg

SEQ ID NO: 728019 - DNA, 25 bp, Homo sapien
gatttttaaaacctcgcacactcag

SEQ ID NO: 728020 - DNA, 25 bp, Homo sapien
tcctggtgaatcatttgcagcctgc

SEQ ID NO: 728021 - DNA, 25 bp, Homo sapien
cacattcagccagctgaaagctaga

SEQ ID NO: 728022 - DNA, 25 bp, Homo sapien
caagctcaaaaggattgtcttgcat

SEQ ID NO: 728023 - DNA, 25 bp, Homo sapien
aacacattcagccagctgaaagcta

SEQ ID NO: 728024 - DNA, 25 bp, Homo sapien
acaagctcaaaaggattgtcttgca

SEQ ID NO: 728025 - DNA, 25 bp, Homo sapien
tctctgtgctgcctcgcctaatgtt

SEQ ID NO: 728026 - DNA, 25 bp, Homo sapien
tggttacttttggacacaaggtcat

SEQ ID NO: 728027 - DNA, 25 bp, Homo sapien
tctcctacaatggttacttttggac

SEQ ID NO: 728028 - DNA, 25 bp, Homo sapien
gtgctgcctcgcctaatgttctcct

SEQ ID NO: 728029 - DNA, 25 bp, Homo sapien
aatttgcttacaaatgtgtagactg

SEQ ID NO: 728030 - DNA, 25 bp, Homo sapien
caaggtttccagcactgtcacagat

SEQ ID NO: 728031 - DNA, 25 bp, Homo sapien
gtcacagataacaaatttgcttaca

SEQ ID NO: 728032 - DNA, 25 bp, Homo sapien
tttggtgaacatattccatgcaagg

SEQ ID NO: 728033 - DNA, 25 bp, Homo sapien
catcacttccgcatgcatttattct

SEQ ID NO: 728034 - DNA, 25 bp, Homo sapien
caggctgagcatgtataccatatca

SEQ ID NO: 728035 - DNA, 25 bp, Homo sapien
catgtataccatatcatcacttccg

SEQ ID NO: 728036 - DNA, 25 bp, Homo sapien
catatcatcacttccgcatgcattt

SEQ ID NO: 728037 - DNA, 25 bp, Homo sapien
caaatggtgccttatgtgtgctctc

SEQ ID NO: 728038 - DNA, 25 bp, Homo sapien
catcggtgcaaatctcattaagtct

SEQ ID NO: 728039 - DNA, 25 bp, Homo sapien
tgtgctctcgatccactcatcggtg

SEQ ID NO: 728040 - DNA, 25 bp, Homo sapien
taccttccatttgtaactgaacatc

SEQ ID NO: 728041 - DNA, 25 bp, Homo sapien
cgagcattggctctctatgcaaacg

SEQ ID NO: 728042 - DNA, 25 bp, Homo sapien
tcctaagtgtgagcttggtgtacct

SEQ ID NO: 728043 - DNA, 25 bp, Homo sapien
taacaggtaacgtggccagtttcgc

SEQ ID NO: 728044 - DNA, 25 bp, Homo sapien
taagatctttggtctgtcaggacgg

SEQ ID NO: 728045 - DNA, 25 bp, Homo sapien
tgtgattgcctttatgtaattcggc

SEQ ID NO: 728046 - DNA, 25 bp, Homo sapien
gctctttcctccaagggaattttca

SEQ ID NO: 728047 - DNA, 25 bp, Homo sapien
caagggtgggtatctagctctttcc

SEQ ID NO: 728048 - DNA, 25 bp, Homo sapien
aactgacaaatttatcgccacaggg

SEQ ID NO: 728049 - DNA, 25 bp, Homo sapien
catggctcacatgaaggttaatggc

SEQ ID NO: 728050 - DNA, 25 bp, Homo sapien
tatgtttcccaaggtagagacatgg

SEQ ID NO: 728051 - DNA, 25 bp, Homo sapien
tcgggaacctcagcccgtcacatga

SEQ ID NO: 728052 - DNA, 25 bp, Homo sapien
catgggtaccgcctctttctggaca

SEQ ID NO: 728053 - DNA, 25 bp, Homo sapien
gactgcctccttgggatgccgactg

SEQ ID NO: 728054 - DNA, 25 bp, Homo sapien
tgcctccttgggatgccgactggca

SEQ ID NO: 728055 - DNA, 25 bp, Homo sapien
ctccttgggatgccgactggcagtc

SEQ ID NO: 728056 - DNA, 25 bp, Homo sapien
ctggcctccgtgagcaggactgcct

SEQ ID NO: 728057 - DNA, 25 bp, Homo sapien
ggtcctttgtattgttggaagccaa

SEQ ID NO: 728058 - DNA, 25 bp, Homo sapien
tagcaaaacaatcctgcaatctgca

SEQ ID NO: 728059 - DNA, 25 bp, Homo sapien
gtaaaacatcaggagccaaagggct

SEQ ID NO: 728060 - DNA, 25 bp, Homo sapien
caaaactgaccaaaaatgcttgcag

SEQ ID NO: 728061 - DNA, 25 bp, Homo sapien
aggagaatagtgagtgtgagaacag

SEQ ID NO: 728062 - DNA, 25 bp, Homo sapien
gagaatagtgagtgtgagaacagac

SEQ ID NO: 728063 - DNA, 25 bp, Homo sapien
aaggagaatagtgagtgtgagaaca

SEQ ID NO: 728064 - DNA, 25 bp, Homo sapien
ggagaatagtgagtgtgagaacaga

SEQ ID NO: 728065 - DNA, 25 bp, Homo sapien
tgaacctctgtttgacccataccag

SEQ ID NO: 728066 - DNA, 25 bp, Homo sapien
gtctcatttgcaagcttgccgtgaa

SEQ ID NO: 728067 - DNA, 25 bp, Homo sapien
tcatccattgaagtttgcgcccttc

SEQ ID NO: 728068 - DNA, 25 bp, Homo sapien
gaagtagcctcgttcatggcagcgg

SEQ ID NO: 728069 - DNA, 25 bp, Homo sapien
ttcttttaatgagttgtccacacgc

SEQ ID NO: 728070 - DNA, 25 bp, Homo sapien
cttttaatgagttgtccacacgcat

SEQ ID NO: 728071 - DNA, 25 bp, Homo sapien
tcttttaatgagttgtccacacgca

SEQ ID NO: 728072 - DNA, 25 bp, Homo sapien
ttgcagttctgctgtcaattcgcta

SEQ ID NO: 728073 - DNA, 25 bp, Homo sapien
tgtcaattcgctagtccaaaaatgt

SEQ ID NO: 728074 - DNA, 25 bp, Homo sapien
tctgctgtcaattcgctagtccaaa

SEQ ID NO: 728075 - DNA, 25 bp, Homo sapien
aattcgctagtccaaaaatgtatca

SEQ ID NO: 728076 - DNA, 25 bp, Homo sapien
taacatctctgccaagagtgaaagg

SEQ ID NO: 728077 - DNA, 25 bp, Homo sapien
cagtaacatctctgccaagagtgaa

SEQ ID NO: 728078 - DNA, 25 bp, Homo sapien
aacatctctgccaagagtgaaaggc

SEQ ID NO: 728079 - DNA, 25 bp, Homo sapien
agtaacatctctgccaagagtgaaa

SEQ ID NO: 728080 - DNA, 25 bp, Homo sapien
agtcaccctgtaactctgatccgac

SEQ ID NO: 728081 - DNA, 25 bp, Homo sapien
gacacacatgtcctcaatatccaga

SEQ ID NO: 728082 - DNA, 25 bp, Homo sapien
gacagatggcctttacttccagagg

SEQ ID NO: 728083 - DNA, 25 bp, Homo sapien
ttctcctacattttcggtgagccca

SEQ ID NO: 728084 - DNA, 25 bp, Homo sapien
atccagccaccaatatgctgctgct

SEQ ID NO: 728085 - DNA, 25 bp, Homo sapien
tgtatccagccaccaatatgctgct

SEQ ID NO: 728086 - DNA, 25 bp, Homo sapien
tatccagccaccaatatgctgctgc

SEQ ID NO: 728087 - DNA, 25 bp, Homo sapien
ctgctggtattactgtttcttctta

SEQ ID NO: 728088 - DNA, 25 bp, Homo sapien
agagaactgcaagtatcttagcata

SEQ ID NO: 728089 - DNA, 25 bp, Homo sapien
ccatagggtaggagaagattaggaa

SEQ ID NO: 728090 - DNA, 25 bp, Homo sapien
caaaaccatagggtaggagaagatt

SEQ ID NO: 728091 - DNA, 25 bp, Homo sapien
caagtatcttagcatagcaaaacca

SEQ ID NO: 728092 - DNA, 25 bp, Homo sapien
ttgaaatattgataacagccagtag

SEQ ID NO: 728093 - DNA, 25 bp, Homo sapien
agtagatatctgtttcaatctgcac

SEQ ID NO: 728094 - DNA, 25 bp, Homo sapien
cagactccaaaaggattttgggctc

SEQ ID NO: 728095 - DNA, 25 bp, Homo sapien
gactccaaaaggattttgggctcca

SEQ ID NO: 728096 - DNA, 25 bp, Homo sapien
ttccatagcttgtatcaagttcccc

SEQ ID NO: 728097 - DNA, 25 bp, Homo sapien
cttttatggcagagcacaactctct

SEQ ID NO: 728098 - DNA, 25 bp, Homo sapien
tttccatagcttgtatcaagttccc

SEQ ID NO: 728099 - DNA, 25 bp, Homo sapien
ttttccatagcttgtatcaagttcc

SEQ ID NO: 728100 - DNA, 25 bp, Homo sapien
gcgggatatccgcaagtgaagtcat

SEQ ID NO: 728101 - DNA, 25 bp, Homo sapien
ttgttggcgggatatccgcaagtga

SEQ ID NO: 728102 - DNA, 25 bp, Homo sapien
gctttcaataatggttgttggcggg

SEQ ID NO: 728103 - DNA, 25 bp, Homo sapien
tcagacattgcatgtaacttagcaa

SEQ ID NO: 728104 - DNA, 25 bp, Homo sapien
acagttacatacgtttgagtgcccc

SEQ ID NO: 728105 - DNA, 25 bp, Homo sapien
tcagatgttgaagttcatgaacttt

SEQ ID NO: 728106 - DNA, 25 bp, Homo sapien
ggaatgtttgacaatctcacacatg

SEQ ID NO: 728107 - DNA, 25 bp, Homo sapien
gaccaggtgtcaaaatggttttatg

SEQ ID NO: 728108 - DNA, 25 bp, Homo sapien
gccccttgactgatgctgctttgca

SEQ ID NO: 728109 - DNA, 25 bp, Homo sapien
ggtgcctaatatatctgcccctggt

SEQ ID NO: 728110 - DNA, 25 bp, Homo sapien
gcagtcgctgcactcagaagcaggt

SEQ ID NO: 728111 - DNA, 25 bp, Homo sapien
ccctggttaaaagcgttagcaatct

SEQ ID NO: 728112 - DNA, 25 bp, Homo sapien
gacactccccatgcagtaacaagat

SEQ ID NO: 728113 - DNA, 25 bp, Homo sapien
tcctttcgtctgagtgtgccgtgcg

SEQ ID NO: 728114 - DNA, 25 bp, Homo sapien
tatgatttatgacctgcgcatccga

SEQ ID NO: 728115 - DNA, 25 bp, Homo sapien
gctgcgtttgaaatatatgccccaa

SEQ ID NO: 728116 - DNA, 25 bp, Homo sapien
aacgtcagcgtggtgaattacgagc

SEQ ID NO: 728117 - DNA, 25 bp, Homo sapien
gaattacgagcagcagcttaaagta

SEQ ID NO: 728118 - DNA, 25 bp, Homo sapien
cgtggtgaattacgagcagcagctt

SEQ ID NO: 728119 - DNA, 25 bp, Homo sapien
ctaccaacgtcagcgtggtgaatta

SEQ ID NO: 728120 - DNA, 25 bp, Homo sapien
tacatgacttattcgtggatgtaat

SEQ ID NO: 728121 - DNA, 25 bp, Homo sapien
tattattacatgacttattcgtgga

SEQ ID NO: 728122 - DNA, 25 bp, Homo sapien
catggctgtcctattattacatgac

SEQ ID NO: 728123 - DNA, 25 bp, Homo sapien
tcatggctgtcctattattacatga

SEQ ID NO: 728124 - DNA, 25 bp, Homo sapien
gagatttgagaatgttagaaatcca

SEQ ID NO: 728125 - DNA, 25 bp, Homo sapien
ccagtttccaccctgttgacacatc

SEQ ID NO: 728126 - DNA, 25 bp, Homo sapien
cagtttccaccctgttgacacatct

SEQ ID NO: 728127 - DNA, 25 bp, Homo sapien
gtttccaccctgttgacacatctct

SEQ ID NO: 728128 - DNA, 25 bp, Homo sapien
agttataacatgaatacaatcccca

SEQ ID NO: 728129 - DNA, 25 bp, Homo sapien
gagttataacatgaatacaatcccc

SEQ ID NO: 728130 - DNA, 25 bp, Homo sapien
agtgtctggaagattggggccctca

SEQ ID NO: 728131 - DNA, 25 bp, Homo sapien
tgagaagcatcttcaagccttcgga

SEQ ID NO: 728132 - DNA, 25 bp, Homo sapien
tcaagccttcggattcagcataaca

SEQ ID NO: 728133 - DNA, 25 bp, Homo sapien
taacaaatccgcaagctcacagtgt

SEQ ID NO: 728134 - DNA, 25 bp, Homo sapien
agcccaaccaaagcatcagatttca

SEQ ID NO: 728135 - DNA, 25 bp, Homo sapien
tcagatttcaatgtcctgactgctg

SEQ ID NO: 728136 - DNA, 25 bp, Homo sapien
catctggttctctgtcatagataca

SEQ ID NO: 728137 - DNA, 25 bp, Homo sapien
tcaatgtcctgactgctgaggatcc

SEQ ID NO: 728138 - DNA, 25 bp, Homo sapien
agctggtcagtgtagtcctctccac

SEQ ID NO: 728139 - DNA, 25 bp, Homo sapien
tggtcagtgtagtcctctccaccca

SEQ ID NO: 728140 - DNA, 25 bp, Homo sapien
tctccacccacatttgttgtttgtt

SEQ ID NO: 728141 - DNA, 25 bp, Homo sapien
tcctctccacccacatttgttgttt

SEQ ID NO: 728142 - DNA, 25 bp, Homo sapien
tgtggctttacatctggctgcacac

SEQ ID NO: 728143 - DNA, 25 bp, Homo sapien
cacgccagggcctaggatcagaaat

SEQ ID NO: 728144 - DNA, 25 bp, Homo sapien
acacgccagggcctaggatcagaaa

SEQ ID NO: 728145 - DNA, 25 bp, Homo sapien
atttgtgtggctttacatctggctg

SEQ ID NO: 728146 - DNA, 25 bp, Homo sapien
caactcccagattagaacacagaaa

SEQ ID NO: 728147 - DNA, 25 bp, Homo sapien
tagagcacggaatgacactcatacc

SEQ ID NO: 728148 - DNA, 25 bp, Homo sapien
gatcatgctcggactttcattcctg

SEQ ID NO: 728149 - DNA, 25 bp, Homo sapien
tgaacagtaaaggtctagagcacgg

SEQ ID NO: 728150 - DNA, 25 bp, Homo sapien
gatagggcggatcataaggattctc

SEQ ID NO: 728151 - DNA, 25 bp, Homo sapien
taatgtaaggtagtgagaaaacttc

SEQ ID NO: 728152 - DNA, 25 bp, Homo sapien
tattcacttgccaatgatcaccaga

SEQ ID NO: 728153 - DNA, 25 bp, Homo sapien
ttaatgtgtaagtgcaggatagggc

SEQ ID NO: 728154 - DNA, 25 bp, Homo sapien
ggtttgtacaaagtagtcagactcc

SEQ ID NO: 728155 - DNA, 25 bp, Homo sapien
catgtattaagcatccagtacgtgc

SEQ ID NO: 728156 - DNA, 25 bp, Homo sapien
gcagtttccctctacaatggtcatt

SEQ ID NO: 728157 - DNA, 25 bp, Homo sapien
tatgagtagacatatatgcagcagg

SEQ ID NO: 728158 - DNA, 25 bp, Homo sapien
tcctgtgtcccgatgagagggccat

SEQ ID NO: 728159 - DNA, 25 bp, Homo sapien
tccatttcatgaagtaaagcaagag

SEQ ID NO: 728160 - DNA, 25 bp, Homo sapien
gggccatgagctaggtcttgagttc

SEQ ID NO: 728161 - DNA, 25 bp, Homo sapien
gagaaaagccactggtgagacttat

SEQ ID NO: 728162 - DNA, 25 bp, Homo sapien
aaaattagaaccttgattgtgtcat

SEQ ID NO: 728163 - DNA, 25 bp, Homo sapien
tttactaagctgctttcgattgtaa

SEQ ID NO: 728164 - DNA, 25 bp, Homo sapien
actaagctgctttcgattgtaaaaa

SEQ ID NO: 728165 - DNA, 25 bp, Homo sapien
gctgctttcgattgtaaaaattaga

SEQ ID NO: 728166 - DNA, 25 bp, Homo sapien
tttctgacttctcatagagttgcat

SEQ ID NO: 728167 - DNA, 25 bp, Homo sapien
ttctcttggactttgtgctatcaaa

SEQ ID NO: 728168 - DNA, 25 bp, Homo sapien
gaagcctagtttccatgactctgtg

SEQ ID NO: 728169 - DNA, 25 bp, Homo sapien
cctagtttccatgactctgtgaagc

SEQ ID NO: 728170 - DNA, 25 bp, Homo sapien
actaagaagcctagtttccatgact

SEQ ID NO: 728171 - DNA, 25 bp, Homo sapien
aagaagcctagtttccatgactctg

SEQ ID NO: 728172 - DNA, 25 bp, Homo sapien
ggaggaggttgtagatagaatatta

SEQ ID NO: 728173 - DNA, 25 bp, Homo sapien
cttcatagaagaaataaagcttgaa

SEQ ID NO: 728174 - DNA, 25 bp, Homo sapien
tagaagaaataaagcttgaagcaaa

SEQ ID NO: 728175 - DNA, 25 bp, Homo sapien
catagaagaaataaagcttgaagca

SEQ ID NO: 728176 - DNA, 25 bp, Homo sapien
tcatagaagaaataaagcttgaagc

SEQ ID NO: 728177 - DNA, 25 bp, Homo sapien
tgaacagccattgccacaaattttg

SEQ ID NO: 728178 - DNA, 25 bp, Homo sapien
gagggagtcatgtaactgaacagcc

SEQ ID NO: 728179 - DNA, 25 bp, Homo sapien
tgagaaccgctatgggtcaagggaa

SEQ ID NO: 728180 - DNA, 25 bp, Homo sapien
cttggagggagtcatgtaactgaac

SEQ ID NO: 728181 - DNA, 25 bp, Homo sapien
gtaggagtgcttgccaatcctagct

SEQ ID NO: 728182 - DNA, 25 bp, Homo sapien
caatcctagctaactctattgacat

SEQ ID NO: 728183 - DNA, 25 bp, Homo sapien
gagcgtcgtaggagtgcttgccaat

SEQ ID NO: 728184 - DNA, 25 bp, Homo sapien
gcttgccaatcctagctaactctat

SEQ ID NO: 728185 - DNA, 25 bp, Homo sapien
ctaagaattcctggttgttttgctt

SEQ ID NO: 728186 - DNA, 25 bp, Homo sapien
taatatggtagaagttcattgtgtc

SEQ ID NO: 728187 - DNA, 25 bp, Homo sapien
tatgttcgtctcctttcaaaatgga

SEQ ID NO: 728188 - DNA, 25 bp, Homo sapien
aaaatggattccgtagcttgtggag

SEQ ID NO: 728189 - DNA, 25 bp, Homo sapien
tacaattgtttgttagtaagaaaca

SEQ ID NO: 728190 - DNA, 25 bp, Homo sapien
caattgtttgttagtaagaaacaag

SEQ ID NO: 728191 - DNA, 25 bp, Homo sapien
aagaacttcccttctggatattggc

SEQ ID NO: 728192 - DNA, 25 bp, Homo sapien
gcctcagtgtccaactactaagagc

SEQ ID NO: 728193 - DNA, 25 bp, Homo sapien
gatgtcattgggatcacttattgcc

SEQ ID NO: 728194 - DNA, 25 bp, Homo sapien
tcatctcatcgtttggtgcctcagt

SEQ ID NO: 728195 - DNA, 25 bp, Homo sapien
gtggacttgtggtcatttgaagaaa

SEQ ID NO: 728196 - DNA, 25 bp, Homo sapien
ggacttgtggtcatttgaagaaata

SEQ ID NO: 728197 - DNA, 25 bp, Homo sapien
tcttctgggtcccacttaatatcct

SEQ ID NO: 728198 - DNA, 25 bp, Homo sapien
ccacttaatatccttcaacctaaag

SEQ ID NO: 728199 - DNA, 25 bp, Homo sapien
aatctgcatgtgttcgtgtttacca

SEQ ID NO: 728200 - DNA, 25 bp, Homo sapien
gtttgaactgtacatagccacatct

SEQ ID NO: 728201 - DNA, 25 bp, Homo sapien
caatggtacccgttactgtcagaaa

SEQ ID NO: 728202 - DNA, 25 bp, Homo sapien
aaattccacgttgatatgttgctcc

SEQ ID NO: 728203 - DNA, 25 bp, Homo sapien
tgtactgtacatgtgaagattgcct

SEQ ID NO: 728204 - DNA, 25 bp, Homo sapien
tagtgggagctccataaatctttcc

SEQ ID NO: 728205 - DNA, 25 bp, Homo sapien
ctgaaggttcctggccgtgcaggtt

SEQ ID NO: 728206 - DNA, 25 bp, Homo sapien
cgaagaaggcctctggtgataaaac

SEQ ID NO: 728207 - DNA, 25 bp, Homo sapien
tgggttctgtgttttcctaaagctc

SEQ ID NO: 728208 - DNA, 25 bp, Homo sapien
gtgttttcctaaagctcatacaatt

SEQ ID NO: 728209 - DNA, 25 bp, Homo sapien
tctgtgttttcctaaagctcataca

SEQ ID NO: 728210 - DNA, 25 bp, Homo sapien
gggttctgtgttttcctaaagctca

SEQ ID NO: 728211 - DNA, 25 bp, Homo sapien
gctctgggatttcaagttgaacttc

SEQ ID NO: 728212 - DNA, 25 bp, Homo sapien
gccaaaacgtacatccacgggaatg

SEQ ID NO: 728213 - DNA, 25 bp, Homo sapien
aattccagggatttaacgggctctg

SEQ ID NO: 728214 - DNA, 25 bp, Homo sapien
tacatccacgggaatgacaacaaag

SEQ ID NO: 728215 - DNA, 25 bp, Homo sapien
gatgcgtccaggctctagaaaagtg

SEQ ID NO: 728216 - DNA, 25 bp, Homo sapien
gaatgagaggaatacggatgcgtcc

SEQ ID NO: 728217 - DNA, 25 bp, Homo sapien
gaaaagtggcgacgttcacagaagt

SEQ ID NO: 728218 - DNA, 25 bp, Homo sapien
taaaaaggagacatctacctggcag

SEQ ID NO: 728219 - DNA, 25 bp, Homo sapien
tacatatccttcaccgtatttatag

SEQ ID NO: 728220 - DNA, 25 bp, Homo sapien
atatccttcaccgtatttatagtct

SEQ ID NO: 728221 - DNA, 25 bp, Homo sapien
gcttctacatatccttcaccgtatt

SEQ ID NO: 728222 - DNA, 25 bp, Homo sapien
atccttcaccgtatttatagtcttc

SEQ ID NO: 728223 - DNA, 25 bp, Homo sapien
cctgtgaggtcgctttctgatccca

SEQ ID NO: 728224 - DNA, 25 bp, Homo sapien
tgtgaggtcgctttctgatcccatg

SEQ ID NO: 728225 - DNA, 25 bp, Homo sapien
tcaccctgtgaggtcgctttctgat

SEQ ID NO: 728226 - DNA, 25 bp, Homo sapien
tgaggtcgctttctgatcccatgat

SEQ ID NO: 728227 - DNA, 25 bp, Homo sapien
gatagatagcagcagccatataact

SEQ ID NO: 728228 - DNA, 25 bp, Homo sapien
catacattgagagaagatagatagc

SEQ ID NO: 728229 - DNA, 25 bp, Homo sapien
aaatgcaagaatgtctatagcagca

SEQ ID NO: 728230 - DNA, 25 bp, Homo sapien
gatatgcttatcaggacacaaatgc

SEQ ID NO: 728231 - DNA, 25 bp, Homo sapien
tgtgagtgtccttctgagaattggc

SEQ ID NO: 728232 - DNA, 25 bp, Homo sapien
ctgtgagtgtccttctgagaattgg

SEQ ID NO: 728233 - DNA, 25 bp, Homo sapien
agtgtccttctgagaattggcccat

SEQ ID NO: 728234 - DNA, 25 bp, Homo sapien
tgagtgtccttctgagaattggccc

SEQ ID NO: 728235 - DNA, 25 bp, Homo sapien
ataaggattttgctcttttagattc

SEQ ID NO: 728236 - DNA, 25 bp, Homo sapien
gctcttttagattccttgtgaaaca

SEQ ID NO: 728237 - DNA, 25 bp, Homo sapien
tgctcttttagattccttgtgaaac

SEQ ID NO: 728238 - DNA, 25 bp, Homo sapien
gattttgctcttttagattccttgt

SEQ ID NO: 728239 - DNA, 25 bp, Homo sapien
tcttgggtctatgttcttctccatc

SEQ ID NO: 728240 - DNA, 25 bp, Homo sapien
tttcttgggtctatgttcttctcca

SEQ ID NO: 728241 - DNA, 25 bp, Homo sapien
aaaggctgtgctgcagatctgtcca

SEQ ID NO: 728242 - DNA, 25 bp, Homo sapien
ttcttgggtctatgttcttctccat

SEQ ID NO: 728243 - DNA, 25 bp, Homo sapien
caaggccgggtttgcattctcatcc

SEQ ID NO: 728244 - DNA, 25 bp, Homo sapien
tcaaggccgggtttgcattctcatc

SEQ ID NO: 728245 - DNA, 25 bp, Homo sapien
cttctgggttctgccactatccaaa

SEQ ID NO: 728246 - DNA, 25 bp, Homo sapien
gggttctgccactatccaaatcatg

SEQ ID NO: 728247 - DNA, 25 bp, Homo sapien
taagtagacctacacagtttccacc

SEQ ID NO: 728248 - DNA, 25 bp, Homo sapien
caagggcttcagttttcatcaccgt

SEQ ID NO: 728249 - DNA, 25 bp, Homo sapien
taccttgaaaactcgggatgtgaga

SEQ ID NO: 728250 - DNA, 25 bp, Homo sapien
taggtagtttccacattacttggct

SEQ ID NO: 728251 - DNA, 25 bp, Homo sapien
caaagtgagtattctctgaacatct

SEQ ID NO: 728252 - DNA, 25 bp, Homo sapien
ggttcaaatccgttctattccatat

SEQ ID NO: 728253 - DNA, 25 bp, Homo sapien
gactcccaaagtgagtattctctga

SEQ ID NO: 728254 - DNA, 25 bp, Homo sapien
cagagcatggttcaaatccgttcta

SEQ ID NO: 728255 - DNA, 25 bp, Homo sapien
gatcatatatgcgagacttctacag

SEQ ID NO: 728256 - DNA, 25 bp, Homo sapien
tgactcagtttagtcacctctccca

SEQ ID NO: 728257 - DNA, 25 bp, Homo sapien
cagacatgacttcagcgaaatttta

SEQ ID NO: 728258 - DNA, 25 bp, Homo sapien
gaattgcaagtcctgggtggttgac

SEQ ID NO: 728259 - DNA, 25 bp, Homo sapien
tccaatgagcgcaacaggacagaag

SEQ ID NO: 728260 - DNA, 25 bp, Homo sapien
aaagttgggacctcagatggaggat

SEQ ID NO: 728261 - DNA, 25 bp, Homo sapien
tccattgatcaaacactatccgaag

SEQ ID NO: 728262 - DNA, 25 bp, Homo sapien
gcagctcatgtcgaatatcatccag

SEQ ID NO: 728263 - DNA, 25 bp, Homo sapien
cacacttcaagagaatcccataatg

SEQ ID NO: 728264 - DNA, 25 bp, Homo sapien
cagcaggcttaagctggcaatcaat

SEQ ID NO: 728265 - DNA, 25 bp, Homo sapien
gctggcaatcaatgatagttataaa

SEQ ID NO: 728266 - DNA, 25 bp, Homo sapien
atatagttttgtgaagagtccagca

SEQ ID NO: 728267 - DNA, 25 bp, Homo sapien
ttactagcgtgttgaactgaacccc

SEQ ID NO: 728268 - DNA, 25 bp, Homo sapien
tgcacaaactttcaccgggcttaga

SEQ ID NO: 728269 - DNA, 25 bp, Homo sapien
caagcactgctatgagggctgcaaa

SEQ ID NO: 728270 - DNA, 25 bp, Homo sapien
ggtcaagaacatatagggctcagcc

SEQ ID NO: 728271 - DNA, 25 bp, Homo sapien
tattctcctgatgcgacaggtcgca

SEQ ID NO: 728272 - DNA, 25 bp, Homo sapien
cacacggatgttattgcgaagccac

SEQ ID NO: 728273 - DNA, 25 bp, Homo sapien
gccccgggcagaataggtgactaca

SEQ ID NO: 728274 - DNA, 25 bp, Homo sapien
gaaagcagcgcttacaaatctcaga

SEQ ID NO: 728275 - DNA, 25 bp, Homo sapien
gactgattcacaacgccaactgctg

SEQ ID NO: 728276 - DNA, 25 bp, Homo sapien
gaataacagacgtcttcacataggg

SEQ ID NO: 728277 - DNA, 25 bp, Homo sapien
gagccaaccatcttgtgccacgata

SEQ ID NO: 728278 - DNA, 25 bp, Homo sapien
tatgtaacaccaggcatgtgaccct

SEQ ID NO: 728279 - DNA, 25 bp, Homo sapien
agtagtgatccgtgaccagtctggc

SEQ ID NO: 728280 - DNA, 25 bp, Homo sapien
ttgagcaacctgctggagaccaccg

SEQ ID NO: 728281 - DNA, 25 bp, Homo sapien
tgttttcgacagagtgtggcttcct

SEQ ID NO: 728282 - DNA, 25 bp, Homo sapien
gttgcaaagggagtataacctctga

SEQ ID NO: 728283 - DNA, 25 bp, Homo sapien
ggctatggtgggcaaaccaagctga

SEQ ID NO: 728284 - DNA, 25 bp, Homo sapien
gtgggcaaaccaagctgattttcca

SEQ ID NO: 728285 - DNA, 25 bp, Homo sapien
ctgtatgcccatggaaagcggcgtt

SEQ ID NO: 728286 - DNA, 25 bp, Homo sapien
gctaaagctacaaagaagattgtcc

SEQ ID NO: 728287 - DNA, 25 bp, Homo sapien
ttcctctctagctagatcctttttg

SEQ ID NO: 728288 - DNA, 25 bp, Homo sapien
aacatctcctactcccaggggcatg

SEQ ID NO: 728289 - DNA, 25 bp, Homo sapien
ctttcctctctagctagatcctttt

SEQ ID NO: 728290 - DNA, 25 bp, Homo sapien
ttctaattctgtcaaatacaacaac

SEQ ID NO: 728291 - DNA, 25 bp, Homo sapien
ctgtgtattatttgtctagtcaaaa

SEQ ID NO: 728292 - DNA, 25 bp, Homo sapien
aaacagagcatgctgacatgggatc

SEQ ID NO: 728293 - DNA, 25 bp, Homo sapien
ttatttgtctagtcaaaaacagagc

SEQ ID NO: 728294 - DNA, 25 bp, Homo sapien
cagagcatgctgacatgggatcagt

SEQ ID NO: 728295 - DNA, 25 bp, Homo sapien
gtaggcactccatgactttaccaga

SEQ ID NO: 728296 - DNA, 25 bp, Homo sapien
cttttgaatatcgttcaagtaggca

SEQ ID NO: 728297 - DNA, 25 bp, Homo sapien
tttgaatatcgttcaagtaggcact

SEQ ID NO: 728298 - DNA, 25 bp, Homo sapien
taggcactccatgactttaccagag

SEQ ID NO: 728299 - DNA, 25 bp, Homo sapien
tctcttatagtacaatggctcccct

SEQ ID NO: 728300 - DNA, 25 bp, Homo sapien
catttgctgtgagttatttctggcc

SEQ ID NO: 728301 - DNA, 25 bp, Homo sapien
acagaattccattgactgctctgtg

SEQ ID NO: 728302 - DNA, 25 bp, Homo sapien
ccctaagagggttacagaattccat

SEQ ID NO: 728303 - DNA, 25 bp, Homo sapien
caggaactgttgtcgagctataagg

SEQ ID NO: 728304 - DNA, 25 bp, Homo sapien
agccctgaatgatcattgtcacctg

SEQ ID NO: 728305 - DNA, 25 bp, Homo sapien
ttcaggaactgttgtcgagctataa

SEQ ID NO: 728306 - DNA, 25 bp, Homo sapien
gggaaggagccctgaatgatcattg

SEQ ID NO: 728307 - DNA, 25 bp, Homo sapien
caatggccagaggtatagggctccc

SEQ ID NO: 728308 - DNA, 25 bp, Homo sapien
gcaatggccagaggtatagggctcc

SEQ ID NO: 728309 - DNA, 25 bp, Homo sapien
ctcagtaagctgatactgtggaaca

SEQ ID NO: 728310 - DNA, 25 bp, Homo sapien
tagggctccctggataacgttgctc

SEQ ID NO: 728311 - DNA, 25 bp, Homo sapien
tctccaaattgtaatggaccatctt

SEQ ID NO: 728312 - DNA, 25 bp, Homo sapien
gatctctccaaattgtaatggacca

SEQ ID NO: 728313 - DNA, 25 bp, Homo sapien
tctctccaaattgtaatggaccatc

SEQ ID NO: 728314 - DNA, 25 bp, Homo sapien
ccaaattgtaatggaccatcttctt

SEQ ID NO: 728315 - DNA, 25 bp, Homo sapien
tggctcttaggtcatgacaactctg

SEQ ID NO: 728316 - DNA, 25 bp, Homo sapien
caattcagacacatagaccttctta

SEQ ID NO: 728317 - DNA, 25 bp, Homo sapien
taatgtacgcgtggagtatgtcaca

SEQ ID NO: 728318 - DNA, 25 bp, Homo sapien
gattaccataggatgaccaccgcag

SEQ ID NO: 728319 - DNA, 25 bp, Homo sapien
cttgtgttactgtttaagtctttag

SEQ ID NO: 728320 - DNA, 25 bp, Homo sapien
tctcattgtgggtgactgtcccatt

SEQ ID NO: 728321 - DNA, 25 bp, Homo sapien
ttcccatcaccaaagtggatgatct

SEQ ID NO: 728322 - DNA, 25 bp, Homo sapien
ctaaattcccatcaccaaagtggat

SEQ ID NO: 728323 - DNA, 25 bp, Homo sapien
ttgccactattaggccaagtgtgca

SEQ ID NO: 728324 - DNA, 25 bp, Homo sapien
gtcatcaagtttgatttgagtaggg

SEQ ID NO: 728325 - DNA, 25 bp, Homo sapien
cttgccactattaggccaagtgtgc

SEQ ID NO: 728326 - DNA, 25 bp, Homo sapien
caaaagacatgtcatcaagtttgat

SEQ ID NO: 728327 - DNA, 25 bp, Homo sapien
tgcagaaccaaagaggtgttgcaac

SEQ ID NO: 728328 - DNA, 25 bp, Homo sapien
ctgcagaaccaaagaggtgttgcaa

SEQ ID NO: 728329 - DNA, 25 bp, Homo sapien
acctgcagattgtcccctgaagtcc

SEQ ID NO: 728330 - DNA, 25 bp, Homo sapien
gaagtcctgtgctaggcagccttgc

SEQ ID NO: 728331 - DNA, 25 bp, Homo sapien
ttccataacctgcagattgtcccct

SEQ ID NO: 728332 - DNA, 25 bp, Homo sapien
cataacctgcagattgtcccctgaa

SEQ ID NO: 728333 - DNA, 25 bp, Homo sapien
aaacttgcgtcactgcgagagcaca

SEQ ID NO: 728334 - DNA, 25 bp, Homo sapien
cgagagcacagtgaaacgtaaaggt

SEQ ID NO: 728335 - DNA, 25 bp, Homo sapien
ttagaaacttgcgtcactgcgagag

SEQ ID NO: 728336 - DNA, 25 bp, Homo sapien
taaaggtcccagcacgctggcagtg

SEQ ID NO: 728337 - DNA, 25 bp, Homo sapien
cagctcctggtcatagaaactctta

SEQ ID NO: 728338 - DNA, 25 bp, Homo sapien
tgttttcagtgttcccgtcagctcc

SEQ ID NO: 728339 - DNA, 25 bp, Homo sapien
tagcagccactgatcgcacaagctt

SEQ ID NO: 728340 - DNA, 25 bp, Homo sapien
ctgtcttgagtggtgttttggtgaa

SEQ ID NO: 728341 - DNA, 25 bp, Homo sapien
cggcatcaggaacagggagttcatc

SEQ ID NO: 728342 - DNA, 25 bp, Homo sapien
acagaacatggctttggcaaaatgg

SEQ ID NO: 728343 - DNA, 25 bp, Homo sapien
tcatcttttcgacacagaacatggc

SEQ ID NO: 728344 - DNA, 25 bp, Homo sapien
acttcttcctggtgtatgtgacggc

SEQ ID NO: 728345 - DNA, 25 bp, Homo sapien
ttcaggatcctatgctgagcacaga

SEQ ID NO: 728346 - DNA, 25 bp, Homo sapien
cagctggtcccgattgtattcagga

SEQ ID NO: 728347 - DNA, 25 bp, Homo sapien
catttcctttggaaggcaaggcctt

SEQ ID NO: 728348 - DNA, 25 bp, Homo sapien
gcattacttggctgcactcatgttt

SEQ ID NO: 728349 - DNA, 25 bp, Homo sapien
gctccacaatctccataaagcgcat

SEQ ID NO: 728350 - DNA, 25 bp, Homo sapien
cattagacacctgtgtgtagtggcc

SEQ ID NO: 728351 - DNA, 25 bp, Homo sapien
tacatatctcctgatggacctgcac

SEQ ID NO: 728352 - DNA, 25 bp, Homo sapien
ccctgtagcactttctagagtcaga

SEQ ID NO: 728353 - DNA, 25 bp, Homo sapien
ccgggtttacggactggagcagcgc

SEQ ID NO: 728354 - DNA, 25 bp, Homo sapien
cgggttcctgctgttcatagaatgt

SEQ ID NO: 728355 - DNA, 25 bp, Homo sapien
cggactggagcagcgcgggttcctg

SEQ ID NO: 728356 - DNA, 25 bp, Homo sapien
gggttcctgctgttcatagaatgtt

SEQ ID NO: 728357 - DNA, 25 bp, Homo sapien
aactgaatcctcttgaatgagatca

SEQ ID NO: 728358 - DNA, 25 bp, Homo sapien
ttgaccctaggaaaggatgtgaact

SEQ ID NO: 728359 - DNA, 25 bp, Homo sapien
gacattagtcatttggttgacccta

SEQ ID NO: 728360 - DNA, 25 bp, Homo sapien
agaatgtgtttacttctctactgtg

SEQ ID NO: 728361 - DNA, 25 bp, Homo sapien
caccaccatcaaccaagacacctgc

SEQ ID NO: 728362 - DNA, 25 bp, Homo sapien
ccatcaaccaagacacctgccgcct

SEQ ID NO: 728363 - DNA, 25 bp, Homo sapien
tgccgccttccaggtaacaaagtta

SEQ ID NO: 728364 - DNA, 25 bp, Homo sapien
ctgccgccttccaggtaacaaagtt

SEQ ID NO: 728365 - DNA, 25 bp, Homo sapien
gaattacaatgcagtagtaccagta

SEQ ID NO: 728366 - DNA, 25 bp, Homo sapien
gtattactgcaaagctcctatgtag

SEQ ID NO: 728367 - DNA, 25 bp, Homo sapien
tactacagggaaaataggcactcac

SEQ ID NO: 728368 - DNA, 25 bp, Homo sapien
tccttgctggtaaactaatatgaat

SEQ ID NO: 728369 - DNA, 25 bp, Homo sapien
gtcagaaagccatgtgtgtctctgc

SEQ ID NO: 728370 - DNA, 25 bp, Homo sapien
cacattgacagcagtagtgggcaga

SEQ ID NO: 728371 - DNA, 25 bp, Homo sapien
ggaaggctttcacaagataagtcag

SEQ ID NO: 728372 - DNA, 25 bp, Homo sapien
gcacttccttaagcctggtaaggaa

SEQ ID NO: 728373 - DNA, 25 bp, Homo sapien
cttcatctgtagcagagttcttttc

SEQ ID NO: 728374 - DNA, 25 bp, Homo sapien
cagagttcttttccacgtgaccttt

SEQ ID NO: 728375 - DNA, 25 bp, Homo sapien
tgcaaacagcattgacatatgggat

SEQ ID NO: 728376 - DNA, 25 bp, Homo sapien
aaacagcattgacatatgggatcaa

SEQ ID NO: 728377 - DNA, 25 bp, Homo sapien
tttgcaaacagcattgacatatggg

SEQ ID NO: 728378 - DNA, 25 bp, Homo sapien
caaacagcattgacatatgggatca

SEQ ID NO: 728379 - DNA, 25 bp, Homo sapien
gattgaatatagagctaaatacctc

SEQ ID NO: 728380 - DNA, 25 bp, Homo sapien
taaaagacttgtggccagttccgct

SEQ ID NO: 728381 - DNA, 25 bp, Homo sapien
gaagcttatgcccaagaaaccaaag

SEQ ID NO: 728382 - DNA, 25 bp, Homo sapien
agttccgcttttttgtcctgccatg

SEQ ID NO: 728383 - DNA, 25 bp, Homo sapien
ctttagatgtttcctccaggtgctg

SEQ ID NO: 728384 - DNA, 25 bp, Homo sapien
tcctccaggtgctgatgctgcctca

SEQ ID NO: 728385 - DNA, 25 bp, Homo sapien
atgtttcctccaggtgctgatgctg

SEQ ID NO: 728386 - DNA, 25 bp, Homo sapien
tttcctccaggtgctgatgctgcct

SEQ ID NO: 728387 - DNA, 25 bp, Homo sapien
gccattctgtctgtactgctctgca

SEQ ID NO: 728388 - DNA, 25 bp, Homo sapien
ctgcacgttgacacccatcagcttg

SEQ ID NO: 728389 - DNA, 25 bp, Homo sapien
catcagcttgcaagtgagcagggct

SEQ ID NO: 728390 - DNA, 25 bp, Homo sapien
tttcttgccagatgcggcaaacccc

SEQ ID NO: 728391 - DNA, 25 bp, Homo sapien
tactgtagattcattgtgtctgctt

SEQ ID NO: 728392 - DNA, 25 bp, Homo sapien
atgtggttagttccttctctatata

SEQ ID NO: 728393 - DNA, 25 bp, Homo sapien
atactgtagattcattgtgtctgct

SEQ ID NO: 728394 - DNA, 25 bp, Homo sapien
tgagttcctttagaaggttgaatct

SEQ ID NO: 728395 - DNA, 25 bp, Homo sapien
ccagagacagactgaagaattccaa

SEQ ID NO: 728396 - DNA, 25 bp, Homo sapien
cttctttctttcagggagtgaaaag

SEQ ID NO: 728397 - DNA, 25 bp, Homo sapien
gccagtaagtcttgagttcctttag

SEQ ID NO: 728398 - DNA, 25 bp, Homo sapien
gaactgccactgattagaactcggg

SEQ ID NO: 728399 - DNA, 25 bp, Homo sapien
cgctttcttcgctgaggaggcattt

SEQ ID NO: 728400 - DNA, 25 bp, Homo sapien
gaagggctcattaatcaggatccag

SEQ ID NO: 728401 - DNA, 25 bp, Homo sapien
tccagtgtgaatgtggaagtgcttg

SEQ ID NO: 728402 - DNA, 25 bp, Homo sapien
aatttgaactcacaccaaagggtct

SEQ ID NO: 728403 - DNA, 25 bp, Homo sapien
gaactcacaccaaagggtctgatag

SEQ ID NO: 728404 - DNA, 25 bp, Homo sapien
caccaaagggtctgatagtcatttg

SEQ ID NO: 728405 - DNA, 25 bp, Homo sapien
tcacaccaaagggtctgatagtcat

SEQ ID NO: 728406 - DNA, 25 bp, Homo sapien
tgtgatccgagggagggaaatccat

SEQ ID NO: 728407 - DNA, 25 bp, Homo sapien
tgagggcaggacaaagaggtgtgct

SEQ ID NO: 728408 - DNA, 25 bp, Homo sapien
tctggaaattcgtggagaaggctcc

SEQ ID NO: 728409 - DNA, 25 bp, Homo sapien
aatccataagtcacacaagcctctg

SEQ ID NO: 728410 - DNA, 25 bp, Homo sapien
tctaaaacagcagggttaaatgctg

SEQ ID NO: 728411 - DNA, 25 bp, Homo sapien
agcagggttaaatgctgggctggct

SEQ ID NO: 728412 - DNA, 25 bp, Homo sapien
cagggttaaatgctgggctggctgc

SEQ ID NO: 728413 - DNA, 25 bp, Homo sapien
taaaacagcagggttaaatgctggg

SEQ ID NO: 728414 - DNA, 25 bp, Homo sapien
ttctcgattgtaattattgaccatt

SEQ ID NO: 728415 - DNA, 25 bp, Homo sapien
ttttttctcgattgtaattattgac

SEQ ID NO: 728416 - DNA, 25 bp, Homo sapien
ttttctcgattgtaattattgacca

SEQ ID NO: 728417 - DNA, 25 bp, Homo sapien
ggatgttttttctcgattgtaatta

SEQ ID NO: 728418 - DNA, 25 bp, Homo sapien
tccctcataaattttatttgcagct

SEQ ID NO: 728419 - DNA, 25 bp, Homo sapien
cttccctcataaattttatttgcag

SEQ ID NO: 728420 - DNA, 25 bp, Homo sapien
ctaatttattgttcttccctcataa

SEQ ID NO: 728421 - DNA, 25 bp, Homo sapien
tattgttcttccctcataaatttta

SEQ ID NO: 728422 - DNA, 25 bp, Homo sapien
tgctcaagaaacacatgtgccttta

SEQ ID NO: 728423 - DNA, 25 bp, Homo sapien
gaatctaacccataacaggtccttg

SEQ ID NO: 728424 - DNA, 25 bp, Homo sapien
gaaagactttacactcatggaccat

SEQ ID NO: 728425 - DNA, 25 bp, Homo sapien
caggtccttgtttggagaacatgct

SEQ ID NO: 728426 - DNA, 25 bp, Homo sapien
agcaaaggtaacaaataatgtcatg

SEQ ID NO: 728427 - DNA, 25 bp, Homo sapien
tattgatcttgacttttaccaggcc

SEQ ID NO: 728428 - DNA, 25 bp, Homo sapien
tgagttttacagtgatggcaagaaa

SEQ ID NO: 728429 - DNA, 25 bp, Homo sapien
tccctcaggccggttgtaatttcag

SEQ ID NO: 728430 - DNA, 25 bp, Homo sapien
acacacttctacattggtttccatg

SEQ ID NO: 728431 - DNA, 25 bp, Homo sapien
tcattccctggccaacacacttcta

SEQ ID NO: 728432 - DNA, 25 bp, Homo sapien
cacttctacattggtttccatgccc

SEQ ID NO: 728433 - DNA, 25 bp, Homo sapien
ccaacacacttctacattggtttcc

SEQ ID NO: 728434 - DNA, 25 bp, Homo sapien
tctggaaatgttcatcaaacaatct

SEQ ID NO: 728435 - DNA, 25 bp, Homo sapien
caaaacagacatctcgttcttctgg

SEQ ID NO: 728436 - DNA, 25 bp, Homo sapien
aaaacagacatctcgttcttctgga

SEQ ID NO: 728437 - DNA, 25 bp, Homo sapien
ctggaaatgttcatcaaacaatctc

SEQ ID NO: 728438 - DNA, 25 bp, Homo sapien
tcatcaaccaatgcatgaagcaggg

SEQ ID NO: 728439 - DNA, 25 bp, Homo sapien
tctagggcagtctggtaggtgcatc

SEQ ID NO: 728440 - DNA, 25 bp, Homo sapien
tcagaagccagggaatccaactagt

SEQ ID NO: 728441 - DNA, 25 bp, Homo sapien
gctgaattgcgcctatcactttgaa

SEQ ID NO: 728442 - DNA, 25 bp, Homo sapien
gtcagttccacagaaaactgatccg

SEQ ID NO: 728443 - DNA, 25 bp, Homo sapien
aactgatccgtgtcggttccatgga

SEQ ID NO: 728444 - DNA, 25 bp, Homo sapien
cgtgtcggttccatggatctttgta

SEQ ID NO: 728445 - DNA, 25 bp, Homo sapien
ggattgatgtaaatctgagtttggc

SEQ ID NO: 728446 - DNA, 25 bp, Homo sapien
tggccagctgacaacgactctcttg

SEQ ID NO: 728447 - DNA, 25 bp, Homo sapien
tagaatgggcttagctagggctgtt

SEQ ID NO: 728448 - DNA, 25 bp, Homo sapien
cagctgccagggttggtaaccttca

SEQ ID NO: 728449 - DNA, 25 bp, Homo sapien
ggctgttgagtgtagcagctgccag

SEQ ID NO: 728450 - DNA, 25 bp, Homo sapien
caggaactctttgattgcttctttc

SEQ ID NO: 728451 - DNA, 25 bp, Homo sapien
gatttcaggaactctttgattgctt

SEQ ID NO: 728452 - DNA, 25 bp, Homo sapien
cttgaaagatttcaggaactctttg

SEQ ID NO: 728453 - DNA, 25 bp, Homo sapien
aagatttcaggaactctttgattgc

SEQ ID NO: 728454 - DNA, 25 bp, Homo sapien
ctcagtaggggacaaatttgcaatt

SEQ ID NO: 728455 - DNA, 25 bp, Homo sapien
caaatttgcaatttgtagttcctgc

SEQ ID NO: 728456 - DNA, 25 bp, Homo sapien
cagtaggggacaaatttgcaatttg

SEQ ID NO: 728457 - DNA, 25 bp, Homo sapien
aatttgcaatttgtagttcctgctc

SEQ ID NO: 728458 - DNA, 25 bp, Homo sapien
tgcatttggcggcaatccaccagag

SEQ ID NO: 728459 - DNA, 25 bp, Homo sapien
tgactacacagggacgtttacagcc

SEQ ID NO: 728460 - DNA, 25 bp, Homo sapien
tctagtcggttgatcacacatgtgc

SEQ ID NO: 728461 - DNA, 25 bp, Homo sapien
catttcgagttgattgagggacgtc

SEQ ID NO: 728462 - DNA, 25 bp, Homo sapien
tagccgaagcagaggcatgactctt

SEQ ID NO: 728463 - DNA, 25 bp, Homo sapien
tggcgtctccggttacttggtccat

SEQ ID NO: 728464 - DNA, 25 bp, Homo sapien
tcaccgagagtgctagccgaagcag

SEQ ID NO: 728465 - DNA, 25 bp, Homo sapien
ctgtgggaagatcaggttcaccgag

SEQ ID NO: 728466 - DNA, 25 bp, Homo sapien
tcacagaatgacgtgcaggtcacta

SEQ ID NO: 728467 - DNA, 25 bp, Homo sapien
cgtgcaggtcactagctactactac

SEQ ID NO: 728468 - DNA, 25 bp, Homo sapien
tgccagttctccaatgtcacctgaa

SEQ ID NO: 728469 - DNA, 25 bp, Homo sapien
ggttttgttgtaaagcccatgctgt

SEQ ID NO: 728470 - DNA, 25 bp, Homo sapien
gatgtgtggtgcgtctcccttgaga

SEQ ID NO: 728471 - DNA, 25 bp, Homo sapien
ggaattcttgcacctcgttaacata

SEQ ID NO: 728472 - DNA, 25 bp, Homo sapien
ttattagtggcagaaatcagagaca

SEQ ID NO: 728473 - DNA, 25 bp, Homo sapien
tacatgaatttgagcatggcttcag

SEQ ID NO: 728474 - DNA, 25 bp, Homo sapien
tctttatcaacaaagagtggctgag

SEQ ID NO: 728475 - DNA, 25 bp, Homo sapien
aagttcatcagtttagaatgcaggg

SEQ ID NO: 728476 - DNA, 25 bp, Homo sapien
tgggtaaaactgtccaacaggcaag

SEQ ID NO: 728477 - DNA, 25 bp, Homo sapien
cactcttgtggcagcgaatgatggt

SEQ ID NO: 728478 - DNA, 25 bp, Homo sapien
caatggctaggagctggacctgaga

SEQ ID NO: 728479 - DNA, 25 bp, Homo sapien
gatagcccaggtagctagctctctg

SEQ ID NO: 728480 - DNA, 25 bp, Homo sapien
ccagatgtctgatgccttttggctg

SEQ ID NO: 728481 - DNA, 25 bp, Homo sapien
aacagtgtcacaagtcccagatcta

SEQ ID NO: 728482 - DNA, 25 bp, Homo sapien
ccagatctagaaatattggatgcaa

SEQ ID NO: 728483 - DNA, 25 bp, Homo sapien
ggatgcaataatgaactgtttgttc

SEQ ID NO: 728484 - DNA, 25 bp, Homo sapien
gtatgtcccataggccaagtaagat

SEQ ID NO: 728485 - DNA, 25 bp, Homo sapien
gcaggcacagtatgtcccataggcc

SEQ ID NO: 728486 - DNA, 25 bp, Homo sapien
ggcacagtatgtcccataggccaag

SEQ ID NO: 728487 - DNA, 25 bp, Homo sapien
tgtgttcttggttggctggctttct

SEQ ID NO: 728488 - DNA, 25 bp, Homo sapien
tttgttgtgaccaatgtagttgagg

SEQ ID NO: 728489 - DNA, 25 bp, Homo sapien
caatgtagttgaggtgttggttacc

SEQ ID NO: 728490 - DNA, 25 bp, Homo sapien
gttgtttttgttgtgaccaatgtag

SEQ ID NO: 728491 - DNA, 25 bp, Homo sapien
tagttgaggtgttggttaccacttg

SEQ ID NO: 728492 - DNA, 25 bp, Homo sapien
tgctttgctttgttcagtaaataca

SEQ ID NO: 728493 - DNA, 25 bp, Homo sapien
gcagtttgctttgctttgttcagta

SEQ ID NO: 728494 - DNA, 25 bp, Homo sapien
tttgctttgctttgttcagtaaata

SEQ ID NO: 728495 - DNA, 25 bp, Homo sapien
agtttgctttgctttgttcagtaaa

SEQ ID NO: 728496 - DNA, 25 bp, Homo sapien
tccatatgagaaccttctcccagct

SEQ ID NO: 728497 - DNA, 25 bp, Homo sapien
tcagaatagcaataagcttatgaat

SEQ ID NO: 728498 - DNA, 25 bp, Homo sapien
ttaactccagttgcttatcttcctc

SEQ ID NO: 728499 - DNA, 25 bp, Homo sapien
ggacttgttgcagaatcatattgtt

SEQ ID NO: 728500 - DNA, 25 bp, Homo sapien
gaaccgtattacttggccgtgtctc

SEQ ID NO: 728501 - DNA, 25 bp, Homo sapien
agctttttctggataattggcttag

SEQ ID NO: 728502 - DNA, 25 bp, Homo sapien
tctcttagatctgcggttggtctgg

SEQ ID NO: 728503 - DNA, 25 bp, Homo sapien
gggcttaatgcactaagccttagca

SEQ ID NO: 728504 - DNA, 25 bp, Homo sapien
attcataataaaacaaaagatgaca

SEQ ID NO: 728505 - DNA, 25 bp, Homo sapien
taataaaacaaaagatgacacttag

SEQ ID NO: 728506 - DNA, 25 bp, Homo sapien
ataataaaacaaaagatgacactta

SEQ ID NO: 728507 - DNA, 25 bp, Homo sapien
tttattcataataaaacaaaagatg

SEQ ID NO: 728508 - DNA, 25 bp, Homo sapien
atttcctcatgagctattgcactga

SEQ ID NO: 728509 - DNA, 25 bp, Homo sapien
atgagctattgcactgaggcctcag

SEQ ID NO: 728510 - DNA, 25 bp, Homo sapien
tcctcatgagctattgcactgaggc

SEQ ID NO: 728511 - DNA, 25 bp, Homo sapien
cagttcatgatttcatgagctcctg

SEQ ID NO: 728512 - DNA, 25 bp, Homo sapien
tactcgatgacgtaagtacaattgt

SEQ ID NO: 728513 - DNA, 25 bp, Homo sapien
tgtgcactgtaaaggacatccaaga

SEQ ID NO: 728514 - DNA, 25 bp, Homo sapien
aagaaacattcttgattgtgaaact

SEQ ID NO: 728515 - DNA, 25 bp, Homo sapien
cactgtaaaggacatccaagaaaca

SEQ ID NO: 728516 - DNA, 25 bp, Homo sapien
tcccagggctttagtcttcagagca

SEQ ID NO: 728517 - DNA, 25 bp, Homo sapien
ccagggctttagtcttcagagcaac

SEQ ID NO: 728518 - DNA, 25 bp, Homo sapien
aaaagcttgaaatgatgagtcaccg

SEQ ID NO: 728519 - DNA, 25 bp, Homo sapien
gatgagtcaccgttcttttctttta

SEQ ID NO: 728520 - DNA, 25 bp, Homo sapien
atgctggcaatctgatcttgtactt

SEQ ID NO: 728521 - DNA, 25 bp, Homo sapien
gctggcaatctgatcttgtacttcc

SEQ ID NO: 728522 - DNA, 25 bp, Homo sapien
tgctggcaatctgatcttgtacttc

SEQ ID NO: 728523 - DNA, 25 bp, Homo sapien
gctggaagacggccctcatgagtac

SEQ ID NO: 728524 - DNA, 25 bp, Homo sapien
acctgaggacacaatgagaagttgg

SEQ ID NO: 728525 - DNA, 25 bp, Homo sapien
cacctgaggacacaatgagaagttg

SEQ ID NO: 728526 - DNA, 25 bp, Homo sapien
gcaagctggaagacggccctcatga

SEQ ID NO: 728527 - DNA, 25 bp, Homo sapien
tcagtctgacgattctgtgtcttgg

SEQ ID NO: 728528 - DNA, 25 bp, Homo sapien
ttcgaggaatacgtttgtggtggtc

SEQ ID NO: 728529 - DNA, 25 bp, Homo sapien
tgcctgatcgattcagctgtggaaa

SEQ ID NO: 728530 - DNA, 25 bp, Homo sapien
cagctgtaccaggtcttttatattc

SEQ ID NO: 728531 - DNA, 25 bp, Homo sapien
tcaggaagacatcaagatgcaaaac

SEQ ID NO: 728532 - DNA, 25 bp, Homo sapien
caaaacgtaggatagtccaacctca

SEQ ID NO: 728533 - DNA, 25 bp, Homo sapien
gatatccaagactatcaccacgagc

SEQ ID NO: 728534 - DNA, 25 bp, Homo sapien
taatggaggattatctacaaacatc

SEQ ID NO: 728535 - DNA, 25 bp, Homo sapien
cctacaattgtatattctaagagtg

SEQ ID NO: 728536 - DNA, 25 bp, Homo sapien
tattgaagtcaatatgggccgaagt

SEQ ID NO: 728537 - DNA, 25 bp, Homo sapien
gggccgaagttgtcataggtatgaa

SEQ ID NO: 728538 - DNA, 25 bp, Homo sapien
tctgtcttagtttatgggcattagc

SEQ ID NO: 728539 - DNA, 25 bp, Homo sapien
aactgctcagcacacgtttaatgca

SEQ ID NO: 728540 - DNA, 25 bp, Homo sapien
caccaactgctcagcacacgtttaa

SEQ ID NO: 728541 - DNA, 25 bp, Homo sapien
gcacttgacattactttgatatcaa

SEQ ID NO: 728542 - DNA, 25 bp, Homo sapien
agcacttgacattactttgatatca

SEQ ID NO: 728543 - DNA, 25 bp, Homo sapien
agataaagaggtcgcctctgggcca

SEQ ID NO: 728544 - DNA, 25 bp, Homo sapien
ttctggagtacctctctaccgggcc

SEQ ID NO: 728545 - DNA, 25 bp, Homo sapien
taccgggccaacagccaaatatgtt

SEQ ID NO: 728546 - DNA, 25 bp, Homo sapien
tctgggccatccatcaatcatcgga

SEQ ID NO: 728547 - DNA, 25 bp, Homo sapien
gcttacaagttctggacaaccatta

SEQ ID NO: 728548 - DNA, 25 bp, Homo sapien
tcttgtccgcttagaaatgaggtca

SEQ ID NO: 728549 - DNA, 25 bp, Homo sapien
caagtcttagcctttaactcaggaa

SEQ ID NO: 728550 - DNA, 25 bp, Homo sapien
taccactttgagcttataaccacag

SEQ ID NO: 728551 - DNA, 25 bp, Homo sapien
ttaaatccatttgatttatttggta

SEQ ID NO: 728552 - DNA, 25 bp, Homo sapien
tatttggtatgttagccagatttcc

SEQ ID NO: 728553 - DNA, 25 bp, Homo sapien
ttatttggtatgttagccagatttc

SEQ ID NO: 728554 - DNA, 25 bp, Homo sapien
taatgaggagctaatgtagaacttc

SEQ ID NO: 728555 - DNA, 25 bp, Homo sapien
ggcttgaagttagggatttccttca

SEQ ID NO: 728556 - DNA, 25 bp, Homo sapien
tttgggtgtcctgttattttactca

SEQ ID NO: 728557 - DNA, 25 bp, Homo sapien
aaggagatatcgttcctgctaagcc

SEQ ID NO: 728558 - DNA, 25 bp, Homo sapien
cttattaaatattgggttacagtct

SEQ ID NO: 728559 - DNA, 25 bp, Homo sapien
gacagggtcttggtactatcatggc

SEQ ID NO: 728560 - DNA, 25 bp, Homo sapien
caagtctgacttttatagttctgtc

SEQ ID NO: 728561 - DNA, 25 bp, Homo sapien
ggtctttctgatgtgcatgggtttc

SEQ ID NO: 728562 - DNA, 25 bp, Homo sapien
gcttctcttggttccactggtgagt

SEQ ID NO: 728563 - DNA, 25 bp, Homo sapien
tctcttggttccactggtgagtccc

SEQ ID NO: 728564 - DNA, 25 bp, Homo sapien
ttctcttggttccactggtgagtcc

SEQ ID NO: 728565 - DNA, 25 bp, Homo sapien
cttctcttggttccactggtgagtc

SEQ ID NO: 728566 - DNA, 25 bp, Homo sapien
tcccttctattgcttggcttcaaga

SEQ ID NO: 728567 - DNA, 25 bp, Homo sapien
gataatttactcagacacatctcat

SEQ ID NO: 728568 - DNA, 25 bp, Homo sapien
gaaccatcaatgtgtagtatccctt

SEQ ID NO: 728569 - DNA, 25 bp, Homo sapien
taagggagtctcacgggtttactga

SEQ ID NO: 728570 - DNA, 25 bp, Homo sapien
tgaacaaagggtgagggccagccat

SEQ ID NO: 728571 - DNA, 25 bp, Homo sapien
ttgaacaaagggtgagggccagcca

SEQ ID NO: 728572 - DNA, 25 bp, Homo sapien
gttgaacaaagggtgagggccagcc

SEQ ID NO: 728573 - DNA, 25 bp, Homo sapien
cagagttgtggattgtcgtcttttt

SEQ ID NO: 728574 - DNA, 25 bp, Homo sapien
gagttgtggattgtcgtctttttct

SEQ ID NO: 728575 - DNA, 25 bp, Homo sapien
agttgtggattgtcgtctttttctg

SEQ ID NO: 728576 - DNA, 25 bp, Homo sapien
ggcagagttgtggattgtcgtcttt

SEQ ID NO: 728577 - DNA, 25 bp, Homo sapien
taattctcctatccctgactgcttc

SEQ ID NO: 728578 - DNA, 25 bp, Homo sapien
attgctaattctcctatccctgact

SEQ ID NO: 728579 - DNA, 25 bp, Homo sapien
gcctcctgttctgccatattgctaa

SEQ ID NO: 728580 - DNA, 25 bp, Homo sapien
agcctcctgttctgccatattgcta

SEQ ID NO: 728581 - DNA, 25 bp, Homo sapien
tcttaacaagacgtgaacatctgtc

SEQ ID NO: 728582 - DNA, 25 bp, Homo sapien
tccgtaggaatcatgtcttaacaag

SEQ ID NO: 728583 - DNA, 25 bp, Homo sapien
tgtggatgaagtccagttgtaaacg

SEQ ID NO: 728584 - DNA, 25 bp, Homo sapien
ctagttcacacttgttccgtaggaa

SEQ ID NO: 728585 - DNA, 25 bp, Homo sapien
tattaattggatttggcaacgtggg

SEQ ID NO: 728586 - DNA, 25 bp, Homo sapien
tagattccagaaagcataggaagac

SEQ ID NO: 728587 - DNA, 25 bp, Homo sapien
gcgataatggcctgattgaaataga

SEQ ID NO: 728588 - DNA, 25 bp, Homo sapien
ggagatgtgctcttatacagataat

SEQ ID NO: 728589 - DNA, 25 bp, Homo sapien
agagcgggcaagtcagccctcccgc

SEQ ID NO: 728590 - DNA, 25 bp, Homo sapien
agccgcgagggcagatcggcagcct

SEQ ID NO: 728591 - DNA, 25 bp, Homo sapien
acatttccacttgcggcgacagctg

SEQ ID NO: 728592 - DNA, 25 bp, Homo sapien
gatatgtagggcgttctgacatttc

SEQ ID NO: 728593 - DNA, 25 bp, Homo sapien
tgctttaggcctggaattcttcaac

SEQ ID NO: 728594 - DNA, 25 bp, Homo sapien
ccagcaacaagagtactaaataagg

SEQ ID NO: 728595 - DNA, 25 bp, Homo sapien
tactttcatggtaaacctcaccagc

SEQ ID NO: 728596 - DNA, 25 bp, Homo sapien
ttccagggacctaatacaatagtgc

SEQ ID NO: 728597 - DNA, 25 bp, Homo sapien
cagattattaaggctggccaccacc

SEQ ID NO: 728598 - DNA, 25 bp, Homo sapien
caagtataggttagacagacctggg

SEQ ID NO: 728599 - DNA, 25 bp, Homo sapien
gaaacactgtcctaccgtttggaga

SEQ ID NO: 728600 - DNA, 25 bp, Homo sapien
gcattaaagaggctgaatctcacta

SEQ ID NO: 728601 - DNA, 25 bp, Homo sapien
tctcactatggagagaacggaaaca

SEQ ID NO: 728602 - DNA, 25 bp, Homo sapien
tccacttatgaacacgagatcactt

SEQ ID NO: 728603 - DNA, 25 bp, Homo sapien
tccatttgtaccattgtatgaccca

SEQ ID NO: 728604 - DNA, 25 bp, Homo sapien
tttgcactgtcgcaataactgcacc

SEQ ID NO: 728605 - DNA, 25 bp, Homo sapien
tcttctggacatggtaactactgga

SEQ ID NO: 728606 - DNA, 25 bp, Homo sapien
tcaggaaatgaacaccgtggttcct

SEQ ID NO: 728607 - DNA, 25 bp, Homo sapien
gcaaccatacgttcctgatttaggg

SEQ ID NO: 728608 - DNA, 25 bp, Homo sapien
cataaggcatgtaacaagaaacagc

SEQ ID NO: 728609 - DNA, 25 bp, Homo sapien
aagtttgccatgaccaatattcagg

SEQ ID NO: 728610 - DNA, 25 bp, Homo sapien
attcggaaatcccctttatctgtga

SEQ ID NO: 728611 - DNA, 25 bp, Homo sapien
tatattcggaaatcccctttatctg

SEQ ID NO: 728612 - DNA, 25 bp, Homo sapien
tcggaaatcccctttatctgtgata

SEQ ID NO: 728613 - DNA, 25 bp, Homo sapien
cggaaatcccctttatctgtgatat

SEQ ID NO: 728614 - DNA, 25 bp, Homo sapien
tataatagctaatcacttttccatt

SEQ ID NO: 728615 - DNA, 25 bp, Homo sapien
taagaccagcaagcattcaaacaaa

SEQ ID NO: 728616 - DNA, 25 bp, Homo sapien
cagctttgcctggatgacaccgtat

SEQ ID NO: 728617 - DNA, 25 bp, Homo sapien
aaagactgggcacaatacacgctag

SEQ ID NO: 728618 - DNA, 25 bp, Homo sapien
aaatctggatcaacgctcacctctg

SEQ ID NO: 728619 - DNA, 25 bp, Homo sapien
tcctcagggaagagtgatgcaacac

SEQ ID NO: 728620 - DNA, 25 bp, Homo sapien
catacgtaaagtctctaagcccaag

SEQ ID NO: 728621 - DNA, 25 bp, Homo sapien
ggtacttgaataagggactcctcag

SEQ ID NO: 728622 - DNA, 25 bp, Homo sapien
caccttcttgttggatcctcacatg

SEQ ID NO: 728623 - DNA, 25 bp, Homo sapien
aagtccgagatgagggtgccaacgt

SEQ ID NO: 728624 - DNA, 25 bp, Homo sapien
ttcttgtgagggtcctcttgtgggt

SEQ ID NO: 728625 - DNA, 25 bp, Homo sapien
tgattgggttcttgtgagggtcctc

SEQ ID NO: 728626 - DNA, 25 bp, Homo sapien
tttccgcatcacgacatagccatca

SEQ ID NO: 728627 - DNA, 25 bp, Homo sapien
agttccaggattcacatactgacat

SEQ ID NO: 728628 - DNA, 25 bp, Homo sapien
cgcatcacgacatagccatcacagt

SEQ ID NO: 728629 - DNA, 25 bp, Homo sapien
cacagttccaggattcacatactga

SEQ ID NO: 728630 - DNA, 25 bp, Homo sapien
gacgtttgagcgtgtggccctgcaa

SEQ ID NO: 728631 - DNA, 25 bp, Homo sapien
cccctgctcatggtgatgcgtccgg

SEQ ID NO: 728632 - DNA, 25 bp, Homo sapien
ttgtgcctcggacacacgcgtgtta

SEQ ID NO: 728633 - DNA, 25 bp, Homo sapien
tatttgaagccaaacgctgactttt

SEQ ID NO: 728634 - DNA, 25 bp, Homo sapien
gaagcagcggtgattaatccggcct

SEQ ID NO: 728635 - DNA, 25 bp, Homo sapien
gacttggcttggtgcacagctcgtt

SEQ ID NO: 728636 - DNA, 25 bp, Homo sapien
gtaggcgccagcatcgcaaggtacg

SEQ ID NO: 728637 - DNA, 25 bp, Homo sapien
gctctgtagggcagtttcggatgcc

SEQ ID NO: 728638 - DNA, 25 bp, Homo sapien
ggagagtgggatccaaggaagatca

SEQ ID NO: 728639 - DNA, 25 bp, Homo sapien
ggccacatatctttagctgatcttc

SEQ ID NO: 728640 - DNA, 25 bp, Homo sapien
tgtggccacatatctttagctgatc

SEQ ID NO: 728641 - DNA, 25 bp, Homo sapien
ctcctgtggccacatatctttagct

SEQ ID NO: 728642 - DNA, 25 bp, Homo sapien
cctgtggccacatatctttagctga

SEQ ID NO: 728643 - DNA, 25 bp, Homo sapien
tcaatttcagtatcttgtctctcca

SEQ ID NO: 728644 - DNA, 25 bp, Homo sapien
gatcacccagctggaagagacagag

SEQ ID NO: 728645 - DNA, 25 bp, Homo sapien
ttaatcaatttcagtatcttgtctc

SEQ ID NO: 728646 - DNA, 25 bp, Homo sapien
tgtggattccaggaagtggtaaaat

SEQ ID NO: 728647 - DNA, 25 bp, Homo sapien
cactgtctgaggatagttggtccat

SEQ ID NO: 728648 - DNA, 25 bp, Homo sapien
ttggtccatttgattgatgtggcct

SEQ ID NO: 728649 - DNA, 25 bp, Homo sapien
tgtggcctggagtagttggatctct

SEQ ID NO: 728650 - DNA, 25 bp, Homo sapien
gtgtgagattccacctatccaagtg

SEQ ID NO: 728651 - DNA, 25 bp, Homo sapien
gaaagatcaatgacctctgtcagtt

SEQ ID NO: 728652 - DNA, 25 bp, Homo sapien
ttaaacctagaaagatcaatgacct

SEQ ID NO: 728653 - DNA, 25 bp, Homo sapien
tgatgaagccataagtattttaatt

SEQ ID NO: 728654 - DNA, 25 bp, Homo sapien
ttatgatgaagccataagtatttta

SEQ ID NO: 728655 - DNA, 25 bp, Homo sapien
tccagtcatctcccatcatgtccgt

SEQ ID NO: 728656 - DNA, 25 bp, Homo sapien
ccagtcatctcccatcatgtccgtc

SEQ ID NO: 728657 - DNA, 25 bp, Homo sapien
agaacaacatggagggaaccatccc

SEQ ID NO: 728658 - DNA, 25 bp, Homo sapien
acaacatggagggaaccatccccat

SEQ ID NO: 728659 - DNA, 25 bp, Homo sapien
taaagaagacaggtttaattgactc

SEQ ID NO: 728660 - DNA, 25 bp, Homo sapien
ataaagaagacaggtttaattgact

SEQ ID NO: 728661 - DNA, 25 bp, Homo sapien
tataaagaagacaggtttaattgac

SEQ ID NO: 728662 - DNA, 25 bp, Homo sapien
gccagtgccaattctctgtattcgt

SEQ ID NO: 728663 - DNA, 25 bp, Homo sapien
gaatgcatatgactgaatgctttcg

SEQ ID NO: 728664 - DNA, 25 bp, Homo sapien
tatctttgtagcagtatcccactct

SEQ ID NO: 728665 - DNA, 25 bp, Homo sapien
tgctttcggaatcagccaggttatg

SEQ ID NO: 728666 - DNA, 25 bp, Homo sapien
aggtgagaaagagcatgaaagagga

SEQ ID NO: 728667 - DNA, 25 bp, Homo sapien
agaaagagcatgaaagaggaagtgc

SEQ ID NO: 728668 - DNA, 25 bp, Homo sapien
tgagaaagagcatgaaagaggaagt

SEQ ID NO: 728669 - DNA, 25 bp, Homo sapien
caggttcctcccctgacacgtgggg

SEQ ID NO: 728670 - DNA, 25 bp, Homo sapien
ttgcttggataaagctttgattcca

SEQ ID NO: 728671 - DNA, 25 bp, Homo sapien
cttttgcttggataaagctttgatt

SEQ ID NO: 728672 - DNA, 25 bp, Homo sapien
tttgaattttagttcggtcttgctc

SEQ ID NO: 728673 - DNA, 25 bp, Homo sapien
attttagttcggtcttgctcttttg

SEQ ID NO: 728674 - DNA, 25 bp, Homo sapien
acacaagtaactgcacttgttcttg

SEQ ID NO: 728675 - DNA, 25 bp, Homo sapien
ggcactaagcaacatcacacacaag

SEQ ID NO: 728676 - DNA, 25 bp, Homo sapien
catttcctttcacgtgctctggagt

SEQ ID NO: 728677 - DNA, 25 bp, Homo sapien
aaaagaagatccaacaccggcacta

SEQ ID NO: 728678 - DNA, 25 bp, Homo sapien
tatctcaaatattgcattgttgttt

SEQ ID NO: 728679 - DNA, 25 bp, Homo sapien
caaatattgcattgttgtttagata

SEQ ID NO: 728680 - DNA, 25 bp, Homo sapien
tagatatagttctgtcagacaatag

SEQ ID NO: 728681 - DNA, 25 bp, Homo sapien
gtcagacaatagtttctagttagaa

SEQ ID NO: 728682 - DNA, 25 bp, Homo sapien
tcattgtggtgtagcaggagtatat

SEQ ID NO: 728683 - DNA, 25 bp, Homo sapien
tgcaatgaaggcaaataatgcagac

SEQ ID NO: 728684 - DNA, 25 bp, Homo sapien
ggatcttcagatttagcattccctt

SEQ ID NO: 728685 - DNA, 25 bp, Homo sapien
cactgttgcatcaatgttggttagc

SEQ ID NO: 728686 - DNA, 25 bp, Homo sapien
tgtaaaaggcaaactacgataaagc

SEQ ID NO: 728687 - DNA, 25 bp, Homo sapien
gaaggaagttcagctgtcaataatc

SEQ ID NO: 728688 - DNA, 25 bp, Homo sapien
tcaaggttacttagtaaggtcagca

SEQ ID NO: 728689 - DNA, 25 bp, Homo sapien
tggagatcctagtccctccccgtat

SEQ ID NO: 728690 - DNA, 25 bp, Homo sapien
taaacgatacaggttatattggcac

SEQ ID NO: 728691 - DNA, 25 bp, Homo sapien
tataaacgatacaggttatattggc

SEQ ID NO: 728692 - DNA, 25 bp, Homo sapien
tggtagatgatatataaacgataca

SEQ ID NO: 728693 - DNA, 25 bp, Homo sapien
gatgatatataaacgatacaggtta

SEQ ID NO: 728694 - DNA, 25 bp, Homo sapien
tatttctttgcaagaaggaagggtc

SEQ ID NO: 728695 - DNA, 25 bp, Homo sapien
aatatttctttgcaagaaggaaggg

SEQ ID NO: 728696 - DNA, 25 bp, Homo sapien
tctttgcaagaaggaagggtcctta

SEQ ID NO: 728697 - DNA, 25 bp, Homo sapien
tcaaatatttctttgcaagaaggaa

SEQ ID NO: 728698 - DNA, 25 bp, Homo sapien
taggatcccatgaagcatccacttt

SEQ ID NO: 728699 - DNA, 25 bp, Homo sapien
tgctattgattgaacgatatgagcc

SEQ ID NO: 728700 - DNA, 25 bp, Homo sapien
cgatatgagcctttttatggttaaa

SEQ ID NO: 728701 - DNA, 25 bp, Homo sapien
cacttttcctccgaatgctattgat

SEQ ID NO: 728702 - DNA, 25 bp, Homo sapien
tgagtgaggatgaaaattgcatacc

SEQ ID NO: 728703 - DNA, 25 bp, Homo sapien
aattgcatacctactttaactggac

SEQ ID NO: 728704 - DNA, 25 bp, Homo sapien
tatctcgttattatcacagcacccc

SEQ ID NO: 728705 - DNA, 25 bp, Homo sapien
taggtactgggatagaggcttcaat

SEQ ID NO: 728706 - DNA, 25 bp, Homo sapien
accctctcttccttcgtggaatgga

SEQ ID NO: 728707 - DNA, 25 bp, Homo sapien
ccagccaccttgtaatcataaagca

SEQ ID NO: 728708 - DNA, 25 bp, Homo sapien
ttccttcgtggaatggagatgtgag

SEQ ID NO: 728709 - DNA, 25 bp, Homo sapien
tgaggcttgggggtacaccagccac

SEQ ID NO: 728710 - DNA, 25 bp, Homo sapien
gcccaggctctgtgacactataccc

SEQ ID NO: 728711 - DNA, 25 bp, Homo sapien
ggctctgtgacactataccccagct

SEQ ID NO: 728712 - DNA, 25 bp, Homo sapien
ccaggctctgtgacactatacccca

SEQ ID NO: 728713 - DNA, 25 bp, Homo sapien
caggctctgtgacactataccccag

SEQ ID NO: 728714 - DNA, 25 bp, Homo sapien
cttccagagactgtcactgctttgt

SEQ ID NO: 728715 - DNA, 25 bp, Homo sapien
tcttccagagactgtcactgctttg

SEQ ID NO: 728716 - DNA, 25 bp, Homo sapien
agtaaagggacaacacaattatgaa

SEQ ID NO: 728717 - DNA, 25 bp, Homo sapien
aagtaaagggacaacacaattatga

SEQ ID NO: 728718 - DNA, 25 bp, Homo sapien
ctgatctcttcatggacctcacaaa

SEQ ID NO: 728719 - DNA, 25 bp, Homo sapien
agaggtcaaagtcatcactgatctc

SEQ ID NO: 728720 - DNA, 25 bp, Homo sapien
tcctctcgtgttggaactgtgtccc

SEQ ID NO: 728721 - DNA, 25 bp, Homo sapien
ctgtgtcccagttcatagaggtcaa

SEQ ID NO: 728722 - DNA, 25 bp, Homo sapien
cactaagatatctagaaataccagg

SEQ ID NO: 728723 - DNA, 25 bp, Homo sapien
tgtaagtatgtaatatgctaagtca

SEQ ID NO: 728724 - DNA, 25 bp, Homo sapien
taactgtgagcatttgagctgtttc

SEQ ID NO: 728725 - DNA, 25 bp, Homo sapien
aataccagggcttatctcagtgtaa

SEQ ID NO: 728726 - DNA, 25 bp, Homo sapien
acagccacagcagaatctgtaccac

SEQ ID NO: 728727 - DNA, 25 bp, Homo sapien
gacagccacagcagaatctgtacca

SEQ ID NO: 728728 - DNA, 25 bp, Homo sapien
ctctgccaccgggaccttctgccca

SEQ ID NO: 728729 - DNA, 25 bp, Homo sapien
cctctctgccaccgggaccttctgc

SEQ ID NO: 728730 - DNA, 25 bp, Homo sapien
caagacagagtctgtatcggataag

SEQ ID NO: 728731 - DNA, 25 bp, Homo sapien
tcagcccagtagttcccctgagaac

SEQ ID NO: 728732 - DNA, 25 bp, Homo sapien
gaacagcctggatccttttcctccc

SEQ ID NO: 728733 - DNA, 25 bp, Homo sapien
taaggaggacaaaccacccctggca

SEQ ID NO: 728734 - DNA, 25 bp, Homo sapien
ccgtggtatcaatggaggcccttcc

SEQ ID NO: 728735 - DNA, 25 bp, Homo sapien
gagccgaaagcatcttgaccacgca

SEQ ID NO: 728736 - DNA, 25 bp, Homo sapien
ggacaatagcaatcctggcccaggt

SEQ ID NO: 728737 - DNA, 25 bp, Homo sapien
taaagacaagttcaccgattcagcc

SEQ ID NO: 728738 - DNA, 25 bp, Homo sapien
gattgagttcttggtgaacatcctc

SEQ ID NO: 728739 - DNA, 25 bp, Homo sapien
gcaggattgagttcttggtgaacat

SEQ ID NO: 728740 - DNA, 25 bp, Homo sapien
cagcaggattgagttcttggtgaac

SEQ ID NO: 728741 - DNA, 25 bp, Homo sapien
caggattgagttcttggtgaacatc

SEQ ID NO: 728742 - DNA, 25 bp, Homo sapien
gcctgtgtaatctatagccttaatg

SEQ ID NO: 728743 - DNA, 25 bp, Homo sapien
catgcccactctagggttctgatcc

SEQ ID NO: 728744 - DNA, 25 bp, Homo sapien
tcacattgtaggacggcagtgtccg

SEQ ID NO: 728745 - DNA, 25 bp, Homo sapien
agtgtccgtgggctgatacctctgt

SEQ ID NO: 728746 - DNA, 25 bp, Homo sapien
gctgcaaaccagagtaagctttatc

SEQ ID NO: 728747 - DNA, 25 bp, Homo sapien
agctttatcaaactttaaggaccag

SEQ ID NO: 728748 - DNA, 25 bp, Homo sapien
tgggaagatactcaactcatttatt

SEQ ID NO: 728749 - DNA, 25 bp, Homo sapien
taaggctagcataatgctgatgcca

SEQ ID NO: 728750 - DNA, 25 bp, Homo sapien
ggtagtttccacatacgcgtgtgtt

SEQ ID NO: 728751 - DNA, 25 bp, Homo sapien
cctggtgttgaactaaggcacttcc

SEQ ID NO: 728752 - DNA, 25 bp, Homo sapien
tgctgtcagctagttatttgcccag

SEQ ID NO: 728753 - DNA, 25 bp, Homo sapien
cgtgtgttgatcagtactccagcca

SEQ ID NO: 728754 - DNA, 25 bp, Homo sapien
gacatagacacacggaacccggcgc

SEQ ID NO: 728755 - DNA, 25 bp, Homo sapien
tgacatagacacacggaacccggcg

SEQ ID NO: 728756 - DNA, 25 bp, Homo sapien
atagacacacggaacccggcgcagc

SEQ ID NO: 728757 - DNA, 25 bp, Homo sapien
agacacacggaacccggcgcagccc

SEQ ID NO: 728758 - DNA, 25 bp, Homo sapien
ctgtccgaggaggtagcgacgacgc

SEQ ID NO: 728759 - DNA, 25 bp, Homo sapien
ggctgcggcgattcgtgcagcagca

SEQ ID NO: 728760 - DNA, 25 bp, Homo sapien
gaggaggtagcgacgacgcgcaagg

SEQ ID NO: 728761 - DNA, 25 bp, Homo sapien
aggtagcgacgacgcgcaaggctgg

SEQ ID NO: 728762 - DNA, 25 bp, Homo sapien
cagagccccggccccagcctccccg

SEQ ID NO: 728763 - DNA, 25 bp, Homo sapien
gccccagcctccccgggagccgcat

SEQ ID NO: 728764 - DNA, 25 bp, Homo sapien
ctagcccagagccccggccccagcc

SEQ ID NO: 728765 - DNA, 25 bp, Homo sapien
ggccccagcctccccgggagccgca

SEQ ID NO: 728766 - DNA, 25 bp, Homo sapien
ctacaagggaatgactgctcctgtc

SEQ ID NO: 728767 - DNA, 25 bp, Homo sapien
cctacaagggaatgactgctcctgt

SEQ ID NO: 728768 - DNA, 25 bp, Homo sapien
tacaagggaatgactgctcctgtct

SEQ ID NO: 728769 - DNA, 25 bp, Homo sapien
tgggactcttctttagttctctcca

SEQ ID NO: 728770 - DNA, 25 bp, Homo sapien
ctgggactcttctttagttctctcc

SEQ ID NO: 728771 - DNA, 25 bp, Homo sapien
gggactcttctttagttctctccat

SEQ ID NO: 728772 - DNA, 25 bp, Homo sapien
ttcgatgtagactgatcagtcttac

SEQ ID NO: 728773 - DNA, 25 bp, Homo sapien
cttcgatgtagactgatcagtctta

SEQ ID NO: 728774 - DNA, 25 bp, Homo sapien
tgaaccgctggcctgttagcactgg

SEQ ID NO: 728775 - DNA, 25 bp, Homo sapien
tggcctgttagcactggcttctgat

SEQ ID NO: 728776 - DNA, 25 bp, Homo sapien
gttttgaaccgctggcctgttagca

SEQ ID NO: 728777 - DNA, 25 bp, Homo sapien
ttccgagttttgaaccgctggcctg

SEQ ID NO: 728778 - DNA, 25 bp, Homo sapien
cacaggctgcttagcactgactgcc

SEQ ID NO: 728779 - DNA, 25 bp, Homo sapien
ctagacttgttacttaaatggagac

SEQ ID NO: 728780 - DNA, 25 bp, Homo sapien
gaagcttcccagcagatagcacaca

SEQ ID NO: 728781 - DNA, 25 bp, Homo sapien
tcctagtgactcttacaaactcttc

SEQ ID NO: 728782 - DNA, 25 bp, Homo sapien
ttaggtttctgaactatattggtca

SEQ ID NO: 728783 - DNA, 25 bp, Homo sapien
taggtttctgaactatattggtcat

SEQ ID NO: 728784 - DNA, 25 bp, Homo sapien
cacatggtcatgctgaatgcctgca

SEQ ID NO: 728785 - DNA, 25 bp, Homo sapien
ccaattgctcatgggagaaattttc

SEQ ID NO: 728786 - DNA, 25 bp, Homo sapien
catttagcaaagcataatccaattg

SEQ ID NO: 728787 - DNA, 25 bp, Homo sapien
tatttacagagctaaagtctcaggg

SEQ ID NO: 728788 - DNA, 25 bp, Homo sapien
tggacaagtgtatccctgaagactg

SEQ ID NO: 728789 - DNA, 25 bp, Homo sapien
caccaggatatcgaagagtgtgtct

SEQ ID NO: 728790 - DNA, 25 bp, Homo sapien
cagcctcattaagcccctggacaag

SEQ ID NO: 728791 - DNA, 25 bp, Homo sapien
taatcttgagcctgtagagtccaga

SEQ ID NO: 728792 - DNA, 25 bp, Homo sapien
aaaacacacagtggttggtcatctt

SEQ ID NO: 728793 - DNA, 25 bp, Homo sapien
ttgtcaccatcatctatgcgcgttc

SEQ ID NO: 728794 - DNA, 25 bp, Homo sapien
atcatctatgcgcgttcctccaggg

SEQ ID NO: 728795 - DNA, 25 bp, Homo sapien
cacacagtggttggtcatcttggtc

SEQ ID NO: 728796 - DNA, 25 bp, Homo sapien
tgagcatagtttcggatggtttcat

SEQ ID NO: 728797 - DNA, 25 bp, Homo sapien
ctgagcatagtttcggatggtttca

SEQ ID NO: 728798 - DNA, 25 bp, Homo sapien
gcatagtttcggatggtttcatgat

SEQ ID NO: 728799 - DNA, 25 bp, Homo sapien
agcatagtttcggatggtttcatga

SEQ ID NO: 728800 - DNA, 25 bp, Homo sapien
cttatatctcctgatgagtttattg

SEQ ID NO: 728801 - DNA, 25 bp, Homo sapien
tccaaatacttatatctcctgatga

SEQ ID NO: 728802 - DNA, 25 bp, Homo sapien
aatacttatatctcctgatgagttt

SEQ ID NO: 728803 - DNA, 25 bp, Homo sapien
caaatacttatatctcctgatgagt

SEQ ID NO: 728804 - DNA, 25 bp, Homo sapien
gcagggtgccattgcccagcagaat

SEQ ID NO: 728805 - DNA, 25 bp, Homo sapien
ctaagctgtcggtgaagagactggt

SEQ ID NO: 728806 - DNA, 25 bp, Homo sapien
gacagcatcgccaactttgtctgct

SEQ ID NO: 728807 - DNA, 25 bp, Homo sapien
actggtgaggatggtggcgggcagg

SEQ ID NO: 728808 - DNA, 25 bp, Homo sapien
ttcttttgttgtctgacaggcgaga

SEQ ID NO: 728809 - DNA, 25 bp, Homo sapien
tgttgtctgacaggcgagaaaacag

SEQ ID NO: 728810 - DNA, 25 bp, Homo sapien
gtctgacaggcgagaaaacaggagc

SEQ ID NO: 728811 - DNA, 25 bp, Homo sapien
tttgttgtctgacaggcgagaaaac

SEQ ID NO: 728812 - DNA, 25 bp, Homo sapien
gaggacaccaaaaagagccactggc

SEQ ID NO: 728813 - DNA, 25 bp, Homo sapien
tgtgtcgaagggcaaaaagattacc

SEQ ID NO: 728814 - DNA, 25 bp, Homo sapien
caagactccttctaatgcagcagac

SEQ ID NO: 728815 - DNA, 25 bp, Homo sapien
gacctaggcatcaagtcttccatga

SEQ ID NO: 728816 - DNA, 25 bp, Homo sapien
tatccagtccaggtgactactgatt

SEQ ID NO: 728817 - DNA, 25 bp, Homo sapien
aattgtgatggtgtgcaaagcaacc

SEQ ID NO: 728818 - DNA, 25 bp, Homo sapien
accaattgtgatggtgtgcaaagca

SEQ ID NO: 728819 - DNA, 25 bp, Homo sapien
tgatggtgtgcaaagcaaccaggtt

SEQ ID NO: 728820 - DNA, 25 bp, Homo sapien
tgtgatggtgtgcaaagcaaccagg

SEQ ID NO: 728821 - DNA, 25 bp, Homo sapien
ttgacagcaaatgaggccgcaatgc

SEQ ID NO: 728822 - DNA, 25 bp, Homo sapien
aagcagcctcttgtctaagttggct

SEQ ID NO: 728823 - DNA, 25 bp, Homo sapien
tctgccatccatgctttgaaaagct

SEQ ID NO: 728824 - DNA, 25 bp, Homo sapien
tctcaaagacgaggtaacagagttg

SEQ ID NO: 728825 - DNA, 25 bp, Homo sapien
cacactctgtctgttaactggaaag

SEQ ID NO: 728826 - DNA, 25 bp, Homo sapien
gactcggaggaagtcggaaagctcc

SEQ ID NO: 728827 - DNA, 25 bp, Homo sapien
tccttgatcgggcattcctgagaaa

SEQ ID NO: 728828 - DNA, 25 bp, Homo sapien
gaaagctccttaagacctgcgtcag

SEQ ID NO: 728829 - DNA, 25 bp, Homo sapien
tttcttctttgacataaagcaccac

SEQ ID NO: 728830 - DNA, 25 bp, Homo sapien
catttcttctttgacataaagcacc

SEQ ID NO: 728831 - DNA, 25 bp, Homo sapien
atttcttctttgacataaagcacca

SEQ ID NO: 728832 - DNA, 25 bp, Homo sapien
gttccactcaacagcgttcattata

SEQ ID NO: 728833 - DNA, 25 bp, Homo sapien
ttgttccactcaacagcgttcatta

SEQ ID NO: 728834 - DNA, 25 bp, Homo sapien
ttcttgttccactcaacagcgttca

SEQ ID NO: 728835 - DNA, 25 bp, Homo sapien
attatacatgtccacagaagaccaa

SEQ ID NO: 728836 - DNA, 25 bp, Homo sapien
gatgttgtcgtagcagtattcctga

SEQ ID NO: 728837 - DNA, 25 bp, Homo sapien
aatggatgttgtcgtagcagtattc

SEQ ID NO: 728838 - DNA, 25 bp, Homo sapien
catgaaatggatgttgtcgtagcag

SEQ ID NO: 728839 - DNA, 25 bp, Homo sapien
gttgtcgtagcagtattcctgaacc

SEQ ID NO: 728840 - DNA, 25 bp, Homo sapien
ctttataaaagagaaccacaatctt

SEQ ID NO: 728841 - DNA, 25 bp, Homo sapien
acagaagcacagcagtggcacgtgg

SEQ ID NO: 728842 - DNA, 25 bp, Homo sapien
tcaaagagcttcagcaaaacacaga

SEQ ID NO: 728843 - DNA, 25 bp, Homo sapien
acagcagtggcacgtggatggatac

SEQ ID NO: 728844 - DNA, 25 bp, Homo sapien
gcacagcagtggcacgtggatggat

SEQ ID NO: 728845 - DNA, 25 bp, Homo sapien
tcaggtcatactgacccttagcatc

SEQ ID NO: 728846 - DNA, 25 bp, Homo sapien
aggtcatactgacccttagcatctg

SEQ ID NO: 728847 - DNA, 25 bp, Homo sapien
caggtcatactgacccttagcatct

SEQ ID NO: 728848 - DNA, 25 bp, Homo sapien
tttcaggtcatactgacccttagca

SEQ ID NO: 728849 - DNA, 25 bp, Homo sapien
gaaaaatttgcatgcaggatagaat

SEQ ID NO: 728850 - DNA, 25 bp, Homo sapien
aacaagaaaacccatgatagagata

SEQ ID NO: 728851 - DNA, 25 bp, Homo sapien
agtctatgggacttatcttcaggga

SEQ ID NO: 728852 - DNA, 25 bp, Homo sapien
tacacattttagaccatgctgagtc

SEQ ID NO: 728853 - DNA, 25 bp, Homo sapien
tactgaagtatctacacagagcacc

SEQ ID NO: 728854 - DNA, 25 bp, Homo sapien
gaaggaactccttgagggacaaaga

SEQ ID NO: 728855 - DNA, 25 bp, Homo sapien
gatggcacatagagactggaatata

SEQ ID NO: 728856 - DNA, 25 bp, Homo sapien
tattaacggcgcaatgtggagttct

SEQ ID NO: 728857 - DNA, 25 bp, Homo sapien
gatataatgcaagcctatagctcac

SEQ ID NO: 728858 - DNA, 25 bp, Homo sapien
gagtaacctcaaatgaccagtgtct

SEQ ID NO: 728859 - DNA, 25 bp, Homo sapien
cactactaggacttggaaatctctc

SEQ ID NO: 728860 - DNA, 25 bp, Homo sapien
ggagtaatacacacctaaactgaag

SEQ ID NO: 728861 - DNA, 25 bp, Homo sapien
catgtgcttccttataccatttcag

SEQ ID NO: 728862 - DNA, 25 bp, Homo sapien
tcatctggtcaagaaaaacactttt

SEQ ID NO: 728863 - DNA, 25 bp, Homo sapien
atttcagtattgcttcttcgctcag

SEQ ID NO: 728864 - DNA, 25 bp, Homo sapien
cttctgcattttgtaaccactcaac

SEQ ID NO: 728865 - DNA, 25 bp, Homo sapien
ttaaaggtcatcaatgtttgtaaac

SEQ ID NO: 728866 - DNA, 25 bp, Homo sapien
gtcatcaatgtttgtaaacagaatc

SEQ ID NO: 728867 - DNA, 25 bp, Homo sapien
tcaatgtttgtaaacagaatcatac

SEQ ID NO: 728868 - DNA, 25 bp, Homo sapien
catcaatgtttgtaaacagaatcat

SEQ ID NO: 728869 - DNA, 25 bp, Homo sapien
gaattccataatgcgtgattaagct

SEQ ID NO: 728870 - DNA, 25 bp, Homo sapien
tgtttgatacgaaagataactctag

SEQ ID NO: 728871 - DNA, 25 bp, Homo sapien
ggaaagctaagatgttggcaaaatg

SEQ ID NO: 728872 - DNA, 25 bp, Homo sapien
ccgtgatttcagaaaggaaagctaa

SEQ ID NO: 728873 - DNA, 25 bp, Homo sapien
tcacatgagggcagatagcaaactc

SEQ ID NO: 728874 - DNA, 25 bp, Homo sapien
cctgccattgcaccagcatactttt

SEQ ID NO: 728875 - DNA, 25 bp, Homo sapien
ctaggcacccattataaggtaaaat

SEQ ID NO: 728876 - DNA, 25 bp, Homo sapien
cccagattcctctaattaaggtcaa

SEQ ID NO: 728877 - DNA, 25 bp, Homo sapien
attttcctcaccttccgattcggat

SEQ ID NO: 728878 - DNA, 25 bp, Homo sapien
gatacacaactaccaaagtggcctg

SEQ ID NO: 728879 - DNA, 25 bp, Homo sapien
ccaagtataatagctgatgcctcag

SEQ ID NO: 728880 - DNA, 25 bp, Homo sapien
tcagcattcccaatcaaaaagtggt

SEQ ID NO: 728881 - DNA, 25 bp, Homo sapien
tgagtgagaggtagagtcccaagta

SEQ ID NO: 728882 - DNA, 25 bp, Homo sapien
tccatgtggcttgtcaggtaaatag

SEQ ID NO: 728883 - DNA, 25 bp, Homo sapien
agcctgctaatctctttctgtctaa

SEQ ID NO: 728884 - DNA, 25 bp, Homo sapien
gtggcttgtcaggtaaatagtatca

SEQ ID NO: 728885 - DNA, 25 bp, Homo sapien
tagtatcagggtctctctgggagcc

SEQ ID NO: 728886 - DNA, 25 bp, Homo sapien
cccactgtggtgaactacagacatg

SEQ ID NO: 728887 - DNA, 25 bp, Homo sapien
cagctcggtggtgactaagcaggct

SEQ ID NO: 728888 - DNA, 25 bp, Homo sapien
tcaggacatatactgcaggacagct

SEQ ID NO: 728889 - DNA, 25 bp, Homo sapien
tgagcaaaatcagcaacacgggcac

SEQ ID NO: 728890 - DNA, 25 bp, Homo sapien
ttaaagcatcctcatgcagactcat

SEQ ID NO: 728891 - DNA, 25 bp, Homo sapien
tctcttaaagcatcctcatgcagac

SEQ ID NO: 728892 - DNA, 25 bp, Homo sapien
tcttaaagcatcctcatgcagactc

SEQ ID NO: 728893 - DNA, 25 bp, Homo sapien
tgtctcttaaagcatcctcatgcag

SEQ ID NO: 728894 - DNA, 25 bp, Homo sapien
tcactaacggggcttaggtattggc

SEQ ID NO: 728895 - DNA, 25 bp, Homo sapien
tcaaatttcccggtaagagtcacta

SEQ ID NO: 728896 - DNA, 25 bp, Homo sapien
ccttgaatcgtcctctaaattgtct

SEQ ID NO: 728897 - DNA, 25 bp, Homo sapien
ggcttaggtattggcgtttccttga

SEQ ID NO: 728898 - DNA, 25 bp, Homo sapien
aatatgcaaataaatgcgctccgcc

SEQ ID NO: 728899 - DNA, 25 bp, Homo sapien
aataaatgcgctccgccgaccggga

SEQ ID NO: 728900 - DNA, 25 bp, Homo sapien
tatgcaaataaatgcgctccgccga

SEQ ID NO: 728901 - DNA, 25 bp, Homo sapien
agagcggcggccttggtgtagtttc

SEQ ID NO: 728902 - DNA, 25 bp, Homo sapien
ggcggcggctcggacccgctttgga

SEQ ID NO: 728903 - DNA, 25 bp, Homo sapien
gcggcggctcggacccgctttggaa

SEQ ID NO: 728904 - DNA, 25 bp, Homo sapien
gggcagcaacgcagacgtgggtggg

SEQ ID NO: 728905 - DNA, 25 bp, Homo sapien
ccaggcggggcagcaacgcagacgt

SEQ ID NO: 728906 - DNA, 25 bp, Homo sapien
tccggcggaggttccctgacagctg

SEQ ID NO: 728907 - DNA, 25 bp, Homo sapien
gcacgtaaattcgactccggcggag

SEQ ID NO: 728908 - DNA, 25 bp, Homo sapien
tcgactccggcggaggttccctgac

SEQ ID NO: 728909 - DNA, 25 bp, Homo sapien
ctgcacgtaaattcgactccggcgg

SEQ ID NO: 728910 - DNA, 25 bp, Homo sapien
gcagttcttggaacacgcgaagccc

SEQ ID NO: 728911 - DNA, 25 bp, Homo sapien
ttggaacacgcgaagcccccgcaaa

SEQ ID NO: 728912 - DNA, 25 bp, Homo sapien
gtaaagcaggttgagggcgcacagg

SEQ ID NO: 728913 - DNA, 25 bp, Homo sapien
aaagcaggttgagggcgcacaggca

SEQ ID NO: 728914 - DNA, 25 bp, Homo sapien
gcccagatgcgtctggatgtcagga

SEQ ID NO: 728915 - DNA, 25 bp, Homo sapien
aggccacgccattccgcaaaactgt

SEQ ID NO: 728916 - DNA, 25 bp, Homo sapien
gagaggtccggttgaatgtttgaaa

SEQ ID NO: 728917 - DNA, 25 bp, Homo sapien
aaactgtccgcaagccctgacggct

SEQ ID NO: 728918 - DNA, 25 bp, Homo sapien
aatgtaagttttaccgctgagcagg

SEQ ID NO: 728919 - DNA, 25 bp, Homo sapien
agcgttactaaatttaacaccaatg

SEQ ID NO: 728920 - DNA, 25 bp, Homo sapien
accaatgtaagttttaccgctgagc

SEQ ID NO: 728921 - DNA, 25 bp, Homo sapien
aagttttaccgctgagcaggtccat

SEQ ID NO: 728922 - DNA, 25 bp, Homo sapien
aactttcaatacctgcaaaattgca

SEQ ID NO: 728923 - DNA, 25 bp, Homo sapien
cttgtgttgatcataaactttcaat

SEQ ID NO: 728924 - DNA, 25 bp, Homo sapien
gcaaaattgcactgatcctatttac

SEQ ID NO: 728925 - DNA, 25 bp, Homo sapien
tacctgcaaaattgcactgatccta

SEQ ID NO: 728926 - DNA, 25 bp, Homo sapien
gatccaagggataggtccataagcc

SEQ ID NO: 728927 - DNA, 25 bp, Homo sapien
tggctgcccatccttctatcaacag

SEQ ID NO: 728928 - DNA, 25 bp, Homo sapien
taagccaacagggtcaataagcgtg

SEQ ID NO: 728929 - DNA, 25 bp, Homo sapien
ccatccttctatcaacagtgattga

SEQ ID NO: 728930 - DNA, 25 bp, Homo sapien
cagtgaaaaatacgagacaaatgtg

SEQ ID NO: 728931 - DNA, 25 bp, Homo sapien
gatctgtgtttttacctgccgtacc

SEQ ID NO: 728932 - DNA, 25 bp, Homo sapien
tgccgtaccatccaacctgttacaa

SEQ ID NO: 728933 - DNA, 25 bp, Homo sapien
caaatgtgagagacacctaggacta

SEQ ID NO: 728934 - DNA, 25 bp, Homo sapien
ttttcacctggctatacagccccag

SEQ ID NO: 728935 - DNA, 25 bp, Homo sapien
gactggcagcaacttgagagtaagg

SEQ ID NO: 728936 - DNA, 25 bp, Homo sapien
gaatctatcacaagaccgggtccct

SEQ ID NO: 728937 - DNA, 25 bp, Homo sapien
catgcctagtggttatgacctgtaa

SEQ ID NO: 728938 - DNA, 25 bp, Homo sapien
tgccccacgcagcaattccaattag

SEQ ID NO: 728939 - DNA, 25 bp, Homo sapien
aatgccccacgcagcaattccaatt

SEQ ID NO: 728940 - DNA, 25 bp, Homo sapien
agactggaaatcagcccgaagccaa

SEQ ID NO: 728941 - DNA, 25 bp, Homo sapien
cgaccactcggagactggaaatcag

SEQ ID NO: 728942 - DNA, 25 bp, Homo sapien
cactaaagcaatcaggaacaagaag

SEQ ID NO: 728943 - DNA, 25 bp, Homo sapien
aagcaatcaggaacaagaagatgcc

SEQ ID NO: 728944 - DNA, 25 bp, Homo sapien
tcagacccactaaagcaatcaggaa

SEQ ID NO: 728945 - DNA, 25 bp, Homo sapien
acagctccaatcagacccactaaag

SEQ ID NO: 728946 - DNA, 25 bp, Homo sapien
aatacaagtaacagaataatcatat

SEQ ID NO: 728947 - DNA, 25 bp, Homo sapien
ctgaacaataaatacaagtaacaga

SEQ ID NO: 728948 - DNA, 25 bp, Homo sapien
taaatacaagtaacagaataatcat

SEQ ID NO: 728949 - DNA, 25 bp, Homo sapien
aataaatacaagtaacagaataatc

SEQ ID NO: 728950 - DNA, 25 bp, Homo sapien
gttcagggctaaacaagcgcaagat

SEQ ID NO: 728951 - DNA, 25 bp, Homo sapien
cctggttcagggctaaacaagcgca

SEQ ID NO: 728952 - DNA, 25 bp, Homo sapien
agggctaaacaagcgcaagatacag

SEQ ID NO: 728953 - DNA, 25 bp, Homo sapien
gctaaacaagcgcaagatacagaaa

SEQ ID NO: 728954 - DNA, 25 bp, Homo sapien
gcacttgccgtattgttccaaccaa

SEQ ID NO: 728955 - DNA, 25 bp, Homo sapien
gatgtcatttcgagcacttgccgta

SEQ ID NO: 728956 - DNA, 25 bp, Homo sapien
tgtcatttgggttaacacttcggaa

SEQ ID NO: 728957 - DNA, 25 bp, Homo sapien
ttcggaacccacagcagtttagatt

SEQ ID NO: 728958 - DNA, 25 bp, Homo sapien
aactgaagaacaggccaatgccacc

SEQ ID NO: 728959 - DNA, 25 bp, Homo sapien
gcacgagtggtcacttttaacacag

SEQ ID NO: 728960 - DNA, 25 bp, Homo sapien
agcacatggcgagcacgagtggtca

SEQ ID NO: 728961 - DNA, 25 bp, Homo sapien
agcatattctcctatgattggagca

SEQ ID NO: 728962 - DNA, 25 bp, Homo sapien
tgaaaaatggtgtaggaaggcaatt

SEQ ID NO: 728963 - DNA, 25 bp, Homo sapien
gatcaagcctttcacccggtcctaa

SEQ ID NO: 728964 - DNA, 25 bp, Homo sapien
tatgcataggttttagaaggctagg

SEQ ID NO: 728965 - DNA, 25 bp, Homo sapien
caactgtagaaatagaagagaccct

SEQ ID NO: 728966 - DNA, 25 bp, Homo sapien
ggtctctagaacctacactcagtgt

SEQ ID NO: 728967 - DNA, 25 bp, Homo sapien
tgtcatcaactctgcggtctctaga

SEQ ID NO: 728968 - DNA, 25 bp, Homo sapien
cttccttgcccgactgttcagagag

SEQ ID NO: 728969 - DNA, 25 bp, Homo sapien
tagaatatgcaataagctggtactc

SEQ ID NO: 728970 - DNA, 25 bp, Homo sapien
taacattttgactatcacccctgga

SEQ ID NO: 728971 - DNA, 25 bp, Homo sapien
cacagggagcttctggtcagaattt

SEQ ID NO: 728972 - DNA, 25 bp, Homo sapien
cacccctggatatatgctgagaggg

SEQ ID NO: 728973 - DNA, 25 bp, Homo sapien
ggatgttaacattttgactatcacc

SEQ ID NO: 728974 - DNA, 25 bp, Homo sapien
taactggcagtgtttatagctggtg

SEQ ID NO: 728975 - DNA, 25 bp, Homo sapien
cagtgtttatagctggtggactgag

SEQ ID NO: 728976 - DNA, 25 bp, Homo sapien
taagaatccacaaattactgtaaga

SEQ ID NO: 728977 - DNA, 25 bp, Homo sapien
aataagaatccacaaattactgtaa

SEQ ID NO: 728978 - DNA, 25 bp, Homo sapien
taacccctacgacctgcaaatatgt

SEQ ID NO: 728979 - DNA, 25 bp, Homo sapien
tgaagtaaaccaaatgacgggcgct

SEQ ID NO: 728980 - DNA, 25 bp, Homo sapien
gcctggcctccagaaggtaccttta

SEQ ID NO: 728981 - DNA, 25 bp, Homo sapien
cccaggtgggctcaatgatataatc

SEQ ID NO: 728982 - DNA, 25 bp, Homo sapien
aaggaatgcactaggattcgcgcgg

SEQ ID NO: 728983 - DNA, 25 bp, Homo sapien
cgcgcgggggtctttctggttcctg

SEQ ID NO: 728984 - DNA, 25 bp, Homo sapien
tgtatctgtaggtcagccaaacacc

SEQ ID NO: 728985 - DNA, 25 bp, Homo sapien
tcaaaggaatgcactaggattcgcg

SEQ ID NO: 728986 - DNA, 25 bp, Homo sapien
cgtgggccaacgcattaatactaac

SEQ ID NO: 728987 - DNA, 25 bp, Homo sapien
aaatatctttttgctacgtgggcca

SEQ ID NO: 728988 - DNA, 25 bp, Homo sapien
aggtgccaccgagcttcagagacca

SEQ ID NO: 728989 - DNA, 25 bp, Homo sapien
gacagtgcccgacaatgaatacagt

SEQ ID NO: 728990 - DNA, 25 bp, Homo sapien
ttaattcaaacatgcatacacaaag

SEQ ID NO: 728991 - DNA, 25 bp, Homo sapien
ctttcttttaattcaaacatgcata

SEQ ID NO: 728992 - DNA, 25 bp, Homo sapien
ttcttttaattcaaacatgcataca

SEQ ID NO: 728993 - DNA, 25 bp, Homo sapien
tcttccattactttcttttaattca

SEQ ID NO: 728994 - DNA, 25 bp, Homo sapien
tccaacagagagaagctaaagcaga

SEQ ID NO: 728995 - DNA, 25 bp, Homo sapien
aatagcaatacccagctctaagtcc

SEQ ID NO: 728996 - DNA, 25 bp, Homo sapien
atttccacagcttgattatacacta

SEQ ID NO: 728997 - DNA, 25 bp, Homo sapien
gcttgattatacactaaaatagcaa

SEQ ID NO: 728998 - DNA, 25 bp, Homo sapien
gttttccactaaatatgcaccccga

SEQ ID NO: 728999 - DNA, 25 bp, Homo sapien
ttgcaggatcatagcagggccatct

SEQ ID NO: 729000 - DNA, 25 bp, Homo sapien
gacaaccttggtgcttgaaaatgtg

SEQ ID NO: 729001 - DNA, 25 bp, Homo sapien
gattcaggactgacttattcagagg

SEQ ID NO: 729002 - DNA, 25 bp, Homo sapien
tttggctcaaggaaacgaagaacta

SEQ ID NO: 729003 - DNA, 25 bp, Homo sapien
taacttaggttgaacatgcgaaact

SEQ ID NO: 729004 - DNA, 25 bp, Homo sapien
gaatgatcatgtctgtacaaccaca

SEQ ID NO: 729005 - DNA, 25 bp, Homo sapien
tgcgaaactggttttcataccaaac

SEQ ID NO: 729006 - DNA, 25 bp, Homo sapien
tattcagtgctccacccgaaggagt

SEQ ID NO: 729007 - DNA, 25 bp, Homo sapien
tcagactcgaactgctaaggacacg

SEQ ID NO: 729008 - DNA, 25 bp, Homo sapien
ctgtcttacaaggtggaattaggcc

SEQ ID NO: 729009 - DNA, 25 bp, Homo sapien
tggctgtgagactaggattccttcc

SEQ ID NO: 729010 - DNA, 25 bp, Homo sapien
gccattggacgaaatgttctagaaa

SEQ ID NO: 729011 - DNA, 25 bp, Homo sapien
tttgttgtagcctaacatacagtct

SEQ ID NO: 729012 - DNA, 25 bp, Homo sapien
tacagtctatctttgataataatcc

SEQ ID NO: 729013 - DNA, 25 bp, Homo sapien
cactgatcattcaagagcatattat

SEQ ID NO: 729014 - DNA, 25 bp, Homo sapien
caaactcagtgatatcttgcagtac

SEQ ID NO: 729015 - DNA, 25 bp, Homo sapien
ctcctccatgaaccaacattattat

SEQ ID NO: 729016 - DNA, 25 bp, Homo sapien
cttctggtgggatttcaaactcagt

SEQ ID NO: 729017 - DNA, 25 bp, Homo sapien
taaggagctggtactagtgttagcc

SEQ ID NO: 729018 - DNA, 25 bp, Homo sapien
tcttcattaactaccaaagagcctg

SEQ ID NO: 729019 - DNA, 25 bp, Homo sapien
caaagagcctgctctagggtaggcc

SEQ ID NO: 729020 - DNA, 25 bp, Homo sapien
gagcctgctctagggtaggcccaca

SEQ ID NO: 729021 - DNA, 25 bp, Homo sapien
gtcttatcttcattaactaccaaag

SEQ ID NO: 729022 - DNA, 25 bp, Homo sapien
tcagtcataggtccgtttcttctca

SEQ ID NO: 729023 - DNA, 25 bp, Homo sapien
tcttcatgagacaccactgcgttac

SEQ ID NO: 729024 - DNA, 25 bp, Homo sapien
gggccctcaaatgactgctgaacat

SEQ ID NO: 729025 - DNA, 25 bp, Homo sapien
gctaagattggttctcgtgcttcca

SEQ ID NO: 729026 - DNA, 25 bp, Homo sapien
gtaaagtgcgttccatttcttcatg

SEQ ID NO: 729027 - DNA, 25 bp, Homo sapien
gaaggacagtgaccaaccaaaggaa

SEQ ID NO: 729028 - DNA, 25 bp, Homo sapien
gacagtgaccaaccaaaggaatcag

SEQ ID NO: 729029 - DNA, 25 bp, Homo sapien
caaaggaatcaggttctctcccaga

SEQ ID NO: 729030 - DNA, 25 bp, Homo sapien
tgaccaaccaaaggaatcaggttct

SEQ ID NO: 729031 - DNA, 25 bp, Homo sapien
cacatcctaccttaagatctgcagt

SEQ ID NO: 729032 - DNA, 25 bp, Homo sapien
ttttctaccttgatagctcagtgta

SEQ ID NO: 729033 - DNA, 25 bp, Homo sapien
ttggccatgttatgtgtaagttcac

SEQ ID NO: 729034 - DNA, 25 bp, Homo sapien
tcacaaaataaaggtattccagtcc

SEQ ID NO: 729035 - DNA, 25 bp, Homo sapien
tggatgtacaagtggagccctgaga

SEQ ID NO: 729036 - DNA, 25 bp, Homo sapien
gatgtcagctaagtccagttttgca

SEQ ID NO: 729037 - DNA, 25 bp, Homo sapien
ccacatgggctgaattggatgtaca

SEQ ID NO: 729038 - DNA, 25 bp, Homo sapien
tctgagatagaggagtagtcaccta

SEQ ID NO: 729039 - DNA, 25 bp, Homo sapien
aaaatgaatggcatactctcagccc

SEQ ID NO: 729040 - DNA, 25 bp, Homo sapien
taatagagatccatatgctgtgcca

SEQ ID NO: 729041 - DNA, 25 bp, Homo sapien
catatcttggttagggagtcagaca

SEQ ID NO: 729042 - DNA, 25 bp, Homo sapien
gctgtggaccttccagtgagggtta

SEQ ID NO: 729043 - DNA, 25 bp, Homo sapien
tggttctgccttctgggaaagcatt

SEQ ID NO: 729044 - DNA, 25 bp, Homo sapien
ttctctatgtccactatcagctatg

SEQ ID NO: 729045 - DNA, 25 bp, Homo sapien
cttagccattttctgtaaccctttg

SEQ ID NO: 729046 - DNA, 25 bp, Homo sapien
ccttcttgtagcctctggttctgcc

SEQ ID NO: 729047 - DNA, 25 bp, Homo sapien
gatctgattactgagaaaatcctgc

SEQ ID NO: 729048 - DNA, 25 bp, Homo sapien
ctctgggtgatgtacagttctctcc

SEQ ID NO: 729049 - DNA, 25 bp, Homo sapien
tgttggctgtcataacccggtgatc

SEQ ID NO: 729050 - DNA, 25 bp, Homo sapien
tctccgtcaggtcaaaatgttggct

SEQ ID NO: 729051 - DNA, 25 bp, Homo sapien
tcctctccagcagagatgaaccaaa

SEQ ID NO: 729052 - DNA, 25 bp, Homo sapien
tccagcagagatgaaccaaagtcac

SEQ ID NO: 729053 - DNA, 25 bp, Homo sapien
aaaaagaacacgcttcctctccagc

SEQ ID NO: 729054 - DNA, 25 bp, Homo sapien
aaaagaacacgcttcctctccagca

SEQ ID NO: 729055 - DNA, 25 bp, Homo sapien
gcttccaagctaattaggtcttgtg

SEQ ID NO: 729056 - DNA, 25 bp, Homo sapien
tgcttgtgacaccaatctgtactgt

SEQ ID NO: 729057 - DNA, 25 bp, Homo sapien
caatgcacgtactttcattcagctc

SEQ ID NO: 729058 - DNA, 25 bp, Homo sapien
tcagtaaacaccaatgcttccaagc

SEQ ID NO: 729059 - DNA, 25 bp, Homo sapien
gccctattgcactcactacttctat

SEQ ID NO: 729060 - DNA, 25 bp, Homo sapien
tataaagatctctcatacaagtgga

SEQ ID NO: 729061 - DNA, 25 bp, Homo sapien
tacttgacctttggtactggcttat

SEQ ID NO: 729062 - DNA, 25 bp, Homo sapien
gttgactataaagatctctcataca

SEQ ID NO: 729063 - DNA, 25 bp, Homo sapien
cagttccggtactttccgctggact

SEQ ID NO: 729064 - DNA, 25 bp, Homo sapien
tcagttccggtactttccgctggac

SEQ ID NO: 729065 - DNA, 25 bp, Homo sapien
gcagattccaagaaagcattcagtg

SEQ ID NO: 729066 - DNA, 25 bp, Homo sapien
gctttccttgtagaatcagatttgg

SEQ ID NO: 729067 - DNA, 25 bp, Homo sapien
gtaggatatcatcttaaacacacag

SEQ ID NO: 729068 - DNA, 25 bp, Homo sapien
aaaggtaaaggttacatgtgtgtgg

SEQ ID NO: 729069 - DNA, 25 bp, Homo sapien
atgactcttggttaggtgatgggca

SEQ ID NO: 729070 - DNA, 25 bp, Homo sapien
ggtatgtgcccctatatatgcgcat

SEQ ID NO: 729071 - DNA, 25 bp, Homo sapien
gatgggcagtgtttagacagcactc

SEQ ID NO: 729072 - DNA, 25 bp, Homo sapien
tacttccaagatgcgcagcctttct

SEQ ID NO: 729073 - DNA, 25 bp, Homo sapien
cagctttgatggaatctttccagat

SEQ ID NO: 729074 - DNA, 25 bp, Homo sapien
gatggaatctttccagatcactctc

SEQ ID NO: 729075 - DNA, 25 bp, Homo sapien
tccagatcactctcatccacagtga

SEQ ID NO: 729076 - DNA, 25 bp, Homo sapien
ggaatctttccagatcactctcatc

SEQ ID NO: 729077 - DNA, 25 bp, Homo sapien
gtctttgattctagagaaatcacca

SEQ ID NO: 729078 - DNA, 25 bp, Homo sapien
tctcatggacctgaagccctaacac

SEQ ID NO: 729079 - DNA, 25 bp, Homo sapien
taacacagtctttgattctagagaa

SEQ ID NO: 729080 - DNA, 25 bp, Homo sapien
gacctgaagccctaacacagtcttt

SEQ ID NO: 729081 - DNA, 25 bp, Homo sapien
ttcacctgttgcactatacatggtt

SEQ ID NO: 729082 - DNA, 25 bp, Homo sapien
ggcctccttacttctatagcaggtt

SEQ ID NO: 729083 - DNA, 25 bp, Homo sapien
cctgttgcactatacatggtttctt

SEQ ID NO: 729084 - DNA, 25 bp, Homo sapien
gtttctttcatgtttggcctcctta

SEQ ID NO: 729085 - DNA, 25 bp, Homo sapien
cctctgctacaatgtatggtctaac

SEQ ID NO: 729086 - DNA, 25 bp, Homo sapien
tgctacaatgtatggtctaacatac

SEQ ID NO: 729087 - DNA, 25 bp, Homo sapien
cttccacccactcatactgcttttc

SEQ ID NO: 729088 - DNA, 25 bp, Homo sapien
tctgctacaatgtatggtctaacat

SEQ ID NO: 729089 - DNA, 25 bp, Homo sapien
tccttgttcttcacaaagttccagc

SEQ ID NO: 729090 - DNA, 25 bp, Homo sapien
agttccagctctccacttaggaagc

SEQ ID NO: 729091 - DNA, 25 bp, Homo sapien
aatgacatactgttttcatcacaca

SEQ ID NO: 729092 - DNA, 25 bp, Homo sapien
taggaagctacataatgacatactg

SEQ ID NO: 729093 - DNA, 25 bp, Homo sapien
aaatgatagcgcaaagaagtaaaaa

SEQ ID NO: 729094 - DNA, 25 bp, Homo sapien
aatgatagcgcaaagaagtaaaaac

SEQ ID NO: 729095 - DNA, 25 bp, Homo sapien
gaaatgatagcgcaaagaagtaaaa

SEQ ID NO: 729096 - DNA, 25 bp, Homo sapien
agaaatgatagcgcaaagaagtaaa

SEQ ID NO: 729097 - DNA, 25 bp, Homo sapien
gatgataaacatatggcaaacacag

SEQ ID NO: 729098 - DNA, 25 bp, Homo sapien
tgataaacatatggcaaacacagtt

SEQ ID NO: 729099 - DNA, 25 bp, Homo sapien
ctagatgataaacatatggcaaaca

SEQ ID NO: 729100 - DNA, 25 bp, Homo sapien
tagatgataaacatatggcaaacac

SEQ ID NO: 729101 - DNA, 25 bp, Homo sapien
tagatcaccatcgaacatcagcaat

SEQ ID NO: 729102 - DNA, 25 bp, Homo sapien
gcaccctatgtgctcaggataaaga

SEQ ID NO: 729103 - DNA, 25 bp, Homo sapien
tgggccttttatgggctggcaccct

SEQ ID NO: 729104 - DNA, 25 bp, Homo sapien
tcagagatactaagttgaagtggtc

SEQ ID NO: 729105 - DNA, 25 bp, Homo sapien
tgttagatacattctatggtgaaaa

SEQ ID NO: 729106 - DNA, 25 bp, Homo sapien
caaggtgcttgagcaagttctcaaa

SEQ ID NO: 729107 - DNA, 25 bp, Homo sapien
gcacaggattcctcactgacaaggt

SEQ ID NO: 729108 - DNA, 25 bp, Homo sapien
gacagttgggaaactgacttacaaa

SEQ ID NO: 729109 - DNA, 25 bp, Homo sapien
ttccttccctaattgtacaccattc

SEQ ID NO: 729110 - DNA, 25 bp, Homo sapien
ttccctaattgtacaccattcacct

SEQ ID NO: 729111 - DNA, 25 bp, Homo sapien
ttttgattgtagtttaggtgcctcc

SEQ ID NO: 729112 - DNA, 25 bp, Homo sapien
cttttgattgtagtttaggtgcctc

SEQ ID NO: 729113 - DNA, 25 bp, Homo sapien
tccaatttattgtgctcgacccagg

SEQ ID NO: 729114 - DNA, 25 bp, Homo sapien
tcgacccaggtttaggatggaagaa

SEQ ID NO: 729115 - DNA, 25 bp, Homo sapien
cagcagcggctgagactcagtttca

SEQ ID NO: 729116 - DNA, 25 bp, Homo sapien
tccactatataaggaaccagtctgg

SEQ ID NO: 729117 - DNA, 25 bp, Homo sapien
gaagacataggtacttctctaacag

SEQ ID NO: 729118 - DNA, 25 bp, Homo sapien
tctgaagacataggtacttctctaa

SEQ ID NO: 729119 - DNA, 25 bp, Homo sapien
ctgaagacataggtacttctctaac

SEQ ID NO: 729120 - DNA, 25 bp, Homo sapien
aagacataggtacttctctaacagc

SEQ ID NO: 729121 - DNA, 25 bp, Homo sapien
gcccagaaatagtctcgagcaatcc

SEQ ID NO: 729122 - DNA, 25 bp, Homo sapien
gggcagtggcaattcagtattcaca

SEQ ID NO: 729123 - DNA, 25 bp, Homo sapien
tcagaaggtcatcatatagaggcaa

SEQ ID NO: 729124 - DNA, 25 bp, Homo sapien
actatggcaccaatgaatcagcaca

SEQ ID NO: 729125 - DNA, 25 bp, Homo sapien
ggtaaaaggctggaccaccagaggc

SEQ ID NO: 729126 - DNA, 25 bp, Homo sapien
acttccatggacatggtaaaaggct

SEQ ID NO: 729127 - DNA, 25 bp, Homo sapien
tggtaaaaggctggaccaccagagg

SEQ ID NO: 729128 - DNA, 25 bp, Homo sapien
atggtaaaaggctggaccaccagag

SEQ ID NO: 729129 - DNA, 25 bp, Homo sapien
ctacctcactatcatcagtagaagt

SEQ ID NO: 729130 - DNA, 25 bp, Homo sapien
cctttctacctcactatcatcagta

SEQ ID NO: 729131 - DNA, 25 bp, Homo sapien
ggagacaccctttctacctcactat

SEQ ID NO: 729132 - DNA, 25 bp, Homo sapien
tttctacctcactatcatcagtaga

SEQ ID NO: 729133 - DNA, 25 bp, Homo sapien
ttcagaacattgaatttaagtggag

SEQ ID NO: 729134 - DNA, 25 bp, Homo sapien
tagttaaggtttgcaatcaagtctc

SEQ ID NO: 729135 - DNA, 25 bp, Homo sapien
gcaaattacataattgactcttgag

SEQ ID NO: 729136 - DNA, 25 bp, Homo sapien
cttataagaaacatcatatatgtct

SEQ ID NO: 729137 - DNA, 25 bp, Homo sapien
caacaaaccacgtctgcctttcctc

SEQ ID NO: 729138 - DNA, 25 bp, Homo sapien
ttcacaacaaaccacgtctgccttt

SEQ ID NO: 729139 - DNA, 25 bp, Homo sapien
acaacaaaccacgtctgcctttcct

SEQ ID NO: 729140 - DNA, 25 bp, Homo sapien
tccttcacaacaaaccacgtctgcc

SEQ ID NO: 729141 - DNA, 25 bp, Homo sapien
tgcatggtaggctgttccccaaagt

SEQ ID NO: 729142 - DNA, 25 bp, Homo sapien
gcttgggtggatacaggcctctccc

SEQ ID NO: 729143 - DNA, 25 bp, Homo sapien
agagcacaggctatgaggacttggc

SEQ ID NO: 729144 - DNA, 25 bp, Homo sapien
aatgccctgcctgtcaaagagaata

SEQ ID NO: 729145 - DNA, 25 bp, Homo sapien
atgccaccaactatcacagactctg

SEQ ID NO: 729146 - DNA, 25 bp, Homo sapien
gttccataccttgcaacaacagtct

SEQ ID NO: 729147 - DNA, 25 bp, Homo sapien
catcatagacaccagagccattgct

SEQ ID NO: 729148 - DNA, 25 bp, Homo sapien
tgtgcataggcatattgttccatac

SEQ ID NO: 729149 - DNA, 25 bp, Homo sapien
gcagtctgcttgcatatgcccatgc

SEQ ID NO: 729150 - DNA, 25 bp, Homo sapien
ggagcctgggccgtctatttagaat

SEQ ID NO: 729151 - DNA, 25 bp, Homo sapien
ctctcggaacagagcgtcgacggga

SEQ ID NO: 729152 - DNA, 25 bp, Homo sapien
atttagaatcctggcctgggtcgct

SEQ ID NO: 729153 - DNA, 25 bp, Homo sapien
acccggtgtaggctgggaccactgc

SEQ ID NO: 729154 - DNA, 25 bp, Homo sapien
cttgcgactggcgtaggtgatgttg

SEQ ID NO: 729155 - DNA, 25 bp, Homo sapien
ggcttccgccgcttgcgactggcgt

SEQ ID NO: 729156 - DNA, 25 bp, Homo sapien
tccgccgcttgcgactggcgtaggt

SEQ ID NO: 729157 - DNA, 25 bp, Homo sapien
gttttctgcaccggcttccgccgct

SEQ ID NO: 729158 - DNA, 25 bp, Homo sapien
caccgtatcctgtccgttgcatcca

SEQ ID NO: 729159 - DNA, 25 bp, Homo sapien
gatgtctgaagaatacaaatcctcc

SEQ ID NO: 729160 - DNA, 25 bp, Homo sapien
taccgatatggtcacgatgagcgct

SEQ ID NO: 729161 - DNA, 25 bp, Homo sapien
cccaaaagtgataagcaagcttccg

SEQ ID NO: 729162 - DNA, 25 bp, Homo sapien
tggcttaatcaccactacagctggt

SEQ ID NO: 729163 - DNA, 25 bp, Homo sapien
gaaacttgcccagatctgtaacagt

SEQ ID NO: 729164 - DNA, 25 bp, Homo sapien
gatcagctaaggctcagaagtgact

SEQ ID NO: 729165 - DNA, 25 bp, Homo sapien
tcatagttctaataagcaagtgtcc

SEQ ID NO: 729166 - DNA, 25 bp, Homo sapien
tgtattaagtcggtctctatgccgc

SEQ ID NO: 729167 - DNA, 25 bp, Homo sapien
gctagccaaacggtccaactctgta

SEQ ID NO: 729168 - DNA, 25 bp, Homo sapien
taactgacgctgagcctaagaactg

SEQ ID NO: 729169 - DNA, 25 bp, Homo sapien
tctatgccgcttggaaggatttgac

SEQ ID NO: 729170 - DNA, 25 bp, Homo sapien
cagaatctctaagggtggcaaccac

SEQ ID NO: 729171 - DNA, 25 bp, Homo sapien
tggtcaagcactaagcacagcatgt

SEQ ID NO: 729172 - DNA, 25 bp, Homo sapien
gatcaggacagcattccgtgacgct

SEQ ID NO: 729173 - DNA, 25 bp, Homo sapien
tccacaggtctagggttggacccaa

SEQ ID NO: 729174 - DNA, 25 bp, Homo sapien
ttcttgtaagttcaggccttctctg

SEQ ID NO: 729175 - DNA, 25 bp, Homo sapien
gaaatttgctgctctacagttatcc

SEQ ID NO: 729176 - DNA, 25 bp, Homo sapien
tcttgtaagttcaggccttctctga

SEQ ID NO: 729177 - DNA, 25 bp, Homo sapien
aaatttgctgctctacagttatcct

SEQ ID NO: 729178 - DNA, 25 bp, Homo sapien
tgtgagtcttcctattaaaagagca

SEQ ID NO: 729179 - DNA, 25 bp, Homo sapien
cacactgtagtggtaattggctgat

SEQ ID NO: 729180 - DNA, 25 bp, Homo sapien
gataaccgtcggttgcaatataaag

SEQ ID NO: 729181 - DNA, 25 bp, Homo sapien
taggccatatggtatacagaacctc

SEQ ID NO: 729182 - DNA, 25 bp, Homo sapien
tggctccaaagcgtactcacttaaa

SEQ ID NO: 729183 - DNA, 25 bp, Homo sapien
tgtgttatcgatcccaaattggtgc

SEQ ID NO: 729184 - DNA, 25 bp, Homo sapien
gagataaattcagtctggctccaaa

SEQ ID NO: 729185 - DNA, 25 bp, Homo sapien
gaaactgaggtcaaggactatacct

SEQ ID NO: 729186 - DNA, 25 bp, Homo sapien
agaattgtactgtgtagtcagacag

SEQ ID NO: 729187 - DNA, 25 bp, Homo sapien
tatgtgatcacagctaatgtcttct

SEQ ID NO: 729188 - DNA, 25 bp, Homo sapien
tattctcctcttggataacaatagt

SEQ ID NO: 729189 - DNA, 25 bp, Homo sapien
ggataattcaagtccaatatcaact

SEQ ID NO: 729190 - DNA, 25 bp, Homo sapien
taatcttgtatagtagaagaagcat

SEQ ID NO: 729191 - DNA, 25 bp, Homo sapien
gacaactaatacaaagccattcaga

SEQ ID NO: 729192 - DNA, 25 bp, Homo sapien
tgctgaaaccctagataatcttgta

SEQ ID NO: 729193 - DNA, 25 bp, Homo sapien
gaagcataaaagaccaaagcatctg

SEQ ID NO: 729194 - DNA, 25 bp, Homo sapien
acaaggaatacaacaaaaggactga

SEQ ID NO: 729195 - DNA, 25 bp, Homo sapien
caaggaatacaacaaaaggactgat

SEQ ID NO: 729196 - DNA, 25 bp, Homo sapien
tacaaggaatacaacaaaaggactg

SEQ ID NO: 729197 - DNA, 25 bp, Homo sapien
gatacaaggaatacaacaaaaggac

SEQ ID NO: 729198 - DNA, 25 bp, Homo sapien
tacactgagaaggatttaatgccca

SEQ ID NO: 729199 - DNA, 25 bp, Homo sapien
aatgcccagtgtagctgacgctgaa

SEQ ID NO: 729200 - DNA, 25 bp, Homo sapien
caattccttgtccagactctgtaca

SEQ ID NO: 729201 - DNA, 25 bp, Homo sapien
gctgaaattcagctcggtcttcggt

SEQ ID NO: 729202 - DNA, 25 bp, Homo sapien
tctggaggaatctggtctgggttat

SEQ ID NO: 729203 - DNA, 25 bp, Homo sapien
tatgaagcacctctccattaaagga

SEQ ID NO: 729204 - DNA, 25 bp, Homo sapien
tctgggttataacagactactgtct

SEQ ID NO: 729205 - DNA, 25 bp, Homo sapien
ttatccagcagacaccttagacgac

SEQ ID NO: 729206 - DNA, 25 bp, Homo sapien
ggtggaagtattgatccatctttcc

SEQ ID NO: 729207 - DNA, 25 bp, Homo sapien
ttggcatcacaaccaataggtgtga

SEQ ID NO: 729208 - DNA, 25 bp, Homo sapien
ctgaagtggagtagctatcgcaaac

SEQ ID NO: 729209 - DNA, 25 bp, Homo sapien
ccggatttcaagtatggatggtggc

SEQ ID NO: 729210 - DNA, 25 bp, Homo sapien
gcatatcagctgcatgaataaactg

SEQ ID NO: 729211 - DNA, 25 bp, Homo sapien
gactcggcacaataaagcatatcag

SEQ ID NO: 729212 - DNA, 25 bp, Homo sapien
gataacctgagcctctcgtgcacag

SEQ ID NO: 729213 - DNA, 25 bp, Homo sapien
cagctctgcttcagtatatcctaaa

SEQ ID NO: 729214 - DNA, 25 bp, Homo sapien
taacacaggaaagtatagagagaac

SEQ ID NO: 729215 - DNA, 25 bp, Homo sapien
caggaaagtatagagagaacataag

SEQ ID NO: 729216 - DNA, 25 bp, Homo sapien
ctagtaacacaggaaagtatagaga

SEQ ID NO: 729217 - DNA, 25 bp, Homo sapien
cacaggaaagtatagagagaacata

SEQ ID NO: 729218 - DNA, 25 bp, Homo sapien
aaaggcatggaaatagtttttcaga

SEQ ID NO: 729219 - DNA, 25 bp, Homo sapien
ggcatggaaatagtttttcagagtt

SEQ ID NO: 729220 - DNA, 25 bp, Homo sapien
aggcatggaaatagtttttcagagt

SEQ ID NO: 729221 - DNA, 25 bp, Homo sapien
aaggcatggaaatagtttttcagag

SEQ ID NO: 729222 - DNA, 25 bp, Homo sapien
tagactggacccaagtccatcggtt

SEQ ID NO: 729223 - DNA, 25 bp, Homo sapien
tagtggtctctgagttacaatgata

SEQ ID NO: 729224 - DNA, 25 bp, Homo sapien
tataaagcaggcgtgcattagactg

SEQ ID NO: 729225 - DNA, 25 bp, Homo sapien
tacaatgatataatctggtcttcca

SEQ ID NO: 729226 - DNA, 25 bp, Homo sapien
tcttctcaatgtctctcacctgtgc

SEQ ID NO: 729227 - DNA, 25 bp, Homo sapien
catgtagctctcaatcaagttcgtc

SEQ ID NO: 729228 - DNA, 25 bp, Homo sapien
tatgctttcacataagaggacttat

SEQ ID NO: 729229 - DNA, 25 bp, Homo sapien
tgtgtctttcatatgcccaagataa

SEQ ID NO: 729230 - DNA, 25 bp, Homo sapien
tcgtatttcgttttcgtaaatgctc

SEQ ID NO: 729231 - DNA, 25 bp, Homo sapien
caggaaaagggttggttgcctcata

SEQ ID NO: 729232 - DNA, 25 bp, Homo sapien
tttcgtaaatgctctgttccttcct

SEQ ID NO: 729233 - DNA, 25 bp, Homo sapien
tggttgcctcatacaacacagcttc

SEQ ID NO: 729234 - DNA, 25 bp, Homo sapien
taccatacagcttgagttcagagcc

SEQ ID NO: 729235 - DNA, 25 bp, Homo sapien
gggtgacctccagcaaatgagttca

SEQ ID NO: 729236 - DNA, 25 bp, Homo sapien
gatagtatcatttcccatcggtgca

SEQ ID NO: 729237 - DNA, 25 bp, Homo sapien
tatcttgaaagagccctgggtgacc

SEQ ID NO: 729238 - DNA, 25 bp, Homo sapien
aacatgccattaacttgcatgtgct

SEQ ID NO: 729239 - DNA, 25 bp, Homo sapien
ggcacgaattggttagagttccaat

SEQ ID NO: 729240 - DNA, 25 bp, Homo sapien
caattgaaaggcacgaattggttag

SEQ ID NO: 729241 - DNA, 25 bp, Homo sapien
atgccattaacttgcatgtgcttca

SEQ ID NO: 729242 - DNA, 25 bp, Homo sapien
tactggattgtactgcatctgaccc

SEQ ID NO: 729243 - DNA, 25 bp, Homo sapien
ccatagggtagtccagctctgtaca

SEQ ID NO: 729244 - DNA, 25 bp, Homo sapien
cacggccccagcataacatgtctga

SEQ ID NO: 729245 - DNA, 25 bp, Homo sapien
tggcactgatacatcgacacggccc

SEQ ID NO: 729246 - DNA, 25 bp, Homo sapien
aagatttaattcagtttgataacac

SEQ ID NO: 729247 - DNA, 25 bp, Homo sapien
ttaattcagtttgataacaccctta

SEQ ID NO: 729248 - DNA, 25 bp, Homo sapien
gatttaattcagtttgataacaccc

SEQ ID NO: 729249 - DNA, 25 bp, Homo sapien
taattcagtttgataacacccttac

SEQ ID NO: 729250 - DNA, 25 bp, Homo sapien
tgctcactgccagacggattctgat

SEQ ID NO: 729251 - DNA, 25 bp, Homo sapien
gaggtgcctaggactgaattccagg

SEQ ID NO: 729252 - DNA, 25 bp, Homo sapien
gaaagccattctaccttaaaggatg

SEQ ID NO: 729253 - DNA, 25 bp, Homo sapien
aatagctagagaacatggaggtgcc

SEQ ID NO: 729254 - DNA, 25 bp, Homo sapien
gagtaaacaggggtcaaggagctta

SEQ ID NO: 729255 - DNA, 25 bp, Homo sapien
gctcatatacgattagacaagcaaa

SEQ ID NO: 729256 - DNA, 25 bp, Homo sapien
aaagataaagcttcaggtcatactt

SEQ ID NO: 729257 - DNA, 25 bp, Homo sapien
gagcttaattttagtcaagatattc

SEQ ID NO: 729258 - DNA, 25 bp, Homo sapien
tgatgggtcaaacagcacaagtcac

SEQ ID NO: 729259 - DNA, 25 bp, Homo sapien
tcaggaatcttacactggaatgcaa

SEQ ID NO: 729260 - DNA, 25 bp, Homo sapien
gagtgatgcagctgtctcatttcag

SEQ ID NO: 729261 - DNA, 25 bp, Homo sapien
cataagtaggtttgctttgaccagg

SEQ ID NO: 729262 - DNA, 25 bp, Homo sapien
tctgacggatgatgaagtggctgaa

SEQ ID NO: 729263 - DNA, 25 bp, Homo sapien
tatttaattcagctggatatgtttc

SEQ ID NO: 729264 - DNA, 25 bp, Homo sapien
ctgaagatgtgtggtagtctgagtg

SEQ ID NO: 729265 - DNA, 25 bp, Homo sapien
agtggctgaagatgtgtggtagtct

SEQ ID NO: 729266 - DNA, 25 bp, Homo sapien
tgctgacgtccaacagtgacagttt

SEQ ID NO: 729267 - DNA, 25 bp, Homo sapien
tgcctccatgtgaacttgctgacgt

SEQ ID NO: 729268 - DNA, 25 bp, Homo sapien
tgtagacggtacctcaccactccgt

SEQ ID NO: 729269 - DNA, 25 bp, Homo sapien
aatgtgaggcacttagatgaaacag

SEQ ID NO: 729270 - DNA, 25 bp, Homo sapien
ttttcaacataaggcacatagcaac

SEQ ID NO: 729271 - DNA, 25 bp, Homo sapien
gcaacattcaactatcatcatggag

SEQ ID NO: 729272 - DNA, 25 bp, Homo sapien
tttgcctattggtaatgaagatcag

SEQ ID NO: 729273 - DNA, 25 bp, Homo sapien
aacaaggttgcagttaacagcagat

SEQ ID NO: 729274 - DNA, 25 bp, Homo sapien
ctcagtttgggattccatcagattt

SEQ ID NO: 729275 - DNA, 25 bp, Homo sapien
taatacatgcaaaatgtgtctaagc

SEQ ID NO: 729276 - DNA, 25 bp, Homo sapien
gtgtctaagctcttcagctctcata

SEQ ID NO: 729277 - DNA, 25 bp, Homo sapien
catgcaaaatgtgtctaagctcttc

SEQ ID NO: 729278 - DNA, 25 bp, Homo sapien
ctccgattcccaggttcaggctatt

SEQ ID NO: 729279 - DNA, 25 bp, Homo sapien
gctaggactacaggctcacgccacc

SEQ ID NO: 729280 - DNA, 25 bp, Homo sapien
tccgattcccaggttcaggctattc

SEQ ID NO: 729281 - DNA, 25 bp, Homo sapien
gagtattaatctagacctctggtct

SEQ ID NO: 729282 - DNA, 25 bp, Homo sapien
ccagtaacatgtggaagagagtaac

SEQ ID NO: 729283 - DNA, 25 bp, Homo sapien
ctaaatccttagatacctcatgctg

SEQ ID NO: 729284 - DNA, 25 bp, Homo sapien
tcagagatattttgtccgaagccat

SEQ ID NO: 729285 - DNA, 25 bp, Homo sapien
acgtgattttattattcttagatac

SEQ ID NO: 729286 - DNA, 25 bp, Homo sapien
tattattcttagatacattttagtt

SEQ ID NO: 729287 - DNA, 25 bp, Homo sapien
ttaacgtgattttattattcttaga

SEQ ID NO: 729288 - DNA, 25 bp, Homo sapien
cgtgattttattattcttagataca

SEQ ID NO: 729289 - DNA, 25 bp, Homo sapien
gcactaagtatcctttgtttggcac

SEQ ID NO: 729290 - DNA, 25 bp, Homo sapien
tgtgcatagtaatgttgaaagcttc

SEQ ID NO: 729291 - DNA, 25 bp, Homo sapien
tggcacttaacaatacagacaaacg

SEQ ID NO: 729292 - DNA, 25 bp, Homo sapien
taaatcccacaatgtagcagtgcac

SEQ ID NO: 729293 - DNA, 25 bp, Homo sapien
aaattggacaagctagagtcattca

SEQ ID NO: 729294 - DNA, 25 bp, Homo sapien
tggtgaaattggacaagctagagtc

SEQ ID NO: 729295 - DNA, 25 bp, Homo sapien
agtggccaacatccctgggtcggtg

SEQ ID NO: 729296 - DNA, 25 bp, Homo sapien
ccctgggtcggtgtttggtagagct

SEQ ID NO: 729297 - DNA, 25 bp, Homo sapien
tacttgcacaaaacagtctctaggc

SEQ ID NO: 729298 - DNA, 25 bp, Homo sapien
caaacataatgttgcgggtgtaaaa

SEQ ID NO: 729299 - DNA, 25 bp, Homo sapien
cacatctaacatggaagtttatgca

SEQ ID NO: 729300 - DNA, 25 bp, Homo sapien
tactcagatccaagctgagaattca

SEQ ID NO: 729301 - DNA, 25 bp, Homo sapien
ctctctttccaatctgaaactatat

SEQ ID NO: 729302 - DNA, 25 bp, Homo sapien
tgttttaagctagttgtcctttcca

SEQ ID NO: 729303 - DNA, 25 bp, Homo sapien
aaatcaatgttttaagctagttgtc

SEQ ID NO: 729304 - DNA, 25 bp, Homo sapien
ctctttccaatctgaaactatataa

SEQ ID NO: 729305 - DNA, 25 bp, Homo sapien
cactgctgcgtttcttataaaaatg

SEQ ID NO: 729306 - DNA, 25 bp, Homo sapien
caatgtctgtgataagtacagccaa

SEQ ID NO: 729307 - DNA, 25 bp, Homo sapien
tggaaagtcccagatttgtattggc

SEQ ID NO: 729308 - DNA, 25 bp, Homo sapien
ggattaaaattcatcactcgctgca

SEQ ID NO: 729309 - DNA, 25 bp, Homo sapien
cctcacagagggtgggtgctattat

SEQ ID NO: 729310 - DNA, 25 bp, Homo sapien
ttcacggcttatgtggatgatctca

SEQ ID NO: 729311 - DNA, 25 bp, Homo sapien
cttaccaggaacagggttcacggct

SEQ ID NO: 729312 - DNA, 25 bp, Homo sapien
tcctcacagagggtgggtgctatta

SEQ ID NO: 729313 - DNA, 25 bp, Homo sapien
tctaagttctggtattaactcgtgt

SEQ ID NO: 729314 - DNA, 25 bp, Homo sapien
ggtattaactcgtgtactccagtag

SEQ ID NO: 729315 - DNA, 25 bp, Homo sapien
tcgtgtactccagtagattctcctg

SEQ ID NO: 729316 - DNA, 25 bp, Homo sapien
tactccagtagattctcctgtgcac

SEQ ID NO: 729317 - DNA, 25 bp, Homo sapien
gacttgatctctaaacactgattct

SEQ ID NO: 729318 - DNA, 25 bp, Homo sapien
ttgctgtggcaatatagagatacat

SEQ ID NO: 729319 - DNA, 25 bp, Homo sapien
atgatttgaactacacggcaggtta

SEQ ID NO: 729320 - DNA, 25 bp, Homo sapien
cacggcaggttaattcactaaagat

SEQ ID NO: 729321 - DNA, 25 bp, Homo sapien
ctgataccgctgaaagtcttgtttc

SEQ ID NO: 729322 - DNA, 25 bp, Homo sapien
actgataccgctgaaagtcttgttt

SEQ ID NO: 729323 - DNA, 25 bp, Homo sapien
gactgataccgctgaaagtcttgtt

SEQ ID NO: 729324 - DNA, 25 bp, Homo sapien
gttccattctttaccactgagtaaa

SEQ ID NO: 729325 - DNA, 25 bp, Homo sapien
tatcctgcataatcatcgcttgtaa

SEQ ID NO: 729326 - DNA, 25 bp, Homo sapien
gtagtttgacgtaaaagatgttcca

SEQ ID NO: 729327 - DNA, 25 bp, Homo sapien
tctcacctccgggttcacagctaag

SEQ ID NO: 729328 - DNA, 25 bp, Homo sapien
tgctgacatttcatgtaattacaaa

SEQ ID NO: 729329 - DNA, 25 bp, Homo sapien
tttgctgcacccatctaccctaata

SEQ ID NO: 729330 - DNA, 25 bp, Homo sapien
taaatctatcatcttactacctttt

SEQ ID NO: 729331 - DNA, 25 bp, Homo sapien
gcgatctttagcttttaattagagt

SEQ ID NO: 729332 - DNA, 25 bp, Homo sapien
gatctgtgtcacaactgaagcccca

SEQ ID NO: 729333 - DNA, 25 bp, Homo sapien
gaatctaactctcccattgtgccga

SEQ ID NO: 729334 - DNA, 25 bp, Homo sapien
gcatttgccgttatgagctcttagg

SEQ ID NO: 729335 - DNA, 25 bp, Homo sapien
cactcggtagctttcgaaaccttcg

SEQ ID NO: 729336 - DNA, 25 bp, Homo sapien
tattccacgttcactgagagtttct

SEQ ID NO: 729337 - DNA, 25 bp, Homo sapien
tttcaatgattcaggactgcacagg

SEQ ID NO: 729338 - DNA, 25 bp, Homo sapien
gaatcaagataacaatcatggcctc

SEQ ID NO: 729339 - DNA, 25 bp, Homo sapien
gaaaatgattttaccacctctccaa

SEQ ID NO: 729340 - DNA, 25 bp, Homo sapien
acttgaaatacatccttaggtgaca

SEQ ID NO: 729341 - DNA, 25 bp, Homo sapien
gtaaaagtagatttagacatctcag

SEQ ID NO: 729342 - DNA, 25 bp, Homo sapien
taggtgacaatcctgcatccagcaa

SEQ ID NO: 729343 - DNA, 25 bp, Homo sapien
atctcagttgatcccgttttggcag

SEQ ID NO: 729344 - DNA, 25 bp, Homo sapien
tgtaggttgagtataatccatagac

SEQ ID NO: 729345 - DNA, 25 bp, Homo sapien
ggttgagtataatccatagacttct

SEQ ID NO: 729346 - DNA, 25 bp, Homo sapien
actggagtgtaggttgagtataatc

SEQ ID NO: 729347 - DNA, 25 bp, Homo sapien
tataatccatagacttctttccagg

SEQ ID NO: 729348 - DNA, 25 bp, Homo sapien
tgaagacttcacttcatgttattca

SEQ ID NO: 729349 - DNA, 25 bp, Homo sapien
ctttctgcaagtagaatggggactg

SEQ ID NO: 729350 - DNA, 25 bp, Homo sapien
tggagatgaagacttcacttcatgt

SEQ ID NO: 729351 - DNA, 25 bp, Homo sapien
tgttgggaatggagatgaagacttc

SEQ ID NO: 729352 - DNA, 25 bp, Homo sapien
gaaacgactgttctttgcaccaggg

SEQ ID NO: 729353 - DNA, 25 bp, Homo sapien
tccggaggacctgatatttcagata

SEQ ID NO: 729354 - DNA, 25 bp, Homo sapien
cttttccggaggacctgatatttca

SEQ ID NO: 729355 - DNA, 25 bp, Homo sapien
cagcttcagttttggagaaacgact

SEQ ID NO: 729356 - DNA, 25 bp, Homo sapien
tgggagcgtctaccacgttgcaaag

SEQ ID NO: 729357 - DNA, 25 bp, Homo sapien
tgccaggagagcacgctaatgcaga

SEQ ID NO: 729358 - DNA, 25 bp, Homo sapien
caaagcatttcatgcccgtcagcaa

SEQ ID NO: 729359 - DNA, 25 bp, Homo sapien
ggagttttccgtcttcacatcaaag

SEQ ID NO: 729360 - DNA, 25 bp, Homo sapien
tcttgtttaatgtcatatatctgac

SEQ ID NO: 729361 - DNA, 25 bp, Homo sapien
gtatcttgtttaatgtcatatatct

SEQ ID NO: 729362 - DNA, 25 bp, Homo sapien
gaagtatcttgtttaatgtcatata

SEQ ID NO: 729363 - DNA, 25 bp, Homo sapien
cttgtttaatgtcatatatctgaca

SEQ ID NO: 729364 - DNA, 25 bp, Homo sapien
tacatattctctcttcccgaaccaa

SEQ ID NO: 729365 - DNA, 25 bp, Homo sapien
gcaaatgggtccatattcttacata

SEQ ID NO: 729366 - DNA, 25 bp, Homo sapien
ggattagggtacattttgttgtcaa

SEQ ID NO: 729367 - DNA, 25 bp, Homo sapien
aacagggacaatggcttgcaaatgg

SEQ ID NO: 729368 - DNA, 25 bp, Homo sapien
aggcactgaacttgaaggcggtagt

SEQ ID NO: 729369 - DNA, 25 bp, Homo sapien
aaggcactgaacttgaaggcggtag

SEQ ID NO: 729370 - DNA, 25 bp, Homo sapien
gaaaggcactgaacttgaaggcggt

SEQ ID NO: 729371 - DNA, 25 bp, Homo sapien
cactgaacttgaaggcggtagtggg

SEQ ID NO: 729372 - DNA, 25 bp, Homo sapien
catatggttgatttcaggagagcgg

SEQ ID NO: 729373 - DNA, 25 bp, Homo sapien
gaggctcccatatggttgatttcag

SEQ ID NO: 729374 - DNA, 25 bp, Homo sapien
tgaactttgaggctcccatatggtt

SEQ ID NO: 729375 - DNA, 25 bp, Homo sapien
cccatatggttgatttcaggagagc

SEQ ID NO: 729376 - DNA, 25 bp, Homo sapien
agactaataaatgaggggttaactg

SEQ ID NO: 729377 - DNA, 25 bp, Homo sapien
taggaagttggattcccagagcttt

SEQ ID NO: 729378 - DNA, 25 bp, Homo sapien
aatgttacttcaagagcccatccaa

SEQ ID NO: 729379 - DNA, 25 bp, Homo sapien
catccaataggaagttggattccca

SEQ ID NO: 729380 - DNA, 25 bp, Homo sapien
tcaagagcccatccaataggaagtt

SEQ ID NO: 729381 - DNA, 25 bp, Homo sapien
tacatgaaagaaccatatccttggg

SEQ ID NO: 729382 - DNA, 25 bp, Homo sapien
catccatcaattatggtcatgggaa

SEQ ID NO: 729383 - DNA, 25 bp, Homo sapien
tatgagcataatgagtcacaggcac

SEQ ID NO: 729384 - DNA, 25 bp, Homo sapien
ccttgggcactgagttggccttcat

SEQ ID NO: 729385 - DNA, 25 bp, Homo sapien
taacctatgatgaaagacggctgca

SEQ ID NO: 729386 - DNA, 25 bp, Homo sapien
aacagctttcttgggtaacctatga

SEQ ID NO: 729387 - DNA, 25 bp, Homo sapien
ggagtggaaccttataccttatagc

SEQ ID NO: 729388 - DNA, 25 bp, Homo sapien
caccaccagtagtctagccacagat

SEQ ID NO: 729389 - DNA, 25 bp, Homo sapien
acaccactgaatggaaagaagacac

SEQ ID NO: 729390 - DNA, 25 bp, Homo sapien
catagatgtctcaacaccactgaat

SEQ ID NO: 729391 - DNA, 25 bp, Homo sapien
tagccagatgcatagatgtctcaac

SEQ ID NO: 729392 - DNA, 25 bp, Homo sapien
gaagacacctgattcatatgtgccc

SEQ ID NO: 729393 - DNA, 25 bp, Homo sapien
gcttctttcagactggtatgtggaa

SEQ ID NO: 729394 - DNA, 25 bp, Homo sapien
tggaccattgagtgagctcttagaa

SEQ ID NO: 729395 - DNA, 25 bp, Homo sapien
tatgtggaagagaaatgcatctgtg

SEQ ID NO: 729396 - DNA, 25 bp, Homo sapien
ggaccctttggtacagcatcttgac

SEQ ID NO: 729397 - DNA, 25 bp, Homo sapien
cacaaagcgcagcttcctatgtcct

SEQ ID NO: 729398 - DNA, 25 bp, Homo sapien
ggcacaaagcgcagcttcctatgtc

SEQ ID NO: 729399 - DNA, 25 bp, Homo sapien
aagcgcagcttcctatgtcctccat

SEQ ID NO: 729400 - DNA, 25 bp, Homo sapien
ggtaccaggcacaaagcgcagcttc

SEQ ID NO: 729401 - DNA, 25 bp, Homo sapien
cgagggtcccactgttctctctgtg

SEQ ID NO: 729402 - DNA, 25 bp, Homo sapien
acatttttccagtgatcgtctcctg

SEQ ID NO: 729403 - DNA, 25 bp, Homo sapien
ttttgaggacactcttcctggtact

SEQ ID NO: 729404 - DNA, 25 bp, Homo sapien
ttttccagtgatcgtctcctggctg

SEQ ID NO: 729405 - DNA, 25 bp, Homo sapien
tctgcaaaattggttcttctgttct

SEQ ID NO: 729406 - DNA, 25 bp, Homo sapien
caaataaagtatgggaactcaactc

SEQ ID NO: 729407 - DNA, 25 bp, Homo sapien
caattttctgcagaatggcaacttt

SEQ ID NO: 729408 - DNA, 25 bp, Homo sapien
ttgttgctaatcgaaaagggaatac

SEQ ID NO: 729409 - DNA, 25 bp, Homo sapien
tgtgatcgggaatttgttctccgtg

SEQ ID NO: 729410 - DNA, 25 bp, Homo sapien
atttgttctccgtgaccagagttac

SEQ ID NO: 729411 - DNA, 25 bp, Homo sapien
tcagtatgcttgctgtgatcgggaa

SEQ ID NO: 729412 - DNA, 25 bp, Homo sapien
gggaatttgttctccgtgaccagag

SEQ ID NO: 729413 - DNA, 25 bp, Homo sapien
taaaactcgagcaattagcttcaga

SEQ ID NO: 729414 - DNA, 25 bp, Homo sapien
ccttgctaggtctttgaacttggga

SEQ ID NO: 729415 - DNA, 25 bp, Homo sapien
tagcaataggaagtgggcaatgtcc

SEQ ID NO: 729416 - DNA, 25 bp, Homo sapien
gaacttgggatgtggtacttaggtc

SEQ ID NO: 729417 - DNA, 25 bp, Homo sapien
ggcctctttgagattgaagggtggg

SEQ ID NO: 729418 - DNA, 25 bp, Homo sapien
ctcactgagggagctaaataatgag

SEQ ID NO: 729419 - DNA, 25 bp, Homo sapien
tgagggagctaaataatgagaactc

SEQ ID NO: 729420 - DNA, 25 bp, Homo sapien
caacagatactggggcctctttgag

SEQ ID NO: 729421 - DNA, 25 bp, Homo sapien
gcaatagaggccacttcgggttccc

SEQ ID NO: 729422 - DNA, 25 bp, Homo sapien
tgcagagcaatagaggccacttcgg

SEQ ID NO: 729423 - DNA, 25 bp, Homo sapien
tccgtgcagagcaatagaggccact

SEQ ID NO: 729424 - DNA, 25 bp, Homo sapien
cgtgtgtccgtgcagagcaatagag

SEQ ID NO: 729425 - DNA, 25 bp, Homo sapien
tagatctttgtctccatacacagga

SEQ ID NO: 729426 - DNA, 25 bp, Homo sapien
gctataagcaataccacaggctgag

SEQ ID NO: 729427 - DNA, 25 bp, Homo sapien
ccagcagtttgcgagagaagtcagc

SEQ ID NO: 729428 - DNA, 25 bp, Homo sapien
gatggagcttgttctgatagcacga

SEQ ID NO: 729429 - DNA, 25 bp, Homo sapien
ctagtaagtccaagactagctgtgg

SEQ ID NO: 729430 - DNA, 25 bp, Homo sapien
gctgtggagtaagaaccaccttcct

SEQ ID NO: 729431 - DNA, 25 bp, Homo sapien
caatcagtgtcccttttctctagta

SEQ ID NO: 729432 - DNA, 25 bp, Homo sapien
atcagtgtcccttttctctagtaag

SEQ ID NO: 729433 - DNA, 25 bp, Homo sapien
gcctgtctgtgcaggtggtgacttg

SEQ ID NO: 729434 - DNA, 25 bp, Homo sapien
gcagagagagttgcctgtctgtgca

SEQ ID NO: 729435 - DNA, 25 bp, Homo sapien
caggtggtgacttgtgcaatctgca

SEQ ID NO: 729436 - DNA, 25 bp, Homo sapien
cagaaatccagcttggtgtgcagag

SEQ ID NO: 729437 - DNA, 25 bp, Homo sapien
ggcaagccacagtcagtttggtcca

SEQ ID NO: 729438 - DNA, 25 bp, Homo sapien
aagccacagtcagtttggtccacgg

SEQ ID NO: 729439 - DNA, 25 bp, Homo sapien
cacagtcagtttggtccacggtcaa

SEQ ID NO: 729440 - DNA, 25 bp, Homo sapien
cagtttggtccacggtcaagaagat

SEQ ID NO: 729441 - DNA, 25 bp, Homo sapien
aagacatgtggctatgacaggggca

SEQ ID NO: 729442 - DNA, 25 bp, Homo sapien
cctgcagtggaatgaggtctggatc

SEQ ID NO: 729443 - DNA, 25 bp, Homo sapien
caggaccctgcagtggaatgaggtc

SEQ ID NO: 729444 - DNA, 25 bp, Homo sapien
ggatctgagtgaagtccactagggc

SEQ ID NO: 729445 - DNA, 25 bp, Homo sapien
cgcagctgggctcccaatatctgct

SEQ ID NO: 729446 - DNA, 25 bp, Homo sapien
tcagctatggactctagcatgaccc

SEQ ID NO: 729447 - DNA, 25 bp, Homo sapien
tgacccattggcctcgtcttagctt

SEQ ID NO: 729448 - DNA, 25 bp, Homo sapien
tcccacttgatgacacctggagctc

SEQ ID NO: 729449 - DNA, 25 bp, Homo sapien
ccagccgaggtcatgtgataaggct

SEQ ID NO: 729450 - DNA, 25 bp, Homo sapien
gctctgctaggccagccgaggtcat

SEQ ID NO: 729451 - DNA, 25 bp, Homo sapien
gctaggccagccgaggtcatgtgat

SEQ ID NO: 729452 - DNA, 25 bp, Homo sapien
gccgaggtcatgtgataaggctgct

SEQ ID NO: 729453 - DNA, 25 bp, Homo sapien
taagcaacgtctccgctgaagtggc

SEQ ID NO: 729454 - DNA, 25 bp, Homo sapien
gtgatgaccattgaccctctccagg

SEQ ID NO: 729455 - DNA, 25 bp, Homo sapien
gggaatttccctgcactctgtgatg

SEQ ID NO: 729456 - DNA, 25 bp, Homo sapien
taaccgggtctggagaatgccctcc

SEQ ID NO: 729457 - DNA, 25 bp, Homo sapien
cccaagtctttctcaagatgtgtca

SEQ ID NO: 729458 - DNA, 25 bp, Homo sapien
acatcctgtgttccatccagtccag

SEQ ID NO: 729459 - DNA, 25 bp, Homo sapien
caatccatgagcatgtcttcctttc

SEQ ID NO: 729460 - DNA, 25 bp, Homo sapien
cagtatttacacagttttgggcagg

SEQ ID NO: 729461 - DNA, 25 bp, Homo sapien
tgcctgatcctttacccaaagcaaa

SEQ ID NO: 729462 - DNA, 25 bp, Homo sapien
tctaaggcagatacagactcattgc

SEQ ID NO: 729463 - DNA, 25 bp, Homo sapien
ggcagcaacatttgcagcatctaag

SEQ ID NO: 729464 - DNA, 25 bp, Homo sapien
caaagcaaaagtcttaagctgccgg

SEQ ID NO: 729465 - DNA, 25 bp, Homo sapien
acttgtatttgggaccagaaagatc

SEQ ID NO: 729466 - DNA, 25 bp, Homo sapien
taaaagactgggcaattgaaagtga

SEQ ID NO: 729467 - DNA, 25 bp, Homo sapien
tttgggaccagaaagatccttgctt

SEQ ID NO: 729468 - DNA, 25 bp, Homo sapien
tgtatttgggaccagaaagatcctt

SEQ ID NO: 729469 - DNA, 25 bp, Homo sapien
ttccttcactaccaggtcaacaacc

SEQ ID NO: 729470 - DNA, 25 bp, Homo sapien
ggaagactcgaggtctggtttgcag

SEQ ID NO: 729471 - DNA, 25 bp, Homo sapien
tttcactggggaagactcgaggtct

SEQ ID NO: 729472 - DNA, 25 bp, Homo sapien
caggtcaacaacctctttcactggg

SEQ ID NO: 729473 - DNA, 25 bp, Homo sapien
ctgtaagaataaaaggtggttatat

SEQ ID NO: 729474 - DNA, 25 bp, Homo sapien
tttagccttcttcgatgtaaaatca

SEQ ID NO: 729475 - DNA, 25 bp, Homo sapien
aattgctttagccttcttcgatgta

SEQ ID NO: 729476 - DNA, 25 bp, Homo sapien
tgctttagccttcttcgatgtaaaa

SEQ ID NO: 729477 - DNA, 25 bp, Homo sapien
gccttcttcgatgtaaaatcacact

SEQ ID NO: 729478 - DNA, 25 bp, Homo sapien
tccctgccagacgtccctttgaagt

SEQ ID NO: 729479 - DNA, 25 bp, Homo sapien
tggtaatcctagttgagaggtacag

SEQ ID NO: 729480 - DNA, 25 bp, Homo sapien
tgaccttgtaaagatcgggtgctcc

SEQ ID NO: 729481 - DNA, 25 bp, Homo sapien
cctttcaaatggctgacctggtaat

SEQ ID NO: 729482 - DNA, 25 bp, Homo sapien
gagtttctccggctggaatgtattc

SEQ ID NO: 729483 - DNA, 25 bp, Homo sapien
tgtattctgtacttggcagcaatga

SEQ ID NO: 729484 - DNA, 25 bp, Homo sapien
tgactcagatctattacagactcac

SEQ ID NO: 729485 - DNA, 25 bp, Homo sapien
aaactgactcagatctattacagac

SEQ ID NO: 729486 - DNA, 25 bp, Homo sapien
ctaaatgcccatccgtgacagatca

SEQ ID NO: 729487 - DNA, 25 bp, Homo sapien
tgcccatccgtgacagatcagataa

SEQ ID NO: 729488 - DNA, 25 bp, Homo sapien
aaatgcccatccgtgacagatcaga

SEQ ID NO: 729489 - DNA, 25 bp, Homo sapien
aatgcccatccgtgacagatcagat

SEQ ID NO: 729490 - DNA, 25 bp, Homo sapien
gtgatgatttctcatcatttttctt

SEQ ID NO: 729491 - DNA, 25 bp, Homo sapien
gatgatttctcatcatttttctttg

SEQ ID NO: 729492 - DNA, 25 bp, Homo sapien
atccattcagtgatgatttctcatc

SEQ ID NO: 729493 - DNA, 25 bp, Homo sapien
ccatccattcagtgatgatttctca

SEQ ID NO: 729494 - DNA, 25 bp, Homo sapien
ctgtgaaggctgcaaatatgctcag

SEQ ID NO: 729495 - DNA, 25 bp, Homo sapien
ggttgcacagtaaacagtctggcca

SEQ ID NO: 729496 - DNA, 25 bp, Homo sapien
gggttgcacagtaaacagtctggcc

SEQ ID NO: 729497 - DNA, 25 bp, Homo sapien
tgtggcacccctgtgaaggctgcaa

SEQ ID NO: 729498 - DNA, 25 bp, Homo sapien
agcagcagcagttatgaagggctta

SEQ ID NO: 729499 - DNA, 25 bp, Homo sapien
agcagttatgaagggcttatcagcc

SEQ ID NO: 729500 - DNA, 25 bp, Homo sapien
cagcagcagttatgaagggcttatc

SEQ ID NO: 729501 - DNA, 25 bp, Homo sapien
gcagcagttatgaagggcttatcag

SEQ ID NO: 729502 - DNA, 25 bp, Homo sapien
tcaggctttggatcctgctaatcat

SEQ ID NO: 729503 - DNA, 25 bp, Homo sapien
atgttcactgacagaaatcctagaa

SEQ ID NO: 729504 - DNA, 25 bp, Homo sapien
tcactgacagaaatcctagaatttt

SEQ ID NO: 729505 - DNA, 25 bp, Homo sapien
ctagaatttttgaaagtcaggcttt

SEQ ID NO: 729506 - DNA, 25 bp, Homo sapien
ttctggaccttgagcaccagggctg

SEQ ID NO: 729507 - DNA, 25 bp, Homo sapien
ccagcagggcctgattcagctccag

SEQ ID NO: 729508 - DNA, 25 bp, Homo sapien
cagcaactcctcagcttggtccagc

SEQ ID NO: 729509 - DNA, 25 bp, Homo sapien
cttcagcttctggaccttgagcacc

SEQ ID NO: 729510 - DNA, 25 bp, Homo sapien
gctgttgatatcaactggcatctca

SEQ ID NO: 729511 - DNA, 25 bp, Homo sapien
aaggctgttgatatcaactggcatc

SEQ ID NO: 729512 - DNA, 25 bp, Homo sapien
tctcagtcaggccaatatcttgtct

SEQ ID NO: 729513 - DNA, 25 bp, Homo sapien
gtcaggccaatatcttgtctctcct

SEQ ID NO: 729514 - DNA, 25 bp, Homo sapien
tcaatcagttaagtgctaccagaaa

SEQ ID NO: 729515 - DNA, 25 bp, Homo sapien
ttacattccgttgttgctgcatcct

SEQ ID NO: 729516 - DNA, 25 bp, Homo sapien
taagtgtcaactgtgtgcctaactg

SEQ ID NO: 729517 - DNA, 25 bp, Homo sapien
tcttaatccaacaacttacattccg

SEQ ID NO: 729518 - DNA, 25 bp, Homo sapien
tctctgggctcatacgttactgggt

SEQ ID NO: 729519 - DNA, 25 bp, Homo sapien
gcaaacaaattctgtcgtgcagatg

SEQ ID NO: 729520 - DNA, 25 bp, Homo sapien
cacttgcttgttagtctctgctgtg

SEQ ID NO: 729521 - DNA, 25 bp, Homo sapien
tacatgatagaatgattaccagatc

SEQ ID NO: 729522 - DNA, 25 bp, Homo sapien
tgcccagctgaaaatacgtttttaa

SEQ ID NO: 729523 - DNA, 25 bp, Homo sapien
tccaaggcttgtcatttggataaca

SEQ ID NO: 729524 - DNA, 25 bp, Homo sapien
aaatccacttcgcaattcaatgagg

SEQ ID NO: 729525 - DNA, 25 bp, Homo sapien
caactctggtacaataaagtcatgg

SEQ ID NO: 729526 - DNA, 25 bp, Homo sapien
tttaataattaactggtcctggctg

SEQ ID NO: 729527 - DNA, 25 bp, Homo sapien
gaggtttgccgtgatctagtgtgca

SEQ ID NO: 729528 - DNA, 25 bp, Homo sapien
ctttaggtacagcagaagatcttgt

SEQ ID NO: 729529 - DNA, 25 bp, Homo sapien
ctaaaagtacgaaacatcagctggc

SEQ ID NO: 729530 - DNA, 25 bp, Homo sapien
ctcctgctatacttggcaaaaaatt

SEQ ID NO: 729531 - DNA, 25 bp, Homo sapien
gtgtacatgaaagttacttgtttaa

SEQ ID NO: 729532 - DNA, 25 bp, Homo sapien
cctgctatacttggcaaaaaatttg

SEQ ID NO: 729533 - DNA, 25 bp, Homo sapien
aaaaaatttgtcatagtgtacatga

SEQ ID NO: 729534 - DNA, 25 bp, Homo sapien
cgaggctagggaggacctcacttcc

SEQ ID NO: 729535 - DNA, 25 bp, Homo sapien
gagcagttttcgctgctgctacggc

SEQ ID NO: 729536 - DNA, 25 bp, Homo sapien
tgctacggctgttgccatgaggcga

SEQ ID NO: 729537 - DNA, 25 bp, Homo sapien
atgttaactgaggtaagcggcgacg

SEQ ID NO: 729538 - DNA, 25 bp, Homo sapien
tcggacccctgtaaagaactcactg

SEQ ID NO: 729539 - DNA, 25 bp, Homo sapien
gccgcgcagggagctgtttcaaata

SEQ ID NO: 729540 - DNA, 25 bp, Homo sapien
gggtaaagccgataagccgcatcat

SEQ ID NO: 729541 - DNA, 25 bp, Homo sapien
tagaatggcgtcagtctcagggact

SEQ ID NO: 729542 - DNA, 25 bp, Homo sapien
ctaatacaaaacagggtagcacact

SEQ ID NO: 729543 - DNA, 25 bp, Homo sapien
ttctaatacaaaacagggtagcaca

SEQ ID NO: 729544 - DNA, 25 bp, Homo sapien
gttcaggtaaactactttcatcaca

SEQ ID NO: 729545 - DNA, 25 bp, Homo sapien
gcacactttcccagcatgttcaggt

SEQ ID NO: 729546 - DNA, 25 bp, Homo sapien
gccattggaagagcgactacttttg

SEQ ID NO: 729547 - DNA, 25 bp, Homo sapien
gattggttcaatactcaagtgtcaa

SEQ ID NO: 729548 - DNA, 25 bp, Homo sapien
gaatactcaagccagacaactacat

SEQ ID NO: 729549 - DNA, 25 bp, Homo sapien
tcatgtcatatcacagattggttca

SEQ ID NO: 729550 - DNA, 25 bp, Homo sapien
taggtactaaggaaacattgaacaa

SEQ ID NO: 729551 - DNA, 25 bp, Homo sapien
aaaaaatccccgatcttgtggagct

SEQ ID NO: 729552 - DNA, 25 bp, Homo sapien
cattctagcggagggaaggcaatag

SEQ ID NO: 729553 - DNA, 25 bp, Homo sapien
tcttttaggcaatgattcacccatt

SEQ ID NO: 729554 - DNA, 25 bp, Homo sapien
ttttgaatacagacataccttagag

SEQ ID NO: 729555 - DNA, 25 bp, Homo sapien
tgagctttcagccagtggtaatctt

SEQ ID NO: 729556 - DNA, 25 bp, Homo sapien
gactgatcaggctagcaggttgctg

SEQ ID NO: 729557 - DNA, 25 bp, Homo sapien
accacagcaatggagcaaatatctc

SEQ ID NO: 729558 - DNA, 25 bp, Homo sapien
tccaggtgcaacagggatcagcagc

SEQ ID NO: 729559 - DNA, 25 bp, Homo sapien
tcagatcgtctgcaatgagcctgcg

SEQ ID NO: 729560 - DNA, 25 bp, Homo sapien
tctcgtggcattactaggttggacc

SEQ ID NO: 729561 - DNA, 25 bp, Homo sapien
catgttagcatggtcaggtttggca

SEQ ID NO: 729562 - DNA, 25 bp, Homo sapien
tgtcccctctccgtggtaactcctg

SEQ ID NO: 729563 - DNA, 25 bp, Homo sapien
tcccctctccgtggtaactcctgtc

SEQ ID NO: 729564 - DNA, 25 bp, Homo sapien
tgtagagtctatgtctctataaatt

SEQ ID NO: 729565 - DNA, 25 bp, Homo sapien
tcatcctttatctgtagagtctatg

SEQ ID NO: 729566 - DNA, 25 bp, Homo sapien
tcctttatctgtagagtctatgtct

SEQ ID NO: 729567 - DNA, 25 bp, Homo sapien
atctgtagagtctatgtctctataa

SEQ ID NO: 729568 - DNA, 25 bp, Homo sapien
caagcaaccaggtaaaaggctgagg

SEQ ID NO: 729569 - DNA, 25 bp, Homo sapien
tgaagtagggtcaagcagaggaaca

SEQ ID NO: 729570 - DNA, 25 bp, Homo sapien
cctgttaccagctgatcaggaagac

SEQ ID NO: 729571 - DNA, 25 bp, Homo sapien
tgcagacctatggacatggaatact

SEQ ID NO: 729572 - DNA, 25 bp, Homo sapien
agatggtaatgaaaacagctgccac

SEQ ID NO: 729573 - DNA, 25 bp, Homo sapien
catggaaacatctccccctcagtga

SEQ ID NO: 729574 - DNA, 25 bp, Homo sapien
cccctcagtgaaataatgagatggt

SEQ ID NO: 729575 - DNA, 25 bp, Homo sapien
cagtgaaataatgagatggtaatga

SEQ ID NO: 729576 - DNA, 25 bp, Homo sapien
attgcccttccacagtttatttcca

SEQ ID NO: 729577 - DNA, 25 bp, Homo sapien
gcattgcccttccacagtttatttc

SEQ ID NO: 729578 - DNA, 25 bp, Homo sapien
cccttccacagtttatttccatcag

SEQ ID NO: 729579 - DNA, 25 bp, Homo sapien
tgtagtagggacaatccaaggttaa

SEQ ID NO: 729580 - DNA, 25 bp, Homo sapien
tctccaaggcttctacttttaagac

SEQ ID NO: 729581 - DNA, 25 bp, Homo sapien
ctctccaaggcttctacttttaaga

SEQ ID NO: 729582 - DNA, 25 bp, Homo sapien
tttctccatggtcttaaccttctgc

SEQ ID NO: 729583 - DNA, 25 bp, Homo sapien
catggtcttaaccttctgcttcctt

SEQ ID NO: 729584 - DNA, 25 bp, Homo sapien
cccagggtcaatttgggaccgcgcg

SEQ ID NO: 729585 - DNA, 25 bp, Homo sapien
gaatgaatacagctacactactatg

SEQ ID NO: 729586 - DNA, 25 bp, Homo sapien
tcctagaagtatacatgatgagtca

SEQ ID NO: 729587 - DNA, 25 bp, Homo sapien
tccatccgaatagaagaccttatct

SEQ ID NO: 729588 - DNA, 25 bp, Homo sapien
tgtgactgagtctgtgagagcctgc

SEQ ID NO: 729589 - DNA, 25 bp, Homo sapien
tcctgtaacttaaacgtcactgtga

SEQ ID NO: 729590 - DNA, 25 bp, Homo sapien
tgtgagagcctgcttgatttctcct

SEQ ID NO: 729591 - DNA, 25 bp, Homo sapien
aaacgtcactgtgactgagtctgtg

SEQ ID NO: 729592 - DNA, 25 bp, Homo sapien
tgggttgttttccacttgggcaata

SEQ ID NO: 729593 - DNA, 25 bp, Homo sapien
ctttccttcatcatcaaatgtttgg

SEQ ID NO: 729594 - DNA, 25 bp, Homo sapien
ttccttcatcatcaaatgtttgggt

SEQ ID NO: 729595 - DNA, 25 bp, Homo sapien
ccttcatcatcaaatgtttgggttg

SEQ ID NO: 729596 - DNA, 25 bp, Homo sapien
tgcgtcacccaccattaatccaatg

SEQ ID NO: 729597 - DNA, 25 bp, Homo sapien
taggttgagagaccagccagtgact

SEQ ID NO: 729598 - DNA, 25 bp, Homo sapien
gtgactccaacaactctcgcaactg

SEQ ID NO: 729599 - DNA, 25 bp, Homo sapien
cattgcccacctgctaggtcctgag

SEQ ID NO: 729600 - DNA, 25 bp, Homo sapien
ctgtgccactcaggacatgctcctt

SEQ ID NO: 729601 - DNA, 25 bp, Homo sapien
gtgccactcaggacatgctccttct

SEQ ID NO: 729602 - DNA, 25 bp, Homo sapien
ctccatcaggcatactgccagggag

SEQ ID NO: 729603 - DNA, 25 bp, Homo sapien
ttctccatcaggcatactgccaggg

SEQ ID NO: 729604 - DNA, 25 bp, Homo sapien
aggagacctcttcctggggctctgc

SEQ ID NO: 729605 - DNA, 25 bp, Homo sapien
taggagacctcttcctggggctctg

SEQ ID NO: 729606 - DNA, 25 bp, Homo sapien
acttggcacttgagttagcatcggc

SEQ ID NO: 729607 - DNA, 25 bp, Homo sapien
gtggtgaggaaagctgtcaagtctc

SEQ ID NO: 729608 - DNA, 25 bp, Homo sapien
tctcctagatggaagaatgttagtg

SEQ ID NO: 729609 - DNA, 25 bp, Homo sapien
tattactactaatggaacaacgtgc

SEQ ID NO: 729610 - DNA, 25 bp, Homo sapien
ctgctgactgcttattttgttctgc

SEQ ID NO: 729611 - DNA, 25 bp, Homo sapien
gctgactgcttattttgttctgcct

SEQ ID NO: 729612 - DNA, 25 bp, Homo sapien
tgctgactgcttattttgttctgcc

SEQ ID NO: 729613 - DNA, 25 bp, Homo sapien
ctgactgcttattttgttctgcctc

SEQ ID NO: 729614 - DNA, 25 bp, Homo sapien
tttagtttcttcgtgtactttgtga

SEQ ID NO: 729615 - DNA, 25 bp, Homo sapien
tccattcaagccagtaatgtcacca

SEQ ID NO: 729616 - DNA, 25 bp, Homo sapien
ttcaagccagtaatgtcaccaaggc

SEQ ID NO: 729617 - DNA, 25 bp, Homo sapien
ttgtgaaggtacacatctgccctcc

SEQ ID NO: 729618 - DNA, 25 bp, Homo sapien
cgcgcgggaggcgggagggcagcga

SEQ ID NO: 729619 - DNA, 25 bp, Homo sapien
ggaggcgggagggcagcgaggacat

SEQ ID NO: 729620 - DNA, 25 bp, Homo sapien
ggccgacgcgctgggaaggacgcgc

SEQ ID NO: 729621 - DNA, 25 bp, Homo sapien
acgcgctgggaaggacgcgcgggag

SEQ ID NO: 729622 - DNA, 25 bp, Homo sapien
gaatgaaagttgactcgggggccgc

SEQ ID NO: 729623 - DNA, 25 bp, Homo sapien
agaatggtgaggcagaagcaaaaag

SEQ ID NO: 729624 - DNA, 25 bp, Homo sapien
cagccgagatttaccggccgcggcg

SEQ ID NO: 729625 - DNA, 25 bp, Homo sapien
tgctcctccagccgagatttaccgg

SEQ ID NO: 729626 - DNA, 25 bp, Homo sapien
gcgctggcgacctcttaacttctcc

SEQ ID NO: 729627 - DNA, 25 bp, Homo sapien
ggctatcgcgccctccttcgctccg

SEQ ID NO: 729628 - DNA, 25 bp, Homo sapien
gccctccttcgctccgcgctggcga

SEQ ID NO: 729629 - DNA, 25 bp, Homo sapien
ctcctgctgaggctatcgcgccctc

SEQ ID NO: 729630 - DNA, 25 bp, Homo sapien
gatgctgttaacctgcggaacccga

SEQ ID NO: 729631 - DNA, 25 bp, Homo sapien
tctccgggctgcgagatgcaaggca

SEQ ID NO: 729632 - DNA, 25 bp, Homo sapien
ccgagaagggaataccgcggcgcat

SEQ ID NO: 729633 - DNA, 25 bp, Homo sapien
caaggcaagtggcatcagagtccgg

SEQ ID NO: 729634 - DNA, 25 bp, Homo sapien
gaatatgatctctgaccactactgg

SEQ ID NO: 729635 - DNA, 25 bp, Homo sapien
tgagagaaatagacatcccgacacc

SEQ ID NO: 729636 - DNA, 25 bp, Homo sapien
taagttcggccaaagaagcagagct

SEQ ID NO: 729637 - DNA, 25 bp, Homo sapien
gatgatcctcaagcttgacaactgt

SEQ ID NO: 729638 - DNA, 25 bp, Homo sapien
agaacactgggtagcacaggcaggc

SEQ ID NO: 729639 - DNA, 25 bp, Homo sapien
tcatgcataaactaagtggagacca

SEQ ID NO: 729640 - DNA, 25 bp, Homo sapien
gaagtgagtcattacagaacactgg

SEQ ID NO: 729641 - DNA, 25 bp, Homo sapien
gatttagaattcgatgactccacaa

SEQ ID NO: 729642 - DNA, 25 bp, Homo sapien
tagaaatgtgtacacagggccagcc

SEQ ID NO: 729643 - DNA, 25 bp, Homo sapien
gaacagacaggcaatggatatggaa

SEQ ID NO: 729644 - DNA, 25 bp, Homo sapien
gattagcagactagtgcaagggaga

SEQ ID NO: 729645 - DNA, 25 bp, Homo sapien
gactcatagacagcatggaactctt

SEQ ID NO: 729646 - DNA, 25 bp, Homo sapien
agttcttcagaagaccgacagttct

SEQ ID NO: 729647 - DNA, 25 bp, Homo sapien
ctctgatcaactggctaagctcctc

SEQ ID NO: 729648 - DNA, 25 bp, Homo sapien
ttcctgtttccttcactacgctgaa

SEQ ID NO: 729649 - DNA, 25 bp, Homo sapien
cttcactacgctgaacagttcttca

SEQ ID NO: 729650 - DNA, 25 bp, Homo sapien
gttctcagccacgagtcaacttcct

SEQ ID NO: 729651 - DNA, 25 bp, Homo sapien
ctgttctcagccacgagtcaacttc

SEQ ID NO: 729652 - DNA, 25 bp, Homo sapien
agccacgagtcaacttcctccaaca

SEQ ID NO: 729653 - DNA, 25 bp, Homo sapien
cacgagtcaacttcctccaacacac

SEQ ID NO: 729654 - DNA, 25 bp, Homo sapien
gaagcagataaaggggttcctggac

SEQ ID NO: 729655 - DNA, 25 bp, Homo sapien
cagataaaggggttcctggacagac

SEQ ID NO: 729656 - DNA, 25 bp, Homo sapien
ggtaaactgcaaactaaagaagcaa

SEQ ID NO: 729657 - DNA, 25 bp, Homo sapien
ctgagcaggtaaactgcaaactaaa

SEQ ID NO: 729658 - DNA, 25 bp, Homo sapien
ccctttgctagcactgaggctctca

SEQ ID NO: 729659 - DNA, 25 bp, Homo sapien
tgctctccatgagggagtgtgcgtc

SEQ ID NO: 729660 - DNA, 25 bp, Homo sapien
tcctctcttgttcgtaacatcagag

SEQ ID NO: 729661 - DNA, 25 bp, Homo sapien
ggagtgtgcgtctaaaaccctttgc

SEQ ID NO: 729662 - DNA, 25 bp, Homo sapien
agcaggagggctttgtaactcacac

SEQ ID NO: 729663 - DNA, 25 bp, Homo sapien
gggctttgtaactcacacgctataa

SEQ ID NO: 729664 - DNA, 25 bp, Homo sapien
acacgctataaccttccctgcagaa

SEQ ID NO: 729665 - DNA, 25 bp, Homo sapien
tataaccttccctgcagaaaactgc

SEQ ID NO: 729666 - DNA, 25 bp, Homo sapien
ccttggacaatagggagtcacagtc

SEQ ID NO: 729667 - DNA, 25 bp, Homo sapien
ccagaaactgcaggatatacaggct

SEQ ID NO: 729668 - DNA, 25 bp, Homo sapien
ggagactcacaatgcccagaaactg

SEQ ID NO: 729669 - DNA, 25 bp, Homo sapien
ggatcatctttgaaggccctatctg

SEQ ID NO: 729670 - DNA, 25 bp, Homo sapien
acagcctttgtcgttcaactgctga

SEQ ID NO: 729671 - DNA, 25 bp, Homo sapien
gcctttgtcgttcaactgctgacaa

SEQ ID NO: 729672 - DNA, 25 bp, Homo sapien
tgtcgttcaactgctgacaatggtc

SEQ ID NO: 729673 - DNA, 25 bp, Homo sapien
tcacagcctttgtcgttcaactgct

SEQ ID NO: 729674 - DNA, 25 bp, Homo sapien
ggtgagctcatcatgagaatcagag

SEQ ID NO: 729675 - DNA, 25 bp, Homo sapien
tcatcatgagaatcagagggactgc

SEQ ID NO: 729676 - DNA, 25 bp, Homo sapien
gaatcagagggactgctaagactag

SEQ ID NO: 729677 - DNA, 25 bp, Homo sapien
ggactgctaagactaggatgcagat

SEQ ID NO: 729678 - DNA, 25 bp, Homo sapien
ccgtaacatcacagttaaacgaact

SEQ ID NO: 729679 - DNA, 25 bp, Homo sapien
caacaccgtaacatcacagttaaac

SEQ ID NO: 729680 - DNA, 25 bp, Homo sapien
caccgtaacatcacagttaaacgaa

SEQ ID NO: 729681 - DNA, 25 bp, Homo sapien
cgtaacatcacagttaaacgaacta

SEQ ID NO: 729682 - DNA, 25 bp, Homo sapien
ggtcagatcactcacgaagggaagc

SEQ ID NO: 729683 - DNA, 25 bp, Homo sapien
aaagaaaggtcagatcactcacgaa

SEQ ID NO: 729684 - DNA, 25 bp, Homo sapien
aaaggtcagatcactcacgaaggga

SEQ ID NO: 729685 - DNA, 25 bp, Homo sapien
agaaaggtcagatcactcacgaagg

SEQ ID NO: 729686 - DNA, 25 bp, Homo sapien
tcagtatgaaaccacaagtcttgca

SEQ ID NO: 729687 - DNA, 25 bp, Homo sapien
tgaaggtcctcagaaacgtagtata

SEQ ID NO: 729688 - DNA, 25 bp, Homo sapien
cgctgtgctagctgaagaagagcca

SEQ ID NO: 729689 - DNA, 25 bp, Homo sapien
taagcattgaaacagggagaagttc

SEQ ID NO: 729690 - DNA, 25 bp, Homo sapien
ggatagttacaggtcacggttgaga

SEQ ID NO: 729691 - DNA, 25 bp, Homo sapien
cagagctgcgtttaagtccttgggc

SEQ ID NO: 729692 - DNA, 25 bp, Homo sapien
taagaacatagaaccccaacaggat

SEQ ID NO: 729693 - DNA, 25 bp, Homo sapien
gatgacaggtgtttccagagctgcg

SEQ ID NO: 729694 - DNA, 25 bp, Homo sapien
caaactctggaattaaggtacctgg

SEQ ID NO: 729695 - DNA, 25 bp, Homo sapien
tcctgacaactagcagaactgtggt

SEQ ID NO: 729696 - DNA, 25 bp, Homo sapien
tgatagagcaagataactaacccct

SEQ ID NO: 729697 - DNA, 25 bp, Homo sapien
caagagctagatttactgtaagacc

SEQ ID NO: 729698 - DNA, 25 bp, Homo sapien
cctcacagtaaatacccatgattcc

SEQ ID NO: 729699 - DNA, 25 bp, Homo sapien
ctcacagtaaatacccatgattcct

SEQ ID NO: 729700 - DNA, 25 bp, Homo sapien
tcacagtaaatacccatgattcctt

SEQ ID NO: 729701 - DNA, 25 bp, Homo sapien
tccccagaatcagcatctttgatcc

SEQ ID NO: 729702 - DNA, 25 bp, Homo sapien
gctcagagactcagcaaagattatc

SEQ ID NO: 729703 - DNA, 25 bp, Homo sapien
gcaaagattatctccccagaatcag

SEQ ID NO: 729704 - DNA, 25 bp, Homo sapien
tacccatccaacatggtgctcagag

SEQ ID NO: 729705 - DNA, 25 bp, Homo sapien
tgcttcaaacaataagttacatggc

SEQ ID NO: 729706 - DNA, 25 bp, Homo sapien
gttacatggccgatactcaattaag

SEQ ID NO: 729707 - DNA, 25 bp, Homo sapien
gactattccctgatgctgtaactgc

SEQ ID NO: 729708 - DNA, 25 bp, Homo sapien
ggaaaaatcaggctcatcgtgccat

SEQ ID NO: 729709 - DNA, 25 bp, Homo sapien
tctccataacttttgagttgtaagg

SEQ ID NO: 729710 - DNA, 25 bp, Homo sapien
ctgaagttactcaaggccatttttg

SEQ ID NO: 729711 - DNA, 25 bp, Homo sapien
aatttttagtccaaagctgcttcta

SEQ ID NO: 729712 - DNA, 25 bp, Homo sapien
tagaacaattttcagcctatagata

SEQ ID NO: 729713 - DNA, 25 bp, Homo sapien
gagtacccctgcataccagaaagtg

SEQ ID NO: 729714 - DNA, 25 bp, Homo sapien
tatctaaaacaacgcatgatcctgg

SEQ ID NO: 729715 - DNA, 25 bp, Homo sapien
cacaggaccatttgagccactgatt

SEQ ID NO: 729716 - DNA, 25 bp, Homo sapien
caaagattggtcatggagagtaccc

SEQ ID NO: 729717 - DNA, 25 bp, Homo sapien
gatacaaatgactaggtccatccca

SEQ ID NO: 729718 - DNA, 25 bp, Homo sapien
ttgtttgttgcaggtgatgttaagg

SEQ ID NO: 729719 - DNA, 25 bp, Homo sapien
ggcttcagattaggggagtcatttt

SEQ ID NO: 729720 - DNA, 25 bp, Homo sapien
ccataaattaaaattggcttcagat

SEQ ID NO: 729721 - DNA, 25 bp, Homo sapien
tgggagttagctcacctacagggag

SEQ ID NO: 729722 - DNA, 25 bp, Homo sapien
cgtgacacttattcttccaggagga

SEQ ID NO: 729723 - DNA, 25 bp, Homo sapien
tgtaaccggccatgctgaattgctg

SEQ ID NO: 729724 - DNA, 25 bp, Homo sapien
tttatggaaggagcactactagcgt

SEQ ID NO: 729725 - DNA, 25 bp, Homo sapien
cgttcgaaggtgttgtgactccagc

SEQ ID NO: 729726 - DNA, 25 bp, Homo sapien
gcctgctgctggaatacgttcgaag

SEQ ID NO: 729727 - DNA, 25 bp, Homo sapien
gcattgtaatagcactagaggcacc

SEQ ID NO: 729728 - DNA, 25 bp, Homo sapien
tagaggcacctttcggcacatcagg

SEQ ID NO: 729729 - DNA, 25 bp, Homo sapien
taaagtggggagaaacgcagatgcc

SEQ ID NO: 729730 - DNA, 25 bp, Homo sapien
gcctcttcttgggactggtgtagtg

SEQ ID NO: 729731 - DNA, 25 bp, Homo sapien
ggatgcagcttgatcgccgtaaagt

SEQ ID NO: 729732 - DNA, 25 bp, Homo sapien
tcaggtagtcctaaacactagccca

SEQ ID NO: 729733 - DNA, 25 bp, Homo sapien
catcttgcctccctaatcttgctgt

SEQ ID NO: 729734 - DNA, 25 bp, Homo sapien
ccctaatcttgctgtatctatcttc

SEQ ID NO: 729735 - DNA, 25 bp, Homo sapien
tgcctccctaatcttgctgtatcta

SEQ ID NO: 729736 - DNA, 25 bp, Homo sapien
tctaatcctgaacatcttgcctccc

SEQ ID NO: 729737 - DNA, 25 bp, Homo sapien
gcctctgatgtgacgataccacaag

SEQ ID NO: 729738 - DNA, 25 bp, Homo sapien
tacaggttggaagacatatgaaccc

SEQ ID NO: 729739 - DNA, 25 bp, Homo sapien
tgaacccatttgatagcatagcctc

SEQ ID NO: 729740 - DNA, 25 bp, Homo sapien
taccacaaggggatgcctgctggca

SEQ ID NO: 729741 - DNA, 25 bp, Homo sapien
cacactgtgaatttacgaaatgcca

SEQ ID NO: 729742 - DNA, 25 bp, Homo sapien
gcagacttccaacctttgctgtagc

SEQ ID NO: 729743 - DNA, 25 bp, Homo sapien
tgtcttatctaatgaggccaaccac

SEQ ID NO: 729744 - DNA, 25 bp, Homo sapien
gaaatgccaatgaatcgtacactaa

SEQ ID NO: 729745 - DNA, 25 bp, Homo sapien
cttaaaatgagtcttgcatataatt

SEQ ID NO: 729746 - DNA, 25 bp, Homo sapien
ggccttaaaatgagtcttgcatata

SEQ ID NO: 729747 - DNA, 25 bp, Homo sapien
aaggccttaaaatgagtcttgcata

SEQ ID NO: 729748 - DNA, 25 bp, Homo sapien
gccttaaaatgagtcttgcatataa

SEQ ID NO: 729749 - DNA, 25 bp, Homo sapien
actggtataatagcactgtcctcaa

SEQ ID NO: 729750 - DNA, 25 bp, Homo sapien
tgcgagaaggaatgagacatgaacc

SEQ ID NO: 729751 - DNA, 25 bp, Homo sapien
tgagaagacttttacagaccaatcc

SEQ ID NO: 729752 - DNA, 25 bp, Homo sapien
gaaagtgacacctcaaaaactgcca

SEQ ID NO: 729753 - DNA, 25 bp, Homo sapien
cacaggttgctagatcagatttgac

SEQ ID NO: 729754 - DNA, 25 bp, Homo sapien
taaaactggcttgttggccgggcat

SEQ ID NO: 729755 - DNA, 25 bp, Homo sapien
taaaagtgggctcgaaaggtgatct

SEQ ID NO: 729756 - DNA, 25 bp, Homo sapien
tgggaactcactataaaggcacagg

SEQ ID NO: 729757 - DNA, 25 bp, Homo sapien
ggatgaggacctggtaaattcccaa

SEQ ID NO: 729758 - DNA, 25 bp, Homo sapien
gggatgaggacctggtaaattccca

SEQ ID NO: 729759 - DNA, 25 bp, Homo sapien
caagcaagattctgagtccacaggg

SEQ ID NO: 729760 - DNA, 25 bp, Homo sapien
ttctgagtccacagggatgaggacc

SEQ ID NO: 729761 - DNA, 25 bp, Homo sapien
tgccactgtttcttcagtgccgcag

SEQ ID NO: 729762 - DNA, 25 bp, Homo sapien
gtgccgcaggcgatcgctcctactt

SEQ ID NO: 729763 - DNA, 25 bp, Homo sapien
gccactgtttcttcagtgccgcagg

SEQ ID NO: 729764 - DNA, 25 bp, Homo sapien
ttcagtgccgcaggcgatcgctcct

SEQ ID NO: 729765 - DNA, 25 bp, Homo sapien
gctctgcttgtctgccccatctcgt

SEQ ID NO: 729766 - DNA, 25 bp, Homo sapien
ttttgctggtaaaggcacatgcact

SEQ ID NO: 729767 - DNA, 25 bp, Homo sapien
ttctctgccagcttgaccacttggc

SEQ ID NO: 729768 - DNA, 25 bp, Homo sapien
tttaagacatggatcagttgccttc

SEQ ID NO: 729769 - DNA, 25 bp, Homo sapien
cgatgttgctagtgaagtgaaggtt

SEQ ID NO: 729770 - DNA, 25 bp, Homo sapien
tcaagatggtgcttcctcttgtttg

SEQ ID NO: 729771 - DNA, 25 bp, Homo sapien
cctcttgtttgtacgatgttgctag

SEQ ID NO: 729772 - DNA, 25 bp, Homo sapien
ggtgcttcctcttgtttgtacgatg

SEQ ID NO: 729773 - DNA, 25 bp, Homo sapien
aagaattaagataccattgggccac

SEQ ID NO: 729774 - DNA, 25 bp, Homo sapien
aattaagataccattgggccacggg

SEQ ID NO: 729775 - DNA, 25 bp, Homo sapien
accattgggccacgggtactcacaa

SEQ ID NO: 729776 - DNA, 25 bp, Homo sapien
taagataccattgggccacgggtac

SEQ ID NO: 729777 - DNA, 25 bp, Homo sapien
tattagatagtcagagcccacacag

SEQ ID NO: 729778 - DNA, 25 bp, Homo sapien
tctgactgcgtgtcatagaaagcac

SEQ ID NO: 729779 - DNA, 25 bp, Homo sapien
acaggaaggaggcaagtctgactgc

SEQ ID NO: 729780 - DNA, 25 bp, Homo sapien
taaactgtctgcaaatcagaacagg

SEQ ID NO: 729781 - DNA, 25 bp, Homo sapien
gtggcttttgcatcttcaggaaaga

SEQ ID NO: 729782 - DNA, 25 bp, Homo sapien
ctgtggcttttgcatcttcaggaaa

SEQ ID NO: 729783 - DNA, 25 bp, Homo sapien
atctgtggcttttgcatcttcagga

SEQ ID NO: 729784 - DNA, 25 bp, Homo sapien
aggaaagaaagaagaaaagacacag

SEQ ID NO: 729785 - DNA, 25 bp, Homo sapien
attgccctgctactgaacgacttta

SEQ ID NO: 729786 - DNA, 25 bp, Homo sapien
cagttactatagctggtatgcaggc

SEQ ID NO: 729787 - DNA, 25 bp, Homo sapien
cagatgcaatatcagttttcccaac

SEQ ID NO: 729788 - DNA, 25 bp, Homo sapien
gaagcctaatagactacagaaacca

SEQ ID NO: 729789 - DNA, 25 bp, Homo sapien
acttgctaattttatcagtccctcc

SEQ ID NO: 729790 - DNA, 25 bp, Homo sapien
taatattaaagagccacaaggaagg

SEQ ID NO: 729791 - DNA, 25 bp, Homo sapien
atcagtccctcccactggttaaata

SEQ ID NO: 729792 - DNA, 25 bp, Homo sapien
aagtggttagtcaacttgctaattt

SEQ ID NO: 729793 - DNA, 25 bp, Homo sapien
tccctctttgccaaagtgtgctgtg

SEQ ID NO: 729794 - DNA, 25 bp, Homo sapien
tgtgctgtggtttcgcaaactagct

SEQ ID NO: 729795 - DNA, 25 bp, Homo sapien
cctctttgccaaagtgtgctgtggt

SEQ ID NO: 729796 - DNA, 25 bp, Homo sapien
ggtttcgcaaactagctcagtcctt

SEQ ID NO: 729797 - DNA, 25 bp, Homo sapien
gcatgacaagtttatctttccacag

SEQ ID NO: 729798 - DNA, 25 bp, Homo sapien
cttttgcttccctccgcatgacaag

SEQ ID NO: 729799 - DNA, 25 bp, Homo sapien
gttgctactgttactgattggaaaa

SEQ ID NO: 729800 - DNA, 25 bp, Homo sapien
gctactgttactgattggaaaacct

SEQ ID NO: 729801 - DNA, 25 bp, Homo sapien
gacgtctctaagtctctatcttgaa

SEQ ID NO: 729802 - DNA, 25 bp, Homo sapien
tgaattgcccagacagagcaagctc

SEQ ID NO: 729803 - DNA, 25 bp, Homo sapien
ccagctctactgctcaacaatgacg

SEQ ID NO: 729804 - DNA, 25 bp, Homo sapien
taagtctctatcttgaattgcccag

SEQ ID NO: 729805 - DNA, 25 bp, Homo sapien
ctctaacctctcaaggtgaactaaa

SEQ ID NO: 729806 - DNA, 25 bp, Homo sapien
tctttctctaacctctcaaggtgaa

SEQ ID NO: 729807 - DNA, 25 bp, Homo sapien
ccatgcatttcattcaatgataacc

SEQ ID NO: 729808 - DNA, 25 bp, Homo sapien
ctgttttacaaatggcatcaagcca

SEQ ID NO: 729809 - DNA, 25 bp, Homo sapien
ggtagccttttctccgcactgcttc

SEQ ID NO: 729810 - DNA, 25 bp, Homo sapien
cactgcttcagatctacattgcaga

SEQ ID NO: 729811 - DNA, 25 bp, Homo sapien
tgcagagcccctgaatgactaattc

SEQ ID NO: 729812 - DNA, 25 bp, Homo sapien
ctaagatgaaggtggattggtagcc

SEQ ID NO: 729813 - DNA, 25 bp, Homo sapien
tatctagagcaggagcgtccaatct

SEQ ID NO: 729814 - DNA, 25 bp, Homo sapien
ttttttagtggcttatacaacctgc

SEQ ID NO: 729815 - DNA, 25 bp, Homo sapien
tccaccaggagtggaaccaattaaa

SEQ ID NO: 729816 - DNA, 25 bp, Homo sapien
aaagaaaacctgacatgtatagaag

SEQ ID NO: 729817 - DNA, 25 bp, Homo sapien
gggcagcatggatcattttcataca

SEQ ID NO: 729818 - DNA, 25 bp, Homo sapien
gcatatgtgaacgtccagggcagca

SEQ ID NO: 729819 - DNA, 25 bp, Homo sapien
aaatcagggaccatggcatctggat

SEQ ID NO: 729820 - DNA, 25 bp, Homo sapien
gattcactagttggggacagcagag

SEQ ID NO: 729821 - DNA, 25 bp, Homo sapien
gaccgaaaactcaggtgatgaagaa

SEQ ID NO: 729822 - DNA, 25 bp, Homo sapien
tgggtgaccgaaaactcaggtgatg

SEQ ID NO: 729823 - DNA, 25 bp, Homo sapien
tcatgggtgaccgaaaactcaggtg

SEQ ID NO: 729824 - DNA, 25 bp, Homo sapien
agaattcatgggtgaccgaaaactc

SEQ ID NO: 729825 - DNA, 25 bp, Homo sapien
tgtataaccaaattacagattcaac

SEQ ID NO: 729826 - DNA, 25 bp, Homo sapien
gagtattgattctgtccacttagat

SEQ ID NO: 729827 - DNA, 25 bp, Homo sapien
gaaagaggataggaggatagtaaaa

SEQ ID NO: 729828 - DNA, 25 bp, Homo sapien
ggccatctaattaaactcacaagag

SEQ ID NO: 729829 - DNA, 25 bp, Homo sapien
ggcaggcttattactatctctagaa

SEQ ID NO: 729830 - DNA, 25 bp, Homo sapien
ctctgcaaatgggacactatccctt

SEQ ID NO: 729831 - DNA, 25 bp, Homo sapien
tggctgggctatgatctggagataa

SEQ ID NO: 729832 - DNA, 25 bp, Homo sapien
tctagaatacaatggcctcctcacc

SEQ ID NO: 729833 - DNA, 25 bp, Homo sapien
tggctctcttgtgatctgtgacaga

SEQ ID NO: 729834 - DNA, 25 bp, Homo sapien
gatctccagatgacttcacaggtac

SEQ ID NO: 729835 - DNA, 25 bp, Homo sapien
gacaattgcaaacacaggtccatca

SEQ ID NO: 729836 - DNA, 25 bp, Homo sapien
tctctcaacatccaaaggtgagggt

SEQ ID NO: 729837 - DNA, 25 bp, Homo sapien
cttactattatccatgactgtctgc

SEQ ID NO: 729838 - DNA, 25 bp, Homo sapien
tttctctctcctacagtgaccccac

SEQ ID NO: 729839 - DNA, 25 bp, Homo sapien
ttcaatcctgttctcgaatgtcggc

SEQ ID NO: 729840 - DNA, 25 bp, Homo sapien
tcatttcccatatgcttattggagg

SEQ ID NO: 729841 - DNA, 25 bp, Homo sapien
gaggaccacttgatcactggagttt

SEQ ID NO: 729842 - DNA, 25 bp, Homo sapien
cttgatcactggagtttgataccag

SEQ ID NO: 729843 - DNA, 25 bp, Homo sapien
cacttgatcactggagtttgatacc

SEQ ID NO: 729844 - DNA, 25 bp, Homo sapien
gaccacttgatcactggagtttgat

SEQ ID NO: 729845 - DNA, 25 bp, Homo sapien
caactttggttggtataggctcttc

SEQ ID NO: 729846 - DNA, 25 bp, Homo sapien
catcccaagatgaagtgtcgcacat

SEQ ID NO: 729847 - DNA, 25 bp, Homo sapien
taaaaacaagttcctcagaaataca

SEQ ID NO: 729848 - DNA, 25 bp, Homo sapien
taggttgaatctatgcagctgtcat

SEQ ID NO: 729849 - DNA, 25 bp, Homo sapien
tcttttacaaaggagcaaattgatg

SEQ ID NO: 729850 - DNA, 25 bp, Homo sapien
tttttccaattggtatggcagccta

SEQ ID NO: 729851 - DNA, 25 bp, Homo sapien
aaaaggtttctcagccatacttcat

SEQ ID NO: 729852 - DNA, 25 bp, Homo sapien
gctgaaagccaccttagaacacttc

SEQ ID NO: 729853 - DNA, 25 bp, Homo sapien
tcacccaaatggctaggattgcagc

SEQ ID NO: 729854 - DNA, 25 bp, Homo sapien
aactctgcttatgtatgtggactgc

SEQ ID NO: 729855 - DNA, 25 bp, Homo sapien
tatttacagcagagaggacagtata

SEQ ID NO: 729856 - DNA, 25 bp, Homo sapien
tgacagtacatggtatgacactacc

SEQ ID NO: 729857 - DNA, 25 bp, Homo sapien
tttaaactcatgtcgtttctgctgt

SEQ ID NO: 729858 - DNA, 25 bp, Homo sapien
ctgctgtgtttggaacataaatgta

SEQ ID NO: 729859 - DNA, 25 bp, Homo sapien
ctttaaactcatgtcgtttctgctg

SEQ ID NO: 729860 - DNA, 25 bp, Homo sapien
tttggaacataaatgtactatacat

SEQ ID NO: 729861 - DNA, 25 bp, Homo sapien
tgacccctacagtataatagatgcc

SEQ ID NO: 729862 - DNA, 25 bp, Homo sapien
gcttatagtggacagaacttgggct

SEQ ID NO: 729863 - DNA, 25 bp, Homo sapien
tgggcttgaagacagatatacaggt

SEQ ID NO: 729864 - DNA, 25 bp, Homo sapien
gatgccagtaagaaccacagctcag

SEQ ID NO: 729865 - DNA, 25 bp, Homo sapien
ctttttcacagaggtcaggttttgg

SEQ ID NO: 729866 - DNA, 25 bp, Homo sapien
tcacagaggtcaggttttgggatca

SEQ ID NO: 729867 - DNA, 25 bp, Homo sapien
ttttcacagaggtcaggttttggga

SEQ ID NO: 729868 - DNA, 25 bp, Homo sapien
tgggatcaaggcaaagggaaagtgg

SEQ ID NO: 729869 - DNA, 25 bp, Homo sapien
tttgtattgcctgttttagatcctt

SEQ ID NO: 729870 - DNA, 25 bp, Homo sapien
tgaagggcatttccctcaccacatc

SEQ ID NO: 729871 - DNA, 25 bp, Homo sapien
gccccgatgtgttgactgtctaaag

SEQ ID NO: 729872 - DNA, 25 bp, Homo sapien
tgtctaaagctttttgtattgcctg

SEQ ID NO: 729873 - DNA, 25 bp, Homo sapien
tcaaaatgtcctgccttgatcagtg

SEQ ID NO: 729874 - DNA, 25 bp, Homo sapien
tcataacatgacaaggcaattcctc

SEQ ID NO: 729875 - DNA, 25 bp, Homo sapien
caatcgcttgcagtaagatccctct

SEQ ID NO: 729876 - DNA, 25 bp, Homo sapien
cagcccttggaaatcacgagtctac

SEQ ID NO: 729877 - DNA, 25 bp, Homo sapien
gtgctccatttgctccccctctggt

SEQ ID NO: 729878 - DNA, 25 bp, Homo sapien
aatcagtgaggagagctacgacacc

SEQ ID NO: 729879 - DNA, 25 bp, Homo sapien
gtgaggagagctacgacacctagga

SEQ ID NO: 729880 - DNA, 25 bp, Homo sapien
ggagagctacgacacctaggagaat

SEQ ID NO: 729881 - DNA, 25 bp, Homo sapien
aaaaatatgaaaagcactctataat

SEQ ID NO: 729882 - DNA, 25 bp, Homo sapien
cttgtgactccagttctttttgtgg

SEQ ID NO: 729883 - DNA, 25 bp, Homo sapien
tgaaaagcactctataattagatat

SEQ ID NO: 729884 - DNA, 25 bp, Homo sapien
atacttgtgactccagttctttttg

SEQ ID NO: 729885 - DNA, 25 bp, Homo sapien
tatccatctatctagagagacagag

SEQ ID NO: 729886 - DNA, 25 bp, Homo sapien
gttaactctgaatgtcaagtccagc

SEQ ID NO: 729887 - DNA, 25 bp, Homo sapien
ccagagtgagaacaggatttaagct

SEQ ID NO: 729888 - DNA, 25 bp, Homo sapien
tggatgcgcaatacacagaggtcaa

SEQ ID NO: 729889 - DNA, 25 bp, Homo sapien
ccccacacgcaattcacttgccaca

SEQ ID NO: 729890 - DNA, 25 bp, Homo sapien
tacttccccacacgcaattcacttg

SEQ ID NO: 729891 - DNA, 25 bp, Homo sapien
taagtacttccccacacgcaattca

SEQ ID NO: 729892 - DNA, 25 bp, Homo sapien
ctctaagtacttccccacacgcaat

SEQ ID NO: 729893 - DNA, 25 bp, Homo sapien
agtttctcataactgtctccataca

SEQ ID NO: 729894 - DNA, 25 bp, Homo sapien
tcaactatcatcctccctccagttt

SEQ ID NO: 729895 - DNA, 25 bp, Homo sapien
ccatacaccacagcattttaccagg

SEQ ID NO: 729896 - DNA, 25 bp, Homo sapien
tttctcataactgtctccatacacc

SEQ ID NO: 729897 - DNA, 25 bp, Homo sapien
caaaccttgcacgaagcctgctagg

SEQ ID NO: 729898 - DNA, 25 bp, Homo sapien
gaatccactacccacatggcacttt

SEQ ID NO: 729899 - DNA, 25 bp, Homo sapien
tattaactggcgaaggaagatcctc

SEQ ID NO: 729900 - DNA, 25 bp, Homo sapien
aagggacttgcagttcgttctagaa

SEQ ID NO: 729901 - DNA, 25 bp, Homo sapien
gcaccaatgtggtgtgtgctcagca

SEQ ID NO: 729902 - DNA, 25 bp, Homo sapien
tgaggcgaggagctacacagatatc

SEQ ID NO: 729903 - DNA, 25 bp, Homo sapien
tttaggataaaccagggctccaatg

SEQ ID NO: 729904 - DNA, 25 bp, Homo sapien
ctcagcatgtggatggtgcagcaag

SEQ ID NO: 729905 - DNA, 25 bp, Homo sapien
cttcttgaactatcaacacatcaaa

SEQ ID NO: 729906 - DNA, 25 bp, Homo sapien
cagaatttcaggagccttgcagtcc

SEQ ID NO: 729907 - DNA, 25 bp, Homo sapien
tatgccacaaatcttgtaggtttgg

SEQ ID NO: 729908 - DNA, 25 bp, Homo sapien
agccttgcagtccaagttgttttcc

SEQ ID NO: 729909 - DNA, 25 bp, Homo sapien
tggttggctacatccccaacccagt

SEQ ID NO: 729910 - DNA, 25 bp, Homo sapien
tgtgacccaactgtgctgtgaatct

SEQ ID NO: 729911 - DNA, 25 bp, Homo sapien
ggtgtaattagatggttggctacat

SEQ ID NO: 729912 - DNA, 25 bp, Homo sapien
ctgtgctgtgaatctattggtgtaa

SEQ ID NO: 729913 - DNA, 25 bp, Homo sapien
gaataagacccatccaggaacaagg

SEQ ID NO: 729914 - DNA, 25 bp, Homo sapien
gaagtgatctaactcccatctggca

SEQ ID NO: 729915 - DNA, 25 bp, Homo sapien
aatataatgggtcagctgcacaggg

SEQ ID NO: 729916 - DNA, 25 bp, Homo sapien
catctgaggcgtgtatggccataca

SEQ ID NO: 729917 - DNA, 25 bp, Homo sapien
aatagcacccatggtacaaggttcc

SEQ ID NO: 729918 - DNA, 25 bp, Homo sapien
gcacccatggtacaaggttccacat

SEQ ID NO: 729919 - DNA, 25 bp, Homo sapien
catggtacaaggttccacatgaggt

SEQ ID NO: 729920 - DNA, 25 bp, Homo sapien
cagaatagcacccatggtacaaggt

SEQ ID NO: 729921 - DNA, 25 bp, Homo sapien
cagatctagtcagccgtcttagcct

SEQ ID NO: 729922 - DNA, 25 bp, Homo sapien
tgatggtcctgccacatttaagtcc

SEQ ID NO: 729923 - DNA, 25 bp, Homo sapien
catttaagtcccctagaggcagatc

SEQ ID NO: 729924 - DNA, 25 bp, Homo sapien
tagaggcagatctagtcagccgtct

SEQ ID NO: 729925 - DNA, 25 bp, Homo sapien
ctgtgtagatcattacatagtagaa

SEQ ID NO: 729926 - DNA, 25 bp, Homo sapien
tgaattattgtaacatctcaaaact

SEQ ID NO: 729927 - DNA, 25 bp, Homo sapien
gaattattgtaacatctcaaaactg

SEQ ID NO: 729928 - DNA, 25 bp, Homo sapien
cattacatagtagaatatattggcc

SEQ ID NO: 729929 - DNA, 25 bp, Homo sapien
tctccctggttctgtctaacggcca

SEQ ID NO: 729930 - DNA, 25 bp, Homo sapien
cggccatactggcttctattacagt

SEQ ID NO: 729931 - DNA, 25 bp, Homo sapien
tgtctaacggccatactggcttcta

SEQ ID NO: 729932 - DNA, 25 bp, Homo sapien
ggttctgtctaacggccatactggc

SEQ ID NO: 729933 - DNA, 25 bp, Homo sapien
cggtgcccttctcctatctgtgtct

SEQ ID NO: 729934 - DNA, 25 bp, Homo sapien
gcccttctcctatctgtgtctgtgc

SEQ ID NO: 729935 - DNA, 25 bp, Homo sapien
tcctgcaagtggctccagccggtgc

SEQ ID NO: 729936 - DNA, 25 bp, Homo sapien
aagtggctccagccggtgcccttct

SEQ ID NO: 729937 - DNA, 25 bp, Homo sapien
gctgctagggttttgttgcaaaaac

SEQ ID NO: 729938 - DNA, 25 bp, Homo sapien
ttcaggctgctagggttttgttgca

SEQ ID NO: 729939 - DNA, 25 bp, Homo sapien
ctggcttagagttcttcaggctgct

SEQ ID NO: 729940 - DNA, 25 bp, Homo sapien
gagttcttcaggctgctagggtttt

SEQ ID NO: 729941 - DNA, 25 bp, Homo sapien
ctacaagcaggtgggaaataggaac

SEQ ID NO: 729942 - DNA, 25 bp, Homo sapien
tcagaatacgtagaaaattattaag

SEQ ID NO: 729943 - DNA, 25 bp, Homo sapien
caggtgggaaataggaacgtgcttc

SEQ ID NO: 729944 - DNA, 25 bp, Homo sapien
ctttgtcagaatacgtagaaaatta

SEQ ID NO: 729945 - DNA, 25 bp, Homo sapien
agctctctggagtttaggttatccc

SEQ ID NO: 729946 - DNA, 25 bp, Homo sapien
agaaaggacagagtggatgctatag

SEQ ID NO: 729947 - DNA, 25 bp, Homo sapien
tctctggagtttaggttatcccgga

SEQ ID NO: 729948 - DNA, 25 bp, Homo sapien
cagaaaggacagagtggatgctata

SEQ ID NO: 729949 - DNA, 25 bp, Homo sapien
aacaggagtcactctcgtaaattgt

SEQ ID NO: 729950 - DNA, 25 bp, Homo sapien
gaaaaacaggagtcactctcgtaaa

SEQ ID NO: 729951 - DNA, 25 bp, Homo sapien
aggaaaaacaggagtcactctcgta

SEQ ID NO: 729952 - DNA, 25 bp, Homo sapien
aaaacaggagtcactctcgtaaatt

SEQ ID NO: 729953 - DNA, 25 bp, Homo sapien
agccaagagctgctctcgtccagcc

SEQ ID NO: 729954 - DNA, 25 bp, Homo sapien
gagccaagagctgctctcgtccagc

SEQ ID NO: 729955 - DNA, 25 bp, Homo sapien
tgagccaagagctgctctcgtccag

SEQ ID NO: 729956 - DNA, 25 bp, Homo sapien
ctgagccaagagctgctctcgtcca

SEQ ID NO: 729957 - DNA, 25 bp, Homo sapien
acagtaatggaagggatctaagtta

SEQ ID NO: 729958 - DNA, 25 bp, Homo sapien
tgtccctaagcagactgaatatgca

SEQ ID NO: 729959 - DNA, 25 bp, Homo sapien
gctgtccctaagcagactgaatatg

SEQ ID NO: 729960 - DNA, 25 bp, Homo sapien
acagaaacagtaatggaagggatct

SEQ ID NO: 729961 - DNA, 25 bp, Homo sapien
gaatcctcaggaactggtcaacttg

SEQ ID NO: 729962 - DNA, 25 bp, Homo sapien
tagtgagaatcctcaggaactggtc

SEQ ID NO: 729963 - DNA, 25 bp, Homo sapien
gggaatcttagtgagaatcctcagg

SEQ ID NO: 729964 - DNA, 25 bp, Homo sapien
ggaactggtcaacttgccagtaaaa

SEQ ID NO: 729965 - DNA, 25 bp, Homo sapien
gcctagctaacatctattcctcctg

SEQ ID NO: 729966 - DNA, 25 bp, Homo sapien
gcaaatactgctagtgcctagctaa

SEQ ID NO: 729967 - DNA, 25 bp, Homo sapien
gagcaggtttaggtatcctgccttc

SEQ ID NO: 729968 - DNA, 25 bp, Homo sapien
ggttcttcccaatagaaacttgagc

SEQ ID NO: 729969 - DNA, 25 bp, Homo sapien
aaacagatatattatcttcatgaaa

SEQ ID NO: 729970 - DNA, 25 bp, Homo sapien
taatagcttagagagatccagtttc

SEQ ID NO: 729971 - DNA, 25 bp, Homo sapien
gccacaatgttgactctccttcctt

SEQ ID NO: 729972 - DNA, 25 bp, Homo sapien
tactaagaaaggcaatctattcaat

SEQ ID NO: 729973 - DNA, 25 bp, Homo sapien
ggcttcttctaacaatagacagtac

SEQ ID NO: 729974 - DNA, 25 bp, Homo sapien
gaaggacaccacatatcccaagcta

SEQ ID NO: 729975 - DNA, 25 bp, Homo sapien
caacttagttgaagaagaatggaac

SEQ ID NO: 729976 - DNA, 25 bp, Homo sapien
tccttattgccaacttactgggaaa

SEQ ID NO: 729977 - DNA, 25 bp, Homo sapien
ccaacactcatttgaggcagaggcc

SEQ ID NO: 729978 - DNA, 25 bp, Homo sapien
acagacatgtggacatctgcaggtt

SEQ ID NO: 729979 - DNA, 25 bp, Homo sapien
ggttttaatgcatttaatgatcttc

SEQ ID NO: 729980 - DNA, 25 bp, Homo sapien
ggacatctgcaggttttaatgcatt

SEQ ID NO: 729981 - DNA, 25 bp, Homo sapien
tgtggacatctgcaggttttaatgc

SEQ ID NO: 729982 - DNA, 25 bp, Homo sapien
gataacgcctaacaagctaatctta

SEQ ID NO: 729983 - DNA, 25 bp, Homo sapien
gatgccataagatagaaataccgag

SEQ ID NO: 729984 - DNA, 25 bp, Homo sapien
taactcatatggcatgataacgcct

SEQ ID NO: 729985 - DNA, 25 bp, Homo sapien
taatcttagacctgcgatgccataa

SEQ ID NO: 729986 - DNA, 25 bp, Homo sapien
ggttagcagactcaaaagccttcac

SEQ ID NO: 729987 - DNA, 25 bp, Homo sapien
tagctaccctagttaatactgccct

SEQ ID NO: 729988 - DNA, 25 bp, Homo sapien
aagccttcacttaactaccctagct

SEQ ID NO: 729989 - DNA, 25 bp, Homo sapien
gaaagataccctttacaggttagca

SEQ ID NO: 729990 - DNA, 25 bp, Homo sapien
ttctcaagctacactgtgaatccac

SEQ ID NO: 729991 - DNA, 25 bp, Homo sapien
catttttctcaagctacactgtgaa

SEQ ID NO: 729992 - DNA, 25 bp, Homo sapien
gaggctagagaaaatcgtagctgac

SEQ ID NO: 729993 - DNA, 25 bp, Homo sapien
ccaggagtttggctcggtctcagtc

SEQ ID NO: 729994 - DNA, 25 bp, Homo sapien
gaagcatttaaagggtcatacacac

SEQ ID NO: 729995 - DNA, 25 bp, Homo sapien
ttgttaaagcattggaggtcattcc

SEQ ID NO: 729996 - DNA, 25 bp, Homo sapien
tattcaggcagtcttaaattagcta

SEQ ID NO: 729997 - DNA, 25 bp, Homo sapien
aatgcagacacatatcccaggaaat

SEQ ID NO: 729998 - DNA, 25 bp, Homo sapien
tggtgaagcataaagataatctctg

SEQ ID NO: 729999 - DNA, 25 bp, Homo sapien
tcttgaaatattgactaggacatcc

SEQ ID NO: 730000 - DNA, 25 bp, Homo sapien
tcattattaacagggcaacattcac

SEQ ID NO: 730001 - DNA, 25 bp, Homo sapien
tatgaaaaccactcgaatccaacag

SEQ ID NO: 730002 - DNA, 25 bp, Homo sapien
cagtatgccttgttccttcatagat

SEQ ID NO: 730003 - DNA, 25 bp, Homo sapien
ctggaatcagtatgccttgttcctt

SEQ ID NO: 730004 - DNA, 25 bp, Homo sapien
gaatcagtatgccttgttccttcat

SEQ ID NO: 730005 - DNA, 25 bp, Homo sapien
atcagtatgccttgttccttcatag

SEQ ID NO: 730006 - DNA, 25 bp, Homo sapien
tagtcaggagtttcttagcatgtga

SEQ ID NO: 730007 - DNA, 25 bp, Homo sapien
taaggcatcctgtcttaacttgtac

SEQ ID NO: 730008 - DNA, 25 bp, Homo sapien
gccctgctgtcacaattctggcaga

SEQ ID NO: 730009 - DNA, 25 bp, Homo sapien
tgtcaactctgcacgaaaagcccat

SEQ ID NO: 730010 - DNA, 25 bp, Homo sapien
aaattgtacttcagccagaaaagct

SEQ ID NO: 730011 - DNA, 25 bp, Homo sapien
ctgggaatagaaaatgagagggacc

SEQ ID NO: 730012 - DNA, 25 bp, Homo sapien
tgaaaaatgtatgtgtgaacactgt

SEQ ID NO: 730013 - DNA, 25 bp, Homo sapien
cactgtataactgtaagtgtgagca

SEQ ID NO: 730014 - DNA, 25 bp, Homo sapien
gacttatagttagattgccctcagt

SEQ ID NO: 730015 - DNA, 25 bp, Homo sapien
tagtactgccaatttatgctgctcc

SEQ ID NO: 730016 - DNA, 25 bp, Homo sapien
gaacagtgtgctcttccactaatac

SEQ ID NO: 730017 - DNA, 25 bp, Homo sapien
ccatgaatccattagttgagcttac

SEQ ID NO: 730018 - DNA, 25 bp, Homo sapien
gacacccttatgagattagctttga

SEQ ID NO: 730019 - DNA, 25 bp, Homo sapien
gttcttataacatgcagccaaaggc

SEQ ID NO: 730020 - DNA, 25 bp, Homo sapien
ctggtgcagttaattgaaggcttcc

SEQ ID NO: 730021 - DNA, 25 bp, Homo sapien
ttggtgacacattgacaagaactag

SEQ ID NO: 730022 - DNA, 25 bp, Homo sapien
ccgtgcccgacctgtaattattcca

SEQ ID NO: 730023 - DNA, 25 bp, Homo sapien
attaaatctagtttttatggataag

SEQ ID NO: 730024 - DNA, 25 bp, Homo sapien
tggataagtaatgggacaagcagag

SEQ ID NO: 730025 - DNA, 25 bp, Homo sapien
cgtgcccgacctgtaattattccat

SEQ ID NO: 730026 - DNA, 25 bp, Homo sapien
gaaagaggccatagaataaccgaga

SEQ ID NO: 730027 - DNA, 25 bp, Homo sapien
ggaaaataattcgagtgagtatcta

SEQ ID NO: 730028 - DNA, 25 bp, Homo sapien
caagggttctatgcccagtcataca

SEQ ID NO: 730029 - DNA, 25 bp, Homo sapien
tgttatacaattttagaaccacaga

SEQ ID NO: 730030 - DNA, 25 bp, Homo sapien
gaactttctcagaatggctccagta

SEQ ID NO: 730031 - DNA, 25 bp, Homo sapien
taatgcctttatgggctatccccag

SEQ ID NO: 730032 - DNA, 25 bp, Homo sapien
tatcaggtccatggcaataatgggc

SEQ ID NO: 730033 - DNA, 25 bp, Homo sapien
tggatagtgattaacagccccactg

SEQ ID NO: 730034 - DNA, 25 bp, Homo sapien
acttttaacctgtcatgcacctggg

SEQ ID NO: 730035 - DNA, 25 bp, Homo sapien
gagctgattcgggaaaacatcatgc

SEQ ID NO: 730036 - DNA, 25 bp, Homo sapien
caaatttgtggtttaggtgggagct

SEQ ID NO: 730037 - DNA, 25 bp, Homo sapien
cacctgggttgcagtgtaggcttga

SEQ ID NO: 730038 - DNA, 25 bp, Homo sapien
tagaggccccatggtggaacttgtg

SEQ ID NO: 730039 - DNA, 25 bp, Homo sapien
cccacataagtagagtagagccaca

SEQ ID NO: 730040 - DNA, 25 bp, Homo sapien
gataaggtcatcagggtagaggccc

SEQ ID NO: 730041 - DNA, 25 bp, Homo sapien
taagatctaatccagggtcccaggt

SEQ ID NO: 730042 - DNA, 25 bp, Homo sapien
gtccctctatttatgatgtatcaga

SEQ ID NO: 730043 - DNA, 25 bp, Homo sapien
aaaatcttccatgtcgttttcatgt

SEQ ID NO: 730044 - DNA, 25 bp, Homo sapien
cgttttcatgtaaagatgtatgtcc

SEQ ID NO: 730045 - DNA, 25 bp, Homo sapien
tatcagaatctcttaaggtgtgtgg

SEQ ID NO: 730046 - DNA, 25 bp, Homo sapien
tctgcatgtggtgtcacaaaagtag

SEQ ID NO: 730047 - DNA, 25 bp, Homo sapien
gaaaatatgatgaacagatctgcat

SEQ ID NO: 730048 - DNA, 25 bp, Homo sapien
gttagcacttaatatagcatctggc

SEQ ID NO: 730049 - DNA, 25 bp, Homo sapien
gaaaggcatgtgcatctgaacaggg

SEQ ID NO: 730050 - DNA, 25 bp, Homo sapien
tgtctccagatatcgccaaaggttt

SEQ ID NO: 730051 - DNA, 25 bp, Homo sapien
ctggagggcaaaatcactcctatgt

SEQ ID NO: 730052 - DNA, 25 bp, Homo sapien
aaatcactcctatgtgaggttcaca

SEQ ID NO: 730053 - DNA, 25 bp, Homo sapien
actccaccaccgctcagttttgaca

SEQ ID NO: 730054 - DNA, 25 bp, Homo sapien
gaaccagtaggtcgaattttgccac

SEQ ID NO: 730055 - DNA, 25 bp, Homo sapien
aagtcaagcccagcagtttcaagcc

SEQ ID NO: 730056 - DNA, 25 bp, Homo sapien
tgacactacagtgcacatgtgccct

SEQ ID NO: 730057 - DNA, 25 bp, Homo sapien
gcattctcgcacctcacacttgtag

SEQ ID NO: 730058 - DNA, 25 bp, Homo sapien
atccagatgtgacccagtgagagtg

SEQ ID NO: 730059 - DNA, 25 bp, Homo sapien
tgagatgcatgggactatatatccc

SEQ ID NO: 730060 - DNA, 25 bp, Homo sapien
cgtattccgagtttacaggtgacaa

SEQ ID NO: 730061 - DNA, 25 bp, Homo sapien
gcactgtgataggtacttgtcatca

SEQ ID NO: 730062 - DNA, 25 bp, Homo sapien
actcggctttgagcaagtgtgtcag

SEQ ID NO: 730063 - DNA, 25 bp, Homo sapien
ggtgttccgacttcactgaccagca

SEQ ID NO: 730064 - DNA, 25 bp, Homo sapien
tgttagggtaatctgtaatcagtga

SEQ ID NO: 730065 - DNA, 25 bp, Homo sapien
gacggcgaacttaatctgtaaatgt

SEQ ID NO: 730066 - DNA, 25 bp, Homo sapien
taactattcagctattgagggacac

SEQ ID NO: 730067 - DNA, 25 bp, Homo sapien
gcaattgctggcttatatggtaaat

SEQ ID NO: 730068 - DNA, 25 bp, Homo sapien
cagctgcagtgaacaactgtgcaca

SEQ ID NO: 730069 - DNA, 25 bp, Homo sapien
caataccaatgtatgagcgctccaa

SEQ ID NO: 730070 - DNA, 25 bp, Homo sapien
gtaaatctcttgatacctactgcca

SEQ ID NO: 730071 - DNA, 25 bp, Homo sapien
taaaagccagatcatattcacacac

SEQ ID NO: 730072 - DNA, 25 bp, Homo sapien
aaatgcagacttttgagtatcaggc

SEQ ID NO: 730073 - DNA, 25 bp, Homo sapien
tgagcaaagttatattaaaggagac

SEQ ID NO: 730074 - DNA, 25 bp, Homo sapien
tccagaagttttggagatacgatcg

SEQ ID NO: 730075 - DNA, 25 bp, Homo sapien
caagcctgagaaatctaaagtataa

SEQ ID NO: 730076 - DNA, 25 bp, Homo sapien
gatcgattggtttctcactcaagcc

SEQ ID NO: 730077 - DNA, 25 bp, Homo sapien
ggagatacgatcgattggtttctca

SEQ ID NO: 730078 - DNA, 25 bp, Homo sapien
tatcggtggtatccttcaaaggcgc

SEQ ID NO: 730079 - DNA, 25 bp, Homo sapien
caagcaaacttccagatgtgttatc

SEQ ID NO: 730080 - DNA, 25 bp, Homo sapien
tcaaaggcgccagtgtcttaataag

SEQ ID NO: 730081 - DNA, 25 bp, Homo sapien
tcatttcctaatgccaggaggagag

SEQ ID NO: 730082 - DNA, 25 bp, Homo sapien
gaataggtatagaggcccaatgtca

SEQ ID NO: 730083 - DNA, 25 bp, Homo sapien
cagcttcctctcagtatgcaaatag

SEQ ID NO: 730084 - DNA, 25 bp, Homo sapien
aagtagaggaaacagtggaagccca

SEQ ID NO: 730085 - DNA, 25 bp, Homo sapien
tgcaggccttgaacatagaaagatg

SEQ ID NO: 730086 - DNA, 25 bp, Homo sapien
tctaatttggcttcaagtcaaggct

SEQ ID NO: 730087 - DNA, 25 bp, Homo sapien
gaagtaccctacactgtccaaaata

SEQ ID NO: 730088 - DNA, 25 bp, Homo sapien
cctgttcaacagctaaagaactctt

SEQ ID NO: 730089 - DNA, 25 bp, Homo sapien
caaaatatgtagtcctgttcaacag

SEQ ID NO: 730090 - DNA, 25 bp, Homo sapien
gtaatagatctgtagtcaaaccact

SEQ ID NO: 730091 - DNA, 25 bp, Homo sapien
tatagcgaaagacatacatagactg

SEQ ID NO: 730092 - DNA, 25 bp, Homo sapien
tagactgttccaatctgtgcagcag

SEQ ID NO: 730093 - DNA, 25 bp, Homo sapien
tatgtataaactaacaaggccccag

SEQ ID NO: 730094 - DNA, 25 bp, Homo sapien
tcccattgggttatatcagacagag

SEQ ID NO: 730095 - DNA, 25 bp, Homo sapien
ggctgtactctccaatctgtgaatc

SEQ ID NO: 730096 - DNA, 25 bp, Homo sapien
tactgattcacaggtaaagactgcc

SEQ ID NO: 730097 - DNA, 25 bp, Homo sapien
gaggcagctgttttttgacagcatg

SEQ ID NO: 730098 - DNA, 25 bp, Homo sapien
aatgaattagggctgcactactgct

SEQ ID NO: 730099 - DNA, 25 bp, Homo sapien
gaagaatgaattagggctgcactac

SEQ ID NO: 730100 - DNA, 25 bp, Homo sapien
ggctgcactactgctcagaagaagc

SEQ ID NO: 730101 - DNA, 25 bp, Homo sapien
aattagggctgcactactgctcaga

SEQ ID NO: 730102 - DNA, 25 bp, Homo sapien
gcaggccaaaacaccttcgatgtca

SEQ ID NO: 730103 - DNA, 25 bp, Homo sapien
tccgcaggctaacatgtgtgaaggg

SEQ ID NO: 730104 - DNA, 25 bp, Homo sapien
gggtcgttacgaatagcaggccaaa

SEQ ID NO: 730105 - DNA, 25 bp, Homo sapien
aaagctgatcgcctctgctcagtag

SEQ ID NO: 730106 - DNA, 25 bp, Homo sapien
gaattcaaggatgctagcgccactt

SEQ ID NO: 730107 - DNA, 25 bp, Homo sapien
gccagatgtgatcttccataccagt

SEQ ID NO: 730108 - DNA, 25 bp, Homo sapien
tattggttatgttctttgcctgata

SEQ ID NO: 730109 - DNA, 25 bp, Homo sapien
tgcctgataaatgtccccaaaaaag

SEQ ID NO: 730110 - DNA, 25 bp, Homo sapien
aaatcccaaatcatgtaggtgttca

SEQ ID NO: 730111 - DNA, 25 bp, Homo sapien
caaaatcccaaatcatgtaggtgtt

SEQ ID NO: 730112 - DNA, 25 bp, Homo sapien
tagtgaacttgtaaatgaaagagct

SEQ ID NO: 730113 - DNA, 25 bp, Homo sapien
gtgaacttgtaaatgaaagagctct

SEQ ID NO: 730114 - DNA, 25 bp, Homo sapien
gctgctggataagaagtaattcctg

SEQ ID NO: 730115 - DNA, 25 bp, Homo sapien
cctgaggtctgtccttaggtctaaa

SEQ ID NO: 730116 - DNA, 25 bp, Homo sapien
ggtgctgccgtgtcaagttctcatg

SEQ ID NO: 730117 - DNA, 25 bp, Homo sapien
tgctgcaattgcttctcacggacaa

SEQ ID NO: 730118 - DNA, 25 bp, Homo sapien
gagaaagacatgagagtgtgcaatt

SEQ ID NO: 730119 - DNA, 25 bp, Homo sapien
agagaaagacatgagagtgtgcaat

SEQ ID NO: 730120 - DNA, 25 bp, Homo sapien
agaaagacatgagagtgtgcaattt

SEQ ID NO: 730121 - DNA, 25 bp, Homo sapien
tctctgcgatgcctctctacttcct

SEQ ID NO: 730122 - DNA, 25 bp, Homo sapien
gttgctgttttatggctagaagttc

SEQ ID NO: 730123 - DNA, 25 bp, Homo sapien
cagagcttgggatggcggctcacgg

SEQ ID NO: 730124 - DNA, 25 bp, Homo sapien
tttccattagttggagtgtctttcg

SEQ ID NO: 730125 - DNA, 25 bp, Homo sapien
tttcgttgctgatttactcagtagg

SEQ ID NO: 730126 - DNA, 25 bp, Homo sapien
gatggcggctcacggaatgattttt

SEQ ID NO: 730127 - DNA, 25 bp, Homo sapien
cttgtaggatggagatgttccacta

SEQ ID NO: 730128 - DNA, 25 bp, Homo sapien
atcttgtgctcctggtaatgtgtac

SEQ ID NO: 730129 - DNA, 25 bp, Homo sapien
atccaatgatgtgtggtgggcagcc

SEQ ID NO: 730130 - DNA, 25 bp, Homo sapien
gctcctggtaatgtgtacttgtagg

SEQ ID NO: 730131 - DNA, 25 bp, Homo sapien
ggatatattcaaaggctctgtgctc

SEQ ID NO: 730132 - DNA, 25 bp, Homo sapien
catcagtaacctcctgccataaggg

SEQ ID NO: 730133 - DNA, 25 bp, Homo sapien
tgctcagcaggatagaagtctttct

SEQ ID NO: 730134 - DNA, 25 bp, Homo sapien
cagtcagttttcaatctcccagtgg

SEQ ID NO: 730135 - DNA, 25 bp, Homo sapien
aactgttcccgggttatcactgtct

SEQ ID NO: 730136 - DNA, 25 bp, Homo sapien
aaaggtccactttgcgtgacaaagg

SEQ ID NO: 730137 - DNA, 25 bp, Homo sapien
ctttgcgtgacaaaggtcagatttc

SEQ ID NO: 730138 - DNA, 25 bp, Homo sapien
tgttcccgggttatcactgtctggg

SEQ ID NO: 730139 - DNA, 25 bp, Homo sapien
atattttatgaaacatatgcacaca

SEQ ID NO: 730140 - DNA, 25 bp, Homo sapien
tccagcccagtgttaagtgtgagta

SEQ ID NO: 730141 - DNA, 25 bp, Homo sapien
aatctcttagaaccagactctgagc

SEQ ID NO: 730142 - DNA, 25 bp, Homo sapien
gcaaaaatgtcccttaatccgctct

SEQ ID NO: 730143 - DNA, 25 bp, Homo sapien
cgctctatgtgctcagagtgaccac

SEQ ID NO: 730144 - DNA, 25 bp, Homo sapien
tatattccataatacaaatgcacat

SEQ ID NO: 730145 - DNA, 25 bp, Homo sapien
tgaaggttctgagttaggttatata

SEQ ID NO: 730146 - DNA, 25 bp, Homo sapien
tttcatattctaaacagtgaagctt

SEQ ID NO: 730147 - DNA, 25 bp, Homo sapien
ttcatattctaaacagtgaagctta

SEQ ID NO: 730148 - DNA, 25 bp, Homo sapien
tgttttaacctggaccgcaccttca

SEQ ID NO: 730149 - DNA, 25 bp, Homo sapien
aacctggaccgcaccttcaagttgg

SEQ ID NO: 730150 - DNA, 25 bp, Homo sapien
tggaccgcaccttcaagttgggctc

SEQ ID NO: 730151 - DNA, 25 bp, Homo sapien
ccgcaccttcaagttgggctcagag

SEQ ID NO: 730152 - DNA, 25 bp, Homo sapien
gggcaaaaccgaagtctcattttca

SEQ ID NO: 730153 - DNA, 25 bp, Homo sapien
taacacttccagttggcccattgtt

SEQ ID NO: 730154 - DNA, 25 bp, Homo sapien
ctggagaactgctactgactgagga

SEQ ID NO: 730155 - DNA, 25 bp, Homo sapien
ggcccattgtttggtgaactgggac

SEQ ID NO: 730156 - DNA, 25 bp, Homo sapien
ttgaactcgtctttccagatttgga

SEQ ID NO: 730157 - DNA, 25 bp, Homo sapien
aattcattatgaggtaagtcactgc

SEQ ID NO: 730158 - DNA, 25 bp, Homo sapien
tgtcactgacctgaagaaatacctc

SEQ ID NO: 730159 - DNA, 25 bp, Homo sapien
catagttcaggcacacaattaattc

SEQ ID NO: 730160 - DNA, 25 bp, Homo sapien
gggccacagagaggctactcatcag

SEQ ID NO: 730161 - DNA, 25 bp, Homo sapien
tcatcagtgcataaaggtctgccca

SEQ ID NO: 730162 - DNA, 25 bp, Homo sapien
gacagtcttagtctaaattccgctg

SEQ ID NO: 730163 - DNA, 25 bp, Homo sapien
cacctatcgagaatgaattacacca

SEQ ID NO: 730164 - DNA, 25 bp, Homo sapien
ggtgcgatcaaggcccactgtaact

SEQ ID NO: 730165 - DNA, 25 bp, Homo sapien
gcctggccagtaatcactcacattt

SEQ ID NO: 730166 - DNA, 25 bp, Homo sapien
atgcctggccagtaatcactcacat

SEQ ID NO: 730167 - DNA, 25 bp, Homo sapien
gatcaaggcccactgtaacttcaaa

SEQ ID NO: 730168 - DNA, 25 bp, Homo sapien
ggtataaagacttagcaggttcatg

SEQ ID NO: 730169 - DNA, 25 bp, Homo sapien
gccccaaggtaatgttgggcaaaga

SEQ ID NO: 730170 - DNA, 25 bp, Homo sapien
aagacttagcaggttcatggaatct

SEQ ID NO: 730171 - DNA, 25 bp, Homo sapien
gagctgggatggcactgcgggaagc

SEQ ID NO: 730172 - DNA, 25 bp, Homo sapien
aagatgccgggatgctgcctccata

SEQ ID NO: 730173 - DNA, 25 bp, Homo sapien
gctgttgggtggctttccctctaaa

SEQ ID NO: 730174 - DNA, 25 bp, Homo sapien
ctgcttttctttgagtgaattcgaa

SEQ ID NO: 730175 - DNA, 25 bp, Homo sapien
gaacaccttgcctaagcgtctgcgt

SEQ ID NO: 730176 - DNA, 25 bp, Homo sapien
ttgctgttgaatgaccagctgagcc

SEQ ID NO: 730177 - DNA, 25 bp, Homo sapien
ggtacctctaatgccaggtgaaatt

SEQ ID NO: 730178 - DNA, 25 bp, Homo sapien
cagctgagccaacgtgctctgaggc

SEQ ID NO: 730179 - DNA, 25 bp, Homo sapien
gactgaggatgtaagggaactccac

SEQ ID NO: 730180 - DNA, 25 bp, Homo sapien
gttagcattcgcctgtcaaaatctc

SEQ ID NO: 730181 - DNA, 25 bp, Homo sapien
gggaaaaggtctctgataagatttg

SEQ ID NO: 730182 - DNA, 25 bp, Homo sapien
agtgtgactgaggttagcattcgcc

SEQ ID NO: 730183 - DNA, 25 bp, Homo sapien
gaaaaggtctctgataagatttgct

SEQ ID NO: 730184 - DNA, 25 bp, Homo sapien
gaaggaggtcaatgtgtgtgaagtt

SEQ ID NO: 730185 - DNA, 25 bp, Homo sapien
aggaggtcaatgtgtgtgaagttgg

SEQ ID NO: 730186 - DNA, 25 bp, Homo sapien
cttgaaggaggtcaatgtgtgtgaa

SEQ ID NO: 730187 - DNA, 25 bp, Homo sapien
tgaaggaggtcaatgtgtgtgaagt

SEQ ID NO: 730188 - DNA, 25 bp, Homo sapien
ggcaatgtgacaacatgcgagaaag

SEQ ID NO: 730189 - DNA, 25 bp, Homo sapien
ctaaaacaacggcaatgtgacaaca

SEQ ID NO: 730190 - DNA, 25 bp, Homo sapien
tgcgagaaaggaatgaaatgtggcc

SEQ ID NO: 730191 - DNA, 25 bp, Homo sapien
tcactctgcaccgtttggaaagcct

SEQ ID NO: 730192 - DNA, 25 bp, Homo sapien
tttcccccattgatcaattccttac

SEQ ID NO: 730193 - DNA, 25 bp, Homo sapien
ctctcccaactcataaacatcgcca

SEQ ID NO: 730194 - DNA, 25 bp, Homo sapien
actctctcccaactcataaacatcg

SEQ ID NO: 730195 - DNA, 25 bp, Homo sapien
tcccccattgatcaattccttactt

SEQ ID NO: 730196 - DNA, 25 bp, Homo sapien
tgccactcgtctgacaccaggtgag

SEQ ID NO: 730197 - DNA, 25 bp, Homo sapien
tggggaacccagcagagatgaagaa

SEQ ID NO: 730198 - DNA, 25 bp, Homo sapien
cgtgtgccactcgtctgacaccagg

SEQ ID NO: 730199 - DNA, 25 bp, Homo sapien
acaccaggtgagttacttcagtggg

SEQ ID NO: 730200 - DNA, 25 bp, Homo sapien
gatcccctagcaaagtcgagctgtt

SEQ ID NO: 730201 - DNA, 25 bp, Homo sapien
catctggaggtgatcccctagcaaa

SEQ ID NO: 730202 - DNA, 25 bp, Homo sapien
ggaggtgatcccctagcaaagtcga

SEQ ID NO: 730203 - DNA, 25 bp, Homo sapien
caaagtcgagctgttgccttgttgg

SEQ ID NO: 730204 - DNA, 25 bp, Homo sapien
actagagggcgctctgtcttcctgc

SEQ ID NO: 730205 - DNA, 25 bp, Homo sapien
cactgctgtcgctcctagtgctgtt

SEQ ID NO: 730206 - DNA, 25 bp, Homo sapien
gactgcctggttgcttcagttgttc

SEQ ID NO: 730207 - DNA, 25 bp, Homo sapien
tgtgtcatccacacaagcactgctg

SEQ ID NO: 730208 - DNA, 25 bp, Homo sapien
attacaaatcctggagctaaatctt

SEQ ID NO: 730209 - DNA, 25 bp, Homo sapien
tacaaatcctggagctaaatctttg

SEQ ID NO: 730210 - DNA, 25 bp, Homo sapien
aatcctggagctaaatctttgccta

SEQ ID NO: 730211 - DNA, 25 bp, Homo sapien
caaatcctggagctaaatctttgcc

SEQ ID NO: 730212 - DNA, 25 bp, Homo sapien
gccagaatgttacggtatatgccca

SEQ ID NO: 730213 - DNA, 25 bp, Homo sapien
ggacatagtcctcctgaaggtgcat

SEQ ID NO: 730214 - DNA, 25 bp, Homo sapien
gatcagactgggagactatccagca

SEQ ID NO: 730215 - DNA, 25 bp, Homo sapien
tacacaataacctaggactactggc

SEQ ID NO: 730216 - DNA, 25 bp, Homo sapien
catgaatcacttggacttcctgttt

SEQ ID NO: 730217 - DNA, 25 bp, Homo sapien
tgttcaccctcacagaatcactttt

SEQ ID NO: 730218 - DNA, 25 bp, Homo sapien
attcctcagtacatgaatcacttgg

SEQ ID NO: 730219 - DNA, 25 bp, Homo sapien
cctgtttccacaaggcatttcctgt

SEQ ID NO: 730220 - DNA, 25 bp, Homo sapien
gatgcactatcccttttttatgaga

SEQ ID NO: 730221 - DNA, 25 bp, Homo sapien
caccaactgtactgatgaaactctc

SEQ ID NO: 730222 - DNA, 25 bp, Homo sapien
gatactacaccttgaaatacctcgg

SEQ ID NO: 730223 - DNA, 25 bp, Homo sapien
cagaaggcaagaagggaaacataca

SEQ ID NO: 730224 - DNA, 25 bp, Homo sapien
gaatctgaggaacttaggtaaaagc

SEQ ID NO: 730225 - DNA, 25 bp, Homo sapien
gatttcaggaagtggttagggcacc

SEQ ID NO: 730226 - DNA, 25 bp, Homo sapien
tccagtaaatatagtgagaattgcc

SEQ ID NO: 730227 - DNA, 25 bp, Homo sapien
gcctatacttgagttaaaatgcaga

SEQ ID NO: 730228 - DNA, 25 bp, Homo sapien
ttgaaaatgaccaagccacactgga

SEQ ID NO: 730229 - DNA, 25 bp, Homo sapien
gactagcttctaaagtgaatacagg

SEQ ID NO: 730230 - DNA, 25 bp, Homo sapien
gaactgacttggtaggacccagtaa

SEQ ID NO: 730231 - DNA, 25 bp, Homo sapien
caccagggtcctaggctaagattga

SEQ ID NO: 730232 - DNA, 25 bp, Homo sapien
taatttcttcctcctcattacgcaa

SEQ ID NO: 730233 - DNA, 25 bp, Homo sapien
tttaatttcttcctcctcattacgc

SEQ ID NO: 730234 - DNA, 25 bp, Homo sapien
ccacttttaatttcttcctcctcat

SEQ ID NO: 730235 - DNA, 25 bp, Homo sapien
cacttttaatttcttcctcctcatt

SEQ ID NO: 730236 - DNA, 25 bp, Homo sapien
tatttgggactttgaatgcgttcct

SEQ ID NO: 730237 - DNA, 25 bp, Homo sapien
ttgggactttgaatgcgttcctcag

SEQ ID NO: 730238 - DNA, 25 bp, Homo sapien
ttaagtatttgggactttgaatgcg

SEQ ID NO: 730239 - DNA, 25 bp, Homo sapien
gactttgaatgcgttcctcaggcat

SEQ ID NO: 730240 - DNA, 25 bp, Homo sapien
ggtcccatgaagactgagcaaacca

SEQ ID NO: 730241 - DNA, 25 bp, Homo sapien
gtcccatgaagactgagcaaaccat

SEQ ID NO: 730242 - DNA, 25 bp, Homo sapien
aggtcccatgaagactgagcaaacc

SEQ ID NO: 730243 - DNA, 25 bp, Homo sapien
tgtggcaagctattaaaagaaacta

SEQ ID NO: 730244 - DNA, 25 bp, Homo sapien
ttatgattgtgtcgctgaagctccc

SEQ ID NO: 730245 - DNA, 25 bp, Homo sapien
aacttatttagtcccagcattccag

SEQ ID NO: 730246 - DNA, 25 bp, Homo sapien
tgaagctccccagggctatttgtat

SEQ ID NO: 730247 - DNA, 25 bp, Homo sapien
ccttttccttgaagtatgataataa

SEQ ID NO: 730248 - DNA, 25 bp, Homo sapien
cttttccttgaagtatgataataag

SEQ ID NO: 730249 - DNA, 25 bp, Homo sapien
ttttccttgaagtatgataataagc

SEQ ID NO: 730250 - DNA, 25 bp, Homo sapien
tttccttgaagtatgataataagca

SEQ ID NO: 730251 - DNA, 25 bp, Homo sapien
gtgctgcggacaccagtgcgtccat

SEQ ID NO: 730252 - DNA, 25 bp, Homo sapien
ctctggaggtgctgcggacaccagt

SEQ ID NO: 730253 - DNA, 25 bp, Homo sapien
aggtgctgcggacaccagtgcgtcc

SEQ ID NO: 730254 - DNA, 25 bp, Homo sapien
cactctctggaggtgctgcggacac

SEQ ID NO: 730255 - DNA, 25 bp, Homo sapien
aaaattatgcagactggacagtcgc

SEQ ID NO: 730256 - DNA, 25 bp, Homo sapien
ggacagtcgccgacttttatcctcc

SEQ ID NO: 730257 - DNA, 25 bp, Homo sapien
gcagactggacagtcgccgactttt

SEQ ID NO: 730258 - DNA, 25 bp, Homo sapien
aggccgcatcccaaaattatgcaga

SEQ ID NO: 730259 - DNA, 25 bp, Homo sapien
gaaagaaatgtgagacaaggattga

SEQ ID NO: 730260 - DNA, 25 bp, Homo sapien
aaagaaatgtgagacaaggattgag

SEQ ID NO: 730261 - DNA, 25 bp, Homo sapien
aagaaatgtgagacaaggattgagg

SEQ ID NO: 730262 - DNA, 25 bp, Homo sapien
agaaagaaatgtgagacaaggattg

SEQ ID NO: 730263 - DNA, 25 bp, Homo sapien
cttggcgcacagagagcgcacgtgt

SEQ ID NO: 730264 - DNA, 25 bp, Homo sapien
gtgtgtgcgtgggttccaggaaagg

SEQ ID NO: 730265 - DNA, 25 bp, Homo sapien
gtttctctaatccatccatgccaac

SEQ ID NO: 730266 - DNA, 25 bp, Homo sapien
agacggtgtttctctaatccatcca

SEQ ID NO: 730267 - DNA, 25 bp, Homo sapien
gggcggtccattgctgggtgaggta

SEQ ID NO: 730268 - DNA, 25 bp, Homo sapien
tccattgctgggtgaggtaaaacag

SEQ ID NO: 730269 - DNA, 25 bp, Homo sapien
cggtccattgctgggtgaggtaaaa

SEQ ID NO: 730270 - DNA, 25 bp, Homo sapien
cattgctgggtgaggtaaaacagag

SEQ ID NO: 730271 - DNA, 25 bp, Homo sapien
cttttaatgacattttccccataat

SEQ ID NO: 730272 - DNA, 25 bp, Homo sapien
ttttaatgacattttccccataatc

SEQ ID NO: 730273 - DNA, 25 bp, Homo sapien
tttaatgacattttccccataatcc

SEQ ID NO: 730274 - DNA, 25 bp, Homo sapien
ttaatgacattttccccataatcca

SEQ ID NO: 730275 - DNA, 25 bp, Homo sapien
ctgtaaagtgatgaagatgatgaca

SEQ ID NO: 730276 - DNA, 25 bp, Homo sapien
tgtaaagtgatgaagatgatgacat

SEQ ID NO: 730277 - DNA, 25 bp, Homo sapien
ccagtactcagaccctagtttagta

SEQ ID NO: 730278 - DNA, 25 bp, Homo sapien
gcattaaccagtactcagaccctag

SEQ ID NO: 730279 - DNA, 25 bp, Homo sapien
cattaaccagtactcagaccctagt

SEQ ID NO: 730280 - DNA, 25 bp, Homo sapien
taaccagtactcagaccctagttta

SEQ ID NO: 730281 - DNA, 25 bp, Homo sapien
tagcagcccagtttcttgcagtcgt

SEQ ID NO: 730282 - DNA, 25 bp, Homo sapien
tgcagtcgtgaccagatactctgta

SEQ ID NO: 730283 - DNA, 25 bp, Homo sapien
gatactctgtattcgtccagcatgc

SEQ ID NO: 730284 - DNA, 25 bp, Homo sapien
tgggtggtggaattgccacaaacgc

SEQ ID NO: 730285 - DNA, 25 bp, Homo sapien
gctgccgcaggatataacacaaacg

SEQ ID NO: 730286 - DNA, 25 bp, Homo sapien
tctaacaaggcattcgaaggctatg

SEQ ID NO: 730287 - DNA, 25 bp, Homo sapien
gaaggctatgatcagccactgacaa

SEQ ID NO: 730288 - DNA, 25 bp, Homo sapien
ttgaagtagttaggaccaggccagc

SEQ ID NO: 730289 - DNA, 25 bp, Homo sapien
tataaatgccttaaatttgtcacat

SEQ ID NO: 730290 - DNA, 25 bp, Homo sapien
tgccttaaatttgtcacattcaact

SEQ ID NO: 730291 - DNA, 25 bp, Homo sapien
tattgagatcttcaccagttcccat

SEQ ID NO: 730292 - DNA, 25 bp, Homo sapien
aatgccttaaatttgtcacattcaa

SEQ ID NO: 730293 - DNA, 25 bp, Homo sapien
aaaatgagaccccaagtcacattta

SEQ ID NO: 730294 - DNA, 25 bp, Homo sapien
taagatgattaataatgggctgaat

SEQ ID NO: 730295 - DNA, 25 bp, Homo sapien
gccaacagtacaccactgacaacat

SEQ ID NO: 730296 - DNA, 25 bp, Homo sapien
tgcaagaaaatagcagaagccaaca

SEQ ID NO: 730297 - DNA, 25 bp, Homo sapien
ctaggagtatcctggggtccagctt

SEQ ID NO: 730298 - DNA, 25 bp, Homo sapien
ggttggtgccatacaacagtgagtg

SEQ ID NO: 730299 - DNA, 25 bp, Homo sapien
agtatcctggggtccagcttctgtc

SEQ ID NO: 730300 - DNA, 25 bp, Homo sapien
agcttctgtccgtccagggggttgg

SEQ ID NO: 730301 - DNA, 25 bp, Homo sapien
tggaatgtgctgttcccagtacagt

SEQ ID NO: 730302 - DNA, 25 bp, Homo sapien
gactaatgatagtgctggaatgtgc

SEQ ID NO: 730303 - DNA, 25 bp, Homo sapien
cagtacagtggaggcccgtacagac

SEQ ID NO: 730304 - DNA, 25 bp, Homo sapien
gtattttgaactgacaccagcgttg

SEQ ID NO: 730305 - DNA, 25 bp, Homo sapien
agcaaagctgttggaaaaactgatt

SEQ ID NO: 730306 - DNA, 25 bp, Homo sapien
ttggaaaaactgattttttgttgca

SEQ ID NO: 730307 - DNA, 25 bp, Homo sapien
tggaaaaactgattttttgttgcac

SEQ ID NO: 730308 - DNA, 25 bp, Homo sapien
tccacagagcaaagctgttggaaaa

SEQ ID NO: 730309 - DNA, 25 bp, Homo sapien
tgaggaaaaaaacttttgagagtca

SEQ ID NO: 730310 - DNA, 25 bp, Homo sapien
cccaagtccaccacaaggtaatgag

SEQ ID NO: 730311 - DNA, 25 bp, Homo sapien
caagtccaccacaaggtaatgagga

SEQ ID NO: 730312 - DNA, 25 bp, Homo sapien
gaaaaaaacttttgagagtcatcac

SEQ ID NO: 730313 - DNA, 25 bp, Homo sapien
gtcaaactaacaatgcagggctcct

SEQ ID NO: 730314 - DNA, 25 bp, Homo sapien
tccagcactgatggagtcaaactaa

SEQ ID NO: 730315 - DNA, 25 bp, Homo sapien
tggcctaccccagacttatccacca

SEQ ID NO: 730316 - DNA, 25 bp, Homo sapien
gcctctgctggcctaccccagactt

SEQ ID NO: 730317 - DNA, 25 bp, Homo sapien
tccgggatcatactggggatcttgt

SEQ ID NO: 730318 - DNA, 25 bp, Homo sapien
tgtatagctaatctgtctgggattg

SEQ ID NO: 730319 - DNA, 25 bp, Homo sapien
caagttggggccttccgggatcata

SEQ ID NO: 730320 - DNA, 25 bp, Homo sapien
catactggggatcttgtgtatagct

SEQ ID NO: 730321 - DNA, 25 bp, Homo sapien
cataaaagcctgctcgtccttgctt

SEQ ID NO: 730322 - DNA, 25 bp, Homo sapien
gcctgctcgtccttgcttttgtggg

SEQ ID NO: 730323 - DNA, 25 bp, Homo sapien
tgatgacgacattatcataaaagcc

SEQ ID NO: 730324 - DNA, 25 bp, Homo sapien
aaagccgcagaagcgtttgaagctg

SEQ ID NO: 730325 - DNA, 25 bp, Homo sapien
cactgatctggtcctgtaaacccca

SEQ ID NO: 730326 - DNA, 25 bp, Homo sapien
gagcatgaaacccaaacttatataa

SEQ ID NO: 730327 - DNA, 25 bp, Homo sapien
cctgtttgcaaacatcatattccct

SEQ ID NO: 730328 - DNA, 25 bp, Homo sapien
taaaatcatatcctgtttgcaaaca

SEQ ID NO: 730329 - DNA, 25 bp, Homo sapien
gagcctaaggctgaatttcttcttg

SEQ ID NO: 730330 - DNA, 25 bp, Homo sapien
cttcagcaactgcagagcctaaggc

SEQ ID NO: 730331 - DNA, 25 bp, Homo sapien
ctgcagagcctaaggctgaatttct

SEQ ID NO: 730332 - DNA, 25 bp, Homo sapien
cagcaactgcagagcctaaggctga

SEQ ID NO: 730333 - DNA, 25 bp, Homo sapien
taatcccatcattaaggtcaatcct

SEQ ID NO: 730334 - DNA, 25 bp, Homo sapien
ccatcattaaggtcaatcctctgaa

SEQ ID NO: 730335 - DNA, 25 bp, Homo sapien
gatggataatcccatcattaaggtc

SEQ ID NO: 730336 - DNA, 25 bp, Homo sapien
ccctttacttgatggataatcccat

SEQ ID NO: 730337 - DNA, 25 bp, Homo sapien
cttagcttctttagtcatggtgaga

SEQ ID NO: 730338 - DNA, 25 bp, Homo sapien
gaatgaatactgtgactgatattcc

SEQ ID NO: 730339 - DNA, 25 bp, Homo sapien
aatactgtgactgatattccatatg

SEQ ID NO: 730340 - DNA, 25 bp, Homo sapien
taaagccatggatatgatgaatgaa

SEQ ID NO: 730341 - DNA, 25 bp, Homo sapien
ccagctccttgaatgtatatattca

SEQ ID NO: 730342 - DNA, 25 bp, Homo sapien
gccagctccttgaatgtatatattc

SEQ ID NO: 730343 - DNA, 25 bp, Homo sapien
cagctccttgaatgtatatattcat

SEQ ID NO: 730344 - DNA, 25 bp, Homo sapien
ggacgcttaggtgtcaacacttcaa

SEQ ID NO: 730345 - DNA, 25 bp, Homo sapien
tcctcctgtgggataataatgagaa

SEQ ID NO: 730346 - DNA, 25 bp, Homo sapien
tagagccctctctaattctgggtga

SEQ ID NO: 730347 - DNA, 25 bp, Homo sapien
cagctctgaggctgtaacaatgggt

SEQ ID NO: 730348 - DNA, 25 bp, Homo sapien
tgacagacaccagactcaacaaaga

SEQ ID NO: 730349 - DNA, 25 bp, Homo sapien
cacctaagtggtatttgataagctc

SEQ ID NO: 730350 - DNA, 25 bp, Homo sapien
tattttatgctgacgctagggccac

SEQ ID NO: 730351 - DNA, 25 bp, Homo sapien
gatgcccctggaaacctattgacag

SEQ ID NO: 730352 - DNA, 25 bp, Homo sapien
accgcgttcagccaatatttgggac

SEQ ID NO: 730353 - DNA, 25 bp, Homo sapien
cctgagatgctcttggttcctgtag

SEQ ID NO: 730354 - DNA, 25 bp, Homo sapien
tggtttaactatgggtggagccaaa

SEQ ID NO: 730355 - DNA, 25 bp, Homo sapien
cagctggaagtctcaagttctcaca

SEQ ID NO: 730356 - DNA, 25 bp, Homo sapien
agctgaaaaggccttctggacatgg

SEQ ID NO: 730357 - DNA, 25 bp, Homo sapien
aacattagtcttccgtcttggccag

SEQ ID NO: 730358 - DNA, 25 bp, Homo sapien
gctggcagggtaacagcctatgtac

SEQ ID NO: 730359 - DNA, 25 bp, Homo sapien
gcaaacagtcagcagagtccgaaga

SEQ ID NO: 730360 - DNA, 25 bp, Homo sapien
cgtgcagcaccggacgagtgtagct

SEQ ID NO: 730361 - DNA, 25 bp, Homo sapien
caccggacgagtgtagctcattcca

SEQ ID NO: 730362 - DNA, 25 bp, Homo sapien
gacgagtgtagctcattccaaatgg

SEQ ID NO: 730363 - DNA, 25 bp, Homo sapien
tagctcattccaaatggtgtcactg

SEQ ID NO: 730364 - DNA, 25 bp, Homo sapien
ttggaagccagctcgatgacacagc

SEQ ID NO: 730365 - DNA, 25 bp, Homo sapien
agccagctcgatgacacagccaaca

SEQ ID NO: 730366 - DNA, 25 bp, Homo sapien
gaagccagctcgatgacacagccaa

SEQ ID NO: 730367 - DNA, 25 bp, Homo sapien
cactttggaagccagctcgatgaca

SEQ ID NO: 730368 - DNA, 25 bp, Homo sapien
tattggggtaactgcattcaagacg

SEQ ID NO: 730369 - DNA, 25 bp, Homo sapien
gcattcaagacgcacatggcgtacc

SEQ ID NO: 730370 - DNA, 25 bp, Homo sapien
gacgcacatggcgtacctttaaata

SEQ ID NO: 730371 - DNA, 25 bp, Homo sapien
taactgcattcaagacgcacatggc

SEQ ID NO: 730372 - DNA, 25 bp, Homo sapien
ttctgatgactgaaacacgtgggca

SEQ ID NO: 730373 - DNA, 25 bp, Homo sapien
gatgttactacagctggtggtcagc

SEQ ID NO: 730374 - DNA, 25 bp, Homo sapien
cacgtgggcattctacttgagaagg

SEQ ID NO: 730375 - DNA, 25 bp, Homo sapien
tgttgacacattgtttggaactggc

SEQ ID NO: 730376 - DNA, 25 bp, Homo sapien
tatcagccccatcatatttgagtct

SEQ ID NO: 730377 - DNA, 25 bp, Homo sapien
atttgagtctgggacacgtaggcac

SEQ ID NO: 730378 - DNA, 25 bp, Homo sapien
gtatatcagccccatcatatttgag

SEQ ID NO: 730379 - DNA, 25 bp, Homo sapien
ggttgttgaatagcggtccacaaac

SEQ ID NO: 730380 - DNA, 25 bp, Homo sapien
ataagcttccctattttcttccaag

SEQ ID NO: 730381 - DNA, 25 bp, Homo sapien
tccttgaataagcttccctattttc

SEQ ID NO: 730382 - DNA, 25 bp, Homo sapien
caaaccatgagtaataatgctcctg

SEQ ID NO: 730383 - DNA, 25 bp, Homo sapien
gaatgaatcgaatccacaaaccatg

SEQ ID NO: 730384 - DNA, 25 bp, Homo sapien
ttatcaggccttctagtgaacgtcc

SEQ ID NO: 730385 - DNA, 25 bp, Homo sapien
ggtgacaagcctgagtattcctcga

SEQ ID NO: 730386 - DNA, 25 bp, Homo sapien
aaaattggcttctgcgcagtgtcca

SEQ ID NO: 730387 - DNA, 25 bp, Homo sapien
tatccacatgggcacgttcagccag

SEQ ID NO: 730388 - DNA, 25 bp, Homo sapien
caccagggttgatttggcagatcac

SEQ ID NO: 730389 - DNA, 25 bp, Homo sapien
cacttagttgaagaggatgacgttc

SEQ ID NO: 730390 - DNA, 25 bp, Homo sapien
caagaagtagcaagattatcctgtt

SEQ ID NO: 730391 - DNA, 25 bp, Homo sapien
gatcaagggtacacaagtagctgca

SEQ ID NO: 730392 - DNA, 25 bp, Homo sapien
tgcacatttaggttttttccgtatc

SEQ ID NO: 730393 - DNA, 25 bp, Homo sapien
ggcagatgacacttgaagatcctga

SEQ ID NO: 730394 - DNA, 25 bp, Homo sapien
cttcaaagagcatgagagggcagat

SEQ ID NO: 730395 - DNA, 25 bp, Homo sapien
tttgtagttcatctgctaatgcaca

SEQ ID NO: 730396 - DNA, 25 bp, Homo sapien
tgtaataggaccctcagaaacagag

SEQ ID NO: 730397 - DNA, 25 bp, Homo sapien
taagctcaatgtacttcaaccggaa

SEQ ID NO: 730398 - DNA, 25 bp, Homo sapien
caacaagcatgacagccgatttcta

SEQ ID NO: 730399 - DNA, 25 bp, Homo sapien
tcaatgtccagtgggccataccgaa

SEQ ID NO: 730400 - DNA, 25 bp, Homo sapien
caaagttgctgttcaatagtaacta

SEQ ID NO: 730401 - DNA, 25 bp, Homo sapien
taactatggatccttgatgtgttct

SEQ ID NO: 730402 - DNA, 25 bp, Homo sapien
caatagtaactatggatccttgatg

SEQ ID NO: 730403 - DNA, 25 bp, Homo sapien
ggatccttgatgtgttctaaagtct

SEQ ID NO: 730404 - DNA, 25 bp, Homo sapien
agccaaattccttgaacgaagtatc

SEQ ID NO: 730405 - DNA, 25 bp, Homo sapien
cacttcataatcctttgtgggaacc

SEQ ID NO: 730406 - DNA, 25 bp, Homo sapien
tccttgaacgaagtatctgcttttc

SEQ ID NO: 730407 - DNA, 25 bp, Homo sapien
ttttcacttcataatcctttgtggg

SEQ ID NO: 730408 - DNA, 25 bp, Homo sapien
gctgaagtaactccggcatgaaggc

SEQ ID NO: 730409 - DNA, 25 bp, Homo sapien
gaatgcatcacggaaagctgaagta

SEQ ID NO: 730410 - DNA, 25 bp, Homo sapien
gagaagcaagcagatctatccatga

SEQ ID NO: 730411 - DNA, 25 bp, Homo sapien
catgaaggcagggaactataaatcc

SEQ ID NO: 730412 - DNA, 25 bp, Homo sapien
gagaacaatggaaagcccatatttc

SEQ ID NO: 730413 - DNA, 25 bp, Homo sapien
cacatagacacaaaagaaatcccag

SEQ ID NO: 730414 - DNA, 25 bp, Homo sapien
taaatttagcttggatgaccgccaa

SEQ ID NO: 730415 - DNA, 25 bp, Homo sapien
tccctaagtcaatttctagcctgca

SEQ ID NO: 730416 - DNA, 25 bp, Homo sapien
tggctgtggattcttcagcgtgatg

SEQ ID NO: 730417 - DNA, 25 bp, Homo sapien
gctgtggattcttcagcgtgatggc

SEQ ID NO: 730418 - DNA, 25 bp, Homo sapien
atggctgtggattcttcagcgtgat

SEQ ID NO: 730419 - DNA, 25 bp, Homo sapien
ctgtggattcttcagcgtgatggcc

SEQ ID NO: 730420 - DNA, 25 bp, Homo sapien
ccaggaaccgtggtgcttggagatg

SEQ ID NO: 730421 - DNA, 25 bp, Homo sapien
cagtccatctgctaacaattagagg

SEQ ID NO: 730422 - DNA, 25 bp, Homo sapien
gggagtacctcgcaagatttttcag

SEQ ID NO: 730423 - DNA, 25 bp, Homo sapien
cttcagaaacatgcacggggcaggt

SEQ ID NO: 730424 - DNA, 25 bp, Homo sapien
tctcaagtatttggcggtaattgca

SEQ ID NO: 730425 - DNA, 25 bp, Homo sapien
tatttggcggtaattgcaactgaat

SEQ ID NO: 730426 - DNA, 25 bp, Homo sapien
ggcggtaattgcaactgaattaaaa

SEQ ID NO: 730427 - DNA, 25 bp, Homo sapien
gcttatatttagttggtctctcaag

SEQ ID NO: 730428 - DNA, 25 bp, Homo sapien
cctattacacctccttgagaactgg

SEQ ID NO: 730429 - DNA, 25 bp, Homo sapien
gaaaacggggctcataaatcaccat

SEQ ID NO: 730430 - DNA, 25 bp, Homo sapien
gctttgtcagacaacctattacacc

SEQ ID NO: 730431 - DNA, 25 bp, Homo sapien
gtttggatgccagggttcatttcct

SEQ ID NO: 730432 - DNA, 25 bp, Homo sapien
ataatctgtttgatcctcttggcaa

SEQ ID NO: 730433 - DNA, 25 bp, Homo sapien
tcataatctgtttgatcctcttggc

SEQ ID NO: 730434 - DNA, 25 bp, Homo sapien
attcataatctgtttgatcctcttg

SEQ ID NO: 730435 - DNA, 25 bp, Homo sapien
cataatctgtttgatcctcttggca

SEQ ID NO: 730436 - DNA, 25 bp, Homo sapien
agttagcaatccctccgcagttaga

SEQ ID NO: 730437 - DNA, 25 bp, Homo sapien
aaattggctttcttgaagcgttcag

SEQ ID NO: 730438 - DNA, 25 bp, Homo sapien
catacgtgtatgcattgatttgcca

SEQ ID NO: 730439 - DNA, 25 bp, Homo sapien
ccaagtcccaccattaaggtcaaag

SEQ ID NO: 730440 - DNA, 25 bp, Homo sapien
ggaaaaagttcccttcatcatagcg

SEQ ID NO: 730441 - DNA, 25 bp, Homo sapien
catagcgatggagtgaaatgtacag

SEQ ID NO: 730442 - DNA, 25 bp, Homo sapien
cccttcatcatagcgatggagtgaa

SEQ ID NO: 730443 - DNA, 25 bp, Homo sapien
gctggggtcagcataaaaggcctgc

SEQ ID NO: 730444 - DNA, 25 bp, Homo sapien
tcatgcaatgcaattacctgaaaga

SEQ ID NO: 730445 - DNA, 25 bp, Homo sapien
caattacctgaaagatacaaataaa

SEQ ID NO: 730446 - DNA, 25 bp, Homo sapien
gatacaaataaaagtggggctctaa

SEQ ID NO: 730447 - DNA, 25 bp, Homo sapien
caatgcaattacctgaaagatacaa

SEQ ID NO: 730448 - DNA, 25 bp, Homo sapien
aatatttatattgtacccttctcca

SEQ ID NO: 730449 - DNA, 25 bp, Homo sapien
atttatattgtacccttctccaagg

SEQ ID NO: 730450 - DNA, 25 bp, Homo sapien
ctcaacatctcccatgggaggatca

SEQ ID NO: 730451 - DNA, 25 bp, Homo sapien
tctcccatgggaggatcaaggccac

SEQ ID NO: 730452 - DNA, 25 bp, Homo sapien
tcagtatgaatacccccgactccaa

SEQ ID NO: 730453 - DNA, 25 bp, Homo sapien
aggttgaacaatacttgatgaaacc

SEQ ID NO: 730454 - DNA, 25 bp, Homo sapien
tctgcccagtcagtatgaatacccc

SEQ ID NO: 730455 - DNA, 25 bp, Homo sapien
tgaacaatacttgatgaaacctttc

SEQ ID NO: 730456 - DNA, 25 bp, Homo sapien
aaagtcactgagaaacgggcctagc

SEQ ID NO: 730457 - DNA, 25 bp, Homo sapien
tgtgcgtaacggtgaaattcaacac

SEQ ID NO: 730458 - DNA, 25 bp, Homo sapien
tcaggcctgaccctaaggctggcaa

SEQ ID NO: 730459 - DNA, 25 bp, Homo sapien
tgatggaacatataatggccccttt

SEQ ID NO: 730460 - DNA, 25 bp, Homo sapien
caatcatttcagtccttaaaaataa

SEQ ID NO: 730461 - DNA, 25 bp, Homo sapien
gcaatcatttcagtccttaaaaata

SEQ ID NO: 730462 - DNA, 25 bp, Homo sapien
gcggaacgcgaaggagaagcaaggc

SEQ ID NO: 730463 - DNA, 25 bp, Homo sapien
ggaacgcgaaggagaagcaaggcac

SEQ ID NO: 730464 - DNA, 25 bp, Homo sapien
cggaacgcgaaggagaagcaaggca

SEQ ID NO: 730465 - DNA, 25 bp, Homo sapien
tggcggaacgcgaaggagaagcaag

SEQ ID NO: 730466 - DNA, 25 bp, Homo sapien
aggagatcagcccaagatctaggag

SEQ ID NO: 730467 - DNA, 25 bp, Homo sapien
cccaagatctaggagtgttacatgt

SEQ ID NO: 730468 - DNA, 25 bp, Homo sapien
tattcatagctaaaataacaggaga

SEQ ID NO: 730469 - DNA, 25 bp, Homo sapien
tctaggagtgttacatgtattcata

SEQ ID NO: 730470 - DNA, 25 bp, Homo sapien
gcatgacatccttttcaaggaactg

SEQ ID NO: 730471 - DNA, 25 bp, Homo sapien
atgtggcctttctgaggaaggcagc

SEQ ID NO: 730472 - DNA, 25 bp, Homo sapien
ccttttcaaggaactgtttgtgtct

SEQ ID NO: 730473 - DNA, 25 bp, Homo sapien
gcctttctgaggaaggcagcatcat

SEQ ID NO: 730474 - DNA, 25 bp, Homo sapien
tcttcttgaagaacaaccctcttcc

SEQ ID NO: 730475 - DNA, 25 bp, Homo sapien
ctggccccagtcagacacttcaaca

SEQ ID NO: 730476 - DNA, 25 bp, Homo sapien
catgacagcaacccctgctggcccc

SEQ ID NO: 730477 - DNA, 25 bp, Homo sapien
ttctcaacttcagggctccgaaacc

SEQ ID NO: 730478 - DNA, 25 bp, Homo sapien
tgctggccccagtcagacacttcaa

SEQ ID NO: 730479 - DNA, 25 bp, Homo sapien
tgtggccttccaatgcatcaaatcc

SEQ ID NO: 730480 - DNA, 25 bp, Homo sapien
ggtgtggccttccaatgcatcaaat

SEQ ID NO: 730481 - DNA, 25 bp, Homo sapien
agaccatgtctggatcaaactcttt

SEQ ID NO: 730482 - DNA, 25 bp, Homo sapien
tcaaatccagcagatactaagacca

SEQ ID NO: 730483 - DNA, 25 bp, Homo sapien
taaaagatggtatgatatcagagcc

SEQ ID NO: 730484 - DNA, 25 bp, Homo sapien
taaagacctaaaagatggtatgata

SEQ ID NO: 730485 - DNA, 25 bp, Homo sapien
gagcctttcgtaaagtcctgaaaga

SEQ ID NO: 730486 - DNA, 25 bp, Homo sapien
agagcctttcgtaaagtcctgaaag

SEQ ID NO: 730487 - DNA, 25 bp, Homo sapien
aatatgagaagcaacaagtaacaac

SEQ ID NO: 730488 - DNA, 25 bp, Homo sapien
ttgaaacactgtataagctctcaac

SEQ ID NO: 730489 - DNA, 25 bp, Homo sapien
gaaggaaggccaaatatgagaagca

SEQ ID NO: 730490 - DNA, 25 bp, Homo sapien
acactgtataagctctcaacacagc

SEQ ID NO: 730491 - DNA, 25 bp, Homo sapien
tgcagggagggccagaaaggcaata

SEQ ID NO: 730492 - DNA, 25 bp, Homo sapien
gcaataacccttaatatagcaggac

SEQ ID NO: 730493 - DNA, 25 bp, Homo sapien
gccagaaaggcaataacccttaata

SEQ ID NO: 730494 - DNA, 25 bp, Homo sapien
cagggagggccagaaaggcaataac

SEQ ID NO: 730495 - DNA, 25 bp, Homo sapien
tgtaacccagattgtaactttaaga

SEQ ID NO: 730496 - DNA, 25 bp, Homo sapien
cagtctgtaacccagattgtaactt

SEQ ID NO: 730497 - DNA, 25 bp, Homo sapien
tctggctgctcagataaacagccca

SEQ ID NO: 730498 - DNA, 25 bp, Homo sapien
gtctgtaacccagattgtaacttta

SEQ ID NO: 730499 - DNA, 25 bp, Homo sapien
tagggcaatttcatgtgtaactttt

SEQ ID NO: 730500 - DNA, 25 bp, Homo sapien
agggcaatttcatgtgtaacttttc

SEQ ID NO: 730501 - DNA, 25 bp, Homo sapien
ttagggcaatttcatgtgtaacttt

SEQ ID NO: 730502 - DNA, 25 bp, Homo sapien
tgtgagggtgctcccgatgtgaaaa

SEQ ID NO: 730503 - DNA, 25 bp, Homo sapien
aattgcaggtggtttccatagtgcc

SEQ ID NO: 730504 - DNA, 25 bp, Homo sapien
atgtgaaaagagagatcttccttcc

SEQ ID NO: 730505 - DNA, 25 bp, Homo sapien
tccaaactgttgtacctccagcaca

SEQ ID NO: 730506 - DNA, 25 bp, Homo sapien
ccatgtcaagctgccagctcctcta

SEQ ID NO: 730507 - DNA, 25 bp, Homo sapien
gcctagtgccatcacattcttggat

SEQ ID NO: 730508 - DNA, 25 bp, Homo sapien
tgccatcacattcttggatttcccc

SEQ ID NO: 730509 - DNA, 25 bp, Homo sapien
ctggcctagtgccatcacattcttg

SEQ ID NO: 730510 - DNA, 25 bp, Homo sapien
aacaccacacgtccatcagccaatg

SEQ ID NO: 730511 - DNA, 25 bp, Homo sapien
gtgagatcatgtcctccttctagag

SEQ ID NO: 730512 - DNA, 25 bp, Homo sapien
cagccaatgtcatcaattgcttcgt

SEQ ID NO: 730513 - DNA, 25 bp, Homo sapien
aattgcttcgtcaaatgaccaaaac

SEQ ID NO: 730514 - DNA, 25 bp, Homo sapien
agcattcatattcgggctttggtgg

SEQ ID NO: 730515 - DNA, 25 bp, Homo sapien
cgggctttggtggagaatatcttct

SEQ ID NO: 730516 - DNA, 25 bp, Homo sapien
ttcatattcgggctttggtggagaa

SEQ ID NO: 730517 - DNA, 25 bp, Homo sapien
aataacagcattcatattcgggctt

SEQ ID NO: 730518 - DNA, 25 bp, Homo sapien
aaatagagaactttggcatgatcca

SEQ ID NO: 730519 - DNA, 25 bp, Homo sapien
gggcttacaaggaggtctatggatt

SEQ ID NO: 730520 - DNA, 25 bp, Homo sapien
ttacacaccgggttctcataggaaa

SEQ ID NO: 730521 - DNA, 25 bp, Homo sapien
tgcataaattgagtgaccaggtaat

SEQ ID NO: 730522 - DNA, 25 bp, Homo sapien
gtctcctcttgcaactgagcaccag

SEQ ID NO: 730523 - DNA, 25 bp, Homo sapien
ttcctgagcaaagggctgttccaca

SEQ ID NO: 730524 - DNA, 25 bp, Homo sapien
ctgagcaaagggctgttccacatcc

SEQ ID NO: 730525 - DNA, 25 bp, Homo sapien
tcttcctgagcaaagggctgttcca

SEQ ID NO: 730526 - DNA, 25 bp, Homo sapien
tgctgtcttcctgagcaaagggctg

SEQ ID NO: 730527 - DNA, 25 bp, Homo sapien
tatgtattttggctatccaacggtc

SEQ ID NO: 730528 - DNA, 25 bp, Homo sapien
tccaacggtctagcattatttccat

SEQ ID NO: 730529 - DNA, 25 bp, Homo sapien
tttatccagttgttggacctcaagg

SEQ ID NO: 730530 - DNA, 25 bp, Homo sapien
cagccacgtaaggagtgtgtatgta

SEQ ID NO: 730531 - DNA, 25 bp, Homo sapien
gcctgaactgatatccaagagtaaa

SEQ ID NO: 730532 - DNA, 25 bp, Homo sapien
gaagtcttgattgcctttccaaatc

SEQ ID NO: 730533 - DNA, 25 bp, Homo sapien
agagtaaacctgagtactgtactga

SEQ ID NO: 730534 - DNA, 25 bp, Homo sapien
tgatcatcttgaagtcttgattgcc

SEQ ID NO: 730535 - DNA, 25 bp, Homo sapien
gcttctgttctttcataactggatt

SEQ ID NO: 730536 - DNA, 25 bp, Homo sapien
gttctttcataactggattggctgc

SEQ ID NO: 730537 - DNA, 25 bp, Homo sapien
ctgttctttcataactggattggct

SEQ ID NO: 730538 - DNA, 25 bp, Homo sapien
tagggctctggtttttgcttctgtt

SEQ ID NO: 730539 - DNA, 25 bp, Homo sapien
ggctcctcttccataggctcaccag

SEQ ID NO: 730540 - DNA, 25 bp, Homo sapien
gctcctcttccataggctcaccagc

SEQ ID NO: 730541 - DNA, 25 bp, Homo sapien
ctcctcttccataggctcaccagca

SEQ ID NO: 730542 - DNA, 25 bp, Homo sapien
gatattcatttcaacggcttcacag

SEQ ID NO: 730543 - DNA, 25 bp, Homo sapien
tacgatccgttcatagctaaaagca

SEQ ID NO: 730544 - DNA, 25 bp, Homo sapien
tactgtaactctagaatcacagcgg

SEQ ID NO: 730545 - DNA, 25 bp, Homo sapien
tcacagcggttacgtttaaggaatc

SEQ ID NO: 730546 - DNA, 25 bp, Homo sapien
cacatggtacaaaatcctgctggag

SEQ ID NO: 730547 - DNA, 25 bp, Homo sapien
tacaaaaccattatacgaagccagg

SEQ ID NO: 730548 - DNA, 25 bp, Homo sapien
caaaaccactggtgcacagaggaca

SEQ ID NO: 730549 - DNA, 25 bp, Homo sapien
aatattggtttcctgcctgccctgc

SEQ ID NO: 730550 - DNA, 25 bp, Homo sapien
atcaaatctgctagatgaattatgt

SEQ ID NO: 730551 - DNA, 25 bp, Homo sapien
tctgctagatgaattatgtaattca

SEQ ID NO: 730552 - DNA, 25 bp, Homo sapien
tttgcaaattgcatccaggaactca

SEQ ID NO: 730553 - DNA, 25 bp, Homo sapien
atttgcaaattgcatccaggaactc

SEQ ID NO: 730554 - DNA, 25 bp, Homo sapien
ccaacttcaggcaagtgtggctttg

SEQ ID NO: 730555 - DNA, 25 bp, Homo sapien
tgtggctttgtaggtcccagggatc

SEQ ID NO: 730556 - DNA, 25 bp, Homo sapien
tcccagggatcgagccctgcagttg

SEQ ID NO: 730557 - DNA, 25 bp, Homo sapien
gcagttgcaccacataacctacaca

SEQ ID NO: 730558 - DNA, 25 bp, Homo sapien
tctttaggtaactcgagagcatata

SEQ ID NO: 730559 - DNA, 25 bp, Homo sapien
gaaagcttttcgtagcatcatgggc

SEQ ID NO: 730560 - DNA, 25 bp, Homo sapien
gagaaagcttttcgtagcatcatgg

SEQ ID NO: 730561 - DNA, 25 bp, Homo sapien
actcgagagcatatacagtggccct

SEQ ID NO: 730562 - DNA, 25 bp, Homo sapien
tattttctgtgtcatcgttcctctt

SEQ ID NO: 730563 - DNA, 25 bp, Homo sapien
tgtcaagagaagttattgccacttt

SEQ ID NO: 730564 - DNA, 25 bp, Homo sapien
ttttggtgtagttttagttgcatcc

SEQ ID NO: 730565 - DNA, 25 bp, Homo sapien
gcatccattatgtcaagagaagtta

SEQ ID NO: 730566 - DNA, 25 bp, Homo sapien
cctttccaattctgtgcctgttgaa

SEQ ID NO: 730567 - DNA, 25 bp, Homo sapien
ccaattctgtgcctgttgaaaacag

SEQ ID NO: 730568 - DNA, 25 bp, Homo sapien
tccaattctgtgcctgttgaaaaca

SEQ ID NO: 730569 - DNA, 25 bp, Homo sapien
ttccaattctgtgcctgttgaaaac

SEQ ID NO: 730570 - DNA, 25 bp, Homo sapien
gctaaagcacttaaatgaagctaaa

SEQ ID NO: 730571 - DNA, 25 bp, Homo sapien
tacgagtccaacatgtttagtaaag

SEQ ID NO: 730572 - DNA, 25 bp, Homo sapien
ttgtactttgccgatcacaggagca

SEQ ID NO: 730573 - DNA, 25 bp, Homo sapien
aatatcagggtttcttacgagtcca

SEQ ID NO: 730574 - DNA, 25 bp, Homo sapien
ccccaatgctttcacgaggtaataa

SEQ ID NO: 730575 - DNA, 25 bp, Homo sapien
gccattgagtttagcaagcagcaca

SEQ ID NO: 730576 - DNA, 25 bp, Homo sapien
gagtagggcgtatgatcatatccca

SEQ ID NO: 730577 - DNA, 25 bp, Homo sapien
cacaactagcattgtgcatagagag

SEQ ID NO: 730578 - DNA, 25 bp, Homo sapien
tgtgggagaataggagtggagaggg

SEQ ID NO: 730579 - DNA, 25 bp, Homo sapien
ggagagggaaaataagttcctctgc

SEQ ID NO: 730580 - DNA, 25 bp, Homo sapien
agggaaaataagttcctctgcatta

SEQ ID NO: 730581 - DNA, 25 bp, Homo sapien
aaaataagttcctctgcattaagca

SEQ ID NO: 730582 - DNA, 25 bp, Homo sapien
gagggaaacttgcttcccatagcca

SEQ ID NO: 730583 - DNA, 25 bp, Homo sapien
cgtgtgctaaaagccccggccagct

SEQ ID NO: 730584 - DNA, 25 bp, Homo sapien
ccgaggactccagaaaagcgtattg

SEQ ID NO: 730585 - DNA, 25 bp, Homo sapien
gcgaaggtcccgtcccgtgtgctaa

SEQ ID NO: 730586 - DNA, 25 bp, Homo sapien
tattgggtttagaagcgctgtagcc

SEQ ID NO: 730587 - DNA, 25 bp, Homo sapien
caaagttgctctcttgggatcgagg

SEQ ID NO: 730588 - DNA, 25 bp, Homo sapien
tctttccataaacgcgctgcgagcg

SEQ ID NO: 730589 - DNA, 25 bp, Homo sapien
gaataatctcgaccctggagtctgc

SEQ ID NO: 730590 - DNA, 25 bp, Homo sapien
gttgctgtgcaaacgtaacgcaggc

SEQ ID NO: 730591 - DNA, 25 bp, Homo sapien
aaccgtccctgatcaaagagattcg

SEQ ID NO: 730592 - DNA, 25 bp, Homo sapien
atctgtcatctgtagcagtggacag

SEQ ID NO: 730593 - DNA, 25 bp, Homo sapien
ggcattttagcagccgcatctgtca

SEQ ID NO: 730594 - DNA, 25 bp, Homo sapien
gggaccaggcattttagcagccgca

SEQ ID NO: 730595 - DNA, 25 bp, Homo sapien
ccacggcaaaggttggcactgggag

SEQ ID NO: 730596 - DNA, 25 bp, Homo sapien
cagtcaggcctgaagtgggagacta

SEQ ID NO: 730597 - DNA, 25 bp, Homo sapien
gagactaaggatcgggagtctctca

SEQ ID NO: 730598 - DNA, 25 bp, Homo sapien
tctcaaagaacctggccacggcaaa

SEQ ID NO: 730599 - DNA, 25 bp, Homo sapien
ccttcgtgcgatttaggctgaagtc

SEQ ID NO: 730600 - DNA, 25 bp, Homo sapien
tcgtgcgatttaggctgaagtcaga

SEQ ID NO: 730601 - DNA, 25 bp, Homo sapien
cctcctccttcgtgcgatttaggct

SEQ ID NO: 730602 - DNA, 25 bp, Homo sapien
cctccttcgtgcgatttaggctgaa

SEQ ID NO: 730603 - DNA, 25 bp, Homo sapien
gagtttaaggcatgtatggaattcc

SEQ ID NO: 730604 - DNA, 25 bp, Homo sapien
aggtgtgtaattggagtttaaggca

SEQ ID NO: 730605 - DNA, 25 bp, Homo sapien
aattggagtttaaggcatgtatgga

SEQ ID NO: 730606 - DNA, 25 bp, Homo sapien
ttaaggcatgtatggaattcccaga

SEQ ID NO: 730607 - DNA, 25 bp, Homo sapien
tggaaggagaaatcggtttcttcat

SEQ ID NO: 730608 - DNA, 25 bp, Homo sapien
gtggaaggagaaatcggtttcttca

SEQ ID NO: 730609 - DNA, 25 bp, Homo sapien
aggcccacattagcgacagacaggg

SEQ ID NO: 730610 - DNA, 25 bp, Homo sapien
tatatgtcgtaaagagtgcgccgcc

SEQ ID NO: 730611 - DNA, 25 bp, Homo sapien
ctcgaatttccggagacaggcccac

SEQ ID NO: 730612 - DNA, 25 bp, Homo sapien
ccagcaccagtgaaagtggaaggaa

SEQ ID NO: 730613 - DNA, 25 bp, Homo sapien
acggtctcccctgcgtgggtggcgg

SEQ ID NO: 730614 - DNA, 25 bp, Homo sapien
gtccgtatctccttcggtttgcgtg

SEQ ID NO: 730615 - DNA, 25 bp, Homo sapien
cggcggtgccaagtgtcagcggtag

SEQ ID NO: 730616 - DNA, 25 bp, Homo sapien
cgcgtctggccgctgctaggaggcg

SEQ ID NO: 730617 - DNA, 25 bp, Homo sapien
tctcatgatgtcaggcggttttccc

SEQ ID NO: 730618 - DNA, 25 bp, Homo sapien
taaggagcagaaacttgcacgatgt

SEQ ID NO: 730619 - DNA, 25 bp, Homo sapien
taattcacgcacagttacaggttcc

SEQ ID NO: 730620 - DNA, 25 bp, Homo sapien
cccaggaatccttcaaagtgagcgt

SEQ ID NO: 730621 - DNA, 25 bp, Homo sapien
tagatccggtgtctaaatgcattca

SEQ ID NO: 730622 - DNA, 25 bp, Homo sapien
tctcaagaggtcgtgccaatcagcc

SEQ ID NO: 730623 - DNA, 25 bp, Homo sapien
tattgaggacccatggtaaaatgca

SEQ ID NO: 730624 - DNA, 25 bp, Homo sapien
caatcagaggaactataagaacacc

SEQ ID NO: 730625 - DNA, 25 bp, Homo sapien
tctgatagaagtctgaacagttgtt

SEQ ID NO: 730626 - DNA, 25 bp, Homo sapien
gacgggcagcggcaccatcctcaca

SEQ ID NO: 730627 - DNA, 25 bp, Homo sapien
cattctgatagaagtctgaacagtt

SEQ ID NO: 730628 - DNA, 25 bp, Homo sapien
ctgcattctgatagaagtctgaaca

SEQ ID NO: 730629 - DNA, 25 bp, Homo sapien
gggcctggtccatgtccgcgtccca

SEQ ID NO: 730630 - DNA, 25 bp, Homo sapien
ctggaggatggagggggcctggtcc

SEQ ID NO: 730631 - DNA, 25 bp, Homo sapien
gatggagggggcctggtccatgtcc

SEQ ID NO: 730632 - DNA, 25 bp, Homo sapien
gaggatggagggggcctggtccatg

SEQ ID NO: 730633 - DNA, 25 bp, Homo sapien
caagctgcagctatgtggctcacga

SEQ ID NO: 730634 - DNA, 25 bp, Homo sapien
tggcggccaggtacatcgacttcct

SEQ ID NO: 730635 - DNA, 25 bp, Homo sapien
aagattcagaccctcaagctggcgg

SEQ ID NO: 730636 - DNA, 25 bp, Homo sapien
tgccctcggacaagctgagcaagat

SEQ ID NO: 730637 - DNA, 25 bp, Homo sapien
gcagcagccgccgagcggcaagcgc

SEQ ID NO: 730638 - DNA, 25 bp, Homo sapien
ggcccagggcaagcgcggcaagaag

SEQ ID NO: 730639 - DNA, 25 bp, Homo sapien
tgggggcgtcggaggcggcgacgag

SEQ ID NO: 730640 - DNA, 25 bp, Homo sapien
aggaagagccagaccggcagcagcc

SEQ ID NO: 730641 - DNA, 25 bp, Homo sapien
ggttcgtctacctgaccattgggtg

SEQ ID NO: 730642 - DNA, 25 bp, Homo sapien
tgggtttccttccaccgaagagtga

SEQ ID NO: 730643 - DNA, 25 bp, Homo sapien
tttcgagcaccttccgaggcgtagt

SEQ ID NO: 730644 - DNA, 25 bp, Homo sapien
gctcttgggcgagatgagacatcac

SEQ ID NO: 730645 - DNA, 25 bp, Homo sapien
aatcctgtagcggaagatgcaaacg

SEQ ID NO: 730646 - DNA, 25 bp, Homo sapien
ggtttccaagaccaaagctgcgagt

SEQ ID NO: 730647 - DNA, 25 bp, Homo sapien
gcggctcactaaacaggccagttga

SEQ ID NO: 730648 - DNA, 25 bp, Homo sapien
tcgctggagaaataacactcgccct

SEQ ID NO: 730649 - DNA, 25 bp, Homo sapien
agatggactggctaatgacccctgg

SEQ ID NO: 730650 - DNA, 25 bp, Homo sapien
catcagctagaagtttagtgccggg

SEQ ID NO: 730651 - DNA, 25 bp, Homo sapien
ctgtcaacaagtaaaaagggagcca

SEQ ID NO: 730652 - DNA, 25 bp, Homo sapien
agggagccatccttgcaaatgtgga

SEQ ID NO: 730653 - DNA, 25 bp, Homo sapien
ggttaatgggcagctaagacaccaa

SEQ ID NO: 730654 - DNA, 25 bp, Homo sapien
catcagttattccagcaactctttg

SEQ ID NO: 730655 - DNA, 25 bp, Homo sapien
caagtgaagtgagtgtgttttccaa

SEQ ID NO: 730656 - DNA, 25 bp, Homo sapien
ttccagcaactctttgatacaagtg

SEQ ID NO: 730657 - DNA, 25 bp, Homo sapien
ctgaagggtcggtggtacgccatcc

SEQ ID NO: 730658 - DNA, 25 bp, Homo sapien
gtctgaagcagacgccgcaagggtg

SEQ ID NO: 730659 - DNA, 25 bp, Homo sapien
tctgctagccagagggttctgcctg

SEQ ID NO: 730660 - DNA, 25 bp, Homo sapien
gcgcctgcgtggagggtctgaagca

SEQ ID NO: 730661 - DNA, 25 bp, Homo sapien
gaactacacgagataaggagcctgg

SEQ ID NO: 730662 - DNA, 25 bp, Homo sapien
gatggtggcaagattcaagactcct

SEQ ID NO: 730663 - DNA, 25 bp, Homo sapien
gccatcgcggtggaaaacatcctcg

SEQ ID NO: 730664 - DNA, 25 bp, Homo sapien
gaaggtgcccacgtttgcttacgag

SEQ ID NO: 730665 - DNA, 25 bp, Homo sapien
atcagaggatgacggctcctcttcc

SEQ ID NO: 730666 - DNA, 25 bp, Homo sapien
cttatcagaggatgacggctcctct

SEQ ID NO: 730667 - DNA, 25 bp, Homo sapien
caacactccaaaatgtccagctggc

SEQ ID NO: 730668 - DNA, 25 bp, Homo sapien
gcttatcagaggatgacggctcctc

SEQ ID NO: 730669 - DNA, 25 bp, Homo sapien
attgctgtgctctattacataatac

SEQ ID NO: 730670 - DNA, 25 bp, Homo sapien
aatacttccttagccagattccaag

SEQ ID NO: 730671 - DNA, 25 bp, Homo sapien
ctttgccagtgtccccaaaattgct

SEQ ID NO: 730672 - DNA, 25 bp, Homo sapien
ccaaaattgctgtgctctattacat

SEQ ID NO: 730673 - DNA, 25 bp, Homo sapien
gtcgaagcttcactgtagtgtgatg

SEQ ID NO: 730674 - DNA, 25 bp, Homo sapien
ccttccaccttgagtcgaagcttca

SEQ ID NO: 730675 - DNA, 25 bp, Homo sapien
ccttgagtcgaagcttcactgtagt

SEQ ID NO: 730676 - DNA, 25 bp, Homo sapien
tccaccttgagtcgaagcttcactg

SEQ ID NO: 730677 - DNA, 25 bp, Homo sapien
cagctgaatatccaacaaacaggta

SEQ ID NO: 730678 - DNA, 25 bp, Homo sapien
gatttgccacaatacatataccagc

SEQ ID NO: 730679 - DNA, 25 bp, Homo sapien
tgtggcctcaaactgtcttacaggt

SEQ ID NO: 730680 - DNA, 25 bp, Homo sapien
tcttacaggtagtaaaggctacaac

SEQ ID NO: 730681 - DNA, 25 bp, Homo sapien
tgaaggtcactgagtaacaattact

SEQ ID NO: 730682 - DNA, 25 bp, Homo sapien
caagattaaggagatcatatttctg

SEQ ID NO: 730683 - DNA, 25 bp, Homo sapien
tgttttatgccctgtgatacagtga

SEQ ID NO: 730684 - DNA, 25 bp, Homo sapien
gatggaggaagttatggaacatgca

SEQ ID NO: 730685 - DNA, 25 bp, Homo sapien
taagttggtaagataaagatactcc

SEQ ID NO: 730686 - DNA, 25 bp, Homo sapien
ttccaggagactgtttttgccattg

SEQ ID NO: 730687 - DNA, 25 bp, Homo sapien
tgctttcatccagtgaagtttcatg

SEQ ID NO: 730688 - DNA, 25 bp, Homo sapien
agtgaagtttcatgcaagggactga

SEQ ID NO: 730689 - DNA, 25 bp, Homo sapien
tcctgtgtctcttggttgcataagt

SEQ ID NO: 730690 - DNA, 25 bp, Homo sapien
cctgtgtctcttggttgcataagtg

SEQ ID NO: 730691 - DNA, 25 bp, Homo sapien
taagcagtattttgtgtggcctgtg

SEQ ID NO: 730692 - DNA, 25 bp, Homo sapien
tgcaccagcagtttccgataagcag

SEQ ID NO: 730693 - DNA, 25 bp, Homo sapien
agagcatatgcaccagcagtttccg

SEQ ID NO: 730694 - DNA, 25 bp, Homo sapien
gcagtttccgataagcagtattttg

SEQ ID NO: 730695 - DNA, 25 bp, Homo sapien
ggtaggcctgccaaagggacaaatg

SEQ ID NO: 730696 - DNA, 25 bp, Homo sapien
tcaaaggtaggcctgccaaagggac

SEQ ID NO: 730697 - DNA, 25 bp, Homo sapien
cctgccaaagggacaaatgaacttg

SEQ ID NO: 730698 - DNA, 25 bp, Homo sapien
taggcctgccaaagggacaaatgaa

SEQ ID NO: 730699 - DNA, 25 bp, Homo sapien
ggcatatgattgaacaattgcgtac

SEQ ID NO: 730700 - DNA, 25 bp, Homo sapien
taatatgccaacataaatctgcctc

SEQ ID NO: 730701 - DNA, 25 bp, Homo sapien
gcctattaatttcacagttactacg

SEQ ID NO: 730702 - DNA, 25 bp, Homo sapien
acacatatgtttatagagcctatta

SEQ ID NO: 730703 - DNA, 25 bp, Homo sapien
ttgaaaataatatgaaatcacatcc

SEQ ID NO: 730704 - DNA, 25 bp, Homo sapien
atttgaaaataatatgaaatcacat

SEQ ID NO: 730705 - DNA, 25 bp, Homo sapien
gaaaataatatgaaatcacatccat

SEQ ID NO: 730706 - DNA, 25 bp, Homo sapien
aaatttgaaaataatatgaaatcac

SEQ ID NO: 730707 - DNA, 25 bp, Homo sapien
cccagaaagtgcctgacccaaattc

SEQ ID NO: 730708 - DNA, 25 bp, Homo sapien
ccaggcccacatagctgtcatcaaa

SEQ ID NO: 730709 - DNA, 25 bp, Homo sapien
attcttagaaccgtccttggctcct

SEQ ID NO: 730710 - DNA, 25 bp, Homo sapien
tcatcggggatgatcccaggcccac

SEQ ID NO: 730711 - DNA, 25 bp, Homo sapien
ctaccacagccttctgactaagctg

SEQ ID NO: 730712 - DNA, 25 bp, Homo sapien
tctaccacagccttctgactaagct

SEQ ID NO: 730713 - DNA, 25 bp, Homo sapien
cagcctcaactactcaggttcaggc

SEQ ID NO: 730714 - DNA, 25 bp, Homo sapien
gcctcaactactcaggttcaggcga

SEQ ID NO: 730715 - DNA, 25 bp, Homo sapien
ccattgcttgggtgaaggggattcc

SEQ ID NO: 730716 - DNA, 25 bp, Homo sapien
ggtccccaagcctgatggcccactg

SEQ ID NO: 730717 - DNA, 25 bp, Homo sapien
gctgattagctcattgcccattgct

SEQ ID NO: 730718 - DNA, 25 bp, Homo sapien
tcacaggtttcatagccaagtctct

SEQ ID NO: 730719 - DNA, 25 bp, Homo sapien
tcaagaaaagcttgtctgtctttag

SEQ ID NO: 730720 - DNA, 25 bp, Homo sapien
tgatgtctgtgtttgggttagttac

SEQ ID NO: 730721 - DNA, 25 bp, Homo sapien
ctatttactagactgcagctatcaa

SEQ ID NO: 730722 - DNA, 25 bp, Homo sapien
tgccagacaggttcaaaaagaatgt

SEQ ID NO: 730723 - DNA, 25 bp, Homo sapien
gttggtctctaacatctgactcgac

SEQ ID NO: 730724 - DNA, 25 bp, Homo sapien
gagtcatgcatagctagttgttgta

SEQ ID NO: 730725 - DNA, 25 bp, Homo sapien
catctgactcgactagagactgcat

SEQ ID NO: 730726 - DNA, 25 bp, Homo sapien
tagagactgcatgctgaaagagtca

SEQ ID NO: 730727 - DNA, 25 bp, Homo sapien
atgatgataatgctgaagttgcaac

SEQ ID NO: 730728 - DNA, 25 bp, Homo sapien
gatgataatgctgaagttgcaacat

SEQ ID NO: 730729 - DNA, 25 bp, Homo sapien
tgatgataatgctgaagttgcaaca

SEQ ID NO: 730730 - DNA, 25 bp, Homo sapien
ctcagtgagtccagacactcaataa

SEQ ID NO: 730731 - DNA, 25 bp, Homo sapien
gactagtagcattgtgtacatggaa

SEQ ID NO: 730732 - DNA, 25 bp, Homo sapien
gaaaaaccatcagtaactgtgcagt

SEQ ID NO: 730733 - DNA, 25 bp, Homo sapien
catggaatgcttggctcttgggttc

SEQ ID NO: 730734 - DNA, 25 bp, Homo sapien
ctgtgcagtaaagtttcctctctct

SEQ ID NO: 730735 - DNA, 25 bp, Homo sapien
tgatcacactacttagcaattgctg

SEQ ID NO: 730736 - DNA, 25 bp, Homo sapien
tttctgaaattgtggagtggaagca

SEQ ID NO: 730737 - DNA, 25 bp, Homo sapien
tgtcaattctgtgtatgctataatg

SEQ ID NO: 730738 - DNA, 25 bp, Homo sapien
tcagatagataaaccaagtagaagt

SEQ ID NO: 730739 - DNA, 25 bp, Homo sapien
tgtttggtagaatatcaattgttga

SEQ ID NO: 730740 - DNA, 25 bp, Homo sapien
tatatgtgtttggtagaatatcaat

SEQ ID NO: 730741 - DNA, 25 bp, Homo sapien
cttacttgcggtaaaagtttgcaat

SEQ ID NO: 730742 - DNA, 25 bp, Homo sapien
tgataaaggtatttttactcttgag

SEQ ID NO: 730743 - DNA, 25 bp, Homo sapien
tgttgaacgaaagggagctttcact

SEQ ID NO: 730744 - DNA, 25 bp, Homo sapien
acaacttctacataccacaccccaa

SEQ ID NO: 730745 - DNA, 25 bp, Homo sapien
aaggagaaacttcacgtactaccat

SEQ ID NO: 730746 - DNA, 25 bp, Homo sapien
gttggttcaccatataaaatcagca

SEQ ID NO: 730747 - DNA, 25 bp, Homo sapien
tctacataccacaccccaaaaggag

SEQ ID NO: 730748 - DNA, 25 bp, Homo sapien
gtgaaagttcattctcagtatcaag

SEQ ID NO: 730749 - DNA, 25 bp, Homo sapien
tcttcagtatttggtatcctttcac

SEQ ID NO: 730750 - DNA, 25 bp, Homo sapien
tcagtatcaagtttattttgtccac

SEQ ID NO: 730751 - DNA, 25 bp, Homo sapien
gtatttggtatcctttcacaaagag

SEQ ID NO: 730752 - DNA, 25 bp, Homo sapien
gccaagttggcaggaaggttgctgg

SEQ ID NO: 730753 - DNA, 25 bp, Homo sapien
cttgggccaagttggcaggaaggtt

SEQ ID NO: 730754 - DNA, 25 bp, Homo sapien
ttgggccaagttggcaggaaggttg

SEQ ID NO: 730755 - DNA, 25 bp, Homo sapien
gggccaagttggcaggaaggttgct

SEQ ID NO: 730756 - DNA, 25 bp, Homo sapien
ttagcagctgtaacaacacttgtgg

SEQ ID NO: 730757 - DNA, 25 bp, Homo sapien
gactatatttgcatgccagacaatg

SEQ ID NO: 730758 - DNA, 25 bp, Homo sapien
gacatagtgtaaaggaaacggagac

SEQ ID NO: 730759 - DNA, 25 bp, Homo sapien
tgtgtaaacgaaacagaactctttg

SEQ ID NO: 730760 - DNA, 25 bp, Homo sapien
ttttgttgaggaaaattcatattgc

SEQ ID NO: 730761 - DNA, 25 bp, Homo sapien
ctgttttgttgaggaaaattcatat

SEQ ID NO: 730762 - DNA, 25 bp, Homo sapien
tttgttgaggaaaattcatattgct

SEQ ID NO: 730763 - DNA, 25 bp, Homo sapien
gttttgttgaggaaaattcatattg

SEQ ID NO: 730764 - DNA, 25 bp, Homo sapien
gcaaaacactattcaggaagcctgg

SEQ ID NO: 730765 - DNA, 25 bp, Homo sapien
tgctgctaatatgggacaacatcct

SEQ ID NO: 730766 - DNA, 25 bp, Homo sapien
tattgcctggcaccgaattgacagt

SEQ ID NO: 730767 - DNA, 25 bp, Homo sapien
taaggactattcaacaccacaggag

SEQ ID NO: 730768 - DNA, 25 bp, Homo sapien
agcaacagctggtctctttacaggg

SEQ ID NO: 730769 - DNA, 25 bp, Homo sapien
taagcaacagctggtctctttacag

SEQ ID NO: 730770 - DNA, 25 bp, Homo sapien
ctgtaagcaacagctggtctcttta

SEQ ID NO: 730771 - DNA, 25 bp, Homo sapien
tgtaagcaacagctggtctctttac

SEQ ID NO: 730772 - DNA, 25 bp, Homo sapien
atatccgaaaaaatgtaggatttgg

SEQ ID NO: 730773 - DNA, 25 bp, Homo sapien
ggatttggctataagcgtcagttca

SEQ ID NO: 730774 - DNA, 25 bp, Homo sapien
ctatatccgaaaaaatgtaggattt

SEQ ID NO: 730775 - DNA, 25 bp, Homo sapien
tatatccgaaaaaatgtaggatttg

SEQ ID NO: 730776 - DNA, 25 bp, Homo sapien
tctagcaaacttgaagcaccacatt

SEQ ID NO: 730777 - DNA, 25 bp, Homo sapien
caattaatagccaggaaaccgtggg

SEQ ID NO: 730778 - DNA, 25 bp, Homo sapien
tatgttgaagtacttaccctggcat

SEQ ID NO: 730779 - DNA, 25 bp, Homo sapien
tctgacttctacaagatgagcattc

SEQ ID NO: 730780 - DNA, 25 bp, Homo sapien
tgaacaggaagtcgttttagtcctg

SEQ ID NO: 730781 - DNA, 25 bp, Homo sapien
gatgtaagcggagacacagtaatga

SEQ ID NO: 730782 - DNA, 25 bp, Homo sapien
gggatgggatgtaagcggagacaca

SEQ ID NO: 730783 - DNA, 25 bp, Homo sapien
gagctttcggcgtcttctttgaaga

SEQ ID NO: 730784 - DNA, 25 bp, Homo sapien
agaaagcaactaccaactgtttcct

SEQ ID NO: 730785 - DNA, 25 bp, Homo sapien
aactgtttcctaacagtctgtccag

SEQ ID NO: 730786 - DNA, 25 bp, Homo sapien
gcaactaccaactgtttcctaacag

SEQ ID NO: 730787 - DNA, 25 bp, Homo sapien
gtttcctaacagtctgtccagaaag

SEQ ID NO: 730788 - DNA, 25 bp, Homo sapien
tatcctgaaaggcaatgcacatcct

SEQ ID NO: 730789 - DNA, 25 bp, Homo sapien
cagtgagacagggagagatttatcc

SEQ ID NO: 730790 - DNA, 25 bp, Homo sapien
aaactgaagcatgtcgcctcctgtg

SEQ ID NO: 730791 - DNA, 25 bp, Homo sapien
caatcctccaatctaagggccagtg

SEQ ID NO: 730792 - DNA, 25 bp, Homo sapien
gcacaaaacccagaactgtaattac

SEQ ID NO: 730793 - DNA, 25 bp, Homo sapien
gagactgaccataaaatcaacacac

SEQ ID NO: 730794 - DNA, 25 bp, Homo sapien
tcttgagactgaccataaaatcaac

SEQ ID NO: 730795 - DNA, 25 bp, Homo sapien
gactgaccataaaatcaacacactg

SEQ ID NO: 730796 - DNA, 25 bp, Homo sapien
catattcatcttcatagccatgtaa

SEQ ID NO: 730797 - DNA, 25 bp, Homo sapien
ttcatagccatgtaatgtttctctc

SEQ ID NO: 730798 - DNA, 25 bp, Homo sapien
tattcatcttcatagccatgtaatg

SEQ ID NO: 730799 - DNA, 25 bp, Homo sapien
catcttcatagccatgtaatgtttc

SEQ ID NO: 730800 - DNA, 25 bp, Homo sapien
ggatggtggaacatgtcctgttact

SEQ ID NO: 730801 - DNA, 25 bp, Homo sapien
aatgcactgccgttggggatgtgtc

SEQ ID NO: 730802 - DNA, 25 bp, Homo sapien
tcctgttactcctcggggctcttgt

SEQ ID NO: 730803 - DNA, 25 bp, Homo sapien
gagagaatgcactgccgttggggat

SEQ ID NO: 730804 - DNA, 25 bp, Homo sapien
caacatttatttgtacgatcaaagc

SEQ ID NO: 730805 - DNA, 25 bp, Homo sapien
gctgctggaaagatctgatccaatt

SEQ ID NO: 730806 - DNA, 25 bp, Homo sapien
gatcaaagccttaaattggaagaac

SEQ ID NO: 730807 - DNA, 25 bp, Homo sapien
tgaaactaatatccccttgaaggag

SEQ ID NO: 730808 - DNA, 25 bp, Homo sapien
gtgacactgagcagaccaccagata

SEQ ID NO: 730809 - DNA, 25 bp, Homo sapien
agtgtgcctgatgcaagctctctca

SEQ ID NO: 730810 - DNA, 25 bp, Homo sapien
tattgccgtggaaacctggtgacac

SEQ ID NO: 730811 - DNA, 25 bp, Homo sapien
catgacataaatccgatccagtgtg

SEQ ID NO: 730812 - DNA, 25 bp, Homo sapien
ttttattccatgaaagatggggaaa

SEQ ID NO: 730813 - DNA, 25 bp, Homo sapien
tttattccatgaaagatggggaaat

SEQ ID NO: 730814 - DNA, 25 bp, Homo sapien
cttttattccatgaaagatggggaa

SEQ ID NO: 730815 - DNA, 25 bp, Homo sapien
caggatcttgacactggctcttcgt

SEQ ID NO: 730816 - DNA, 25 bp, Homo sapien
gagtaatgacaggaagggtatacag

SEQ ID NO: 730817 - DNA, 25 bp, Homo sapien
gttctatcagccaacttccagtcct

SEQ ID NO: 730818 - DNA, 25 bp, Homo sapien
tggatccatgaaaaggctactttgg

SEQ ID NO: 730819 - DNA, 25 bp, Homo sapien
tgtctaacaagctcctctcataact

SEQ ID NO: 730820 - DNA, 25 bp, Homo sapien
tcaggggatctgtgcctgctacctc

SEQ ID NO: 730821 - DNA, 25 bp, Homo sapien
tggcaaggagaaagcaattcttcct

SEQ ID NO: 730822 - DNA, 25 bp, Homo sapien
tccacagtagctatctccttctaac

SEQ ID NO: 730823 - DNA, 25 bp, Homo sapien
ggttagctgcaattctctgatggct

SEQ ID NO: 730824 - DNA, 25 bp, Homo sapien
ctagggttagctgcaattctctgat

SEQ ID NO: 730825 - DNA, 25 bp, Homo sapien
gggttagctgcaattctctgatggc

SEQ ID NO: 730826 - DNA, 25 bp, Homo sapien
tagggttagctgcaattctctgatg

SEQ ID NO: 730827 - DNA, 25 bp, Homo sapien
ggcctgcagccctgtcttcctatgt

SEQ ID NO: 730828 - DNA, 25 bp, Homo sapien
gatgactccactagcaacttcatgg

SEQ ID NO: 730829 - DNA, 25 bp, Homo sapien
gatttcatcatgatatggcctgcag

SEQ ID NO: 730830 - DNA, 25 bp, Homo sapien
tagaccactaagatgactccactag

SEQ ID NO: 730831 - DNA, 25 bp, Homo sapien
caagggaggtgaatccaactcatca

SEQ ID NO: 730832 - DNA, 25 bp, Homo sapien
gaaggtattatcttttgttgcagag

SEQ ID NO: 730833 - DNA, 25 bp, Homo sapien
tacaatattctcagcttttacccag

SEQ ID NO: 730834 - DNA, 25 bp, Homo sapien
catttatgctgttgattcgctttcc

SEQ ID NO: 730835 - DNA, 25 bp, Homo sapien
ggctgtcaggttttcccaacatgga

SEQ ID NO: 730836 - DNA, 25 bp, Homo sapien
aacacagaggacaatagaggcagag

SEQ ID NO: 730837 - DNA, 25 bp, Homo sapien
tgttgaattcctacagtcagagaac

SEQ ID NO: 730838 - DNA, 25 bp, Homo sapien
taggatctagaggttctggtgacta

SEQ ID NO: 730839 - DNA, 25 bp, Homo sapien
tccagacaaggctaaatgtgcatgc

SEQ ID NO: 730840 - DNA, 25 bp, Homo sapien
cagtttctgctcttaagggcttacc

SEQ ID NO: 730841 - DNA, 25 bp, Homo sapien
gaaaaactagctgtggcattccagg

SEQ ID NO: 730842 - DNA, 25 bp, Homo sapien
tctaatgtaaaagacctcaggcacc

SEQ ID NO: 730843 - DNA, 25 bp, Homo sapien
tagcctgttgggatatcttgatctc

SEQ ID NO: 730844 - DNA, 25 bp, Homo sapien
cagcagcccatacatattttagtgg

SEQ ID NO: 730845 - DNA, 25 bp, Homo sapien
tagaaaatcttagcctgttgggata

SEQ ID NO: 730846 - DNA, 25 bp, Homo sapien
tatgccatggttatgtgtcttgtac

SEQ ID NO: 730847 - DNA, 25 bp, Homo sapien
cccagttagacagttaatgtgcaat

SEQ ID NO: 730848 - DNA, 25 bp, Homo sapien
taaagtgatgttttggcatgacatg

SEQ ID NO: 730849 - DNA, 25 bp, Homo sapien
tccagttagaaagttaatgtgccca

SEQ ID NO: 730850 - DNA, 25 bp, Homo sapien
aacccagtggtattctaaagtgatg

SEQ ID NO: 730851 - DNA, 25 bp, Homo sapien
tcctgtggatgcacaaggaaggtga

SEQ ID NO: 730852 - DNA, 25 bp, Homo sapien
aaggtgaagagggtcatagatgact

SEQ ID NO: 730853 - DNA, 25 bp, Homo sapien
taaagtgtatgcaaatcctgtggat

SEQ ID NO: 730854 - DNA, 25 bp, Homo sapien
gaaagatgtgccttcggtggcaaac

SEQ ID NO: 730855 - DNA, 25 bp, Homo sapien
atatcttacgttagaaaattctctc

SEQ ID NO: 730856 - DNA, 25 bp, Homo sapien
caacttttatggtgaatatcttacg

SEQ ID NO: 730857 - DNA, 25 bp, Homo sapien
aaaatgttactcacttgttctctgg

SEQ ID NO: 730858 - DNA, 25 bp, Homo sapien
tttagtctgaagaagtctgtttccc

SEQ ID NO: 730859 - DNA, 25 bp, Homo sapien
tgctctactctggcagatttcctcc

SEQ ID NO: 730860 - DNA, 25 bp, Homo sapien
cctccaaaagctcttctaattcatt

SEQ ID NO: 730861 - DNA, 25 bp, Homo sapien
ctgctctactctggcagatttcctc

SEQ ID NO: 730862 - DNA, 25 bp, Homo sapien
gaccatatctggatgaagcttgaga

SEQ ID NO: 730863 - DNA, 25 bp, Homo sapien
gcttgagatataaccacaggttcag

SEQ ID NO: 730864 - DNA, 25 bp, Homo sapien
gagagtatgatctacagccagctag

SEQ ID NO: 730865 - DNA, 25 bp, Homo sapien
tgcctgccgcattttggtgatcaca

SEQ ID NO: 730866 - DNA, 25 bp, Homo sapien
cctgaacttgctgtgaattaaccct

SEQ ID NO: 730867 - DNA, 25 bp, Homo sapien
catggggtcctgaacttgctgtgaa

SEQ ID NO: 730868 - DNA, 25 bp, Homo sapien
gggtcctgaacttgctgtgaattaa

SEQ ID NO: 730869 - DNA, 25 bp, Homo sapien
tctgcatggggtcctgaacttgctg

SEQ ID NO: 730870 - DNA, 25 bp, Homo sapien
cacaccctgtaacaaactgaagtct

SEQ ID NO: 730871 - DNA, 25 bp, Homo sapien
ttcccacaccctgtaacaaactgaa

SEQ ID NO: 730872 - DNA, 25 bp, Homo sapien
tactttattcttagtgctaggcaca

SEQ ID NO: 730873 - DNA, 25 bp, Homo sapien
caaatgtatgaaaagtcaggcttta

SEQ ID NO: 730874 - DNA, 25 bp, Homo sapien
ggcataaatctacaacctattttag

SEQ ID NO: 730875 - DNA, 25 bp, Homo sapien
gataactctctaagtacttttggca

SEQ ID NO: 730876 - DNA, 25 bp, Homo sapien
tattttagtgtctgttacatagtgc

SEQ ID NO: 730877 - DNA, 25 bp, Homo sapien
tacgggccacataaagataatttct

SEQ ID NO: 730878 - DNA, 25 bp, Homo sapien
agggcctatattctgtgtttgcttc

SEQ ID NO: 730879 - DNA, 25 bp, Homo sapien
ctcagggccccatggaccaagactt

SEQ ID NO: 730880 - DNA, 25 bp, Homo sapien
tcaagggcctatattctgtgtttgc

SEQ ID NO: 730881 - DNA, 25 bp, Homo sapien
tcagggccccatggaccaagacttg

SEQ ID NO: 730882 - DNA, 25 bp, Homo sapien
caaaatcagcatatgctcgagtaat

SEQ ID NO: 730883 - DNA, 25 bp, Homo sapien
gagccaaaatcagcatatgctcgag

SEQ ID NO: 730884 - DNA, 25 bp, Homo sapien
agagccaaaatcagcatatgctcga

SEQ ID NO: 730885 - DNA, 25 bp, Homo sapien
gccaaaatcagcatatgctcgagta

SEQ ID NO: 730886 - DNA, 25 bp, Homo sapien
gaattctgcgtgtgctccagggcct

SEQ ID NO: 730887 - DNA, 25 bp, Homo sapien
caggtgaattctgcgtgtgctccag

SEQ ID NO: 730888 - DNA, 25 bp, Homo sapien
gccttcaggaacatatgatttacat

SEQ ID NO: 730889 - DNA, 25 bp, Homo sapien
tcaggaacatatgatttacattcat

SEQ ID NO: 730890 - DNA, 25 bp, Homo sapien
tactctagacctagggtgctcctcc

SEQ ID NO: 730891 - DNA, 25 bp, Homo sapien
ctactctagacctagggtgctcctc

SEQ ID NO: 730892 - DNA, 25 bp, Homo sapien
ctctagacctagggtgctcctcctt

SEQ ID NO: 730893 - DNA, 25 bp, Homo sapien
actctagacctagggtgctcctcct

SEQ ID NO: 730894 - DNA, 25 bp, Homo sapien
atttggaatgcagactaccatggca

SEQ ID NO: 730895 - DNA, 25 bp, Homo sapien
taccatggcagtaagctgcttctgt

SEQ ID NO: 730896 - DNA, 25 bp, Homo sapien
ggaacctgtattctccagccccagt

SEQ ID NO: 730897 - DNA, 25 bp, Homo sapien
gctgcttctgttcccataggaacct

SEQ ID NO: 730898 - DNA, 25 bp, Homo sapien
tttggcgaattactggaagatggcg

SEQ ID NO: 730899 - DNA, 25 bp, Homo sapien
cgaattactggaagatggcggttcc

SEQ ID NO: 730900 - DNA, 25 bp, Homo sapien
tggcgaattactggaagatggcggt

SEQ ID NO: 730901 - DNA, 25 bp, Homo sapien
gcgaattactggaagatggcggttc

SEQ ID NO: 730902 - DNA, 25 bp, Homo sapien
tatagattcgcatatatgtggccaa

SEQ ID NO: 730903 - DNA, 25 bp, Homo sapien
ttcttatagattcgcatatatgtgg

SEQ ID NO: 730904 - DNA, 25 bp, Homo sapien
tagagaacatatatcgggtgcctct

SEQ ID NO: 730905 - DNA, 25 bp, Homo sapien
aggcctagagaacatatatcgggtg

SEQ ID NO: 730906 - DNA, 25 bp, Homo sapien
gggtggagtaggctggcgctttagt

SEQ ID NO: 730907 - DNA, 25 bp, Homo sapien
gtggagtaggctggcgctttagttg

SEQ ID NO: 730908 - DNA, 25 bp, Homo sapien
tctgggtggagtaggctggcgcttt

SEQ ID NO: 730909 - DNA, 25 bp, Homo sapien
agtaggctggcgctttagttgaacc

SEQ ID NO: 730910 - DNA, 25 bp, Homo sapien
gcacctaacacttcatggcctgtgc

SEQ ID NO: 730911 - DNA, 25 bp, Homo sapien
tacagcacctaacacttcatggcct

SEQ ID NO: 730912 - DNA, 25 bp, Homo sapien
tgtacagcacctaacacttcatggc

SEQ ID NO: 730913 - DNA, 25 bp, Homo sapien
cttgtgtacagcacctaacacttca

SEQ ID NO: 730914 - DNA, 25 bp, Homo sapien
agttggtcatttaggactcctccat

SEQ ID NO: 730915 - DNA, 25 bp, Homo sapien
gttggtcatttaggactcctccatg

SEQ ID NO: 730916 - DNA, 25 bp, Homo sapien
cagttggtcatttaggactcctcca

SEQ ID NO: 730917 - DNA, 25 bp, Homo sapien
tcagttggtcatttaggactcctcc

SEQ ID NO: 730918 - DNA, 25 bp, Homo sapien
acactgagcaggcccattataagcc

SEQ ID NO: 730919 - DNA, 25 bp, Homo sapien
actgagcaggcccattataagccat

SEQ ID NO: 730920 - DNA, 25 bp, Homo sapien
cactgagcaggcccattataagcca

SEQ ID NO: 730921 - DNA, 25 bp, Homo sapien
ctgaccagatgtaccatttgttgaa

SEQ ID NO: 730922 - DNA, 25 bp, Homo sapien
tttgttgaagtcttgcaagttcacc

SEQ ID NO: 730923 - DNA, 25 bp, Homo sapien
tcttgcaagttcaccctggagtgtg

SEQ ID NO: 730924 - DNA, 25 bp, Homo sapien
tgtggctgcaaggtagctgctgccc

SEQ ID NO: 730925 - DNA, 25 bp, Homo sapien
ctcagatcatttttccttctacaca

SEQ ID NO: 730926 - DNA, 25 bp, Homo sapien
tcatttttccttctacacaaagtac

SEQ ID NO: 730927 - DNA, 25 bp, Homo sapien
gatcatttttccttctacacaaagt

SEQ ID NO: 730928 - DNA, 25 bp, Homo sapien
cagatcatttttccttctacacaaa

SEQ ID NO: 730929 - DNA, 25 bp, Homo sapien
ttgacttcaaaagggatggaacacc

SEQ ID NO: 730930 - DNA, 25 bp, Homo sapien
gcaaatgccctgagagaccaaggtt

SEQ ID NO: 730931 - DNA, 25 bp, Homo sapien
gatgaaagacaataggaactccttg

SEQ ID NO: 730932 - DNA, 25 bp, Homo sapien
ggaacaccgtgaaatttacctcaga

SEQ ID NO: 730933 - DNA, 25 bp, Homo sapien
ggtgggcctatttccagtggctgta

SEQ ID NO: 730934 - DNA, 25 bp, Homo sapien
tggaggtagatcagggtcacttgcc

SEQ ID NO: 730935 - DNA, 25 bp, Homo sapien
gctgatgggattgccgctgagatca

SEQ ID NO: 730936 - DNA, 25 bp, Homo sapien
catttgaaggtgaaaagccctcttt

SEQ ID NO: 730937 - DNA, 25 bp, Homo sapien
gttattcctgcaaactctatgggca

SEQ ID NO: 730938 - DNA, 25 bp, Homo sapien
gccgttattcctgcaaactctatgg

SEQ ID NO: 730939 - DNA, 25 bp, Homo sapien
gaaccagccgttattcctgcaaact

SEQ ID NO: 730940 - DNA, 25 bp, Homo sapien
agcttccagaaccagccgttattcc

SEQ ID NO: 730941 - DNA, 25 bp, Homo sapien
ctggagtgaactgatgactatggga

SEQ ID NO: 730942 - DNA, 25 bp, Homo sapien
tcactggagtgaactgatgactatg

SEQ ID NO: 730943 - DNA, 25 bp, Homo sapien
aactgatgactatgggagctggttg

SEQ ID NO: 730944 - DNA, 25 bp, Homo sapien
gagtgaactgatgactatgggagct

SEQ ID NO: 730945 - DNA, 25 bp, Homo sapien
tactccctatgagactgtggacctg

SEQ ID NO: 730946 - DNA, 25 bp, Homo sapien
tacatggttctttcagttcctcagg

SEQ ID NO: 730947 - DNA, 25 bp, Homo sapien
tggcattgggctgagaaacactgct

SEQ ID NO: 730948 - DNA, 25 bp, Homo sapien
catatgtatttactggtccacagca

SEQ ID NO: 730949 - DNA, 25 bp, Homo sapien
gaatcttattaacatgtcagctaac

SEQ ID NO: 730950 - DNA, 25 bp, Homo sapien
tatttgattataagggaacacagcc

SEQ ID NO: 730951 - DNA, 25 bp, Homo sapien
ggaataatctgtacggctttcagta

SEQ ID NO: 730952 - DNA, 25 bp, Homo sapien
tcagctaaccagagaattttgggaa

SEQ ID NO: 730953 - DNA, 25 bp, Homo sapien
ttagggccattaaggctgctagaat

SEQ ID NO: 730954 - DNA, 25 bp, Homo sapien
tagggccattaaggctgctagaatt

SEQ ID NO: 730955 - DNA, 25 bp, Homo sapien
agggccattaaggctgctagaattt

SEQ ID NO: 730956 - DNA, 25 bp, Homo sapien
attcattttaaggtgctgtgtgtgt

SEQ ID NO: 730957 - DNA, 25 bp, Homo sapien
gatgtactgaggatagaacacatga

SEQ ID NO: 730958 - DNA, 25 bp, Homo sapien
taatacttcttcagctaatggtact

SEQ ID NO: 730959 - DNA, 25 bp, Homo sapien
atgatgtactgaggatagaacacat

SEQ ID NO: 730960 - DNA, 25 bp, Homo sapien
gtactgaggatagaacacatgaaat

SEQ ID NO: 730961 - DNA, 25 bp, Homo sapien
tattttaagtctatttgtagtcacc

SEQ ID NO: 730962 - DNA, 25 bp, Homo sapien
cattttctgactggccgctggagag

SEQ ID NO: 730963 - DNA, 25 bp, Homo sapien
tgtagtcaccatttaatcaatgcag

SEQ ID NO: 730964 - DNA, 25 bp, Homo sapien
aatgcagatctaatactcctttgta

SEQ ID NO: 730965 - DNA, 25 bp, Homo sapien
caagtcagctgaattccagcagctg

SEQ ID NO: 730966 - DNA, 25 bp, Homo sapien
gagtcaaatcaagtcagctgaattc

SEQ ID NO: 730967 - DNA, 25 bp, Homo sapien
aatcaagtcagctgaattccagcag

SEQ ID NO: 730968 - DNA, 25 bp, Homo sapien
cttctccaaaataagactctttagc

SEQ ID NO: 730969 - DNA, 25 bp, Homo sapien
cactttgtttttggcgtagatctgg

SEQ ID NO: 730970 - DNA, 25 bp, Homo sapien
tctctattagagatgacttggtgag

SEQ ID NO: 730971 - DNA, 25 bp, Homo sapien
tgaagggcacatgtaaaatattctg

SEQ ID NO: 730972 - DNA, 25 bp, Homo sapien
tcttgcttcgatgcaaccattccag

SEQ ID NO: 730973 - DNA, 25 bp, Homo sapien
tactgtccccagtagttacatgctc

SEQ ID NO: 730974 - DNA, 25 bp, Homo sapien
cactgtgaagcttgtaactaatcat

SEQ ID NO: 730975 - DNA, 25 bp, Homo sapien
ctgtccccagtagttacatgctcct

SEQ ID NO: 730976 - DNA, 25 bp, Homo sapien
ggatactgtccccagtagttacatg

SEQ ID NO: 730977 - DNA, 25 bp, Homo sapien
caggaatcatggcactggtaaaatt

SEQ ID NO: 730978 - DNA, 25 bp, Homo sapien
gtgatgagtccagtcactcttttgg

SEQ ID NO: 730979 - DNA, 25 bp, Homo sapien
ggaatcatggcactggtaaaatttt

SEQ ID NO: 730980 - DNA, 25 bp, Homo sapien
gagtccagtcactcttttggcagga

SEQ ID NO: 730981 - DNA, 25 bp, Homo sapien
tacgtagggccaggttgcatttcca

SEQ ID NO: 730982 - DNA, 25 bp, Homo sapien
agttccaacgccagctacgtagggc

SEQ ID NO: 730983 - DNA, 25 bp, Homo sapien
gctgtccaagcacctattgcttggc

SEQ ID NO: 730984 - DNA, 25 bp, Homo sapien
taagcagagacccactgatagcacc

SEQ ID NO: 730985 - DNA, 25 bp, Homo sapien
ttagttagatcttgccagtgagagg

SEQ ID NO: 730986 - DNA, 25 bp, Homo sapien
tccttgccttcagcgtcgatttctg

SEQ ID NO: 730987 - DNA, 25 bp, Homo sapien
atttttattgccagccgtattttag

SEQ ID NO: 730988 - DNA, 25 bp, Homo sapien
tgttgtaggtttctgataccgcaca

SEQ ID NO: 730989 - DNA, 25 bp, Homo sapien
tagccactgtggtaactggaggcat

SEQ ID NO: 730990 - DNA, 25 bp, Homo sapien
gccactgtggtaactggaggcattc

SEQ ID NO: 730991 - DNA, 25 bp, Homo sapien
cactgtggtaactggaggcattctg

SEQ ID NO: 730992 - DNA, 25 bp, Homo sapien
gattagccactgtggtaactggagg

SEQ ID NO: 730993 - DNA, 25 bp, Homo sapien
ttgctgctttctgaacgagttctgc

SEQ ID NO: 730994 - DNA, 25 bp, Homo sapien
tttctgaacgagttctgctcactct

SEQ ID NO: 730995 - DNA, 25 bp, Homo sapien
tgctttctgaacgagttctgctcac

SEQ ID NO: 730996 - DNA, 25 bp, Homo sapien
ctgctcactcttgtttttacaccat

SEQ ID NO: 730997 - DNA, 25 bp, Homo sapien
ttctcgaaaggagggtcaaagcttc

SEQ ID NO: 730998 - DNA, 25 bp, Homo sapien
acttcggagccctcagtagcagcag

SEQ ID NO: 730999 - DNA, 25 bp, Homo sapien
tatttgctggttctcgaaaggaggg

SEQ ID NO: 731000 - DNA, 25 bp, Homo sapien
tcaaagcttccaacttcggagccct

SEQ ID NO: 731001 - DNA, 25 bp, Homo sapien
tcacttcataggtttagccgttgaa

SEQ ID NO: 731002 - DNA, 25 bp, Homo sapien
caaagtgcatgtatgcacgcacaca

SEQ ID NO: 731003 - DNA, 25 bp, Homo sapien
ggatcttccaaagtgcatgtatgca

SEQ ID NO: 731004 - DNA, 25 bp, Homo sapien
ggtttagccgttgaaagcttctcag

SEQ ID NO: 731005 - DNA, 25 bp, Homo sapien
agatgactgtcctcactatgggcag

SEQ ID NO: 731006 - DNA, 25 bp, Homo sapien
gaagatgactgtcctcactatgggc

SEQ ID NO: 731007 - DNA, 25 bp, Homo sapien
aagatgactgtcctcactatgggca

SEQ ID NO: 731008 - DNA, 25 bp, Homo sapien
ttagcactgggtacatagggatgaa

SEQ ID NO: 731009 - DNA, 25 bp, Homo sapien
gcactgggtacatagggatgaaaga

SEQ ID NO: 731010 - DNA, 25 bp, Homo sapien
tattttgcttagcactgggtacata

SEQ ID NO: 731011 - DNA, 25 bp, Homo sapien
ttgcttagcactgggtacataggga

SEQ ID NO: 731012 - DNA, 25 bp, Homo sapien
gccatacgccctcttctggtttcgg

SEQ ID NO: 731013 - DNA, 25 bp, Homo sapien
tcttcttagggtgaaactctagcca

SEQ ID NO: 731014 - DNA, 25 bp, Homo sapien
tgtgggtatcgtagttctcttgcct

SEQ ID NO: 731015 - DNA, 25 bp, Homo sapien
tctggtttcgggtgaggagcctgaa

SEQ ID NO: 731016 - DNA, 25 bp, Homo sapien
ccagctgcatgaggatttgcttgca

SEQ ID NO: 731017 - DNA, 25 bp, Homo sapien
aagttccagctgcatgaggatttgc

SEQ ID NO: 731018 - DNA, 25 bp, Homo sapien
ggcaagttccagctgcatgaggatt

SEQ ID NO: 731019 - DNA, 25 bp, Homo sapien
gttccagctgcatgaggatttgctt

SEQ ID NO: 731020 - DNA, 25 bp, Homo sapien
ggcaccttcagctctgaatcaccga

SEQ ID NO: 731021 - DNA, 25 bp, Homo sapien
cagctctgaatcaccgaaagagaat

SEQ ID NO: 731022 - DNA, 25 bp, Homo sapien
ttcagctctgaatcaccgaaagaga

SEQ ID NO: 731023 - DNA, 25 bp, Homo sapien
ccttcagctctgaatcaccgaaaga

SEQ ID NO: 731024 - DNA, 25 bp, Homo sapien
ccaggacttgtctctattcattttc

SEQ ID NO: 731025 - DNA, 25 bp, Homo sapien
attttctgggctgtgtctaacagga

SEQ ID NO: 731026 - DNA, 25 bp, Homo sapien
caggagataataggctagagagaga

SEQ ID NO: 731027 - DNA, 25 bp, Homo sapien
gccaggacttgtctctattcatttt

SEQ ID NO: 731028 - DNA, 25 bp, Homo sapien
cttagagttaacatctcagttattt

SEQ ID NO: 731029 - DNA, 25 bp, Homo sapien
tgtgttgattgtttatcacaaacat

SEQ ID NO: 731030 - DNA, 25 bp, Homo sapien
gagttaacatctcagttattttatg

SEQ ID NO: 731031 - DNA, 25 bp, Homo sapien
attttatgtgttgattgtttatcac

SEQ ID NO: 731032 - DNA, 25 bp, Homo sapien
ctttcatttcgggtactgtcaaggg

SEQ ID NO: 731033 - DNA, 25 bp, Homo sapien
tcgggtactgtcaagggttcaattg

SEQ ID NO: 731034 - DNA, 25 bp, Homo sapien
catttcgggtactgtcaagggttca

SEQ ID NO: 731035 - DNA, 25 bp, Homo sapien
gggtactgtcaagggttcaattgct

SEQ ID NO: 731036 - DNA, 25 bp, Homo sapien
tcccatagaggcagaggtgtgagga

SEQ ID NO: 731037 - DNA, 25 bp, Homo sapien
gcaactgtggaaagaattcccttcc

SEQ ID NO: 731038 - DNA, 25 bp, Homo sapien
acacagcagagcatgtggggaccag

SEQ ID NO: 731039 - DNA, 25 bp, Homo sapien
aagacacagcagagcatgtggggac

SEQ ID NO: 731040 - DNA, 25 bp, Homo sapien
caaaactcattgtatgagtcagcag

SEQ ID NO: 731041 - DNA, 25 bp, Homo sapien
cagccagcccttttgtctgatggtc

SEQ ID NO: 731042 - DNA, 25 bp, Homo sapien
tcagcaggatctagaaggttcactt

SEQ ID NO: 731043 - DNA, 25 bp, Homo sapien
tctagaaggttcacttcctccacag

SEQ ID NO: 731044 - DNA, 25 bp, Homo sapien
ttatgacataattagaggagagctg

SEQ ID NO: 731045 - DNA, 25 bp, Homo sapien
tatgacataattagaggagagctgg

SEQ ID NO: 731046 - DNA, 25 bp, Homo sapien
caagcaggctaaggggcctccagtc

SEQ ID NO: 731047 - DNA, 25 bp, Homo sapien
acaagcaggctaaggggcctccagt

SEQ ID NO: 731048 - DNA, 25 bp, Homo sapien
agctttgtgggggtcattttatgga

SEQ ID NO: 731049 - DNA, 25 bp, Homo sapien
gtgatgaacatgtaaaccacagctt

SEQ ID NO: 731050 - DNA, 25 bp, Homo sapien
gaaaagagtgatgaacatgtaaacc

SEQ ID NO: 731051 - DNA, 25 bp, Homo sapien
gagtgatgaacatgtaaaccacagc

SEQ ID NO: 731052 - DNA, 25 bp, Homo sapien
ttatgacacaagcaatccacaggca

SEQ ID NO: 731053 - DNA, 25 bp, Homo sapien
gatacaaaggcagctaaagatcttg

SEQ ID NO: 731054 - DNA, 25 bp, Homo sapien
gagttggcccatatttccttgcgtg

SEQ ID NO: 731055 - DNA, 25 bp, Homo sapien
ttgtgttcatgtgaagagttggccc

SEQ ID NO: 731056 - DNA, 25 bp, Homo sapien
gctctggaatgtcgctgatgatgtc

SEQ ID NO: 731057 - DNA, 25 bp, Homo sapien
ctctgctctggaatgtcgctgatga

SEQ ID NO: 731058 - DNA, 25 bp, Homo sapien
ctggaatgtcgctgatgatgtcttc

SEQ ID NO: 731059 - DNA, 25 bp, Homo sapien
tctgctctggaatgtcgctgatgat

SEQ ID NO: 731060 - DNA, 25 bp, Homo sapien
agatattccctccagaacgctctgc

SEQ ID NO: 731061 - DNA, 25 bp, Homo sapien
cagaacgctctgcaatctggcttca

SEQ ID NO: 731062 - DNA, 25 bp, Homo sapien
tattccctccagaacgctctgcaat

SEQ ID NO: 731063 - DNA, 25 bp, Homo sapien
ctccagaacgctctgcaatctggct

SEQ ID NO: 731064 - DNA, 25 bp, Homo sapien
ctgccctcacttccctgttatcctg

SEQ ID NO: 731065 - DNA, 25 bp, Homo sapien
tttgttctgggctatgttgctgttc

SEQ ID NO: 731066 - DNA, 25 bp, Homo sapien
cctgttatcctgctctccaccacat

SEQ ID NO: 731067 - DNA, 25 bp, Homo sapien
gttctgggctatgttgctgttccac

SEQ ID NO: 731068 - DNA, 25 bp, Homo sapien
tcaactcagagatggatcttcagca

SEQ ID NO: 731069 - DNA, 25 bp, Homo sapien
cttcagcagccatgtggttacacca

SEQ ID NO: 731070 - DNA, 25 bp, Homo sapien
tcagagatggatcttcagcagccat

SEQ ID NO: 731071 - DNA, 25 bp, Homo sapien
actcagagatggatcttcagcagcc

SEQ ID NO: 731072 - DNA, 25 bp, Homo sapien
ctgtcacctgtaagccccaggcaca

SEQ ID NO: 731073 - DNA, 25 bp, Homo sapien
agtccataaatgccttcttggcaga

SEQ ID NO: 731074 - DNA, 25 bp, Homo sapien
tctgtcacctgtaagccccaggcac

SEQ ID NO: 731075 - DNA, 25 bp, Homo sapien
ataaatgccttcttggcagaggttc

SEQ ID NO: 731076 - DNA, 25 bp, Homo sapien
gataaacctgtggttgctgaccaaa

SEQ ID NO: 731077 - DNA, 25 bp, Homo sapien
aaagagatgtacagattttccagga

SEQ ID NO: 731078 - DNA, 25 bp, Homo sapien
gatactatgagccttccaagcctct

SEQ ID NO: 731079 - DNA, 25 bp, Homo sapien
tttcctggtagtacagctatctgtc

SEQ ID NO: 731080 - DNA, 25 bp, Homo sapien
cacaaagtctaagaatctctttgga

SEQ ID NO: 731081 - DNA, 25 bp, Homo sapien
acaaagtctaagaatctctttggaa

SEQ ID NO: 731082 - DNA, 25 bp, Homo sapien
atctctttggaaaagccagcattca

SEQ ID NO: 731083 - DNA, 25 bp, Homo sapien
tgatactccactgctacaactggtg

SEQ ID NO: 731084 - DNA, 25 bp, Homo sapien
tagtagttcctagggatagcccatg

SEQ ID NO: 731085 - DNA, 25 bp, Homo sapien
ttcttctactctgttgctgagctct

SEQ ID NO: 731086 - DNA, 25 bp, Homo sapien
gactcaacatgtccagagattggtt

SEQ ID NO: 731087 - DNA, 25 bp, Homo sapien
gttttaaattgcatgctattctgaa

SEQ ID NO: 731088 - DNA, 25 bp, Homo sapien
tttaaattgcatgctattctgaata

SEQ ID NO: 731089 - DNA, 25 bp, Homo sapien
taaattgcatgctattctgaatatg

SEQ ID NO: 731090 - DNA, 25 bp, Homo sapien
aagttttaaattgcatgctattctg

SEQ ID NO: 731091 - DNA, 25 bp, Homo sapien
taggtgtctctggtaatacttgctt

SEQ ID NO: 731092 - DNA, 25 bp, Homo sapien
aggtgtctctggtaatacttgcttc

SEQ ID NO: 731093 - DNA, 25 bp, Homo sapien
tgaaaatgaaagtactgctttcaga

SEQ ID NO: 731094 - DNA, 25 bp, Homo sapien
ccctcagaggttctgcattagttgg

SEQ ID NO: 731095 - DNA, 25 bp, Homo sapien
agtactgctttcagaagtatgggca

SEQ ID NO: 731096 - DNA, 25 bp, Homo sapien
tatgcagcttgagttgagaaaccag

SEQ ID NO: 731097 - DNA, 25 bp, Homo sapien
gcagctatagtgttggcctcaccaa

SEQ ID NO: 731098 - DNA, 25 bp, Homo sapien
agctctcgataaacttcttaaatga

SEQ ID NO: 731099 - DNA, 25 bp, Homo sapien
gcatagtagatggagaacagaattt

SEQ ID NO: 731100 - DNA, 25 bp, Homo sapien
gcctcaccaacactatgggccatga

SEQ ID NO: 731101 - DNA, 25 bp, Homo sapien
cttaatagctgttactcagtctctt

SEQ ID NO: 731102 - DNA, 25 bp, Homo sapien
acttaatagctgttactcagtctct

SEQ ID NO: 731103 - DNA, 25 bp, Homo sapien
tacttaatagctgttactcagtctc

SEQ ID NO: 731104 - DNA, 25 bp, Homo sapien
tctagtctcccctgtaacccacatg

SEQ ID NO: 731105 - DNA, 25 bp, Homo sapien
aatctagtctcccctgtaacccaca

SEQ ID NO: 731106 - DNA, 25 bp, Homo sapien
atctagtctcccctgtaacccacat

SEQ ID NO: 731107 - DNA, 25 bp, Homo sapien
taatgtggtcatgctgtgtgtgtct

SEQ ID NO: 731108 - DNA, 25 bp, Homo sapien
tggcagaggctcaaagcaatttcag

SEQ ID NO: 731109 - DNA, 25 bp, Homo sapien
catgaagtttgagatcaacagactg

SEQ ID NO: 731110 - DNA, 25 bp, Homo sapien
tatttttcggagtccttcagtggct

SEQ ID NO: 731111 - DNA, 25 bp, Homo sapien
tggagtaccagtgtgttcttcttct

SEQ ID NO: 731112 - DNA, 25 bp, Homo sapien
gaaactatgacttgttggagtacca

SEQ ID NO: 731113 - DNA, 25 bp, Homo sapien
ttactgctctccgaaatgaaagttt

SEQ ID NO: 731114 - DNA, 25 bp, Homo sapien
tgaaagtttatgattgtatctgcca

SEQ ID NO: 731115 - DNA, 25 bp, Homo sapien
aaaactgtccagatgcttattgtac

SEQ ID NO: 731116 - DNA, 25 bp, Homo sapien
tccattcaaagttgacacaggcccc

SEQ ID NO: 731117 - DNA, 25 bp, Homo sapien
tgattagtagttagagacccagttc

SEQ ID NO: 731118 - DNA, 25 bp, Homo sapien
caggccccagaagaaaggtcagtta

SEQ ID NO: 731119 - DNA, 25 bp, Homo sapien
cacaggattagttaagcaaagcagg

SEQ ID NO: 731120 - DNA, 25 bp, Homo sapien
tgactcttccattgggcagcctggg

SEQ ID NO: 731121 - DNA, 25 bp, Homo sapien
aaagcaggtcccttcgcgagaccaa

SEQ ID NO: 731122 - DNA, 25 bp, Homo sapien
taaacgagccctggatctgcaaagc

SEQ ID NO: 731123 - DNA, 25 bp, Homo sapien
agagttgctaggaaacctccccacg

SEQ ID NO: 731124 - DNA, 25 bp, Homo sapien
gggctgcgtgcccttgtccttttcg

SEQ ID NO: 731125 - DNA, 25 bp, Homo sapien
ttttcgcctcagtgcgcggctcagg

SEQ ID NO: 731126 - DNA, 25 bp, Homo sapien
agagcccgagttgctggcgcgctct

SEQ ID NO: 731127 - DNA, 25 bp, Homo sapien
tcagcttagcgaagagccaaacaca

SEQ ID NO: 731128 - DNA, 25 bp, Homo sapien
gagtgtcgctaggacgttttccgca

SEQ ID NO: 731129 - DNA, 25 bp, Homo sapien
tcaatcagcgcagttgcttccacag

SEQ ID NO: 731130 - DNA, 25 bp, Homo sapien
gaaaaaagtctgtggcgcatcaatc

SEQ ID NO: 731131 - DNA, 25 bp, Homo sapien
aaaaagccagggccgagccgcacat

SEQ ID NO: 731132 - DNA, 25 bp, Homo sapien
cctcgccggtcgttttgcaggcaga

SEQ ID NO: 731133 - DNA, 25 bp, Homo sapien
ggcccagtccaagaacaagtgaaaa

SEQ ID NO: 731134 - DNA, 25 bp, Homo sapien
aatgcagcggtaaaaaaagccaggg

SEQ ID NO: 731135 - DNA, 25 bp, Homo sapien
cgggcagctcttcgtgccagcccaa

SEQ ID NO: 731136 - DNA, 25 bp, Homo sapien
gggcagctcttcgtgccagcccaag

SEQ ID NO: 731137 - DNA, 25 bp, Homo sapien
ccgggatgctctggccgggcagctc

SEQ ID NO: 731138 - DNA, 25 bp, Homo sapien
ctggccgggatgctctggccgggca

SEQ ID NO: 731139 - DNA, 25 bp, Homo sapien
tctacagcctcgagttaaaggcaag

SEQ ID NO: 731140 - DNA, 25 bp, Homo sapien
gaagactactcccattataaccaac

SEQ ID NO: 731141 - DNA, 25 bp, Homo sapien
gcattaatatccctccagtgtgggt

SEQ ID NO: 731142 - DNA, 25 bp, Homo sapien
cagattgagcactaatgatagcaga

SEQ ID NO: 731143 - DNA, 25 bp, Homo sapien
ttcaggtctgcaggtgcaagtaggc

SEQ ID NO: 731144 - DNA, 25 bp, Homo sapien
tcccttttcaggtctgcaggtgcaa

SEQ ID NO: 731145 - DNA, 25 bp, Homo sapien
ccttttcaggtctgcaggtgcaagt

SEQ ID NO: 731146 - DNA, 25 bp, Homo sapien
ggtctgcaggtgcaagtaggcccat

SEQ ID NO: 731147 - DNA, 25 bp, Homo sapien
catctcaaagattaccaaaagggat

SEQ ID NO: 731148 - DNA, 25 bp, Homo sapien
tgtaacatgatttgcaagagagtaa

SEQ ID NO: 731149 - DNA, 25 bp, Homo sapien
taagactatgcatacatttgactct

SEQ ID NO: 731150 - DNA, 25 bp, Homo sapien
taaatatcaaatatatgccaactga

SEQ ID NO: 731151 - DNA, 25 bp, Homo sapien
tttcagtatcaacctgacgtcaggc

SEQ ID NO: 731152 - DNA, 25 bp, Homo sapien
tgtgaccacagtcccatcagatgtt

SEQ ID NO: 731153 - DNA, 25 bp, Homo sapien
taatgcccaaaagtcaatctctgcc

SEQ ID NO: 731154 - DNA, 25 bp, Homo sapien
tttgtccaaaaagccctgatgtctg

SEQ ID NO: 731155 - DNA, 25 bp, Homo sapien
caataggatgtctcttcaccttgtc

SEQ ID NO: 731156 - DNA, 25 bp, Homo sapien
ctcttcaccttgtcagacccacact

SEQ ID NO: 731157 - DNA, 25 bp, Homo sapien
tcaccttgtcagacccacactgcat

SEQ ID NO: 731158 - DNA, 25 bp, Homo sapien
tcttcaccttgtcagacccacactg

SEQ ID NO: 731159 - DNA, 25 bp, Homo sapien
catggacagagccattaggaatctc

SEQ ID NO: 731160 - DNA, 25 bp, Homo sapien
cagcaggaaattctcatgagctata

SEQ ID NO: 731161 - DNA, 25 bp, Homo sapien
cactggataacggaacaataaaaca

SEQ ID NO: 731162 - DNA, 25 bp, Homo sapien
tctcatgagctatagaggagtcact

SEQ ID NO: 731163 - DNA, 25 bp, Homo sapien
gggagagctgtccttttacaaccat

SEQ ID NO: 731164 - DNA, 25 bp, Homo sapien
cataaagcagactggctggcacttg

SEQ ID NO: 731165 - DNA, 25 bp, Homo sapien
ctggctggcacttgttcagcagagg

SEQ ID NO: 731166 - DNA, 25 bp, Homo sapien
tgagtgcataaagcagactggctgg

SEQ ID NO: 731167 - DNA, 25 bp, Homo sapien
agcttttcctacattagacttagaa

SEQ ID NO: 731168 - DNA, 25 bp, Homo sapien
catctatctgtacagcttttcctac

SEQ ID NO: 731169 - DNA, 25 bp, Homo sapien
atcatctatctgtacagcttttcct

SEQ ID NO: 731170 - DNA, 25 bp, Homo sapien
acagcttttcctacattagacttag

SEQ ID NO: 731171 - DNA, 25 bp, Homo sapien
ggaattttcaagaacggcagaaaca

SEQ ID NO: 731172 - DNA, 25 bp, Homo sapien
gctgggaattttcaagaacggcaga

SEQ ID NO: 731173 - DNA, 25 bp, Homo sapien
tgggaattttcaagaacggcagaaa

SEQ ID NO: 731174 - DNA, 25 bp, Homo sapien
tgctgggaattttcaagaacggcag

SEQ ID NO: 731175 - DNA, 25 bp, Homo sapien
caagaagaaccattgtgaagccact

SEQ ID NO: 731176 - DNA, 25 bp, Homo sapien
tgaaatgggccatcacaagaagccc

SEQ ID NO: 731177 - DNA, 25 bp, Homo sapien
gaaaaagctctgattgctgcacaca

SEQ ID NO: 731178 - DNA, 25 bp, Homo sapien
taccggtgcaagacgtgtaaactga

SEQ ID NO: 731179 - DNA, 25 bp, Homo sapien
tctcaggttctacatagctacagga

SEQ ID NO: 731180 - DNA, 25 bp, Homo sapien
cagatacactttggcatgcagcatt

SEQ ID NO: 731181 - DNA, 25 bp, Homo sapien
gacacctaacgatgatgacccagag

SEQ ID NO: 731182 - DNA, 25 bp, Homo sapien
tcacagaagacatgccagatacact

SEQ ID NO: 731183 - DNA, 25 bp, Homo sapien
ttccccagacactcaatggagtaag

SEQ ID NO: 731184 - DNA, 25 bp, Homo sapien
tagaagtgctaactggggtagtatg

SEQ ID NO: 731185 - DNA, 25 bp, Homo sapien
taactggggtagtatggagcaccct

SEQ ID NO: 731186 - DNA, 25 bp, Homo sapien
ctcaatggagtaagcaggaaacatc

SEQ ID NO: 731187 - DNA, 25 bp, Homo sapien
gggcatatttaaggattgctcccca

SEQ ID NO: 731188 - DNA, 25 bp, Homo sapien
gggaaaaggtgcctctcactctgct

SEQ ID NO: 731189 - DNA, 25 bp, Homo sapien
gacatcccggatataggtggatcac

SEQ ID NO: 731190 - DNA, 25 bp, Homo sapien
taaggacactggaagtcacggtgtg

SEQ ID NO: 731191 - DNA, 25 bp, Homo sapien
gctgcaatagtagaggacaaggacc

SEQ ID NO: 731192 - DNA, 25 bp, Homo sapien
ggcttgaggaataccagaaccagac

SEQ ID NO: 731193 - DNA, 25 bp, Homo sapien
catagattcctgcacatgtccataa

SEQ ID NO: 731194 - DNA, 25 bp, Homo sapien
ctgagaaacaatcttgatgggcata

SEQ ID NO: 731195 - DNA, 25 bp, Homo sapien
tgctgcatttgaagatgcacatcta

SEQ ID NO: 731196 - DNA, 25 bp, Homo sapien
atccacattctggacccagcgcaag

SEQ ID NO: 731197 - DNA, 25 bp, Homo sapien
catttgaagatgcacatctattgtc

SEQ ID NO: 731198 - DNA, 25 bp, Homo sapien
attctggacccagcgcaaggcacct

SEQ ID NO: 731199 - DNA, 25 bp, Homo sapien
gggtattataacatgcacagatggg

SEQ ID NO: 731200 - DNA, 25 bp, Homo sapien
tggaaacaatatcacaacgttcact

SEQ ID NO: 731201 - DNA, 25 bp, Homo sapien
gcagcctttgcttattaaattggaa

SEQ ID NO: 731202 - DNA, 25 bp, Homo sapien
tattgaatcaactgagcagcctttg

SEQ ID NO: 731203 - DNA, 25 bp, Homo sapien
ctggacgcagctggatagacacttc

SEQ ID NO: 731204 - DNA, 25 bp, Homo sapien
gacgcagctggatagacacttctcc

SEQ ID NO: 731205 - DNA, 25 bp, Homo sapien
gcagctggatagacacttctcctgg

SEQ ID NO: 731206 - DNA, 25 bp, Homo sapien
ggatagacacttctcctggtgtcac

SEQ ID NO: 731207 - DNA, 25 bp, Homo sapien
tggctgcaggcactataaagactag

SEQ ID NO: 731208 - DNA, 25 bp, Homo sapien
gctcctagggctcgcagtagagtag

SEQ ID NO: 731209 - DNA, 25 bp, Homo sapien
tgcagtgtccgaagacacacagctg

SEQ ID NO: 731210 - DNA, 25 bp, Homo sapien
taaacatgtccccttgctcctaggg

SEQ ID NO: 731211 - DNA, 25 bp, Homo sapien
gaagtacaaaagaggtataggagaa

SEQ ID NO: 731212 - DNA, 25 bp, Homo sapien
gaaaaggtgtatactaatctcaggg

SEQ ID NO: 731213 - DNA, 25 bp, Homo sapien
agtctattacaaagtctctaagaac

SEQ ID NO: 731214 - DNA, 25 bp, Homo sapien
gataatcatgaattgcagctttgtg

SEQ ID NO: 731215 - DNA, 25 bp, Homo sapien
tacaacataggccaaactgtgaaat

SEQ ID NO: 731216 - DNA, 25 bp, Homo sapien
caccaggattctgtagcactgaagg

SEQ ID NO: 731217 - DNA, 25 bp, Homo sapien
tactacatgtagtttttacaccagg

SEQ ID NO: 731218 - DNA, 25 bp, Homo sapien
gaaagtgaaagcgaataatgtccag

SEQ ID NO: 731219 - DNA, 25 bp, Homo sapien
tgtgaactgcgttaaactacatgca

SEQ ID NO: 731220 - DNA, 25 bp, Homo sapien
gttaaactacatgcatccaattgag

SEQ ID NO: 731221 - DNA, 25 bp, Homo sapien
tgaaggattggatacaattgtgaac

SEQ ID NO: 731222 - DNA, 25 bp, Homo sapien
caattgagtggtgcgcatctgtgta

SEQ ID NO: 731223 - DNA, 25 bp, Homo sapien
ttaatgacaggacaggaccacccac

SEQ ID NO: 731224 - DNA, 25 bp, Homo sapien
aaattaatgacaggacaggaccacc

SEQ ID NO: 731225 - DNA, 25 bp, Homo sapien
taaaaattaatgacaggacaggacc

SEQ ID NO: 731226 - DNA, 25 bp, Homo sapien
ttaaaaattaatgacaggacaggac

SEQ ID NO: 731227 - DNA, 25 bp, Homo sapien
atctcctgttgatgtctcctgtttc

SEQ ID NO: 731228 - DNA, 25 bp, Homo sapien
tctcttctatctccaacccctatct

SEQ ID NO: 731229 - DNA, 25 bp, Homo sapien
aacccctatctctcccctgagcttc

SEQ ID NO: 731230 - DNA, 25 bp, Homo sapien
catctcctgttgatgtctcctgttt

SEQ ID NO: 731231 - DNA, 25 bp, Homo sapien
gattctaagaactcagacactcatt

SEQ ID NO: 731232 - DNA, 25 bp, Homo sapien
cagaattagaaagaagacatggagg

SEQ ID NO: 731233 - DNA, 25 bp, Homo sapien
caaagaatggtgtgagcatctctga

SEQ ID NO: 731234 - DNA, 25 bp, Homo sapien
gatgacctacttagagctattgcca

SEQ ID NO: 731235 - DNA, 25 bp, Homo sapien
tgctccttcctaaactgagctgagg

SEQ ID NO: 731236 - DNA, 25 bp, Homo sapien
tatgagactctagactggacatctt

SEQ ID NO: 731237 - DNA, 25 bp, Homo sapien
gcagctaagagctactaaataaggt

SEQ ID NO: 731238 - DNA, 25 bp, Homo sapien
tccatggcaactggatcataccacc

SEQ ID NO: 731239 - DNA, 25 bp, Homo sapien
atttcaattgaactctagcatgcca

SEQ ID NO: 731240 - DNA, 25 bp, Homo sapien
ttcaaactcattacttttgacccag

SEQ ID NO: 731241 - DNA, 25 bp, Homo sapien
gaatctagtagtttagttttcactc

SEQ ID NO: 731242 - DNA, 25 bp, Homo sapien
caggttaatttcgacactatgttca

SEQ ID NO: 731243 - DNA, 25 bp, Homo sapien
gcacgtataccggagtcagctgagg

SEQ ID NO: 731244 - DNA, 25 bp, Homo sapien
ggattctataaattctggccttagc

SEQ ID NO: 731245 - DNA, 25 bp, Homo sapien
aagcaaattccggtctcgctggcct

SEQ ID NO: 731246 - DNA, 25 bp, Homo sapien
tagcctagcaagcaaattccggtct

SEQ ID NO: 731247 - DNA, 25 bp, Homo sapien
tgttagacactggtacactgggcca

SEQ ID NO: 731248 - DNA, 25 bp, Homo sapien
tgctttttctgtgcaggcaacccct

SEQ ID NO: 731249 - DNA, 25 bp, Homo sapien
ggagaaagggactactcattcctaa

SEQ ID NO: 731250 - DNA, 25 bp, Homo sapien
tcagaagctaggctgcctcctgaga

SEQ ID NO: 731251 - DNA, 25 bp, Homo sapien
tattgtgcattgatgctgagacatc

SEQ ID NO: 731252 - DNA, 25 bp, Homo sapien
caaatccaagacgaaagtcacggga

SEQ ID NO: 731253 - DNA, 25 bp, Homo sapien
tctagataaatcgtttccaacggaa

SEQ ID NO: 731254 - DNA, 25 bp, Homo sapien
tatcaacgtatgagccaaatccaag

SEQ ID NO: 731255 - DNA, 25 bp, Homo sapien
ttagcatatccacatcaaaccctag

SEQ ID NO: 731256 - DNA, 25 bp, Homo sapien
aatctacagttcatctcagaagttt

SEQ ID NO: 731257 - DNA, 25 bp, Homo sapien
aaagcccaatctacagttcatctca

SEQ ID NO: 731258 - DNA, 25 bp, Homo sapien
gcatatccacatcaaaccctagata

SEQ ID NO: 731259 - DNA, 25 bp, Homo sapien
gggaggcatgcagtctaaattgtag

SEQ ID NO: 731260 - DNA, 25 bp, Homo sapien
tggtgtatctatgtttccagagatc

SEQ ID NO: 731261 - DNA, 25 bp, Homo sapien
tgaagcatggcgtcaaaacctcctt

SEQ ID NO: 731262 - DNA, 25 bp, Homo sapien
tcttctgtctatgaactgctttctc

SEQ ID NO: 731263 - DNA, 25 bp, Homo sapien
gacagtttccgtcattgggcaccac

SEQ ID NO: 731264 - DNA, 25 bp, Homo sapien
cactatgcctgccaatttgctatca

SEQ ID NO: 731265 - DNA, 25 bp, Homo sapien
ttttagcctcttttcgccatccgat

SEQ ID NO: 731266 - DNA, 25 bp, Homo sapien
ctatcaagagcgagatgagacgtct

SEQ ID NO: 731267 - DNA, 25 bp, Homo sapien
ggtacaaaaatagttgagttgccaa

SEQ ID NO: 731268 - DNA, 25 bp, Homo sapien
tctcatggcttatccttgttctgta

SEQ ID NO: 731269 - DNA, 25 bp, Homo sapien
caaaagagtcatatctactaagcgg

SEQ ID NO: 731270 - DNA, 25 bp, Homo sapien
tgcactgttccataaattctctctc

SEQ ID NO: 731271 - DNA, 25 bp, Homo sapien
cattcagcaagctgaaatcaggtac

SEQ ID NO: 731272 - DNA, 25 bp, Homo sapien
aaaaaatgttctcatagtgtttaca

SEQ ID NO: 731273 - DNA, 25 bp, Homo sapien
catagtgtttacaatttgaagcaga

SEQ ID NO: 731274 - DNA, 25 bp, Homo sapien
aatcaggtactttgtagtctttcga

SEQ ID NO: 731275 - DNA, 25 bp, Homo sapien
gttctgtaattattaagaccaatga

SEQ ID NO: 731276 - DNA, 25 bp, Homo sapien
agaccaatgatgagtagcggttcat

SEQ ID NO: 731277 - DNA, 25 bp, Homo sapien
tgtaattattaagaccaatgatgag

SEQ ID NO: 731278 - DNA, 25 bp, Homo sapien
ttattaagaccaatgatgagtagcg

SEQ ID NO: 731279 - DNA, 25 bp, Homo sapien
gatatagtaacgctctttagaagca

SEQ ID NO: 731280 - DNA, 25 bp, Homo sapien
ctccaaatggtgtaactgacagata

SEQ ID NO: 731281 - DNA, 25 bp, Homo sapien
tagagacacgttagtggcaatcaca

SEQ ID NO: 731282 - DNA, 25 bp, Homo sapien
gcacctctttagattaacactggac

SEQ ID NO: 731283 - DNA, 25 bp, Homo sapien
taatgttgttgtctattaatttctc

SEQ ID NO: 731284 - DNA, 25 bp, Homo sapien
ttttccttgaactgcaaagatgaca

SEQ ID NO: 731285 - DNA, 25 bp, Homo sapien
taatttctctgaaagttggcctagt

SEQ ID NO: 731286 - DNA, 25 bp, Homo sapien
tctctgaaagttggcctagtgaggg

SEQ ID NO: 731287 - DNA, 25 bp, Homo sapien
aaagactccagacaccaccaagatt

SEQ ID NO: 731288 - DNA, 25 bp, Homo sapien
tcttatgtgtgaaggctttgactgg

SEQ ID NO: 731289 - DNA, 25 bp, Homo sapien
gtgaaggctttgactggctcagaca

SEQ ID NO: 731290 - DNA, 25 bp, Homo sapien
ccaccaagattattcttatgtgtga

SEQ ID NO: 731291 - DNA, 25 bp, Homo sapien
tggtgcctggcaagaggggtagaag

SEQ ID NO: 731292 - DNA, 25 bp, Homo sapien
ctatttcaccagcaatggtgcctgg

SEQ ID NO: 731293 - DNA, 25 bp, Homo sapien
atggtgcctggcaagaggggtagaa

SEQ ID NO: 731294 - DNA, 25 bp, Homo sapien
attctatttcaccagcaatggtgcc

SEQ ID NO: 731295 - DNA, 25 bp, Homo sapien
tgtgcccaagctaaaggaaggtgct

SEQ ID NO: 731296 - DNA, 25 bp, Homo sapien
tttgtgcccaagctaaaggaaggtg

SEQ ID NO: 731297 - DNA, 25 bp, Homo sapien
cgcccggcctaagttcttcatttca

SEQ ID NO: 731298 - DNA, 25 bp, Homo sapien
ttgtgcccaagctaaaggaaggtgc

SEQ ID NO: 731299 - DNA, 25 bp, Homo sapien
gatatagttctataaggctctccaa

SEQ ID NO: 731300 - DNA, 25 bp, Homo sapien
tgtgtcagtcaagcttgctgcaatc

SEQ ID NO: 731301 - DNA, 25 bp, Homo sapien
caaaataggtcctcttactgggcag

SEQ ID NO: 731302 - DNA, 25 bp, Homo sapien
tacactgaaggagcaagaattactg

SEQ ID NO: 731303 - DNA, 25 bp, Homo sapien
acccatctggacagatggcggtaat

SEQ ID NO: 731304 - DNA, 25 bp, Homo sapien
ttcatcattgctcgtcacgtttctg

SEQ ID NO: 731305 - DNA, 25 bp, Homo sapien
gacagatggcggtaatgttaaaata

SEQ ID NO: 731306 - DNA, 25 bp, Homo sapien
cgtcacgtttctgcatccttccatg

SEQ ID NO: 731307 - DNA, 25 bp, Homo sapien
gaatctctatctcctctggtgctgt

SEQ ID NO: 731308 - DNA, 25 bp, Homo sapien
gatactgttacaatctggatctctc

SEQ ID NO: 731309 - DNA, 25 bp, Homo sapien
ctttgtgttactctctccgttgtgc

SEQ ID NO: 731310 - DNA, 25 bp, Homo sapien
gagacaatgcctcatgacgtaaatg

SEQ ID NO: 731311 - DNA, 25 bp, Homo sapien
ccttgtgtgacttgcaactctcaga

SEQ ID NO: 731312 - DNA, 25 bp, Homo sapien
tcctcgaccactgcaaacaggctga

SEQ ID NO: 731313 - DNA, 25 bp, Homo sapien
cagcacacagatttccatggtgata

SEQ ID NO: 731314 - DNA, 25 bp, Homo sapien
cactggaaacacttggaatctagaa

SEQ ID NO: 731315 - DNA, 25 bp, Homo sapien
ggagggagtgaccatttaccagaat

SEQ ID NO: 731316 - DNA, 25 bp, Homo sapien
gaatggcccaagagtgatcttcgta

SEQ ID NO: 731317 - DNA, 25 bp, Homo sapien
tgttgctggtggtggcccaaaataa

SEQ ID NO: 731318 - DNA, 25 bp, Homo sapien
tggagaggcttaaattactgccagc

SEQ ID NO: 731319 - DNA, 25 bp, Homo sapien
agggcactggcatcgatcaccttcc

SEQ ID NO: 731320 - DNA, 25 bp, Homo sapien
gcacacttggccctttgaattgaca

SEQ ID NO: 731321 - DNA, 25 bp, Homo sapien
tttgaattgacacagtgctgggctg

SEQ ID NO: 731322 - DNA, 25 bp, Homo sapien
aagggcactggcatcgatcaccttc

SEQ ID NO: 731323 - DNA, 25 bp, Homo sapien
gtgttcacagaagcggccgatgctc

SEQ ID NO: 731324 - DNA, 25 bp, Homo sapien
gcagtgttcacagaagcggccgatg

SEQ ID NO: 731325 - DNA, 25 bp, Homo sapien
tgctcctgggatcggtgcactcaca

SEQ ID NO: 731326 - DNA, 25 bp, Homo sapien
gccgatgctcctgggatcggtgcac

SEQ ID NO: 731327 - DNA, 25 bp, Homo sapien
cctgagacaaattgtgagggtgaag

SEQ ID NO: 731328 - DNA, 25 bp, Homo sapien
tgttccatgagagcacatgaggttt

SEQ ID NO: 731329 - DNA, 25 bp, Homo sapien
cactgatcaagtatagcctgagaca

SEQ ID NO: 731330 - DNA, 25 bp, Homo sapien
ctgaagtttggtcgacataatgctg

SEQ ID NO: 731331 - DNA, 25 bp, Homo sapien
ctttgattattaagctttggcctac

SEQ ID NO: 731332 - DNA, 25 bp, Homo sapien
cttctgtgctttgattattaagctt

SEQ ID NO: 731333 - DNA, 25 bp, Homo sapien
actcttctgtgctttgattattaag

SEQ ID NO: 731334 - DNA, 25 bp, Homo sapien
ctacagacactcttctgtgctttga

SEQ ID NO: 731335 - DNA, 25 bp, Homo sapien
tacacagctgaattcccatgcaacg

SEQ ID NO: 731336 - DNA, 25 bp, Homo sapien
tgtggctgagtggttagttttcccc

SEQ ID NO: 731337 - DNA, 25 bp, Homo sapien
catgcaacgtacttccatggaaagg

SEQ ID NO: 731338 - DNA, 25 bp, Homo sapien
tatgtaacttcaaaagggccattcc

SEQ ID NO: 731339 - DNA, 25 bp, Homo sapien
gaggtgcctaacaaatgccctttcc

SEQ ID NO: 731340 - DNA, 25 bp, Homo sapien
gacttcgggctcataacatacatgc

SEQ ID NO: 731341 - DNA, 25 bp, Homo sapien
tgctacaactggaatggaaacacca

SEQ ID NO: 731342 - DNA, 25 bp, Homo sapien
ggtcaaaggctatcccagtgctaca

SEQ ID NO: 731343 - DNA, 25 bp, Homo sapien
gaggctgacactctgtaatctgatg

SEQ ID NO: 731344 - DNA, 25 bp, Homo sapien
tctgatgaggacttaattttattac

SEQ ID NO: 731345 - DNA, 25 bp, Homo sapien
taatgatcaggactttaagcaaccc

SEQ ID NO: 731346 - DNA, 25 bp, Homo sapien
tattccattgtagtatcacctgtct

SEQ ID NO: 731347 - DNA, 25 bp, Homo sapien
ggtgactgctcttgtgcaaacactt

SEQ ID NO: 731348 - DNA, 25 bp, Homo sapien
tcttcaggcttctcacgtcggtagg

SEQ ID NO: 731349 - DNA, 25 bp, Homo sapien
gcaaacactttgcagaatcaactta

SEQ ID NO: 731350 - DNA, 25 bp, Homo sapien
gaagttgcacctgaaagtttcatga

SEQ ID NO: 731351 - DNA, 25 bp, Homo sapien
agtgtaatcagtgctcttcagagga

SEQ ID NO: 731352 - DNA, 25 bp, Homo sapien
tcttcgttcgagtgtacaaccagca

SEQ ID NO: 731353 - DNA, 25 bp, Homo sapien
gaagcgtagggataacaggtacctg

SEQ ID NO: 731354 - DNA, 25 bp, Homo sapien
cagcaactggcatgaccgtgagcaa

SEQ ID NO: 731355 - DNA, 25 bp, Homo sapien
tcatggcccgtgtatcaaggtctca

SEQ ID NO: 731356 - DNA, 25 bp, Homo sapien
gaaggaattcccctgtaggtatgcc

SEQ ID NO: 731357 - DNA, 25 bp, Homo sapien
tacaggctatggtgcgaaggaattc

SEQ ID NO: 731358 - DNA, 25 bp, Homo sapien
tgaacactggcctgacaatgagaag

SEQ ID NO: 731359 - DNA, 25 bp, Homo sapien
tttggagggttgtcaggcatccatc

SEQ ID NO: 731360 - DNA, 25 bp, Homo sapien
caagttagcattgaaagtgcttggc

SEQ ID NO: 731361 - DNA, 25 bp, Homo sapien
tagaggacatctaacagagctgctg

SEQ ID NO: 731362 - DNA, 25 bp, Homo sapien
gctgtgtttattggctccagaacaa

SEQ ID NO: 731363 - DNA, 25 bp, Homo sapien
ctttagggcacaaaaatgctgcagt

SEQ ID NO: 731364 - DNA, 25 bp, Homo sapien
gcagtgcaatggtgtccccagagaa

SEQ ID NO: 731365 - DNA, 25 bp, Homo sapien
tgtttataaatacgtgtgcactgca

SEQ ID NO: 731366 - DNA, 25 bp, Homo sapien
gagttgcctacaaggaagtttgtcc

SEQ ID NO: 731367 - DNA, 25 bp, Homo sapien
tgttagctatatctcagtggtctgc

SEQ ID NO: 731368 - DNA, 25 bp, Homo sapien
gaagctttaggaaatctcttgggaa

SEQ ID NO: 731369 - DNA, 25 bp, Homo sapien
caatctgcacatgattgagctccca

SEQ ID NO: 731370 - DNA, 25 bp, Homo sapien
gaaggattgcatctcatgcatccac

SEQ ID NO: 731371 - DNA, 25 bp, Homo sapien
tctcctgccattgatacaagacatg

SEQ ID NO: 731372 - DNA, 25 bp, Homo sapien
tatgcgggatctgagctgataatca

SEQ ID NO: 731373 - DNA, 25 bp, Homo sapien
tgaaatcattcgcactcacgtaaag

SEQ ID NO: 731374 - DNA, 25 bp, Homo sapien
gatgctgcaaaacctaactatgaca

SEQ ID NO: 731375 - DNA, 25 bp, Homo sapien
tactactaaacagaatgatgcatta

SEQ ID NO: 731376 - DNA, 25 bp, Homo sapien
cacctactactaaacagaatgatgc

SEQ ID NO: 731377 - DNA, 25 bp, Homo sapien
ttgattaacacctactactaaacag

SEQ ID NO: 731378 - DNA, 25 bp, Homo sapien
taacacctactactaaacagaatga

SEQ ID NO: 731379 - DNA, 25 bp, Homo sapien
taatcttccagtgtacaaccaggaa

SEQ ID NO: 731380 - DNA, 25 bp, Homo sapien
ttttaagggaatgaccttgatgcaa

SEQ ID NO: 731381 - DNA, 25 bp, Homo sapien
gaacagcaaggctgagagtccacag

SEQ ID NO: 731382 - DNA, 25 bp, Homo sapien
ccttgatgcaatggtaatcttccag

SEQ ID NO: 731383 - DNA, 25 bp, Homo sapien
catttggttcttgtcatcaagtgaa

SEQ ID NO: 731384 - DNA, 25 bp, Homo sapien
gtcatcaagtgaagtggaagcagta

SEQ ID NO: 731385 - DNA, 25 bp, Homo sapien
gaaatgtgcgggtattgagccaagc

SEQ ID NO: 731386 - DNA, 25 bp, Homo sapien
gccaagctccttgtaaaagcatttc

SEQ ID NO: 731387 - DNA, 25 bp, Homo sapien
tgtctctctatggagcatgcatctg

SEQ ID NO: 731388 - DNA, 25 bp, Homo sapien
gaacaaagcttcagatgtgtcctca

SEQ ID NO: 731389 - DNA, 25 bp, Homo sapien
tctctatggagcatgcatctgacat

SEQ ID NO: 731390 - DNA, 25 bp, Homo sapien
aaggggtgtctctctatggagcatg

SEQ ID NO: 731391 - DNA, 25 bp, Homo sapien
actgtggcaaattaaggacaatatt

SEQ ID NO: 731392 - DNA, 25 bp, Homo sapien
aattcatgttgcctgtgtcagcaac

SEQ ID NO: 731393 - DNA, 25 bp, Homo sapien
tcttctaaaaccttcatacaccatg

SEQ ID NO: 731394 - DNA, 25 bp, Homo sapien
gaagcaagtttatggtaaatttcca

SEQ ID NO: 731395 - DNA, 25 bp, Homo sapien
aaatgaatctctagttgggcctgga

SEQ ID NO: 731396 - DNA, 25 bp, Homo sapien
taagaatcacctgggcctcaaactt

SEQ ID NO: 731397 - DNA, 25 bp, Homo sapien
gaggtgggtctccttatgacttcaa

SEQ ID NO: 731398 - DNA, 25 bp, Homo sapien
ccttagatacagttcacagagagtg

SEQ ID NO: 731399 - DNA, 25 bp, Homo sapien
ttccatgtcctctgattagagtatc

SEQ ID NO: 731400 - DNA, 25 bp, Homo sapien
ccatgtcctctgattagagtatcat

SEQ ID NO: 731401 - DNA, 25 bp, Homo sapien
tccatgtcctctgattagagtatca

SEQ ID NO: 731402 - DNA, 25 bp, Homo sapien
tggcccttgtgtctcacctttcact

SEQ ID NO: 731403 - DNA, 25 bp, Homo sapien
gcttttatcctcattccaaactcgt

SEQ ID NO: 731404 - DNA, 25 bp, Homo sapien
ctgcttttatcctcattccaaactc

SEQ ID NO: 731405 - DNA, 25 bp, Homo sapien
ccaaactcgtttgatttgaattaat

SEQ ID NO: 731406 - DNA, 25 bp, Homo sapien
tggtgaccatgctcttcatgatagt

SEQ ID NO: 731407 - DNA, 25 bp, Homo sapien
ggaatagggatggtgaccatgctct

SEQ ID NO: 731408 - DNA, 25 bp, Homo sapien
taatccagtagaaagatagattggg

SEQ ID NO: 731409 - DNA, 25 bp, Homo sapien
aaattaatccagtagaaagatagat

SEQ ID NO: 731410 - DNA, 25 bp, Homo sapien
tcacactgggaaacatgccggaggc

SEQ ID NO: 731411 - DNA, 25 bp, Homo sapien
gaggctggcaatctcctgaagatgc

SEQ ID NO: 731412 - DNA, 25 bp, Homo sapien
ggttcctctcctagaagcacatgga

SEQ ID NO: 731413 - DNA, 25 bp, Homo sapien
tagtgggataatacacaggctgctg

SEQ ID NO: 731414 - DNA, 25 bp, Homo sapien
catgaatcctcactagttgtacccc

SEQ ID NO: 731415 - DNA, 25 bp, Homo sapien
aggccatgaatcctcactagttgta

SEQ ID NO: 731416 - DNA, 25 bp, Homo sapien
gccatgaatcctcactagttgtacc

SEQ ID NO: 731417 - DNA, 25 bp, Homo sapien
gaatcctcactagttgtaccccatc

SEQ ID NO: 731418 - DNA, 25 bp, Homo sapien
gtatttgtttccaggctccattggc

SEQ ID NO: 731419 - DNA, 25 bp, Homo sapien
ccaggctccattggcagataaatac

SEQ ID NO: 731420 - DNA, 25 bp, Homo sapien
ttatttggcttgcagcttgacaggg

SEQ ID NO: 731421 - DNA, 25 bp, Homo sapien
ctgtttttgcgggtgagggcataag

SEQ ID NO: 731422 - DNA, 25 bp, Homo sapien
cttttgggcagcagggcagtaatgg

SEQ ID NO: 731423 - DNA, 25 bp, Homo sapien
gtgatgctctgagatgtgacattca

SEQ ID NO: 731424 - DNA, 25 bp, Homo sapien
gggtgatgctctgagatgtgacatt

SEQ ID NO: 731425 - DNA, 25 bp, Homo sapien
ggcagcagggcagtaatgggtgatg

SEQ ID NO: 731426 - DNA, 25 bp, Homo sapien
ttcttaccacattttctggcaatcc

SEQ ID NO: 731427 - DNA, 25 bp, Homo sapien
tctccacttcttaccacattttctg

SEQ ID NO: 731428 - DNA, 25 bp, Homo sapien
ggtcccaaagtcctgcctgctgact

SEQ ID NO: 731429 - DNA, 25 bp, Homo sapien
tggggtcccaaagtcctgcctgctg

SEQ ID NO: 731430 - DNA, 25 bp, Homo sapien
ttaacaccaataattcgttgtttca

SEQ ID NO: 731431 - DNA, 25 bp, Homo sapien
taacaccaataattcgttgtttcac

SEQ ID NO: 731432 - DNA, 25 bp, Homo sapien
ccaaccagaaagtggcgcacatgct

SEQ ID NO: 731433 - DNA, 25 bp, Homo sapien
tgtaatgtacatgctgacttcctta

SEQ ID NO: 731434 - DNA, 25 bp, Homo sapien
aatttttgtaatgtacatgctgact

SEQ ID NO: 731435 - DNA, 25 bp, Homo sapien
caaccagaaagtggcgcacatgcta

SEQ ID NO: 731436 - DNA, 25 bp, Homo sapien
ccgacttaaggtcttgtcagttgga

SEQ ID NO: 731437 - DNA, 25 bp, Homo sapien
tggagaggccgacttaaggtcttgt

SEQ ID NO: 731438 - DNA, 25 bp, Homo sapien
gacttaaggtcttgtcagttggatg

SEQ ID NO: 731439 - DNA, 25 bp, Homo sapien
gaggccgacttaaggtcttgtcagt

SEQ ID NO: 731440 - DNA, 25 bp, Homo sapien
cactgtgctgggtttgggaactcca

SEQ ID NO: 731441 - DNA, 25 bp, Homo sapien
ggagcaaaggtgagcactgtgctgg

SEQ ID NO: 731442 - DNA, 25 bp, Homo sapien
tgggtttgggaactccagtctccac

SEQ ID NO: 731443 - DNA, 25 bp, Homo sapien
ctggagcaaaggtgagcactgtgct

SEQ ID NO: 731444 - DNA, 25 bp, Homo sapien
tagttgctcccactgatgggtcatt

SEQ ID NO: 731445 - DNA, 25 bp, Homo sapien
ctgaccagtgaagctagttgctccc

SEQ ID NO: 731446 - DNA, 25 bp, Homo sapien
cttggcgttgagtcccacattgtcc

SEQ ID NO: 731447 - DNA, 25 bp, Homo sapien
ggcgttgagtcccacattgtcccca

SEQ ID NO: 731448 - DNA, 25 bp, Homo sapien
caatccagaatagcggcatagccac

SEQ ID NO: 731449 - DNA, 25 bp, Homo sapien
gaatagcggcatagccaccattgat

SEQ ID NO: 731450 - DNA, 25 bp, Homo sapien
tgtgtgacaatccagaatagcggca

SEQ ID NO: 731451 - DNA, 25 bp, Homo sapien
cggcatagccaccattgatttggtc

SEQ ID NO: 731452 - DNA, 25 bp, Homo sapien
cctatttcaagaatgtagggccatc

SEQ ID NO: 731453 - DNA, 25 bp, Homo sapien
aatgtagggccatcttccagcttct

SEQ ID NO: 731454 - DNA, 25 bp, Homo sapien
gaatgtagggccatcttccagcttc

SEQ ID NO: 731455 - DNA, 25 bp, Homo sapien
gtagggccatcttccagcttcttac

SEQ ID NO: 731456 - DNA, 25 bp, Homo sapien
acagaaacaatttcagtgacaacag

SEQ ID NO: 731457 - DNA, 25 bp, Homo sapien
gacagaaacaatttcagtgacaaca

SEQ ID NO: 731458 - DNA, 25 bp, Homo sapien
tggtgacctcgcttcctccagcagc

SEQ ID NO: 731459 - DNA, 25 bp, Homo sapien
cagacttggtgacctcgcttcctcc

SEQ ID NO: 731460 - DNA, 25 bp, Homo sapien
gacttggtgacctcgcttcctccag

SEQ ID NO: 731461 - DNA, 25 bp, Homo sapien
ttggtgacctcgcttcctccagcag

SEQ ID NO: 731462 - DNA, 25 bp, Homo sapien
cattaaactttgccttaatgggtct

SEQ ID NO: 731463 - DNA, 25 bp, Homo sapien
gctgggaacggctgaaggaggactc

SEQ ID NO: 731464 - DNA, 25 bp, Homo sapien
ctggggagatccaccgtcctccacg

SEQ ID NO: 731465 - DNA, 25 bp, Homo sapien
gacgatgattctggggctccgccct

SEQ ID NO: 731466 - DNA, 25 bp, Homo sapien
agtggcggaggagcttgggcggctg

SEQ ID NO: 731467 - DNA, 25 bp, Homo sapien
caccaaaggattaggaagaatctgc

SEQ ID NO: 731468 - DNA, 25 bp, Homo sapien
agaatctgcagtgcgagccagtccg

SEQ ID NO: 731469 - DNA, 25 bp, Homo sapien
tatttgcggccttcttgtgttgcag

SEQ ID NO: 731470 - DNA, 25 bp, Homo sapien
gagccagtccgctgccccagagggt

SEQ ID NO: 731471 - DNA, 25 bp, Homo sapien
ggcagaaagtgatttccagggacca

SEQ ID NO: 731472 - DNA, 25 bp, Homo sapien
cagaaagtgatttccagggaccagc

SEQ ID NO: 731473 - DNA, 25 bp, Homo sapien
gaaagtgatttccagggaccagcat

SEQ ID NO: 731474 - DNA, 25 bp, Homo sapien
atgctcaccactggcagaaagtgat

SEQ ID NO: 731475 - DNA, 25 bp, Homo sapien
aagtgcatgatctgtccatttaaac

SEQ ID NO: 731476 - DNA, 25 bp, Homo sapien
ggtaagtgcatgatctgtccattta

SEQ ID NO: 731477 - DNA, 25 bp, Homo sapien
ttaaaccaaaatcatgtatgcgttc

SEQ ID NO: 731478 - DNA, 25 bp, Homo sapien
cttggtaagtgcatgatctgtccat

SEQ ID NO: 731479 - DNA, 25 bp, Homo sapien
aattttcttgcatttcttcagctct

SEQ ID NO: 731480 - DNA, 25 bp, Homo sapien
cttcagctctttctgaattttccat

SEQ ID NO: 731481 - DNA, 25 bp, Homo sapien
atttctctgataattttcttgcatt

SEQ ID NO: 731482 - DNA, 25 bp, Homo sapien
ccatttctctgataattttcttgca

SEQ ID NO: 731483 - DNA, 25 bp, Homo sapien
tatctcaatagatccaactgcttcc

SEQ ID NO: 731484 - DNA, 25 bp, Homo sapien
atctcaatagatccaactgcttcct

SEQ ID NO: 731485 - DNA, 25 bp, Homo sapien
tctcaatagatccaactgcttcctt

SEQ ID NO: 731486 - DNA, 25 bp, Homo sapien
gtgttagtttggactagacatccac

SEQ ID NO: 731487 - DNA, 25 bp, Homo sapien
aaccagtggcattaaaggaaggcag

SEQ ID NO: 731488 - DNA, 25 bp, Homo sapien
tccattgaccagtgatgccagtata

SEQ ID NO: 731489 - DNA, 25 bp, Homo sapien
gacatccactaataaggttatcact

SEQ ID NO: 731490 - DNA, 25 bp, Homo sapien
tcagcttctcttgagactgagtaca

SEQ ID NO: 731491 - DNA, 25 bp, Homo sapien
attcagcttctcttgagactgagta

SEQ ID NO: 731492 - DNA, 25 bp, Homo sapien
ttcagcttctcttgagactgagtac

SEQ ID NO: 731493 - DNA, 25 bp, Homo sapien
ctattccaacataatacagggtcaa

SEQ ID NO: 731494 - DNA, 25 bp, Homo sapien
tattccaacataatacagggtcaac

SEQ ID NO: 731495 - DNA, 25 bp, Homo sapien
tcgtgctgcagttataatccacaag

SEQ ID NO: 731496 - DNA, 25 bp, Homo sapien
gagtgttaagttcaccgatgtcaca

SEQ ID NO: 731497 - DNA, 25 bp, Homo sapien
tataatccacaaggaaatctgtatg

SEQ ID NO: 731498 - DNA, 25 bp, Homo sapien
aatcctcttggtctgtcgtgctgca

SEQ ID NO: 731499 - DNA, 25 bp, Homo sapien
gatagagtcactagggtgagtttcc

SEQ ID NO: 731500 - DNA, 25 bp, Homo sapien
tgccaggccaatcgaaaaagtagac

SEQ ID NO: 731501 - DNA, 25 bp, Homo sapien
cctagaacatgctgccgctgaagcc

SEQ ID NO: 731502 - DNA, 25 bp, Homo sapien
cgctgaagccattataagaggagac

SEQ ID NO: 731503 - DNA, 25 bp, Homo sapien
gaataggcacttaattccttactgg

SEQ ID NO: 731504 - DNA, 25 bp, Homo sapien
tccttactggtcaatgagatgacca

SEQ ID NO: 731505 - DNA, 25 bp, Homo sapien
tctcctgggccctaaaggctatgac

SEQ ID NO: 731506 - DNA, 25 bp, Homo sapien
gactgttcggattgatgacaagact

SEQ ID NO: 731507 - DNA, 25 bp, Homo sapien
gttctccattaagaatcaaggaggt

SEQ ID NO: 731508 - DNA, 25 bp, Homo sapien
taaagaagtacacagcaccaagaga

SEQ ID NO: 731509 - DNA, 25 bp, Homo sapien
gaacagtcccgatggtatatccagg

SEQ ID NO: 731510 - DNA, 25 bp, Homo sapien
accaagagacacttttgaagctata

SEQ ID NO: 731511 - DNA, 25 bp, Homo sapien
agagagatattagaggaattaggta

SEQ ID NO: 731512 - DNA, 25 bp, Homo sapien
gagagatattagaggaattaggtaa

SEQ ID NO: 731513 - DNA, 25 bp, Homo sapien
aacaaagtgatatttatctttctgc

SEQ ID NO: 731514 - DNA, 25 bp, Homo sapien
tatctttctgcagttatataagaaa

SEQ ID NO: 731515 - DNA, 25 bp, Homo sapien
tataagaaagacaatagaatgtaat

SEQ ID NO: 731516 - DNA, 25 bp, Homo sapien
gttatataagaaagacaatagaatg

SEQ ID NO: 731517 - DNA, 25 bp, Homo sapien
tcaaagtgagggactgctgctccaa

SEQ ID NO: 731518 - DNA, 25 bp, Homo sapien
caataacctggaaaatatgaaaggc

SEQ ID NO: 731519 - DNA, 25 bp, Homo sapien
aaaggcagctcctcgggctattgcg

SEQ ID NO: 731520 - DNA, 25 bp, Homo sapien
gctgctccaatgcaataactgctat

SEQ ID NO: 731521 - DNA, 25 bp, Homo sapien
gtcttgatggataattgaaagaaac

SEQ ID NO: 731522 - DNA, 25 bp, Homo sapien
cttgatagatggtcttgatggataa

SEQ ID NO: 731523 - DNA, 25 bp, Homo sapien
ccagctgtggaaaagttatctatac

SEQ ID NO: 731524 - DNA, 25 bp, Homo sapien
cagttccttctatggattcaggttt

SEQ ID NO: 731525 - DNA, 25 bp, Homo sapien
actgaatgatggagtacgataaact

SEQ ID NO: 731526 - DNA, 25 bp, Homo sapien
tggagtacgataaactgcgtgtgtg

SEQ ID NO: 731527 - DNA, 25 bp, Homo sapien
tgcgtgtgtgtaaaggcgataaagt

SEQ ID NO: 731528 - DNA, 25 bp, Homo sapien
gataaagtactagccgcaattgctg

SEQ ID NO: 731529 - DNA, 25 bp, Homo sapien
gacttaattctgagattcagacctt

SEQ ID NO: 731530 - DNA, 25 bp, Homo sapien
attgagaccgaccaaggcgactgtc

SEQ ID NO: 731531 - DNA, 25 bp, Homo sapien
ggcgactgtctctccagacttaatt

SEQ ID NO: 731532 - DNA, 25 bp, Homo sapien
ctgcagaagctggactaccgtactc

SEQ ID NO: 731533 - DNA, 25 bp, Homo sapien
tttccagattccattaggtggactg

SEQ ID NO: 731534 - DNA, 25 bp, Homo sapien
gcatggttttgctagctgcacttac

SEQ ID NO: 731535 - DNA, 25 bp, Homo sapien
tccagattccattaggtggactgtg

SEQ ID NO: 731536 - DNA, 25 bp, Homo sapien
ttaggtggactgtgcatggttttgc

SEQ ID NO: 731537 - DNA, 25 bp, Homo sapien
taaaatcatacgcatttgcttccct

SEQ ID NO: 731538 - DNA, 25 bp, Homo sapien
caaaacaggctcttgactaaccact

SEQ ID NO: 731539 - DNA, 25 bp, Homo sapien
caatatggtctcgataatgccgcac

SEQ ID NO: 731540 - DNA, 25 bp, Homo sapien
gatattgttactgatggtggtcccg

SEQ ID NO: 731541 - DNA, 25 bp, Homo sapien
tatattggaatgtcgcagcgctgcc

SEQ ID NO: 731542 - DNA, 25 bp, Homo sapien
tcatacaggagtgtccaattttttg

SEQ ID NO: 731543 - DNA, 25 bp, Homo sapien
ggacaatccagaatttaatcacacc

SEQ ID NO: 731544 - DNA, 25 bp, Homo sapien
tactatgcattcttctctacagatg

SEQ ID NO: 731545 - DNA, 25 bp, Homo sapien
tagctgcctgttagtattgttcatc

SEQ ID NO: 731546 - DNA, 25 bp, Homo sapien
ttttagagaatgttgcgtgtgcact

SEQ ID NO: 731547 - DNA, 25 bp, Homo sapien
aaatgccagtgaaatctagctgcct

SEQ ID NO: 731548 - DNA, 25 bp, Homo sapien
tgttctatcaagcactgaaggcctc

SEQ ID NO: 731549 - DNA, 25 bp, Homo sapien
cttctctagtttctgtaggtgaaaa

SEQ ID NO: 731550 - DNA, 25 bp, Homo sapien
gagcaatactttaactatatctcac

SEQ ID NO: 731551 - DNA, 25 bp, Homo sapien
aatactataagtttctctcagagca

SEQ ID NO: 731552 - DNA, 25 bp, Homo sapien
gtttgcagactgtagatcttttttc

SEQ ID NO: 731553 - DNA, 25 bp, Homo sapien
gcacgagcaattgcgatcctctgtt

SEQ ID NO: 731554 - DNA, 25 bp, Homo sapien
tgaatccagggcagacgtagcctca

SEQ ID NO: 731555 - DNA, 25 bp, Homo sapien
gcttgaacagctgacttgctttctg

SEQ ID NO: 731556 - DNA, 25 bp, Homo sapien
gggtttcgaactaaggcacgagcaa

SEQ ID NO: 731557 - DNA, 25 bp, Homo sapien
tactgcgggcacaacatgaaacctt

SEQ ID NO: 731558 - DNA, 25 bp, Homo sapien
gagtcaggccatcgagaaaactgtt

SEQ ID NO: 731559 - DNA, 25 bp, Homo sapien
aaaatcttatgtaactggccgggcg

SEQ ID NO: 731560 - DNA, 25 bp, Homo sapien
cagtgtaatttggtgcagggccaca

SEQ ID NO: 731561 - DNA, 25 bp, Homo sapien
ccgtgagggctgcaataaagcaacc

SEQ ID NO: 731562 - DNA, 25 bp, Homo sapien
aacatttcaggtctcgctgggcgcg

SEQ ID NO: 731563 - DNA, 25 bp, Homo sapien
gaaacctgctgcattggcacaccag

SEQ ID NO: 731564 - DNA, 25 bp, Homo sapien
tgtggtgtggccgaaactcccttaa

SEQ ID NO: 731565 - DNA, 25 bp, Homo sapien
aggagaaggaccattactctgaaag

SEQ ID NO: 731566 - DNA, 25 bp, Homo sapien
gggccctgatctatcaaaggagaag

SEQ ID NO: 731567 - DNA, 25 bp, Homo sapien
ccctttctcaatcagattctcaaag

SEQ ID NO: 731568 - DNA, 25 bp, Homo sapien
acatcaagcgctacaaatgtgagct

SEQ ID NO: 731569 - DNA, 25 bp, Homo sapien
tttgcaatcttaatcacactgttgt

SEQ ID NO: 731570 - DNA, 25 bp, Homo sapien
caatcttaatcacactgttgtgcga

SEQ ID NO: 731571 - DNA, 25 bp, Homo sapien
tcttaatcacactgttgtgcgactg

SEQ ID NO: 731572 - DNA, 25 bp, Homo sapien
taatcacactgttgtgcgactgtca

SEQ ID NO: 731573 - DNA, 25 bp, Homo sapien
cacttatttgatagcacttaggaaa

SEQ ID NO: 731574 - DNA, 25 bp, Homo sapien
gggtatgatccttctgactctgaga

SEQ ID NO: 731575 - DNA, 25 bp, Homo sapien
ttccataagggcataatagcttacc

SEQ ID NO: 731576 - DNA, 25 bp, Homo sapien
taacccacatgagagcttcgatttg

SEQ ID NO: 731577 - DNA, 25 bp, Homo sapien
ggttactgtcagaccacgtcactgg

SEQ ID NO: 731578 - DNA, 25 bp, Homo sapien
caccatggtagttgaacgggaaaca

SEQ ID NO: 731579 - DNA, 25 bp, Homo sapien
tcgacatgggttccagggctcaaca

SEQ ID NO: 731580 - DNA, 25 bp, Homo sapien
taatgttcttctgggtcgacatggg

SEQ ID NO: 731581 - DNA, 25 bp, Homo sapien
tgggacttgccgtaaacatagaggg

SEQ ID NO: 731582 - DNA, 25 bp, Homo sapien
gaattgctaggcagagatacggacc

SEQ ID NO: 731583 - DNA, 25 bp, Homo sapien
gtttctgggaaagcgtgtcagcaca

SEQ ID NO: 731584 - DNA, 25 bp, Homo sapien
tttgagagggtccattaccaggcat

SEQ ID NO: 731585 - DNA, 25 bp, Homo sapien
cagggtttcctgatacaggtttata

SEQ ID NO: 731586 - DNA, 25 bp, Homo sapien
caaacaattaaaaggttgcaactag

SEQ ID NO: 731587 - DNA, 25 bp, Homo sapien
taacacgtcacagtctaaggagaat

SEQ ID NO: 731588 - DNA, 25 bp, Homo sapien
taaaatgggcctacatgtactgtac

SEQ ID NO: 731589 - DNA, 25 bp, Homo sapien
ctaatctctagtggcagtaagcaaa

SEQ ID NO: 731590 - DNA, 25 bp, Homo sapien
gaaaagtatggctgactatctagat

SEQ ID NO: 731591 - DNA, 25 bp, Homo sapien
gagcatccataccaattagtttaaa

SEQ ID NO: 731592 - DNA, 25 bp, Homo sapien
gaatacatatgatattgctcccttt

SEQ ID NO: 731593 - DNA, 25 bp, Homo sapien
atcatcagtcatcaggataatgcaa

SEQ ID NO: 731594 - DNA, 25 bp, Homo sapien
aaaatgtggatggttaatatgcaca

SEQ ID NO: 731595 - DNA, 25 bp, Homo sapien
gccaagccctagaatcaggagaaat

SEQ ID NO: 731596 - DNA, 25 bp, Homo sapien
cacttaagacaatagaaagccaagc

SEQ ID NO: 731597 - DNA, 25 bp, Homo sapien
tctgtgccataaaacgactcttaat

SEQ ID NO: 731598 - DNA, 25 bp, Homo sapien
taagagggaccataatctgtgccat

SEQ ID NO: 731599 - DNA, 25 bp, Homo sapien
atttcatccaacaatagcaaaatgc

SEQ ID NO: 731600 - DNA, 25 bp, Homo sapien
catacatgaatactccctgaccgta

SEQ ID NO: 731601 - DNA, 25 bp, Homo sapien
attttcagtttgaatacaaaagcaa

SEQ ID NO: 731602 - DNA, 25 bp, Homo sapien
gctatgttaatattagataaagcag

SEQ ID NO: 731603 - DNA, 25 bp, Homo sapien
gcaagacccaactacgtgtcatctg

SEQ ID NO: 731604 - DNA, 25 bp, Homo sapien
taagggctcgattcatcaagagaac

SEQ ID NO: 731605 - DNA, 25 bp, Homo sapien
tcaagtcactcttagcactcaccta

SEQ ID NO: 731606 - DNA, 25 bp, Homo sapien
tataccaagggtcaccactatcccg

SEQ ID NO: 731607 - DNA, 25 bp, Homo sapien
tagcactcacctataccaagggtca

SEQ ID NO: 731608 - DNA, 25 bp, Homo sapien
cactatcccgatttctaacagcata

SEQ ID NO: 731609 - DNA, 25 bp, Homo sapien
cctttagggtcacaatcaaatctgc

SEQ ID NO: 731610 - DNA, 25 bp, Homo sapien
tcaaatctgcacttcgaatagtaga

SEQ ID NO: 731611 - DNA, 25 bp, Homo sapien
ttgccattagttcagcatgtgctcc

SEQ ID NO: 731612 - DNA, 25 bp, Homo sapien
gaataatatagacctcgttttgcca

SEQ ID NO: 731613 - DNA, 25 bp, Homo sapien
cccaagctagtgttaaactcctcag

SEQ ID NO: 731614 - DNA, 25 bp, Homo sapien
caggagtttctcactttgtggcaag

SEQ ID NO: 731615 - DNA, 25 bp, Homo sapien
ggattacaggaaccagccgtcatgt

SEQ ID NO: 731616 - DNA, 25 bp, Homo sapien
cttttcttgagaaggtcgctggaca

SEQ ID NO: 731617 - DNA, 25 bp, Homo sapien
gaagtgagttggtctttctttcagt

SEQ ID NO: 731618 - DNA, 25 bp, Homo sapien
tttcagtagaatatgtcattgactc

SEQ ID NO: 731619 - DNA, 25 bp, Homo sapien
ctttcagtagaatatgtcattgact

SEQ ID NO: 731620 - DNA, 25 bp, Homo sapien
ggaaaatactggatgaacagttcca

SEQ ID NO: 731621 - DNA, 25 bp, Homo sapien
gaaaatactggatgaacagttccat

SEQ ID NO: 731622 - DNA, 25 bp, Homo sapien
tgtccccagaaccacaaaaggccat

SEQ ID NO: 731623 - DNA, 25 bp, Homo sapien
tggaaaatactggatgaacagttcc

SEQ ID NO: 731624 - DNA, 25 bp, Homo sapien
aataacacccaaaatgacgaatatc

SEQ ID NO: 731625 - DNA, 25 bp, Homo sapien
tggaataaatttctgcatcatgctt

SEQ ID NO: 731626 - DNA, 25 bp, Homo sapien
cacccaaaatgacgaatatcatgga

SEQ ID NO: 731627 - DNA, 25 bp, Homo sapien
taacacccaaaatgacgaatatcat

SEQ ID NO: 731628 - DNA, 25 bp, Homo sapien
ttcccctgctctgccgtaaaataat

SEQ ID NO: 731629 - DNA, 25 bp, Homo sapien
ggccaagtgtcttaatctcatcgtt

SEQ ID NO: 731630 - DNA, 25 bp, Homo sapien
tttcccctgctctgccgtaaaataa

SEQ ID NO: 731631 - DNA, 25 bp, Homo sapien
atctcatcgttaaaatttcccctgc

SEQ ID NO: 731632 - DNA, 25 bp, Homo sapien
atttgtgctatatctatggctaata

SEQ ID NO: 731633 - DNA, 25 bp, Homo sapien
atggctaatattgttgtcaagcctc

SEQ ID NO: 731634 - DNA, 25 bp, Homo sapien
tttgtgctatatctatggctaatat

SEQ ID NO: 731635 - DNA, 25 bp, Homo sapien
gagagttttactgactccatttgca

SEQ ID NO: 731636 - DNA, 25 bp, Homo sapien
ccagatgggaagaccagtctggagt

SEQ ID NO: 731637 - DNA, 25 bp, Homo sapien
cagtctggagtgtggcgttcaggtc

SEQ ID NO: 731638 - DNA, 25 bp, Homo sapien
caggtcgggtaagtgcttgtaagcc

SEQ ID NO: 731639 - DNA, 25 bp, Homo sapien
ctttgtcggtaggtgtttggccatc

SEQ ID NO: 731640 - DNA, 25 bp, Homo sapien
aaatactaaatgctcctggtgcggg

SEQ ID NO: 731641 - DNA, 25 bp, Homo sapien
gttcttggcattgttggaggccttc

SEQ ID NO: 731642 - DNA, 25 bp, Homo sapien
tttccttaaatactaaatgctcctg

SEQ ID NO: 731643 - DNA, 25 bp, Homo sapien
ggaggccttccatgtctttccttaa

SEQ ID NO: 731644 - DNA, 25 bp, Homo sapien
cacagccatacgcttgtaactggag

SEQ ID NO: 731645 - DNA, 25 bp, Homo sapien
tgcaaggaataacccatgctgtctg

SEQ ID NO: 731646 - DNA, 25 bp, Homo sapien
aagtggctgacctgatactctatca

SEQ ID NO: 731647 - DNA, 25 bp, Homo sapien
cactagtcccgtacaatagatgagg

SEQ ID NO: 731648 - DNA, 25 bp, Homo sapien
ttcctattatagttccttgcaaaac

SEQ ID NO: 731649 - DNA, 25 bp, Homo sapien
tatgccttgaatttatactttgaga

SEQ ID NO: 731650 - DNA, 25 bp, Homo sapien
agagttcctattatagttccttgca

SEQ ID NO: 731651 - DNA, 25 bp, Homo sapien
tttatgccttgaatttatactttga

SEQ ID NO: 731652 - DNA, 25 bp, Homo sapien
tttgtgttaagacgccaatcctgga

SEQ ID NO: 731653 - DNA, 25 bp, Homo sapien
agacgccaatcctggaacctgttgc

SEQ ID NO: 731654 - DNA, 25 bp, Homo sapien
actgaaagtcccatgttagttgcat

SEQ ID NO: 731655 - DNA, 25 bp, Homo sapien
tagttgcattttgtgttaagacgcc

SEQ ID NO: 731656 - DNA, 25 bp, Homo sapien
acggcaagtactggagcaatactca

SEQ ID NO: 731657 - DNA, 25 bp, Homo sapien
tcctgtcacggcaagtactggagca

SEQ ID NO: 731658 - DNA, 25 bp, Homo sapien
tgtcacggcaagtactggagcaata

SEQ ID NO: 731659 - DNA, 25 bp, Homo sapien
tcacggcaagtactggagcaatact

SEQ ID NO: 731660 - DNA, 25 bp, Homo sapien
catgcttaagttcttgcttatcttt

SEQ ID NO: 731661 - DNA, 25 bp, Homo sapien
ccagcatgcttaagttcttgcttat

SEQ ID NO: 731662 - DNA, 25 bp, Homo sapien
cagcatgcttaagttcttgcttatc

SEQ ID NO: 731663 - DNA, 25 bp, Homo sapien
gcatgcttaagttcttgcttatctt

SEQ ID NO: 731664 - DNA, 25 bp, Homo sapien
tacatttgctcgaaggctttttccc

SEQ ID NO: 731665 - DNA, 25 bp, Homo sapien
ttcatacatttgctcgaaggctttt

SEQ ID NO: 731666 - DNA, 25 bp, Homo sapien
tagtacgtatattctccaaagcttc

SEQ ID NO: 731667 - DNA, 25 bp, Homo sapien
ttttcccttgttaatgacactatag

SEQ ID NO: 731668 - DNA, 25 bp, Homo sapien
tgcataacagcttccaataatctgt

SEQ ID NO: 731669 - DNA, 25 bp, Homo sapien
gaaaccctgccgcataggcaaaata

SEQ ID NO: 731670 - DNA, 25 bp, Homo sapien
tatataaaggcatggctgaatgcat

SEQ ID NO: 731671 - DNA, 25 bp, Homo sapien
gtcattcgtccagcttgaattaaat

SEQ ID NO: 731672 - DNA, 25 bp, Homo sapien
tatatcagtatcagtattttaccag

SEQ ID NO: 731673 - DNA, 25 bp, Homo sapien
taccaggtccggactatttccacga

SEQ ID NO: 731674 - DNA, 25 bp, Homo sapien
ccagttatgctgtacttatagagac

SEQ ID NO: 731675 - DNA, 25 bp, Homo sapien
gataactcactataaactagacatc

SEQ ID NO: 731676 - DNA, 25 bp, Homo sapien
ggaactactttggaccatcggtgaa

SEQ ID NO: 731677 - DNA, 25 bp, Homo sapien
ggttacaacttgtgctcagtctatg

SEQ ID NO: 731678 - DNA, 25 bp, Homo sapien
tagcaagtgtgaagaccctgcaatg

SEQ ID NO: 731679 - DNA, 25 bp, Homo sapien
catcggtgaaagtccctctgaggag

SEQ ID NO: 731680 - DNA, 25 bp, Homo sapien
acagagtcttctaggccaggtatca

SEQ ID NO: 731681 - DNA, 25 bp, Homo sapien
catactccaaaagtgtgggtaccct

SEQ ID NO: 731682 - DNA, 25 bp, Homo sapien
tgaaactcaaaacgtgaggctgggt

SEQ ID NO: 731683 - DNA, 25 bp, Homo sapien
tttaatactggaggagaatccctag

SEQ ID NO: 731684 - DNA, 25 bp, Homo sapien
aggtcccttcagtggttgatttagc

SEQ ID NO: 731685 - DNA, 25 bp, Homo sapien
ttaggtcccttcagtggttgattta

SEQ ID NO: 731686 - DNA, 25 bp, Homo sapien
gtcccttcagtggttgatttagcct

SEQ ID NO: 731687 - DNA, 25 bp, Homo sapien
ttctttaggtcccttcagtggttga

SEQ ID NO: 731688 - DNA, 25 bp, Homo sapien
gatgtttggaagcacacagaatatt

SEQ ID NO: 731689 - DNA, 25 bp, Homo sapien
gaatatttactcgactgtggcacag

SEQ ID NO: 731690 - DNA, 25 bp, Homo sapien
gactggttatctgtctgatatgcta

SEQ ID NO: 731691 - DNA, 25 bp, Homo sapien
gataactgaagctaaatgactggtt

SEQ ID NO: 731692 - DNA, 25 bp, Homo sapien
tccatatgcaattgcagtaaaaact

SEQ ID NO: 731693 - DNA, 25 bp, Homo sapien
ctccatatgcaattgcagtaaaaac

SEQ ID NO: 731694 - DNA, 25 bp, Homo sapien
gctccatatgcaattgcagtaaaaa

SEQ ID NO: 731695 - DNA, 25 bp, Homo sapien
agctccatatgcaattgcagtaaaa

SEQ ID NO: 731696 - DNA, 25 bp, Homo sapien
ggctttttcccttcttgactgcggc

SEQ ID NO: 731697 - DNA, 25 bp, Homo sapien
tccaacaaggcaaacagatgcgcag

SEQ ID NO: 731698 - DNA, 25 bp, Homo sapien
ggctttggaatattcaggagccaaa

SEQ ID NO: 731699 - DNA, 25 bp, Homo sapien
actgcggctgtctatatttggtttc

SEQ ID NO: 731700 - DNA, 25 bp, Homo sapien
tctctgcagaagttgaacagaagtg

SEQ ID NO: 731701 - DNA, 25 bp, Homo sapien
tactgagggataagccacggaggat

SEQ ID NO: 731702 - DNA, 25 bp, Homo sapien
acatctgggcgacatggatagaaga

SEQ ID NO: 731703 - DNA, 25 bp, Homo sapien
tgctactgtctttcctcgctcaata

SEQ ID NO: 731704 - DNA, 25 bp, Homo sapien
cgattgctatttgggaacggagcca

SEQ ID NO: 731705 - DNA, 25 bp, Homo sapien
acggctgttgtcaccataggcgatg

SEQ ID NO: 731706 - DNA, 25 bp, Homo sapien
caggctcttgaggaacgattgctat

SEQ ID NO: 731707 - DNA, 25 bp, Homo sapien
gatctcatctaatggcaccacacgg

SEQ ID NO: 731708 - DNA, 25 bp, Homo sapien
tgtgctcctttcagtccaacttgtg

SEQ ID NO: 731709 - DNA, 25 bp, Homo sapien
cattatcgagggctgaagtggcctc

SEQ ID NO: 731710 - DNA, 25 bp, Homo sapien
gaagagcccttgcaatagctagtct

SEQ ID NO: 731711 - DNA, 25 bp, Homo sapien
tagctagtctttgtttctggccgcc

SEQ ID NO: 731712 - DNA, 25 bp, Homo sapien
tgttattggatgcttatatttggta

SEQ ID NO: 731713 - DNA, 25 bp, Homo sapien
cctccatgttattggatgcttatat

SEQ ID NO: 731714 - DNA, 25 bp, Homo sapien
catgttattggatgcttatatttgg

SEQ ID NO: 731715 - DNA, 25 bp, Homo sapien
ccatgttattggatgcttatatttg

SEQ ID NO: 731716 - DNA, 25 bp, Homo sapien
ctttatcaagggcatgctgaaccac

SEQ ID NO: 731717 - DNA, 25 bp, Homo sapien
actaggcatgtccttcccgtcctgg

SEQ ID NO: 731718 - DNA, 25 bp, Homo sapien
tctgaattgcagagagcctgtgagt

SEQ ID NO: 731719 - DNA, 25 bp, Homo sapien
tatcaaatctgcgttctgaattgca

SEQ ID NO: 731720 - DNA, 25 bp, Homo sapien
tcgatttctcaggagctcttgatga

SEQ ID NO: 731721 - DNA, 25 bp, Homo sapien
gcactgactgtgcattcactaactt

SEQ ID NO: 731722 - DNA, 25 bp, Homo sapien
aaaatatatgtctcgatttctcagg

SEQ ID NO: 731723 - DNA, 25 bp, Homo sapien
taacttaaaatatatgtctcgattt

SEQ ID NO: 731724 - DNA, 25 bp, Homo sapien
gatagctacctaatcctcccagaaa

SEQ ID NO: 731725 - DNA, 25 bp, Homo sapien
tgtgaggcacttcacttactggtga

SEQ ID NO: 731726 - DNA, 25 bp, Homo sapien
tgagagaaatccctacggtctggag

SEQ ID NO: 731727 - DNA, 25 bp, Homo sapien
aaaactactgtaatatgtgctgcaa

SEQ ID NO: 731728 - DNA, 25 bp, Homo sapien
gaggctagctaaatgtgtaaatgga

SEQ ID NO: 731729 - DNA, 25 bp, Homo sapien
taaaatcaccaggtgacattacata

SEQ ID NO: 731730 - DNA, 25 bp, Homo sapien
ttattggtagagtacactttaggga

SEQ ID NO: 731731 - DNA, 25 bp, Homo sapien
tcaccaggtgacattacatatttaa

SEQ ID NO: 731732 - DNA, 25 bp, Homo sapien
gatccagtgcactctgtgagccatg

SEQ ID NO: 731733 - DNA, 25 bp, Homo sapien
catgactgcatcagctatcttgctg

SEQ ID NO: 731734 - DNA, 25 bp, Homo sapien
tatcttgctgaataaattgtggaca

SEQ ID NO: 731735 - DNA, 25 bp, Homo sapien
gaagaccttggtgctacaatcaaca

SEQ ID NO: 731736 - DNA, 25 bp, Homo sapien
tctgctgataagtcgtaatgggcct

SEQ ID NO: 731737 - DNA, 25 bp, Homo sapien
tataattgacacgtccacctccgga

SEQ ID NO: 731738 - DNA, 25 bp, Homo sapien
tgcagccgccggtagaagcaatctg

SEQ ID NO: 731739 - DNA, 25 bp, Homo sapien
tattgaaagagctctcggagacgca

SEQ ID NO: 731740 - DNA, 25 bp, Homo sapien
cgctgcacggacagcgagcgccacc

SEQ ID NO: 731741 - DNA, 25 bp, Homo sapien
gcccgctgcacggacagcgagcgcc

SEQ ID NO: 731742 - DNA, 25 bp, Homo sapien
cacggacagcgagcgccaccctgtg

SEQ ID NO: 731743 - DNA, 25 bp, Homo sapien
tgcacggacagcgagcgccaccctg

SEQ ID NO: 731744 - DNA, 25 bp, Homo sapien
gagggttccgaactggcgatccgca

SEQ ID NO: 731745 - DNA, 25 bp, Homo sapien
ccgcttgcacgtagcagcgaagagt

SEQ ID NO: 731746 - DNA, 25 bp, Homo sapien
tggcgatccgcacggtccgcttgca

SEQ ID NO: 731747 - DNA, 25 bp, Homo sapien
cctcgaagtgcccagtacattgaga

SEQ ID NO: 731748 - DNA, 25 bp, Homo sapien
aggtggaaccgatgcaagtttcagc

SEQ ID NO: 731749 - DNA, 25 bp, Homo sapien
ctgaggtggaaccgatgcaagtttc

SEQ ID NO: 731750 - DNA, 25 bp, Homo sapien
gaggtggaaccgatgcaagtttcag

SEQ ID NO: 731751 - DNA, 25 bp, Homo sapien
tgaggtggaaccgatgcaagtttca

SEQ ID NO: 731752 - DNA, 25 bp, Homo sapien
ggtaacgctgcctgaacccgttgca

SEQ ID NO: 731753 - DNA, 25 bp, Homo sapien
cagcccgagacccagagtttgtaga

SEQ ID NO: 731754 - DNA, 25 bp, Homo sapien
gacaagtaagtaacacgcatcgctg

SEQ ID NO: 731755 - DNA, 25 bp, Homo sapien
cttttagagggaacggccactggag

SEQ ID NO: 731756 - DNA, 25 bp, Homo sapien
tcctcttgggccctgtctgtccgga

SEQ ID NO: 731757 - DNA, 25 bp, Homo sapien
accaagtcctcttgggccctgtctg

SEQ ID NO: 731758 - DNA, 25 bp, Homo sapien
tcccaccaagtcctcttgggccctg

SEQ ID NO: 731759 - DNA, 25 bp, Homo sapien
agtcctcttgggccctgtctgtccg

SEQ ID NO: 731760 - DNA, 25 bp, Homo sapien
cggcaagaagggcagcgacaccgac

SEQ ID NO: 731761 - DNA, 25 bp, Homo sapien
acggcctagagtgacgcccaccctg

SEQ ID NO: 731762 - DNA, 25 bp, Homo sapien
cccgggcaccgcaacggcctagagt

SEQ ID NO: 731763 - DNA, 25 bp, Homo sapien
agcgacaccgacagcgagcacagcg

SEQ ID NO: 731764 - DNA, 25 bp, Homo sapien
gtccagtttgcaacaagcgcttcat

SEQ ID NO: 731765 - DNA, 25 bp, Homo sapien
ctgtccagtttgcaacaagcgcttc

SEQ ID NO: 731766 - DNA, 25 bp, Homo sapien
tgtccagtttgcaacaagcgcttca

SEQ ID NO: 731767 - DNA, 25 bp, Homo sapien
gcaagcgcttcacgcgctccgacga

SEQ ID NO: 731768 - DNA, 25 bp, Homo sapien
actggcttttctgcggcaagcgctt

SEQ ID NO: 731769 - DNA, 25 bp, Homo sapien
gcggcccttcgtgtgcaactggctt

SEQ ID NO: 731770 - DNA, 25 bp, Homo sapien
tgcaactggcttttctgcggcaagc

SEQ ID NO: 731771 - DNA, 25 bp, Homo sapien
tgtacggcaagacttcgcacctcaa

SEQ ID NO: 731772 - DNA, 25 bp, Homo sapien
acggcaagacttcgcacctcaaggc

SEQ ID NO: 731773 - DNA, 25 bp, Homo sapien
ggtgtacggcaagacttcgcacctc

SEQ ID NO: 731774 - DNA, 25 bp, Homo sapien
gcaagacttcgcacctcaaggcgca

SEQ ID NO: 731775 - DNA, 25 bp, Homo sapien
gccgggcagcacctcatggacggct

SEQ ID NO: 731776 - DNA, 25 bp, Homo sapien
ggcttcaagccagtgctacccggct

SEQ ID NO: 731777 - DNA, 25 bp, Homo sapien
gctccatgttgagcgctgggccttc

SEQ ID NO: 731778 - DNA, 25 bp, Homo sapien
gcacctcatggacggcttcaagcca

SEQ ID NO: 731779 - DNA, 25 bp, Homo sapien
cttcagcagcggcgcctcctcgcac

SEQ ID NO: 731780 - DNA, 25 bp, Homo sapien
tacaactcggattactcgggcctga

SEQ ID NO: 731781 - DNA, 25 bp, Homo sapien
agccggtgttcatctccaaggtgca

SEQ ID NO: 731782 - DNA, 25 bp, Homo sapien
aggtgcacacctctgtggacgggct

SEQ ID NO: 731783 - DNA, 25 bp, Homo sapien
gagtcgtggtttaagccctcgcacc

SEQ ID NO: 731784 - DNA, 25 bp, Homo sapien
tcgcccttcgccaacgactactctg

SEQ ID NO: 731785 - DNA, 25 bp, Homo sapien
ccctggtgtccgactcgttcagctg

SEQ ID NO: 731786 - DNA, 25 bp, Homo sapien
ttcgccaacgactactctgttttcc

SEQ ID NO: 731787 - DNA, 25 bp, Homo sapien
ctggtgtccgactcgttcagctgcg

SEQ ID NO: 731788 - DNA, 25 bp, Homo sapien
ggatcgactcctctggccatgcttg

SEQ ID NO: 731789 - DNA, 25 bp, Homo sapien
gtctctcaagcttcggcgtgtccgg

SEQ ID NO: 731790 - DNA, 25 bp, Homo sapien
ttcttccgccagctgcaacgtagtg

SEQ ID NO: 731791 - DNA, 25 bp, Homo sapien
caacgtagtgggttccagtctctca

SEQ ID NO: 731792 - DNA, 25 bp, Homo sapien
tcagacgccggcagccaaacttgtc

SEQ ID NO: 731793 - DNA, 25 bp, Homo sapien
gacgccggcagccaaacttgtcccc

SEQ ID NO: 731794 - DNA, 25 bp, Homo sapien
cgccggcagccaaacttgtcccctc

SEQ ID NO: 731795 - DNA, 25 bp, Homo sapien
cagacgccggcagccaaacttgtcc

SEQ ID NO: 731796 - DNA, 25 bp, Homo sapien
ttaggctttcaagtgctcgaagacg

SEQ ID NO: 731797 - DNA, 25 bp, Homo sapien
actttctggtcattggtgttatttt

SEQ ID NO: 731798 - DNA, 25 bp, Homo sapien
gctcgaagacgccacactttctggt

SEQ ID NO: 731799 - DNA, 25 bp, Homo sapien
ttttgggtagtgttatctctaagaa

SEQ ID NO: 731800 - DNA, 25 bp, Homo sapien
ctaaagcacgcgattttgttcgtgt

SEQ ID NO: 731801 - DNA, 25 bp, Homo sapien
cctgcaatatccagcaggcatgtgg

SEQ ID NO: 731802 - DNA, 25 bp, Homo sapien
tgggccaggtttgaagcgagcttcc

SEQ ID NO: 731803 - DNA, 25 bp, Homo sapien
tcactgggccgaaataacgtggcca

SEQ ID NO: 731804 - DNA, 25 bp, Homo sapien
aaggctggagatcgaacgcctggaa

SEQ ID NO: 731805 - DNA, 25 bp, Homo sapien
tggaagccgactttcaccccgcata

SEQ ID NO: 731806 - DNA, 25 bp, Homo sapien
gaaaaagtgctgaaccgcagccaga

SEQ ID NO: 731807 - DNA, 25 bp, Homo sapien
tgctcggactcattgccatgcatgc

SEQ ID NO: 731808 - DNA, 25 bp, Homo sapien
taagcattttggaatttctgttccc

SEQ ID NO: 731809 - DNA, 25 bp, Homo sapien
tgttcccaaatcttgactgaggaag

SEQ ID NO: 731810 - DNA, 25 bp, Homo sapien
ttctgttcccaaatcttgactgagg

SEQ ID NO: 731811 - DNA, 25 bp, Homo sapien
catttctaagcattttggaatttct

SEQ ID NO: 731812 - DNA, 25 bp, Homo sapien
gctcctcaaggctccgtgggttggt

SEQ ID NO: 731813 - DNA, 25 bp, Homo sapien
ccgaagttcgttggaccatcgcggg

SEQ ID NO: 731814 - DNA, 25 bp, Homo sapien
tacgtgaaaccggaagcaggagcac

SEQ ID NO: 731815 - DNA, 25 bp, Homo sapien
tgtatggcaacgcatcccaggtata

SEQ ID NO: 731816 - DNA, 25 bp, Homo sapien
gacctgcgccgggtgccgggaggtg

SEQ ID NO: 731817 - DNA, 25 bp, Homo sapien
ggctggacctgggacggcaggctgt

SEQ ID NO: 731818 - DNA, 25 bp, Homo sapien
cggcaggctgtctctcgggtgcggg

SEQ ID NO: 731819 - DNA, 25 bp, Homo sapien
aggcggggacgcgtgtgtgccctgg

SEQ ID NO: 731820 - DNA, 25 bp, Homo sapien
gatgctccattaaatcgattttgtg

SEQ ID NO: 731821 - DNA, 25 bp, Homo sapien
gagagaacccaagtattcgacaatg

SEQ ID NO: 731822 - DNA, 25 bp, Homo sapien
aaaagagtgaatgcaagtccccaac

SEQ ID NO: 731823 - DNA, 25 bp, Homo sapien
aaactacaaggctcaaactggatga

SEQ ID NO: 731824 - DNA, 25 bp, Homo sapien
cttgttataatcctcttaagttctt

SEQ ID NO: 731825 - DNA, 25 bp, Homo sapien
tcttgttataatcctcttaagttct

SEQ ID NO: 731826 - DNA, 25 bp, Homo sapien
cacagaaatccggaagttcacacca

SEQ ID NO: 731827 - DNA, 25 bp, Homo sapien
acagaaatccggaagttcacaccag

SEQ ID NO: 731828 - DNA, 25 bp, Homo sapien
cagaaatccggaagttcacaccaga

SEQ ID NO: 731829 - DNA, 25 bp, Homo sapien
tgctgccagcatcggacacaatccg

SEQ ID NO: 731830 - DNA, 25 bp, Homo sapien
acctttcatctggcctttattgccc

SEQ ID NO: 731831 - DNA, 25 bp, Homo sapien
catcggacacaatccgggggccaca

SEQ ID NO: 731832 - DNA, 25 bp, Homo sapien
ctgccagcatcggacacaatccggg

SEQ ID NO: 731833 - DNA, 25 bp, Homo sapien
tctaggcattcatcgtagggagcca

SEQ ID NO: 731834 - DNA, 25 bp, Homo sapien
gtggtgttcctttgaccagagttcc

SEQ ID NO: 731835 - DNA, 25 bp, Homo sapien
gaagcagaaccacctgacatgcctc

SEQ ID NO: 731836 - DNA, 25 bp, Homo sapien
gcatcaggttgccatgtcaataccc

SEQ ID NO: 731837 - DNA, 25 bp, Homo sapien
tggcacaactcacagcgcaacgtaa

SEQ ID NO: 731838 - DNA, 25 bp, Homo sapien
ttcgaatgacgaactttttaatagc

SEQ ID NO: 731839 - DNA, 25 bp, Homo sapien
ggaagcacttcgctgttgaagatac

SEQ ID NO: 731840 - DNA, 25 bp, Homo sapien
cccgcaggtctaaactgggtgaagg

SEQ ID NO: 731841 - DNA, 25 bp, Homo sapien
tttctcttctattacacttgctacc

SEQ ID NO: 731842 - DNA, 25 bp, Homo sapien
tattacggtgcatgattgtgtataa

SEQ ID NO: 731843 - DNA, 25 bp, Homo sapien
tacacttgctaccaagctggggttt

SEQ ID NO: 731844 - DNA, 25 bp, Homo sapien
tcctgattattacggtgcatgattg

SEQ ID NO: 731845 - DNA, 25 bp, Homo sapien
ttggcagtattgttgacctgctttt

SEQ ID NO: 731846 - DNA, 25 bp, Homo sapien
caagggtaacgtggggaatcagcac

SEQ ID NO: 731847 - DNA, 25 bp, Homo sapien
tttggcagtattgttgacctgcttt

SEQ ID NO: 731848 - DNA, 25 bp, Homo sapien
gaatgccgacggcaggaatccaatc

SEQ ID NO: 731849 - DNA, 25 bp, Homo sapien
catggctttcatggaatgccgacgg

SEQ ID NO: 731850 - DNA, 25 bp, Homo sapien
tgccgacggcaggaatccaatcagc

SEQ ID NO: 731851 - DNA, 25 bp, Homo sapien
tggctttcatggaatgccgacggca

SEQ ID NO: 731852 - DNA, 25 bp, Homo sapien
taaagttgcctgcatgctcctcagt

SEQ ID NO: 731853 - DNA, 25 bp, Homo sapien
cagaaaagacttccacatatgggac

SEQ ID NO: 731854 - DNA, 25 bp, Homo sapien
gaggctcattactcatcccttggca

SEQ ID NO: 731855 - DNA, 25 bp, Homo sapien
tcagaatttctttagagggcaccaa

SEQ ID NO: 731856 - DNA, 25 bp, Homo sapien
gacttccatacacatttggcagcca

SEQ ID NO: 731857 - DNA, 25 bp, Homo sapien
tcctgttcaccttttcctgacttcc

SEQ ID NO: 731858 - DNA, 25 bp, Homo sapien
cctgacttccatacacatttggcag

SEQ ID NO: 731859 - DNA, 25 bp, Homo sapien
tttcctgacttccatacacatttgg

SEQ ID NO: 731860 - DNA, 25 bp, Homo sapien
gtcactggggaaattaagtcttcac

SEQ ID NO: 731861 - DNA, 25 bp, Homo sapien
ccccatgagtacctgaagtgctttt

SEQ ID NO: 731862 - DNA, 25 bp, Homo sapien
gataaaacctcctgtatcagctgag

SEQ ID NO: 731863 - DNA, 25 bp, Homo sapien
cttcacttatcaaatctgttaccaa

SEQ ID NO: 731864 - DNA, 25 bp, Homo sapien
tgatttttgctactacttctcctcg

SEQ ID NO: 731865 - DNA, 25 bp, Homo sapien
tttttgctactacttctcctcgtct

SEQ ID NO: 731866 - DNA, 25 bp, Homo sapien
aaggaatgatttttgctactacttc

SEQ ID NO: 731867 - DNA, 25 bp, Homo sapien
gaatgatttttgctactacttctcc

SEQ ID NO: 731868 - DNA, 25 bp, Homo sapien
tctccaaaagctgactcctgctcat

SEQ ID NO: 731869 - DNA, 25 bp, Homo sapien
ttcaacttctttactatcctctcca

SEQ ID NO: 731870 - DNA, 25 bp, Homo sapien
caaaagctgactcctgctcatctct

SEQ ID NO: 731871 - DNA, 25 bp, Homo sapien
cttctcacccctaatgtcttcctca

SEQ ID NO: 731872 - DNA, 25 bp, Homo sapien
tactttgtaccaaacaacagtatca

SEQ ID NO: 731873 - DNA, 25 bp, Homo sapien
gagttttatcggctgcctcttctca

SEQ ID NO: 731874 - DNA, 25 bp, Homo sapien
tccgggaaagagttttatcggctgc

SEQ ID NO: 731875 - DNA, 25 bp, Homo sapien
caacagtatcaactccgggaaagag

SEQ ID NO: 731876 - DNA, 25 bp, Homo sapien
tctgatgcaatttgcttgcaatttt

SEQ ID NO: 731877 - DNA, 25 bp, Homo sapien
ctgatcatcattggcaagccttttc

SEQ ID NO: 731878 - DNA, 25 bp, Homo sapien
attggcaagccttttctgaactcca

SEQ ID NO: 731879 - DNA, 25 bp, Homo sapien
caagccttttctgaactccattttt

SEQ ID NO: 731880 - DNA, 25 bp, Homo sapien
ggcaagccttttctgaactccattt

SEQ ID NO: 731881 - DNA, 25 bp, Homo sapien
acaggaagaaatctgacaactattc

SEQ ID NO: 731882 - DNA, 25 bp, Homo sapien
tctttcacaggaagaaatctgacaa

SEQ ID NO: 731883 - DNA, 25 bp, Homo sapien
aatctgacaactattcttacggcca

SEQ ID NO: 731884 - DNA, 25 bp, Homo sapien
agaaatctgacaactattcttacgg

SEQ ID NO: 731885 - DNA, 25 bp, Homo sapien
acagttgttgagctgaatcacttcc

SEQ ID NO: 731886 - DNA, 25 bp, Homo sapien
cagtagtccatggatcaaagtttaa

SEQ ID NO: 731887 - DNA, 25 bp, Homo sapien
aagatacagttgttgagctgaatca

SEQ ID NO: 731888 - DNA, 25 bp, Homo sapien
gtagtccatggatcaaagtttaaga

SEQ ID NO: 731889 - DNA, 25 bp, Homo sapien
gccttgtaggagcaaagactctcca

SEQ ID NO: 731890 - DNA, 25 bp, Homo sapien
gttgtatgccttccccactatccga

SEQ ID NO: 731891 - DNA, 25 bp, Homo sapien
tccgaaatgagcacgacacagttgt

SEQ ID NO: 731892 - DNA, 25 bp, Homo sapien
tatccgagccagagaaaaatcagct

SEQ ID NO: 731893 - DNA, 25 bp, Homo sapien
gaaaacaaataggatgacaagaaac

SEQ ID NO: 731894 - DNA, 25 bp, Homo sapien
caaagaaaacaaataggatgacaag

SEQ ID NO: 731895 - DNA, 25 bp, Homo sapien
tcaagtggagacccaaagaaaacaa

SEQ ID NO: 731896 - DNA, 25 bp, Homo sapien
aagaaaacaaataggatgacaagaa

SEQ ID NO: 731897 - DNA, 25 bp, Homo sapien
tctgtcagtggaaaatgttgggatg

SEQ ID NO: 731898 - DNA, 25 bp, Homo sapien
ttctcagatttgtctgtcagtggaa

SEQ ID NO: 731899 - DNA, 25 bp, Homo sapien
tttgtctgtcagtggaaaatgttgg

SEQ ID NO: 731900 - DNA, 25 bp, Homo sapien
cagatttgtctgtcagtggaaaatg

SEQ ID NO: 731901 - DNA, 25 bp, Homo sapien
caaccttcggttggcttctctacca

SEQ ID NO: 731902 - DNA, 25 bp, Homo sapien
tggctctcatgctttctctacaaca

SEQ ID NO: 731903 - DNA, 25 bp, Homo sapien
cataatttagggtttccgctgacaa

SEQ ID NO: 731904 - DNA, 25 bp, Homo sapien
agtctctctgcattaagatcctgca

SEQ ID NO: 731905 - DNA, 25 bp, Homo sapien
tgtacaccgtgtagccagcgtacat

SEQ ID NO: 731906 - DNA, 25 bp, Homo sapien
ccagcgtacatggaaaagggattgt

SEQ ID NO: 731907 - DNA, 25 bp, Homo sapien
caggttttgctgtacaccgtgtagc

SEQ ID NO: 731908 - DNA, 25 bp, Homo sapien
gaaaagggattgtatgattcttgct

SEQ ID NO: 731909 - DNA, 25 bp, Homo sapien
tacagacaacagtgggagagtgatt

SEQ ID NO: 731910 - DNA, 25 bp, Homo sapien
gacagaggttgataaggatccccaa

SEQ ID NO: 731911 - DNA, 25 bp, Homo sapien
catggtcataaaggactattgggcc

SEQ ID NO: 731912 - DNA, 25 bp, Homo sapien
cttatgtgcctggatagtggatacc

SEQ ID NO: 731913 - DNA, 25 bp, Homo sapien
ggcagacagcagattctgatgttct

SEQ ID NO: 731914 - DNA, 25 bp, Homo sapien
ggagacatactatgtggcccaagga

SEQ ID NO: 731915 - DNA, 25 bp, Homo sapien
tcctacacaaagaaggtctggagac

SEQ ID NO: 731916 - DNA, 25 bp, Homo sapien
tgatgttctcaatgatgcatattgt

SEQ ID NO: 731917 - DNA, 25 bp, Homo sapien
agtctgtatcttgcaatttgggaat

SEQ ID NO: 731918 - DNA, 25 bp, Homo sapien
cttggaggcagcaaatagttgagtc

SEQ ID NO: 731919 - DNA, 25 bp, Homo sapien
ggcagcaaatagttgagtctttctt

SEQ ID NO: 731920 - DNA, 25 bp, Homo sapien
gtataacttatatactgctgcctgc

SEQ ID NO: 731921 - DNA, 25 bp, Homo sapien
acaactgtgttgtatgaaagggcat

SEQ ID NO: 731922 - DNA, 25 bp, Homo sapien
cacaactgtgttgtatgaaagggca

SEQ ID NO: 731923 - DNA, 25 bp, Homo sapien
taatgaaccgtgtttggtactggag

SEQ ID NO: 731924 - DNA, 25 bp, Homo sapien
tggtactggagagctgatattgcac

SEQ ID NO: 731925 - DNA, 25 bp, Homo sapien
gatcttgatctttctactaccccag

SEQ ID NO: 731926 - DNA, 25 bp, Homo sapien
tgcaccctacgttctctgatgatct

SEQ ID NO: 731927 - DNA, 25 bp, Homo sapien
aaaagtgaaggctccgccatcgctg

SEQ ID NO: 731928 - DNA, 25 bp, Homo sapien
taaaggcttttgatgtgcactgaag

SEQ ID NO: 731929 - DNA, 25 bp, Homo sapien
gcagaactaattcagggtacaaaag

SEQ ID NO: 731930 - DNA, 25 bp, Homo sapien
aaagatcagtttcattgcttgcaga

SEQ ID NO: 731931 - DNA, 25 bp, Homo sapien
cttggccactgtgtaaccaggccag

SEQ ID NO: 731932 - DNA, 25 bp, Homo sapien
tggccactgtgtaaccaggccagaa

SEQ ID NO: 731933 - DNA, 25 bp, Homo sapien
agaattcaggccatcgtttcttagg

SEQ ID NO: 731934 - DNA, 25 bp, Homo sapien
agaagctcaggcccaagcacagaat

SEQ ID NO: 731935 - DNA, 25 bp, Homo sapien
tgtgtctacacaagagtggatggtg

SEQ ID NO: 731936 - DNA, 25 bp, Homo sapien
tgtgtgtctacacaagagtggatgg

SEQ ID NO: 731937 - DNA, 25 bp, Homo sapien
gctgtgtgtctacacaagagtggat

SEQ ID NO: 731938 - DNA, 25 bp, Homo sapien
agctgtgtgtctacacaagagtgga

SEQ ID NO: 731939 - DNA, 25 bp, Homo sapien
tctgcactgacttaaacatgattct

SEQ ID NO: 731940 - DNA, 25 bp, Homo sapien
gaacagtattatcaactacccataa

SEQ ID NO: 731941 - DNA, 25 bp, Homo sapien
tctgttgggtacatccctctgcata

SEQ ID NO: 731942 - DNA, 25 bp, Homo sapien
tctttcctgaacagacttattatct

SEQ ID NO: 731943 - DNA, 25 bp, Homo sapien
ttcttagaacctctagttatttcta

SEQ ID NO: 731944 - DNA, 25 bp, Homo sapien
ttatttctaagtttctaaatctcca

SEQ ID NO: 731945 - DNA, 25 bp, Homo sapien
tttctaagtttctaaatctccagac

SEQ ID NO: 731946 - DNA, 25 bp, Homo sapien
tcttagaacctctagttatttctaa

SEQ ID NO: 731947 - DNA, 25 bp, Homo sapien
tcctcattaatgcaacacatattgg

SEQ ID NO: 731948 - DNA, 25 bp, Homo sapien
gcctccttatcctcattaatgcaac

SEQ ID NO: 731949 - DNA, 25 bp, Homo sapien
cattaatgcaacacatattggaagg

SEQ ID NO: 731950 - DNA, 25 bp, Homo sapien
tgcaacacatattggaaggttgtac

SEQ ID NO: 731951 - DNA, 25 bp, Homo sapien
tacagctgcctttttccagtatcca

SEQ ID NO: 731952 - DNA, 25 bp, Homo sapien
aaaacatcgtacagctgcctttttc

SEQ ID NO: 731953 - DNA, 25 bp, Homo sapien
catcgtacagctgcctttttccagt

SEQ ID NO: 731954 - DNA, 25 bp, Homo sapien
aaacatcgtacagctgcctttttcc

SEQ ID NO: 731955 - DNA, 25 bp, Homo sapien
gataaaattgttcaaggattcctgg

SEQ ID NO: 731956 - DNA, 25 bp, Homo sapien
ctaatcttaacatgcaatgctgcag

SEQ ID NO: 731957 - DNA, 25 bp, Homo sapien
gattcctggacaataaatcctaatc

SEQ ID NO: 731958 - DNA, 25 bp, Homo sapien
tgtccactgatagattcttgctgta

SEQ ID NO: 731959 - DNA, 25 bp, Homo sapien
acatgctcctagatggaggggtgtc

SEQ ID NO: 731960 - DNA, 25 bp, Homo sapien
ttcagttttactattggctcctttc

SEQ ID NO: 731961 - DNA, 25 bp, Homo sapien
ggcttacatgctcctagatggaggg

SEQ ID NO: 731962 - DNA, 25 bp, Homo sapien
tctgtggattaagggttgttgttca

SEQ ID NO: 731963 - DNA, 25 bp, Homo sapien
ctggtgagtgcctgattccaagttc

SEQ ID NO: 731964 - DNA, 25 bp, Homo sapien
tagatagaagtcacctcattgagtc

SEQ ID NO: 731965 - DNA, 25 bp, Homo sapien
ctgattccaagttcatagatagaag

SEQ ID NO: 731966 - DNA, 25 bp, Homo sapien
tggcagaagggatcatgaaattttc

SEQ ID NO: 731967 - DNA, 25 bp, Homo sapien
gctggacattcactatggtgccttc

SEQ ID NO: 731968 - DNA, 25 bp, Homo sapien
tccagtgcttgcaagacacaattgg

SEQ ID NO: 731969 - DNA, 25 bp, Homo sapien
tcaaagctaaactgactggctctgg

SEQ ID NO: 731970 - DNA, 25 bp, Homo sapien
ggtatagaagctcagcctttctgtg

SEQ ID NO: 731971 - DNA, 25 bp, Homo sapien
caaaattccacattcttcgtaacat

SEQ ID NO: 731972 - DNA, 25 bp, Homo sapien
tcaaaattccacattcttcgtaaca

SEQ ID NO: 731973 - DNA, 25 bp, Homo sapien
agtcaaaattccacattcttcgtaa

SEQ ID NO: 731974 - DNA, 25 bp, Homo sapien
atagtcaaaattccacattcttcgt

SEQ ID NO: 731975 - DNA, 25 bp, Homo sapien
ataaaaggaggtcaaaactcttatg

SEQ ID NO: 731976 - DNA, 25 bp, Homo sapien
gaggtcaaaactcttatgtgagaca

SEQ ID NO: 731977 - DNA, 25 bp, Homo sapien
attgtataaaagagatgacacttct

SEQ ID NO: 731978 - DNA, 25 bp, Homo sapien
cttatgtgagacatgtattttcaag

SEQ ID NO: 731979 - DNA, 25 bp, Homo sapien
tgttgtttcgggtaggtcttctgag

SEQ ID NO: 731980 - DNA, 25 bp, Homo sapien
tctgttgtttcgggtaggtcttctg

SEQ ID NO: 731981 - DNA, 25 bp, Homo sapien
cttaatggtccggaggtttctgttg

SEQ ID NO: 731982 - DNA, 25 bp, Homo sapien
tcacttaatggtccggaggtttctg

SEQ ID NO: 731983 - DNA, 25 bp, Homo sapien
cacctgcttgactgcctgacgcttc

SEQ ID NO: 731984 - DNA, 25 bp, Homo sapien
actgcctgacgcttcgcctcctgct

SEQ ID NO: 731985 - DNA, 25 bp, Homo sapien
tgcttgactgcctgacgcttcgcct

SEQ ID NO: 731986 - DNA, 25 bp, Homo sapien
ctgacgcttcgcctcctgctggcct

SEQ ID NO: 731987 - DNA, 25 bp, Homo sapien
tataataaggacaattggccgtggg

SEQ ID NO: 731988 - DNA, 25 bp, Homo sapien
tacacaggggctataataaggacaa

SEQ ID NO: 731989 - DNA, 25 bp, Homo sapien
tcttccccctgtgcaagtgtgctgg

SEQ ID NO: 731990 - DNA, 25 bp, Homo sapien
taagtacgctccatgctcacatctt

SEQ ID NO: 731991 - DNA, 25 bp, Homo sapien
cagcacgggacacaaagtgatagca

SEQ ID NO: 731992 - DNA, 25 bp, Homo sapien
gcacgggacacaaagtgatagcagc

SEQ ID NO: 731993 - DNA, 25 bp, Homo sapien
ttcctacccatgaaacctcagccca

SEQ ID NO: 731994 - DNA, 25 bp, Homo sapien
cggcagcacgggacacaaagtgata

SEQ ID NO: 731995 - DNA, 25 bp, Homo sapien
ttcaagatagttggcaagtggtgcc

SEQ ID NO: 731996 - DNA, 25 bp, Homo sapien
tgtgtattcaagatagttggcaagt

SEQ ID NO: 731997 - DNA, 25 bp, Homo sapien
ggtgccgctattgctttgtagtcac

SEQ ID NO: 731998 - DNA, 25 bp, Homo sapien
caagtggtgccgctattgctttgta

SEQ ID NO: 731999 - DNA, 25 bp, Homo sapien
ttgaacgaacgttggaatagatggt

SEQ ID NO: 732000 - DNA, 25 bp, Homo sapien
gaacgttggaatagatggtgctgcc

SEQ ID NO: 732001 - DNA, 25 bp, Homo sapien
agagggtgattttgaacgaacgttg

SEQ ID NO: 732002 - DNA, 25 bp, Homo sapien
ctttagaagagggtgattttgaacg

SEQ ID NO: 732003 - DNA, 25 bp, Homo sapien
gccataaaagtggtagatctcctac

SEQ ID NO: 732004 - DNA, 25 bp, Homo sapien
aaagccataaaagtggtagatctcc

SEQ ID NO: 732005 - DNA, 25 bp, Homo sapien
cataaaagtggtagatctcctactt

SEQ ID NO: 732006 - DNA, 25 bp, Homo sapien
ttaaagccataaaagtggtagatct

SEQ ID NO: 732007 - DNA, 25 bp, Homo sapien
ctttatccttatctggtgcttcttg

SEQ ID NO: 732008 - DNA, 25 bp, Homo sapien
gagtactggaccctgtagccaaatg

SEQ ID NO: 732009 - DNA, 25 bp, Homo sapien
tcttgtgccaacaccccagtgactt

SEQ ID NO: 732010 - DNA, 25 bp, Homo sapien
gacttatgaagccagcaatagaaaa

SEQ ID NO: 732011 - DNA, 25 bp, Homo sapien
agtggtcacctcggagcatcaaact

SEQ ID NO: 732012 - DNA, 25 bp, Homo sapien
gaaggcagtcaacccaagtggactg

SEQ ID NO: 732013 - DNA, 25 bp, Homo sapien
aaggcagtcaacccaagtggactgc

SEQ ID NO: 732014 - DNA, 25 bp, Homo sapien
ggtcacctcggagcatcaaactgtg

SEQ ID NO: 732015 - DNA, 25 bp, Homo sapien
ggcgataaaagttgtgaaaccagct

SEQ ID NO: 732016 - DNA, 25 bp, Homo sapien
tacccagagtgatgaggaaacgtcc

SEQ ID NO: 732017 - DNA, 25 bp, Homo sapien
gatgaggatgtagctggcgataaaa

SEQ ID NO: 732018 - DNA, 25 bp, Homo sapien
cttgccagcctcaggttacccagag

SEQ ID NO: 732019 - DNA, 25 bp, Homo sapien
gaattttcccctcaacatcccagct

SEQ ID NO: 732020 - DNA, 25 bp, Homo sapien
cagctccacagtgacgagtagggga

SEQ ID NO: 732021 - DNA, 25 bp, Homo sapien
tccaaacgagtacaggagccactac

SEQ ID NO: 732022 - DNA, 25 bp, Homo sapien
ggaggggatgctccaaacgagtaca

SEQ ID NO: 732023 - DNA, 25 bp, Homo sapien
cagagcccctattccttgcatgact

SEQ ID NO: 732024 - DNA, 25 bp, Homo sapien
tttcttggtttgcagaaccccacac

SEQ ID NO: 732025 - DNA, 25 bp, Homo sapien
caactgttaccactctgatgctttc

SEQ ID NO: 732026 - DNA, 25 bp, Homo sapien
gatgctttctgctcaaacaaagggc

SEQ ID NO: 732027 - DNA, 25 bp, Homo sapien
tacagctttggtacagggaattccc

SEQ ID NO: 732028 - DNA, 25 bp, Homo sapien
tgcatgggttgacaatctggcccct

SEQ ID NO: 732029 - DNA, 25 bp, Homo sapien
gcatctgggcacagcgtctactggg

SEQ ID NO: 732030 - DNA, 25 bp, Homo sapien
ttcctataggcatcagagcatctgg

SEQ ID NO: 732031 - DNA, 25 bp, Homo sapien
tgtggacacccttcctctatgaacg

SEQ ID NO: 732032 - DNA, 25 bp, Homo sapien
ccatgtgcacatattgtagggtccc

SEQ ID NO: 732033 - DNA, 25 bp, Homo sapien
tttctggtaagtcgccctctgtgga

SEQ ID NO: 732034 - DNA, 25 bp, Homo sapien
ggtggatactttagaaactgggaca

SEQ ID NO: 732035 - DNA, 25 bp, Homo sapien
tggcgtcccatgtaaggtaaatgct

SEQ ID NO: 732036 - DNA, 25 bp, Homo sapien
tctgccaattgctcccatggtgaga

SEQ ID NO: 732037 - DNA, 25 bp, Homo sapien
agttattcatcacccctccgcaggg

SEQ ID NO: 732038 - DNA, 25 bp, Homo sapien
tttgccgcaggcgaaggtagcactg

SEQ ID NO: 732039 - DNA, 25 bp, Homo sapien
tcagagaggatttacagggtaaggt

SEQ ID NO: 732040 - DNA, 25 bp, Homo sapien
ctggaacatcagacaatggatagat

SEQ ID NO: 732041 - DNA, 25 bp, Homo sapien
gtcagtcagagaggatttacagggt

SEQ ID NO: 732042 - DNA, 25 bp, Homo sapien
caatggatagatccccataggattt

SEQ ID NO: 732043 - DNA, 25 bp, Homo sapien
ggtcacttgttgagccacggtagaa

SEQ ID NO: 732044 - DNA, 25 bp, Homo sapien
gttgagccacggtagaatattttgt

SEQ ID NO: 732045 - DNA, 25 bp, Homo sapien
gaatacattgggtcacttgttgagc

SEQ ID NO: 732046 - DNA, 25 bp, Homo sapien
cttgttggaatacattgggtcactt

SEQ ID NO: 732047 - DNA, 25 bp, Homo sapien
gatgccgtaattgggcaggaaggct

SEQ ID NO: 732048 - DNA, 25 bp, Homo sapien
tgatgccgtaattgggcaggaaggc

SEQ ID NO: 732049 - DNA, 25 bp, Homo sapien
ctgatgccgtaattgggcaggaagg

SEQ ID NO: 732050 - DNA, 25 bp, Homo sapien
atgccgtaattgggcaggaaggctg

SEQ ID NO: 732051 - DNA, 25 bp, Homo sapien
tcacaacaatcccaggtaaaacacg

SEQ ID NO: 732052 - DNA, 25 bp, Homo sapien
agtgttcatttatactcaggtgtaa

SEQ ID NO: 732053 - DNA, 25 bp, Homo sapien
gattgataatacttgatgtattagg

SEQ ID NO: 732054 - DNA, 25 bp, Homo sapien
aaagacatgacaatacggtgaagca

SEQ ID NO: 732055 - DNA, 25 bp, Homo sapien
aaaagcaatcgtgacatgcccattt

SEQ ID NO: 732056 - DNA, 25 bp, Homo sapien
tgaaaaagctataggatatcaaaac

SEQ ID NO: 732057 - DNA, 25 bp, Homo sapien
tacttcataaccaggcagctttgtg

SEQ ID NO: 732058 - DNA, 25 bp, Homo sapien
gcttgatttaaatgagaatacttca

SEQ ID NO: 732059 - DNA, 25 bp, Homo sapien
tgggtcaccccagccaggagattgc

SEQ ID NO: 732060 - DNA, 25 bp, Homo sapien
gtcaccccagccaggagattgccaa

SEQ ID NO: 732061 - DNA, 25 bp, Homo sapien
ctgtgataccaccgtagtttctgca

SEQ ID NO: 732062 - DNA, 25 bp, Homo sapien
tgcagttgttcccaggtctcaagct

SEQ ID NO: 732063 - DNA, 25 bp, Homo sapien
aagtccagtagatctcttggctcga

SEQ ID NO: 732064 - DNA, 25 bp, Homo sapien
agtccagtagatctcttggctcgaa

SEQ ID NO: 732065 - DNA, 25 bp, Homo sapien
aaagtccagtagatctcttggctcg

SEQ ID NO: 732066 - DNA, 25 bp, Homo sapien
ttagtgctgctattagaagattgcc

SEQ ID NO: 732067 - DNA, 25 bp, Homo sapien
cctgtattttggagcgagttagtgc

SEQ ID NO: 732068 - DNA, 25 bp, Homo sapien
aaattgcatgcaataacctgcactg

SEQ ID NO: 732069 - DNA, 25 bp, Homo sapien
aagatgattatcaacctctgagtcc

SEQ ID NO: 732070 - DNA, 25 bp, Homo sapien
tgcttaatatggaaacatgcttctt

SEQ ID NO: 732071 - DNA, 25 bp, Homo sapien
tcagatgggcttgtgagttgttgat

SEQ ID NO: 732072 - DNA, 25 bp, Homo sapien
atagatggagtgcttcacaggagcc

SEQ ID NO: 732073 - DNA, 25 bp, Homo sapien
gagcaatattgggaggtgaaacacc

SEQ ID NO: 732074 - DNA, 25 bp, Homo sapien
ggctgaagcagtccatgaccttgta

SEQ ID NO: 732075 - DNA, 25 bp, Homo sapien
tgaccttgtagattccccagggtgg

SEQ ID NO: 732076 - DNA, 25 bp, Homo sapien
gcagtccatgaccttgtagattccc

SEQ ID NO: 732077 - DNA, 25 bp, Homo sapien
gtccatgaccttgtagattccccag

SEQ ID NO: 732078 - DNA, 25 bp, Homo sapien
ttccactttacttcctgtgaatgca

SEQ ID NO: 732079 - DNA, 25 bp, Homo sapien
aatgcatccgactggcattcagaaa

SEQ ID NO: 732080 - DNA, 25 bp, Homo sapien
tggcttccactttacttcctgtgaa

SEQ ID NO: 732081 - DNA, 25 bp, Homo sapien
ctgtgaatgcatccgactggcattc

SEQ ID NO: 732082 - DNA, 25 bp, Homo sapien
ccaacactacgtctgtctctcagct

SEQ ID NO: 732083 - DNA, 25 bp, Homo sapien
cactggaactttgatccctggggtc

SEQ ID NO: 732084 - DNA, 25 bp, Homo sapien
ttgccaccaacactacgtctgtctc

SEQ ID NO: 732085 - DNA, 25 bp, Homo sapien
tgctccgccacaatcaggaaggtgt

SEQ ID NO: 732086 - DNA, 25 bp, Homo sapien
actgctcccgacctgctgataatgg

SEQ ID NO: 732087 - DNA, 25 bp, Homo sapien
cacatgaccacttaggaccaggcct

SEQ ID NO: 732088 - DNA, 25 bp, Homo sapien
taccaagatgaatggcgggagccac

SEQ ID NO: 732089 - DNA, 25 bp, Homo sapien
gataatggacactttgccgtgcact

SEQ ID NO: 732090 - DNA, 25 bp, Homo sapien
aaataaagggacttactcaagccag

SEQ ID NO: 732091 - DNA, 25 bp, Homo sapien
aaacataggctgatttacaaaggct

SEQ ID NO: 732092 - DNA, 25 bp, Homo sapien
cctaatcatgttttgattgtgcaca

SEQ ID NO: 732093 - DNA, 25 bp, Homo sapien
acaccatcagcatcgttacaattaa

SEQ ID NO: 732094 - DNA, 25 bp, Homo sapien
tcaaggaccaggtgtacatcctcgg

SEQ ID NO: 732095 - DNA, 25 bp, Homo sapien
tagacatcgagaccttcaccatgga

SEQ ID NO: 732096 - DNA, 25 bp, Homo sapien
tgaatgaagtcacgggaaagcactg

SEQ ID NO: 732097 - DNA, 25 bp, Homo sapien
tgaagtcccgaggtatctacgagac

SEQ ID NO: 732098 - DNA, 25 bp, Homo sapien
ccttgtttgtgatctttctgtcttc

SEQ ID NO: 732099 - DNA, 25 bp, Homo sapien
ctgcctggccgctgtgcaaccttcc

SEQ ID NO: 732100 - DNA, 25 bp, Homo sapien
acagccttgtttgtgatctttctgt

SEQ ID NO: 732101 - DNA, 25 bp, Homo sapien
tggccgctgtgcaaccttccaagtg

SEQ ID NO: 732102 - DNA, 25 bp, Homo sapien
gaaggttgcaggtgagtattctttc

SEQ ID NO: 732103 - DNA, 25 bp, Homo sapien
tctttcctaggtatagctgtgtcat

SEQ ID NO: 732104 - DNA, 25 bp, Homo sapien
cacaccccagtagggcaaagaaggt

SEQ ID NO: 732105 - DNA, 25 bp, Homo sapien
aaagaaggttgcaggtgagtattct

SEQ ID NO: 732106 - DNA, 25 bp, Homo sapien
cttctgccttcatgtcttactaaat

SEQ ID NO: 732107 - DNA, 25 bp, Homo sapien
taattacatgtctgattaaatccac

SEQ ID NO: 732108 - DNA, 25 bp, Homo sapien
ctagaagataagtgccgttttcctt

SEQ ID NO: 732109 - DNA, 25 bp, Homo sapien
gcaaatatatttgccagcagctgtt

SEQ ID NO: 732110 - DNA, 25 bp, Homo sapien
taacgggcagctctgcgacttctag

SEQ ID NO: 732111 - DNA, 25 bp, Homo sapien
atcacaaatgtgtatcggctaacgg

SEQ ID NO: 732112 - DNA, 25 bp, Homo sapien
gacttctagtaggaaagcttctctc

SEQ ID NO: 732113 - DNA, 25 bp, Homo sapien
gcactctgtcgtttgccaaggaact

SEQ ID NO: 732114 - DNA, 25 bp, Homo sapien
attgtgtccatcatgccttctatca

SEQ ID NO: 732115 - DNA, 25 bp, Homo sapien
catcatgccttctatcaattctcca

SEQ ID NO: 732116 - DNA, 25 bp, Homo sapien
tcatgccttctatcaattctccagt

SEQ ID NO: 732117 - DNA, 25 bp, Homo sapien
tgtccatcatgccttctatcaattc

SEQ ID NO: 732118 - DNA, 25 bp, Homo sapien
tcaactgtagtggtttctgtacaaa

SEQ ID NO: 732119 - DNA, 25 bp, Homo sapien
tcaatttgtcctgccctagcttctt

SEQ ID NO: 732120 - DNA, 25 bp, Homo sapien
cattgtcatatcaactgtagtggtt

SEQ ID NO: 732121 - DNA, 25 bp, Homo sapien
cttttcattgtcatatcaactgtag

SEQ ID NO: 732122 - DNA, 25 bp, Homo sapien
taaacatgtatttcccactggccat

SEQ ID NO: 732123 - DNA, 25 bp, Homo sapien
tgtaaacatgtatttcccactggcc

SEQ ID NO: 732124 - DNA, 25 bp, Homo sapien
gacctgtaaacatgtatttcccact

SEQ ID NO: 732125 - DNA, 25 bp, Homo sapien
cctgtaaacatgtatttcccactgg

SEQ ID NO: 732126 - DNA, 25 bp, Homo sapien
cagtgggagtcagtgccgggaagat

SEQ ID NO: 732127 - DNA, 25 bp, Homo sapien
agtcagtgccgggaagataaaggga

SEQ ID NO: 732128 - DNA, 25 bp, Homo sapien
gcatccaatcaaatggcaggcctgg

SEQ ID NO: 732129 - DNA, 25 bp, Homo sapien
ggccatctggcatccaatcaaatgg

SEQ ID NO: 732130 - DNA, 25 bp, Homo sapien
gcaccaacagaagcaattggaaagt

SEQ ID NO: 732131 - DNA, 25 bp, Homo sapien
ggttcttttatcaccatgtggacca

SEQ ID NO: 732132 - DNA, 25 bp, Homo sapien
aaaaatccagccaaataattgggct

SEQ ID NO: 732133 - DNA, 25 bp, Homo sapien
catgactttaaatagccagttagct

SEQ ID NO: 732134 - DNA, 25 bp, Homo sapien
gattcaacgtcagaaattcttctag

SEQ ID NO: 732135 - DNA, 25 bp, Homo sapien
tactgctcaggaagccaaagcggtg

SEQ ID NO: 732136 - DNA, 25 bp, Homo sapien
aagcggtggccagtgatcagattca

SEQ ID NO: 732137 - DNA, 25 bp, Homo sapien
tgacatgtacatgcagaatactgct

SEQ ID NO: 732138 - DNA, 25 bp, Homo sapien
tgcagccaagtttcccactttcggg

SEQ ID NO: 732139 - DNA, 25 bp, Homo sapien
ctgcacacccagagtgcaataaata

SEQ ID NO: 732140 - DNA, 25 bp, Homo sapien
gcaataaataaatctcaccctggga

SEQ ID NO: 732141 - DNA, 25 bp, Homo sapien
tcattttatcttccctgccagacga

SEQ ID NO: 732142 - DNA, 25 bp, Homo sapien
tgagttctgtgaaccctcgtagcaa

SEQ ID NO: 732143 - DNA, 25 bp, Homo sapien
gtgaaccctcgtagcaaattaattg

SEQ ID NO: 732144 - DNA, 25 bp, Homo sapien
taattgaattcaaggaggaggccat

SEQ ID NO: 732145 - DNA, 25 bp, Homo sapien
ccttaatgatcaaccagcaaatgta

SEQ ID NO: 732146 - DNA, 25 bp, Homo sapien
ttaaggtaattgcaaaatcagctga

SEQ ID NO: 732147 - DNA, 25 bp, Homo sapien
ggtaattgcaaaatcagctgatgac

SEQ ID NO: 732148 - DNA, 25 bp, Homo sapien
cctgacatgttgcaatggtgaggag

SEQ ID NO: 732149 - DNA, 25 bp, Homo sapien
catgttgcaatggtgaggaggtccc

SEQ ID NO: 732150 - DNA, 25 bp, Homo sapien
gggcttcacactcagccttgggcat

SEQ ID NO: 732151 - DNA, 25 bp, Homo sapien
tgggcttcacactcagccttgggca

SEQ ID NO: 732152 - DNA, 25 bp, Homo sapien
ctgggcttcacactcagccttgggc

SEQ ID NO: 732153 - DNA, 25 bp, Homo sapien
ctcggcgattgagcgggcggcggcg

SEQ ID NO: 732154 - DNA, 25 bp, Homo sapien
acacccggagcgctcggcgattgag

SEQ ID NO: 732155 - DNA, 25 bp, Homo sapien
ctccaagccgctccccgcggggcga

SEQ ID NO: 732156 - DNA, 25 bp, Homo sapien
ggggcgagctcacacccggagcgct

SEQ ID NO: 732157 - DNA, 25 bp, Homo sapien
gcagggcgtggccggggccgagtgg

SEQ ID NO: 732158 - DNA, 25 bp, Homo sapien
cgaggcctggctgccgagcggaaag

SEQ ID NO: 732159 - DNA, 25 bp, Homo sapien
cggtcgcggtgccttcttcgaggca

SEQ ID NO: 732160 - DNA, 25 bp, Homo sapien
ctgtcggtactcgtagtttccggcg

SEQ ID NO: 732161 - DNA, 25 bp, Homo sapien
ggcactaccgcgaaggctgtcggta

SEQ ID NO: 732162 - DNA, 25 bp, Homo sapien
cgctgcccccgcgcagggagcatgg

SEQ ID NO: 732163 - DNA, 25 bp, Homo sapien
ttcctgaggcgcatccggacccggg

SEQ ID NO: 732164 - DNA, 25 bp, Homo sapien
atggctttcctgaggcgcatccgga

SEQ ID NO: 732165 - DNA, 25 bp, Homo sapien
ctttcctgaggcgcatccggacccg

SEQ ID NO: 732166 - DNA, 25 bp, Homo sapien
gccgccgctgggctgtggcgtagca

SEQ ID NO: 732167 - DNA, 25 bp, Homo sapien
gccgctgggctgtggcgtagcagct

SEQ ID NO: 732168 - DNA, 25 bp, Homo sapien
tctgcctctttttccgcgaatggcc

SEQ ID NO: 732169 - DNA, 25 bp, Homo sapien
tctttttccgcgaatggccgccgct

SEQ ID NO: 732170 - DNA, 25 bp, Homo sapien
tgggggcgaggcgggaggagaggcc

SEQ ID NO: 732171 - DNA, 25 bp, Homo sapien
gcgaggcgggaggagaggccggtcc

SEQ ID NO: 732172 - DNA, 25 bp, Homo sapien
ggcgaggcgggaggagaggccggtc

SEQ ID NO: 732173 - DNA, 25 bp, Homo sapien
gtgggggcgaggcgggaggagaggc

SEQ ID NO: 732174 - DNA, 25 bp, Homo sapien
cctccttctgtagccatcgccgctg

SEQ ID NO: 732175 - DNA, 25 bp, Homo sapien
tccctccttctgtagccatcgccgc

SEQ ID NO: 732176 - DNA, 25 bp, Homo sapien
tccttctgtagccatcgccgctgcc

SEQ ID NO: 732177 - DNA, 25 bp, Homo sapien
ccttctgtagccatcgccgctgccg

SEQ ID NO: 732178 - DNA, 25 bp, Homo sapien
tcaaagggcataactccctctctct

SEQ ID NO: 732179 - DNA, 25 bp, Homo sapien
cctctctctcctaatgtgtcgtgat

SEQ ID NO: 732180 - DNA, 25 bp, Homo sapien
cctaatgtgtcgtgatgaatttttt

SEQ ID NO: 732181 - DNA, 25 bp, Homo sapien
acattcaaagggcataactccctct

SEQ ID NO: 732182 - DNA, 25 bp, Homo sapien
ttgttgtccagttgcttgattttca

SEQ ID NO: 732183 - DNA, 25 bp, Homo sapien
tgattttcaccaggagtccctattt

SEQ ID NO: 732184 - DNA, 25 bp, Homo sapien
caggagtccctattttgctgcaagt

SEQ ID NO: 732185 - DNA, 25 bp, Homo sapien
tgctgcaagtagctgccagtaaagc

SEQ ID NO: 732186 - DNA, 25 bp, Homo sapien
gaagttgcaccaatccttgacttgg

SEQ ID NO: 732187 - DNA, 25 bp, Homo sapien
caagttgcgttgttaccagttctag

SEQ ID NO: 732188 - DNA, 25 bp, Homo sapien
tgccaagcgtttccagcaagttgcg

SEQ ID NO: 732189 - DNA, 25 bp, Homo sapien
gatgcactcccgttattactgctgg

SEQ ID NO: 732190 - DNA, 25 bp, Homo sapien
cagtggtattgaaacaccaggtcta

SEQ ID NO: 732191 - DNA, 25 bp, Homo sapien
gttagcagctgtgagtatagcttga

SEQ ID NO: 732192 - DNA, 25 bp, Homo sapien
ccaggtctaatttggaccggaactg

SEQ ID NO: 732193 - DNA, 25 bp, Homo sapien
tgagcaagaatattcccagaagctg

SEQ ID NO: 732194 - DNA, 25 bp, Homo sapien
ccctgactggagttgaaacgactgt

SEQ ID NO: 732195 - DNA, 25 bp, Homo sapien
aacgactgtggtggaatagcctgaa

SEQ ID NO: 732196 - DNA, 25 bp, Homo sapien
tgccaactgatttgccctgaaggtg

SEQ ID NO: 732197 - DNA, 25 bp, Homo sapien
gttggagccctgataagcacctgag

SEQ ID NO: 732198 - DNA, 25 bp, Homo sapien
aagtcaaactcagcacgttcacact

SEQ ID NO: 732199 - DNA, 25 bp, Homo sapien
ctcaagccaattttccacctttagt

SEQ ID NO: 732200 - DNA, 25 bp, Homo sapien
cctcaagccaattttccacctttag

SEQ ID NO: 732201 - DNA, 25 bp, Homo sapien
tagaaatatccccatatgagctggt

SEQ ID NO: 732202 - DNA, 25 bp, Homo sapien
tacatgcaggattagctaaagaaca

SEQ ID NO: 732203 - DNA, 25 bp, Homo sapien
ggaccaaccctgtcaactaagctaa

SEQ ID NO: 732204 - DNA, 25 bp, Homo sapien
tagttaccactaccagttcagacag

SEQ ID NO: 732205 - DNA, 25 bp, Homo sapien
ctgccctggctctcagaagattcat

SEQ ID NO: 732206 - DNA, 25 bp, Homo sapien
tttatttctgccctggctctcagaa

SEQ ID NO: 732207 - DNA, 25 bp, Homo sapien
tttctgccctggctctcagaagatt

SEQ ID NO: 732208 - DNA, 25 bp, Homo sapien
caggtttcatggagtcttttatttc

SEQ ID NO: 732209 - DNA, 25 bp, Homo sapien
tgctggcaatgtacatagcccttca

SEQ ID NO: 732210 - DNA, 25 bp, Homo sapien
tatgctggcaatgtacatagccctt

SEQ ID NO: 732211 - DNA, 25 bp, Homo sapien
gctggcaatgtacatagcccttcat

SEQ ID NO: 732212 - DNA, 25 bp, Homo sapien
cctatgctggcaatgtacatagccc

SEQ ID NO: 732213 - DNA, 25 bp, Homo sapien
tgttgcttggtaacctttcattcat

SEQ ID NO: 732214 - DNA, 25 bp, Homo sapien
atcactgttgcttggtaacctttca

SEQ ID NO: 732215 - DNA, 25 bp, Homo sapien
actgttgcttggtaacctttcattc

SEQ ID NO: 732216 - DNA, 25 bp, Homo sapien
tcactgttgcttggtaacctttcat

SEQ ID NO: 732217 - DNA, 25 bp, Homo sapien
aaataagatctgaccagaagccctc

SEQ ID NO: 732218 - DNA, 25 bp, Homo sapien
ctatgtgcttaatgctgctggagaa

SEQ ID NO: 732219 - DNA, 25 bp, Homo sapien
tgctatgtgcttaatgctgctggag

SEQ ID NO: 732220 - DNA, 25 bp, Homo sapien
tgataaataagatctgaccagaagc

SEQ ID NO: 732221 - DNA, 25 bp, Homo sapien
ctctcattcatatcattataaacag

SEQ ID NO: 732222 - DNA, 25 bp, Homo sapien
tatgcctctcattcatatcattata

SEQ ID NO: 732223 - DNA, 25 bp, Homo sapien
atttatgcctctcattcatatcatt

SEQ ID NO: 732224 - DNA, 25 bp, Homo sapien
tgcctctcattcatatcattataaa

SEQ ID NO: 732225 - DNA, 25 bp, Homo sapien
ctccctttctacctattttgatgaa

SEQ ID NO: 732226 - DNA, 25 bp, Homo sapien
ttagggaataggctaagatttctcc

SEQ ID NO: 732227 - DNA, 25 bp, Homo sapien
aaagcatgctcaccatagaaaacta

SEQ ID NO: 732228 - DNA, 25 bp, Homo sapien
ctaaacttgccatttagggaatagg

SEQ ID NO: 732229 - DNA, 25 bp, Homo sapien
ttggtatacctagctccctaaggga

SEQ ID NO: 732230 - DNA, 25 bp, Homo sapien
gatatctgctacacttcctccctga

SEQ ID NO: 732231 - DNA, 25 bp, Homo sapien
tttcttacgaaactcggccagcagt

SEQ ID NO: 732232 - DNA, 25 bp, Homo sapien
caaatatagaaactgggccaaggta

SEQ ID NO: 732233 - DNA, 25 bp, Homo sapien
tcttgatcagaagtctgctggcctt

SEQ ID NO: 732234 - DNA, 25 bp, Homo sapien
aggacaggaacaggcaactcttcga

SEQ ID NO: 732235 - DNA, 25 bp, Homo sapien
taacagcacctatcgtggcattagc

SEQ ID NO: 732236 - DNA, 25 bp, Homo sapien
cacttgtgtgagttggtcaggacta

SEQ ID NO: 732237 - DNA, 25 bp, Homo sapien
tctccagtatgccagcgaagatgtg

SEQ ID NO: 732238 - DNA, 25 bp, Homo sapien
cgaagatgtgctcgtaaatgagatg

SEQ ID NO: 732239 - DNA, 25 bp, Homo sapien
tccttcaatatgacagatatgctgc

SEQ ID NO: 732240 - DNA, 25 bp, Homo sapien
tgtatgggttcttctatgtctctgg

SEQ ID NO: 732241 - DNA, 25 bp, Homo sapien
tcttggaataaactgtactacgtaa

SEQ ID NO: 732242 - DNA, 25 bp, Homo sapien
taacagatataggagcattcatgct

SEQ ID NO: 732243 - DNA, 25 bp, Homo sapien
gacaactatacttacgatattggtc

SEQ ID NO: 732244 - DNA, 25 bp, Homo sapien
gataatgtgagcctcatagaataag

SEQ ID NO: 732245 - DNA, 25 bp, Homo sapien
gcttatgccctagaaaacacaaatc

SEQ ID NO: 732246 - DNA, 25 bp, Homo sapien
tgtctctttgtagttgaactctccc

SEQ ID NO: 732247 - DNA, 25 bp, Homo sapien
aatgcatctgagtttcatccatgtg

SEQ ID NO: 732248 - DNA, 25 bp, Homo sapien
cacagaagagttgctatcacttcca

SEQ ID NO: 732249 - DNA, 25 bp, Homo sapien
gaagctcaatgaactccgagtaggt

SEQ ID NO: 732250 - DNA, 25 bp, Homo sapien
ccgagtaggttaaatgcagagagtc

SEQ ID NO: 732251 - DNA, 25 bp, Homo sapien
gcagagagtcacatcgagtcacatt

SEQ ID NO: 732252 - DNA, 25 bp, Homo sapien
ggcatgcacatgaggcttaacagaa

SEQ ID NO: 732253 - DNA, 25 bp, Homo sapien
gagaccatgaatttatagggacacc

SEQ ID NO: 732254 - DNA, 25 bp, Homo sapien
aaaactgagagtaaggcgaggttga

SEQ ID NO: 732255 - DNA, 25 bp, Homo sapien
tagggacaccaatctgcataatgag

SEQ ID NO: 732256 - DNA, 25 bp, Homo sapien
caaagacgactaagattgataggca

SEQ ID NO: 732257 - DNA, 25 bp, Homo sapien
ctatgatcattaaggcttctagtca

SEQ ID NO: 732258 - DNA, 25 bp, Homo sapien
tactttaagaatctggtttattata

SEQ ID NO: 732259 - DNA, 25 bp, Homo sapien
cggcctaacgatttcttttctctag

SEQ ID NO: 732260 - DNA, 25 bp, Homo sapien
tatacatataacatgcaaaatacgt

SEQ ID NO: 732261 - DNA, 25 bp, Homo sapien
catgtaatgcaaatgttgaggctac

SEQ ID NO: 732262 - DNA, 25 bp, Homo sapien
tagaataaatttgtcgtggccagat

SEQ ID NO: 732263 - DNA, 25 bp, Homo sapien
tgaactgaggtacaatcactggaag

SEQ ID NO: 732264 - DNA, 25 bp, Homo sapien
tgacgaagccaacatataagacagt

SEQ ID NO: 732265 - DNA, 25 bp, Homo sapien
taacagatgagtccagttctcccga

SEQ ID NO: 732266 - DNA, 25 bp, Homo sapien
gttctcccgaggtaacaatggcaag

SEQ ID NO: 732267 - DNA, 25 bp, Homo sapien
ccttttagaacattccgggcattca

SEQ ID NO: 732268 - DNA, 25 bp, Homo sapien
gagagatgatcactccgcataaacc

SEQ ID NO: 732269 - DNA, 25 bp, Homo sapien
taagtccaattaaggtccagcctgc

SEQ ID NO: 732270 - DNA, 25 bp, Homo sapien
ccagcattttcctaaggtgtcaacc

SEQ ID NO: 732271 - DNA, 25 bp, Homo sapien
tcaaaggtgtgtaaacaagtgcagc

SEQ ID NO: 732272 - DNA, 25 bp, Homo sapien
caagtgcagcactagaggtctctgt

SEQ ID NO: 732273 - DNA, 25 bp, Homo sapien
tatataacgctacaaagggctggcc

SEQ ID NO: 732274 - DNA, 25 bp, Homo sapien
gactcagaatggtatgcagaacaga

SEQ ID NO: 732275 - DNA, 25 bp, Homo sapien
tatcccactgagtcaaataaaggac

SEQ ID NO: 732276 - DNA, 25 bp, Homo sapien
aaatgtcaattacagccccagaggc

SEQ ID NO: 732277 - DNA, 25 bp, Homo sapien
ttagcgtcattacaaaagaggcccc

SEQ ID NO: 732278 - DNA, 25 bp, Homo sapien
gcttagctattaaccagggagatca

SEQ ID NO: 732279 - DNA, 25 bp, Homo sapien
ctaagaggaacagagcccaaggttt

SEQ ID NO: 732280 - DNA, 25 bp, Homo sapien
tgcccacggttgtgtgcctactaag

SEQ ID NO: 732281 - DNA, 25 bp, Homo sapien
cctaggcatagggtaaatggatctc

SEQ ID NO: 732282 - DNA, 25 bp, Homo sapien
tctctgaccctgacttgaaacctgt

SEQ ID NO: 732283 - DNA, 25 bp, Homo sapien
caaactggcgtttatgacaactgct

SEQ ID NO: 732284 - DNA, 25 bp, Homo sapien
gaaggctgtaactggacaactgaag

SEQ ID NO: 732285 - DNA, 25 bp, Homo sapien
agatatagaccattacatgtaactg

SEQ ID NO: 732286 - DNA, 25 bp, Homo sapien
taatatgccctctttaagacccaaa

SEQ ID NO: 732287 - DNA, 25 bp, Homo sapien
aatatgctggtaatgaattgttgca

SEQ ID NO: 732288 - DNA, 25 bp, Homo sapien
ccaattctttaaagattaatatgcc

SEQ ID NO: 732289 - DNA, 25 bp, Homo sapien
caaggctgctttatattgtccataa

SEQ ID NO: 732290 - DNA, 25 bp, Homo sapien
gtatacaaggctggcaatcaccagt

SEQ ID NO: 732291 - DNA, 25 bp, Homo sapien
gctcccagttgctggtatacaaggc

SEQ ID NO: 732292 - DNA, 25 bp, Homo sapien
tcttatattccagcttcacatccct

SEQ ID NO: 732293 - DNA, 25 bp, Homo sapien
ggggcggagtgagcgcaccgcgcca

SEQ ID NO: 732294 - DNA, 25 bp, Homo sapien
ggagtgagcgcaccgcgccaccgcc

SEQ ID NO: 732295 - DNA, 25 bp, Homo sapien
gggcggagtgagcgcaccgcgccac

SEQ ID NO: 732296 - DNA, 25 bp, Homo sapien
gcggagtgagcgcaccgcgccaccg

SEQ ID NO: 732297 - DNA, 25 bp, Homo sapien
cctcgcaggccgaagcgaaggcctg

SEQ ID NO: 732298 - DNA, 25 bp, Homo sapien
gctgctacttagcagccgcgccact

SEQ ID NO: 732299 - DNA, 25 bp, Homo sapien
aaggcctgggacaagcagcgcgtcc

SEQ ID NO: 732300 - DNA, 25 bp, Homo sapien
actgcgcacagctgtagcctcgcag

SEQ ID NO: 732301 - DNA, 25 bp, Homo sapien
ggctcctcacccgagactctgggcc

SEQ ID NO: 732302 - DNA, 25 bp, Homo sapien
aagtgagcgaggacacctccgcagg

SEQ ID NO: 732303 - DNA, 25 bp, Homo sapien
cgcgagcgcagaccctagtctccca

SEQ ID NO: 732304 - DNA, 25 bp, Homo sapien
gcaaccgtccgagggaacgcgaggc

SEQ ID NO: 732305 - DNA, 25 bp, Homo sapien
tcggggcttctctgaagtctcgcgc

SEQ ID NO: 732306 - DNA, 25 bp, Homo sapien
taggcgaagggtcggggcttctctg

SEQ ID NO: 732307 - DNA, 25 bp, Homo sapien
ctgcctccaggccggcccccgaggt

SEQ ID NO: 732308 - DNA, 25 bp, Homo sapien
ttctctgaagtctcgcgcctcccgg

SEQ ID NO: 732309 - DNA, 25 bp, Homo sapien
cgccgcctcctcctcgttctcctcc

SEQ ID NO: 732310 - DNA, 25 bp, Homo sapien
ccgccgcctcctcctcgttctcctc

SEQ ID NO: 732311 - DNA, 25 bp, Homo sapien
gccgccgcctcctcctcgttctcct

SEQ ID NO: 732312 - DNA, 25 bp, Homo sapien
ggccgccgcctcctcctcgttctcc

SEQ ID NO: 732313 - DNA, 25 bp, Homo sapien
gtcttgggcgaaactccgcgctctc

SEQ ID NO: 732314 - DNA, 25 bp, Homo sapien
cgcgtcttgggcgaaactccgcgct

SEQ ID NO: 732315 - DNA, 25 bp, Homo sapien
gcacccgcgcgtcttgggcgaaact

SEQ ID NO: 732316 - DNA, 25 bp, Homo sapien
aagcgcacccgcgcgtcttgggcga

SEQ ID NO: 732317 - DNA, 25 bp, Homo sapien
cccgaggcggcgaagctaaacacaa

SEQ ID NO: 732318 - DNA, 25 bp, Homo sapien
aaacacaaggcaagccgggctggtg

SEQ ID NO: 732319 - DNA, 25 bp, Homo sapien
ttctcctccgtgaaccccagcatca

SEQ ID NO: 732320 - DNA, 25 bp, Homo sapien
aagaacctgccggttgtcctcgctt

SEQ ID NO: 732321 - DNA, 25 bp, Homo sapien
gtagttttgttggatgggcaggtcc

SEQ ID NO: 732322 - DNA, 25 bp, Homo sapien
ccaagtttgttaaagtgcccgagtg

SEQ ID NO: 732323 - DNA, 25 bp, Homo sapien
gcaggtccccttgcccgtcgcctct

SEQ ID NO: 732324 - DNA, 25 bp, Homo sapien
ggatggggacttcaagccaagtttg

SEQ ID NO: 732325 - DNA, 25 bp, Homo sapien
tgagataaagacaagcccaagaggt

SEQ ID NO: 732326 - DNA, 25 bp, Homo sapien
tcgaacaggctcaacgcgggattct

SEQ ID NO: 732327 - DNA, 25 bp, Homo sapien
acacccatgtgtgcggagattgcag

SEQ ID NO: 732328 - DNA, 25 bp, Homo sapien
gacgagttacatgcgctctgccaaa

SEQ ID NO: 732329 - DNA, 25 bp, Homo sapien
gaaagcagatacatgtccaagagac

SEQ ID NO: 732330 - DNA, 25 bp, Homo sapien
gacaacgcaggtaactctccaaata

SEQ ID NO: 732331 - DNA, 25 bp, Homo sapien
aagtttatggtttgcatctcttgga

SEQ ID NO: 732332 - DNA, 25 bp, Homo sapien
catttactccaatgctttcagtaat

SEQ ID NO: 732333 - DNA, 25 bp, Homo sapien
aaatgtcatggagataagtgaaagc

SEQ ID NO: 732334 - DNA, 25 bp, Homo sapien
tcatggagataagtgaaagctttaa

SEQ ID NO: 732335 - DNA, 25 bp, Homo sapien
tgtcatggagataagtgaaagcttt

SEQ ID NO: 732336 - DNA, 25 bp, Homo sapien
ttcaaatgtcatggagataagtgaa

SEQ ID NO: 732337 - DNA, 25 bp, Homo sapien
tatgtgatattccatatcttgtgaa

SEQ ID NO: 732338 - DNA, 25 bp, Homo sapien
acaggaccaggacttatggttgttc

SEQ ID NO: 732339 - DNA, 25 bp, Homo sapien
tgcaacagtgggaattggtagaaga

SEQ ID NO: 732340 - DNA, 25 bp, Homo sapien
caattctgatccagatccatctttc

SEQ ID NO: 732341 - DNA, 25 bp, Homo sapien
gaggagacaagtgaagaccattcaa

SEQ ID NO: 732342 - DNA, 25 bp, Homo sapien
gaaatctagttctgcttgaggagac

SEQ ID NO: 732343 - DNA, 25 bp, Homo sapien
tattatcctttcgtttgacggtggc

SEQ ID NO: 732344 - DNA, 25 bp, Homo sapien
gaccattcaacaaacgctgcactga

SEQ ID NO: 732345 - DNA, 25 bp, Homo sapien
tgtccttcagagtaggaaaatagct

SEQ ID NO: 732346 - DNA, 25 bp, Homo sapien
tagctgctttgtttagttgtcagga

SEQ ID NO: 732347 - DNA, 25 bp, Homo sapien
ccttcagagtaggaaaatagctgct

SEQ ID NO: 732348 - DNA, 25 bp, Homo sapien
taaccattttgaggacaacaggtgc

SEQ ID NO: 732349 - DNA, 25 bp, Homo sapien
cattagaagagccatgagcaatcac

SEQ ID NO: 732350 - DNA, 25 bp, Homo sapien
ggtaaatatcaaggccgagcaggca

SEQ ID NO: 732351 - DNA, 25 bp, Homo sapien
tacaaagggtgagatgaatttatca

SEQ ID NO: 732352 - DNA, 25 bp, Homo sapien
taattaaaatttcaatctggagcca

SEQ ID NO: 732353 - DNA, 25 bp, Homo sapien
taatggagcgattaatatgcgtgtc

SEQ ID NO: 732354 - DNA, 25 bp, Homo sapien
tatgcgtgtctgtgggaattccgtc

SEQ ID NO: 732355 - DNA, 25 bp, Homo sapien
gttccacatcttgggcttcgagaag

SEQ ID NO: 732356 - DNA, 25 bp, Homo sapien
tcagaggtctcaggtaaagttccac

SEQ ID NO: 732357 - DNA, 25 bp, Homo sapien
ctcacagcaacaattcttattgttc

SEQ ID NO: 732358 - DNA, 25 bp, Homo sapien
gttcctgttttttgatgcttcatac

SEQ ID NO: 732359 - DNA, 25 bp, Homo sapien
gcaacaattcttattgttcctgttt

SEQ ID NO: 732360 - DNA, 25 bp, Homo sapien
acagcaacaattcttattgttcctg

SEQ ID NO: 732361 - DNA, 25 bp, Homo sapien
tagattattcttcactagtctcgta

SEQ ID NO: 732362 - DNA, 25 bp, Homo sapien
aaagaaagatggtgttcttactgta

SEQ ID NO: 732363 - DNA, 25 bp, Homo sapien
agatggtgttcttactgtatactag

SEQ ID NO: 732364 - DNA, 25 bp, Homo sapien
tcttcactagtctcgtaaaacctac

SEQ ID NO: 732365 - DNA, 25 bp, Homo sapien
tgtgaaaaccgaagggaaggctaca

SEQ ID NO: 732366 - DNA, 25 bp, Homo sapien
tggaagctgccttaaagccttttga

SEQ ID NO: 732367 - DNA, 25 bp, Homo sapien
caaagaaggtactacacatgtctgt

SEQ ID NO: 732368 - DNA, 25 bp, Homo sapien
cttcctgccatttaggattaaaagg

SEQ ID NO: 732369 - DNA, 25 bp, Homo sapien
aaaaggcttttatcagccagtgttt

SEQ ID NO: 732370 - DNA, 25 bp, Homo sapien
tccaaaaggcttttatcagccagtg

SEQ ID NO: 732371 - DNA, 25 bp, Homo sapien
tttccaaaaggcttttatcagccag

SEQ ID NO: 732372 - DNA, 25 bp, Homo sapien
ccaaaaggcttttatcagccagtgt

SEQ ID NO: 732373 - DNA, 25 bp, Homo sapien
aggaatagagacacaattacaaaag

SEQ ID NO: 732374 - DNA, 25 bp, Homo sapien
gagtaaggaatagagacacaattac

SEQ ID NO: 732375 - DNA, 25 bp, Homo sapien
ttctttttgccagatgctcttaact

SEQ ID NO: 732376 - DNA, 25 bp, Homo sapien
tttttgccagatgctcttaacttac

SEQ ID NO: 732377 - DNA, 25 bp, Homo sapien
ttattaaacgatcaagaaacttgtc

SEQ ID NO: 732378 - DNA, 25 bp, Homo sapien
ctttaagatgttaacagccacctgc

SEQ ID NO: 732379 - DNA, 25 bp, Homo sapien
cctcaggtgaaaggtaagctgttgc

SEQ ID NO: 732380 - DNA, 25 bp, Homo sapien
gaaatcccatggtctcagctttctt

SEQ ID NO: 732381 - DNA, 25 bp, Homo sapien
gaaaagtggatttatttacagagga

SEQ ID NO: 732382 - DNA, 25 bp, Homo sapien
gatgagcttactgcttcctgactta

SEQ ID NO: 732383 - DNA, 25 bp, Homo sapien
gagtcactgatacataaagagattt

SEQ ID NO: 732384 - DNA, 25 bp, Homo sapien
cagattagtcaattctaagagtcac

SEQ ID NO: 732385 - DNA, 25 bp, Homo sapien
tcttcactcatctcgtggacttgtc

SEQ ID NO: 732386 - DNA, 25 bp, Homo sapien
catctcgtggacttgtccatttaaa

SEQ ID NO: 732387 - DNA, 25 bp, Homo sapien
cagagttccataagttcttcactca

SEQ ID NO: 732388 - DNA, 25 bp, Homo sapien
aattgctcctttggtaccaccaaat

SEQ ID NO: 732389 - DNA, 25 bp, Homo sapien
gcttgatagggtcttggcttaagcc

SEQ ID NO: 732390 - DNA, 25 bp, Homo sapien
ttgcttgatagggtcttggcttaag

SEQ ID NO: 732391 - DNA, 25 bp, Homo sapien
tgcttgatagggtcttggcttaagc

SEQ ID NO: 732392 - DNA, 25 bp, Homo sapien
ttaaatgcagcttctaagccattgc

SEQ ID NO: 732393 - DNA, 25 bp, Homo sapien
gagttttggacttaaatgccacata

SEQ ID NO: 732394 - DNA, 25 bp, Homo sapien
tctgtcaaattccagagttttggac

SEQ ID NO: 732395 - DNA, 25 bp, Homo sapien
gcttctaagccattgcagttaaaga

SEQ ID NO: 732396 - DNA, 25 bp, Homo sapien
catagtaaacgttttttatgatagc

SEQ ID NO: 732397 - DNA, 25 bp, Homo sapien
aacgttttttatgatagcttcttca

SEQ ID NO: 732398 - DNA, 25 bp, Homo sapien
ttatgatagcttcttcagaactaac

SEQ ID NO: 732399 - DNA, 25 bp, Homo sapien
cgttttttatgatagcttcttcaga

SEQ ID NO: 732400 - DNA, 25 bp, Homo sapien
cattaactgacaggtactataacag

SEQ ID NO: 732401 - DNA, 25 bp, Homo sapien
ggagcctctgtaattgagatttcac

SEQ ID NO: 732402 - DNA, 25 bp, Homo sapien
ctagttccagtagcaaagaatatga

SEQ ID NO: 732403 - DNA, 25 bp, Homo sapien
ttgaattgaaaatggcaggagcctc

SEQ ID NO: 732404 - DNA, 25 bp, Homo sapien
atgacaactggcttctctagaaaat

SEQ ID NO: 732405 - DNA, 25 bp, Homo sapien
ttcattatacagttgcttacacaca

SEQ ID NO: 732406 - DNA, 25 bp, Homo sapien
atatgcactagtgtgctgtaatgta

SEQ ID NO: 732407 - DNA, 25 bp, Homo sapien
acatatgcactagtgtgctgtaatg

SEQ ID NO: 732408 - DNA, 25 bp, Homo sapien
ttcttgttaagaactacatgaccac

SEQ ID NO: 732409 - DNA, 25 bp, Homo sapien
gagatgcgaagtttgaccaaaacat

SEQ ID NO: 732410 - DNA, 25 bp, Homo sapien
tttgaagtcgttggagaacctgctg

SEQ ID NO: 732411 - DNA, 25 bp, Homo sapien
agataacggagagatgcgaagtttg

SEQ ID NO: 732412 - DNA, 25 bp, Homo sapien
ccattcattatagatacgactttca

SEQ ID NO: 732413 - DNA, 25 bp, Homo sapien
ggcactgaatttaaccaagggttga

SEQ ID NO: 732414 - DNA, 25 bp, Homo sapien
ttcaaattgatcaagcaaagtggtc

SEQ ID NO: 732415 - DNA, 25 bp, Homo sapien
taaagcgtgatcaggattgcccaaa

SEQ ID NO: 732416 - DNA, 25 bp, Homo sapien
tcacttctctcaatacagccactag

SEQ ID NO: 732417 - DNA, 25 bp, Homo sapien
tatttcacttctctcaatacagcca

SEQ ID NO: 732418 - DNA, 25 bp, Homo sapien
tctggtatgtcttgtttcttcaaca

SEQ ID NO: 732419 - DNA, 25 bp, Homo sapien
tcttgaagatggctaaagctgaatc

SEQ ID NO: 732420 - DNA, 25 bp, Homo sapien
tctgtgctccaactcggacgtggct

SEQ ID NO: 732421 - DNA, 25 bp, Homo sapien
tcaatcagagggtattcaacttcca

SEQ ID NO: 732422 - DNA, 25 bp, Homo sapien
tctgtgtgcgctcaactctgtgctc

SEQ ID NO: 732423 - DNA, 25 bp, Homo sapien
caacttccaggagcgtctgtttgag

SEQ ID NO: 732424 - DNA, 25 bp, Homo sapien
gccatctccttggattaacttgtat

SEQ ID NO: 732425 - DNA, 25 bp, Homo sapien
ttgtaaacaaatcacccttgtcctc

SEQ ID NO: 732426 - DNA, 25 bp, Homo sapien
gcagccatctccttggattaacttg

SEQ ID NO: 732427 - DNA, 25 bp, Homo sapien
ccttgtcctccaaggtgaaggctgc

SEQ ID NO: 732428 - DNA, 25 bp, Homo sapien
aagagtttgggcgacacaatggaca

SEQ ID NO: 732429 - DNA, 25 bp, Homo sapien
aggtgtggttaaggaccactacagg

SEQ ID NO: 732430 - DNA, 25 bp, Homo sapien
gaccactacaggttgagcacgcagt

SEQ ID NO: 732431 - DNA, 25 bp, Homo sapien
ccagttggggcaaaataggacctga

SEQ ID NO: 732432 - DNA, 25 bp, Homo sapien
cacaatgtcgtcaatgaattctaca

SEQ ID NO: 732433 - DNA, 25 bp, Homo sapien
gctattcggttcatctgggcagaca

SEQ ID NO: 732434 - DNA, 25 bp, Homo sapien
taagtcgtgcattatagcctgaaaa

SEQ ID NO: 732435 - DNA, 25 bp, Homo sapien
tctctgtctagggaaggtttaaaca

SEQ ID NO: 732436 - DNA, 25 bp, Homo sapien
cagcatggccatacaagagaaaatg

SEQ ID NO: 732437 - DNA, 25 bp, Homo sapien
catttcatcggaagacacagcatgg

SEQ ID NO: 732438 - DNA, 25 bp, Homo sapien
cccagaggtaagtgtgggtctccag

SEQ ID NO: 732439 - DNA, 25 bp, Homo sapien
tctgccaggcctaacatgttatcca

SEQ ID NO: 732440 - DNA, 25 bp, Homo sapien
ggttaacaagctcactttgaaaggc

SEQ ID NO: 732441 - DNA, 25 bp, Homo sapien
aagatgctcctgaaacatccagctc

SEQ ID NO: 732442 - DNA, 25 bp, Homo sapien
gaaccaactatcaaacactctaaag

SEQ ID NO: 732443 - DNA, 25 bp, Homo sapien
catccagctccatttcttaattatg

SEQ ID NO: 732444 - DNA, 25 bp, Homo sapien
ttctggccatagctttccaagaggg

SEQ ID NO: 732445 - DNA, 25 bp, Homo sapien
gacctgctcaggcatcttctggcca

SEQ ID NO: 732446 - DNA, 25 bp, Homo sapien
tctctctgaagtccggaatctgtct

SEQ ID NO: 732447 - DNA, 25 bp, Homo sapien
gaggttcaaagagttcatcagtagc

SEQ ID NO: 732448 - DNA, 25 bp, Homo sapien
tttccttataagagtgacttccgca

SEQ ID NO: 732449 - DNA, 25 bp, Homo sapien
cagttgctgcgatctttttggtagt

SEQ ID NO: 732450 - DNA, 25 bp, Homo sapien
tccgcattatggagaggtgagactt

SEQ ID NO: 732451 - DNA, 25 bp, Homo sapien
acttcatgtctgacagttgctgcga

SEQ ID NO: 732452 - DNA, 25 bp, Homo sapien
aagcgctgtgtatggattttctgca

SEQ ID NO: 732453 - DNA, 25 bp, Homo sapien
ggattttctgcattaaatccaagag

SEQ ID NO: 732454 - DNA, 25 bp, Homo sapien
cttatcaagcgctgtgtatggattt

SEQ ID NO: 732455 - DNA, 25 bp, Homo sapien
ttaaatccaagaggggcatagtgtc

SEQ ID NO: 732456 - DNA, 25 bp, Homo sapien
ttcttctaaggcctcaagctcttca

SEQ ID NO: 732457 - DNA, 25 bp, Homo sapien
cccacagtcccttgagcaattttat

SEQ ID NO: 732458 - DNA, 25 bp, Homo sapien
gagccacttcaaaaagacgagtaga

SEQ ID NO: 732459 - DNA, 25 bp, Homo sapien
ttatttctttgcgacactgtttcat

SEQ ID NO: 732460 - DNA, 25 bp, Homo sapien
tctgagttctacatccatctgttcc

SEQ ID NO: 732461 - DNA, 25 bp, Homo sapien
accttctgagttctacatccatctg

SEQ ID NO: 732462 - DNA, 25 bp, Homo sapien
cactgggttttagtccaattatcaa

SEQ ID NO: 732463 - DNA, 25 bp, Homo sapien
ggttttagtccaattatcaatgctt

SEQ ID NO: 732464 - DNA, 25 bp, Homo sapien
aagatggaaggaggtggtgctgaga

SEQ ID NO: 732465 - DNA, 25 bp, Homo sapien
tagattagggaagatggaaggaggt

SEQ ID NO: 732466 - DNA, 25 bp, Homo sapien
aaggaggtggtgctgagaaagataa

SEQ ID NO: 732467 - DNA, 25 bp, Homo sapien
agaaagataaattgttgtaatagac

SEQ ID NO: 732468 - DNA, 25 bp, Homo sapien
tctgtaactctgtgatggccctcag

SEQ ID NO: 732469 - DNA, 25 bp, Homo sapien
tccaggcccgtgtaagcatcccaga

SEQ ID NO: 732470 - DNA, 25 bp, Homo sapien
gctgtcatgtccttaactgtgcctt

SEQ ID NO: 732471 - DNA, 25 bp, Homo sapien
cccagacgcggacttccttgttgag

SEQ ID NO: 732472 - DNA, 25 bp, Homo sapien
tgtaagtgaagagttgagccagcca

SEQ ID NO: 732473 - DNA, 25 bp, Homo sapien
taagaggaccaaatgccctgatttg

SEQ ID NO: 732474 - DNA, 25 bp, Homo sapien
gagccagccatatgggttgcaggaa

SEQ ID NO: 732475 - DNA, 25 bp, Homo sapien
catccacgcctctgcataagaggac

SEQ ID NO: 732476 - DNA, 25 bp, Homo sapien
ccaaagttgtggcttcatttattaa

SEQ ID NO: 732477 - DNA, 25 bp, Homo sapien
cagtgctaacaaatctgccaaagtt

SEQ ID NO: 732478 - DNA, 25 bp, Homo sapien
gccttgtccacaatccttcggacat

SEQ ID NO: 732479 - DNA, 25 bp, Homo sapien
tgtgtaaccgcagtgctaacaaatc

SEQ ID NO: 732480 - DNA, 25 bp, Homo sapien
gactttagtaatggaatgcctgttc

SEQ ID NO: 732481 - DNA, 25 bp, Homo sapien
tcatggttgcccaggtctgactgat

SEQ ID NO: 732482 - DNA, 25 bp, Homo sapien
tgtgctctagagtttcaaaaagttg

SEQ ID NO: 732483 - DNA, 25 bp, Homo sapien
cgatagtgaacttcgtaagaaaact

SEQ ID NO: 732484 - DNA, 25 bp, Homo sapien
gctggacttccatccaagtgaagat

SEQ ID NO: 732485 - DNA, 25 bp, Homo sapien
ggtgagaccaagttcgctggacttc

SEQ ID NO: 732486 - DNA, 25 bp, Homo sapien
catctttcacaagctggattcgaat

SEQ ID NO: 732487 - DNA, 25 bp, Homo sapien
gattcgaatatcttctgaacagaca

SEQ ID NO: 732488 - DNA, 25 bp, Homo sapien
atagcatacagcctgtctttgacaa

SEQ ID NO: 732489 - DNA, 25 bp, Homo sapien
tagaatagcatacagcctgtctttg

SEQ ID NO: 732490 - DNA, 25 bp, Homo sapien
tttgctagaatagcatacagcctgt

SEQ ID NO: 732491 - DNA, 25 bp, Homo sapien
ctttgctagaatagcatacagcctg

SEQ ID NO: 732492 - DNA, 25 bp, Homo sapien
ggtctgcacgttgcttctaacacat

SEQ ID NO: 732493 - DNA, 25 bp, Homo sapien
taggtctgcacgttgcttctaacac

SEQ ID NO: 732494 - DNA, 25 bp, Homo sapien
tagagattaggtctgcacgttgctt

SEQ ID NO: 732495 - DNA, 25 bp, Homo sapien
gattaggtctgcacgttgcttctaa

SEQ ID NO: 732496 - DNA, 25 bp, Homo sapien
tcagcagaagagacgaaatagaagc

SEQ ID NO: 732497 - DNA, 25 bp, Homo sapien
cagcgagagctttttcacaaagaga

SEQ ID NO: 732498 - DNA, 25 bp, Homo sapien
atagaagcgaggaaaggctatgcgc

SEQ ID NO: 732499 - DNA, 25 bp, Homo sapien
tggtttccaggtattcagcgagagc

SEQ ID NO: 732500 - DNA, 25 bp, Homo sapien
cacagtataatacgagactttcaaa

SEQ ID NO: 732501 - DNA, 25 bp, Homo sapien
tgatagagacgctatgacattcctc

SEQ ID NO: 732502 - DNA, 25 bp, Homo sapien
gattttctagttcctggcccacgtg

SEQ ID NO: 732503 - DNA, 25 bp, Homo sapien
catgacaggtagcatttgacaatga

SEQ ID NO: 732504 - DNA, 25 bp, Homo sapien
ggtgaggagacattcacagtaagtc

SEQ ID NO: 732505 - DNA, 25 bp, Homo sapien
cgcgtagttaaaatgctatgaatgg

SEQ ID NO: 732506 - DNA, 25 bp, Homo sapien
ggaattcagggatttagaacgcgta

SEQ ID NO: 732507 - DNA, 25 bp, Homo sapien
ggtaggtgaggagacattcacagta

SEQ ID NO: 732508 - DNA, 25 bp, Homo sapien
tgccctgtgtgcagaaacatcctga

SEQ ID NO: 732509 - DNA, 25 bp, Homo sapien
tctgcaatgctgtcgaaaagtttgg

SEQ ID NO: 732510 - DNA, 25 bp, Homo sapien
tgctgtacattccaactgccctgtg

SEQ ID NO: 732511 - DNA, 25 bp, Homo sapien
tcggcttggaatgggacatactcct

SEQ ID NO: 732512 - DNA, 25 bp, Homo sapien
ttcaagttgcagaagccatgtttcc

SEQ ID NO: 732513 - DNA, 25 bp, Homo sapien
tatttgtgagctggttagtgcaacc

SEQ ID NO: 732514 - DNA, 25 bp, Homo sapien
tagtgcaacctgagctgggaaatca

SEQ ID NO: 732515 - DNA, 25 bp, Homo sapien
tctgttatagaatgacgcaccgttt

SEQ ID NO: 732516 - DNA, 25 bp, Homo sapien
atcttgaagttcctttatgtctcaa

SEQ ID NO: 732517 - DNA, 25 bp, Homo sapien
tcttgaagttcctttatgtctcaaa

SEQ ID NO: 732518 - DNA, 25 bp, Homo sapien
ttcccctaagagtgtaaaatcaaga

SEQ ID NO: 732519 - DNA, 25 bp, Homo sapien
tggtacaaacacttctttagtaata

SEQ ID NO: 732520 - DNA, 25 bp, Homo sapien
atcttcccctaagagtgtaaaatca

SEQ ID NO: 732521 - DNA, 25 bp, Homo sapien
ccctaagagtgtaaaatcaagaatt

SEQ ID NO: 732522 - DNA, 25 bp, Homo sapien
tctggcatggacatctatggtacaa

SEQ ID NO: 732523 - DNA, 25 bp, Homo sapien
caggtggaagttctcccagcaaaag

SEQ ID NO: 732524 - DNA, 25 bp, Homo sapien
aaagtgtaatcagtgtattcagctg

SEQ ID NO: 732525 - DNA, 25 bp, Homo sapien
ctatggtacaaattgtcatgatctt

SEQ ID NO: 732526 - DNA, 25 bp, Homo sapien
ttgccttctgagaaataagttttgc

SEQ ID NO: 732527 - DNA, 25 bp, Homo sapien
gccttctgagaaataagttttgcca

SEQ ID NO: 732528 - DNA, 25 bp, Homo sapien
aacttgccttctgagaaataagttt

SEQ ID NO: 732529 - DNA, 25 bp, Homo sapien
ccttctgagaaataagttttgccac

SEQ ID NO: 732530 - DNA, 25 bp, Homo sapien
tgatcactagtcgagggctgtttcc

SEQ ID NO: 732531 - DNA, 25 bp, Homo sapien
agcagtgtttctgggtatcctccca

SEQ ID NO: 732532 - DNA, 25 bp, Homo sapien
catcggtgacgaagttgagacagcc

SEQ ID NO: 732533 - DNA, 25 bp, Homo sapien
ggaactgggcatcacaaatattaac

SEQ ID NO: 732534 - DNA, 25 bp, Homo sapien
tgttttcccggtaccagctgggcca

SEQ ID NO: 732535 - DNA, 25 bp, Homo sapien
catggttagatgaagtgattgagtt

SEQ ID NO: 732536 - DNA, 25 bp, Homo sapien
gaatacatagaccatcatgccaagg

SEQ ID NO: 732537 - DNA, 25 bp, Homo sapien
catgccaagggcacgtcctaggtct

SEQ ID NO: 732538 - DNA, 25 bp, Homo sapien
aatcccttatagatattgcctatgg

SEQ ID NO: 732539 - DNA, 25 bp, Homo sapien
cagagattcggttgaactcatcaaa

SEQ ID NO: 732540 - DNA, 25 bp, Homo sapien
tgatggcatcatgaatcattttcac

SEQ ID NO: 732541 - DNA, 25 bp, Homo sapien
tcctgtctgcaccaatcccttatag

SEQ ID NO: 732542 - DNA, 25 bp, Homo sapien
cgggttcatagtaataaatattcca

SEQ ID NO: 732543 - DNA, 25 bp, Homo sapien
gttcgaccagcataacccgggttca

SEQ ID NO: 732544 - DNA, 25 bp, Homo sapien
tccggtaattcggttcgaccagcat

SEQ ID NO: 732545 - DNA, 25 bp, Homo sapien
taaatattccaactgatggcttcag

SEQ ID NO: 732546 - DNA, 25 bp, Homo sapien
ccttcagcaactaacaagatttcac

SEQ ID NO: 732547 - DNA, 25 bp, Homo sapien
gctccttgcaaagcgtgtacaacgt

SEQ ID NO: 732548 - DNA, 25 bp, Homo sapien
taatgcacgcgcatccacaaaacct

SEQ ID NO: 732549 - DNA, 25 bp, Homo sapien
tgtacaacgtaatgaactttcgggc

SEQ ID NO: 732550 - DNA, 25 bp, Homo sapien
taatagcacgaagtccccagtcgta

SEQ ID NO: 732551 - DNA, 25 bp, Homo sapien
gatcttcgggtctatttttatctcc

SEQ ID NO: 732552 - DNA, 25 bp, Homo sapien
tcgtttcagagatccagccacaacc

SEQ ID NO: 732553 - DNA, 25 bp, Homo sapien
ccaagacagacttaatagcacgaag

SEQ ID NO: 732554 - DNA, 25 bp, Homo sapien
gattggatcatcaagtgggtggatt

SEQ ID NO: 732555 - DNA, 25 bp, Homo sapien
tcccaagtcatattgcacatacaca

SEQ ID NO: 732556 - DNA, 25 bp, Homo sapien
aagaaggtccgtgcttgccccttgc

SEQ ID NO: 732557 - DNA, 25 bp, Homo sapien
tgtgaagaaggtccgtgcttgcccc

SEQ ID NO: 732558 - DNA, 25 bp, Homo sapien
ttttgggcatattgaaatcccttaa

SEQ ID NO: 732559 - DNA, 25 bp, Homo sapien
agggctggaaacaggtcaccgacca

SEQ ID NO: 732560 - DNA, 25 bp, Homo sapien
cactattttgggcatattgaaatcc

SEQ ID NO: 732561 - DNA, 25 bp, Homo sapien
aacactgggatgtcgtcagtcacta

SEQ ID NO: 732562 - DNA, 25 bp, Homo sapien
tgcaggcggagctccagggtagact

SEQ ID NO: 732563 - DNA, 25 bp, Homo sapien
ctgcagagcaaacagctggttgctg

SEQ ID NO: 732564 - DNA, 25 bp, Homo sapien
tgcagagcaaacagctggttgctgg

SEQ ID NO: 732565 - DNA, 25 bp, Homo sapien
gagcaaacagctggttgctggtttc

SEQ ID NO: 732566 - DNA, 25 bp, Homo sapien
cagagcaaacagctggttgctggtt

SEQ ID NO: 732567 - DNA, 25 bp, Homo sapien
tgcatttccaactacaaagaccgag

SEQ ID NO: 732568 - DNA, 25 bp, Homo sapien
ttccaactacaaagaccgagtgccg

SEQ ID NO: 732569 - DNA, 25 bp, Homo sapien
tgcctgcatttccaactacaaagac

SEQ ID NO: 732570 - DNA, 25 bp, Homo sapien
actacaaagaccgagtgccgcacag

SEQ ID NO: 732571 - DNA, 25 bp, Homo sapien
ctgttgtcacagctttagggtttaa

SEQ ID NO: 732572 - DNA, 25 bp, Homo sapien
taagtcattccaaaccggcttctgt

SEQ ID NO: 732573 - DNA, 25 bp, Homo sapien
catatgttcggttcagtgttctcaa

SEQ ID NO: 732574 - DNA, 25 bp, Homo sapien
cattctcgggtagcatgatgtatga

SEQ ID NO: 732575 - DNA, 25 bp, Homo sapien
aagacatgatccttcttcatacaca

SEQ ID NO: 732576 - DNA, 25 bp, Homo sapien
cttcatacacatatgttcagtatcc

SEQ ID NO: 732577 - DNA, 25 bp, Homo sapien
caactgaagacatgatccttcttca

SEQ ID NO: 732578 - DNA, 25 bp, Homo sapien
tcttcatacacatatgttcagtatc

SEQ ID NO: 732579 - DNA, 25 bp, Homo sapien
tccaggactatccattttggtccat

SEQ ID NO: 732580 - DNA, 25 bp, Homo sapien
ggtcaatatcgccatccaggactat

SEQ ID NO: 732581 - DNA, 25 bp, Homo sapien
gcttaagatttgcttgttctcgtag

SEQ ID NO: 732582 - DNA, 25 bp, Homo sapien
tctcgtagaatggatgagaagagac

SEQ ID NO: 732583 - DNA, 25 bp, Homo sapien
ggcaaaagcaatgccgcaaacatcc

SEQ ID NO: 732584 - DNA, 25 bp, Homo sapien
aaaagcaatgccgcaaacatccaga

SEQ ID NO: 732585 - DNA, 25 bp, Homo sapien
gggcaaaagcaatgccgcaaacatc

SEQ ID NO: 732586 - DNA, 25 bp, Homo sapien
agcaatgccgcaaacatccagaagc

SEQ ID NO: 732587 - DNA, 25 bp, Homo sapien
tgatgtatctcaaacagaagcctca

SEQ ID NO: 732588 - DNA, 25 bp, Homo sapien
ctcatgaagggagtgagtgcaatgc

SEQ ID NO: 732589 - DNA, 25 bp, Homo sapien
aatgcgctcattgctggcgagggtc

SEQ ID NO: 732590 - DNA, 25 bp, Homo sapien
gggttgcgctccttaagtgatgtat

SEQ ID NO: 732591 - DNA, 25 bp, Homo sapien
tctgtctatccaactggccacatac

SEQ ID NO: 732592 - DNA, 25 bp, Homo sapien
tgcaccaggctactctcaggaattg

SEQ ID NO: 732593 - DNA, 25 bp, Homo sapien
tctcagtttatccaagcatgcaggg

SEQ ID NO: 732594 - DNA, 25 bp, Homo sapien
aattggccttttctgattgatgccg

SEQ ID NO: 732595 - DNA, 25 bp, Homo sapien
ttcataaacttcttttgggctgtca

SEQ ID NO: 732596 - DNA, 25 bp, Homo sapien
aggtacattttcaggagtcagcaag

SEQ ID NO: 732597 - DNA, 25 bp, Homo sapien
ggtacattttcaggagtcagcaagc

SEQ ID NO: 732598 - DNA, 25 bp, Homo sapien
tcataaacttcttttgggctgtcag

SEQ ID NO: 732599 - DNA, 25 bp, Homo sapien
atgttttaacctccccatgaccctg

SEQ ID NO: 732600 - DNA, 25 bp, Homo sapien
ggtacagatcacatgttttaacctc

SEQ ID NO: 732601 - DNA, 25 bp, Homo sapien
gatcacatgttttaacctccccatg

SEQ ID NO: 732602 - DNA, 25 bp, Homo sapien
aggtacagatcacatgttttaacct

SEQ ID NO: 732603 - DNA, 25 bp, Homo sapien
ctcacacagtattggctgctaatct

SEQ ID NO: 732604 - DNA, 25 bp, Homo sapien
tgagaaagccacatgaagtccctga

SEQ ID NO: 732605 - DNA, 25 bp, Homo sapien
aaggagggttgccttctgtctgcat

SEQ ID NO: 732606 - DNA, 25 bp, Homo sapien
acatgttgtaaaccgtgcctctgag

SEQ ID NO: 732607 - DNA, 25 bp, Homo sapien
ccctgcgacggaaatttcactgctt

SEQ ID NO: 732608 - DNA, 25 bp, Homo sapien
taatcaaagattgttccctgcgacg

SEQ ID NO: 732609 - DNA, 25 bp, Homo sapien
ttgtggtccacataataatcaaaga

SEQ ID NO: 732610 - DNA, 25 bp, Homo sapien
ctggatccatagtaaactgggcaat

SEQ ID NO: 732611 - DNA, 25 bp, Homo sapien
tgccaatgtgtcacctacaaagact

SEQ ID NO: 732612 - DNA, 25 bp, Homo sapien
gatactatgtaatcctcagagagac

SEQ ID NO: 732613 - DNA, 25 bp, Homo sapien
catgaaatatctaagacgagctgtc

SEQ ID NO: 732614 - DNA, 25 bp, Homo sapien
gttgaaaggcacacgggatactatg

SEQ ID NO: 732615 - DNA, 25 bp, Homo sapien
gaacggtgccatataagtccacttc

SEQ ID NO: 732616 - DNA, 25 bp, Homo sapien
tcatgtcgtcgataaaataaatcaa

SEQ ID NO: 732617 - DNA, 25 bp, Homo sapien
cataatcaatatgctgccggatcag

SEQ ID NO: 732618 - DNA, 25 bp, Homo sapien
caggaccatagttatgaccagcttt

SEQ ID NO: 732619 - DNA, 25 bp, Homo sapien
taagcatcaccttctgtctatcata

SEQ ID NO: 732620 - DNA, 25 bp, Homo sapien
tttctttaagcatcaccttctgtct

SEQ ID NO: 732621 - DNA, 25 bp, Homo sapien
gaagctgcccaccatcggattcatg

SEQ ID NO: 732622 - DNA, 25 bp, Homo sapien
tgcaggcgacatactggcagttatg

SEQ ID NO: 732623 - DNA, 25 bp, Homo sapien
caaatataagagtgtaaggattaca

SEQ ID NO: 732624 - DNA, 25 bp, Homo sapien
gcaaatataagagtgtaaggattac

SEQ ID NO: 732625 - DNA, 25 bp, Homo sapien
gtaaggattacaattgtaccagaaa

SEQ ID NO: 732626 - DNA, 25 bp, Homo sapien
tacaattgtaccagaaaattgcaaa

SEQ ID NO: 732627 - DNA, 25 bp, Homo sapien
gaagctaaagatttggccatagatg

SEQ ID NO: 732628 - DNA, 25 bp, Homo sapien
gccatagatggtgtttagtgcatcc

SEQ ID NO: 732629 - DNA, 25 bp, Homo sapien
ggaatgctattgttgcctggatcaa

SEQ ID NO: 732630 - DNA, 25 bp, Homo sapien
gcctggatcaaagtggggccactcc

SEQ ID NO: 732631 - DNA, 25 bp, Homo sapien
gataaatctctcagattaaagatgt

SEQ ID NO: 732632 - DNA, 25 bp, Homo sapien
ctggaagacgtttgataaatctctc

SEQ ID NO: 732633 - DNA, 25 bp, Homo sapien
tctctcagattaaagatgtagtgga

SEQ ID NO: 732634 - DNA, 25 bp, Homo sapien
tagtggaatttaatagccgtgggta

SEQ ID NO: 732635 - DNA, 25 bp, Homo sapien
gaagccacagatgtattaaatcaag

SEQ ID NO: 732636 - DNA, 25 bp, Homo sapien
tcagtttgtctccataaacacgggc

SEQ ID NO: 732637 - DNA, 25 bp, Homo sapien
tggaccttttaaacactcaggagaa

SEQ ID NO: 732638 - DNA, 25 bp, Homo sapien
aaatatttataagcagtttccagca

SEQ ID NO: 732639 - DNA, 25 bp, Homo sapien
ccctctatcagcaaagtggcaataa

SEQ ID NO: 732640 - DNA, 25 bp, Homo sapien
cactggcatgtaatgtgggtccttc

SEQ ID NO: 732641 - DNA, 25 bp, Homo sapien
gaagcagcatgtgactatctatacc

SEQ ID NO: 732642 - DNA, 25 bp, Homo sapien
caaacaaaactaggtgcatggcagc

SEQ ID NO: 732643 - DNA, 25 bp, Homo sapien
tcagagtgatctgaaagacctcaag

SEQ ID NO: 732644 - DNA, 25 bp, Homo sapien
tcaaggccacgaaggtaagctgcca

SEQ ID NO: 732645 - DNA, 25 bp, Homo sapien
gattccatagccctcggtcagagtg

SEQ ID NO: 732646 - DNA, 25 bp, Homo sapien
ggttcgtaagatccggctgatgcga

SEQ ID NO: 732647 - DNA, 25 bp, Homo sapien
ggctccagttcggatgtacaaattg

SEQ ID NO: 732648 - DNA, 25 bp, Homo sapien
tccagttcggatgtacaaattggca

SEQ ID NO: 732649 - DNA, 25 bp, Homo sapien
ttggctccagttcggatgtacaaat

SEQ ID NO: 732650 - DNA, 25 bp, Homo sapien
ttcttggctccagttcggatgtaca

SEQ ID NO: 732651 - DNA, 25 bp, Homo sapien
cagttttccctggagtctaccatgc

SEQ ID NO: 732652 - DNA, 25 bp, Homo sapien
gcatgaacttcattatgaattccag

SEQ ID NO: 732653 - DNA, 25 bp, Homo sapien
cccagagcatgaacttcattatgaa

SEQ ID NO: 732654 - DNA, 25 bp, Homo sapien
ttttccctggagtctaccatgccca

SEQ ID NO: 732655 - DNA, 25 bp, Homo sapien
catgtgtcagaatgtgctgcaggag

SEQ ID NO: 732656 - DNA, 25 bp, Homo sapien
tggatgaagccgtcgagatggctat

SEQ ID NO: 732657 - DNA, 25 bp, Homo sapien
ggtgaagagtgcctctctcatggat

SEQ ID NO: 732658 - DNA, 25 bp, Homo sapien
ttctcattagtgcatgtgtcagaat

SEQ ID NO: 732659 - DNA, 25 bp, Homo sapien
ctgcttttattctcaagtccctgcg

SEQ ID NO: 732660 - DNA, 25 bp, Homo sapien
catcagagacaccctgtgtaaagtg

SEQ ID NO: 732661 - DNA, 25 bp, Homo sapien
tgtgtgcttcagagggttcatcaga

SEQ ID NO: 732662 - DNA, 25 bp, Homo sapien
tcaagtccctgcgtacgtgaggaca

SEQ ID NO: 732663 - DNA, 25 bp, Homo sapien
gcggccacgcatgaaaccagtcaat

SEQ ID NO: 732664 - DNA, 25 bp, Homo sapien
gaacctcctgctgacggagaccaga

SEQ ID NO: 732665 - DNA, 25 bp, Homo sapien
caatagccgtgcagttaactatggc

SEQ ID NO: 732666 - DNA, 25 bp, Homo sapien
aactctcagcgtgcgaccaactgga

SEQ ID NO: 732667 - DNA, 25 bp, Homo sapien
tgaacatgtgccatgaaaaggctaa

SEQ ID NO: 732668 - DNA, 25 bp, Homo sapien
tgtgccatgaaaaggctaatagagt

SEQ ID NO: 732669 - DNA, 25 bp, Homo sapien
catgaaaaggctaatagagtctttg

SEQ ID NO: 732670 - DNA, 25 bp, Homo sapien
aaaaggctaatagagtctttgtgca

SEQ ID NO: 732671 - DNA, 25 bp, Homo sapien
gcgttcttttttctcggatacctca

SEQ ID NO: 732672 - DNA, 25 bp, Homo sapien
caacaggttcttaaacagtgatatt

SEQ ID NO: 732673 - DNA, 25 bp, Homo sapien
tggatgccgttcaccaggcgttctt

SEQ ID NO: 732674 - DNA, 25 bp, Homo sapien
tcattctggtaatatctggtactca

SEQ ID NO: 732675 - DNA, 25 bp, Homo sapien
ttgacgacatgaatgctccttgcct

SEQ ID NO: 732676 - DNA, 25 bp, Homo sapien
ttgtgggaagacatacttggtgatg

SEQ ID NO: 732677 - DNA, 25 bp, Homo sapien
tgcttttgggtcctaggcagctcgg

SEQ ID NO: 732678 - DNA, 25 bp, Homo sapien
gatgagctggaagaactatgcctct

SEQ ID NO: 732679 - DNA, 25 bp, Homo sapien
cggcatcatgatttctcagttgcag

SEQ ID NO: 732680 - DNA, 25 bp, Homo sapien
ccggctcactttctccgtctgaagg

SEQ ID NO: 732681 - DNA, 25 bp, Homo sapien
tctccgtctgaaggccgatctttgt

SEQ ID NO: 732682 - DNA, 25 bp, Homo sapien
tctttgtgatcagagcttcggcatc

SEQ ID NO: 732683 - DNA, 25 bp, Homo sapien
ggaacacttcagtctgaatggctgt

SEQ ID NO: 732684 - DNA, 25 bp, Homo sapien
aacacttcagtctgaatggctgtca

SEQ ID NO: 732685 - DNA, 25 bp, Homo sapien
ctggaacacttcagtctgaatggct

SEQ ID NO: 732686 - DNA, 25 bp, Homo sapien
acacttcagtctgaatggctgtcac

SEQ ID NO: 732687 - DNA, 25 bp, Homo sapien
agccttgagtaagtcagcttcacat

SEQ ID NO: 732688 - DNA, 25 bp, Homo sapien
tcagccttgagtaagtcagcttcac

SEQ ID NO: 732689 - DNA, 25 bp, Homo sapien
cagccttgagtaagtcagcttcaca

SEQ ID NO: 732690 - DNA, 25 bp, Homo sapien
tactttgaggaaactcagggaccaa

SEQ ID NO: 732691 - DNA, 25 bp, Homo sapien
ctttgaggaaactcagggaccaata

SEQ ID NO: 732692 - DNA, 25 bp, Homo sapien
aaatattactttgaggaaactcagg

SEQ ID NO: 732693 - DNA, 25 bp, Homo sapien
gaaactcagggaccaataaattatc

SEQ ID NO: 732694 - DNA, 25 bp, Homo sapien
cacagaaacacgtacacagacagga

SEQ ID NO: 732695 - DNA, 25 bp, Homo sapien
caagcaaggctttagtggactccca

SEQ ID NO: 732696 - DNA, 25 bp, Homo sapien
gaagctctgtaagttgccaagcaag

SEQ ID NO: 732697 - DNA, 25 bp, Homo sapien
tagcggaagtctggagaagctctgt

SEQ ID NO: 732698 - DNA, 25 bp, Homo sapien
ggagccagaaggaccatcacggctg

SEQ ID NO: 732699 - DNA, 25 bp, Homo sapien
gactttagctgctttccaacttcgg

SEQ ID NO: 732700 - DNA, 25 bp, Homo sapien
tgcagtaacattggtaactgcgatg

SEQ ID NO: 732701 - DNA, 25 bp, Homo sapien
caacttcggtctttgggcactcttc

SEQ ID NO: 732702 - DNA, 25 bp, Homo sapien
taaactctgggtctttcaaatagtg

SEQ ID NO: 732703 - DNA, 25 bp, Homo sapien
tgctctttgtcatagttaattaatg

SEQ ID NO: 732704 - DNA, 25 bp, Homo sapien
gcaaaagatttggttcgaatcaggt

SEQ ID NO: 732705 - DNA, 25 bp, Homo sapien
ctttcaaatagtgttcattcaccac

SEQ ID NO: 732706 - DNA, 25 bp, Homo sapien
cagccagttctaagtttgcttgggc

SEQ ID NO: 732707 - DNA, 25 bp, Homo sapien
taatgcttggcgttttggctccaca

SEQ ID NO: 732708 - DNA, 25 bp, Homo sapien
tctagtttttcagtagctgcagcca

SEQ ID NO: 732709 - DNA, 25 bp, Homo sapien
agctttttcctgatagcctctagtt

SEQ ID NO: 732710 - DNA, 25 bp, Homo sapien
cttttcaatgtcatagtttgcactc

SEQ ID NO: 732711 - DNA, 25 bp, Homo sapien
ttttcaatgtcatagtttgcactca

SEQ ID NO: 732712 - DNA, 25 bp, Homo sapien
tttcaatgtcatagtttgcactcac

SEQ ID NO: 732713 - DNA, 25 bp, Homo sapien
ggaaatacactcatggaagatcgaa

SEQ ID NO: 732714 - DNA, 25 bp, Homo sapien
tagggctcagatatggtgctgtctg

SEQ ID NO: 732715 - DNA, 25 bp, Homo sapien
tcctttctgcttgatagggctcaga

SEQ ID NO: 732716 - DNA, 25 bp, Homo sapien
gaagatcgaattcctttctgcttga

SEQ ID NO: 732717 - DNA, 25 bp, Homo sapien
tagttatcctggtggttcctaacca

SEQ ID NO: 732718 - DNA, 25 bp, Homo sapien
tatcctggtggttcctaaccaacat

SEQ ID NO: 732719 - DNA, 25 bp, Homo sapien
ttatcctggtggttcctaaccaaca

SEQ ID NO: 732720 - DNA, 25 bp, Homo sapien
catactcgccaaaacattcattgca

SEQ ID NO: 732721 - DNA, 25 bp, Homo sapien
gacacttcaagtgtcccaactgctc

SEQ ID NO: 732722 - DNA, 25 bp, Homo sapien
tcatgattccctcatactcgccaaa

SEQ ID NO: 732723 - DNA, 25 bp, Homo sapien
cagggctctgacttgctggacactt

SEQ ID NO: 732724 - DNA, 25 bp, Homo sapien
ttttctcttctggacgtagggactg

SEQ ID NO: 732725 - DNA, 25 bp, Homo sapien
cacagggctgcgtttaaagagggaa

SEQ ID NO: 732726 - DNA, 25 bp, Homo sapien
tgaaactcagagataatccattgtc

SEQ ID NO: 732727 - DNA, 25 bp, Homo sapien
tctttagcattgaaagacctgggag

SEQ ID NO: 732728 - DNA, 25 bp, Homo sapien
tgctttttcaaatgaagccgtgagt

SEQ ID NO: 732729 - DNA, 25 bp, Homo sapien
gagtctgctcagatttcgatccaga

SEQ ID NO: 732730 - DNA, 25 bp, Homo sapien
tcttgacaccggactttctcagctg

SEQ ID NO: 732731 - DNA, 25 bp, Homo sapien
ctcttcttgacaccggactttctca

SEQ ID NO: 732732 - DNA, 25 bp, Homo sapien
aagtctgttagctaatttgatggtt

SEQ ID NO: 732733 - DNA, 25 bp, Homo sapien
gattcactaaacatagactgattgg

SEQ ID NO: 732734 - DNA, 25 bp, Homo sapien
gactgattggctatcgaaatcgtca

SEQ ID NO: 732735 - DNA, 25 bp, Homo sapien
gacattggctaacaagggtttaaga

SEQ ID NO: 732736 - DNA, 25 bp, Homo sapien
gctatagtatccatgcaacataaat

SEQ ID NO: 732737 - DNA, 25 bp, Homo sapien
cgggttggtgtgactgttataatct

SEQ ID NO: 732738 - DNA, 25 bp, Homo sapien
ataaggaacagagtgtaacgggttg

SEQ ID NO: 732739 - DNA, 25 bp, Homo sapien
tgtaacgggttggtgtgactgttat

SEQ ID NO: 732740 - DNA, 25 bp, Homo sapien
tggtgtgactgttataatctttcat

SEQ ID NO: 732741 - DNA, 25 bp, Homo sapien
gcaaggtttacgtccttccacacag

SEQ ID NO: 732742 - DNA, 25 bp, Homo sapien
caaggtttacgtccttccacacagt

SEQ ID NO: 732743 - DNA, 25 bp, Homo sapien
ttatggcaaggtttacgtccttcca

SEQ ID NO: 732744 - DNA, 25 bp, Homo sapien
tggcaaggtttacgtccttccacac

SEQ ID NO: 732745 - DNA, 25 bp, Homo sapien
actccacaaatgcttaatgcaatta

SEQ ID NO: 732746 - DNA, 25 bp, Homo sapien
ctccacaaatgcttaatgcaattac

SEQ ID NO: 732747 - DNA, 25 bp, Homo sapien
tgtcaactccacaaatgcttaatgc

SEQ ID NO: 732748 - DNA, 25 bp, Homo sapien
ctgaatgtcaactccacaaatgctt

SEQ ID NO: 732749 - DNA, 25 bp, Homo sapien
gaaagggaacccacttgcagtgcac

SEQ ID NO: 732750 - DNA, 25 bp, Homo sapien
caaatgccgccgtgagaagaacatc

SEQ ID NO: 732751 - DNA, 25 bp, Homo sapien
gatactgccttgtgaagggtccgac

SEQ ID NO: 732752 - DNA, 25 bp, Homo sapien
gacttaatggattgaccccagcgaa

SEQ ID NO: 732753 - DNA, 25 bp, Homo sapien
ttcctttggtttggccagcttgcac

SEQ ID NO: 732754 - DNA, 25 bp, Homo sapien
gatatttttaccactctcctcaaaa

SEQ ID NO: 732755 - DNA, 25 bp, Homo sapien
ttggtttggccagcttgcactgcat

SEQ ID NO: 732756 - DNA, 25 bp, Homo sapien
ttgatatttttaccactctcctcaa

SEQ ID NO: 732757 - DNA, 25 bp, Homo sapien
ttgtagcatcatccgtcaacatgga

SEQ ID NO: 732758 - DNA, 25 bp, Homo sapien
tgggcagtccttcgttattccaggc

SEQ ID NO: 732759 - DNA, 25 bp, Homo sapien
tattccaggcggcaattgtagcatc

SEQ ID NO: 732760 - DNA, 25 bp, Homo sapien
taggatagcggcattttcggtggac

SEQ ID NO: 732761 - DNA, 25 bp, Homo sapien
taagatccttctataggcggagtat

SEQ ID NO: 732762 - DNA, 25 bp, Homo sapien
tgaccgtaaacatcatgaagcccgg

SEQ ID NO: 732763 - DNA, 25 bp, Homo sapien
cccaatgttgggacttgtagccatg

SEQ ID NO: 732764 - DNA, 25 bp, Homo sapien
gattcaggtctcaaaagtgacatgt

SEQ ID NO: 732765 - DNA, 25 bp, Homo sapien
gtttcctcgagattttcaattaaga

SEQ ID NO: 732766 - DNA, 25 bp, Homo sapien
gactggatctatcgtttcctcgaga

SEQ ID NO: 732767 - DNA, 25 bp, Homo sapien
tgtgttcctgccaagtagtggatcc

SEQ ID NO: 732768 - DNA, 25 bp, Homo sapien
aaaggccaaagcagtttcaatggca

SEQ ID NO: 732769 - DNA, 25 bp, Homo sapien
catcttctgtgactgtgaaattgag

SEQ ID NO: 732770 - DNA, 25 bp, Homo sapien
agttgtctgagcttgtaattccggc

SEQ ID NO: 732771 - DNA, 25 bp, Homo sapien
ggcctttcaatactgacaacctctg

SEQ ID NO: 732772 - DNA, 25 bp, Homo sapien
caattttgtgtgaaggataaggcga

SEQ ID NO: 732773 - DNA, 25 bp, Homo sapien
caatctctctaccagtttggtgtca

SEQ ID NO: 732774 - DNA, 25 bp, Homo sapien
ttgtgctctatctctgccacggtgg

SEQ ID NO: 732775 - DNA, 25 bp, Homo sapien
gagatcgtcttccagatacttgagc

SEQ ID NO: 732776 - DNA, 25 bp, Homo sapien
cagaaaggcgcaaaaggagatcgtc

SEQ ID NO: 732777 - DNA, 25 bp, Homo sapien
ctgccactggtctgtaacattctcg

SEQ ID NO: 732778 - DNA, 25 bp, Homo sapien
tggtctgtaacattctcgggcctcg

SEQ ID NO: 732779 - DNA, 25 bp, Homo sapien
tctgtaacattctcgggcctcgttg

SEQ ID NO: 732780 - DNA, 25 bp, Homo sapien
cactggtctgtaacattctcgggcc

SEQ ID NO: 732781 - DNA, 25 bp, Homo sapien
atgtcttccaccttgtcagcctgct

SEQ ID NO: 732782 - DNA, 25 bp, Homo sapien
gatagagatgcgtccctgcatgtct

SEQ ID NO: 732783 - DNA, 25 bp, Homo sapien
gatgctctccatcaggatagagatg

SEQ ID NO: 732784 - DNA, 25 bp, Homo sapien
cagcctgctcgatcgctctgtggaa

SEQ ID NO: 732785 - DNA, 25 bp, Homo sapien
aagttaggaagtcaacgggactcag

SEQ ID NO: 732786 - DNA, 25 bp, Homo sapien
ctcagatgagtgtgttcaactgtga

SEQ ID NO: 732787 - DNA, 25 bp, Homo sapien
aaatccaattcaagagggtctatct

SEQ ID NO: 732788 - DNA, 25 bp, Homo sapien
tgttcaactgtgaatcgaagcagga

SEQ ID NO: 732789 - DNA, 25 bp, Homo sapien
cagtttgagaagaagacttgtgaat

SEQ ID NO: 732790 - DNA, 25 bp, Homo sapien
gtttgagaagaagacttgtgaatgt

SEQ ID NO: 732791 - DNA, 25 bp, Homo sapien
tttacagtttgagaagaagacttgt

SEQ ID NO: 732792 - DNA, 25 bp, Homo sapien
tacagtttgagaagaagacttgtga

SEQ ID NO: 732793 - DNA, 25 bp, Homo sapien
aatatgatagggaaacaagtaggaa

SEQ ID NO: 732794 - DNA, 25 bp, Homo sapien
acaagtaggaatggtgtgaacgata

SEQ ID NO: 732795 - DNA, 25 bp, Homo sapien
atagggaaacaagtaggaatggtgt

SEQ ID NO: 732796 - DNA, 25 bp, Homo sapien
ctgtaatatgatagggaaacaagta

SEQ ID NO: 732797 - DNA, 25 bp, Homo sapien
cctcgaaattcttccatgacggcaa

SEQ ID NO: 732798 - DNA, 25 bp, Homo sapien
tgcctcgaaattcttccatgacggc

SEQ ID NO: 732799 - DNA, 25 bp, Homo sapien
gaaattcttccatgacggcaattgc

SEQ ID NO: 732800 - DNA, 25 bp, Homo sapien
tcgaaattcttccatgacggcaatt

SEQ ID NO: 732801 - DNA, 25 bp, Homo sapien
tctttttctggacactcggattcta

SEQ ID NO: 732802 - DNA, 25 bp, Homo sapien
tcagggcgcattgctctcagaagaa

SEQ ID NO: 732803 - DNA, 25 bp, Homo sapien
ctcagaagaatcagcttctgtatta

SEQ ID NO: 732804 - DNA, 25 bp, Homo sapien
gagagcatacgtcattctgtcaggg

SEQ ID NO: 732805 - DNA, 25 bp, Homo sapien
acatacttcgcacccagtttttcct

SEQ ID NO: 732806 - DNA, 25 bp, Homo sapien
gctgctttcttcgaatgctttaact

SEQ ID NO: 732807 - DNA, 25 bp, Homo sapien
taactaagtccaatctggtcctctc

SEQ ID NO: 732808 - DNA, 25 bp, Homo sapien
ctacccccggagacaggatgaagaa

SEQ ID NO: 732809 - DNA, 25 bp, Homo sapien
tccagagtcaattgtaaagccaagt

SEQ ID NO: 732810 - DNA, 25 bp, Homo sapien
cccagtgtcctcctttggaagcttt

SEQ ID NO: 732811 - DNA, 25 bp, Homo sapien
ctaaagacacattgtggaattttcc

SEQ ID NO: 732812 - DNA, 25 bp, Homo sapien
gaggatgacccagtgtcctcctttg

SEQ ID NO: 732813 - DNA, 25 bp, Homo sapien
gaacactgacagtactgcttgcact

SEQ ID NO: 732814 - DNA, 25 bp, Homo sapien
aggcatcatgaacactgacagtact

SEQ ID NO: 732815 - DNA, 25 bp, Homo sapien
catcatgaacactgacagtactgct

SEQ ID NO: 732816 - DNA, 25 bp, Homo sapien
catgaacactgacagtactgcttgc

SEQ ID NO: 732817 - DNA, 25 bp, Homo sapien
aagatgacagccatcgctgtccgca

SEQ ID NO: 732818 - DNA, 25 bp, Homo sapien
tactgagtgttccagatatctctaa

SEQ ID NO: 732819 - DNA, 25 bp, Homo sapien
agtacaatggctagacagtctctca

SEQ ID NO: 732820 - DNA, 25 bp, Homo sapien
tatctctaagtgaggggaacgacga

SEQ ID NO: 732821 - DNA, 25 bp, Homo sapien
ccttggctgaatctttcaaggagct

SEQ ID NO: 732822 - DNA, 25 bp, Homo sapien
gaaaaccctgtaatctctgtggctt

SEQ ID NO: 732823 - DNA, 25 bp, Homo sapien
ctgtggcttccttggctgaatcttt

SEQ ID NO: 732824 - DNA, 25 bp, Homo sapien
gagcttctccaaggttcctagccac

SEQ ID NO: 732825 - DNA, 25 bp, Homo sapien
cagggcggcatgcaaattggccagc

SEQ ID NO: 732826 - DNA, 25 bp, Homo sapien
ctgatcaaagttgtacagggcggca

SEQ ID NO: 732827 - DNA, 25 bp, Homo sapien
aattggccagcatccctgttggggg

SEQ ID NO: 732828 - DNA, 25 bp, Homo sapien
ccctgttgggggttcattagtgatc

SEQ ID NO: 732829 - DNA, 25 bp, Homo sapien
tgctccttggagcatatttcaagtg

SEQ ID NO: 732830 - DNA, 25 bp, Homo sapien
ctaagtagttgtagaggacactggc

SEQ ID NO: 732831 - DNA, 25 bp, Homo sapien
actggcacaaatggtgaggtctcca

SEQ ID NO: 732832 - DNA, 25 bp, Homo sapien
taaaaggatagcttcggctccagcc

SEQ ID NO: 732833 - DNA, 25 bp, Homo sapien
gaggttatttgaccactagcactta

SEQ ID NO: 732834 - DNA, 25 bp, Homo sapien
tggaagaggttatttgaccactagc

SEQ ID NO: 732835 - DNA, 25 bp, Homo sapien
ctccttggaagaggttatttgacca

SEQ ID NO: 732836 - DNA, 25 bp, Homo sapien
gaagaggttatttgaccactagcac

SEQ ID NO: 732837 - DNA, 25 bp, Homo sapien
taacttcaaatcaaggggaacatta

SEQ ID NO: 732838 - DNA, 25 bp, Homo sapien
gggaacattactgagaaagtcacaa

SEQ ID NO: 732839 - DNA, 25 bp, Homo sapien
acttcaaatcaaggggaacattact

SEQ ID NO: 732840 - DNA, 25 bp, Homo sapien
gagaaagtcacaacaaggtggcatc

SEQ ID NO: 732841 - DNA, 25 bp, Homo sapien
gatggattcatgaattcttctaaat

SEQ ID NO: 732842 - DNA, 25 bp, Homo sapien
aattcttctaaatacacccgacaca

SEQ ID NO: 732843 - DNA, 25 bp, Homo sapien
cttctaaatacacccgacacagttt

SEQ ID NO: 732844 - DNA, 25 bp, Homo sapien
ttcttctaaatacacccgacacagt

SEQ ID NO: 732845 - DNA, 25 bp, Homo sapien
aggccatacagtgccgggctttctg

SEQ ID NO: 732846 - DNA, 25 bp, Homo sapien
agcatctcctctatgtactggtggt

SEQ ID NO: 732847 - DNA, 25 bp, Homo sapien
gaagagagtgttggatgtcactgtc

SEQ ID NO: 732848 - DNA, 25 bp, Homo sapien
tcagcatttgggtggaggccataca

SEQ ID NO: 732849 - DNA, 25 bp, Homo sapien
gttcaagtgatatacgtatttcccg

SEQ ID NO: 732850 - DNA, 25 bp, Homo sapien
cgtatttcccgaatgagaatattca

SEQ ID NO: 732851 - DNA, 25 bp, Homo sapien
aatattcatcctctcacattcttgg

SEQ ID NO: 732852 - DNA, 25 bp, Homo sapien
tcaaactaaggtccagttgttcaag

SEQ ID NO: 732853 - DNA, 25 bp, Homo sapien
ccataagtagaaggataagccagtt

SEQ ID NO: 732854 - DNA, 25 bp, Homo sapien
cataactcaatgcaaactgctgggc

SEQ ID NO: 732855 - DNA, 25 bp, Homo sapien
actgggctaggccataagtagaagg

SEQ ID NO: 732856 - DNA, 25 bp, Homo sapien
ttgctccaagtgtctggtaccgtgt

SEQ ID NO: 732857 - DNA, 25 bp, Homo sapien
tacaagaccagagttgccgggaaat

SEQ ID NO: 732858 - DNA, 25 bp, Homo sapien
ggcagtctaagcacgtgcagtagct

SEQ ID NO: 732859 - DNA, 25 bp, Homo sapien
ttggactgacaagcgccaacttgga

SEQ ID NO: 732860 - DNA, 25 bp, Homo sapien
cagtggagcacgtgacggcagtcta

SEQ ID NO: 732861 - DNA, 25 bp, Homo sapien
gggtaaggtcttgtgtccaagtatc

SEQ ID NO: 732862 - DNA, 25 bp, Homo sapien
gaagaagccggagagccacacgaca

SEQ ID NO: 732863 - DNA, 25 bp, Homo sapien
tcgagttctcggcatcgcaggagga

SEQ ID NO: 732864 - DNA, 25 bp, Homo sapien
cacgacagccggaagggtaaggtct

SEQ ID NO: 732865 - DNA, 25 bp, Homo sapien
ggccactcattttttcgagccatcg

SEQ ID NO: 732866 - DNA, 25 bp, Homo sapien
aagagtccgtggaggtatgcacctt

SEQ ID NO: 732867 - DNA, 25 bp, Homo sapien
ggcgggtgtccataatcttcctttg

SEQ ID NO: 732868 - DNA, 25 bp, Homo sapien
gcagtcaagcgcgttttatccaggg

SEQ ID NO: 732869 - DNA, 25 bp, Homo sapien
gggcctctcagtttggttctataca

SEQ ID NO: 732870 - DNA, 25 bp, Homo sapien
cttctcttcgctcttcagcctgaag

SEQ ID NO: 732871 - DNA, 25 bp, Homo sapien
tttggttctatacacagggcactcg

SEQ ID NO: 732872 - DNA, 25 bp, Homo sapien
ggcactcgtaggtctgtttggtttc

SEQ ID NO: 732873 - DNA, 25 bp, Homo sapien
gacactggaggccttacagagtgct

SEQ ID NO: 732874 - DNA, 25 bp, Homo sapien
gagtgctagcctcttccttcaggac

SEQ ID NO: 732875 - DNA, 25 bp, Homo sapien
gcactccagcagaggctagaggaat

SEQ ID NO: 732876 - DNA, 25 bp, Homo sapien
gactttcactctaaggatagcgttg

SEQ ID NO: 732877 - DNA, 25 bp, Homo sapien
cacatcgtttaacctgctcttggtc

SEQ ID NO: 732878 - DNA, 25 bp, Homo sapien
cttggtcattggaaatttacactga

SEQ ID NO: 732879 - DNA, 25 bp, Homo sapien
ttaatagaccacacacatcgtttaa

SEQ ID NO: 732880 - DNA, 25 bp, Homo sapien
cattggaaatttacactgaacaaag

SEQ ID NO: 732881 - DNA, 25 bp, Homo sapien
caggcctctgtagtgagctgttcca

SEQ ID NO: 732882 - DNA, 25 bp, Homo sapien
gacagtgtcccctgaaattgggttc

SEQ ID NO: 732883 - DNA, 25 bp, Homo sapien
tgggaactggcgaacctatctttct

SEQ ID NO: 732884 - DNA, 25 bp, Homo sapien
tctgctggccggatgcgaaataacc

SEQ ID NO: 732885 - DNA, 25 bp, Homo sapien
gggatgtgtcccaggcgtcctttat

SEQ ID NO: 732886 - DNA, 25 bp, Homo sapien
cctgtttctgaaagagttttacttg

SEQ ID NO: 732887 - DNA, 25 bp, Homo sapien
tgtaagcagtcacttcacaagtgaa

SEQ ID NO: 732888 - DNA, 25 bp, Homo sapien
caccagtccattattctcttagaga

SEQ ID NO: 732889 - DNA, 25 bp, Homo sapien
ggtttctgactaccagttggactgg

SEQ ID NO: 732890 - DNA, 25 bp, Homo sapien
tgttcgtgtccctaaatgcagatgt

SEQ ID NO: 732891 - DNA, 25 bp, Homo sapien
tgcagatgttctctaagggtttgtc

SEQ ID NO: 732892 - DNA, 25 bp, Homo sapien
ccttgactcccgtccaggagttgat

SEQ ID NO: 732893 - DNA, 25 bp, Homo sapien
cgtgggagatatgtgctgaattata

SEQ ID NO: 732894 - DNA, 25 bp, Homo sapien
tattcgggccaatcaatacaatgtt

SEQ ID NO: 732895 - DNA, 25 bp, Homo sapien
taaaaatcaaatagaacagttgcag

SEQ ID NO: 732896 - DNA, 25 bp, Homo sapien
ggagaatgtccttatccgtgggaga

SEQ ID NO: 732897 - DNA, 25 bp, Homo sapien
tcagggaggctattcacagaatctc

SEQ ID NO: 732898 - DNA, 25 bp, Homo sapien
tgagtctgttaaacaccaccttggg

SEQ ID NO: 732899 - DNA, 25 bp, Homo sapien
caatggacgctgaaactgttgagca

SEQ ID NO: 732900 - DNA, 25 bp, Homo sapien
aaaacttcagacttggacagactcc

SEQ ID NO: 732901 - DNA, 25 bp, Homo sapien
ccacacttggcctgataatccttga

SEQ ID NO: 732902 - DNA, 25 bp, Homo sapien
tatacgccttcaccctgagtttagc

SEQ ID NO: 732903 - DNA, 25 bp, Homo sapien
tacgtgattggtgaaagtcctcccc

SEQ ID NO: 732904 - DNA, 25 bp, Homo sapien
cattcagaggtcagatgcatgtgtg

SEQ ID NO: 732905 - DNA, 25 bp, Homo sapien
tgcacccggccactctctagttctt

SEQ ID NO: 732906 - DNA, 25 bp, Homo sapien
actgcacccggccactctctagttc

SEQ ID NO: 732907 - DNA, 25 bp, Homo sapien
cacccggccactctctagttctttt

SEQ ID NO: 732908 - DNA, 25 bp, Homo sapien
gcacccggccactctctagttcttt

SEQ ID NO: 732909 - DNA, 25 bp, Homo sapien
ggttgagtgccggagtgggcgcgcc

SEQ ID NO: 732910 - DNA, 25 bp, Homo sapien
cacagtttgacttccctttgccacc

SEQ ID NO: 732911 - DNA, 25 bp, Homo sapien
ttccctttgccacccggtcctgctg

SEQ ID NO: 732912 - DNA, 25 bp, Homo sapien
aaacgtggcccttggctgcggcact

SEQ ID NO: 732913 - DNA, 25 bp, Homo sapien
atttatattgtacaagatccaataa

SEQ ID NO: 732914 - DNA, 25 bp, Homo sapien
tttatattgtacaagatccaataat

SEQ ID NO: 732915 - DNA, 25 bp, Homo sapien
tatagtttttaatgttgtgtctgta

SEQ ID NO: 732916 - DNA, 25 bp, Homo sapien
tagtttttaatgttgtgtctgtaat

SEQ ID NO: 732917 - DNA, 25 bp, Homo sapien
ctgctactgcacatctggcttctaa

SEQ ID NO: 732918 - DNA, 25 bp, Homo sapien
ctggcttctaatatggtggtcccat

SEQ ID NO: 732919 - DNA, 25 bp, Homo sapien
atctggcttctaatatggtggtccc

SEQ ID NO: 732920 - DNA, 25 bp, Homo sapien
ggcttctaatatggtggtcccattc

SEQ ID NO: 732921 - DNA, 25 bp, Homo sapien
acgctttcaaagaggtatcctggag

SEQ ID NO: 732922 - DNA, 25 bp, Homo sapien
tcctgtatgatgacaacgcaggtga

SEQ ID NO: 732923 - DNA, 25 bp, Homo sapien
cctgtatgatgacaacgcaggtgat

SEQ ID NO: 732924 - DNA, 25 bp, Homo sapien
tgacgctttcaaagaggtatcctgg

SEQ ID NO: 732925 - DNA, 25 bp, Homo sapien
gcgagctttatcaactctgaatatt

SEQ ID NO: 732926 - DNA, 25 bp, Homo sapien
cagcgagctttatcaactctgaata

SEQ ID NO: 732927 - DNA, 25 bp, Homo sapien
tatcaactctgaatatttctgccat

SEQ ID NO: 732928 - DNA, 25 bp, Homo sapien
tttatcaactctgaatatttctgcc

SEQ ID NO: 732929 - DNA, 25 bp, Homo sapien
ttctctttgtctggcctggctacac

SEQ ID NO: 732930 - DNA, 25 bp, Homo sapien
gagaaaataagtctttctctttgtc

SEQ ID NO: 732931 - DNA, 25 bp, Homo sapien
ctggggtcaaacagctgtaggagaa

SEQ ID NO: 732932 - DNA, 25 bp, Homo sapien
gtcaaacagctgtaggagaaaataa

SEQ ID NO: 732933 - DNA, 25 bp, Homo sapien
ctgtagttggcaaagacaatagtgt

SEQ ID NO: 732934 - DNA, 25 bp, Homo sapien
gtagttggcaaagacaatagtgtta

SEQ ID NO: 732935 - DNA, 25 bp, Homo sapien
tgtagttggcaaagacaatagtgtt

SEQ ID NO: 732936 - DNA, 25 bp, Homo sapien
cacttctggcttactaccaagagag

SEQ ID NO: 732937 - DNA, 25 bp, Homo sapien
cttgtatcctggtggcccctgatga

SEQ ID NO: 732938 - DNA, 25 bp, Homo sapien
ggacgttggtgctcctgtcacatcg

SEQ ID NO: 732939 - DNA, 25 bp, Homo sapien
ttgaaaggcaagtcagcaaggcagc

SEQ ID NO: 732940 - DNA, 25 bp, Homo sapien
aacgtgacttcacagaaagtcgttt

SEQ ID NO: 732941 - DNA, 25 bp, Homo sapien
ccaaatagatggttggcaacaaatt

SEQ ID NO: 732942 - DNA, 25 bp, Homo sapien
caaatagatggttggcaacaaattc

SEQ ID NO: 732943 - DNA, 25 bp, Homo sapien
aattttgtaaaacgtgacttcacag

SEQ ID NO: 732944 - DNA, 25 bp, Homo sapien
tcttcagaggggctatagtttatgt

SEQ ID NO: 732945 - DNA, 25 bp, Homo sapien
gcgttttcctggtaggtcggcactc

SEQ ID NO: 732946 - DNA, 25 bp, Homo sapien
agccttgttaaatggcgttttcctg

SEQ ID NO: 732947 - DNA, 25 bp, Homo sapien
aaaaaccagaagactatctgaagag

SEQ ID NO: 732948 - DNA, 25 bp, Homo sapien
actcaggcacactctatgtttgtgt

SEQ ID NO: 732949 - DNA, 25 bp, Homo sapien
tatgtttgtgtccactaatagtcac

SEQ ID NO: 732950 - DNA, 25 bp, Homo sapien
tgccaatttggtgcataatattttc

SEQ ID NO: 732951 - DNA, 25 bp, Homo sapien
aatagtcactccgtcttcggttctg

SEQ ID NO: 732952 - DNA, 25 bp, Homo sapien
ggttccagtcaagccggactgttca

SEQ ID NO: 732953 - DNA, 25 bp, Homo sapien
tcaagccggactgttcaggttcact

SEQ ID NO: 732954 - DNA, 25 bp, Homo sapien
tatcatgtgggttccagtcaagccg

SEQ ID NO: 732955 - DNA, 25 bp, Homo sapien
cagtatatatgtatcatgtgggttc

SEQ ID NO: 732956 - DNA, 25 bp, Homo sapien
tgatgccagagcccgggcccacaga

SEQ ID NO: 732957 - DNA, 25 bp, Homo sapien
tcctttcgctccttataaatacatt

SEQ ID NO: 732958 - DNA, 25 bp, Homo sapien
gccagaaaggtgctatggacactaa

SEQ ID NO: 732959 - DNA, 25 bp, Homo sapien
ttgactgttaaccagtgcgtcaggg

SEQ ID NO: 732960 - DNA, 25 bp, Homo sapien
catgatggataagacccctgaattc

SEQ ID NO: 732961 - DNA, 25 bp, Homo sapien
tgaattctgacaattaccattgcct

SEQ ID NO: 732962 - DNA, 25 bp, Homo sapien
ttaatacatccagtccatgatggat

SEQ ID NO: 732963 - DNA, 25 bp, Homo sapien
ttctgacaattaccattgccttggc

SEQ ID NO: 732964 - DNA, 25 bp, Homo sapien
ggcaaacctcaaaagggtcagccat

SEQ ID NO: 732965 - DNA, 25 bp, Homo sapien
tggtcggcaaacctcaaaagggtca

SEQ ID NO: 732966 - DNA, 25 bp, Homo sapien
tcggcaaacctcaaaagggtcagcc

SEQ ID NO: 732967 - DNA, 25 bp, Homo sapien
gtcggcaaacctcaaaagggtcagc

SEQ ID NO: 732968 - DNA, 25 bp, Homo sapien
tggccacgggtaattgcttgaaagc

SEQ ID NO: 732969 - DNA, 25 bp, Homo sapien
ctaagtggccacgggtaattgcttg

SEQ ID NO: 732970 - DNA, 25 bp, Homo sapien
agtggccacgggtaattgcttgaaa

SEQ ID NO: 732971 - DNA, 25 bp, Homo sapien
ccacgggtaattgcttgaaagctgc

SEQ ID NO: 732972 - DNA, 25 bp, Homo sapien
catgttgttgtcgtgggtcactggg

SEQ ID NO: 732973 - DNA, 25 bp, Homo sapien
tcgtgggtcactgggtaaggattca

SEQ ID NO: 732974 - DNA, 25 bp, Homo sapien
tgttgtcgtgggtcactgggtaagg

SEQ ID NO: 732975 - DNA, 25 bp, Homo sapien
cacggccccatgttgttgtcgtggg

SEQ ID NO: 732976 - DNA, 25 bp, Homo sapien
aaattgctaaatcttcagtgttggc

SEQ ID NO: 732977 - DNA, 25 bp, Homo sapien
tttctactgtcttggagcctttgcc

SEQ ID NO: 732978 - DNA, 25 bp, Homo sapien
cttccatataaagaccatgagggca

SEQ ID NO: 732979 - DNA, 25 bp, Homo sapien
gggactttgccgtgaaaattgctaa

SEQ ID NO: 732980 - DNA, 25 bp, Homo sapien
ccgcagggcctgtctgacggagaat

SEQ ID NO: 732981 - DNA, 25 bp, Homo sapien
tcgaactctgaaggcatctcccagc

SEQ ID NO: 732982 - DNA, 25 bp, Homo sapien
caggagctccgtccgcagggcctgt

SEQ ID NO: 732983 - DNA, 25 bp, Homo sapien
aatggagcggattgaaggtcgcatc

SEQ ID NO: 732984 - DNA, 25 bp, Homo sapien
taattgagctgacaatcaggagaag

SEQ ID NO: 732985 - DNA, 25 bp, Homo sapien
aggttgcctgaatctgaccccagct

SEQ ID NO: 732986 - DNA, 25 bp, Homo sapien
tgacaccgtgcacgttcattatggg

SEQ ID NO: 732987 - DNA, 25 bp, Homo sapien
cacaaggtcccttatctaattgagc

SEQ ID NO: 732988 - DNA, 25 bp, Homo sapien
ccagatcagggcgacctgaaacgat

SEQ ID NO: 732989 - DNA, 25 bp, Homo sapien
cagggcgacctgaaacgatgaccat

SEQ ID NO: 732990 - DNA, 25 bp, Homo sapien
cttgtccagatcagggcgacctgaa

SEQ ID NO: 732991 - DNA, 25 bp, Homo sapien
ctctggatccctcatttggttcttg

SEQ ID NO: 732992 - DNA, 25 bp, Homo sapien
ggagcctgataatggattctggtcc

SEQ ID NO: 732993 - DNA, 25 bp, Homo sapien
cttatgaccaggaaggactgagaga

SEQ ID NO: 732994 - DNA, 25 bp, Homo sapien
cctgtgacagggatgcttatgacca

SEQ ID NO: 732995 - DNA, 25 bp, Homo sapien
gaattcatggaaggcaactgaggcc

SEQ ID NO: 732996 - DNA, 25 bp, Homo sapien
tccccagattgccatgaaattgcac

SEQ ID NO: 732997 - DNA, 25 bp, Homo sapien
gattgccatgaaattgcacaggtcc

SEQ ID NO: 732998 - DNA, 25 bp, Homo sapien
cacttgtgatgccatggtatgatgg

SEQ ID NO: 732999 - DNA, 25 bp, Homo sapien
tgatgggagcccagttgacttcccc

SEQ ID NO: 733000 - DNA, 25 bp, Homo sapien
tgatgataaaatagaacatcacaga

SEQ ID NO: 733001 - DNA, 25 bp, Homo sapien
atgatgataaaatagaacatcacag

SEQ ID NO: 733002 - DNA, 25 bp, Homo sapien
gatgataaaatagaacatcacagaa

SEQ ID NO: 733003 - DNA, 25 bp, Homo sapien
tgcactggtgttgggaccgtcctcc

SEQ ID NO: 733004 - DNA, 25 bp, Homo sapien
aatgcactggtgttgggaccgtcct

SEQ ID NO: 733005 - DNA, 25 bp, Homo sapien
agaatgcactggtgttgggaccgtc

SEQ ID NO: 733006 - DNA, 25 bp, Homo sapien
cactggtgttgggaccgtcctccat

SEQ ID NO: 733007 - DNA, 25 bp, Homo sapien
tgcgtcccaaaaccgggattcagga

SEQ ID NO: 733008 - DNA, 25 bp, Homo sapien
ccaaaaccgggattcaggagctctt

SEQ ID NO: 733009 - DNA, 25 bp, Homo sapien
caaaaccgggattcaggagctcttc

SEQ ID NO: 733010 - DNA, 25 bp, Homo sapien
tcccaaaaccgggattcaggagctc

SEQ ID NO: 733011 - DNA, 25 bp, Homo sapien
aggcttgcccgtgtgtcccgtagta

SEQ ID NO: 733012 - DNA, 25 bp, Homo sapien
aatgtgggggtacatgggccactac

SEQ ID NO: 733013 - DNA, 25 bp, Homo sapien
gtgtgtcccgtagtacagaatgtgg

SEQ ID NO: 733014 - DNA, 25 bp, Homo sapien
tccaagaagctggaggcttgcccgt

SEQ ID NO: 733015 - DNA, 25 bp, Homo sapien
gccacttccgctctgcagaaaaagg

SEQ ID NO: 733016 - DNA, 25 bp, Homo sapien
taaccgctctgattactgcttgact

SEQ ID NO: 733017 - DNA, 25 bp, Homo sapien
gagaatactgactaagcctaaccgc

SEQ ID NO: 733018 - DNA, 25 bp, Homo sapien
caaactgcccgacactgggctttga

SEQ ID NO: 733019 - DNA, 25 bp, Homo sapien
tgagaatttcccagatcctcacaat

SEQ ID NO: 733020 - DNA, 25 bp, Homo sapien
ttccctggacctttataagcatctg

SEQ ID NO: 733021 - DNA, 25 bp, Homo sapien
cctgcttccctggacctttataagc

SEQ ID NO: 733022 - DNA, 25 bp, Homo sapien
cctcacaatgactgagcagccctgc

SEQ ID NO: 733023 - DNA, 25 bp, Homo sapien
gctgtgctcagaagcaactctctcg

SEQ ID NO: 733024 - DNA, 25 bp, Homo sapien
aactctctcgctgattagggctgcc

SEQ ID NO: 733025 - DNA, 25 bp, Homo sapien
gaacagcgtgggacattagctgagc

SEQ ID NO: 733026 - DNA, 25 bp, Homo sapien
cacttggtctaggaggcctgggacc

SEQ ID NO: 733027 - DNA, 25 bp, Homo sapien
aatatttgttgcctgagatgcgtgc

SEQ ID NO: 733028 - DNA, 25 bp, Homo sapien
gacacgtagtaataggcctttgaaa

SEQ ID NO: 733029 - DNA, 25 bp, Homo sapien
tgagacgttagcgacatctgctggg

SEQ ID NO: 733030 - DNA, 25 bp, Homo sapien
gagttaaatcaaatgccacaatggg

SEQ ID NO: 733031 - DNA, 25 bp, Homo sapien
catttgttgagttaccagaattgcc

SEQ ID NO: 733032 - DNA, 25 bp, Homo sapien
tacctaacttctcagggactacact

SEQ ID NO: 733033 - DNA, 25 bp, Homo sapien
tactgggatgaaatcagtgacctga

SEQ ID NO: 733034 - DNA, 25 bp, Homo sapien
tagaagatagagaacccgccatcag

SEQ ID NO: 733035 - DNA, 25 bp, Homo sapien
tgcctagtccacagggagaggatgc

SEQ ID NO: 733036 - DNA, 25 bp, Homo sapien
gaccgagaaccacaaacaggtagtg

SEQ ID NO: 733037 - DNA, 25 bp, Homo sapien
gaatgttcctaaatggcgcagccaa

SEQ ID NO: 733038 - DNA, 25 bp, Homo sapien
gcatgtggataaggtcagtgctcac

SEQ ID NO: 733039 - DNA, 25 bp, Homo sapien
gagagagacttagtttggcccagca

SEQ ID NO: 733040 - DNA, 25 bp, Homo sapien
taccaattgaggctcctgtagcaaa

SEQ ID NO: 733041 - DNA, 25 bp, Homo sapien
cactgagcttgagatactgctggaa

SEQ ID NO: 733042 - DNA, 25 bp, Homo sapien
tggcccagcatgtaaaacttcagtc

SEQ ID NO: 733043 - DNA, 25 bp, Homo sapien
taactgggcatagtagtacacacct

SEQ ID NO: 733044 - DNA, 25 bp, Homo sapien
gacctggcggacactttggtaagga

SEQ ID NO: 733045 - DNA, 25 bp, Homo sapien
gaccagcttagaagtttgcaaccct

SEQ ID NO: 733046 - DNA, 25 bp, Homo sapien
tatgtctaccggaaagacctggcgg

SEQ ID NO: 733047 - DNA, 25 bp, Homo sapien
aacaaccctcaagtgtttgatgtca

SEQ ID NO: 733048 - DNA, 25 bp, Homo sapien
ggtttagaatatgccaagctgctgt

SEQ ID NO: 733049 - DNA, 25 bp, Homo sapien
catggttggcctagataaattgtta

SEQ ID NO: 733050 - DNA, 25 bp, Homo sapien
tatataatgctgtccaacaaccctc

SEQ ID NO: 733051 - DNA, 25 bp, Homo sapien
tgaaagtctccaaatgatcttcttc

SEQ ID NO: 733052 - DNA, 25 bp, Homo sapien
aaagtctccaaatgatcttcttcct

SEQ ID NO: 733053 - DNA, 25 bp, Homo sapien
gaaagtctccaaatgatcttcttcc

SEQ ID NO: 733054 - DNA, 25 bp, Homo sapien
aagtctccaaatgatcttcttcctt

SEQ ID NO: 733055 - DNA, 25 bp, Homo sapien
gattcagcttaatttctaatcagac

SEQ ID NO: 733056 - DNA, 25 bp, Homo sapien
aactgtaaccctctttggcaagctc

SEQ ID NO: 733057 - DNA, 25 bp, Homo sapien
tggctcccacaatcataactgtaac

SEQ ID NO: 733058 - DNA, 25 bp, Homo sapien
catagccatcctctttaggtactgg

SEQ ID NO: 733059 - DNA, 25 bp, Homo sapien
tttaggtactggctcccacaatcat

SEQ ID NO: 733060 - DNA, 25 bp, Homo sapien
tcccactcccttagactgctgctta

SEQ ID NO: 733061 - DNA, 25 bp, Homo sapien
aatatcccactcccttagactgctg

SEQ ID NO: 733062 - DNA, 25 bp, Homo sapien
tatcccactcccttagactgctgct

SEQ ID NO: 733063 - DNA, 25 bp, Homo sapien
cactcccttagactgctgcttattt

SEQ ID NO: 733064 - DNA, 25 bp, Homo sapien
tttctccttgcccattgaagccact

SEQ ID NO: 733065 - DNA, 25 bp, Homo sapien
tggtgcatggccagatagatatggt

SEQ ID NO: 733066 - DNA, 25 bp, Homo sapien
agatatggttcaaaacaaatttggg

SEQ ID NO: 733067 - DNA, 25 bp, Homo sapien
gccagatagatatggttcaaaacaa

SEQ ID NO: 733068 - DNA, 25 bp, Homo sapien
ccacgtgattgtcagttctaccttt

SEQ ID NO: 733069 - DNA, 25 bp, Homo sapien
ctgatctcgtatctatttgctatgg

SEQ ID NO: 733070 - DNA, 25 bp, Homo sapien
gattgtcagttctaccttttgaaaa

SEQ ID NO: 733071 - DNA, 25 bp, Homo sapien
caaattggctgatctcgtatctatt

SEQ ID NO: 733072 - DNA, 25 bp, Homo sapien
caggtgatgcaatccgcagccaagt

SEQ ID NO: 733073 - DNA, 25 bp, Homo sapien
tacagagagttaggaacaacgttcc

SEQ ID NO: 733074 - DNA, 25 bp, Homo sapien
tccagagatcctaattcagttgggc

SEQ ID NO: 733075 - DNA, 25 bp, Homo sapien
catgtaataaacagaccagtgtagc

SEQ ID NO: 733076 - DNA, 25 bp, Homo sapien
gaaattgggcaaacatcactgggca

SEQ ID NO: 733077 - DNA, 25 bp, Homo sapien
gaatctgtgttacgacaggtctacc

SEQ ID NO: 733078 - DNA, 25 bp, Homo sapien
tgctggtgactgtagctagttaacc

SEQ ID NO: 733079 - DNA, 25 bp, Homo sapien
cctccctagagaggataaagtgtgt

SEQ ID NO: 733080 - DNA, 25 bp, Homo sapien
gcacaaaccgttaagatcatgaagt

SEQ ID NO: 733081 - DNA, 25 bp, Homo sapien
tgccggcccctttgctgtatttggt

SEQ ID NO: 733082 - DNA, 25 bp, Homo sapien
tgctcctgccaagtataactttgga

SEQ ID NO: 733083 - DNA, 25 bp, Homo sapien
catgtcttggtatgtcagtatgaac

SEQ ID NO: 733084 - DNA, 25 bp, Homo sapien
gattgttggagccacatggaccatg

SEQ ID NO: 733085 - DNA, 25 bp, Homo sapien
tattggcagaacttaaaccctatgg

SEQ ID NO: 733086 - DNA, 25 bp, Homo sapien
actgctaagtgctaggaaccttccc

SEQ ID NO: 733087 - DNA, 25 bp, Homo sapien
ccctagtgaattcgagtggtgacca

SEQ ID NO: 733088 - DNA, 25 bp, Homo sapien
tattgcttttgcaatctgtagatgt

SEQ ID NO: 733089 - DNA, 25 bp, Homo sapien
gcttctctgtaaggtacaacatttt

SEQ ID NO: 733090 - DNA, 25 bp, Homo sapien
ctgggggggtggcattgtctatgat

SEQ ID NO: 733091 - DNA, 25 bp, Homo sapien
ggggggtggcattgtctatgattta

SEQ ID NO: 733092 - DNA, 25 bp, Homo sapien
aatacactgttgactgggcagctac

SEQ ID NO: 733093 - DNA, 25 bp, Homo sapien
caccctgctgggttagtgataccaa

SEQ ID NO: 733094 - DNA, 25 bp, Homo sapien
tgaatctgtgatacatgccacccag

SEQ ID NO: 733095 - DNA, 25 bp, Homo sapien
tgattgtggcaactaatggctgtcc

SEQ ID NO: 733096 - DNA, 25 bp, Homo sapien
aatgcattgtaaagttaaagcatat

SEQ ID NO: 733097 - DNA, 25 bp, Homo sapien
ttaatgcattgtaaagttaaagcat

SEQ ID NO: 733098 - DNA, 25 bp, Homo sapien
taatgcattgtaaagttaaagcata

SEQ ID NO: 733099 - DNA, 25 bp, Homo sapien
tgttaagccagttaccctattagca

SEQ ID NO: 733100 - DNA, 25 bp, Homo sapien
tcaaggtacgtggtgatcctctcac

SEQ ID NO: 733101 - DNA, 25 bp, Homo sapien
aaatgtggaatagctagctgtggac

SEQ ID NO: 733102 - DNA, 25 bp, Homo sapien
gctgtggacagcgttaaggttttgt

SEQ ID NO: 733103 - DNA, 25 bp, Homo sapien
tcccatggcagaggttcagttgatg

SEQ ID NO: 733104 - DNA, 25 bp, Homo sapien
gactggtttcgatccgttgtgagca

SEQ ID NO: 733105 - DNA, 25 bp, Homo sapien
caagtgccccggaaatgctccattt

SEQ ID NO: 733106 - DNA, 25 bp, Homo sapien
tgcagaaacacggaagctatcgtac

SEQ ID NO: 733107 - DNA, 25 bp, Homo sapien
tggcatcgtaagtgaacaaaatttc

SEQ ID NO: 733108 - DNA, 25 bp, Homo sapien
tgcaaaaattggacatctaggcctg

SEQ ID NO: 733109 - DNA, 25 bp, Homo sapien
tgtgattactcattacctcctctcc

SEQ ID NO: 733110 - DNA, 25 bp, Homo sapien
gcataagatttgtattggcatcgta

SEQ ID NO: 733111 - DNA, 25 bp, Homo sapien
gcaccttcagggttgtatgaccata

SEQ ID NO: 733112 - DNA, 25 bp, Homo sapien
taagataggacaagatcaggcacct

SEQ ID NO: 733113 - DNA, 25 bp, Homo sapien
gcctctaagataggacaagatcagg

SEQ ID NO: 733114 - DNA, 25 bp, Homo sapien
tcctgcttagcctctaagataggac

SEQ ID NO: 733115 - DNA, 25 bp, Homo sapien
ggagagaattcttcttgtgcaggaa

SEQ ID NO: 733116 - DNA, 25 bp, Homo sapien
gagagaattcttcttgtgcaggaag

SEQ ID NO: 733117 - DNA, 25 bp, Homo sapien
ctaatccgtaccttgaacatacgcc

SEQ ID NO: 733118 - DNA, 25 bp, Homo sapien
aatccgtaccttgaacatacgcctt

SEQ ID NO: 733119 - DNA, 25 bp, Homo sapien
taatccgtaccttgaacatacgcct

SEQ ID NO: 733120 - DNA, 25 bp, Homo sapien
tgtcttctgtctgcctttacacttg

SEQ ID NO: 733121 - DNA, 25 bp, Homo sapien
ttccctaccataggttatcactgtc

SEQ ID NO: 733122 - DNA, 25 bp, Homo sapien
gcctttacacttgcacagggctcct

SEQ ID NO: 733123 - DNA, 25 bp, Homo sapien
tgctgtttgaaatttccctaccata

SEQ ID NO: 733124 - DNA, 25 bp, Homo sapien
tctctggtgtcgaactggagagttg

SEQ ID NO: 733125 - DNA, 25 bp, Homo sapien
ctggagagttggcactcgggactca

SEQ ID NO: 733126 - DNA, 25 bp, Homo sapien
gcctgagtactgacgttctctggtg

SEQ ID NO: 733127 - DNA, 25 bp, Homo sapien
tgtcgcagtttgcatgctgaagcct

SEQ ID NO: 733128 - DNA, 25 bp, Homo sapien
cctggggcaaggatggttcccgcaa

SEQ ID NO: 733129 - DNA, 25 bp, Homo sapien
gggcaaggatggttcccgcaaatcc

SEQ ID NO: 733130 - DNA, 25 bp, Homo sapien
tggggcaaggatggttcccgcaaat

SEQ ID NO: 733131 - DNA, 25 bp, Homo sapien
gcaaggatggttcccgcaaatccat

SEQ ID NO: 733132 - DNA, 25 bp, Homo sapien
gtatgaaccctttggttttgctcca

SEQ ID NO: 733133 - DNA, 25 bp, Homo sapien
caagtgtatgaaccctttggttttg

SEQ ID NO: 733134 - DNA, 25 bp, Homo sapien
tctccagtaaagcttggttgctggg

SEQ ID NO: 733135 - DNA, 25 bp, Homo sapien
tttctccagtaaagcttggttgctg

SEQ ID NO: 733136 - DNA, 25 bp, Homo sapien
ccacaattggtatcctgctgaaggt

SEQ ID NO: 733137 - DNA, 25 bp, Homo sapien
ctagttatgtagaggatgctcagta

SEQ ID NO: 733138 - DNA, 25 bp, Homo sapien
gatcttactggttatattggtagaa

SEQ ID NO: 733139 - DNA, 25 bp, Homo sapien
gggattccagagttagtctctctga

SEQ ID NO: 733140 - DNA, 25 bp, Homo sapien
gatttataaggcatgcaagctcctt

SEQ ID NO: 733141 - DNA, 25 bp, Homo sapien
catggcttgagcagagtagctgtca

SEQ ID NO: 733142 - DNA, 25 bp, Homo sapien
gcaataccagccattggacaagaaa

SEQ ID NO: 733143 - DNA, 25 bp, Homo sapien
ttactcagaagctttggccatggct

SEQ ID NO: 733144 - DNA, 25 bp, Homo sapien
taactataaggagccgtgaattctc

SEQ ID NO: 733145 - DNA, 25 bp, Homo sapien
ggagccgtgaattctctagtaaacg

SEQ ID NO: 733146 - DNA, 25 bp, Homo sapien
ccatcagtaactataaggagccgtg

SEQ ID NO: 733147 - DNA, 25 bp, Homo sapien
ttctctagtaaacgctccagaagac

SEQ ID NO: 733148 - DNA, 25 bp, Homo sapien
taacctcctcagaggttttgccagg

SEQ ID NO: 733149 - DNA, 25 bp, Homo sapien
aggttttgccaggaagatcactcat

SEQ ID NO: 733150 - DNA, 25 bp, Homo sapien
tttaacctcctcagaggttttgcca

SEQ ID NO: 733151 - DNA, 25 bp, Homo sapien
catttaacctcctcagaggttttgc

SEQ ID NO: 733152 - DNA, 25 bp, Homo sapien
ttctccatggaagtgctcctgggtt

SEQ ID NO: 733153 - DNA, 25 bp, Homo sapien
ctccatggaagtgctcctgggttct

SEQ ID NO: 733154 - DNA, 25 bp, Homo sapien
tccatggaagtgctcctgggttctg

SEQ ID NO: 733155 - DNA, 25 bp, Homo sapien
tctccatggaagtgctcctgggttc

SEQ ID NO: 733156 - DNA, 25 bp, Homo sapien
ccatatgaagctttgggtacccgat

SEQ ID NO: 733157 - DNA, 25 bp, Homo sapien
cgataatgactacaacatttgcatc

SEQ ID NO: 733158 - DNA, 25 bp, Homo sapien
gggtacccgataatgactacaacat

SEQ ID NO: 733159 - DNA, 25 bp, Homo sapien
gaagctttgggtacccgataatgac

SEQ ID NO: 733160 - DNA, 25 bp, Homo sapien
tgttgtccagcaagcgtctcagcct

SEQ ID NO: 733161 - DNA, 25 bp, Homo sapien
tcacttctggttgctaattattgtc

SEQ ID NO: 733162 - DNA, 25 bp, Homo sapien
gaatccctggctatttcccagcaga

SEQ ID NO: 733163 - DNA, 25 bp, Homo sapien
tattgtctctagaggtgcctgcttc

SEQ ID NO: 733164 - DNA, 25 bp, Homo sapien
cctgcatagcctgagagggattaga

SEQ ID NO: 733165 - DNA, 25 bp, Homo sapien
tagcctgagagggattagagagaac

SEQ ID NO: 733166 - DNA, 25 bp, Homo sapien
ctgtcccttgacactttgaaccttt

SEQ ID NO: 733167 - DNA, 25 bp, Homo sapien
gcttccccttggatggctgtccctt

SEQ ID NO: 733168 - DNA, 25 bp, Homo sapien
ggcagcatgatgctcggagtcctca

SEQ ID NO: 733169 - DNA, 25 bp, Homo sapien
gcagcatgatgctcggagtcctcag

SEQ ID NO: 733170 - DNA, 25 bp, Homo sapien
cagcatgatgctcggagtcctcaga

SEQ ID NO: 733171 - DNA, 25 bp, Homo sapien
tggcagcatgatgctcggagtcctc

SEQ ID NO: 733172 - DNA, 25 bp, Homo sapien
ctggaataggagcacgggtcttgga

SEQ ID NO: 733173 - DNA, 25 bp, Homo sapien
agaatgatactttccggtagtggga

SEQ ID NO: 733174 - DNA, 25 bp, Homo sapien
tgggatctctgtaaggaaggagcct

SEQ ID NO: 733175 - DNA, 25 bp, Homo sapien
tgggtaaacagaagatgagtttgag

SEQ ID NO: 733176 - DNA, 25 bp, Homo sapien
gatgaattccggttgggatgggcca

SEQ ID NO: 733177 - DNA, 25 bp, Homo sapien
gaggggagatgaattccggttggga

SEQ ID NO: 733178 - DNA, 25 bp, Homo sapien
gagatgaattccggttgggatgggc

SEQ ID NO: 733179 - DNA, 25 bp, Homo sapien
tgggatgggccatctgaggaggctt

SEQ ID NO: 733180 - DNA, 25 bp, Homo sapien
gatctcatcccaaaggatgctggaa

SEQ ID NO: 733181 - DNA, 25 bp, Homo sapien
tctggctctcccgtagagatctcat

SEQ ID NO: 733182 - DNA, 25 bp, Homo sapien
gatgctggaatacactggaacatat

SEQ ID NO: 733183 - DNA, 25 bp, Homo sapien
aaacccactggcctttcctgctttg

SEQ ID NO: 733184 - DNA, 25 bp, Homo sapien
tgggcccacataagcaagctcctgt

SEQ ID NO: 733185 - DNA, 25 bp, Homo sapien
gaagttctgggtgtcttgagtacca

SEQ ID NO: 733186 - DNA, 25 bp, Homo sapien
gaacaaatagaacggaaggcagctg

SEQ ID NO: 733187 - DNA, 25 bp, Homo sapien
catgagcttgcctgttgtatcttcc

SEQ ID NO: 733188 - DNA, 25 bp, Homo sapien
gatccaccaggctcaatttttctgg

SEQ ID NO: 733189 - DNA, 25 bp, Homo sapien
tgctaggcattattggttgctgctg

SEQ ID NO: 733190 - DNA, 25 bp, Homo sapien
gaaatttgctgcaggtatgctaggc

SEQ ID NO: 733191 - DNA, 25 bp, Homo sapien
tctgtccccagcagtgaaatttgct

SEQ ID NO: 733192 - DNA, 25 bp, Homo sapien
cgtaaacatccacaggactgtggaa

SEQ ID NO: 733193 - DNA, 25 bp, Homo sapien
ggcccgagggtgtgatgacgtccag

SEQ ID NO: 733194 - DNA, 25 bp, Homo sapien
taaacatccacaggactgtggaaga

SEQ ID NO: 733195 - DNA, 25 bp, Homo sapien
aagaaggcccgagggtgtgatgacg

SEQ ID NO: 733196 - DNA, 25 bp, Homo sapien
ctagaagcatttccccgtgtgaaca

SEQ ID NO: 733197 - DNA, 25 bp, Homo sapien
cgtgtgaacatcaggttctgctgtt

SEQ ID NO: 733198 - DNA, 25 bp, Homo sapien
tgaacatcaggttctgctgttctgg

SEQ ID NO: 733199 - DNA, 25 bp, Homo sapien
tttccccgtgtgaacatcaggttct

SEQ ID NO: 733200 - DNA, 25 bp, Homo sapien
gacctagaaggaaaagccctctatg

SEQ ID NO: 733201 - DNA, 25 bp, Homo sapien
ggtacagacacggaaagccggcttc

SEQ ID NO: 733202 - DNA, 25 bp, Homo sapien
cttcccaaggaaggcggtacagaca

SEQ ID NO: 733203 - DNA, 25 bp, Homo sapien
agaaccctgggatgcttatctgggc

SEQ ID NO: 733204 - DNA, 25 bp, Homo sapien
gccaagaggagtatttatagctgcc

SEQ ID NO: 733205 - DNA, 25 bp, Homo sapien
tgcccggttctcacaaggctgccgg

SEQ ID NO: 733206 - DNA, 25 bp, Homo sapien
tcggatgtaccctgaagaggtgcag

SEQ ID NO: 733207 - DNA, 25 bp, Homo sapien
ggtcgaccaaatccccattcagagg

SEQ ID NO: 733208 - DNA, 25 bp, Homo sapien
tgttcccttcttggcctaaaccaga

SEQ ID NO: 733209 - DNA, 25 bp, Homo sapien
ggttcctagattggctgctaccctc

SEQ ID NO: 733210 - DNA, 25 bp, Homo sapien
tttcatctcgaaaggattggctggg

SEQ ID NO: 733211 - DNA, 25 bp, Homo sapien
catccctgtggcactacatccgatt

SEQ ID NO: 733212 - DNA, 25 bp, Homo sapien
ttaagattccactgaggcatcaact

SEQ ID NO: 733213 - DNA, 25 bp, Homo sapien
tcctcctccctggttacaatcttct

SEQ ID NO: 733214 - DNA, 25 bp, Homo sapien
ttctctggctccgagcctctactgg

SEQ ID NO: 733215 - DNA, 25 bp, Homo sapien
tggctccgagcctctactgggtgct

SEQ ID NO: 733216 - DNA, 25 bp, Homo sapien
ggtcttatggccgtggtacccaatc

SEQ ID NO: 733217 - DNA, 25 bp, Homo sapien
tctggggccttttgccaacataagg

SEQ ID NO: 733218 - DNA, 25 bp, Homo sapien
gccgtggtacccaatcataatctgg

SEQ ID NO: 733219 - DNA, 25 bp, Homo sapien
gaatcaaggtacaaagcagttcctt

SEQ ID NO: 733220 - DNA, 25 bp, Homo sapien
aaggaaaagattgatcgccgttctg

SEQ ID NO: 733221 - DNA, 25 bp, Homo sapien
tgagagcttctcagactatccacct

SEQ ID NO: 733222 - DNA, 25 bp, Homo sapien
agcttctcagactatccacctttgg

SEQ ID NO: 733223 - DNA, 25 bp, Homo sapien
tgatcgccgttctggtaaaaagctg

SEQ ID NO: 733224 - DNA, 25 bp, Homo sapien
aaatctgtcgaaatgcaccatgaag

SEQ ID NO: 733225 - DNA, 25 bp, Homo sapien
gtaaaatctgtcgaaatgcaccatg

SEQ ID NO: 733226 - DNA, 25 bp, Homo sapien
gaagtaaaatctgtcgaaatgcacc

SEQ ID NO: 733227 - DNA, 25 bp, Homo sapien
taaaatctgtcgaaatgcaccatga

SEQ ID NO: 733228 - DNA, 25 bp, Homo sapien
tccgtggagttatgcaggtggtccc

SEQ ID NO: 733229 - DNA, 25 bp, Homo sapien
caaagaactctgtgcgattggccca

SEQ ID NO: 733230 - DNA, 25 bp, Homo sapien
taggagctgacggaattaagactgc

SEQ ID NO: 733231 - DNA, 25 bp, Homo sapien
tctgggaatgcactctagctgtagg

SEQ ID NO: 733232 - DNA, 25 bp, Homo sapien
gctgtgcttggtaccaggctccaca

SEQ ID NO: 733233 - DNA, 25 bp, Homo sapien
gggcctgaccgtcgagatagtttga

SEQ ID NO: 733234 - DNA, 25 bp, Homo sapien
caaggaggaggtattcgatagacat

SEQ ID NO: 733235 - DNA, 25 bp, Homo sapien
cgtcgagatagtttgaggctgtgct

SEQ ID NO: 733236 - DNA, 25 bp, Homo sapien
tttcctgacgtgaggtcaaagggtg

SEQ ID NO: 733237 - DNA, 25 bp, Homo sapien
ggtggagctgtcctaggctccttgc

SEQ ID NO: 733238 - DNA, 25 bp, Homo sapien
attttcctgacgtgaggtcaaaggg

SEQ ID NO: 733239 - DNA, 25 bp, Homo sapien
taggctccttgctcatgatggatgg

SEQ ID NO: 733240 - DNA, 25 bp, Homo sapien
gtgtcacctcttacaccctgctcag

SEQ ID NO: 733241 - DNA, 25 bp, Homo sapien
cctttggggaagtacatgtctgtct

SEQ ID NO: 733242 - DNA, 25 bp, Homo sapien
tcagcagtgtcagggggctcctttg

SEQ ID NO: 733243 - DNA, 25 bp, Homo sapien
tctgcaaagaccaactcaagttcca

SEQ ID NO: 733244 - DNA, 25 bp, Homo sapien
gacagccagcggagcgttggtttcc

SEQ ID NO: 733245 - DNA, 25 bp, Homo sapien
cagcggagcgttggtttccgattcc

SEQ ID NO: 733246 - DNA, 25 bp, Homo sapien
tggtttccgattccttcctaatgtg

SEQ ID NO: 733247 - DNA, 25 bp, Homo sapien
gggtgacagccagcggagcgttggt

SEQ ID NO: 733248 - DNA, 25 bp, Homo sapien
gagctgcttcctacaatattcatga

SEQ ID NO: 733249 - DNA, 25 bp, Homo sapien
cactctctggtttgcgctggatccc

SEQ ID NO: 733250 - DNA, 25 bp, Homo sapien
tattcatgacttagaacagcccatt

SEQ ID NO: 733251 - DNA, 25 bp, Homo sapien
gcccattcttaaagctggtccaaca

SEQ ID NO: 733252 - DNA, 25 bp, Homo sapien
ggcagagggacatgtgtcagctgta

SEQ ID NO: 733253 - DNA, 25 bp, Homo sapien
tgggcagagggacatgtgtcagctg

SEQ ID NO: 733254 - DNA, 25 bp, Homo sapien
cagagggacatgtgtcagctgtact

SEQ ID NO: 733255 - DNA, 25 bp, Homo sapien
atgggcagagggacatgtgtcagct

SEQ ID NO: 733256 - DNA, 25 bp, Homo sapien
tatgcaaggagaacaaacttagttg

SEQ ID NO: 733257 - DNA, 25 bp, Homo sapien
tttgaaaggcaaagagctacgctgt

SEQ ID NO: 733258 - DNA, 25 bp, Homo sapien
ttatttgatactccccagcaccaga

SEQ ID NO: 733259 - DNA, 25 bp, Homo sapien
gaattatcccctctgtcatgccatg

SEQ ID NO: 733260 - DNA, 25 bp, Homo sapien
tgagcactctgcgaatagccttatt

SEQ ID NO: 733261 - DNA, 25 bp, Homo sapien
tgcgaatagccttattcccctttga

SEQ ID NO: 733262 - DNA, 25 bp, Homo sapien
cgaatagccttattcccctttgacg

SEQ ID NO: 733263 - DNA, 25 bp, Homo sapien
tggtgatgagcactctgcgaatagc

SEQ ID NO: 733264 - DNA, 25 bp, Homo sapien
attttcctaccattccctccaagag

SEQ ID NO: 733265 - DNA, 25 bp, Homo sapien
tcttcttttaggctgactcttagtc

SEQ ID NO: 733266 - DNA, 25 bp, Homo sapien
aagggtacagatgctcagtggttac

SEQ ID NO: 733267 - DNA, 25 bp, Homo sapien
tagggccccagatatagattcgtaa

SEQ ID NO: 733268 - DNA, 25 bp, Homo sapien
gaaggatcgggtaaaagatacagag

SEQ ID NO: 733269 - DNA, 25 bp, Homo sapien
aggatcgggtaaaagatacagagaa

SEQ ID NO: 733270 - DNA, 25 bp, Homo sapien
ggaaggatcgggtaaaagatacaga

SEQ ID NO: 733271 - DNA, 25 bp, Homo sapien
ctggaaggatcgggtaaaagataca

SEQ ID NO: 733272 - DNA, 25 bp, Homo sapien
gatcagtccattggggccgcatgtc

SEQ ID NO: 733273 - DNA, 25 bp, Homo sapien
attggggccgcatgtcaggacaccg

SEQ ID NO: 733274 - DNA, 25 bp, Homo sapien
tccattggggccgcatgtcaggaca

SEQ ID NO: 733275 - DNA, 25 bp, Homo sapien
tcaggacaccggatgacactgtttg

SEQ ID NO: 733276 - DNA, 25 bp, Homo sapien
catgctgaccaaagactcatcttta

SEQ ID NO: 733277 - DNA, 25 bp, Homo sapien
catcacatgctgaccaaagactcat

SEQ ID NO: 733278 - DNA, 25 bp, Homo sapien
tcacatgctgaccaaagactcatct

SEQ ID NO: 733279 - DNA, 25 bp, Homo sapien
cacatgctgaccaaagactcatctt

SEQ ID NO: 733280 - DNA, 25 bp, Homo sapien
taaagacctcattgacacaggcctc

SEQ ID NO: 733281 - DNA, 25 bp, Homo sapien
gccaagtgagggatagaagaataat

SEQ ID NO: 733282 - DNA, 25 bp, Homo sapien
cacggcttaggagattggccacttc

SEQ ID NO: 733283 - DNA, 25 bp, Homo sapien
tggcatacatggaaaccagtcccct

SEQ ID NO: 733284 - DNA, 25 bp, Homo sapien
tgcttagcgtgcaccagaatgagct

SEQ ID NO: 733285 - DNA, 25 bp, Homo sapien
gaagccgtccagttttgaagccacc

SEQ ID NO: 733286 - DNA, 25 bp, Homo sapien
gaactgaccctgcaagtaccttgat

SEQ ID NO: 733287 - DNA, 25 bp, Homo sapien
ggaccaatgcctgcaaacctaggag

SEQ ID NO: 733288 - DNA, 25 bp, Homo sapien
ctactggtgccatattccacctgat

SEQ ID NO: 733289 - DNA, 25 bp, Homo sapien
tctgagaaccgcatccttcctggtg

SEQ ID NO: 733290 - DNA, 25 bp, Homo sapien
tgctccctactggtgccatattcca

SEQ ID NO: 733291 - DNA, 25 bp, Homo sapien
cctggtgctccctactggtgccata

SEQ ID NO: 733292 - DNA, 25 bp, Homo sapien
ttctctcccagccattgtccattga

SEQ ID NO: 733293 - DNA, 25 bp, Homo sapien
ccagccattgtccattgatgggaat

SEQ ID NO: 733294 - DNA, 25 bp, Homo sapien
tctcccagccattgtccattgatgg

SEQ ID NO: 733295 - DNA, 25 bp, Homo sapien
aatgaggtagtgggcagccaagcca

SEQ ID NO: 733296 - DNA, 25 bp, Homo sapien
tgcccaacagtggatccataacctg

SEQ ID NO: 733297 - DNA, 25 bp, Homo sapien
ttgctggcagaatcggcatccggat

SEQ ID NO: 733298 - DNA, 25 bp, Homo sapien
gagagatagaatcagatggatttgc

SEQ ID NO: 733299 - DNA, 25 bp, Homo sapien
catccggatgtgagcagtgtagaac

SEQ ID NO: 733300 - DNA, 25 bp, Homo sapien
gccctgaggtagtcatatcatagga

SEQ ID NO: 733301 - DNA, 25 bp, Homo sapien
tgacagtaactttttagcaggcatg

SEQ ID NO: 733302 - DNA, 25 bp, Homo sapien
ggacatgttcatgaattacccctga

SEQ ID NO: 733303 - DNA, 25 bp, Homo sapien
gacatgtgcagaacctagagttaga

SEQ ID NO: 733304 - DNA, 25 bp, Homo sapien
attcccatgactgtcaatccattcc

SEQ ID NO: 733305 - DNA, 25 bp, Homo sapien
gatctttggctgacactcaacataa

SEQ ID NO: 733306 - DNA, 25 bp, Homo sapien
ctccataacctagagcagggcctgc

SEQ ID NO: 733307 - DNA, 25 bp, Homo sapien
cagcagtactggctgcaggacacca

SEQ ID NO: 733308 - DNA, 25 bp, Homo sapien
acaccaccatgggacaggcaactgt

SEQ ID NO: 733309 - DNA, 25 bp, Homo sapien
tgaagcccagacttagagaaatggc

SEQ ID NO: 733310 - DNA, 25 bp, Homo sapien
cactggaacgtgtcaaggatgcaac

SEQ ID NO: 733311 - DNA, 25 bp, Homo sapien
tttgcagtgttgctcgggcaccact

SEQ ID NO: 733312 - DNA, 25 bp, Homo sapien
tacttgagggataggatacatttcc

SEQ ID NO: 733313 - DNA, 25 bp, Homo sapien
tagagcttaccttcttggtggagag

SEQ ID NO: 733314 - DNA, 25 bp, Homo sapien
cacctctcagttgggagtagctaaa

SEQ ID NO: 733315 - DNA, 25 bp, Homo sapien
gcttaatgtcagtgtgagccaggac

SEQ ID NO: 733316 - DNA, 25 bp, Homo sapien
ttgcagatttttcaccaagtctcat

SEQ ID NO: 733317 - DNA, 25 bp, Homo sapien
gttgttgttttgcagatttttcacc

SEQ ID NO: 733318 - DNA, 25 bp, Homo sapien
ttgttgttttgcagatttttcacca

SEQ ID NO: 733319 - DNA, 25 bp, Homo sapien
tgttttgcagatttttcaccaagtc

SEQ ID NO: 733320 - DNA, 25 bp, Homo sapien
gaagcaactcactaaagccaggaca

SEQ ID NO: 733321 - DNA, 25 bp, Homo sapien
aggaagcaactcactaaagccagga

SEQ ID NO: 733322 - DNA, 25 bp, Homo sapien
actcactaaagccaggacacatctc

SEQ ID NO: 733323 - DNA, 25 bp, Homo sapien
tctcaggaagcaactcactaaagcc

SEQ ID NO: 733324 - DNA, 25 bp, Homo sapien
actgactgtggatgaggtgaagcaa

SEQ ID NO: 733325 - DNA, 25 bp, Homo sapien
gagaagcaacttctcctacccttcc

SEQ ID NO: 733326 - DNA, 25 bp, Homo sapien
tgatttcctggtgtggcaaaggcca

SEQ ID NO: 733327 - DNA, 25 bp, Homo sapien
ccttccctcactggtgatttcctgg

SEQ ID NO: 733328 - DNA, 25 bp, Homo sapien
tgttccataaagctcttcacataga

SEQ ID NO: 733329 - DNA, 25 bp, Homo sapien
tccataaagctcttcacatagagag

SEQ ID NO: 733330 - DNA, 25 bp, Homo sapien
gttccataaagctcttcacatagag

SEQ ID NO: 733331 - DNA, 25 bp, Homo sapien
ctgttccataaagctcttcacatag

SEQ ID NO: 733332 - DNA, 25 bp, Homo sapien
agtgtgactacacattttgtgatcc

SEQ ID NO: 733333 - DNA, 25 bp, Homo sapien
atttctgtaagtctggaattttgtt

SEQ ID NO: 733334 - DNA, 25 bp, Homo sapien
tttgcacgcttctttaaggttgcct

SEQ ID NO: 733335 - DNA, 25 bp, Homo sapien
tatgaaaagataacacccgtaagtg

SEQ ID NO: 733336 - DNA, 25 bp, Homo sapien
tgtcattagtacaacattaactggt

SEQ ID NO: 733337 - DNA, 25 bp, Homo sapien
caatggatagattgtccagatggaa

SEQ ID NO: 733338 - DNA, 25 bp, Homo sapien
tcttctcaagtgtgcatggaacatt

SEQ ID NO: 733339 - DNA, 25 bp, Homo sapien
tagaggactttaatacccaactgtc

SEQ ID NO: 733340 - DNA, 25 bp, Homo sapien
gctgtaggcgcccaaggagccaacc

SEQ ID NO: 733341 - DNA, 25 bp, Homo sapien
gcgtcaggcagtgcttcacaggctg

SEQ ID NO: 733342 - DNA, 25 bp, Homo sapien
ggctgtaggcgcccaaggagccaac

SEQ ID NO: 733343 - DNA, 25 bp, Homo sapien
gggaggtgggcgagcggtaggcgtc

SEQ ID NO: 733344 - DNA, 25 bp, Homo sapien
ccaggcgtatctgggcggccacaag

SEQ ID NO: 733345 - DNA, 25 bp, Homo sapien
tgccgagggcgggaagcgctccacc

SEQ ID NO: 733346 - DNA, 25 bp, Homo sapien
gatccaggcgtatctgggcggccac

SEQ ID NO: 733347 - DNA, 25 bp, Homo sapien
gtcccggcgaggatccaggcgtatc

SEQ ID NO: 733348 - DNA, 25 bp, Homo sapien
cacttcgggaataagcaatccacac

SEQ ID NO: 733349 - DNA, 25 bp, Homo sapien
gaagagtgtaaaactgtcagtcccc

SEQ ID NO: 733350 - DNA, 25 bp, Homo sapien
agtacaacactcacaactactgaag

SEQ ID NO: 733351 - DNA, 25 bp, Homo sapien
agcaggagaaagaaacgacgcgggc

SEQ ID NO: 733352 - DNA, 25 bp, Homo sapien
tgattaaaagtagttgcagcctgaa

SEQ ID NO: 733353 - DNA, 25 bp, Homo sapien
tccagagatatgaaaggacccagag

SEQ ID NO: 733354 - DNA, 25 bp, Homo sapien
gagatatgaaaggacccagagtgtg

SEQ ID NO: 733355 - DNA, 25 bp, Homo sapien
gattaaaagtagttgcagcctgaac

SEQ ID NO: 733356 - DNA, 25 bp, Homo sapien
cagcttttgccagcgctactgtctt

SEQ ID NO: 733357 - DNA, 25 bp, Homo sapien
agcttttgccagcgctactgtcttc

SEQ ID NO: 733358 - DNA, 25 bp, Homo sapien
ccagcttttgccagcgctactgtct

SEQ ID NO: 733359 - DNA, 25 bp, Homo sapien
tcactggcgatgctatggaaattct

SEQ ID NO: 733360 - DNA, 25 bp, Homo sapien
tgaagtatcactggcgatgctatgg

SEQ ID NO: 733361 - DNA, 25 bp, Homo sapien
agtatcactggcgatgctatggaaa

SEQ ID NO: 733362 - DNA, 25 bp, Homo sapien
atgctgaagtatcactggcgatgct

SEQ ID NO: 733363 - DNA, 25 bp, Homo sapien
gcagtcgtccctgcgtggttggaca

SEQ ID NO: 733364 - DNA, 25 bp, Homo sapien
cctcgcgtgataaacatcaagggaa

SEQ ID NO: 733365 - DNA, 25 bp, Homo sapien
atcaggcaggcgtcctcgcgtgata

SEQ ID NO: 733366 - DNA, 25 bp, Homo sapien
cacagataaaatgcgtctcctgtct

SEQ ID NO: 733367 - DNA, 25 bp, Homo sapien
cttgaggcctgtactctgtcagcct

SEQ ID NO: 733368 - DNA, 25 bp, Homo sapien
tgtggtggaacgcagatcacactgt

SEQ ID NO: 733369 - DNA, 25 bp, Homo sapien
actctgtcagcctgctctgactggg

SEQ ID NO: 733370 - DNA, 25 bp, Homo sapien
tggtggaacgcagatcacactgtcc

SEQ ID NO: 733371 - DNA, 25 bp, Homo sapien
ttggggaagttatctggacacttac

SEQ ID NO: 733372 - DNA, 25 bp, Homo sapien
ggcactttggggaagttatctggac

SEQ ID NO: 733373 - DNA, 25 bp, Homo sapien
tccaaagctggcactttggggaagt

SEQ ID NO: 733374 - DNA, 25 bp, Homo sapien
cactttggggaagttatctggacac

SEQ ID NO: 733375 - DNA, 25 bp, Homo sapien
tttcgcttcgacacagctcctttcg

SEQ ID NO: 733376 - DNA, 25 bp, Homo sapien
gctttactgtctcctttcgcttcga

SEQ ID NO: 733377 - DNA, 25 bp, Homo sapien
cgacacagctcctttcgaggaaatg

SEQ ID NO: 733378 - DNA, 25 bp, Homo sapien
gctcctttcgaggaaatgctgcatc

SEQ ID NO: 733379 - DNA, 25 bp, Homo sapien
attatatgcgctcagattttcccca

SEQ ID NO: 733380 - DNA, 25 bp, Homo sapien
gaattatatgcgctcagattttccc

SEQ ID NO: 733381 - DNA, 25 bp, Homo sapien
tacagaattatatgcgctcagattt

SEQ ID NO: 733382 - DNA, 25 bp, Homo sapien
acagaattatatgcgctcagatttt

SEQ ID NO: 733383 - DNA, 25 bp, Homo sapien
agagagtttctcttgataacggtca

SEQ ID NO: 733384 - DNA, 25 bp, Homo sapien
cttgataacggtcagggaaggagtt

SEQ ID NO: 733385 - DNA, 25 bp, Homo sapien
ttctcttgataacggtcagggaagg

SEQ ID NO: 733386 - DNA, 25 bp, Homo sapien
gagtttctcttgataacggtcaggg

SEQ ID NO: 733387 - DNA, 25 bp, Homo sapien
tgtttggcatcatgaaaatgagttt

SEQ ID NO: 733388 - DNA, 25 bp, Homo sapien
catggagcagtgtaatccctaaatc

SEQ ID NO: 733389 - DNA, 25 bp, Homo sapien
gcagttcagctgaactttgcttttc

SEQ ID NO: 733390 - DNA, 25 bp, Homo sapien
cctaaatcaagctgtgcaaattgtt

SEQ ID NO: 733391 - DNA, 25 bp, Homo sapien
tgttaagtttgtccaccatgggccc

SEQ ID NO: 733392 - DNA, 25 bp, Homo sapien
cattgtgtgggtaatcggttggcca

SEQ ID NO: 733393 - DNA, 25 bp, Homo sapien
taagcagttgccaccaagtgcctca

SEQ ID NO: 733394 - DNA, 25 bp, Homo sapien
ccaatagagaggctgtcatgcacat

SEQ ID NO: 733395 - DNA, 25 bp, Homo sapien
cgcgtcggcacccaagaatttctta

SEQ ID NO: 733396 - DNA, 25 bp, Homo sapien
cacggctctaggctctgaatctgct

SEQ ID NO: 733397 - DNA, 25 bp, Homo sapien
tagaaggaaactacggacgcaggca

SEQ ID NO: 733398 - DNA, 25 bp, Homo sapien
catgcaaatgggctctagactaggt

SEQ ID NO: 733399 - DNA, 25 bp, Homo sapien
tttgttggggatgtcaaaggaggac

SEQ ID NO: 733400 - DNA, 25 bp, Homo sapien
tctttgttggggatgtcaaaggagg

SEQ ID NO: 733401 - DNA, 25 bp, Homo sapien
ttgttggggatgtcaaaggaggacc

SEQ ID NO: 733402 - DNA, 25 bp, Homo sapien
ctctttgttggggatgtcaaaggag

SEQ ID NO: 733403 - DNA, 25 bp, Homo sapien
catgggccccaggtctcctggagcc

SEQ ID NO: 733404 - DNA, 25 bp, Homo sapien
caggtctcctggagccctgaaatta

SEQ ID NO: 733405 - DNA, 25 bp, Homo sapien
cccaggtctcctggagccctgaaat

SEQ ID NO: 733406 - DNA, 25 bp, Homo sapien
ctgcatgggccccaggtctcctgga

SEQ ID NO: 733407 - DNA, 25 bp, Homo sapien
tgtgagcggctgttgtagaactgcc

SEQ ID NO: 733408 - DNA, 25 bp, Homo sapien
tacttcaaggcgtctccaggtggag

SEQ ID NO: 733409 - DNA, 25 bp, Homo sapien
tggccatcctcaaatttcgtgcagt

SEQ ID NO: 733410 - DNA, 25 bp, Homo sapien
tgcttcagcccacttagaggaggtt

SEQ ID NO: 733411 - DNA, 25 bp, Homo sapien
tttttcagtgaccagattaacaggc

SEQ ID NO: 733412 - DNA, 25 bp, Homo sapien
taaagctgaagtcatgcacgaagtt

SEQ ID NO: 733413 - DNA, 25 bp, Homo sapien
ccaagcctgggattatgaagaaggt

SEQ ID NO: 733414 - DNA, 25 bp, Homo sapien
ggctagaatttagcgttccagttaa

SEQ ID NO: 733415 - DNA, 25 bp, Homo sapien
tagagcttctctttcgttcccggtg

SEQ ID NO: 733416 - DNA, 25 bp, Homo sapien
agagcttctctttcgttcccggtgg

SEQ ID NO: 733417 - DNA, 25 bp, Homo sapien
atagagcttctctttcgttcccggt

SEQ ID NO: 733418 - DNA, 25 bp, Homo sapien
cgccgctggcagttccagggctaag

SEQ ID NO: 733419 - DNA, 25 bp, Homo sapien
gctcgaccgccgctggcagttccag

SEQ ID NO: 733420 - DNA, 25 bp, Homo sapien
gaccgccgctggcagttccagggct

SEQ ID NO: 733421 - DNA, 25 bp, Homo sapien
ctggcagttccagggctaaggattt

SEQ ID NO: 733422 - DNA, 25 bp, Homo sapien
tggggcggctacatctttggaatct

SEQ ID NO: 733423 - DNA, 25 bp, Homo sapien
ttctcagggctgagatgccgtcgag

SEQ ID NO: 733424 - DNA, 25 bp, Homo sapien
tgtttgtcaattcgttctgaagagg

SEQ ID NO: 733425 - DNA, 25 bp, Homo sapien
aggatgtaccgaatttgtttgtcaa

SEQ ID NO: 733426 - DNA, 25 bp, Homo sapien
taccagaattgttatcacctaagtg

SEQ ID NO: 733427 - DNA, 25 bp, Homo sapien
ataccagaattgttatcacctaagt

SEQ ID NO: 733428 - DNA, 25 bp, Homo sapien
accagaattgttatcacctaagtgt

SEQ ID NO: 733429 - DNA, 25 bp, Homo sapien
ccagaattgttatcacctaagtgtc

SEQ ID NO: 733430 - DNA, 25 bp, Homo sapien
ggaagcatccatctttttcagccat

SEQ ID NO: 733431 - DNA, 25 bp, Homo sapien
tgttttctgccagtgcctctttgct

SEQ ID NO: 733432 - DNA, 25 bp, Homo sapien
ctcattgaatccagattggaagcat

SEQ ID NO: 733433 - DNA, 25 bp, Homo sapien
ttcagccatctttggaaggttcagg

SEQ ID NO: 733434 - DNA, 25 bp, Homo sapien
caaatctgttctggaggtactctag

SEQ ID NO: 733435 - DNA, 25 bp, Homo sapien
caaaagaccagtgatgattttcacc

SEQ ID NO: 733436 - DNA, 25 bp, Homo sapien
tctaggtatacctcaaactccaaaa

SEQ ID NO: 733437 - DNA, 25 bp, Homo sapien
acagctctggcttgttcctcactac

SEQ ID NO: 733438 - DNA, 25 bp, Homo sapien
tgatgttaaaatccacctcagttaa

SEQ ID NO: 733439 - DNA, 25 bp, Homo sapien
gaagtggcattgcatccctgagttg

SEQ ID NO: 733440 - DNA, 25 bp, Homo sapien
cagactcttttgtttacgtgtagcc

SEQ ID NO: 733441 - DNA, 25 bp, Homo sapien
ccccacaccaagttgagggaatgag

SEQ ID NO: 733442 - DNA, 25 bp, Homo sapien
tccacccttgagtctctgaccattt

SEQ ID NO: 733443 - DNA, 25 bp, Homo sapien
ccacccttgagtctctgaccatttc

SEQ ID NO: 733444 - DNA, 25 bp, Homo sapien
tttccacccttgagtctctgaccat

SEQ ID NO: 733445 - DNA, 25 bp, Homo sapien
ttccacccttgagtctctgaccatt

SEQ ID NO: 733446 - DNA, 25 bp, Homo sapien
acagcaaccaacttctaatcatccc

SEQ ID NO: 733447 - DNA, 25 bp, Homo sapien
aaccaacttctaatcatccctttgc

SEQ ID NO: 733448 - DNA, 25 bp, Homo sapien
atagcgctgggattatatcagcact

SEQ ID NO: 733449 - DNA, 25 bp, Homo sapien
cttctaatcatccctttgctgttct

SEQ ID NO: 733450 - DNA, 25 bp, Homo sapien
gctgcgcagaatgagatgagttgtc

SEQ ID NO: 733451 - DNA, 25 bp, Homo sapien
caggaactccttaaagctgcgcaga

SEQ ID NO: 733452 - DNA, 25 bp, Homo sapien
ctacatttgccgaagagccctcagg

SEQ ID NO: 733453 - DNA, 25 bp, Homo sapien
tgtgcctgcagcttcgtcagcaggc

SEQ ID NO: 733454 - DNA, 25 bp, Homo sapien
gcccagtggacaggtttctgaccag

SEQ ID NO: 733455 - DNA, 25 bp, Homo sapien
caacataagttctgtgcccagtgga

SEQ ID NO: 733456 - DNA, 25 bp, Homo sapien
acaacaacaatctgaggtgcccatg

SEQ ID NO: 733457 - DNA, 25 bp, Homo sapien
gatattcaaactgcatagccacttt

SEQ ID NO: 733458 - DNA, 25 bp, Homo sapien
cacaaatactttccactcagggttc

SEQ ID NO: 733459 - DNA, 25 bp, Homo sapien
cagggttcaactccaggttccattc

SEQ ID NO: 733460 - DNA, 25 bp, Homo sapien
tctgtaagcccaaggactcacaaat

SEQ ID NO: 733461 - DNA, 25 bp, Homo sapien
gtaatctcttctgtaagcccaagga

SEQ ID NO: 733462 - DNA, 25 bp, Homo sapien
tggaaagaagcctcccactccactg

SEQ ID NO: 733463 - DNA, 25 bp, Homo sapien
tctggaaagaagcctcccactccac

SEQ ID NO: 733464 - DNA, 25 bp, Homo sapien
cactccactgccagcacccaaagct

SEQ ID NO: 733465 - DNA, 25 bp, Homo sapien
ccactgccagcacccaaagctgaaa

SEQ ID NO: 733466 - DNA, 25 bp, Homo sapien
tcattgtatttcaactgtacgaacc

SEQ ID NO: 733467 - DNA, 25 bp, Homo sapien
tattctcgattaactccacaacccc

SEQ ID NO: 733468 - DNA, 25 bp, Homo sapien
ccccaaccatgaaaaatcatcattg

SEQ ID NO: 733469 - DNA, 25 bp, Homo sapien
caaccccccaaccatgaaaaatcat

SEQ ID NO: 733470 - DNA, 25 bp, Homo sapien
tgctaccctcaggactagatgctct

SEQ ID NO: 733471 - DNA, 25 bp, Homo sapien
gatgctctaaagatctccgggtagc

SEQ ID NO: 733472 - DNA, 25 bp, Homo sapien
gacaattcctgcattgtgcgggagc

SEQ ID NO: 733473 - DNA, 25 bp, Homo sapien
agaccatgcacctcgcttctgtggc

SEQ ID NO: 733474 - DNA, 25 bp, Homo sapien
tctcttttcaaggtgcccatctgta

SEQ ID NO: 733475 - DNA, 25 bp, Homo sapien
tgtcacgtacattacctcacagagg

SEQ ID NO: 733476 - DNA, 25 bp, Homo sapien
tctggtgggcctgcaaccagttctg

SEQ ID NO: 733477 - DNA, 25 bp, Homo sapien
tacagcttttttggccagtgcctgg

SEQ ID NO: 733478 - DNA, 25 bp, Homo sapien
gaggatggcaccagagaggaccatg

SEQ ID NO: 733479 - DNA, 25 bp, Homo sapien
tgatgctggcaagcaggtagtggtg

SEQ ID NO: 733480 - DNA, 25 bp, Homo sapien
ccatggcttggcagaacttgctgca

SEQ ID NO: 733481 - DNA, 25 bp, Homo sapien
gtgaacgcctaaggaggatggcacc

SEQ ID NO: 733482 - DNA, 25 bp, Homo sapien
cactgtggcacctcatcgcagggtg

SEQ ID NO: 733483 - DNA, 25 bp, Homo sapien
caagctggagttcttcatatcccca

SEQ ID NO: 733484 - DNA, 25 bp, Homo sapien
atcgtggccctcactctttcttggg

SEQ ID NO: 733485 - DNA, 25 bp, Homo sapien
agaaccatcattcctctgcatcgtg

SEQ ID NO: 733486 - DNA, 25 bp, Homo sapien
tcctcacgtcccagacaataggcgg

SEQ ID NO: 733487 - DNA, 25 bp, Homo sapien
tcacgtcccagacaataggcggcca

SEQ ID NO: 733488 - DNA, 25 bp, Homo sapien
acgtcccagacaataggcggccagg

SEQ ID NO: 733489 - DNA, 25 bp, Homo sapien
ctcacgtcccagacaataggcggcc

SEQ ID NO: 733490 - DNA, 25 bp, Homo sapien
tggattcattggcgaaaaggaaaaa

SEQ ID NO: 733491 - DNA, 25 bp, Homo sapien
ctggattcattggcgaaaaggaaaa

SEQ ID NO: 733492 - DNA, 25 bp, Homo sapien
cagatgtgccaccaaactgatgtag

SEQ ID NO: 733493 - DNA, 25 bp, Homo sapien
caaactgatgtagaagttttgctcc

SEQ ID NO: 733494 - DNA, 25 bp, Homo sapien
ccagatgtgccaccaaactgatgta

SEQ ID NO: 733495 - DNA, 25 bp, Homo sapien
cccagatgtgccaccaaactgatgt

SEQ ID NO: 733496 - DNA, 25 bp, Homo sapien
ttcacgaacatgtcagctcttcatg

SEQ ID NO: 733497 - DNA, 25 bp, Homo sapien
cttgatattcacgaacatgtcagct

SEQ ID NO: 733498 - DNA, 25 bp, Homo sapien
atattcacgaacatgtcagctcttc

SEQ ID NO: 733499 - DNA, 25 bp, Homo sapien
cacgaacatgtcagctcttcatgag

SEQ ID NO: 733500 - DNA, 25 bp, Homo sapien
cactgcacagggtgagaacttccca

SEQ ID NO: 733501 - DNA, 25 bp, Homo sapien
tcgagggtttcatctgggaccagca

SEQ ID NO: 733502 - DNA, 25 bp, Homo sapien
caaacgggcagttctccctgagggt

SEQ ID NO: 733503 - DNA, 25 bp, Homo sapien
gacccacctcgcagattgaatagca

SEQ ID NO: 733504 - DNA, 25 bp, Homo sapien
ggacatcattcagtcactagttgga

SEQ ID NO: 733505 - DNA, 25 bp, Homo sapien
tagcagagtggaacttgtactaact

SEQ ID NO: 733506 - DNA, 25 bp, Homo sapien
ttcacagacgcatctgtagcagagt

SEQ ID NO: 733507 - DNA, 25 bp, Homo sapien
gatgtgtgctctggctcggataaga

SEQ ID NO: 733508 - DNA, 25 bp, Homo sapien
atacattcataaagacaattatggc

SEQ ID NO: 733509 - DNA, 25 bp, Homo sapien
tacattcataaagacaattatggct

SEQ ID NO: 733510 - DNA, 25 bp, Homo sapien
acattcataaagacaattatggctt

SEQ ID NO: 733511 - DNA, 25 bp, Homo sapien
gctgtatcctggcaataagaaattg

SEQ ID NO: 733512 - DNA, 25 bp, Homo sapien
tgcttaagagttccaggctgtatcc

SEQ ID NO: 733513 - DNA, 25 bp, Homo sapien
gatgctttttgacgaatctcttctt

SEQ ID NO: 733514 - DNA, 25 bp, Homo sapien
gccttacacttggttggtgtcccag

SEQ ID NO: 733515 - DNA, 25 bp, Homo sapien
aaaaaagtctctcattaaccctgca

SEQ ID NO: 733516 - DNA, 25 bp, Homo sapien
taaccctgcaataacataatcctgc

SEQ ID NO: 733517 - DNA, 25 bp, Homo sapien
tttggccgtcacttatgttggcagg

SEQ ID NO: 733518 - DNA, 25 bp, Homo sapien
aaaagaaacacatctatttgaaggc

SEQ ID NO: 733519 - DNA, 25 bp, Homo sapien
agaatgatggccacggcccgcaaat

SEQ ID NO: 733520 - DNA, 25 bp, Homo sapien
tcttgcccccaaagcacgtctgtgt

SEQ ID NO: 733521 - DNA, 25 bp, Homo sapien
tggagtgctgcatgcttagaatgat

SEQ ID NO: 733522 - DNA, 25 bp, Homo sapien
taaaggatgtgaacattagcggagg

SEQ ID NO: 733523 - DNA, 25 bp, Homo sapien
gaacaattagtatgctcagcgatgc

SEQ ID NO: 733524 - DNA, 25 bp, Homo sapien
caccctgattaaacgttggaagcgg

SEQ ID NO: 733525 - DNA, 25 bp, Homo sapien
ttaggcgttcaacaccttgtcctgg

SEQ ID NO: 733526 - DNA, 25 bp, Homo sapien
ggccctgtgctgtaataacgctctg

SEQ ID NO: 733527 - DNA, 25 bp, Homo sapien
gagtcactatcttcccactgatgag

SEQ ID NO: 733528 - DNA, 25 bp, Homo sapien
taaactcgcttaccctgaggctgag

SEQ ID NO: 733529 - DNA, 25 bp, Homo sapien
gaggaaaatggtcaggagtcactat

SEQ ID NO: 733530 - DNA, 25 bp, Homo sapien
gtttctagttctgggcacttgctca

SEQ ID NO: 733531 - DNA, 25 bp, Homo sapien
ctcctctacttgaaaagcttcactg

SEQ ID NO: 733532 - DNA, 25 bp, Homo sapien
cctctacttgaaaagcttcactgat

SEQ ID NO: 733533 - DNA, 25 bp, Homo sapien
tcctctacttgaaaagcttcactga

SEQ ID NO: 733534 - DNA, 25 bp, Homo sapien
tctacttgaaaagcttcactgattc

SEQ ID NO: 733535 - DNA, 25 bp, Homo sapien
gtagatactaaaggttacatattca

SEQ ID NO: 733536 - DNA, 25 bp, Homo sapien
tctgtagatactaaaggttacatat

SEQ ID NO: 733537 - DNA, 25 bp, Homo sapien
gatactaaaggttacatattcaaat

SEQ ID NO: 733538 - DNA, 25 bp, Homo sapien
ctattctgtagatactaaaggttac

SEQ ID NO: 733539 - DNA, 25 bp, Homo sapien
aacgcacagtcataccataatcaag

SEQ ID NO: 733540 - DNA, 25 bp, Homo sapien
catcctgttaaggtttgacaaacgc

SEQ ID NO: 733541 - DNA, 25 bp, Homo sapien
tgtagaatcacactaacaattcctt

SEQ ID NO: 733542 - DNA, 25 bp, Homo sapien
gatgtgcggacattcaaagtccacc

SEQ ID NO: 733543 - DNA, 25 bp, Homo sapien
cagttcatgtagatagtgaccccaa

SEQ ID NO: 733544 - DNA, 25 bp, Homo sapien
gaactctgctcatacgggcaagatg

SEQ ID NO: 733545 - DNA, 25 bp, Homo sapien
agtattcggaatggcgcacggcaac

SEQ ID NO: 733546 - DNA, 25 bp, Homo sapien
tgagcgtgccaatacacaactgccg

SEQ ID NO: 733547 - DNA, 25 bp, Homo sapien
aaactggctccgacttacgtactga

SEQ ID NO: 733548 - DNA, 25 bp, Homo sapien
tacactgggtcttatttacgtcact

SEQ ID NO: 733549 - DNA, 25 bp, Homo sapien
gggatatggccattctcgaaatcaa

SEQ ID NO: 733550 - DNA, 25 bp, Homo sapien
caagtgctcaggaacaccatggagt

SEQ ID NO: 733551 - DNA, 25 bp, Homo sapien
gacaacttggctggagcctacagca

SEQ ID NO: 733552 - DNA, 25 bp, Homo sapien
acaacttggctggagcctacagcat

SEQ ID NO: 733553 - DNA, 25 bp, Homo sapien
aacttggctggagcctacagcatga

SEQ ID NO: 733554 - DNA, 25 bp, Homo sapien
caacttggctggagcctacagcatg

SEQ ID NO: 733555 - DNA, 25 bp, Homo sapien
tactcctcggctttaaagagcttag

SEQ ID NO: 733556 - DNA, 25 bp, Homo sapien
cggctttaaagagcttagaatgcac

SEQ ID NO: 733557 - DNA, 25 bp, Homo sapien
cctcggctttaaagagcttagaatg

SEQ ID NO: 733558 - DNA, 25 bp, Homo sapien
actcctcggctttaaagagcttaga

SEQ ID NO: 733559 - DNA, 25 bp, Homo sapien
tgttcacagaatgtgagcatggctt

SEQ ID NO: 733560 - DNA, 25 bp, Homo sapien
gcctttcgaacacatctctggctgt

SEQ ID NO: 733561 - DNA, 25 bp, Homo sapien
cccctggttttagcttgaaaatcag

SEQ ID NO: 733562 - DNA, 25 bp, Homo sapien
tagttatgcagacaccttctgttcc

SEQ ID NO: 733563 - DNA, 25 bp, Homo sapien
tagtggctaccccattggactgcag

SEQ ID NO: 733564 - DNA, 25 bp, Homo sapien
tacaacattcggctctattcccaga

SEQ ID NO: 733565 - DNA, 25 bp, Homo sapien
cagtaacatggcagggcacttgtcc

SEQ ID NO: 733566 - DNA, 25 bp, Homo sapien
cacccttcagcacatgtcaacttgg

SEQ ID NO: 733567 - DNA, 25 bp, Homo sapien
caggtgggaaattcgctttaggcca

SEQ ID NO: 733568 - DNA, 25 bp, Homo sapien
gaagcaagaggattgactgctcaga

SEQ ID NO: 733569 - DNA, 25 bp, Homo sapien
gaaatggatgcttctgactctcaca

SEQ ID NO: 733570 - DNA, 25 bp, Homo sapien
tggtggctctcatgagtgttgctgt

SEQ ID NO: 733571 - DNA, 25 bp, Homo sapien
tagtgagacatagagaaccttaggc

SEQ ID NO: 733572 - DNA, 25 bp, Homo sapien
ccttaggcctgagtggtgaaatgga

SEQ ID NO: 733573 - DNA, 25 bp, Homo sapien
tgctccaaataattgttgtctgaac

SEQ ID NO: 733574 - DNA, 25 bp, Homo sapien
aataattgttgtctgaactctgcca

SEQ ID NO: 733575 - DNA, 25 bp, Homo sapien
tcgttcatacttggcagcaagaaca

SEQ ID NO: 733576 - DNA, 25 bp, Homo sapien
tctgccatcaaccatgtgtcgttca

SEQ ID NO: 733577 - DNA, 25 bp, Homo sapien
tttcaaagggataaacatgggtctg

SEQ ID NO: 733578 - DNA, 25 bp, Homo sapien
catgggtctggttctcttttagcaa

SEQ ID NO: 733579 - DNA, 25 bp, Homo sapien
catttaggctgtctaatgctctgca

SEQ ID NO: 733580 - DNA, 25 bp, Homo sapien
tatggcttggtcacaactggagtca

SEQ ID NO: 733581 - DNA, 25 bp, Homo sapien
gaaagagccaacactgcatactgac

SEQ ID NO: 733582 - DNA, 25 bp, Homo sapien
cagggctgccttatacacaggttgt

SEQ ID NO: 733583 - DNA, 25 bp, Homo sapien
ggccttgccagtagatatgacctca

SEQ ID NO: 733584 - DNA, 25 bp, Homo sapien
tcagaaattcccaagcagtatagtg

SEQ ID NO: 733585 - DNA, 25 bp, Homo sapien
gatcgtgagctgacgggtgacaaca

SEQ ID NO: 733586 - DNA, 25 bp, Homo sapien
cctccttcggtaggtggcctgctgt

SEQ ID NO: 733587 - DNA, 25 bp, Homo sapien
tggtgaccaccctagtggccttggc

SEQ ID NO: 733588 - DNA, 25 bp, Homo sapien
taccgccctgggtactgatcctcta

SEQ ID NO: 733589 - DNA, 25 bp, Homo sapien
ttgccgtggggcaacttcctgccat

SEQ ID NO: 733590 - DNA, 25 bp, Homo sapien
tttgccgtggggcaacttcctgcca

SEQ ID NO: 733591 - DNA, 25 bp, Homo sapien
cttggccctcagattttgccgtggg

SEQ ID NO: 733592 - DNA, 25 bp, Homo sapien
cttcttggccctcagattttgccgt

SEQ ID NO: 733593 - DNA, 25 bp, Homo sapien
aagctgaaagccttgttgctgtttt

SEQ ID NO: 733594 - DNA, 25 bp, Homo sapien
agctgaaagccttgttgctgttttt

SEQ ID NO: 733595 - DNA, 25 bp, Homo sapien
ctagattcaggacgacccaagaaag

SEQ ID NO: 733596 - DNA, 25 bp, Homo sapien
aacacagacgtggcacccacttcat

SEQ ID NO: 733597 - DNA, 25 bp, Homo sapien
tcatccccagtacaccttaggtatg

SEQ ID NO: 733598 - DNA, 25 bp, Homo sapien
gatcttgggggccaacacagacgtg

SEQ ID NO: 733599 - DNA, 25 bp, Homo sapien
cagtacaccttaggtatgtgacttt

SEQ ID NO: 733600 - DNA, 25 bp, Homo sapien
agttgctttagcaatgtcatcacca

SEQ ID NO: 733601 - DNA, 25 bp, Homo sapien
cagttgctttagcaatgtcatcacc

SEQ ID NO: 733602 - DNA, 25 bp, Homo sapien
gttgctttagcaatgtcatcaccaa

SEQ ID NO: 733603 - DNA, 25 bp, Homo sapien
ttgctttagcaatgtcatcaccaac

SEQ ID NO: 733604 - DNA, 25 bp, Homo sapien
actgtaatcctcagatcctttcagt

SEQ ID NO: 733605 - DNA, 25 bp, Homo sapien
ctgtaatcctcagatcctttcagtc

SEQ ID NO: 733606 - DNA, 25 bp, Homo sapien
gcagaggcagaagtcaccacctcaa

SEQ ID NO: 733607 - DNA, 25 bp, Homo sapien
gggcagaggcagaagtcaccacctc

SEQ ID NO: 733608 - DNA, 25 bp, Homo sapien
agtcaccacctcaatctgggcctct

SEQ ID NO: 733609 - DNA, 25 bp, Homo sapien
gaggcagaagtcaccacctcaatct

SEQ ID NO: 733610 - DNA, 25 bp, Homo sapien
tcggtgccacatgtgttgagcaaca

SEQ ID NO: 733611 - DNA, 25 bp, Homo sapien
atcggtgccacatgtgttgagcaac

SEQ ID NO: 733612 - DNA, 25 bp, Homo sapien
cggtgccacatgtgttgagcaacat

SEQ ID NO: 733613 - DNA, 25 bp, Homo sapien
aatgatcctttattgaaatattttc

SEQ ID NO: 733614 - DNA, 25 bp, Homo sapien
atgatcctttattgaaatattttcc

SEQ ID NO: 733615 - DNA, 25 bp, Homo sapien
attgaaatattttcctttgtgcttc

SEQ ID NO: 733616 - DNA, 25 bp, Homo sapien
tttattgaaatattttcctttgtgc

SEQ ID NO: 733617 - DNA, 25 bp, Homo sapien
caatccctcaggagtcgtagaatag

SEQ ID NO: 733618 - DNA, 25 bp, Homo sapien
cgggctagcagcgtgtaacctgcat

SEQ ID NO: 733619 - DNA, 25 bp, Homo sapien
aagaggcgggctagcagcgtgtaac

SEQ ID NO: 733620 - DNA, 25 bp, Homo sapien
acaatccctcaggagtcgtagaata

SEQ ID NO: 733621 - DNA, 25 bp, Homo sapien
tgatgggtactttaagcattgtaga

SEQ ID NO: 733622 - DNA, 25 bp, Homo sapien
aatgtataatagtgtcctcccagtc

SEQ ID NO: 733623 - DNA, 25 bp, Homo sapien
tacagagaacagatgtactctgaga

SEQ ID NO: 733624 - DNA, 25 bp, Homo sapien
taaggcaggttaacatttgcgttta

SEQ ID NO: 733625 - DNA, 25 bp, Homo sapien
catggtgggaagcaaaaagctactt

SEQ ID NO: 733626 - DNA, 25 bp, Homo sapien
gtgtcaacaaccagtctaagaagga

SEQ ID NO: 733627 - DNA, 25 bp, Homo sapien
tctttaccctaagcaaacgtgtata

SEQ ID NO: 733628 - DNA, 25 bp, Homo sapien
tcctcagaaggtaaccatggtggga

SEQ ID NO: 733629 - DNA, 25 bp, Homo sapien
tcagcctacccaacacatggaaagt

SEQ ID NO: 733630 - DNA, 25 bp, Homo sapien
gaatctatgattgctagtctggtac

SEQ ID NO: 733631 - DNA, 25 bp, Homo sapien
tgccttaacttacatgcccagtgtt

SEQ ID NO: 733632 - DNA, 25 bp, Homo sapien
taaagggccggatgcgatagctcat

SEQ ID NO: 733633 - DNA, 25 bp, Homo sapien
tgcatgggttctaaccctaacttaa

SEQ ID NO: 733634 - DNA, 25 bp, Homo sapien
ccactttggtagtgtgtgatcttgg

SEQ ID NO: 733635 - DNA, 25 bp, Homo sapien
aattgggctgcatgggttctaaccc

SEQ ID NO: 733636 - DNA, 25 bp, Homo sapien
aacttaaccactttggtagtgtgtg

SEQ ID NO: 733637 - DNA, 25 bp, Homo sapien
ctggatacagacacccgataaggca

SEQ ID NO: 733638 - DNA, 25 bp, Homo sapien
cattagctgggtcagcgtttatcct

SEQ ID NO: 733639 - DNA, 25 bp, Homo sapien
cagcgtttatccttgctctgcttcc

SEQ ID NO: 733640 - DNA, 25 bp, Homo sapien
agacacccgataaggcattagctgg

SEQ ID NO: 733641 - DNA, 25 bp, Homo sapien
ccagggcgtccggcaacggataact

SEQ ID NO: 733642 - DNA, 25 bp, Homo sapien
cagggcgtccggcaacggataactt

SEQ ID NO: 733643 - DNA, 25 bp, Homo sapien
tccagccgagagacccacgccgggc

SEQ ID NO: 733644 - DNA, 25 bp, Homo sapien
cgagagacccacgccgggcccccag

SEQ ID NO: 733645 - DNA, 25 bp, Homo sapien
agagcagcctccgtcgctgtcgctg

SEQ ID NO: 733646 - DNA, 25 bp, Homo sapien
gtcgctgagagcctcacgagtcgag

SEQ ID NO: 733647 - DNA, 25 bp, Homo sapien
ctcacgagtcgaggtcctgcaggtg

SEQ ID NO: 733648 - DNA, 25 bp, Homo sapien
cgggacccgttctgctaggaagaag

SEQ ID NO: 733649 - DNA, 25 bp, Homo sapien
gcgcctcatggctccgccccaggcc

SEQ ID NO: 733650 - DNA, 25 bp, Homo sapien
cagaagaagattctcattggtggag

SEQ ID NO: 733651 - DNA, 25 bp, Homo sapien
cggcgataggctgaactggcgtggg

SEQ ID NO: 733652 - DNA, 25 bp, Homo sapien
ccgccccggaggacggcgataggct

SEQ ID NO: 733653 - DNA, 25 bp, Homo sapien
tatataatatttgaactaggccggg

SEQ ID NO: 733654 - DNA, 25 bp, Homo sapien
gctgattgtcatcgcctagcggcca

SEQ ID NO: 733655 - DNA, 25 bp, Homo sapien
caatgggacttgacggcagaattca

SEQ ID NO: 733656 - DNA, 25 bp, Homo sapien
caggttcaggtgttctcgggttcca

SEQ ID NO: 733657 - DNA, 25 bp, Homo sapien
gaacacttgccagatagtgaccatg

SEQ ID NO: 733658 - DNA, 25 bp, Homo sapien
tacgtcttgacgctacctaatggct

SEQ ID NO: 733659 - DNA, 25 bp, Homo sapien
gaactggagcaattcagtgcagctg

SEQ ID NO: 733660 - DNA, 25 bp, Homo sapien
cacaaaatgcaattggtccagcttc

SEQ ID NO: 733661 - DNA, 25 bp, Homo sapien
tcccctcttggttaggatgcacagg

SEQ ID NO: 733662 - DNA, 25 bp, Homo sapien
cccattggccgctgttgcgtctttg

SEQ ID NO: 733663 - DNA, 25 bp, Homo sapien
tgcacaggaaggcaattcagagcct

SEQ ID NO: 733664 - DNA, 25 bp, Homo sapien
tttggacaaaactctgacagatggg

SEQ ID NO: 733665 - DNA, 25 bp, Homo sapien
actaggctattcatccgaataagga

SEQ ID NO: 733666 - DNA, 25 bp, Homo sapien
cacataggctgccaacactaggcta

SEQ ID NO: 733667 - DNA, 25 bp, Homo sapien
gccaacactaggctattcatccgaa

SEQ ID NO: 733668 - DNA, 25 bp, Homo sapien
tttcctctgcaggcacacataggct

SEQ ID NO: 733669 - DNA, 25 bp, Homo sapien
gcaactgctttgaagggagcattct

SEQ ID NO: 733670 - DNA, 25 bp, Homo sapien
taccccttcatcatgggagcacggt

SEQ ID NO: 733671 - DNA, 25 bp, Homo sapien
gggaaccatggcctttgttgttatg

SEQ ID NO: 733672 - DNA, 25 bp, Homo sapien
ctctgtgggtgctggtaccccttca

SEQ ID NO: 733673 - DNA, 25 bp, Homo sapien
aatttctgctggagactaccgccat

SEQ ID NO: 733674 - DNA, 25 bp, Homo sapien
gaacatgaaattgggacgtccccga

SEQ ID NO: 733675 - DNA, 25 bp, Homo sapien
atgtgtgtattagatttgaggtgtc

SEQ ID NO: 733676 - DNA, 25 bp, Homo sapien
aaaggaaatggacccagaatatgaa

SEQ ID NO: 733677 - DNA, 25 bp, Homo sapien
tgagagattatcagattcgaggact

SEQ ID NO: 733678 - DNA, 25 bp, Homo sapien
ttcgaggactgaattggttgatctc

SEQ ID NO: 733679 - DNA, 25 bp, Homo sapien
tgtctgagagtcggaaaacatctaa

SEQ ID NO: 733680 - DNA, 25 bp, Homo sapien
tatatgaaaatggagtcaatggcat

SEQ ID NO: 733681 - DNA, 25 bp, Homo sapien
ccgaccgagcaaagagatttgaatt

SEQ ID NO: 733682 - DNA, 25 bp, Homo sapien
ctaccgccataggcgcacagagcaa

SEQ ID NO: 733683 - DNA, 25 bp, Homo sapien
agaagatgaagagctactgtctgag

SEQ ID NO: 733684 - DNA, 25 bp, Homo sapien
tctatcgaccaaacacggcgatcgg

SEQ ID NO: 733685 - DNA, 25 bp, Homo sapien
agggagcgacgctaccaactgggct

SEQ ID NO: 733686 - DNA, 25 bp, Homo sapien
tggctcggccactgccgaaagacaa

SEQ ID NO: 733687 - DNA, 25 bp, Homo sapien
cccttagaaacgctcagggagcgac

SEQ ID NO: 733688 - DNA, 25 bp, Homo sapien
gagcagcaagtttcttctcggtctt

SEQ ID NO: 733689 - DNA, 25 bp, Homo sapien
catgaaacccgccaacaatttagct

SEQ ID NO: 733690 - DNA, 25 bp, Homo sapien
ttcttcccgagcagcaagtttcttc

SEQ ID NO: 733691 - DNA, 25 bp, Homo sapien
cgcatgttattcatgacgcccatga

SEQ ID NO: 733692 - DNA, 25 bp, Homo sapien
cctcggcagacgagaagcacttttg

SEQ ID NO: 733693 - DNA, 25 bp, Homo sapien
ggagtctgacttgggagctacatcc

SEQ ID NO: 733694 - DNA, 25 bp, Homo sapien
gagaattgttttacgcgcccctcta

SEQ ID NO: 733695 - DNA, 25 bp, Homo sapien
cctctaccaactgcggaatcgctcg

SEQ ID NO: 733696 - DNA, 25 bp, Homo sapien
taaattagcacgaacaggaggactc

SEQ ID NO: 733697 - DNA, 25 bp, Homo sapien
tgccaacgggtttcttcacacaaga

SEQ ID NO: 733698 - DNA, 25 bp, Homo sapien
gatctcacggcaccttaaaacggct

SEQ ID NO: 733699 - DNA, 25 bp, Homo sapien
tcttaataacagaggcgcacagtgc

SEQ ID NO: 733700 - DNA, 25 bp, Homo sapien
taagccctggttaactatgttcaac

SEQ ID NO: 733701 - DNA, 25 bp, Homo sapien
caggcattcacagtacttcagcaca

SEQ ID NO: 733702 - DNA, 25 bp, Homo sapien
caggcaatagctaaatgcaccagca

SEQ ID NO: 733703 - DNA, 25 bp, Homo sapien
gagggaacctaatgagtcttcaacg

SEQ ID NO: 733704 - DNA, 25 bp, Homo sapien
taggtctccaactcagagcctctga

SEQ ID NO: 733705 - DNA, 25 bp, Homo sapien
ttatcattgcaaccccagaatctag

SEQ ID NO: 733706 - DNA, 25 bp, Homo sapien
gcaggtctctagctacttcgccagt

SEQ ID NO: 733707 - DNA, 25 bp, Homo sapien
tgaagctatgcatgggcaggtctct

SEQ ID NO: 733708 - DNA, 25 bp, Homo sapien
tggcattgagtataaatccctgagc

SEQ ID NO: 733709 - DNA, 25 bp, Homo sapien
cagattgtagattcaactacagctg

SEQ ID NO: 733710 - DNA, 25 bp, Homo sapien
ttgtagattcaactacagctgggtg

SEQ ID NO: 733711 - DNA, 25 bp, Homo sapien
tcaaattggcattgagtataaatcc

SEQ ID NO: 733712 - DNA, 25 bp, Homo sapien
tttagatttatgtggcttgtcaaga

SEQ ID NO: 733713 - DNA, 25 bp, Homo sapien
ctttagatttatgtggcttgtcaag

SEQ ID NO: 733714 - DNA, 25 bp, Homo sapien
gctctggaaatcttagccaaattag

SEQ ID NO: 733715 - DNA, 25 bp, Homo sapien
tcactacattccgtataagtacaac

SEQ ID NO: 733716 - DNA, 25 bp, Homo sapien
caaaccaggtatacaaatccttgtc

SEQ ID NO: 733717 - DNA, 25 bp, Homo sapien
tcagtcttgaaacaaggtatatggg

SEQ ID NO: 733718 - DNA, 25 bp, Homo sapien
cagagaggagatgaactaaatgtcc

SEQ ID NO: 733719 - DNA, 25 bp, Homo sapien
gaaagtagcattcacagatctaact

SEQ ID NO: 733720 - DNA, 25 bp, Homo sapien
catttctcatggtaagcttttctgg

SEQ ID NO: 733721 - DNA, 25 bp, Homo sapien
caatgacatcatggcagtgcccctg

SEQ ID NO: 733722 - DNA, 25 bp, Homo sapien
ggctgcagcaagaacaacacgatga

SEQ ID NO: 733723 - DNA, 25 bp, Homo sapien
cacgatgagcaggtatctttctttc

SEQ ID NO: 733724 - DNA, 25 bp, Homo sapien
gaacaacacgatgagcaggtatctt

SEQ ID NO: 733725 - DNA, 25 bp, Homo sapien
gactggctgcagcaagaacaacacg

SEQ ID NO: 733726 - DNA, 25 bp, Homo sapien
tcaaaggactttgattcaagcatgt

SEQ ID NO: 733727 - DNA, 25 bp, Homo sapien
caaaggactttgattcaagcatgtt

SEQ ID NO: 733728 - DNA, 25 bp, Homo sapien
cttcaaaggactttgattcaagcat

SEQ ID NO: 733729 - DNA, 25 bp, Homo sapien
aaggactttgattcaagcatgttag

SEQ ID NO: 733730 - DNA, 25 bp, Homo sapien
ctagcagtataagcaaattccacca

SEQ ID NO: 733731 - DNA, 25 bp, Homo sapien
ttcaataatatcaggttcagcatct

SEQ ID NO: 733732 - DNA, 25 bp, Homo sapien
agtataagcaaattccaccagttgt

SEQ ID NO: 733733 - DNA, 25 bp, Homo sapien
ccagttgttcaataatatcaggttc

SEQ ID NO: 733734 - DNA, 25 bp, Homo sapien
ggaatgtatcctaatagcccctgaa

SEQ ID NO: 733735 - DNA, 25 bp, Homo sapien
caatgctttgccatggtagatacca

SEQ ID NO: 733736 - DNA, 25 bp, Homo sapien
ggcataggatactgaaactcttcca

SEQ ID NO: 733737 - DNA, 25 bp, Homo sapien
cagtccttgaattagtatggcatag

SEQ ID NO: 733738 - DNA, 25 bp, Homo sapien
aacattgttgctattcacggaaatt

SEQ ID NO: 733739 - DNA, 25 bp, Homo sapien
ctgaacattgttgctattcacggaa

SEQ ID NO: 733740 - DNA, 25 bp, Homo sapien
tcacaggttcaatctgatattggtt

SEQ ID NO: 733741 - DNA, 25 bp, Homo sapien
tgaacattgttgctattcacggaaa

SEQ ID NO: 733742 - DNA, 25 bp, Homo sapien
caaaatggctatagcagtccctcag

SEQ ID NO: 733743 - DNA, 25 bp, Homo sapien
gaaaacgttctagtggacaatgtct

SEQ ID NO: 733744 - DNA, 25 bp, Homo sapien
gctgctgcccaggttaatatgcatc

SEQ ID NO: 733745 - DNA, 25 bp, Homo sapien
taaatgcggatacttaaaatcagcc

SEQ ID NO: 733746 - DNA, 25 bp, Homo sapien
ctggaaggctctgatcaactttttc

SEQ ID NO: 733747 - DNA, 25 bp, Homo sapien
ctctggaaggctctgatcaactttt

SEQ ID NO: 733748 - DNA, 25 bp, Homo sapien
acactctggaaggctctgatcaact

SEQ ID NO: 733749 - DNA, 25 bp, Homo sapien
cacagtgaaaagcataccacactct

SEQ ID NO: 733750 - DNA, 25 bp, Homo sapien
tcttggaacgtatcctgcagataag

SEQ ID NO: 733751 - DNA, 25 bp, Homo sapien
gataagggtgggctactgcacaaac

SEQ ID NO: 733752 - DNA, 25 bp, Homo sapien
catctggacgttcattcatgtgcca

SEQ ID NO: 733753 - DNA, 25 bp, Homo sapien
gggctactgcacaaacatctggacg

SEQ ID NO: 733754 - DNA, 25 bp, Homo sapien
ggtcaaatatcttagcactgactgg

SEQ ID NO: 733755 - DNA, 25 bp, Homo sapien
aaagtagggacagaggagacttgcc

SEQ ID NO: 733756 - DNA, 25 bp, Homo sapien
caggaaggagtactaaagtgtccgg

SEQ ID NO: 733757 - DNA, 25 bp, Homo sapien
gcatcttcaggagccctttgcatca

SEQ ID NO: 733758 - DNA, 25 bp, Homo sapien
gagtgaagccccaattacggcccaa

SEQ ID NO: 733759 - DNA, 25 bp, Homo sapien
tacggcccaaagagatggaaggact

SEQ ID NO: 733760 - DNA, 25 bp, Homo sapien
tcttttcaatatgtagacccatggc

SEQ ID NO: 733761 - DNA, 25 bp, Homo sapien
gtacaggtaggattagagattggcc

SEQ ID NO: 733762 - DNA, 25 bp, Homo sapien
ggaggaaatttagagtgctagggag

SEQ ID NO: 733763 - DNA, 25 bp, Homo sapien
gaaatttagagtgctagggagttat

SEQ ID NO: 733764 - DNA, 25 bp, Homo sapien
aatttagagtgctagggagttatag

SEQ ID NO: 733765 - DNA, 25 bp, Homo sapien
aggaaatttagagtgctagggagtt

SEQ ID NO: 733766 - DNA, 25 bp, Homo sapien
tagcatgttgtcctggagcagtccc

SEQ ID NO: 733767 - DNA, 25 bp, Homo sapien
catgcagtagctgcggagatgcccc

SEQ ID NO: 733768 - DNA, 25 bp, Homo sapien
cagccgagtcgtaacatcatttggg

SEQ ID NO: 733769 - DNA, 25 bp, Homo sapien
cctccaagggcacatacaagttaat

SEQ ID NO: 733770 - DNA, 25 bp, Homo sapien
gagaggcttcccagtcagatcagca

SEQ ID NO: 733771 - DNA, 25 bp, Homo sapien
tctgggactggctccataagtcttc

SEQ ID NO: 733772 - DNA, 25 bp, Homo sapien
gaattcaatgtagtcgactcggcca

SEQ ID NO: 733773 - DNA, 25 bp, Homo sapien
tattctcaggccgaatgagaggctt

SEQ ID NO: 733774 - DNA, 25 bp, Homo sapien
gacaccaatgatgtttttgaattgc

SEQ ID NO: 733775 - DNA, 25 bp, Homo sapien
tttgaattgcacactgctagaagat

SEQ ID NO: 733776 - DNA, 25 bp, Homo sapien
tcagtacctgattcatctggcacat

SEQ ID NO: 733777 - DNA, 25 bp, Homo sapien
gctagaagataactggataaaacac

SEQ ID NO: 733778 - DNA, 25 bp, Homo sapien
tataaatcatatccctcagcacata

SEQ ID NO: 733779 - DNA, 25 bp, Homo sapien
gaaactggcaagtagatcttaaaac

SEQ ID NO: 733780 - DNA, 25 bp, Homo sapien
ggtgcaagaacttatccaagaactt

SEQ ID NO: 733781 - DNA, 25 bp, Homo sapien
tatcgaggcagatcatatgtttgga

SEQ ID NO: 733782 - DNA, 25 bp, Homo sapien
ggttggcagcgaacactaccaggta

SEQ ID NO: 733783 - DNA, 25 bp, Homo sapien
gataggttggcagcgaacactacca

SEQ ID NO: 733784 - DNA, 25 bp, Homo sapien
cccttaagataggttggcagcgaac

SEQ ID NO: 733785 - DNA, 25 bp, Homo sapien
ggcagcgaacactaccaggtatcaa

SEQ ID NO: 733786 - DNA, 25 bp, Homo sapien
gaagacagtcgagttttatctccac

SEQ ID NO: 733787 - DNA, 25 bp, Homo sapien
catttgatttagcatcaagtaaaag

SEQ ID NO: 733788 - DNA, 25 bp, Homo sapien
taataacagctgtacaaggtcttgt

SEQ ID NO: 733789 - DNA, 25 bp, Homo sapien
ccacgtcacagtacataagcatgca

SEQ ID NO: 733790 - DNA, 25 bp, Homo sapien
cctggaatggtagtcgggagattga

SEQ ID NO: 733791 - DNA, 25 bp, Homo sapien
tcatcttctacatctactcatcttt

SEQ ID NO: 733792 - DNA, 25 bp, Homo sapien
actcatcttctacatctactcatct

SEQ ID NO: 733793 - DNA, 25 bp, Homo sapien
gaggcctggaatggtagtcgggaga

SEQ ID NO: 733794 - DNA, 25 bp, Homo sapien
aagccagtgagacatcagggcagca

SEQ ID NO: 733795 - DNA, 25 bp, Homo sapien
tgtgaaggaccaaagacaaatagcc

SEQ ID NO: 733796 - DNA, 25 bp, Homo sapien
taagggcattatatggctggagact

SEQ ID NO: 733797 - DNA, 25 bp, Homo sapien
taatacatgtttagcaggtcacaac

SEQ ID NO: 733798 - DNA, 25 bp, Homo sapien
atgttgctattatggtaaccctacc

SEQ ID NO: 733799 - DNA, 25 bp, Homo sapien
cctaccccaggagaatgagctggca

SEQ ID NO: 733800 - DNA, 25 bp, Homo sapien
tacacgtatatacaagcccacactt

SEQ ID NO: 733801 - DNA, 25 bp, Homo sapien
tgatagaattaacccacaaagcctt

SEQ ID NO: 733802 - DNA, 25 bp, Homo sapien
gaagaaacattacagagttcccatg

SEQ ID NO: 733803 - DNA, 25 bp, Homo sapien
tttaaagtaaatcctagctggtcac

SEQ ID NO: 733804 - DNA, 25 bp, Homo sapien
ccctgttgtcaccacacatgcataa

SEQ ID NO: 733805 - DNA, 25 bp, Homo sapien
cattgaaatgattgaaccattgtgt

SEQ ID NO: 733806 - DNA, 25 bp, Homo sapien
tgtaaaatttactaaccaatgccat

SEQ ID NO: 733807 - DNA, 25 bp, Homo sapien
accaatgccatgacatgtttgatgc

SEQ ID NO: 733808 - DNA, 25 bp, Homo sapien
ttgtaaaatttactaaccaatgcca

SEQ ID NO: 733809 - DNA, 25 bp, Homo sapien
gtaaaatttactaaccaatgccatg

SEQ ID NO: 733810 - DNA, 25 bp, Homo sapien
ttcaagatgaagcatgacttcagga

SEQ ID NO: 733811 - DNA, 25 bp, Homo sapien
tacattcaagatgaagcatgacttc

SEQ ID NO: 733812 - DNA, 25 bp, Homo sapien
cattcaagatgaagcatgacttcag

SEQ ID NO: 733813 - DNA, 25 bp, Homo sapien
attcaagatgaagcatgacttcagg

SEQ ID NO: 733814 - DNA, 25 bp, Homo sapien
cagtaaagtgctgatgaataaagtc

SEQ ID NO: 733815 - DNA, 25 bp, Homo sapien
tgtgttactcgcttgacatcaagtt

SEQ ID NO: 733816 - DNA, 25 bp, Homo sapien
tcctggttgagaagatgtgttactc

SEQ ID NO: 733817 - DNA, 25 bp, Homo sapien
ctgcagttgctttcaattcaggaca

SEQ ID NO: 733818 - DNA, 25 bp, Homo sapien
tttattaagaaaaatgtgagaaggc

SEQ ID NO: 733819 - DNA, 25 bp, Homo sapien
ttaagaaaaatgtgagaaggcaatt

SEQ ID NO: 733820 - DNA, 25 bp, Homo sapien
gaaaaatgtgagaaggcaatttagt

SEQ ID NO: 733821 - DNA, 25 bp, Homo sapien
tattaagaaaaatgtgagaaggcaa

SEQ ID NO: 733822 - DNA, 25 bp, Homo sapien
tcaaccataaatggctggcgattag

SEQ ID NO: 733823 - DNA, 25 bp, Homo sapien
ccatcttaaggcattcaggattgtc

SEQ ID NO: 733824 - DNA, 25 bp, Homo sapien
aagaggaaacctgactttagcaagg

SEQ ID NO: 733825 - DNA, 25 bp, Homo sapien
gtatttcaaccacctgactgcagca

SEQ ID NO: 733826 - DNA, 25 bp, Homo sapien
cactagaaacaaaagcgcatgaaag

SEQ ID NO: 733827 - DNA, 25 bp, Homo sapien
ggctactgagtctaatccattctaa

SEQ ID NO: 733828 - DNA, 25 bp, Homo sapien
caagggattaactatctagaagagc

SEQ ID NO: 733829 - DNA, 25 bp, Homo sapien
ggttgggacttagccagcaagcaag

SEQ ID NO: 733830 - DNA, 25 bp, Homo sapien
tgtaggagacaggattcgtctttgg

SEQ ID NO: 733831 - DNA, 25 bp, Homo sapien
cactgtaggagacaggattcgtctt

SEQ ID NO: 733832 - DNA, 25 bp, Homo sapien
aggagacaggattcgtctttggaaa

SEQ ID NO: 733833 - DNA, 25 bp, Homo sapien
tgtaccactgtaggagacaggattc

SEQ ID NO: 733834 - DNA, 25 bp, Homo sapien
tctactctggaaaggcaacaaagtc

SEQ ID NO: 733835 - DNA, 25 bp, Homo sapien
gcaacaaagtccggtggtaggaaga

SEQ ID NO: 733836 - DNA, 25 bp, Homo sapien
gcctttccccagtttagctctgccc

SEQ ID NO: 733837 - DNA, 25 bp, Homo sapien
gaagcctttccccagtttagctctg

SEQ ID NO: 733838 - DNA, 25 bp, Homo sapien
attgatacctgggacctaccacaga

SEQ ID NO: 733839 - DNA, 25 bp, Homo sapien
attagaatcacctagaaaatctctg

SEQ ID NO: 733840 - DNA, 25 bp, Homo sapien
tctctaggtagtgtttaggaattgg

SEQ ID NO: 733841 - DNA, 25 bp, Homo sapien
aaatgtggttcaaagaccacctgct

SEQ ID NO: 733842 - DNA, 25 bp, Homo sapien
gagacagtagatggtacctcattcc

SEQ ID NO: 733843 - DNA, 25 bp, Homo sapien
ctggagacagtagatggtacctcat

SEQ ID NO: 733844 - DNA, 25 bp, Homo sapien
ggagacagtagatggtacctcattc

SEQ ID NO: 733845 - DNA, 25 bp, Homo sapien
tggagacagtagatggtacctcatt

SEQ ID NO: 733846 - DNA, 25 bp, Homo sapien
aaatatctacaagactgtggttgag

SEQ ID NO: 733847 - DNA, 25 bp, Homo sapien
tagggctatgcggtagtcatgtttc

SEQ ID NO: 733848 - DNA, 25 bp, Homo sapien
gagcctccaaatagggctatgcggt

SEQ ID NO: 733849 - DNA, 25 bp, Homo sapien
caagactgtggttgagagcctccaa

SEQ ID NO: 733850 - DNA, 25 bp, Homo sapien
aggatgtggtatttgctcttcccca

SEQ ID NO: 733851 - DNA, 25 bp, Homo sapien
aaaatatggtattctttctcccaca

SEQ ID NO: 733852 - DNA, 25 bp, Homo sapien
gggtgttatcctttaggatgtggta

SEQ ID NO: 733853 - DNA, 25 bp, Homo sapien
tcttccccagcaatacatgtagtac

SEQ ID NO: 733854 - DNA, 25 bp, Homo sapien
aaggatgtaggcttgaaataatgct

SEQ ID NO: 733855 - DNA, 25 bp, Homo sapien
aagcctaaggtcagtttttatcaag

SEQ ID NO: 733856 - DNA, 25 bp, Homo sapien
gggcagttgctagtggtttatccag

SEQ ID NO: 733857 - DNA, 25 bp, Homo sapien
aataatgctctggtctcatcaggta

SEQ ID NO: 733858 - DNA, 25 bp, Homo sapien
tacagcatgttggaagaaccccttg

SEQ ID NO: 733859 - DNA, 25 bp, Homo sapien
gacatttcagacatgcactgccatg

SEQ ID NO: 733860 - DNA, 25 bp, Homo sapien
gaaatgttgcttgacaggacagaag

SEQ ID NO: 733861 - DNA, 25 bp, Homo sapien
gatgttcttaggtctagagcagagg

SEQ ID NO: 733862 - DNA, 25 bp, Homo sapien
caaggtcacatactggtctcctgtg

SEQ ID NO: 733863 - DNA, 25 bp, Homo sapien
tgttgatgcgcgtaatgctaaccat

SEQ ID NO: 733864 - DNA, 25 bp, Homo sapien
ctcctgtgttgatgcgcgtaatgct

SEQ ID NO: 733865 - DNA, 25 bp, Homo sapien
aggtcacatactggtctcctgtgtt

SEQ ID NO: 733866 - DNA, 25 bp, Homo sapien
ttcaatatagcaacccaagacttct

SEQ ID NO: 733867 - DNA, 25 bp, Homo sapien
gggaagaggcagctcaataggcttt

SEQ ID NO: 733868 - DNA, 25 bp, Homo sapien
gacattaccatgttacagactgaga

SEQ ID NO: 733869 - DNA, 25 bp, Homo sapien
cagactgagaacaccaatactagga

SEQ ID NO: 733870 - DNA, 25 bp, Homo sapien
gaggaggaatccaaataaaaactga

SEQ ID NO: 733871 - DNA, 25 bp, Homo sapien
ggtagttccatgaatagggtgccac

SEQ ID NO: 733872 - DNA, 25 bp, Homo sapien
tgttggcagggaatatgcagagtcc

SEQ ID NO: 733873 - DNA, 25 bp, Homo sapien
tccaccgtatgaagccaagatcctt

SEQ ID NO: 733874 - DNA, 25 bp, Homo sapien
tagtaatttacaggctctggccctc

SEQ ID NO: 733875 - DNA, 25 bp, Homo sapien
tccaggcttgatgactgaacactcc

SEQ ID NO: 733876 - DNA, 25 bp, Homo sapien
aagtccaggcttgatgactgaacac

SEQ ID NO: 733877 - DNA, 25 bp, Homo sapien
tgaagtccaggcttgatgactgaac

SEQ ID NO: 733878 - DNA, 25 bp, Homo sapien
cacttgaagtccaggcttgatgact

SEQ ID NO: 733879 - DNA, 25 bp, Homo sapien
tgggcattaccctagtgatgaaact

SEQ ID NO: 733880 - DNA, 25 bp, Homo sapien
gaaggcagtgctatttattgctccc

SEQ ID NO: 733881 - DNA, 25 bp, Homo sapien
taacagtagagtcacagatgggacg

SEQ ID NO: 733882 - DNA, 25 bp, Homo sapien
tgatgaaactagttccaacctgggc

SEQ ID NO: 733883 - DNA, 25 bp, Homo sapien
tttaggtgaccaggaaaatagagcc

SEQ ID NO: 733884 - DNA, 25 bp, Homo sapien
tatgatcgtatccagtgtttcaggc

SEQ ID NO: 733885 - DNA, 25 bp, Homo sapien
cgtaggttactcagtggtgggcaca

SEQ ID NO: 733886 - DNA, 25 bp, Homo sapien
gaacatcaggaatggtctcttagga

SEQ ID NO: 733887 - DNA, 25 bp, Homo sapien
tgtgccgcccttccatgtatgtgca

SEQ ID NO: 733888 - DNA, 25 bp, Homo sapien
gcatcgaagaatgcttgtgccgccc

SEQ ID NO: 733889 - DNA, 25 bp, Homo sapien
tacttgacagtaagggctgttcaca

SEQ ID NO: 733890 - DNA, 25 bp, Homo sapien
cactatgtttgatagcatcgaagaa

SEQ ID NO: 733891 - DNA, 25 bp, Homo sapien
ctgtagcagaaaaggatgggaagct

SEQ ID NO: 733892 - DNA, 25 bp, Homo sapien
tagcagaaaaggatgggaagctttc

SEQ ID NO: 733893 - DNA, 25 bp, Homo sapien
aaaaggatgggaagctttcagtaag

SEQ ID NO: 733894 - DNA, 25 bp, Homo sapien
gatgggaagctttcagtaaggaaaa

SEQ ID NO: 733895 - DNA, 25 bp, Homo sapien
tcgtttttcaaaggggcagcggatg

SEQ ID NO: 733896 - DNA, 25 bp, Homo sapien
ttttcaaaggggcagcggatgtctg

SEQ ID NO: 733897 - DNA, 25 bp, Homo sapien
gtttttcaaaggggcagcggatgtc

SEQ ID NO: 733898 - DNA, 25 bp, Homo sapien
ttcaaaggggcagcggatgtctgtc

SEQ ID NO: 733899 - DNA, 25 bp, Homo sapien
ggaggacccagtttcgaataccagc

SEQ ID NO: 733900 - DNA, 25 bp, Homo sapien
ctgtctcgaggtgtcggaggaccca

SEQ ID NO: 733901 - DNA, 25 bp, Homo sapien
cattgtcccaaaacacgcatgctgc

SEQ ID NO: 733902 - DNA, 25 bp, Homo sapien
tctgcagcacatgcagcaaggctgt

SEQ ID NO: 733903 - DNA, 25 bp, Homo sapien
cagttctcgtatcatagcactcaaa

SEQ ID NO: 733904 - DNA, 25 bp, Homo sapien
tcacaggaattaagcactctcccag

SEQ ID NO: 733905 - DNA, 25 bp, Homo sapien
aaacatagattaggccattggcttc

SEQ ID NO: 733906 - DNA, 25 bp, Homo sapien
tgcagcgctgggtcagcatgctggg

SEQ ID NO: 733907 - DNA, 25 bp, Homo sapien
tagaatacagttaactgtaaaataa

SEQ ID NO: 733908 - DNA, 25 bp, Homo sapien
atagaatacagttaactgtaaaata

SEQ ID NO: 733909 - DNA, 25 bp, Homo sapien
tatgggaagtaaggtagaggttcac

SEQ ID NO: 733910 - DNA, 25 bp, Homo sapien
gaagctgcagaactcctttatattt

SEQ ID NO: 733911 - DNA, 25 bp, Homo sapien
tacattgatagtgcctgaataaaga

SEQ ID NO: 733912 - DNA, 25 bp, Homo sapien
cactttttgagcctagggtttatgg

SEQ ID NO: 733913 - DNA, 25 bp, Homo sapien
ggtctattattctaattaagtgctc

SEQ ID NO: 733914 - DNA, 25 bp, Homo sapien
gtacatatacgcacaaaatgtctag

SEQ ID NO: 733915 - DNA, 25 bp, Homo sapien
ttttagtgtgcttgtttacaggaag

SEQ ID NO: 733916 - DNA, 25 bp, Homo sapien
ctcatactaatgagaaaggtctatt

SEQ ID NO: 733917 - DNA, 25 bp, Homo sapien
tcttcctggcttcaatcattggaca

SEQ ID NO: 733918 - DNA, 25 bp, Homo sapien
tatcttgtcttttacaaataccagc

SEQ ID NO: 733919 - DNA, 25 bp, Homo sapien
tttacaaataccagcccatgattct

SEQ ID NO: 733920 - DNA, 25 bp, Homo sapien
ttcctggcttcaatcattggacaca

SEQ ID NO: 733921 - DNA, 25 bp, Homo sapien
gacataaactatagagccaactgct

SEQ ID NO: 733922 - DNA, 25 bp, Homo sapien
caagggtctcttcatttgctccaca

SEQ ID NO: 733923 - DNA, 25 bp, Homo sapien
catggcattggtgagaccatcttcc

SEQ ID NO: 733924 - DNA, 25 bp, Homo sapien
gagaatgtgtcctaatcgaccaaca

SEQ ID NO: 733925 - DNA, 25 bp, Homo sapien
gatgagccaatcttctattctgcca

SEQ ID NO: 733926 - DNA, 25 bp, Homo sapien
caaactgtgagactaagctgctcca

SEQ ID NO: 733927 - DNA, 25 bp, Homo sapien
tgagcacaaacagacctaaccgtat

SEQ ID NO: 733928 - DNA, 25 bp, Homo sapien
gatactgcgcttcactgatgagcca

SEQ ID NO: 733929 - DNA, 25 bp, Homo sapien
tgtgacagctttacatgtttcattc

SEQ ID NO: 733930 - DNA, 25 bp, Homo sapien
tgaaaaaggcaaagtattactagga

SEQ ID NO: 733931 - DNA, 25 bp, Homo sapien
tgacagctttacatgtttcattcca

SEQ ID NO: 733932 - DNA, 25 bp, Homo sapien
gtattactaggaaggaaatgagtag

SEQ ID NO: 733933 - DNA, 25 bp, Homo sapien
gctggaccacaaagtcacaagtata

SEQ ID NO: 733934 - DNA, 25 bp, Homo sapien
gaaaatgtgcttgtcagtatggtga

SEQ ID NO: 733935 - DNA, 25 bp, Homo sapien
tagtcaattgacatagcctaaaagg

SEQ ID NO: 733936 - DNA, 25 bp, Homo sapien
tacaggacagggagttttgggcaac

SEQ ID NO: 733937 - DNA, 25 bp, Homo sapien
taaccagtattgctttgtagccact

SEQ ID NO: 733938 - DNA, 25 bp, Homo sapien
caccttgtgttaaccagtattgctt

SEQ ID NO: 733939 - DNA, 25 bp, Homo sapien
tgtgttaaccagtattgctttgtag

SEQ ID NO: 733940 - DNA, 25 bp, Homo sapien
gtattgctttgtagccactgacttc

SEQ ID NO: 733941 - DNA, 25 bp, Homo sapien
caataggacttgagaagagcggacc

SEQ ID NO: 733942 - DNA, 25 bp, Homo sapien
gagcggaccgctctgacgctttgag

SEQ ID NO: 733943 - DNA, 25 bp, Homo sapien
tggacttgagccaataggacttgag

SEQ ID NO: 733944 - DNA, 25 bp, Homo sapien
cagtgccatgagacgcatggacttg

SEQ ID NO: 733945 - DNA, 25 bp, Homo sapien
cggccgggctactgtgacgtcatct

SEQ ID NO: 733946 - DNA, 25 bp, Homo sapien
acgtcatcttctcgcgcctgggaag

SEQ ID NO: 733947 - DNA, 25 bp, Homo sapien
agagagccctaaggcaacctcggcg

SEQ ID NO: 733948 - DNA, 25 bp, Homo sapien
gatgcctgttactgggcagagagcc

SEQ ID NO: 733949 - DNA, 25 bp, Homo sapien
tgcgacggcgtcgctgacggagggc

SEQ ID NO: 733950 - DNA, 25 bp, Homo sapien
acggcgtcgctgacggagggcgtct

SEQ ID NO: 733951 - DNA, 25 bp, Homo sapien
cggcgtcgctgacggagggcgtctt

SEQ ID NO: 733952 - DNA, 25 bp, Homo sapien
cgacggcgtcgctgacggagggcgt

SEQ ID NO: 733953 - DNA, 25 bp, Homo sapien
ggatgttcgttccagcaccgatctc

SEQ ID NO: 733954 - DNA, 25 bp, Homo sapien
tgcacccctagcaccgggatgttcg

SEQ ID NO: 733955 - DNA, 25 bp, Homo sapien
tccaaagcggcaccggccttgaagg

SEQ ID NO: 733956 - DNA, 25 bp, Homo sapien
agcggcaccggccttgaaggaagaa

SEQ ID NO: 733957 - DNA, 25 bp, Homo sapien
ctacaaggtagtttcgataggtact

SEQ ID NO: 733958 - DNA, 25 bp, Homo sapien
taaaaacgttgtgcagggcccagta

SEQ ID NO: 733959 - DNA, 25 bp, Homo sapien
aaaactcagtttcgcacaagcatcc

SEQ ID NO: 733960 - DNA, 25 bp, Homo sapien
agctcaataaaaacggaccacatga

SEQ ID NO: 733961 - DNA, 25 bp, Homo sapien
aattatattcaattccggcatttac

SEQ ID NO: 733962 - DNA, 25 bp, Homo sapien
gagaaactggatggctggatgacat

SEQ ID NO: 733963 - DNA, 25 bp, Homo sapien
gttgtattccatccacgtctattat

SEQ ID NO: 733964 - DNA, 25 bp, Homo sapien
ggttctcagacaatccaaagccttc

SEQ ID NO: 733965 - DNA, 25 bp, Homo sapien
tcaggactaagtgaagcaaatgggt

SEQ ID NO: 733966 - DNA, 25 bp, Homo sapien
tttcactggtgaataaacagaaaac

SEQ ID NO: 733967 - DNA, 25 bp, Homo sapien
tattaggtttctttttcactggtga

SEQ ID NO: 733968 - DNA, 25 bp, Homo sapien
gaaaacatccactgccctgatgatt

SEQ ID NO: 733969 - DNA, 25 bp, Homo sapien
tgatgattcccaaacctccatatct

SEQ ID NO: 733970 - DNA, 25 bp, Homo sapien
ttaaaaatgcacaatttttcagtta

SEQ ID NO: 733971 - DNA, 25 bp, Homo sapien
tagaaaataatagttttagaacata

SEQ ID NO: 733972 - DNA, 25 bp, Homo sapien
ttagaacatactttaaaaatgcaca

SEQ ID NO: 733973 - DNA, 25 bp, Homo sapien
tactttaaaaatgcacaatttttca

SEQ ID NO: 733974 - DNA, 25 bp, Homo sapien
ttgtagctaagttggtagttgattt

SEQ ID NO: 733975 - DNA, 25 bp, Homo sapien
tagctaagttggtagttgatttctt

SEQ ID NO: 733976 - DNA, 25 bp, Homo sapien
tgtagctaagttggtagttgatttc

SEQ ID NO: 733977 - DNA, 25 bp, Homo sapien
gctaagttggtagttgatttcttta

SEQ ID NO: 733978 - DNA, 25 bp, Homo sapien
gacaggcaggatgactcttctattc

SEQ ID NO: 733979 - DNA, 25 bp, Homo sapien
gcagccaaggccttaatgacaggca

SEQ ID NO: 733980 - DNA, 25 bp, Homo sapien
tacagggaatcaagaacgtagagtc

SEQ ID NO: 733981 - DNA, 25 bp, Homo sapien
gaagctaagaggttccaaagttgta

SEQ ID NO: 733982 - DNA, 25 bp, Homo sapien
cagagtgggcttgggaaagcccggt

SEQ ID NO: 733983 - DNA, 25 bp, Homo sapien
tcccatttgcaaggtacccactgtt

SEQ ID NO: 733984 - DNA, 25 bp, Homo sapien
gcccggtggtctaggtttcagccca

SEQ ID NO: 733985 - DNA, 25 bp, Homo sapien
gtggtctaggtttcagcccagaaag

SEQ ID NO: 733986 - DNA, 25 bp, Homo sapien
accactgctttagggcaacaggcat

SEQ ID NO: 733987 - DNA, 25 bp, Homo sapien
gcctcagggataaagttgccagact

SEQ ID NO: 733988 - DNA, 25 bp, Homo sapien
gaactcaggcaactcctaaaagggc

SEQ ID NO: 733989 - DNA, 25 bp, Homo sapien
caacaggcattaggttcaatttgga

SEQ ID NO: 733990 - DNA, 25 bp, Homo sapien
cacacagacacgtattggaaaagga

SEQ ID NO: 733991 - DNA, 25 bp, Homo sapien
gaaaaaagtggctagctcagtccaa

SEQ ID NO: 733992 - DNA, 25 bp, Homo sapien
gcgtgtggccctcacatttgtgaat

SEQ ID NO: 733993 - DNA, 25 bp, Homo sapien
tgagaagccatcatgctcacgatga

SEQ ID NO: 733994 - DNA, 25 bp, Homo sapien
taatacaatggatgcctaaggacag

SEQ ID NO: 733995 - DNA, 25 bp, Homo sapien
gacagaagtactcaaacttttggtc

SEQ ID NO: 733996 - DNA, 25 bp, Homo sapien
ttacatatgtatgggcaaggacttc

SEQ ID NO: 733997 - DNA, 25 bp, Homo sapien
tggtctcagtactcctttacattct

SEQ ID NO: 733998 - DNA, 25 bp, Homo sapien
gattccttctaatgacttgtcttcc

SEQ ID NO: 733999 - DNA, 25 bp, Homo sapien
tgcttcagagtaaaggaaagactaa

SEQ ID NO: 734000 - DNA, 25 bp, Homo sapien
ctaaagcaaaagctgtaacttgttt

SEQ ID NO: 734001 - DNA, 25 bp, Homo sapien
tgtactttccaagttttctaaagca

SEQ ID NO: 734002 - DNA, 25 bp, Homo sapien
tttctaaagcaaaagctgtaacttg

SEQ ID NO: 734003 - DNA, 25 bp, Homo sapien
tgccgccttgacttcctaggctcca

SEQ ID NO: 734004 - DNA, 25 bp, Homo sapien
caaatggtacactaggaaaattgca

SEQ ID NO: 734005 - DNA, 25 bp, Homo sapien
tgaagtgaggaatcaatcggaatct

SEQ ID NO: 734006 - DNA, 25 bp, Homo sapien
aattctgccagaaactatactaagc

SEQ ID NO: 734007 - DNA, 25 bp, Homo sapien
gataagtggcgtagaatgaacaaca

SEQ ID NO: 734008 - DNA, 25 bp, Homo sapien
actctgtaagttattgctggttaag

SEQ ID NO: 734009 - DNA, 25 bp, Homo sapien
gttattgctggttaagaagttatgg

SEQ ID NO: 734010 - DNA, 25 bp, Homo sapien
aagttatggtattcaagcctcaatt

SEQ ID NO: 734011 - DNA, 25 bp, Homo sapien
tattcaagcctcaattcctctggtg

SEQ ID NO: 734012 - DNA, 25 bp, Homo sapien
tgtttttctagcattcatcactgga

SEQ ID NO: 734013 - DNA, 25 bp, Homo sapien
caagccacgataaagaaagcagtaa

SEQ ID NO: 734014 - DNA, 25 bp, Homo sapien
ggattggtacctaacagatgttcaa

SEQ ID NO: 734015 - DNA, 25 bp, Homo sapien
tagacctcatcggttttgccaaaac

SEQ ID NO: 734016 - DNA, 25 bp, Homo sapien
cctggcagcacgtagttagttatat

SEQ ID NO: 734017 - DNA, 25 bp, Homo sapien
ttggatgggcggtgaatacatgtac

SEQ ID NO: 734018 - DNA, 25 bp, Homo sapien
ggttagtatcacaagtacctggcag

SEQ ID NO: 734019 - DNA, 25 bp, Homo sapien
tatggcccatgacttgcaaaatttg

SEQ ID NO: 734020 - DNA, 25 bp, Homo sapien
tgttcctccattgatttattaaacg

SEQ ID NO: 734021 - DNA, 25 bp, Homo sapien
cattgatttattaaacgttggacag

SEQ ID NO: 734022 - DNA, 25 bp, Homo sapien
tgatttattaaacgttggacagaat

SEQ ID NO: 734023 - DNA, 25 bp, Homo sapien
cctccattgatttattaaacgttgg

SEQ ID NO: 734024 - DNA, 25 bp, Homo sapien
cctctgcaaaaaagcaataggtaag

SEQ ID NO: 734025 - DNA, 25 bp, Homo sapien
gcaaaaaagcaataggtaagacact

SEQ ID NO: 734026 - DNA, 25 bp, Homo sapien
aaagcaataggtaagacacttccct

SEQ ID NO: 734027 - DNA, 25 bp, Homo sapien
taggtaagacacttccctcaagaaa

SEQ ID NO: 734028 - DNA, 25 bp, Homo sapien
cacagtcgggaccatagatctttgg

SEQ ID NO: 734029 - DNA, 25 bp, Homo sapien
gatctttggagacaggtgggtatat

SEQ ID NO: 734030 - DNA, 25 bp, Homo sapien
gacaggtgggtatatatcttccaaa

SEQ ID NO: 734031 - DNA, 25 bp, Homo sapien
cagtcgggaccatagatctttggag

SEQ ID NO: 734032 - DNA, 25 bp, Homo sapien
taagtcagctatgggtgggttgtcc

SEQ ID NO: 734033 - DNA, 25 bp, Homo sapien
taaagaaggcatgaactcctgatac

SEQ ID NO: 734034 - DNA, 25 bp, Homo sapien
gcacaagagtctagttattcaggaa

SEQ ID NO: 734035 - DNA, 25 bp, Homo sapien
gggactgtcaaccattcactaagtg

SEQ ID NO: 734036 - DNA, 25 bp, Homo sapien
gatctgcatttatcaagaaatctag

SEQ ID NO: 734037 - DNA, 25 bp, Homo sapien
ggaaaatgcccataatatgatgttg

SEQ ID NO: 734038 - DNA, 25 bp, Homo sapien
ataaagtgcttgatgaatagtgctc

SEQ ID NO: 734039 - DNA, 25 bp, Homo sapien
tcagtgtctataagggtagatctgc

SEQ ID NO: 734040 - DNA, 25 bp, Homo sapien
ctgcttgatttactccatcctttac

SEQ ID NO: 734041 - DNA, 25 bp, Homo sapien
gctgcttgatttactccatccttta

SEQ ID NO: 734042 - DNA, 25 bp, Homo sapien
tgcttgatttactccatcctttaca

SEQ ID NO: 734043 - DNA, 25 bp, Homo sapien
tgagaagcttactggacggacgaga

SEQ ID NO: 734044 - DNA, 25 bp, Homo sapien
tgatcgaccttcacccaaggagaaa

SEQ ID NO: 734045 - DNA, 25 bp, Homo sapien
cagggactagggaatagactttcac

SEQ ID NO: 734046 - DNA, 25 bp, Homo sapien
tagaactacccactaaagcctgctg

SEQ ID NO: 734047 - DNA, 25 bp, Homo sapien
gacaggacctgttgccaaggaagct

SEQ ID NO: 734048 - DNA, 25 bp, Homo sapien
aaaaagcagtgtgagaatgtgagcc

SEQ ID NO: 734049 - DNA, 25 bp, Homo sapien
tgatgcagccgatgtgacttcaggc

SEQ ID NO: 734050 - DNA, 25 bp, Homo sapien
tagagatacctgaactggtagaggc

SEQ ID NO: 734051 - DNA, 25 bp, Homo sapien
tgatggaagcttatattccttatga

SEQ ID NO: 734052 - DNA, 25 bp, Homo sapien
aaaaaattcccttgcttgcagagtt

SEQ ID NO: 734053 - DNA, 25 bp, Homo sapien
tatgcatatatacatctctgtatga

SEQ ID NO: 734054 - DNA, 25 bp, Homo sapien
tatacatctctgtatgaatcactca

SEQ ID NO: 734055 - DNA, 25 bp, Homo sapien
gagttaccagttttcttgacttctg

SEQ ID NO: 734056 - DNA, 25 bp, Homo sapien
tgacttctgacaccagtatgtatgc

SEQ ID NO: 734057 - DNA, 25 bp, Homo sapien
tgattttctgaagccgcgatgcccc

SEQ ID NO: 734058 - DNA, 25 bp, Homo sapien
gcgatgccccttagcctaggtctgg

SEQ ID NO: 734059 - DNA, 25 bp, Homo sapien
ccagctgctgccacctcattgttac

SEQ ID NO: 734060 - DNA, 25 bp, Homo sapien
tatacccagctgctgccacctcatt

SEQ ID NO: 734061 - DNA, 25 bp, Homo sapien
ctttatacccagctgctgccacctc

SEQ ID NO: 734062 - DNA, 25 bp, Homo sapien
tacccagctgctgccacctcattgt

SEQ ID NO: 734063 - DNA, 25 bp, Homo sapien
cactatcgtgggaacagaatgaggg

SEQ ID NO: 734064 - DNA, 25 bp, Homo sapien
ctttccctaggtaaacactgttctg

SEQ ID NO: 734065 - DNA, 25 bp, Homo sapien
taggtaaacactgttctgaatttgg

SEQ ID NO: 734066 - DNA, 25 bp, Homo sapien
actcactatcgtgggaacagaatga

SEQ ID NO: 734067 - DNA, 25 bp, Homo sapien
tctgcgtctcttcgagctctttctg

SEQ ID NO: 734068 - DNA, 25 bp, Homo sapien
taaaggatactacaggagtggcaga

SEQ ID NO: 734069 - DNA, 25 bp, Homo sapien
tgcaggagtcacaaattgattcaaa

SEQ ID NO: 734070 - DNA, 25 bp, Homo sapien
gaagcttgacaaccacttaacctgt

SEQ ID NO: 734071 - DNA, 25 bp, Homo sapien
cggcttcgaggcctgcgcccggcca

SEQ ID NO: 734072 - DNA, 25 bp, Homo sapien
cacccggagacactgcgtctcggcg

SEQ ID NO: 734073 - DNA, 25 bp, Homo sapien
agacactgcgtctcggcggctcggc

SEQ ID NO: 734074 - DNA, 25 bp, Homo sapien
ggtttcgtcgaggccgggcaggatc

SEQ ID NO: 734075 - DNA, 25 bp, Homo sapien
actcggcaggtctcgtccagtggga

SEQ ID NO: 734076 - DNA, 25 bp, Homo sapien
tccgttgtcctgaggactcggcagg

SEQ ID NO: 734077 - DNA, 25 bp, Homo sapien
gccgagcttgcctgcgtcgcgagac

SEQ ID NO: 734078 - DNA, 25 bp, Homo sapien
tcgtccagtgggaacagagcggtca

SEQ ID NO: 734079 - DNA, 25 bp, Homo sapien
tctttccatctagctcatagaaggg

SEQ ID NO: 734080 - DNA, 25 bp, Homo sapien
cagcaagctctggtagaacgagacc

SEQ ID NO: 734081 - DNA, 25 bp, Homo sapien
tccaagaggccagacgtggcttgtc

SEQ ID NO: 734082 - DNA, 25 bp, Homo sapien
tttgtccactacgaacacagcagtc

SEQ ID NO: 734083 - DNA, 25 bp, Homo sapien
ggaaaagggatgaatgcccaccaga

SEQ ID NO: 734084 - DNA, 25 bp, Homo sapien
ctgcgaggaaaagggatgaatgccc

SEQ ID NO: 734085 - DNA, 25 bp, Homo sapien
gcgaggaaaagggatgaatgcccac

SEQ ID NO: 734086 - DNA, 25 bp, Homo sapien
gaggaaaagggatgaatgcccacca

SEQ ID NO: 734087 - DNA, 25 bp, Homo sapien
tgcagactgcccgtgcagtctgagc

SEQ ID NO: 734088 - DNA, 25 bp, Homo sapien
agactgcccgtgcagtctgagcgtg

SEQ ID NO: 734089 - DNA, 25 bp, Homo sapien
gacagttaactgcagactgcccgtg

SEQ ID NO: 734090 - DNA, 25 bp, Homo sapien
ttaactgcagactgcccgtgcagtc

SEQ ID NO: 734091 - DNA, 25 bp, Homo sapien
tggatcaggatatcagaagagcctc

SEQ ID NO: 734092 - DNA, 25 bp, Homo sapien
tactgtagggagttattggaaaggc

SEQ ID NO: 734093 - DNA, 25 bp, Homo sapien
tcacggttggatcaggatatcagaa

SEQ ID NO: 734094 - DNA, 25 bp, Homo sapien
ggttggatcaggatatcagaagagc

SEQ ID NO: 734095 - DNA, 25 bp, Homo sapien
atacacattgtgaggagctgtccct

SEQ ID NO: 734096 - DNA, 25 bp, Homo sapien
tcgtaggtcagttgcaatgagatgg

SEQ ID NO: 734097 - DNA, 25 bp, Homo sapien
tggaatgcactgagccagtcgtagg

SEQ ID NO: 734098 - DNA, 25 bp, Homo sapien
tggctcctacactttgcacggtggg

SEQ ID NO: 734099 - DNA, 25 bp, Homo sapien
gatgccagggttccagatgtcattt

SEQ ID NO: 734100 - DNA, 25 bp, Homo sapien
ttgatgccagggttccagatgtcat

SEQ ID NO: 734101 - DNA, 25 bp, Homo sapien
tccagacttccttgatgccagggtt

SEQ ID NO: 734102 - DNA, 25 bp, Homo sapien
tgatgccagggttccagatgtcatt

SEQ ID NO: 734103 - DNA, 25 bp, Homo sapien
aagggaacactgaacgtctatgggg

SEQ ID NO: 734104 - DNA, 25 bp, Homo sapien
ggcctgagcggaacatgtggcttct

SEQ ID NO: 734105 - DNA, 25 bp, Homo sapien
tggcttctgccgaaggaattgggtt

SEQ ID NO: 734106 - DNA, 25 bp, Homo sapien
cactgaacgtctatggggctgggcc

SEQ ID NO: 734107 - DNA, 25 bp, Homo sapien
ggggagacagatcccaccaaagtca

SEQ ID NO: 734108 - DNA, 25 bp, Homo sapien
gtggggagacagatcccaccaaagt

SEQ ID NO: 734109 - DNA, 25 bp, Homo sapien
agagtggggagacagatcccaccaa

SEQ ID NO: 734110 - DNA, 25 bp, Homo sapien
gggagacagatcccaccaaagtcac

SEQ ID NO: 734111 - DNA, 25 bp, Homo sapien
tcctcttggggaggactgcgtggat

SEQ ID NO: 734112 - DNA, 25 bp, Homo sapien
catggcccctacttcctccaagttc

SEQ ID NO: 734113 - DNA, 25 bp, Homo sapien
tcagggcttcccactatcattcttt

SEQ ID NO: 734114 - DNA, 25 bp, Homo sapien
tcccactatcattctttccaggaac

SEQ ID NO: 734115 - DNA, 25 bp, Homo sapien
gcttcccactatcattctttccagg

SEQ ID NO: 734116 - DNA, 25 bp, Homo sapien
gggcttcccactatcattctttcca

SEQ ID NO: 734117 - DNA, 25 bp, Homo sapien
ctcacggacgcaggcactcaaggtt

SEQ ID NO: 734118 - DNA, 25 bp, Homo sapien
ggacgcaggcactcaaggtttaact

SEQ ID NO: 734119 - DNA, 25 bp, Homo sapien
gctgaattctcacggacgcaggcac

SEQ ID NO: 734120 - DNA, 25 bp, Homo sapien
aattctcacggacgcaggcactcaa

SEQ ID NO: 734121 - DNA, 25 bp, Homo sapien
ccaggaaatagtagagacattccat

SEQ ID NO: 734122 - DNA, 25 bp, Homo sapien
tggcggcatcaagtggcaatcttgc

SEQ ID NO: 734123 - DNA, 25 bp, Homo sapien
gtttggcggcatcaagtggcaatct

SEQ ID NO: 734124 - DNA, 25 bp, Homo sapien
ggcatcaagtggcaatcttgcagcc

SEQ ID NO: 734125 - DNA, 25 bp, Homo sapien
ttcagtccaacctctagttcagagg

SEQ ID NO: 734126 - DNA, 25 bp, Homo sapien
caatggccagagaatgggttaaaca

SEQ ID NO: 734127 - DNA, 25 bp, Homo sapien
gatgagtgagccagagatgaaagct

SEQ ID NO: 734128 - DNA, 25 bp, Homo sapien
gaggcattttgctgtagtttcagcc

SEQ ID NO: 734129 - DNA, 25 bp, Homo sapien
tctgcggctctgaccagaagccgct

SEQ ID NO: 734130 - DNA, 25 bp, Homo sapien
tcctctcgcgaatctgcacactgct

SEQ ID NO: 734131 - DNA, 25 bp, Homo sapien
cacactgcttcagtggtctggaccc

SEQ ID NO: 734132 - DNA, 25 bp, Homo sapien
ggcccagggttacagcggctcagct

SEQ ID NO: 734133 - DNA, 25 bp, Homo sapien
tccacactttctccttccttcaggg

SEQ ID NO: 734134 - DNA, 25 bp, Homo sapien
tgtccacactttctccttccttcag

SEQ ID NO: 734135 - DNA, 25 bp, Homo sapien
gtccacactttctccttccttcagg

SEQ ID NO: 734136 - DNA, 25 bp, Homo sapien
cttgtccacactttctccttccttc

SEQ ID NO: 734137 - DNA, 25 bp, Homo sapien
ccaatggagggaagatagccttttc

SEQ ID NO: 734138 - DNA, 25 bp, Homo sapien
aggaccacgggcaagcactacagtg

SEQ ID NO: 734139 - DNA, 25 bp, Homo sapien
gacatgaacacaacccgtaacagga

SEQ ID NO: 734140 - DNA, 25 bp, Homo sapien
caaagatgcaaaaacaagccaatgg

SEQ ID NO: 734141 - DNA, 25 bp, Homo sapien
cttgaaagaaagttattgtttccag

SEQ ID NO: 734142 - DNA, 25 bp, Homo sapien
tgaaagaaagttattgtttccagga

SEQ ID NO: 734143 - DNA, 25 bp, Homo sapien
tattaaacaggatgtgtgacctcag

SEQ ID NO: 734144 - DNA, 25 bp, Homo sapien
catggaacatgttttctagccttgg

SEQ ID NO: 734145 - DNA, 25 bp, Homo sapien
tcctgtgattctatgagattgctcc

SEQ ID NO: 734146 - DNA, 25 bp, Homo sapien
gaaagagcagcaaagtcggagtcat

SEQ ID NO: 734147 - DNA, 25 bp, Homo sapien
attgttctcccattaatttctgtgg

SEQ ID NO: 734148 - DNA, 25 bp, Homo sapien
ggctatagactcttggaggagagaa

SEQ ID NO: 734149 - DNA, 25 bp, Homo sapien
tctcttaaatcctgggagagatcct

SEQ ID NO: 734150 - DNA, 25 bp, Homo sapien
tctgtggttctatgtcttggcctgg

SEQ ID NO: 734151 - DNA, 25 bp, Homo sapien
gtatcaatattcgaaacaaattcca

SEQ ID NO: 734152 - DNA, 25 bp, Homo sapien
ctgtatcaatattcgaaacaaattc

SEQ ID NO: 734153 - DNA, 25 bp, Homo sapien
tatcaatattcgaaacaaattccat

SEQ ID NO: 734154 - DNA, 25 bp, Homo sapien
tgtatcaatattcgaaacaaattcc

SEQ ID NO: 734155 - DNA, 25 bp, Homo sapien
taagcagaaggtctttcattgccca

SEQ ID NO: 734156 - DNA, 25 bp, Homo sapien
tctttcattgcccagcacatcatga

SEQ ID NO: 734157 - DNA, 25 bp, Homo sapien
ttcattgcccagcacatcatgaaat

SEQ ID NO: 734158 - DNA, 25 bp, Homo sapien
gtaagcagaaggtctttcattgccc

SEQ ID NO: 734159 - DNA, 25 bp, Homo sapien
acactgggtagagtttttcattcca

SEQ ID NO: 734160 - DNA, 25 bp, Homo sapien
cttccaggagtttttccacctcatg

SEQ ID NO: 734161 - DNA, 25 bp, Homo sapien
gtctccccgcttccacactgggtag

SEQ ID NO: 734162 - DNA, 25 bp, Homo sapien
ccatttaattgattgtgctccctca

SEQ ID NO: 734163 - DNA, 25 bp, Homo sapien
tccttttggcatctagggaatatca

SEQ ID NO: 734164 - DNA, 25 bp, Homo sapien
gttatatttgagcccacgagggctg

SEQ ID NO: 734165 - DNA, 25 bp, Homo sapien
tcaggttcaccgcaaatgttatatt

SEQ ID NO: 734166 - DNA, 25 bp, Homo sapien
gcagttcttctcatagactatgttg

SEQ ID NO: 734167 - DNA, 25 bp, Homo sapien
tacggatcagcagataaaccagcct

SEQ ID NO: 734168 - DNA, 25 bp, Homo sapien
tgctgtccagttgtaaacatacgga

SEQ ID NO: 734169 - DNA, 25 bp, Homo sapien
ttggccggtgccattttccccgtca

SEQ ID NO: 734170 - DNA, 25 bp, Homo sapien
catcagggaagacgttatgatggct

SEQ ID NO: 734171 - DNA, 25 bp, Homo sapien
tcaattatagagtaagaaaagagaa

SEQ ID NO: 734172 - DNA, 25 bp, Homo sapien
tatagagtaagaaaagagaaggttg

SEQ ID NO: 734173 - DNA, 25 bp, Homo sapien
tagagtaagaaaagagaaggttgaa

SEQ ID NO: 734174 - DNA, 25 bp, Homo sapien
attatagagtaagaaaagagaaggt

SEQ ID NO: 734175 - DNA, 25 bp, Homo sapien
cactgttcactcatgctaaggaaag

SEQ ID NO: 734176 - DNA, 25 bp, Homo sapien
tttaactcttcggtgtcctggagat

SEQ ID NO: 734177 - DNA, 25 bp, Homo sapien
agcagggtgactgttattaactctc

SEQ ID NO: 734178 - DNA, 25 bp, Homo sapien
tacacaatgaaatatcgtgcagcca

SEQ ID NO: 734179 - DNA, 25 bp, Homo sapien
cacttgtgcgatgggaacatatgcc

SEQ ID NO: 734180 - DNA, 25 bp, Homo sapien
tgaacatcgtcccaatttctggaaa

SEQ ID NO: 734181 - DNA, 25 bp, Homo sapien
catatgcccgtccatgtcttctgta

SEQ ID NO: 734182 - DNA, 25 bp, Homo sapien
cagtcacttccatgagttgaggccc

SEQ ID NO: 734183 - DNA, 25 bp, Homo sapien
gaaggttccattgagcacatacgtg

SEQ ID NO: 734184 - DNA, 25 bp, Homo sapien
aacaggccagtattatccccgaagc

SEQ ID NO: 734185 - DNA, 25 bp, Homo sapien
gctaggatcatgaatcaggacatca

SEQ ID NO: 734186 - DNA, 25 bp, Homo sapien
tccccgaagctccacttgtagttaa

SEQ ID NO: 734187 - DNA, 25 bp, Homo sapien
tggcggtggcggacaaggtcctggt

SEQ ID NO: 734188 - DNA, 25 bp, Homo sapien
ggtggcggtggcggacaaggtcctg

SEQ ID NO: 734189 - DNA, 25 bp, Homo sapien
cggtggcggacaaggtcctggtgct

SEQ ID NO: 734190 - DNA, 25 bp, Homo sapien
gcggtggcggacaaggtcctggtgc

SEQ ID NO: 734191 - DNA, 25 bp, Homo sapien
agggatttaataatatgacctgcgt

SEQ ID NO: 734192 - DNA, 25 bp, Homo sapien
ggagggatttaataatatgacctgc

SEQ ID NO: 734193 - DNA, 25 bp, Homo sapien
gggatttaataatatgacctgcgtg

SEQ ID NO: 734194 - DNA, 25 bp, Homo sapien
gagggatttaataatatgacctgcg

SEQ ID NO: 734195 - DNA, 25 bp, Homo sapien
gtcactgcagcttgctaacccagac

SEQ ID NO: 734196 - DNA, 25 bp, Homo sapien
gctaacccagacatactctcaagct

SEQ ID NO: 734197 - DNA, 25 bp, Homo sapien
ttctgttaatgccatcccgcctccc

SEQ ID NO: 734198 - DNA, 25 bp, Homo sapien
gaaattgctttcaagtacagctgtg

SEQ ID NO: 734199 - DNA, 25 bp, Homo sapien
tgtattaacagtggaaagatgtcta

SEQ ID NO: 734200 - DNA, 25 bp, Homo sapien
aaacaaaccttatgtgtatatatag

SEQ ID NO: 734201 - DNA, 25 bp, Homo sapien
gtgagatagacttatatgtattaac

SEQ ID NO: 734202 - DNA, 25 bp, Homo sapien
taaaacaatatgaatagccctcttg

SEQ ID NO: 734203 - DNA, 25 bp, Homo sapien
tagatcacctgtgctcaagagttgg

SEQ ID NO: 734204 - DNA, 25 bp, Homo sapien
gtgggtagatcacctgtgctcaaga

SEQ ID NO: 734205 - DNA, 25 bp, Homo sapien
gggtagatcacctgtgctcaagagt

SEQ ID NO: 734206 - DNA, 25 bp, Homo sapien
ggtagatcacctgtgctcaagagtt

SEQ ID NO: 734207 - DNA, 25 bp, Homo sapien
gaaatgctccctagaagagacccct

SEQ ID NO: 734208 - DNA, 25 bp, Homo sapien
cacctttagataaagccaggcagct

SEQ ID NO: 734209 - DNA, 25 bp, Homo sapien
ctttaatatggcctgtacagctgga

SEQ ID NO: 734210 - DNA, 25 bp, Homo sapien
tagcacacatgcatctgccctcaga

SEQ ID NO: 734211 - DNA, 25 bp, Homo sapien
ttatgtaaggaagcataatcccaca

SEQ ID NO: 734212 - DNA, 25 bp, Homo sapien
cagatgtgagagctataaggtatta

SEQ ID NO: 734213 - DNA, 25 bp, Homo sapien
taagacgttgaaactggccgggtgc

SEQ ID NO: 734214 - DNA, 25 bp, Homo sapien
gtgtcataatttacacagatgtgag

SEQ ID NO: 734215 - DNA, 25 bp, Homo sapien
ctggggtgtttgaatcataagattt

SEQ ID NO: 734216 - DNA, 25 bp, Homo sapien
gggtgtttgaatcataagattttag

SEQ ID NO: 734217 - DNA, 25 bp, Homo sapien
gaatcataagattttagagtagttg

SEQ ID NO: 734218 - DNA, 25 bp, Homo sapien
gtttgaatcataagattttagagta

SEQ ID NO: 734219 - DNA, 25 bp, Homo sapien
ctacaattgtgatggtggcttgaaa

SEQ ID NO: 734220 - DNA, 25 bp, Homo sapien
agttttcatcaggaatcctactcag

SEQ ID NO: 734221 - DNA, 25 bp, Homo sapien
tttcatcaggaatcctactcagctc

SEQ ID NO: 734222 - DNA, 25 bp, Homo sapien
atatctgttaatctggcagttttca

SEQ ID NO: 734223 - DNA, 25 bp, Homo sapien
ccttggcaggtcacgacaaagtcta

SEQ ID NO: 734224 - DNA, 25 bp, Homo sapien
caggtcacgacaaagtctattaggg

SEQ ID NO: 734225 - DNA, 25 bp, Homo sapien
ctcccttggcaggtcacgacaaagt

SEQ ID NO: 734226 - DNA, 25 bp, Homo sapien
cacgacaaagtctattagggagctt

SEQ ID NO: 734227 - DNA, 25 bp, Homo sapien
tgaaggttcgtctcacagtcagcag

SEQ ID NO: 734228 - DNA, 25 bp, Homo sapien
cagtacgtcccagacccattgaagg

SEQ ID NO: 734229 - DNA, 25 bp, Homo sapien
gaaatgatggtacagacctccgtgg

SEQ ID NO: 734230 - DNA, 25 bp, Homo sapien
cagaaatcagggtgctcgtgagagc

SEQ ID NO: 734231 - DNA, 25 bp, Homo sapien
gttggccatactccccgtgctcttt

SEQ ID NO: 734232 - DNA, 25 bp, Homo sapien
ccgtgctctttcagacctccgtgcc

SEQ ID NO: 734233 - DNA, 25 bp, Homo sapien
tcagacctccgtgcccccttacagg

SEQ ID NO: 734234 - DNA, 25 bp, Homo sapien
tccccgtgctctttcagacctccgt

SEQ ID NO: 734235 - DNA, 25 bp, Homo sapien
tagttatgtcttccacctagaggac

SEQ ID NO: 734236 - DNA, 25 bp, Homo sapien
acagaagcaagagcatgttagttat

SEQ ID NO: 734237 - DNA, 25 bp, Homo sapien
tcttccacctagaggacatgccgct

SEQ ID NO: 734238 - DNA, 25 bp, Homo sapien
gacatgccgcttataatgccattaa

SEQ ID NO: 734239 - DNA, 25 bp, Homo sapien
tgccatccttaaaggcgaggctggg

SEQ ID NO: 734240 - DNA, 25 bp, Homo sapien
accaagagggagatcacagtgacaa

SEQ ID NO: 734241 - DNA, 25 bp, Homo sapien
cacagtgacaaatatggccaagcag

SEQ ID NO: 734242 - DNA, 25 bp, Homo sapien
gcagccaacggagatcagggcactg

SEQ ID NO: 734243 - DNA, 25 bp, Homo sapien
cttgttcatgcaagaaatgtgcctg

SEQ ID NO: 734244 - DNA, 25 bp, Homo sapien
taacaggccagtttggtattcacca

SEQ ID NO: 734245 - DNA, 25 bp, Homo sapien
tagtgatataaagcgtaggaaccaa

SEQ ID NO: 734246 - DNA, 25 bp, Homo sapien
gcctatttacacagagatatattca

SEQ ID NO: 734247 - DNA, 25 bp, Homo sapien
caggcctttgcttctgaccacattc

SEQ ID NO: 734248 - DNA, 25 bp, Homo sapien
tttgagtagcggatccttttcctgg

SEQ ID NO: 734249 - DNA, 25 bp, Homo sapien
gttgagaaagacactcaggcctttg

SEQ ID NO: 734250 - DNA, 25 bp, Homo sapien
gaagaacacggcttttgcacggttg

SEQ ID NO: 734251 - DNA, 25 bp, Homo sapien
gatttcaaatatgtgcagcgactgt

SEQ ID NO: 734252 - DNA, 25 bp, Homo sapien
gccaagcaaagtaggttgtcaccaa

SEQ ID NO: 734253 - DNA, 25 bp, Homo sapien
tcaagttgccatgaaaaaccaggga

SEQ ID NO: 734254 - DNA, 25 bp, Homo sapien
tggaaagctgaaagtatcccgcctc

SEQ ID NO: 734255 - DNA, 25 bp, Homo sapien
aatatagggagaccctcatctaaaa

SEQ ID NO: 734256 - DNA, 25 bp, Homo sapien
caaaaactataaatgaaattgaggc

SEQ ID NO: 734257 - DNA, 25 bp, Homo sapien
gaaacaactgtaagtgaaattgaaa

SEQ ID NO: 734258 - DNA, 25 bp, Homo sapien
aattgaaaagcaaatgatgaatcag

SEQ ID NO: 734259 - DNA, 25 bp, Homo sapien
aacaggcaaactatgtcccatgggc

SEQ ID NO: 734260 - DNA, 25 bp, Homo sapien
agttgcgatcgagactgtgtggccc

SEQ ID NO: 734261 - DNA, 25 bp, Homo sapien
gatttagtacccagccctttatgga

SEQ ID NO: 734262 - DNA, 25 bp, Homo sapien
gagtccaggacaatcgcttatagaa

SEQ ID NO: 734263 - DNA, 25 bp, Homo sapien
catggccctacagtcatcacgtaaa

SEQ ID NO: 734264 - DNA, 25 bp, Homo sapien
tggccctacagtcatcacgtaaatg

SEQ ID NO: 734265 - DNA, 25 bp, Homo sapien
ggccctacagtcatcacgtaaatgg

SEQ ID NO: 734266 - DNA, 25 bp, Homo sapien
ccatggccctacagtcatcacgtaa

SEQ ID NO: 734267 - DNA, 25 bp, Homo sapien
cagttgtatcccaccctagttgtga

SEQ ID NO: 734268 - DNA, 25 bp, Homo sapien
tcttgtagattgtaggatgttgggc

SEQ ID NO: 734269 - DNA, 25 bp, Homo sapien
ttactggcctctaaccacgggatgc

SEQ ID NO: 734270 - DNA, 25 bp, Homo sapien
gatgttgggcaacattactggcctc

SEQ ID NO: 734271 - DNA, 25 bp, Homo sapien
tcctcaggcctcacatggagtacat

SEQ ID NO: 734272 - DNA, 25 bp, Homo sapien
tcaggaagggtcaaacaacttgccc

SEQ ID NO: 734273 - DNA, 25 bp, Homo sapien
tcattcgggcagatgcatgtgccgc

SEQ ID NO: 734274 - DNA, 25 bp, Homo sapien
gccaaggagggcagacatacccatt

SEQ ID NO: 734275 - DNA, 25 bp, Homo sapien
cattaatcaaattatctcactatct

SEQ ID NO: 734276 - DNA, 25 bp, Homo sapien
tctaacgctcaacaaacattaatca

SEQ ID NO: 734277 - DNA, 25 bp, Homo sapien
ctaacgctcaacaaacattaatcaa

SEQ ID NO: 734278 - DNA, 25 bp, Homo sapien
tcaaattatctcactatcttttagg

SEQ ID NO: 734279 - DNA, 25 bp, Homo sapien
tgcattgaacgtattgccctctaaa

SEQ ID NO: 734280 - DNA, 25 bp, Homo sapien
atgagtgcattgaacgtattgccct

SEQ ID NO: 734281 - DNA, 25 bp, Homo sapien
gtgcattgaacgtattgccctctaa

SEQ ID NO: 734282 - DNA, 25 bp, Homo sapien
gagtgcattgaacgtattgccctct

SEQ ID NO: 734283 - DNA, 25 bp, Homo sapien
agcagccttctgttaccaaagcaaa

SEQ ID NO: 734284 - DNA, 25 bp, Homo sapien
gaagcagccttctgttaccaaagca

SEQ ID NO: 734285 - DNA, 25 bp, Homo sapien
gcagccttctgttaccaaagcaaag

SEQ ID NO: 734286 - DNA, 25 bp, Homo sapien
ctgaagcagccttctgttaccaaag

SEQ ID NO: 734287 - DNA, 25 bp, Homo sapien
cctgcgatgagatgagctgttggct

SEQ ID NO: 734288 - DNA, 25 bp, Homo sapien
tcagggcaccgagcctgtggtttgc

SEQ ID NO: 734289 - DNA, 25 bp, Homo sapien
cagatgttctgtgtgggtttgccag

SEQ ID NO: 734290 - DNA, 25 bp, Homo sapien
ccataggaggttcccatgtgaggag

SEQ ID NO: 734291 - DNA, 25 bp, Homo sapien
aggagtaaggtactagctctctgca

SEQ ID NO: 734292 - DNA, 25 bp, Homo sapien
taggagtaaggtactagctctctgc

SEQ ID NO: 734293 - DNA, 25 bp, Homo sapien
cctaggagtaaggtactagctctct

SEQ ID NO: 734294 - DNA, 25 bp, Homo sapien
aacctaggagtaaggtactagctct

SEQ ID NO: 734295 - DNA, 25 bp, Homo sapien
tgggggtggtttgataatcactacc

SEQ ID NO: 734296 - DNA, 25 bp, Homo sapien
tgggcttggacattgttttcagaca

SEQ ID NO: 734297 - DNA, 25 bp, Homo sapien
gacattggttgcttagtaaaggcag

SEQ ID NO: 734298 - DNA, 25 bp, Homo sapien
cctttggggtactgagccagaggat

SEQ ID NO: 734299 - DNA, 25 bp, Homo sapien
agcagcagccttgcgtcggcgtcgc

SEQ ID NO: 734300 - DNA, 25 bp, Homo sapien
ccttgcgtcggcgtcgcgggtgggt

SEQ ID NO: 734301 - DNA, 25 bp, Homo sapien
ttgcgtcggcgtcgcgggtgggtgg

SEQ ID NO: 734302 - DNA, 25 bp, Homo sapien
gcagccttgcgtcggcgtcgcgggt

SEQ ID NO: 734303 - DNA, 25 bp, Homo sapien
gggcgagcagccgcgccacacggcc

SEQ ID NO: 734304 - DNA, 25 bp, Homo sapien
ggggcgagcagccgcgccacacggc

SEQ ID NO: 734305 - DNA, 25 bp, Homo sapien
tggggcgagcagccgcgccacacgg

SEQ ID NO: 734306 - DNA, 25 bp, Homo sapien
gtgcaggccgcggacaaagtttggg

SEQ ID NO: 734307 - DNA, 25 bp, Homo sapien
agtttggggtctggcaagcccggca

SEQ ID NO: 734308 - DNA, 25 bp, Homo sapien
gctcctacgggaagccgctgcacgg

SEQ ID NO: 734309 - DNA, 25 bp, Homo sapien
cagaacgctgctcctacgggaagcc

SEQ ID NO: 734310 - DNA, 25 bp, Homo sapien
ccgattctgggcgtccctcgttgac

SEQ ID NO: 734311 - DNA, 25 bp, Homo sapien
gcgtccgattctgggcgtccctcgt

SEQ ID NO: 734312 - DNA, 25 bp, Homo sapien
ctgccgcgtccgattctgggcgtcc

SEQ ID NO: 734313 - DNA, 25 bp, Homo sapien
ttctgggcgtccctcgttgaccgtc

SEQ ID NO: 734314 - DNA, 25 bp, Homo sapien
gactgcccggagagggtcgccttcg

SEQ ID NO: 734315 - DNA, 25 bp, Homo sapien
gccttcgttcttctccacgcccgta

SEQ ID NO: 734316 - DNA, 25 bp, Homo sapien
agactgcccggagagggtcgccttc

SEQ ID NO: 734317 - DNA, 25 bp, Homo sapien
cgccttcgttcttctccacgcccgt

SEQ ID NO: 734318 - DNA, 25 bp, Homo sapien
agaatcctcaagccccaacagtccc

SEQ ID NO: 734319 - DNA, 25 bp, Homo sapien
atcctcaagccccaacagtccccac

SEQ ID NO: 734320 - DNA, 25 bp, Homo sapien
ccctggctcctcagaatcctcaagc

SEQ ID NO: 734321 - DNA, 25 bp, Homo sapien
cagtccccacaaacccatttcccag

SEQ ID NO: 734322 - DNA, 25 bp, Homo sapien
gagcaatacaccacaatcacagaaa

SEQ ID NO: 734323 - DNA, 25 bp, Homo sapien
taaaaggagcaatacaccacaatca

SEQ ID NO: 734324 - DNA, 25 bp, Homo sapien
aaggagcaatacaccacaatcacag

SEQ ID NO: 734325 - DNA, 25 bp, Homo sapien
cttaaaaggagcaatacaccacaat

SEQ ID NO: 734326 - DNA, 25 bp, Homo sapien
tagacgtgtatgcacccagagatgc

SEQ ID NO: 734327 - DNA, 25 bp, Homo sapien
tcctccatgagggtgtttagatcca

SEQ ID NO: 734328 - DNA, 25 bp, Homo sapien
tcaggatggccaagcagatagacgt

SEQ ID NO: 734329 - DNA, 25 bp, Homo sapien
caacttttatggtcagggtgctcag

SEQ ID NO: 734330 - DNA, 25 bp, Homo sapien
tcgggtagaagttccactaacaatc

SEQ ID NO: 734331 - DNA, 25 bp, Homo sapien
tcacaacgtagaaggccatggcatg

SEQ ID NO: 734332 - DNA, 25 bp, Homo sapien
ccatggcatgtaagtgtcgggtaga

SEQ ID NO: 734333 - DNA, 25 bp, Homo sapien
tatcgatgtcaaacttgggaccagt

SEQ ID NO: 734334 - DNA, 25 bp, Homo sapien
taccagagtcagctagaggcttcca

SEQ ID NO: 734335 - DNA, 25 bp, Homo sapien
caataccccgtacagtgcttgggaa

SEQ ID NO: 734336 - DNA, 25 bp, Homo sapien
catggccccgtggaatggtaccaga

SEQ ID NO: 734337 - DNA, 25 bp, Homo sapien
gactaagaaaggtatcatggccccg

SEQ ID NO: 734338 - DNA, 25 bp, Homo sapien
aatgtggtatatacgtaagatagag

SEQ ID NO: 734339 - DNA, 25 bp, Homo sapien
aaatgtggtatatacgtaagataga

SEQ ID NO: 734340 - DNA, 25 bp, Homo sapien
tttgtgctaggctggtgaacagaaa

SEQ ID NO: 734341 - DNA, 25 bp, Homo sapien
aagactggaaactctgcactgctag

SEQ ID NO: 734342 - DNA, 25 bp, Homo sapien
gagatatcacgtcatgcccattagg

SEQ ID NO: 734343 - DNA, 25 bp, Homo sapien
tatgaaagaatacaggagctcctca

SEQ ID NO: 734344 - DNA, 25 bp, Homo sapien
agattcagtgcaatctatatcaaga

SEQ ID NO: 734345 - DNA, 25 bp, Homo sapien
caccgtgagcagcctagcagaataa

SEQ ID NO: 734346 - DNA, 25 bp, Homo sapien
aaaagacttgtacaatgaagactac

SEQ ID NO: 734347 - DNA, 25 bp, Homo sapien
tgctgaaagaacttacagatgccag

SEQ ID NO: 734348 - DNA, 25 bp, Homo sapien
taaagccaggttgtttcagtgccac

SEQ ID NO: 734349 - DNA, 25 bp, Homo sapien
gcaactgtacaccaaacaactgggt

SEQ ID NO: 734350 - DNA, 25 bp, Homo sapien
gggaccccgtcatcctataaatgtg

SEQ ID NO: 734351 - DNA, 25 bp, Homo sapien
ctttatgacatgttaatgggacccc

SEQ ID NO: 734352 - DNA, 25 bp, Homo sapien
cttaacatgagggtcacgtttacat

SEQ ID NO: 734353 - DNA, 25 bp, Homo sapien
acgcacagccagtcatcagtgtcct

SEQ ID NO: 734354 - DNA, 25 bp, Homo sapien
cccttctatcttaacatgagggtca

SEQ ID NO: 734355 - DNA, 25 bp, Homo sapien
catgagggtcacgtttacatttcag

SEQ ID NO: 734356 - DNA, 25 bp, Homo sapien
caattcaagattagcgtagtaccaa

SEQ ID NO: 734357 - DNA, 25 bp, Homo sapien
ttagcgtagtaccaacagttacctg

SEQ ID NO: 734358 - DNA, 25 bp, Homo sapien
gttacctgtaaaatacgccagaata

SEQ ID NO: 734359 - DNA, 25 bp, Homo sapien
ttgatctcaatccttttgcaactga

SEQ ID NO: 734360 - DNA, 25 bp, Homo sapien
gaaaccatcagagcaaaagtaggcc

SEQ ID NO: 734361 - DNA, 25 bp, Homo sapien
tctccatgggtaacacacttctgca

SEQ ID NO: 734362 - DNA, 25 bp, Homo sapien
tctacatgtgaataagaccacctgg

SEQ ID NO: 734363 - DNA, 25 bp, Homo sapien
caggagggcatcatctagggtactt

SEQ ID NO: 734364 - DNA, 25 bp, Homo sapien
ggaagcatcaaatgaatcaccatgc

SEQ ID NO: 734365 - DNA, 25 bp, Homo sapien
aagcatcaaatgaatcaccatgctg

SEQ ID NO: 734366 - DNA, 25 bp, Homo sapien
agcatcaaatgaatcaccatgctgc

SEQ ID NO: 734367 - DNA, 25 bp, Homo sapien
gaagcatcaaatgaatcaccatgct

SEQ ID NO: 734368 - DNA, 25 bp, Homo sapien
gatgaagtatcatcttctattccaa

SEQ ID NO: 734369 - DNA, 25 bp, Homo sapien
aggtgctatctgagctaactggtca

SEQ ID NO: 734370 - DNA, 25 bp, Homo sapien
tagggtccataatttctctaattca

SEQ ID NO: 734371 - DNA, 25 bp, Homo sapien
tcatcataagaacgtagggtccata

SEQ ID NO: 734372 - DNA, 25 bp, Homo sapien
taagagcagcctaaccaaggagacg

SEQ ID NO: 734373 - DNA, 25 bp, Homo sapien
tgttcaaaaatacggagcagtgcct

SEQ ID NO: 734374 - DNA, 25 bp, Homo sapien
tgcccatgaggtacacaagccttgt

SEQ ID NO: 734375 - DNA, 25 bp, Homo sapien
catgccagttagcaggagtgcccat

SEQ ID NO: 734376 - DNA, 25 bp, Homo sapien
tcctgatttccagagggctcaactt

SEQ ID NO: 734377 - DNA, 25 bp, Homo sapien
gctagccattttacaccccacgtga

SEQ ID NO: 734378 - DNA, 25 bp, Homo sapien
ttgaggcctctagacccatggttgc

SEQ ID NO: 734379 - DNA, 25 bp, Homo sapien
aaatactgcgtttgtgagaagagcc

SEQ ID NO: 734380 - DNA, 25 bp, Homo sapien
tctgtgtgtatacctcatgcaaaag

SEQ ID NO: 734381 - DNA, 25 bp, Homo sapien
tctttgaatggcaacgtgagaggtt

SEQ ID NO: 734382 - DNA, 25 bp, Homo sapien
tataagatataccaggatttcctcc

SEQ ID NO: 734383 - DNA, 25 bp, Homo sapien
accgcgccctgcgaatatttttgta

SEQ ID NO: 734384 - DNA, 25 bp, Homo sapien
ttgttggtggcagagcggcccttct

SEQ ID NO: 734385 - DNA, 25 bp, Homo sapien
aaatatggagctcgtttggtgaatc

SEQ ID NO: 734386 - DNA, 25 bp, Homo sapien
ccatggatacccttgtaaatgatga

SEQ ID NO: 734387 - DNA, 25 bp, Homo sapien
cacagattgtggtataggacgttcc

SEQ ID NO: 734388 - DNA, 25 bp, Homo sapien
tttgttttaccataaggtgtatagc

SEQ ID NO: 734389 - DNA, 25 bp, Homo sapien
taccataaggtgtatagcaattgga

SEQ ID NO: 734390 - DNA, 25 bp, Homo sapien
cataaggtgtatagcaattggataa

SEQ ID NO: 734391 - DNA, 25 bp, Homo sapien
ggtgtatagcaattggataaaaatt

SEQ ID NO: 734392 - DNA, 25 bp, Homo sapien
gtctgaggtgtcactaatgggcaag

SEQ ID NO: 734393 - DNA, 25 bp, Homo sapien
gaggtgtcactaatgggcaaggcca

SEQ ID NO: 734394 - DNA, 25 bp, Homo sapien
aggtgtcactaatgggcaaggccat

SEQ ID NO: 734395 - DNA, 25 bp, Homo sapien
ctgaggtgtcactaatgggcaaggc

SEQ ID NO: 734396 - DNA, 25 bp, Homo sapien
tatgggcttctagaattttgatctt

SEQ ID NO: 734397 - DNA, 25 bp, Homo sapien
ttgagtttgttatgggcttctagaa

SEQ ID NO: 734398 - DNA, 25 bp, Homo sapien
cttaagtattgagtttgttatgggc

SEQ ID NO: 734399 - DNA, 25 bp, Homo sapien
acccagccttgcttaagtattgagt

SEQ ID NO: 734400 - DNA, 25 bp, Homo sapien
tataaagatccatttatggccattc

SEQ ID NO: 734401 - DNA, 25 bp, Homo sapien
cacttagtcctaagcatctgctaat

SEQ ID NO: 734402 - DNA, 25 bp, Homo sapien
caatgttgttgcctgtatccagact

SEQ ID NO: 734403 - DNA, 25 bp, Homo sapien
gcccagtgcctaccaggttgtttta

SEQ ID NO: 734404 - DNA, 25 bp, Homo sapien
cctttggtcactccatcattgtgtg

SEQ ID NO: 734405 - DNA, 25 bp, Homo sapien
tagtggagaattacgctctatctcc

SEQ ID NO: 734406 - DNA, 25 bp, Homo sapien
tccttgagggtggaccgtctacata

SEQ ID NO: 734407 - DNA, 25 bp, Homo sapien
cacaacccgtacttaagtagtggag

SEQ ID NO: 734408 - DNA, 25 bp, Homo sapien
acagttacagtgtgttgattaaaga

SEQ ID NO: 734409 - DNA, 25 bp, Homo sapien
tttctccaactgtatatgtctgata

SEQ ID NO: 734410 - DNA, 25 bp, Homo sapien
actttttgggcaaacagttacagtg

SEQ ID NO: 734411 - DNA, 25 bp, Homo sapien
aatatattgcatgtaatttcctgct

SEQ ID NO: 734412 - DNA, 25 bp, Homo sapien
tctgaagagaactcaccggttgtag

SEQ ID NO: 734413 - DNA, 25 bp, Homo sapien
tgttctcaggaaatccatacagccc

SEQ ID NO: 734414 - DNA, 25 bp, Homo sapien
gcaacagtcgtccagaggttctgaa

SEQ ID NO: 734415 - DNA, 25 bp, Homo sapien
cacatcagtgaaggcgaattctttc

SEQ ID NO: 734416 - DNA, 25 bp, Homo sapien
gcctggacttttgtcctgtgcttct

SEQ ID NO: 734417 - DNA, 25 bp, Homo sapien
cctggacttttgtcctgtgcttctg

SEQ ID NO: 734418 - DNA, 25 bp, Homo sapien
tgcctggacttttgtcctgtgcttc

SEQ ID NO: 734419 - DNA, 25 bp, Homo sapien
tggacttttgtcctgtgcttctgtc

SEQ ID NO: 734420 - DNA, 25 bp, Homo sapien
aagacattaggtaaatgaagtggtc

SEQ ID NO: 734421 - DNA, 25 bp, Homo sapien
gaccttatgtaaaggaagacattag

SEQ ID NO: 734422 - DNA, 25 bp, Homo sapien
cataagaccttatgtaaaggaagac

SEQ ID NO: 734423 - DNA, 25 bp, Homo sapien
gaagtgaagcataagaccttatgta

SEQ ID NO: 734424 - DNA, 25 bp, Homo sapien
ttgaagtaagacaatctcctgcccc

SEQ ID NO: 734425 - DNA, 25 bp, Homo sapien
aatctcctgccccaattctaggagt

SEQ ID NO: 734426 - DNA, 25 bp, Homo sapien
ctcctgccccaattctaggagtcat

SEQ ID NO: 734427 - DNA, 25 bp, Homo sapien
cttgaagtaagacaatctcctgccc

SEQ ID NO: 734428 - DNA, 25 bp, Homo sapien
gctgactgacgtacagggacttggt

SEQ ID NO: 734429 - DNA, 25 bp, Homo sapien
tgataccaactgaaggacgggacct

SEQ ID NO: 734430 - DNA, 25 bp, Homo sapien
taatgtggtaaagccgactgacaga

SEQ ID NO: 734431 - DNA, 25 bp, Homo sapien
tgctgattcagtgacgccggctgac

SEQ ID NO: 734432 - DNA, 25 bp, Homo sapien
ttgagttagaggataagacactgcc

SEQ ID NO: 734433 - DNA, 25 bp, Homo sapien
gttggaaagcccatgctagactgct

SEQ ID NO: 734434 - DNA, 25 bp, Homo sapien
gacataggtttagttcggcacagct

SEQ ID NO: 734435 - DNA, 25 bp, Homo sapien
tgccagttgacatatagaccaggaa

SEQ ID NO: 734436 - DNA, 25 bp, Homo sapien
ccaccccgcccagccagaataatta

SEQ ID NO: 734437 - DNA, 25 bp, Homo sapien
cgcccagccagaataattaacattt

SEQ ID NO: 734438 - DNA, 25 bp, Homo sapien
ccccgcccagccagaataattaaca

SEQ ID NO: 734439 - DNA, 25 bp, Homo sapien
cccgcccagccagaataattaacat

SEQ ID NO: 734440 - DNA, 25 bp, Homo sapien
catgagcgacctgtaatccttcatt

SEQ ID NO: 734441 - DNA, 25 bp, Homo sapien
ggcatgagcgacctgtaatccttca

SEQ ID NO: 734442 - DNA, 25 bp, Homo sapien
gcatgagcgacctgtaatccttcat

SEQ ID NO: 734443 - DNA, 25 bp, Homo sapien
tttgtagtttgaacacgtggctcat

SEQ ID NO: 734444 - DNA, 25 bp, Homo sapien
ttgatttgtagtttgaacacgtggc

SEQ ID NO: 734445 - DNA, 25 bp, Homo sapien
tgagacgttgatttgtagtttgaac

SEQ ID NO: 734446 - DNA, 25 bp, Homo sapien
gacgttgatttgtagtttgaacacg

SEQ ID NO: 734447 - DNA, 25 bp, Homo sapien
aaaatgttggattcgcttggcagga

SEQ ID NO: 734448 - DNA, 25 bp, Homo sapien
gcaaggctgtatcaattaccgaaga

SEQ ID NO: 734449 - DNA, 25 bp, Homo sapien
aaatggatgatctgacaccttccgg

SEQ ID NO: 734450 - DNA, 25 bp, Homo sapien
gttggagattccactagaaccccag

SEQ ID NO: 734451 - DNA, 25 bp, Homo sapien
ttctatggctggtctgcaaatacat

SEQ ID NO: 734452 - DNA, 25 bp, Homo sapien
tgttagagagtgctgaaaactagcc

SEQ ID NO: 734453 - DNA, 25 bp, Homo sapien
caaagggtccaaatatgaacacagc

SEQ ID NO: 734454 - DNA, 25 bp, Homo sapien
tgagttgcaaccaagaaacaagatt

SEQ ID NO: 734455 - DNA, 25 bp, Homo sapien
tcatcatgctagagagcagcttagg

SEQ ID NO: 734456 - DNA, 25 bp, Homo sapien
ctctttaaagctaggatcatcatgc

SEQ ID NO: 734457 - DNA, 25 bp, Homo sapien
taccttaaagactgcctagaaagag

SEQ ID NO: 734458 - DNA, 25 bp, Homo sapien
cagctgagatttttgaactagaacc

SEQ ID NO: 734459 - DNA, 25 bp, Homo sapien
tatttaaacaatcctctatatatat

SEQ ID NO: 734460 - DNA, 25 bp, Homo sapien
gaagtcaatgtttcagtagaagtat

SEQ ID NO: 734461 - DNA, 25 bp, Homo sapien
tcaatgtttcagtagaagtatgtta

SEQ ID NO: 734462 - DNA, 25 bp, Homo sapien
aatgtttcagtagaagtatgttagg

SEQ ID NO: 734463 - DNA, 25 bp, Homo sapien
tctaggcaattttgaacaaacgaaa

SEQ ID NO: 734464 - DNA, 25 bp, Homo sapien
agtcttggaaagtgctaggaaaaag

SEQ ID NO: 734465 - DNA, 25 bp, Homo sapien
gggaccatgcagttatttcagctta

SEQ ID NO: 734466 - DNA, 25 bp, Homo sapien
tcaatgaatgacacaagacccctcc

SEQ ID NO: 734467 - DNA, 25 bp, Homo sapien
tcactatggttgcagaaataagcac

SEQ ID NO: 734468 - DNA, 25 bp, Homo sapien
ttttcacgacaagaacagaccagta

SEQ ID NO: 734469 - DNA, 25 bp, Homo sapien
ttcactaatctctctaaagggcttc

SEQ ID NO: 734470 - DNA, 25 bp, Homo sapien
caaaactgccctcaactggaagatc

SEQ ID NO: 734471 - DNA, 25 bp, Homo sapien
tgccataggtaaagaaagaagataa

SEQ ID NO: 734472 - DNA, 25 bp, Homo sapien
tctattaattgccacatccagagag

SEQ ID NO: 734473 - DNA, 25 bp, Homo sapien
tcctaatacaatatgacttcccctc

SEQ ID NO: 734474 - DNA, 25 bp, Homo sapien
tatgttagcagaacattgccatagg

SEQ ID NO: 734475 - DNA, 25 bp, Homo sapien
ccctctcttcagtccagggagacca

SEQ ID NO: 734476 - DNA, 25 bp, Homo sapien
ctctcttcagtccagggagaccaac

SEQ ID NO: 734477 - DNA, 25 bp, Homo sapien
tcctctctacacctgaaacacaaat

SEQ ID NO: 734478 - DNA, 25 bp, Homo sapien
ctccctctcttcagtccagggagac

SEQ ID NO: 734479 - DNA, 25 bp, Homo sapien
ggttcttgactgacccagagaaaga

SEQ ID NO: 734480 - DNA, 25 bp, Homo sapien
tcactgctgcccagtagagtcaggg

SEQ ID NO: 734481 - DNA, 25 bp, Homo sapien
cagggaggcagcgtttgtctcatcg

SEQ ID NO: 734482 - DNA, 25 bp, Homo sapien
cttcttgtagttcacttcctttggg

SEQ ID NO: 734483 - DNA, 25 bp, Homo sapien
tgtaagggttgtaaacgtggattca

SEQ ID NO: 734484 - DNA, 25 bp, Homo sapien
ggattcacagtgtgaaattctgagc

SEQ ID NO: 734485 - DNA, 25 bp, Homo sapien
acgtggattcacagtgtgaaattct

SEQ ID NO: 734486 - DNA, 25 bp, Homo sapien
aagggttgtaaacgtggattcacag

SEQ ID NO: 734487 - DNA, 25 bp, Homo sapien
ggaagacattgttgtagcgaaccag

SEQ ID NO: 734488 - DNA, 25 bp, Homo sapien
tgtggaagacattgttgtagcgaac

SEQ ID NO: 734489 - DNA, 25 bp, Homo sapien
tgtagcgaaccaggcctgaaggccc

SEQ ID NO: 734490 - DNA, 25 bp, Homo sapien
cattgttgtagcgaaccaggcctga

SEQ ID NO: 734491 - DNA, 25 bp, Homo sapien
ttgttacatctaaatgaagaaaaag

SEQ ID NO: 734492 - DNA, 25 bp, Homo sapien
aaagggggggactctcagcctctgc

SEQ ID NO: 734493 - DNA, 25 bp, Homo sapien
ggagctgtgtgagtgaaaaggcagg

SEQ ID NO: 734494 - DNA, 25 bp, Homo sapien
cctctgcaagaagcggtcgggagct

SEQ ID NO: 734495 - DNA, 25 bp, Homo sapien
aatcgtctctcacacttcggtagca

SEQ ID NO: 734496 - DNA, 25 bp, Homo sapien
agacaatcgtctctcacacttcggt

SEQ ID NO: 734497 - DNA, 25 bp, Homo sapien
tgagtgccagccaatgagacaatcg

SEQ ID NO: 734498 - DNA, 25 bp, Homo sapien
gtgccagccaatgagacaatcgtct

SEQ ID NO: 734499 - DNA, 25 bp, Homo sapien
acaagggctgtcctatcaaaagaag

SEQ ID NO: 734500 - DNA, 25 bp, Homo sapien
agaacaagggctgtcctatcaaaag

SEQ ID NO: 734501 - DNA, 25 bp, Homo sapien
aagggctgtcctatcaaaagaagag

SEQ ID NO: 734502 - DNA, 25 bp, Homo sapien
gctgtcctatcaaaagaagagctga

SEQ ID NO: 734503 - DNA, 25 bp, Homo sapien
ctgaaaccctcagcggaagtcacat

SEQ ID NO: 734504 - DNA, 25 bp, Homo sapien
gcggaagtcacatcagttccccttc

SEQ ID NO: 734505 - DNA, 25 bp, Homo sapien
tcagcggaagtcacatcagttcccc

SEQ ID NO: 734506 - DNA, 25 bp, Homo sapien
accctcagcggaagtcacatcagtt

SEQ ID NO: 734507 - DNA, 25 bp, Homo sapien
gccccggccccatccacggccgcga

SEQ ID NO: 734508 - DNA, 25 bp, Homo sapien
tggccccggccccatccacggccgc

SEQ ID NO: 734509 - DNA, 25 bp, Homo sapien
gccccggccccatccacggccgtga

SEQ ID NO: 734510 - DNA, 25 bp, Homo sapien
gccgtgaccccggacccggatgcca

SEQ ID NO: 734511 - DNA, 25 bp, Homo sapien
ccttatcctgggccttgcctccgcg

SEQ ID NO: 734512 - DNA, 25 bp, Homo sapien
gccttgcctccgcgaactccgcggt

SEQ ID NO: 734513 - DNA, 25 bp, Homo sapien
ccgctccttatcctgggccttgcct

SEQ ID NO: 734514 - DNA, 25 bp, Homo sapien
ttatcctgggccttgcctccgcgaa

SEQ ID NO: 734515 - DNA, 25 bp, Homo sapien
tccttggccaggccgtccagcttgg

SEQ ID NO: 734516 - DNA, 25 bp, Homo sapien
tggccaggccgtccagcttggtgac

SEQ ID NO: 734517 - DNA, 25 bp, Homo sapien
gtccttggccaggccgtccagcttg

SEQ ID NO: 734518 - DNA, 25 bp, Homo sapien
cttggccaggccgtccagcttggtg

SEQ ID NO: 734519 - DNA, 25 bp, Homo sapien
ggtctccttccgcacaggcataatc

SEQ ID NO: 734520 - DNA, 25 bp, Homo sapien
gcgggtctccttccgcacaggcata

SEQ ID NO: 734521 - DNA, 25 bp, Homo sapien
tctccttccgcacaggcataatctt

SEQ ID NO: 734522 - DNA, 25 bp, Homo sapien
ccggcgcgggtctccttccgcacag

SEQ ID NO: 734523 - DNA, 25 bp, Homo sapien
atggccccgcggatggcggcggcca

SEQ ID NO: 734524 - DNA, 25 bp, Homo sapien
ggatgatggccccgcggatggcggc

SEQ ID NO: 734525 - DNA, 25 bp, Homo sapien
gatggccccgcggatggcggcggcc

SEQ ID NO: 734526 - DNA, 25 bp, Homo sapien
atgatggccccgcggatggcggcgg

SEQ ID NO: 734527 - DNA, 25 bp, Homo sapien
cctgggcgcggggatgaagggcacc

SEQ ID NO: 734528 - DNA, 25 bp, Homo sapien
cagcatccaaggtggcgttggcgaa

SEQ ID NO: 734529 - DNA, 25 bp, Homo sapien
agagacagcatccaaggtggcgttg

SEQ ID NO: 734530 - DNA, 25 bp, Homo sapien
ttagagacagcatccaaggtggcgt

SEQ ID NO: 734531 - DNA, 25 bp, Homo sapien
agacagcatccaaggtggcgttggc

SEQ ID NO: 734532 - DNA, 25 bp, Homo sapien
tcaggggatcaggtagctgtagatg

SEQ ID NO: 734533 - DNA, 25 bp, Homo sapien
ttgacagtaataggctttaattcac

SEQ ID NO: 734534 - DNA, 25 bp, Homo sapien
gacagtaataggctttaattcactt

SEQ ID NO: 734535 - DNA, 25 bp, Homo sapien
tttgacagtaataggctttaattca

SEQ ID NO: 734536 - DNA, 25 bp, Homo sapien
ttttgacagtaataggctttaattc

SEQ ID NO: 734537 - DNA, 25 bp, Homo sapien
taagcaggttatcacatagcataga

SEQ ID NO: 734538 - DNA, 25 bp, Homo sapien
gaagtagttcagtcatgtcaggttt

SEQ ID NO: 734539 - DNA, 25 bp, Homo sapien
aaagcttgtgaactcctgtaaaaca

SEQ ID NO: 734540 - DNA, 25 bp, Homo sapien
tattgggacagtggataagcaggtt

SEQ ID NO: 734541 - DNA, 25 bp, Homo sapien
ggtcgaggtcaaggagacattctca

SEQ ID NO: 734542 - DNA, 25 bp, Homo sapien
cactctcataggagacgatctcgaa

SEQ ID NO: 734543 - DNA, 25 bp, Homo sapien
tcatatacaccagaataccggcggc

SEQ ID NO: 734544 - DNA, 25 bp, Homo sapien
tagacgttacactcgatccagatcc

SEQ ID NO: 734545 - DNA, 25 bp, Homo sapien
cagaagattggtcagatagaagcac

SEQ ID NO: 734546 - DNA, 25 bp, Homo sapien
tagttacttgcactttacctgctgg

SEQ ID NO: 734547 - DNA, 25 bp, Homo sapien
cagagttttataatccccacgtgct

SEQ ID NO: 734548 - DNA, 25 bp, Homo sapien
ggtagataacattctgaactccagc

SEQ ID NO: 734549 - DNA, 25 bp, Homo sapien
ctgatttgttaatataagtttgtaa

SEQ ID NO: 734550 - DNA, 25 bp, Homo sapien
atttggtaacagcttttgagaaatg

SEQ ID NO: 734551 - DNA, 25 bp, Homo sapien
aaataattatatacttggcagttta

SEQ ID NO: 734552 - DNA, 25 bp, Homo sapien
cagttaagtttactaatagttactg

SEQ ID NO: 734553 - DNA, 25 bp, Homo sapien
cctaagagagtcttgggtttaatct

SEQ ID NO: 734554 - DNA, 25 bp, Homo sapien
tcttatagtagggatagtgttaacc

SEQ ID NO: 734555 - DNA, 25 bp, Homo sapien
tgtgagagatgtcatagcattttgc

SEQ ID NO: 734556 - DNA, 25 bp, Homo sapien
tgcttattcagcgtctttagcaatt

SEQ ID NO: 734557 - DNA, 25 bp, Homo sapien
tctaggaaaggagtaagttgccgac

SEQ ID NO: 734558 - DNA, 25 bp, Homo sapien
gcggcgttgcgtctaaaaaggcgaa

SEQ ID NO: 734559 - DNA, 25 bp, Homo sapien
aagtggttagtcaacgaccgcaccg

SEQ ID NO: 734560 - DNA, 25 bp, Homo sapien
tctctatttcagtgagcggccgcgt

SEQ ID NO: 734561 - DNA, 25 bp, Homo sapien
tcatataaggctcatctggcgactg

SEQ ID NO: 734562 - DNA, 25 bp, Homo sapien
ttacgtcgtgctctgaggaggccag

SEQ ID NO: 734563 - DNA, 25 bp, Homo sapien
cagtcagcgggttaattaggccatc

SEQ ID NO: 734564 - DNA, 25 bp, Homo sapien
gaggaaaacaacttcgagggcagag

SEQ ID NO: 734565 - DNA, 25 bp, Homo sapien
tcgtgagaactgcaaaccgctgcgg

SEQ ID NO: 734566 - DNA, 25 bp, Homo sapien
ccacgatggaaaggatcttgggtcc

SEQ ID NO: 734567 - DNA, 25 bp, Homo sapien
tccttgagttgggttggtcacagcc

SEQ ID NO: 734568 - DNA, 25 bp, Homo sapien
ccaacaagttgtgggactccagtca

SEQ ID NO: 734569 - DNA, 25 bp, Homo sapien
gcgacgcagcgagagctaataagcg

SEQ ID NO: 734570 - DNA, 25 bp, Homo sapien
tccagatcgagctggagaaacgccg

SEQ ID NO: 734571 - DNA, 25 bp, Homo sapien
tggagattttactccgctcgtccct

SEQ ID NO: 734572 - DNA, 25 bp, Homo sapien
taataagcgggcgtcagctgcgtcc

SEQ ID NO: 734573 - DNA, 25 bp, Homo sapien
cgccgcggctgtcagacgcggaggg

SEQ ID NO: 734574 - DNA, 25 bp, Homo sapien
gggatctacatcccgcagctccgga

SEQ ID NO: 734575 - DNA, 25 bp, Homo sapien
agcccgccccgctcgactcgcgcag

SEQ ID NO: 734576 - DNA, 25 bp, Homo sapien
aaaaagaagtgagtgcggtgccgcc

SEQ ID NO: 734577 - DNA, 25 bp, Homo sapien
agtcacccaggagatgagttttgaa

SEQ ID NO: 734578 - DNA, 25 bp, Homo sapien
agagggagtttaaaaggggcatctg

SEQ ID NO: 734579 - DNA, 25 bp, Homo sapien
tttaagtaaccaagatcaccaaggc

SEQ ID NO: 734580 - DNA, 25 bp, Homo sapien
ctcaagcttagagcctttaagtaac

SEQ ID NO: 734581 - DNA, 25 bp, Homo sapien
ttagagcctttaagtaaccaagatc

SEQ ID NO: 734582 - DNA, 25 bp, Homo sapien
aagtaaccaagatcaccaaggcagg

SEQ ID NO: 734583 - DNA, 25 bp, Homo sapien
caaaaattaggaagacggcatattt

SEQ ID NO: 734584 - DNA, 25 bp, Homo sapien
gaagacggcatattttaatgaatcc

SEQ ID NO: 734585 - DNA, 25 bp, Homo sapien
cagaggccacttcggtcacttcagt

SEQ ID NO: 734586 - DNA, 25 bp, Homo sapien
aacaaaagcacaaaactcaagtcca

SEQ ID NO: 734587 - DNA, 25 bp, Homo sapien
tacaggcattaacatgtccactcca

SEQ ID NO: 734588 - DNA, 25 bp, Homo sapien
ccctagccacagacataaagatatg

SEQ ID NO: 734589 - DNA, 25 bp, Homo sapien
gatcttcggagaaaagtgctattcc

SEQ ID NO: 734590 - DNA, 25 bp, Homo sapien
tccattatgctacttgacaaacagc

SEQ ID NO: 734591 - DNA, 25 bp, Homo sapien
gatgacataatagcatgttgctgat

SEQ ID NO: 734592 - DNA, 25 bp, Homo sapien
gacataatagcatgttgctgatgag

SEQ ID NO: 734593 - DNA, 25 bp, Homo sapien
ctaaaagatgacataatagcatgtt

SEQ ID NO: 734594 - DNA, 25 bp, Homo sapien
aagatgacataatagcatgttgctg

SEQ ID NO: 734595 - DNA, 25 bp, Homo sapien
aatgtcattggtattaagtcactgg

SEQ ID NO: 734596 - DNA, 25 bp, Homo sapien
taagtcactggagcattacctagtc

SEQ ID NO: 734597 - DNA, 25 bp, Homo sapien
ggcttgaaaaggtttctactcagaa

SEQ ID NO: 734598 - DNA, 25 bp, Homo sapien
tctcattcagttaataacagtcagc

SEQ ID NO: 734599 - DNA, 25 bp, Homo sapien
cttcagcaaggttgtatccactcta

SEQ ID NO: 734600 - DNA, 25 bp, Homo sapien
tcagcaaggttgtatccactctatt

SEQ ID NO: 734601 - DNA, 25 bp, Homo sapien
gcaaggttgtatccactctattaac

SEQ ID NO: 734602 - DNA, 25 bp, Homo sapien
catcttcagcaaggttgtatccact

SEQ ID NO: 734603 - DNA, 25 bp, Homo sapien
aatgagtccaaatacaagcaacagt

SEQ ID NO: 734604 - DNA, 25 bp, Homo sapien
caagcaacagtaaactcaatttctg

SEQ ID NO: 734605 - DNA, 25 bp, Homo sapien
tacaagcaacagtaaactcaatttc

SEQ ID NO: 734606 - DNA, 25 bp, Homo sapien
atgagtccaaatacaagcaacagta

SEQ ID NO: 734607 - DNA, 25 bp, Homo sapien
tgcttaagtctagtatttgctcacg

SEQ ID NO: 734608 - DNA, 25 bp, Homo sapien
gctcacgtaacttgacactgctttg

SEQ ID NO: 734609 - DNA, 25 bp, Homo sapien
tatcctgccatagaagcaccgttct

SEQ ID NO: 734610 - DNA, 25 bp, Homo sapien
gcaccgttctcgacatccactgtgt

SEQ ID NO: 734611 - DNA, 25 bp, Homo sapien
tcattacaggaatcataacacactt

SEQ ID NO: 734612 - DNA, 25 bp, Homo sapien
gttaacagataacacctataactga

SEQ ID NO: 734613 - DNA, 25 bp, Homo sapien
ctgaaaaatcggaaaggagctcaca

SEQ ID NO: 734614 - DNA, 25 bp, Homo sapien
aactgccctttttcattacaggaat

SEQ ID NO: 734615 - DNA, 25 bp, Homo sapien
tgagggcccaacacatgtacgaaag

SEQ ID NO: 734616 - DNA, 25 bp, Homo sapien
tttagaatggtgtgggacacagacc

SEQ ID NO: 734617 - DNA, 25 bp, Homo sapien
tgtacgaaagagacccatacccagt

SEQ ID NO: 734618 - DNA, 25 bp, Homo sapien
gacacagaccttacaagattccaaa

SEQ ID NO: 734619 - DNA, 25 bp, Homo sapien
ttaagcatgcgcttcatggttgcat

SEQ ID NO: 734620 - DNA, 25 bp, Homo sapien
tctctgagtttaagcatgcgcttca

SEQ ID NO: 734621 - DNA, 25 bp, Homo sapien
gagtttaagcatgcgcttcatggtt

SEQ ID NO: 734622 - DNA, 25 bp, Homo sapien
tgatctctgagtttaagcatgcgct

SEQ ID NO: 734623 - DNA, 25 bp, Homo sapien
aataaagttggtatcaacaaggatg

SEQ ID NO: 734624 - DNA, 25 bp, Homo sapien
aaggatgtagtaaggtgggcccagc

SEQ ID NO: 734625 - DNA, 25 bp, Homo sapien
ataaataaagttggtatcaacaagg

SEQ ID NO: 734626 - DNA, 25 bp, Homo sapien
aaagttggtatcaacaaggatgtag

SEQ ID NO: 734627 - DNA, 25 bp, Homo sapien
tgtacacagtacaaaccttggatcc

SEQ ID NO: 734628 - DNA, 25 bp, Homo sapien
tccaggaatcttaagggtcaactgt

SEQ ID NO: 734629 - DNA, 25 bp, Homo sapien
gaatcttaagggtcaactgtggcca

SEQ ID NO: 734630 - DNA, 25 bp, Homo sapien
gtacacagtacaaaccttggatcct

SEQ ID NO: 734631 - DNA, 25 bp, Homo sapien
catattcattaaatgctctttggag

SEQ ID NO: 734632 - DNA, 25 bp, Homo sapien
ttctaatatatcattgtcttagcct

SEQ ID NO: 734633 - DNA, 25 bp, Homo sapien
tatacactatcaaggggccggcaga

SEQ ID NO: 734634 - DNA, 25 bp, Homo sapien
cagatttggtatctgctgagagcct

SEQ ID NO: 734635 - DNA, 25 bp, Homo sapien
aaattggataaacagagcattctgc

SEQ ID NO: 734636 - DNA, 25 bp, Homo sapien
tctttcataggtaaggctggtctct

SEQ ID NO: 734637 - DNA, 25 bp, Homo sapien
ttagcatgggtttatcccgattggg

SEQ ID NO: 734638 - DNA, 25 bp, Homo sapien
gttgtcttggcatgaaattcttagc

SEQ ID NO: 734639 - DNA, 25 bp, Homo sapien
ttgattgactgaaacagtctcactt

SEQ ID NO: 734640 - DNA, 25 bp, Homo sapien
tgattgactgaaacagtctcacttt

SEQ ID NO: 734641 - DNA, 25 bp, Homo sapien
tcagactccctagttaagagctcct

SEQ ID NO: 734642 - DNA, 25 bp, Homo sapien
ctcagactccctagttaagagctcc

SEQ ID NO: 734643 - DNA, 25 bp, Homo sapien
tcaaatactgaacagctttgcatct

SEQ ID NO: 734644 - DNA, 25 bp, Homo sapien
ttcaaatactgaacagctttgcatc

SEQ ID NO: 734645 - DNA, 25 bp, Homo sapien
taaatgccactttgtggccaggcgt

SEQ ID NO: 734646 - DNA, 25 bp, Homo sapien
cagtaaaggaagaatgcttccaaag

SEQ ID NO: 734647 - DNA, 25 bp, Homo sapien
agttttactatgaagctactagcag

SEQ ID NO: 734648 - DNA, 25 bp, Homo sapien
tagcaaagagaacaccataggtaaa

SEQ ID NO: 734649 - DNA, 25 bp, Homo sapien
ccagccagaagtcgcttcttggtta

SEQ ID NO: 734650 - DNA, 25 bp, Homo sapien
cctggtttgtactcttaatgtcagc

SEQ ID NO: 734651 - DNA, 25 bp, Homo sapien
tgtcagctgcctcaaatctattttg

SEQ ID NO: 734652 - DNA, 25 bp, Homo sapien
tgtagagaggcaggtctaaatagat

SEQ ID NO: 734653 - DNA, 25 bp, Homo sapien
tgaacaagtcaaacacttttcctta

SEQ ID NO: 734654 - DNA, 25 bp, Homo sapien
gctgctgagccattcacaacaatat

SEQ ID NO: 734655 - DNA, 25 bp, Homo sapien
gccattcacaacaatatagtcaact

SEQ ID NO: 734656 - DNA, 25 bp, Homo sapien
ccaatcgttgcaaaatgtcatccag

SEQ ID NO: 734657 - DNA, 25 bp, Homo sapien
tctccagcttcaccaatcgttgcaa

SEQ ID NO: 734658 - DNA, 25 bp, Homo sapien
ctatctgatactgcccgagacattc

SEQ ID NO: 734659 - DNA, 25 bp, Homo sapien
tttgtggttactggcaccaaattcc

SEQ ID NO: 734660 - DNA, 25 bp, Homo sapien
tactggcaccaaattcccactagta

SEQ ID NO: 734661 - DNA, 25 bp, Homo sapien
actgcccgagacattcgttctttta

SEQ ID NO: 734662 - DNA, 25 bp, Homo sapien
tggatggagcagcacaaggtgattt

SEQ ID NO: 734663 - DNA, 25 bp, Homo sapien
gcttttctgccataggatataatcc

SEQ ID NO: 734664 - DNA, 25 bp, Homo sapien
gagcagcacaaggtgattttcaact

SEQ ID NO: 734665 - DNA, 25 bp, Homo sapien
agtattgctctgtcctaagccagca

SEQ ID NO: 734666 - DNA, 25 bp, Homo sapien
caaatagccgtagtctaacagttac

SEQ ID NO: 734667 - DNA, 25 bp, Homo sapien
ggacatagtacagcattgaacagac

SEQ ID NO: 734668 - DNA, 25 bp, Homo sapien
aaattgccccaatgtttacgatagg

SEQ ID NO: 734669 - DNA, 25 bp, Homo sapien
agaattagagttccatgaatccagc

SEQ ID NO: 734670 - DNA, 25 bp, Homo sapien
tatacacctggctaaagtcctcaag

SEQ ID NO: 734671 - DNA, 25 bp, Homo sapien
tcctgatagcatagacactcaaagg

SEQ ID NO: 734672 - DNA, 25 bp, Homo sapien
tatagggcaccatgtggcaattaga

SEQ ID NO: 734673 - DNA, 25 bp, Homo sapien
caaacttctacctggcaatggcata

SEQ ID NO: 734674 - DNA, 25 bp, Homo sapien
ctggcgcgcgtgtcctgcatagccg

SEQ ID NO: 734675 - DNA, 25 bp, Homo sapien
agatgttccgtaatgtagtctgctc

SEQ ID NO: 734676 - DNA, 25 bp, Homo sapien
aatatgatgccgagaccctggacca

SEQ ID NO: 734677 - DNA, 25 bp, Homo sapien
agccacggctgaggccccgtattac

SEQ ID NO: 734678 - DNA, 25 bp, Homo sapien
aacattggcctgaccacaataaatg

SEQ ID NO: 734679 - DNA, 25 bp, Homo sapien
aataaatgctagtggatatatcagc

SEQ ID NO: 734680 - DNA, 25 bp, Homo sapien
gaaagattatctactacttacttag

SEQ ID NO: 734681 - DNA, 25 bp, Homo sapien
gattatctactacttacttaggaaa

SEQ ID NO: 734682 - DNA, 25 bp, Homo sapien
cctgcggaccagctgacctcgaagc

SEQ ID NO: 734683 - DNA, 25 bp, Homo sapien
ggaccagctgacctcgaagcccgac

SEQ ID NO: 734684 - DNA, 25 bp, Homo sapien
aaggcttccctgcggaccagctgac

SEQ ID NO: 734685 - DNA, 25 bp, Homo sapien
ttccctgcggaccagctgacctcga

SEQ ID NO: 734686 - DNA, 25 bp, Homo sapien
ccgccgagaggcaacgtcaaccgct

SEQ ID NO: 734687 - DNA, 25 bp, Homo sapien
gccgcgccgccgagaggcaacgtca

SEQ ID NO: 734688 - DNA, 25 bp, Homo sapien
cgagaggcaacgtcaaccgctccat

SEQ ID NO: 734689 - DNA, 25 bp, Homo sapien
ggtactccaggtactcgtccaccgc

SEQ ID NO: 734690 - DNA, 25 bp, Homo sapien
agaagagagagtcgcttcagctcag

SEQ ID NO: 734691 - DNA, 25 bp, Homo sapien
tgagaagagagagtcgcttcagctc

SEQ ID NO: 734692 - DNA, 25 bp, Homo sapien
gaagagagagtcgcttcagctcagg

SEQ ID NO: 734693 - DNA, 25 bp, Homo sapien
gctgagaagagagagtcgcttcagc

SEQ ID NO: 734694 - DNA, 25 bp, Homo sapien
tctctgggcccacaagtttacaatc

SEQ ID NO: 734695 - DNA, 25 bp, Homo sapien
tgtaagcgcagaggtaaaacttttc

SEQ ID NO: 734696 - DNA, 25 bp, Homo sapien
aatccatccctgttggtgaccgcca

SEQ ID NO: 734697 - DNA, 25 bp, Homo sapien
gaccgccagctcacaaataatctgt

SEQ ID NO: 734698 - DNA, 25 bp, Homo sapien
cactgagtggatcagtactaaatat

SEQ ID NO: 734699 - DNA, 25 bp, Homo sapien
tttggaaagcccgaggtagacagat

SEQ ID NO: 734700 - DNA, 25 bp, Homo sapien
aaaaaactagcagctggctttgggt

SEQ ID NO: 734701 - DNA, 25 bp, Homo sapien
gtttggaagaaatctcactgagtgg

SEQ ID NO: 734702 - DNA, 25 bp, Homo sapien
gctggactagctggcaggtattaaa

SEQ ID NO: 734703 - DNA, 25 bp, Homo sapien
gactagctggcaggtattaaaaatc

SEQ ID NO: 734704 - DNA, 25 bp, Homo sapien
ctagctggactagctggcaggtatt

SEQ ID NO: 734705 - DNA, 25 bp, Homo sapien
tggactagctggcaggtattaaaaa

SEQ ID NO: 734706 - DNA, 25 bp, Homo sapien
tatcaagagtgttacgaaagggcca

SEQ ID NO: 734707 - DNA, 25 bp, Homo sapien
cacccacacgacataagagaaccag

SEQ ID NO: 734708 - DNA, 25 bp, Homo sapien
aatgcaaattaaaggccggttgcgg

SEQ ID NO: 734709 - DNA, 25 bp, Homo sapien
gaaaaggtccattctttgaaccaga

SEQ ID NO: 734710 - DNA, 25 bp, Homo sapien
gacataaaggtaagccctgcactgg

SEQ ID NO: 734711 - DNA, 25 bp, Homo sapien
gctgaggaatcgcttccaagtcagt

SEQ ID NO: 734712 - DNA, 25 bp, Homo sapien
gcaaagtgtttgcacctgcagcgaa

SEQ ID NO: 734713 - DNA, 25 bp, Homo sapien
tattgcatgtaaagccaggcgcagc

SEQ ID NO: 734714 - DNA, 25 bp, Homo sapien
agtttccactactgtgtcatgggca

SEQ ID NO: 734715 - DNA, 25 bp, Homo sapien
gctgcataaggaatgtcctgtccca

SEQ ID NO: 734716 - DNA, 25 bp, Homo sapien
cgccagcgagctgaaaccagttaat

SEQ ID NO: 734717 - DNA, 25 bp, Homo sapien
tcatgggcatatgcaggctgaccac

SEQ ID NO: 734718 - DNA, 25 bp, Homo sapien
gtagacagggaacacattctgctcc

SEQ ID NO: 734719 - DNA, 25 bp, Homo sapien
gtcccgctcagctctcagaaggatc

SEQ ID NO: 734720 - DNA, 25 bp, Homo sapien
tttcaagtagacagggaacacattc

SEQ ID NO: 734721 - DNA, 25 bp, Homo sapien
caagtagacagggaacacattctgc

SEQ ID NO: 734722 - DNA, 25 bp, Homo sapien
ttgatgatagcaaattaccctcggg

SEQ ID NO: 734723 - DNA, 25 bp, Homo sapien
tatatactcgtatgggcctggcgtg

SEQ ID NO: 734724 - DNA, 25 bp, Homo sapien
catttttggaggacattctggcaga

SEQ ID NO: 734725 - DNA, 25 bp, Homo sapien
aactgctggtagtacaaagctgccg

SEQ ID NO: 734726 - DNA, 25 bp, Homo sapien
atgccaaagttctgaaagaattaaa

SEQ ID NO: 734727 - DNA, 25 bp, Homo sapien
tgatgccaaagttctgaaagaatta

SEQ ID NO: 734728 - DNA, 25 bp, Homo sapien
aatgatgccaaagttctgaaagaat

SEQ ID NO: 734729 - DNA, 25 bp, Homo sapien
gatgccaaagttctgaaagaattaa

SEQ ID NO: 734730 - DNA, 25 bp, Homo sapien
gatgccagctaccaccattatttag

SEQ ID NO: 734731 - DNA, 25 bp, Homo sapien
gaagtactagccattttgactagtc

SEQ ID NO: 734732 - DNA, 25 bp, Homo sapien
gacgtcactaaagggcaaagatgcc

SEQ ID NO: 734733 - DNA, 25 bp, Homo sapien
ctagtcaagaataagaagagtcaca

SEQ ID NO: 734734 - DNA, 25 bp, Homo sapien
cataaacagtgtgggacgattgctc

SEQ ID NO: 734735 - DNA, 25 bp, Homo sapien
tattgagtccccgagcttagggaac

SEQ ID NO: 734736 - DNA, 25 bp, Homo sapien
tagggcctggtagcctcatgcttgc

SEQ ID NO: 734737 - DNA, 25 bp, Homo sapien
tggtctctcagcttgatagggcctg

SEQ ID NO: 734738 - DNA, 25 bp, Homo sapien
tatgatcacatcacttcactggatc

SEQ ID NO: 734739 - DNA, 25 bp, Homo sapien
gatcacatcacttcactggatccgg

SEQ ID NO: 734740 - DNA, 25 bp, Homo sapien
catcacttcactggatccggcctgg

SEQ ID NO: 734741 - DNA, 25 bp, Homo sapien
aatgggtaaaagtattcttctgcac

SEQ ID NO: 734742 - DNA, 25 bp, Homo sapien
gaaatgcttttaggaatgggctgtc

SEQ ID NO: 734743 - DNA, 25 bp, Homo sapien
ggagaagaactagatgatgcttgaa

SEQ ID NO: 734744 - DNA, 25 bp, Homo sapien
ctgccgtaatgggagattctaaaaa

SEQ ID NO: 734745 - DNA, 25 bp, Homo sapien
tctgttaacgtttctggagaagaac

SEQ ID NO: 734746 - DNA, 25 bp, Homo sapien
cctgctcggtgataatgttttattt

SEQ ID NO: 734747 - DNA, 25 bp, Homo sapien
ttctcctgctcggtgataatgtttt

SEQ ID NO: 734748 - DNA, 25 bp, Homo sapien
gttttctcctgctcggtgataatgt

SEQ ID NO: 734749 - DNA, 25 bp, Homo sapien
aagttttctcctgctcggtgataat

SEQ ID NO: 734750 - DNA, 25 bp, Homo sapien
aatgaagaaacttgactacttgtac

SEQ ID NO: 734751 - DNA, 25 bp, Homo sapien
atcatcctcttcaggtctccttaat

SEQ ID NO: 734752 - DNA, 25 bp, Homo sapien
tcttcaggtctccttaatgaagaaa

SEQ ID NO: 734753 - DNA, 25 bp, Homo sapien
cctggtatcgtctttcaaagaaagc

SEQ ID NO: 734754 - DNA, 25 bp, Homo sapien
gctacaagtaaatgcttagtgcaac

SEQ ID NO: 734755 - DNA, 25 bp, Homo sapien
tgtattctaataagcctcaaggcct

SEQ ID NO: 734756 - DNA, 25 bp, Homo sapien
cattctagtgcttttgctacaagta

SEQ ID NO: 734757 - DNA, 25 bp, Homo sapien
tcaaggcctaacaccaactgtaagt

SEQ ID NO: 734758 - DNA, 25 bp, Homo sapien
cgagtctggatacacctaaaagcct

SEQ ID NO: 734759 - DNA, 25 bp, Homo sapien
ttgtagttaaagcaaaaaagcagcc

SEQ ID NO: 734760 - DNA, 25 bp, Homo sapien
tgtgcccagatgtgtattgggtaat

SEQ ID NO: 734761 - DNA, 25 bp, Homo sapien
tgggtaattttaacgagtctggata

SEQ ID NO: 734762 - DNA, 25 bp, Homo sapien
attcagattcatgtcacagccattc

SEQ ID NO: 734763 - DNA, 25 bp, Homo sapien
tattaagctgctaaatactaaagcc

SEQ ID NO: 734764 - DNA, 25 bp, Homo sapien
gccattccacagttattaagctgct

SEQ ID NO: 734765 - DNA, 25 bp, Homo sapien
tgtcacagccattccacagttatta

SEQ ID NO: 734766 - DNA, 25 bp, Homo sapien
ttgatataataacttgtaaaccatt

SEQ ID NO: 734767 - DNA, 25 bp, Homo sapien
tttattgatataataacttgtaaac

SEQ ID NO: 734768 - DNA, 25 bp, Homo sapien
tattgatataataacttgtaaacca

SEQ ID NO: 734769 - DNA, 25 bp, Homo sapien
catatttattgatataataacttgt

SEQ ID NO: 734770 - DNA, 25 bp, Homo sapien
tcatgaaggttttgtagctgatggc

SEQ ID NO: 734771 - DNA, 25 bp, Homo sapien
ttccacttagcagccttttccattt

SEQ ID NO: 734772 - DNA, 25 bp, Homo sapien
ggcaatggagcttttcctttccact

SEQ ID NO: 734773 - DNA, 25 bp, Homo sapien
tgtagctgatggcaatggagctttt

SEQ ID NO: 734774 - DNA, 25 bp, Homo sapien
acttggatgatggttttaatttctc

SEQ ID NO: 734775 - DNA, 25 bp, Homo sapien
gatacttggatgatggttttaattt

SEQ ID NO: 734776 - DNA, 25 bp, Homo sapien
aagatacttggatgatggttttaat

SEQ ID NO: 734777 - DNA, 25 bp, Homo sapien
tacttggatgatggttttaatttct

SEQ ID NO: 734778 - DNA, 25 bp, Homo sapien
aaaaacatttactgtactctcagac

SEQ ID NO: 734779 - DNA, 25 bp, Homo sapien
tgtttgtccaaaacccttgataata

SEQ ID NO: 734780 - DNA, 25 bp, Homo sapien
tctcagacagactcatataaaataa

SEQ ID NO: 734781 - DNA, 25 bp, Homo sapien
tttgaatgacaaaaaaatggctcat

SEQ ID NO: 734782 - DNA, 25 bp, Homo sapien
ccagtacagtcatagacaatgggtg

SEQ ID NO: 734783 - DNA, 25 bp, Homo sapien
atgacatgcgcccaagacaaggtgc

SEQ ID NO: 734784 - DNA, 25 bp, Homo sapien
tccgctatcagaagcctgctggaaa

SEQ ID NO: 734785 - DNA, 25 bp, Homo sapien
gacaaggtgccatcaaatggcttcc

SEQ ID NO: 734786 - DNA, 25 bp, Homo sapien
agtgggcatcccaagccacagtgtc

SEQ ID NO: 734787 - DNA, 25 bp, Homo sapien
tcccaagccacagtgtcagaagatc

SEQ ID NO: 734788 - DNA, 25 bp, Homo sapien
catcccaagccacagtgtcagaaga

SEQ ID NO: 734789 - DNA, 25 bp, Homo sapien
ctagtgggcatcccaagccacagtg

SEQ ID NO: 734790 - DNA, 25 bp, Homo sapien
ccaacagacgggagagcacttatgt

SEQ ID NO: 734791 - DNA, 25 bp, Homo sapien
gcacttatgtattgggcttccacct

SEQ ID NO: 734792 - DNA, 25 bp, Homo sapien
gactggagctcaacgataggacttt

SEQ ID NO: 734793 - DNA, 25 bp, Homo sapien
tcccattaatcaagagtggccccaa

SEQ ID NO: 734794 - DNA, 25 bp, Homo sapien
ttaattaggtccactgggcccctga

SEQ ID NO: 734795 - DNA, 25 bp, Homo sapien
gggcccctgacagttaagttctgca

SEQ ID NO: 734796 - DNA, 25 bp, Homo sapien
tgtcttgccccttggaacatcatga

SEQ ID NO: 734797 - DNA, 25 bp, Homo sapien
gattcatgcctaggtgcccattaag

SEQ ID NO: 734798 - DNA, 25 bp, Homo sapien
agccacggcctgccgcctaggaaga

SEQ ID NO: 734799 - DNA, 25 bp, Homo sapien
acggcctgccgcctaggaagaagcg

SEQ ID NO: 734800 - DNA, 25 bp, Homo sapien
ctaggaagaagcgtgcgggagccgc

SEQ ID NO: 734801 - DNA, 25 bp, Homo sapien
cctgccgcctaggaagaagcgtgcg

SEQ ID NO: 734802 - DNA, 25 bp, Homo sapien
cttcgaccgcaagggccccacactg

SEQ ID NO: 734803 - DNA, 25 bp, Homo sapien
gcgtgagcttcgaccgcaagggccc

SEQ ID NO: 734804 - DNA, 25 bp, Homo sapien
gagcttcgaccgcaagggccccaca

SEQ ID NO: 734805 - DNA, 25 bp, Homo sapien
cgcgtgagcttcgaccgcaagggcc

SEQ ID NO: 734806 - DNA, 25 bp, Homo sapien
cctccgcccgccgtagcacacgtgc

SEQ ID NO: 734807 - DNA, 25 bp, Homo sapien
tccgcccgccgtagcacacgtgcag

SEQ ID NO: 734808 - DNA, 25 bp, Homo sapien
cgccgtagcacacgtgcagcggctt

SEQ ID NO: 734809 - DNA, 25 bp, Homo sapien
ccgtagcacacgtgcagcggcttac

SEQ ID NO: 734810 - DNA, 25 bp, Homo sapien
tgcggaagctctagaagagtgaccc

SEQ ID NO: 734811 - DNA, 25 bp, Homo sapien
tttccgttgcggaagctctagaaga

SEQ ID NO: 734812 - DNA, 25 bp, Homo sapien
tctagaagagtgaccctggacccac

SEQ ID NO: 734813 - DNA, 25 bp, Homo sapien
tcacactttccgttgcggaagctct

SEQ ID NO: 734814 - DNA, 25 bp, Homo sapien
tgcacgtaccacaaaaactactact

SEQ ID NO: 734815 - DNA, 25 bp, Homo sapien
ctgcacgtaccacaaaaactactac

SEQ ID NO: 734816 - DNA, 25 bp, Homo sapien
cacgtaccacaaaaactactactga

SEQ ID NO: 734817 - DNA, 25 bp, Homo sapien
gcacgtaccacaaaaactactactg

SEQ ID NO: 734818 - DNA, 25 bp, Homo sapien
tgggcctcgtcccaggattggagac

SEQ ID NO: 734819 - DNA, 25 bp, Homo sapien
gcaagcagcgacgaaaatagtcctt

SEQ ID NO: 734820 - DNA, 25 bp, Homo sapien
ggtggcgggcggctagaaggtgaca

SEQ ID NO: 734821 - DNA, 25 bp, Homo sapien
cccaggattggagacttaaaacgca

SEQ ID NO: 734822 - DNA, 25 bp, Homo sapien
tcattcaggccggaggtcttttcga

SEQ ID NO: 734823 - DNA, 25 bp, Homo sapien
ttttcgagccactttcgcctgcctg

SEQ ID NO: 734824 - DNA, 25 bp, Homo sapien
gcgtgaccgcgtcttcatggagatc

SEQ ID NO: 734825 - DNA, 25 bp, Homo sapien
aatggcacagaattttcgagaaggg

SEQ ID NO: 734826 - DNA, 25 bp, Homo sapien
caaaatagtacgtccaaatctccac

SEQ ID NO: 734827 - DNA, 25 bp, Homo sapien
gaaggcactgatgccgtacccactt

SEQ ID NO: 734828 - DNA, 25 bp, Homo sapien
tctccacttcgtgatgaaaatttgg

SEQ ID NO: 734829 - DNA, 25 bp, Homo sapien
tggaagaaacgggtacacgtagctc

SEQ ID NO: 734830 - DNA, 25 bp, Homo sapien
ctttatcgtaatgtgtatcttcatc

SEQ ID NO: 734831 - DNA, 25 bp, Homo sapien
ttatcgtaatgtgtatcttcatcca

SEQ ID NO: 734832 - DNA, 25 bp, Homo sapien
tatcgtaatgtgtatcttcatccat

SEQ ID NO: 734833 - DNA, 25 bp, Homo sapien
tttatcgtaatgtgtatcttcatcc

SEQ ID NO: 734834 - DNA, 25 bp, Homo sapien
gcatcttctatgtgacttccaacca

SEQ ID NO: 734835 - DNA, 25 bp, Homo sapien
ccaaaatgttactgcatcttctatg

SEQ ID NO: 734836 - DNA, 25 bp, Homo sapien
ctgggcccaaaatgttactgcatct

SEQ ID NO: 734837 - DNA, 25 bp, Homo sapien
tgcatcttctatgtgacttccaacc

SEQ ID NO: 734838 - DNA, 25 bp, Homo sapien
aaccaatcttcatgatatccttatt

SEQ ID NO: 734839 - DNA, 25 bp, Homo sapien
caaccaatcttcatgatatccttat

SEQ ID NO: 734840 - DNA, 25 bp, Homo sapien
accaatcttcatgatatccttattt

SEQ ID NO: 734841 - DNA, 25 bp, Homo sapien
aaatcagagcgcctcttctccaaaa

SEQ ID NO: 734842 - DNA, 25 bp, Homo sapien
ttctccaaaagaacgcagctcctcg

SEQ ID NO: 734843 - DNA, 25 bp, Homo sapien
aaaaatcagagcgcctcttctccaa

SEQ ID NO: 734844 - DNA, 25 bp, Homo sapien
atcagagcgcctcttctccaaaaga

SEQ ID NO: 734845 - DNA, 25 bp, Homo sapien
gcagcaacatctgccattccgcaat

SEQ ID NO: 734846 - DNA, 25 bp, Homo sapien
ctgccattccgcaatatttgctgtt

SEQ ID NO: 734847 - DNA, 25 bp, Homo sapien
aggcagcaacatctgccattccgca

SEQ ID NO: 734848 - DNA, 25 bp, Homo sapien
atcaggcagcaacatctgccattcc

SEQ ID NO: 734849 - DNA, 25 bp, Homo sapien
taaacactacaatggtctgtagccc

SEQ ID NO: 734850 - DNA, 25 bp, Homo sapien
ccattaggccattagggagaaaaca

SEQ ID NO: 734851 - DNA, 25 bp, Homo sapien
tgtagccctccaaagttcaacccta

SEQ ID NO: 734852 - DNA, 25 bp, Homo sapien
tgctccttaggagggaataatgaga

SEQ ID NO: 734853 - DNA, 25 bp, Homo sapien
gtagaggcagatccctaaaaacggc

SEQ ID NO: 734854 - DNA, 25 bp, Homo sapien
tagccttagcactactggcacttgg

SEQ ID NO: 734855 - DNA, 25 bp, Homo sapien
ggcacttgggaccagatgagtctgt

SEQ ID NO: 734856 - DNA, 25 bp, Homo sapien
gcaaaaacgtctccaaacactgtca

SEQ ID NO: 734857 - DNA, 25 bp, Homo sapien
catctgtaccaacactgatcttcag

SEQ ID NO: 734858 - DNA, 25 bp, Homo sapien
acactgatcttcagaaaataatcca

SEQ ID NO: 734859 - DNA, 25 bp, Homo sapien
gtaccaacactgatcttcagaaaat

SEQ ID NO: 734860 - DNA, 25 bp, Homo sapien
tttgcatctgtaccaacactgatct

SEQ ID NO: 734861 - DNA, 25 bp, Homo sapien
aaggaatttcaactatatcagatcg

SEQ ID NO: 734862 - DNA, 25 bp, Homo sapien
ttccatagtcaatgtacctcaccag

SEQ ID NO: 734863 - DNA, 25 bp, Homo sapien
ttttggcaacactagaaaactgcag

SEQ ID NO: 734864 - DNA, 25 bp, Homo sapien
caaactgggtaacttcttgatcaga

SEQ ID NO: 734865 - DNA, 25 bp, Homo sapien
tgagaacaagttgaccaggatccaa

SEQ ID NO: 734866 - DNA, 25 bp, Homo sapien
tcaagctccccaaaaaggttgtgcc

SEQ ID NO: 734867 - DNA, 25 bp, Homo sapien
ggttgactggtttgatctatgcccc

SEQ ID NO: 734868 - DNA, 25 bp, Homo sapien
ccttgggcctgctgaaggttgactg

SEQ ID NO: 734869 - DNA, 25 bp, Homo sapien
caggctgacgttagaccctaaatta

SEQ ID NO: 734870 - DNA, 25 bp, Homo sapien
ctgctctactttcaattctaacgcc

SEQ ID NO: 734871 - DNA, 25 bp, Homo sapien
ttccaggctgacgttagaccctaaa

SEQ ID NO: 734872 - DNA, 25 bp, Homo sapien
ctaacgccttataactttcaagaag

SEQ ID NO: 734873 - DNA, 25 bp, Homo sapien
catcttagctgccagatttttcatt

SEQ ID NO: 734874 - DNA, 25 bp, Homo sapien
tttcattctggtatctatataggtc

SEQ ID NO: 734875 - DNA, 25 bp, Homo sapien
tcttcagagtgtattctaagtggtt

SEQ ID NO: 734876 - DNA, 25 bp, Homo sapien
ttctaagtggttagtcaaatccaca

SEQ ID NO: 734877 - DNA, 25 bp, Homo sapien
caaagaagctggagtagtaaagcac

SEQ ID NO: 734878 - DNA, 25 bp, Homo sapien
gaaacggacactgatgtcgacatgc

SEQ ID NO: 734879 - DNA, 25 bp, Homo sapien
tgagccagactgtattctgcccata

SEQ ID NO: 734880 - DNA, 25 bp, Homo sapien
catccaacacttgtatagcatctga

SEQ ID NO: 734881 - DNA, 25 bp, Homo sapien
agttagaatgacgatcattaaagtc

SEQ ID NO: 734882 - DNA, 25 bp, Homo sapien
tagaatgacgatcattaaagtcagg

SEQ ID NO: 734883 - DNA, 25 bp, Homo sapien
acactttcacagtgttggtgggaac

SEQ ID NO: 734884 - DNA, 25 bp, Homo sapien
tgtggaagacgatatggcgattcct

SEQ ID NO: 734885 - DNA, 25 bp, Homo sapien
catttctttgggcaatcaaaatatt

SEQ ID NO: 734886 - DNA, 25 bp, Homo sapien
tgcaatgtttttaagcgtttattaa

SEQ ID NO: 734887 - DNA, 25 bp, Homo sapien
ttctttgggcaatcaaaatattccc

SEQ ID NO: 734888 - DNA, 25 bp, Homo sapien
ttaagcgtttattaagagatgactc

SEQ ID NO: 734889 - DNA, 25 bp, Homo sapien
tttggaaccatgctacaagacggtg

SEQ ID NO: 734890 - DNA, 25 bp, Homo sapien
gtctgtttcacttctaacactggtg

SEQ ID NO: 734891 - DNA, 25 bp, Homo sapien
acggtgcagagaagcgtctgtttca

SEQ ID NO: 734892 - DNA, 25 bp, Homo sapien
ggtgaactcctctcttttatcacac

SEQ ID NO: 734893 - DNA, 25 bp, Homo sapien
gactcagtcttctctaggatttcat

SEQ ID NO: 734894 - DNA, 25 bp, Homo sapien
gtcttctgaaatcagtgatccttcc

SEQ ID NO: 734895 - DNA, 25 bp, Homo sapien
gatccttccacagataggtcaaaaa

SEQ ID NO: 734896 - DNA, 25 bp, Homo sapien
atattatccattgcgtcttctgaaa

SEQ ID NO: 734897 - DNA, 25 bp, Homo sapien
agcttgtactgtggcaatgagcctt

SEQ ID NO: 734898 - DNA, 25 bp, Homo sapien
ttgaaattatctccttgtctgcatc

SEQ ID NO: 734899 - DNA, 25 bp, Homo sapien
cttttgcagtacttgactatatgta

SEQ ID NO: 734900 - DNA, 25 bp, Homo sapien
caatactgtccttgtacttagcttg

SEQ ID NO: 734901 - DNA, 25 bp, Homo sapien
catagggatgaggatttagtcactc

SEQ ID NO: 734902 - DNA, 25 bp, Homo sapien
taaaactatctcttaggctaaggga

SEQ ID NO: 734903 - DNA, 25 bp, Homo sapien
tatctacagtagactcatacaggca

SEQ ID NO: 734904 - DNA, 25 bp, Homo sapien
gaatatcagttccagcactcaaagt

SEQ ID NO: 734905 - DNA, 25 bp, Homo sapien
gatccacactgggactcttatttaa

SEQ ID NO: 734906 - DNA, 25 bp, Homo sapien
taaatattcaataagctgcttttta

SEQ ID NO: 734907 - DNA, 25 bp, Homo sapien
tcaatgtcttcttaatggatagcaa

SEQ ID NO: 734908 - DNA, 25 bp, Homo sapien
taatggatagcaagtgatccacact

SEQ ID NO: 734909 - DNA, 25 bp, Homo sapien
taaatttcctgaaagacattattgc

SEQ ID NO: 734910 - DNA, 25 bp, Homo sapien
gacattattgcgcagctgagttatt

SEQ ID NO: 734911 - DNA, 25 bp, Homo sapien
tcctgaaagacattattgcgcagct

SEQ ID NO: 734912 - DNA, 25 bp, Homo sapien
tattcctctctctcatgataaattt

SEQ ID NO: 734913 - DNA, 25 bp, Homo sapien
gtatttgagtaatcctatttcagga

SEQ ID NO: 734914 - DNA, 25 bp, Homo sapien
catttctgtgccaaactagttagca

SEQ ID NO: 734915 - DNA, 25 bp, Homo sapien
tctgtgccaaactagttagcatctc

SEQ ID NO: 734916 - DNA, 25 bp, Homo sapien
atgtatttgagtaatcctatttcag

SEQ ID NO: 734917 - DNA, 25 bp, Homo sapien
gctgctaagttccttcatgggctca

SEQ ID NO: 734918 - DNA, 25 bp, Homo sapien
gaattatctgcccattaacctcaga

SEQ ID NO: 734919 - DNA, 25 bp, Homo sapien
tcaagaagatctcgttccaagctca

SEQ ID NO: 734920 - DNA, 25 bp, Homo sapien
cagaacgtaccaaaggacgcttgct

SEQ ID NO: 734921 - DNA, 25 bp, Homo sapien
taaaaacaggaatatcaatggcagt

SEQ ID NO: 734922 - DNA, 25 bp, Homo sapien
ttctctccaagctctatggtaggtg

SEQ ID NO: 734923 - DNA, 25 bp, Homo sapien
tatggtaggtggctgctctctcaat

SEQ ID NO: 734924 - DNA, 25 bp, Homo sapien
ggcagtaaccctgagtctccttcag

SEQ ID NO: 734925 - DNA, 25 bp, Homo sapien
tttgccctagggtagtatgggacca

SEQ ID NO: 734926 - DNA, 25 bp, Homo sapien
gaacagcattcaggtttgccctagg

SEQ ID NO: 734927 - DNA, 25 bp, Homo sapien
taaaggcatgttggcttgaacagca

SEQ ID NO: 734928 - DNA, 25 bp, Homo sapien
accatcagataagccataggatcag

SEQ ID NO: 734929 - DNA, 25 bp, Homo sapien
tatgcaatgtatgcagaccctgggc

SEQ ID NO: 734930 - DNA, 25 bp, Homo sapien
tgggcaacacctttcatgaccttta

SEQ ID NO: 734931 - DNA, 25 bp, Homo sapien
agaccctgggcaacacctttcatga

SEQ ID NO: 734932 - DNA, 25 bp, Homo sapien
gccttatgcaatgtatgcagaccct

SEQ ID NO: 734933 - DNA, 25 bp, Homo sapien
tcacggtttaaagcaaatacattgt

SEQ ID NO: 734934 - DNA, 25 bp, Homo sapien
agtcaaaatctccaacaattccttg

SEQ ID NO: 734935 - DNA, 25 bp, Homo sapien
ttgttcacggtttaaagcaaataca

SEQ ID NO: 734936 - DNA, 25 bp, Homo sapien
ttcacggtttaaagcaaatacattg

SEQ ID NO: 734937 - DNA, 25 bp, Homo sapien
caactcaggtgacatcaaactcaag

SEQ ID NO: 734938 - DNA, 25 bp, Homo sapien
caaccatcatgttcaccgaggctcg

SEQ ID NO: 734939 - DNA, 25 bp, Homo sapien
caggttttcccattttcaactcagg

SEQ ID NO: 734940 - DNA, 25 bp, Homo sapien
taagcatataagtctgaacctggag

SEQ ID NO: 734941 - DNA, 25 bp, Homo sapien
catgggtaaacagtgtgtcatggga

SEQ ID NO: 734942 - DNA, 25 bp, Homo sapien
ggtaatcagcctaatacctaacagg

SEQ ID NO: 734943 - DNA, 25 bp, Homo sapien
actgctttcagattaatgtaggaca

SEQ ID NO: 734944 - DNA, 25 bp, Homo sapien
tgatccacagtaaattcgcttagga

SEQ ID NO: 734945 - DNA, 25 bp, Homo sapien
catcataaatggcaggtgcttatca

SEQ ID NO: 734946 - DNA, 25 bp, Homo sapien
tgcttatcatctacacaacacccgg

SEQ ID NO: 734947 - DNA, 25 bp, Homo sapien
aatggcaggtgcttatcatctacac

SEQ ID NO: 734948 - DNA, 25 bp, Homo sapien
ggcaggtgcttatcatctacacaac

SEQ ID NO: 734949 - DNA, 25 bp, Homo sapien
taagacatagggtaatattgatgac

SEQ ID NO: 734950 - DNA, 25 bp, Homo sapien
aagatctgagatactgcaaacaggc

SEQ ID NO: 734951 - DNA, 25 bp, Homo sapien
agcaagctggcttcataaaagaagc

SEQ ID NO: 734952 - DNA, 25 bp, Homo sapien
ggaaatgcctctactgaaggaccca

SEQ ID NO: 734953 - DNA, 25 bp, Homo sapien
tccactttggggattccatctttat

SEQ ID NO: 734954 - DNA, 25 bp, Homo sapien
atccactttggggattccatcttta

SEQ ID NO: 734955 - DNA, 25 bp, Homo sapien
gatccactttggggattccatcttt

SEQ ID NO: 734956 - DNA, 25 bp, Homo sapien
tgatccactttggggattccatctt

SEQ ID NO: 734957 - DNA, 25 bp, Homo sapien
cctttggcatcaagaaacattcagc

SEQ ID NO: 734958 - DNA, 25 bp, Homo sapien
atctttttctgggtttggaactgat

SEQ ID NO: 734959 - DNA, 25 bp, Homo sapien
taacatatcaagctacagaggaggg

SEQ ID NO: 734960 - DNA, 25 bp, Homo sapien
ttaaaacttgttcagcagtcattga

SEQ ID NO: 734961 - DNA, 25 bp, Homo sapien
aactcaactagtcccagaacatttc

SEQ ID NO: 734962 - DNA, 25 bp, Homo sapien
tcacaacctgaatactaaagataca

SEQ ID NO: 734963 - DNA, 25 bp, Homo sapien
gatatttctgtgtattaaccaaacc

SEQ ID NO: 734964 - DNA, 25 bp, Homo sapien
agatacaactcaactagtcccagaa

SEQ ID NO: 734965 - DNA, 25 bp, Homo sapien
tgtcaaaagttctacccagaagttg

SEQ ID NO: 734966 - DNA, 25 bp, Homo sapien
tactagaggccagctgtccctttgt

SEQ ID NO: 734967 - DNA, 25 bp, Homo sapien
ttctacccagaagttgattttcaac

SEQ ID NO: 734968 - DNA, 25 bp, Homo sapien
tcagtttctttattactagaggcca

SEQ ID NO: 734969 - DNA, 25 bp, Homo sapien
tgcccttgaccacctaaaacttcta

SEQ ID NO: 734970 - DNA, 25 bp, Homo sapien
ccatgacataagttctctgcccttg

SEQ ID NO: 734971 - DNA, 25 bp, Homo sapien
tgaactgggatagacagaaagggtt

SEQ ID NO: 734972 - DNA, 25 bp, Homo sapien
tggtggtaccaagggtatgaactgg

SEQ ID NO: 734973 - DNA, 25 bp, Homo sapien
cctcatcaacattgtgcagtccagc

SEQ ID NO: 734974 - DNA, 25 bp, Homo sapien
tttgacgtaggcaacactccaaccc

SEQ ID NO: 734975 - DNA, 25 bp, Homo sapien
ggcagcaatggtttgacgtaggcaa

SEQ ID NO: 734976 - DNA, 25 bp, Homo sapien
tctggaaagctgggagagctgccat

SEQ ID NO: 734977 - DNA, 25 bp, Homo sapien
tggacacagtattagctcctagaaa

SEQ ID NO: 734978 - DNA, 25 bp, Homo sapien
tctggacacagtattagctcctaga

SEQ ID NO: 734979 - DNA, 25 bp, Homo sapien
aacaaacaacttcagacgcgcggcc

SEQ ID NO: 734980 - DNA, 25 bp, Homo sapien
caaacaacttcagacgcgcggcctt

SEQ ID NO: 734981 - DNA, 25 bp, Homo sapien
cttggttatggacagctttaaggtc

SEQ ID NO: 734982 - DNA, 25 bp, Homo sapien
aagccaggagaggtattgagaggtg

SEQ ID NO: 734983 - DNA, 25 bp, Homo sapien
cagctttaaggtcccggaagccagg

SEQ ID NO: 734984 - DNA, 25 bp, Homo sapien
cagcccgccgctggaccatgggagc

SEQ ID NO: 734985 - DNA, 25 bp, Homo sapien
caaagcagacagcatgtggaccagc

SEQ ID NO: 734986 - DNA, 25 bp, Homo sapien
aaagcagacagcatgtggaccagcc

SEQ ID NO: 734987 - DNA, 25 bp, Homo sapien
ccaaagcagacagcatgtggaccag

SEQ ID NO: 734988 - DNA, 25 bp, Homo sapien
ccaggcaaaccactcatgaaactat

SEQ ID NO: 734989 - DNA, 25 bp, Homo sapien
ctctctgcgcccagttacgagttag

SEQ ID NO: 734990 - DNA, 25 bp, Homo sapien
gagttagaggtgacttaacagaccc

SEQ ID NO: 734991 - DNA, 25 bp, Homo sapien
caaaccactcatgaaactatctggg

SEQ ID NO: 734992 - DNA, 25 bp, Homo sapien
tataggctctttcaactcccaccag

SEQ ID NO: 734993 - DNA, 25 bp, Homo sapien
cagccagacttcttagtataggctc

SEQ ID NO: 734994 - DNA, 25 bp, Homo sapien
gcccaggtgcctcccacataaaacc

SEQ ID NO: 734995 - DNA, 25 bp, Homo sapien
acttcttagtataggctctttcaac

SEQ ID NO: 734996 - DNA, 25 bp, Homo sapien
cagcagtggattgaaacatccggat

SEQ ID NO: 734997 - DNA, 25 bp, Homo sapien
cagtggattgaaacatccggatgca

SEQ ID NO: 734998 - DNA, 25 bp, Homo sapien
ttgaaacatccggatgcatttgtca

SEQ ID NO: 734999 - DNA, 25 bp, Homo sapien
ggattgaaacatccggatgcatttg

SEQ ID NO: 735000 - DNA, 25 bp, Homo sapien
aatgctactgacaatctccaggcct

SEQ ID NO: 735001 - DNA, 25 bp, Homo sapien
atgctactgacaatctccaggcctg

SEQ ID NO: 735002 - DNA, 25 bp, Homo sapien
ggctcttgccatgtgcagggcatta

SEQ ID NO: 735003 - DNA, 25 bp, Homo sapien
ctagacagctatgttgcctaaagga

SEQ ID NO: 735004 - DNA, 25 bp, Homo sapien
aggcctgagacccacaatgacaaaa

SEQ ID NO: 735005 - DNA, 25 bp, Homo sapien
tatgttgcctaaaggactgtgagga

SEQ ID NO: 735006 - DNA, 25 bp, Homo sapien
cacctggatagatttcaacaagttc

SEQ ID NO: 735007 - DNA, 25 bp, Homo sapien
acctggatagatttcaacaagttca

SEQ ID NO: 735008 - DNA, 25 bp, Homo sapien
tggatagatttcaacaagttcattt

SEQ ID NO: 735009 - DNA, 25 bp, Homo sapien
cctggatagatttcaacaagttcat

SEQ ID NO: 735010 - DNA, 25 bp, Homo sapien
gctgttcgtaaagacaggagggaac

SEQ ID NO: 735011 - DNA, 25 bp, Homo sapien
gacacagctgttcgtaaagacagga

SEQ ID NO: 735012 - DNA, 25 bp, Homo sapien
aggagggaacctccgccagccttgg

SEQ ID NO: 735013 - DNA, 25 bp, Homo sapien
ctcagtgacctcttgagacacagct

SEQ ID NO: 735014 - DNA, 25 bp, Homo sapien
tccaagacctgcacccttagcagat

SEQ ID NO: 735015 - DNA, 25 bp, Homo sapien
cctcgggcatgagcattgtcatcgc

SEQ ID NO: 735016 - DNA, 25 bp, Homo sapien
ttagcagatatcctaaaccctcggg

SEQ ID NO: 735017 - DNA, 25 bp, Homo sapien
tatcctaaaccctcgggcatgagca

SEQ ID NO: 735018 - DNA, 25 bp, Homo sapien
gattctaagggttcttgaatgcaca

SEQ ID NO: 735019 - DNA, 25 bp, Homo sapien
gcacagcttggcaagatccccaaca

SEQ ID NO: 735020 - DNA, 25 bp, Homo sapien
cagagttccgacacagttgggtgag

SEQ ID NO: 735021 - DNA, 25 bp, Homo sapien
tgggtgagagcccatacaatgggat

SEQ ID NO: 735022 - DNA, 25 bp, Homo sapien
ccagctcacgtaactgcctgttatc

SEQ ID NO: 735023 - DNA, 25 bp, Homo sapien
acactggtcaggtctagagggtggg

SEQ ID NO: 735024 - DNA, 25 bp, Homo sapien
tgccaccagctcacgtaactgcctg

SEQ ID NO: 735025 - DNA, 25 bp, Homo sapien
gagggcagggacttccttgagctcc

SEQ ID NO: 735026 - DNA, 25 bp, Homo sapien
tgcttcatcaaccaccatcgtgctt

SEQ ID NO: 735027 - DNA, 25 bp, Homo sapien
tcaaccaccatcgtgctttctaaac

SEQ ID NO: 735028 - DNA, 25 bp, Homo sapien
agtggtgcttcatcaaccaccatcg

SEQ ID NO: 735029 - DNA, 25 bp, Homo sapien
tcagtccagtggtgcttcatcaacc

SEQ ID NO: 735030 - DNA, 25 bp, Homo sapien
ctcgaggagagcttccctattcact

SEQ ID NO: 735031 - DNA, 25 bp, Homo sapien
gtggcctggttccagttacattttc

SEQ ID NO: 735032 - DNA, 25 bp, Homo sapien
tccagttacattttccgcaattagc

SEQ ID NO: 735033 - DNA, 25 bp, Homo sapien
gggctcgaggagagcttccctattc

SEQ ID NO: 735034 - DNA, 25 bp, Homo sapien
caagaagtggaatcatgccatgtgc

SEQ ID NO: 735035 - DNA, 25 bp, Homo sapien
atgggagccaagaagtggaatcatg

SEQ ID NO: 735036 - DNA, 25 bp, Homo sapien
gagccaagaagtggaatcatgccat

SEQ ID NO: 735037 - DNA, 25 bp, Homo sapien
gccaagaagtggaatcatgccatgt

SEQ ID NO: 735038 - DNA, 25 bp, Homo sapien
tgcaaacttcggcattgtcttcaaa

SEQ ID NO: 735039 - DNA, 25 bp, Homo sapien
tggactgcaaacttcggcattgtct

SEQ ID NO: 735040 - DNA, 25 bp, Homo sapien
gactgcaaacttcggcattgtcttc

SEQ ID NO: 735041 - DNA, 25 bp, Homo sapien
ctggactgcaaacttcggcattgtc

SEQ ID NO: 735042 - DNA, 25 bp, Homo sapien
catctctgcagacaatgaagtacct

SEQ ID NO: 735043 - DNA, 25 bp, Homo sapien
caaagttgtggtcacagagtgagat

SEQ ID NO: 735044 - DNA, 25 bp, Homo sapien
caaggtccaatgtatccagatatga

SEQ ID NO: 735045 - DNA, 25 bp, Homo sapien
ccattattgatgttgacaaggtcca

SEQ ID NO: 735046 - DNA, 25 bp, Homo sapien
tttttcagcttaccacagtgagtat

SEQ ID NO: 735047 - DNA, 25 bp, Homo sapien
gattagggtgtaaaaatctgtggga

SEQ ID NO: 735048 - DNA, 25 bp, Homo sapien
ttgccatataacactgacaggatcc

SEQ ID NO: 735049 - DNA, 25 bp, Homo sapien
cagtgagtataatccatatgaacaa

SEQ ID NO: 735050 - DNA, 25 bp, Homo sapien
cacagtcatacttatagtagatagg

SEQ ID NO: 735051 - DNA, 25 bp, Homo sapien
tgtccgaggcctggtggttacttct

SEQ ID NO: 735052 - DNA, 25 bp, Homo sapien
tccccagcagttagtcacattttcc

SEQ ID NO: 735053 - DNA, 25 bp, Homo sapien
gatcaaaacttatgctggatcccat

SEQ ID NO: 735054 - DNA, 25 bp, Homo sapien
gcatgttcggggcagcatagctgtg

SEQ ID NO: 735055 - DNA, 25 bp, Homo sapien
ttctgagattagaggagatggggca

SEQ ID NO: 735056 - DNA, 25 bp, Homo sapien
agatggggcatgttcggggcagcat

SEQ ID NO: 735057 - DNA, 25 bp, Homo sapien
cttctgagattagaggagatggggc

SEQ ID NO: 735058 - DNA, 25 bp, Homo sapien
cactgaagctgcacttgatgaacat

SEQ ID NO: 735059 - DNA, 25 bp, Homo sapien
atcactgaagctgcacttgatgaac

SEQ ID NO: 735060 - DNA, 25 bp, Homo sapien
tcactgaagctgcacttgatgaaca

SEQ ID NO: 735061 - DNA, 25 bp, Homo sapien
tggccagacatttcatctgctttgt

SEQ ID NO: 735062 - DNA, 25 bp, Homo sapien
gatggccagacatttcatctgcttt

SEQ ID NO: 735063 - DNA, 25 bp, Homo sapien
gtgactccttgcctgtaatagcaga

SEQ ID NO: 735064 - DNA, 25 bp, Homo sapien
tctcataggtgtttcataattggca

SEQ ID NO: 735065 - DNA, 25 bp, Homo sapien
atggtatgcaagccatgataagaca

SEQ ID NO: 735066 - DNA, 25 bp, Homo sapien
catggtatgcaagccatgataagac

SEQ ID NO: 735067 - DNA, 25 bp, Homo sapien
ttcagttcttggtccagctcagtgc

SEQ ID NO: 735068 - DNA, 25 bp, Homo sapien
tgtgccagccgtggtgaaaacctgc

SEQ ID NO: 735069 - DNA, 25 bp, Homo sapien
aaacctgcagcaagtcatgatgaag

SEQ ID NO: 735070 - DNA, 25 bp, Homo sapien
cctgatgtagtgtgcaagccatgat

SEQ ID NO: 735071 - DNA, 25 bp, Homo sapien
gaactctgactctctaggactgtga

SEQ ID NO: 735072 - DNA, 25 bp, Homo sapien
actgtgaccgcaggccaccctgtgg

SEQ ID NO: 735073 - DNA, 25 bp, Homo sapien
tgatggtgatttcagcaagatcaga

SEQ ID NO: 735074 - DNA, 25 bp, Homo sapien
gattcttcgaaagagaactctgact

SEQ ID NO: 735075 - DNA, 25 bp, Homo sapien
cacgtcattgcataaccctggttca

SEQ ID NO: 735076 - DNA, 25 bp, Homo sapien
ggttcatgctttccaatctggctct

SEQ ID NO: 735077 - DNA, 25 bp, Homo sapien
tggccccaggcacgtcattgcataa

SEQ ID NO: 735078 - DNA, 25 bp, Homo sapien
ctggttcatgctttccaatctggct

SEQ ID NO: 735079 - DNA, 25 bp, Homo sapien
gaagccagctattcccactgttggg

SEQ ID NO: 735080 - DNA, 25 bp, Homo sapien
catgaagctcccaatcaaggtgaga

SEQ ID NO: 735081 - DNA, 25 bp, Homo sapien
gaaacatcagattgccccaagtgca

SEQ ID NO: 735082 - DNA, 25 bp, Homo sapien
tgcctagtgggctcagaaacatcag

SEQ ID NO: 735083 - DNA, 25 bp, Homo sapien
gatagaacaggccttatgtcaacag

SEQ ID NO: 735084 - DNA, 25 bp, Homo sapien
gcaggtgccctgacataggttctgt

SEQ ID NO: 735085 - DNA, 25 bp, Homo sapien
tttagctattgaatcagcaggtgcc

SEQ ID NO: 735086 - DNA, 25 bp, Homo sapien
tcttggcactccgatgatagaacag

SEQ ID NO: 735087 - DNA, 25 bp, Homo sapien
tcatgcactcttttctcgtggtttt

SEQ ID NO: 735088 - DNA, 25 bp, Homo sapien
ctcttttctcgtggttttgcagcac

SEQ ID NO: 735089 - DNA, 25 bp, Homo sapien
cactcttttctcgtggttttgcagc

SEQ ID NO: 735090 - DNA, 25 bp, Homo sapien
atgcactcttttctcgtggttttgc

SEQ ID NO: 735091 - DNA, 25 bp, Homo sapien
tgggaggaacaatattgagtctctc

SEQ ID NO: 735092 - DNA, 25 bp, Homo sapien
tgagtctctcaatccaactgttatt

SEQ ID NO: 735093 - DNA, 25 bp, Homo sapien
aacgttctgagttctttagtagtgc

SEQ ID NO: 735094 - DNA, 25 bp, Homo sapien
tcttacatcccatatcattccaggt

SEQ ID NO: 735095 - DNA, 25 bp, Homo sapien
atagattgcgtttctatcatcttgg

SEQ ID NO: 735096 - DNA, 25 bp, Homo sapien
tcttggtgattactttcaacataca

SEQ ID NO: 735097 - DNA, 25 bp, Homo sapien
catcttggtgattactttcaacata

SEQ ID NO: 735098 - DNA, 25 bp, Homo sapien
tagattgcgtttctatcatcttggt

SEQ ID NO: 735099 - DNA, 25 bp, Homo sapien
tggacacaagctaatgagtttatct

SEQ ID NO: 735100 - DNA, 25 bp, Homo sapien
gtctctagtaatatgagtctttcag

SEQ ID NO: 735101 - DNA, 25 bp, Homo sapien
taaagccagacctccacaattattt

SEQ ID NO: 735102 - DNA, 25 bp, Homo sapien
acaaattcaattgtaatggacacaa

SEQ ID NO: 735103 - DNA, 25 bp, Homo sapien
tgtgtgagcagtggtcaaagtattt

SEQ ID NO: 735104 - DNA, 25 bp, Homo sapien
cgatgtgtgagcagtggtcaaagta

SEQ ID NO: 735105 - DNA, 25 bp, Homo sapien
gagcagtggtcaaagtatttgtcat

SEQ ID NO: 735106 - DNA, 25 bp, Homo sapien
tgagcagtggtcaaagtatttgtca

SEQ ID NO: 735107 - DNA, 25 bp, Homo sapien
tctaatggtccttctgggtaatcca

SEQ ID NO: 735108 - DNA, 25 bp, Homo sapien
tggtccttctgggtaatccagggcc

SEQ ID NO: 735109 - DNA, 25 bp, Homo sapien
ctttctaatggtccttctgggtaat

SEQ ID NO: 735110 - DNA, 25 bp, Homo sapien
taatggtccttctgggtaatccagg

SEQ ID NO: 735111 - DNA, 25 bp, Homo sapien
tcatgtgagtgcactcggaaacttg

SEQ ID NO: 735112 - DNA, 25 bp, Homo sapien
tgctctttagagtagattccagaag

SEQ ID NO: 735113 - DNA, 25 bp, Homo sapien
cagcagttgttggtcaattgctctt

SEQ ID NO: 735114 - DNA, 25 bp, Homo sapien
gattccagaagtgggttctgagcca

SEQ ID NO: 735115 - DNA, 25 bp, Homo sapien
agggcccactgcatgagtgaggagc

SEQ ID NO: 735116 - DNA, 25 bp, Homo sapien
ccactgcatgagtgaggagcaactc

SEQ ID NO: 735117 - DNA, 25 bp, Homo sapien
cccactgcatgagtgaggagcaact

SEQ ID NO: 735118 - DNA, 25 bp, Homo sapien
ggcccactgcatgagtgaggagcaa

SEQ ID NO: 735119 - DNA, 25 bp, Homo sapien
tagatgttccatcttgtcgccctgc

SEQ ID NO: 735120 - DNA, 25 bp, Homo sapien
catcttgtcgccctgccctaatgaa

SEQ ID NO: 735121 - DNA, 25 bp, Homo sapien
gtcgccctgccctaatgaaatttca

SEQ ID NO: 735122 - DNA, 25 bp, Homo sapien
gaaaaggtagatgttccatcttgtc

SEQ ID NO: 735123 - DNA, 25 bp, Homo sapien
cccctgcgctttctagtccactgac

SEQ ID NO: 735124 - DNA, 25 bp, Homo sapien
agcccctgcgctttctagtccactg

SEQ ID NO: 735125 - DNA, 25 bp, Homo sapien
cacagcccctgcgctttctagtcca

SEQ ID NO: 735126 - DNA, 25 bp, Homo sapien
acagcccctgcgctttctagtccac

SEQ ID NO: 735127 - DNA, 25 bp, Homo sapien
tgagtccaaagcctccaagcaaggg

SEQ ID NO: 735128 - DNA, 25 bp, Homo sapien
tgggaaactggataaccgtgcttgt

SEQ ID NO: 735129 - DNA, 25 bp, Homo sapien
tcctctgcatctgccgtggtctggg

SEQ ID NO: 735130 - DNA, 25 bp, Homo sapien
ggataaccgtgcttgttagaactga

SEQ ID NO: 735131 - DNA, 25 bp, Homo sapien
tgttgctctgtacattgtgcttgcc

SEQ ID NO: 735132 - DNA, 25 bp, Homo sapien
ttgtgcttgccaaaaccaggtctgt

SEQ ID NO: 735133 - DNA, 25 bp, Homo sapien
ctggccactgcatgttgctctgtac

SEQ ID NO: 735134 - DNA, 25 bp, Homo sapien
tgcatgttgctctgtacattgtgct

SEQ ID NO: 735135 - DNA, 25 bp, Homo sapien
agatgatactcgggcctgccagtgg

SEQ ID NO: 735136 - DNA, 25 bp, Homo sapien
tcagatgatactcgggcctgccagt

SEQ ID NO: 735137 - DNA, 25 bp, Homo sapien
ttcagatgatactcgggcctgccag

SEQ ID NO: 735138 - DNA, 25 bp, Homo sapien
ggcttcagatgatactcgggcctgc

SEQ ID NO: 735139 - DNA, 25 bp, Homo sapien
caggcaatgctgacgttagtagaaa

SEQ ID NO: 735140 - DNA, 25 bp, Homo sapien
tgacgttagtagaaagctggaggtc

SEQ ID NO: 735141 - DNA, 25 bp, Homo sapien
caatgctgacgttagtagaaagctg

SEQ ID NO: 735142 - DNA, 25 bp, Homo sapien
ccagggcaggcaatgctgacgttag

SEQ ID NO: 735143 - DNA, 25 bp, Homo sapien
cctttggatattaccgtggtcctgc

SEQ ID NO: 735144 - DNA, 25 bp, Homo sapien
caggcaagttgatcccaaatgatac

SEQ ID NO: 735145 - DNA, 25 bp, Homo sapien
agtagctggagctgacataggcccc

SEQ ID NO: 735146 - DNA, 25 bp, Homo sapien
taagcttctttaaggagcgtcctgc

SEQ ID NO: 735147 - DNA, 25 bp, Homo sapien
tactagtacctcatattcaccggaa

SEQ ID NO: 735148 - DNA, 25 bp, Homo sapien
gagagcctgaggtatcttgaatttt

SEQ ID NO: 735149 - DNA, 25 bp, Homo sapien
tgttttcttgtgacttgctgagagc

SEQ ID NO: 735150 - DNA, 25 bp, Homo sapien
tgtaccaattgctcagacagcatca

SEQ ID NO: 735151 - DNA, 25 bp, Homo sapien
ggatgacaaccccttcatctgaaat

SEQ ID NO: 735152 - DNA, 25 bp, Homo sapien
tatttaaatattgacgtggatgaca

SEQ ID NO: 735153 - DNA, 25 bp, Homo sapien
gcctgtaatcatctcccggcagcat

SEQ ID NO: 735154 - DNA, 25 bp, Homo sapien
cacatgaactcactgacctgcctga

SEQ ID NO: 735155 - DNA, 25 bp, Homo sapien
tcacaggatcagcaagtaacattat

SEQ ID NO: 735156 - DNA, 25 bp, Homo sapien
taacattatttgtaaaggtccaagc

SEQ ID NO: 735157 - DNA, 25 bp, Homo sapien
acattatttgtaaaggtccaagcat

SEQ ID NO: 735158 - DNA, 25 bp, Homo sapien
acaggatcagcaagtaacattattt

SEQ ID NO: 735159 - DNA, 25 bp, Homo sapien
ctaaaagagtcaatgttgggtttgg

SEQ ID NO: 735160 - DNA, 25 bp, Homo sapien
gctaaaagagtcaatgttgggtttg

SEQ ID NO: 735161 - DNA, 25 bp, Homo sapien
tggctaaaagagtcaatgttgggtt

SEQ ID NO: 735162 - DNA, 25 bp, Homo sapien
tttggctaaaagagtcaatgttggg

SEQ ID NO: 735163 - DNA, 25 bp, Homo sapien
tgcagccagggagcggggtgtcctc

SEQ ID NO: 735164 - DNA, 25 bp, Homo sapien
ctgcagccagggagcggggtgtcct

SEQ ID NO: 735165 - DNA, 25 bp, Homo sapien
agccagggagcggggtgtcctccac

SEQ ID NO: 735166 - DNA, 25 bp, Homo sapien
agggagcggggtgtcctccacagcc

SEQ ID NO: 735167 - DNA, 25 bp, Homo sapien
gtctcccatcttgttgatatagcaa

SEQ ID NO: 735168 - DNA, 25 bp, Homo sapien
acttgcttaactgtctagaatcctg

SEQ ID NO: 735169 - DNA, 25 bp, Homo sapien
cacctactgagtctgtgaaatactt

SEQ ID NO: 735170 - DNA, 25 bp, Homo sapien
gcctataaccttagcacctactgag

SEQ ID NO: 735171 - DNA, 25 bp, Homo sapien
taccattgtctctgctagctgcaaa

SEQ ID NO: 735172 - DNA, 25 bp, Homo sapien
tcagatctaccattgtctctgctag

SEQ ID NO: 735173 - DNA, 25 bp, Homo sapien
gctagctgcaaaaaagtctgggaag

SEQ ID NO: 735174 - DNA, 25 bp, Homo sapien
cattcatcagatctaccattgtctc

SEQ ID NO: 735175 - DNA, 25 bp, Homo sapien
ccttaatttgaaagctcctaacatc

SEQ ID NO: 735176 - DNA, 25 bp, Homo sapien
aatttccagaatctgctgtctgtag

SEQ ID NO: 735177 - DNA, 25 bp, Homo sapien
cactgtactgcttccggaggagtcc

SEQ ID NO: 735178 - DNA, 25 bp, Homo sapien
gcataagctacggtcaatttccaga

SEQ ID NO: 735179 - DNA, 25 bp, Homo sapien
ctcctttttctctgaatgtaccacc

SEQ ID NO: 735180 - DNA, 25 bp, Homo sapien
tcctttttctctgaatgtaccacca

SEQ ID NO: 735181 - DNA, 25 bp, Homo sapien
cctttttctctgaatgtaccaccat

SEQ ID NO: 735182 - DNA, 25 bp, Homo sapien
ttgattcagatagaacctggaccac

SEQ ID NO: 735183 - DNA, 25 bp, Homo sapien
gaaacccagtggtttcatgactaaa

SEQ ID NO: 735184 - DNA, 25 bp, Homo sapien
tagcaggttcatagcttgattcaga

SEQ ID NO: 735185 - DNA, 25 bp, Homo sapien
gaacctggaccacatgaaacccagt

SEQ ID NO: 735186 - DNA, 25 bp, Homo sapien
aaggtaatgaccgagagaagtcaaa

SEQ ID NO: 735187 - DNA, 25 bp, Homo sapien
ctagagaaggtaatgaccgagagaa

SEQ ID NO: 735188 - DNA, 25 bp, Homo sapien
aatgaccgagagaagtcaaataacc

SEQ ID NO: 735189 - DNA, 25 bp, Homo sapien
tgaccgagagaagtcaaataaccgg

SEQ ID NO: 735190 - DNA, 25 bp, Homo sapien
tctaacagctttgttaagataacat

SEQ ID NO: 735191 - DNA, 25 bp, Homo sapien
tgcatcttctcctagctgctgagcc

SEQ ID NO: 735192 - DNA, 25 bp, Homo sapien
gataacattgagatactgttgagct

SEQ ID NO: 735193 - DNA, 25 bp, Homo sapien
tcaaaaggaggtgaatcagtggaga

SEQ ID NO: 735194 - DNA, 25 bp, Homo sapien
cacaactgcgcgctgttggagtgag

SEQ ID NO: 735195 - DNA, 25 bp, Homo sapien
aggcaactgggcgcacagatttttc

SEQ ID NO: 735196 - DNA, 25 bp, Homo sapien
ttggagtgaggcaactgggcgcaca

SEQ ID NO: 735197 - DNA, 25 bp, Homo sapien
tagcgcggcatcctcgccgggcaca

SEQ ID NO: 735198 - DNA, 25 bp, Homo sapien
ccactgggtgccggagtaggaagca

SEQ ID NO: 735199 - DNA, 25 bp, Homo sapien
acccactgggtgccggagtaggaag

SEQ ID NO: 735200 - DNA, 25 bp, Homo sapien
caacccactgggtgccggagtagga

SEQ ID NO: 735201 - DNA, 25 bp, Homo sapien
cactgggtgccggagtaggaagcac

SEQ ID NO: 735202 - DNA, 25 bp, Homo sapien
gtactatgctgtcgggcgagcgtct

SEQ ID NO: 735203 - DNA, 25 bp, Homo sapien
cggcaagtactatgctgtcgggcga

SEQ ID NO: 735204 - DNA, 25 bp, Homo sapien
cgcgggcgtggctgggcggcaagta

SEQ ID NO: 735205 - DNA, 25 bp, Homo sapien
gctgggcggcaagtactatgctgtc

SEQ ID NO: 735206 - DNA, 25 bp, Homo sapien
agaagggccgtggacaatcagaggg

SEQ ID NO: 735207 - DNA, 25 bp, Homo sapien
gagcagaggaacaagtggaatttag

SEQ ID NO: 735208 - DNA, 25 bp, Homo sapien
tttagccgccaagagggctggtccg

SEQ ID NO: 735209 - DNA, 25 bp, Homo sapien
cagctgccttgggatagcggtcccg

SEQ ID NO: 735210 - DNA, 25 bp, Homo sapien
acttcgttcgaagtctcagggacca

SEQ ID NO: 735211 - DNA, 25 bp, Homo sapien
gggccccgccagtttagcattcaaa

SEQ ID NO: 735212 - DNA, 25 bp, Homo sapien
cattcaaaaccgaattggaagttct

SEQ ID NO: 735213 - DNA, 25 bp, Homo sapien
cacctgaaaacttcgcgcaacttcg

SEQ ID NO: 735214 - DNA, 25 bp, Homo sapien
agaacccaggagtggctagcaccac

SEQ ID NO: 735215 - DNA, 25 bp, Homo sapien
gagagaacccaggagtggctagcac

SEQ ID NO: 735216 - DNA, 25 bp, Homo sapien
atccgctctcgtcccagtcccgcag

SEQ ID NO: 735217 - DNA, 25 bp, Homo sapien
ccccaatccgctctcgtcccagtcc

SEQ ID NO: 735218 - DNA, 25 bp, Homo sapien
gggattcagagcacccacgcgcagc

SEQ ID NO: 735219 - DNA, 25 bp, Homo sapien
acagaaggctcaacggacgggcttg

SEQ ID NO: 735220 - DNA, 25 bp, Homo sapien
ttggggattcagagcacccacgcgc

SEQ ID NO: 735221 - DNA, 25 bp, Homo sapien
aggcacagaaggctcaacggacggg

SEQ ID NO: 735222 - DNA, 25 bp, Homo sapien
ctggtgcgtcctcgcccgggttgtc

SEQ ID NO: 735223 - DNA, 25 bp, Homo sapien
gccgagtagtatctggccatgtcct

SEQ ID NO: 735224 - DNA, 25 bp, Homo sapien
acccaggcacacgagcagggacagg

SEQ ID NO: 735225 - DNA, 25 bp, Homo sapien
ttgatgtagtgtcgcagcgccgagt

SEQ ID NO: 735226 - DNA, 25 bp, Homo sapien
tactttcgagatttctggaccgggc

SEQ ID NO: 735227 - DNA, 25 bp, Homo sapien
tggcgcattcttgcccctttcactg

SEQ ID NO: 735228 - DNA, 25 bp, Homo sapien
gtttctcctagacaccttgctagcg

SEQ ID NO: 735229 - DNA, 25 bp, Homo sapien
cctacagcatttctctggcgcattc

SEQ ID NO: 735230 - DNA, 25 bp, Homo sapien
tctttgatctgcatgacggcataac

SEQ ID NO: 735231 - DNA, 25 bp, Homo sapien
caaagacactcaaaggagggctcca

SEQ ID NO: 735232 - DNA, 25 bp, Homo sapien
gctttatggcaatcatcttcggaaa

SEQ ID NO: 735233 - DNA, 25 bp, Homo sapien
tgttggagataacactgcctgttga

SEQ ID NO: 735234 - DNA, 25 bp, Homo sapien
ctatttgggatatgaaaactaaaca

SEQ ID NO: 735235 - DNA, 25 bp, Homo sapien
taaacattattgtcaggtgttcatc

SEQ ID NO: 735236 - DNA, 25 bp, Homo sapien
caagcaagctaggtgtatgaagcat

SEQ ID NO: 735237 - DNA, 25 bp, Homo sapien
tacttttataactaggtgacaggaa

SEQ ID NO: 735238 - DNA, 25 bp, Homo sapien
cgagttctgggaacattttctgtgc

SEQ ID NO: 735239 - DNA, 25 bp, Homo sapien
caagaggtctgaaatcagtgtctct

SEQ ID NO: 735240 - DNA, 25 bp, Homo sapien
gctttctctcatcaagaggtctgaa

SEQ ID NO: 735241 - DNA, 25 bp, Homo sapien
tctctgggctggatcgttttccata

SEQ ID NO: 735242 - DNA, 25 bp, Homo sapien
gcaccttgagctctgcaacaatgtc

SEQ ID NO: 735243 - DNA, 25 bp, Homo sapien
tgggcaccttgagctctgcaacaat

SEQ ID NO: 735244 - DNA, 25 bp, Homo sapien
ctgggcaccttgagctctgcaacaa

SEQ ID NO: 735245 - DNA, 25 bp, Homo sapien
gggcaccttgagctctgcaacaatg

SEQ ID NO: 735246 - DNA, 25 bp, Homo sapien
aaatctcccctagtctagaagcctg

SEQ ID NO: 735247 - DNA, 25 bp, Homo sapien
tcatttctgccgaaatctcccctag

SEQ ID NO: 735248 - DNA, 25 bp, Homo sapien
ttttaaaatcgtcaaaggagcacca

SEQ ID NO: 735249 - DNA, 25 bp, Homo sapien
tattccacagaagtttagagatttg

SEQ ID NO: 735250 - DNA, 25 bp, Homo sapien
caagtgttgtagtgacctcttctgg

SEQ ID NO: 735251 - DNA, 25 bp, Homo sapien
tgggtggaccctgtgaactatgatc

SEQ ID NO: 735252 - DNA, 25 bp, Homo sapien
cctgctgagtctctagggagaactt

SEQ ID NO: 735253 - DNA, 25 bp, Homo sapien
cattgtagaacttggtttaaggcag

SEQ ID NO: 735254 - DNA, 25 bp, Homo sapien
tgcttagtgttaaagacaaccctgg

SEQ ID NO: 735255 - DNA, 25 bp, Homo sapien
gtctccttctaactgcacctgatgg

SEQ ID NO: 735256 - DNA, 25 bp, Homo sapien
aatagcactcataggcaacttcaag

SEQ ID NO: 735257 - DNA, 25 bp, Homo sapien
cagtaagtcgatatagtctacccta

SEQ ID NO: 735258 - DNA, 25 bp, Homo sapien
tctgtatgtatcaaaggagccgaag

SEQ ID NO: 735259 - DNA, 25 bp, Homo sapien
tctgaagtgaaagatgaccgggaac

SEQ ID NO: 735260 - DNA, 25 bp, Homo sapien
gctgagcagcattccacgatgttga

SEQ ID NO: 735261 - DNA, 25 bp, Homo sapien
acgatgttgacaggcgtcttgggca

SEQ ID NO: 735262 - DNA, 25 bp, Homo sapien
tcaccacattgcagggtcttcaagc

SEQ ID NO: 735263 - DNA, 25 bp, Homo sapien
gaaaacattgcagaattcagcacag

SEQ ID NO: 735264 - DNA, 25 bp, Homo sapien
tatacaatgatgacaaaggaaaaca

SEQ ID NO: 735265 - DNA, 25 bp, Homo sapien
cagtggctgcatgcattggtaggat

SEQ ID NO: 735266 - DNA, 25 bp, Homo sapien
taggatgggtggattctcgttttac

SEQ ID NO: 735267 - DNA, 25 bp, Homo sapien
cagactgaactagctctcgtggaga

SEQ ID NO: 735268 - DNA, 25 bp, Homo sapien
tcctgtgcgtcaggcaacaagggca

SEQ ID NO: 735269 - DNA, 25 bp, Homo sapien
ccttcccataattgcacagcatttg

SEQ ID NO: 735270 - DNA, 25 bp, Homo sapien
gtatttacaatcaacttcagactga

SEQ ID NO: 735271 - DNA, 25 bp, Homo sapien
tgaaaactcaacaacttttgggtgc

SEQ ID NO: 735272 - DNA, 25 bp, Homo sapien
tagctttggtacttagcctttcgtg

SEQ ID NO: 735273 - DNA, 25 bp, Homo sapien
ttctcatgtcacatgcaggtaacat

SEQ ID NO: 735274 - DNA, 25 bp, Homo sapien
cttagcctttcgtgtaaatttctca

SEQ ID NO: 735275 - DNA, 25 bp, Homo sapien
catgagttgcattagagacagagaa

SEQ ID NO: 735276 - DNA, 25 bp, Homo sapien
ttgggctccaaatggcacacttctc

SEQ ID NO: 735277 - DNA, 25 bp, Homo sapien
aaatggcacacttctcatgagttgc

SEQ ID NO: 735278 - DNA, 25 bp, Homo sapien
gcacacttctcatgagttgcattag

SEQ ID NO: 735279 - DNA, 25 bp, Homo sapien
aataatggcactgtaaaatcccagc

SEQ ID NO: 735280 - DNA, 25 bp, Homo sapien
gcttcctgttgacctcgtctcttca

SEQ ID NO: 735281 - DNA, 25 bp, Homo sapien
tcttcagaacctcatcaggcacaga

SEQ ID NO: 735282 - DNA, 25 bp, Homo sapien
gcacagatgcaatgatgcatagtac

SEQ ID NO: 735283 - DNA, 25 bp, Homo sapien
caattgagatggagctttccgcgaa

SEQ ID NO: 735284 - DNA, 25 bp, Homo sapien
tgccaagttagagccggtccagaat

SEQ ID NO: 735285 - DNA, 25 bp, Homo sapien
tatgggtgactaagtacgcgactcc

SEQ ID NO: 735286 - DNA, 25 bp, Homo sapien
tgctgttgaagctgaagaccccagg

SEQ ID NO: 735287 - DNA, 25 bp, Homo sapien
gatgtccgctcatatttccatacat

SEQ ID NO: 735288 - DNA, 25 bp, Homo sapien
actcgatgtccgctcatatttccat

SEQ ID NO: 735289 - DNA, 25 bp, Homo sapien
ttcctcactcgatgtccgctcatat

SEQ ID NO: 735290 - DNA, 25 bp, Homo sapien
ctcactcgatgtccgctcatatttc

SEQ ID NO: 735291 - DNA, 25 bp, Homo sapien
gaagtcaaatgctgaatccagtgcc

SEQ ID NO: 735292 - DNA, 25 bp, Homo sapien
aagtttgtgccttcattctagactc

SEQ ID NO: 735293 - DNA, 25 bp, Homo sapien
ggaagtttgtgccttcattctagac

SEQ ID NO: 735294 - DNA, 25 bp, Homo sapien
tcaaatgctgaatccagtgccttct

SEQ ID NO: 735295 - DNA, 25 bp, Homo sapien
gtcttcatgcttgggcttgtgatcc

SEQ ID NO: 735296 - DNA, 25 bp, Homo sapien
cagtcttcatgcttgggcttgtgat

SEQ ID NO: 735297 - DNA, 25 bp, Homo sapien
cttcatgcttgggcttgtgatccac

SEQ ID NO: 735298 - DNA, 25 bp, Homo sapien
tcagtcttcatgcttgggcttgtga

SEQ ID NO: 735299 - DNA, 25 bp, Homo sapien
ctctaagattttccctggattttgg

SEQ ID NO: 735300 - DNA, 25 bp, Homo sapien
ccaaagtgatgacttgatcctgcag

SEQ ID NO: 735301 - DNA, 25 bp, Homo sapien
tgatttcccatattccaaagtgatg

SEQ ID NO: 735302 - DNA, 25 bp, Homo sapien
tgaactggggactttagctttttga

SEQ ID NO: 735303 - DNA, 25 bp, Homo sapien
tttaacagtggcatttctgcaagtg

SEQ ID NO: 735304 - DNA, 25 bp, Homo sapien
ggctactgagtctctcagatggatt

SEQ ID NO: 735305 - DNA, 25 bp, Homo sapien
gacaatcaatatgccctttttggct

SEQ ID NO: 735306 - DNA, 25 bp, Homo sapien
tcagttctatttgctgggcatgggc

SEQ ID NO: 735307 - DNA, 25 bp, Homo sapien
gggtgtacttgagcctcggactctg

SEQ ID NO: 735308 - DNA, 25 bp, Homo sapien
aggtgggtgtacttgagcctcggac

SEQ ID NO: 735309 - DNA, 25 bp, Homo sapien
gtgtacttgagcctcggactctggg

SEQ ID NO: 735310 - DNA, 25 bp, Homo sapien
gtgggtgtacttgagcctcggactc

SEQ ID NO: 735311 - DNA, 25 bp, Homo sapien
tctttgtcatatgctacatttccaa

SEQ ID NO: 735312 - DNA, 25 bp, Homo sapien
tctttactgtgttatgttcattttt

SEQ ID NO: 735313 - DNA, 25 bp, Homo sapien
aatatactgacatccatttctggat

SEQ ID NO: 735314 - DNA, 25 bp, Homo sapien
ctggattctttactgtgttatgttc

SEQ ID NO: 735315 - DNA, 25 bp, Homo sapien
tagtcctggtcattagcaggtgctc

SEQ ID NO: 735316 - DNA, 25 bp, Homo sapien
agatgtgtttgttgggtagaggtcc

SEQ ID NO: 735317 - DNA, 25 bp, Homo sapien
ggactccactgtgcctaagctccat

SEQ ID NO: 735318 - DNA, 25 bp, Homo sapien
aggtgctcacaaaggactccactgt

SEQ ID NO: 735319 - DNA, 25 bp, Homo sapien
tcacgagcattatgaagtgttagca

SEQ ID NO: 735320 - DNA, 25 bp, Homo sapien
ttctcagtagagttgtcacgagcat

SEQ ID NO: 735321 - DNA, 25 bp, Homo sapien
catctgctccatgaagaggggcttc

SEQ ID NO: 735322 - DNA, 25 bp, Homo sapien
cagcagctggttaagcatatttttg

SEQ ID NO: 735323 - DNA, 25 bp, Homo sapien
tcatagggatgtgaataggacctac

SEQ ID NO: 735324 - DNA, 25 bp, Homo sapien
gtgaataggacctactttagattca

SEQ ID NO: 735325 - DNA, 25 bp, Homo sapien
cactgactttgggacatgttcatag

SEQ ID NO: 735326 - DNA, 25 bp, Homo sapien
tgtttctattttcccgctctccaaa

SEQ ID NO: 735327 - DNA, 25 bp, Homo sapien
gccttccagtggaatactttttgct

SEQ ID NO: 735328 - DNA, 25 bp, Homo sapien
tagcaattgtagctgctcttctcca

SEQ ID NO: 735329 - DNA, 25 bp, Homo sapien
cagtcactcccaattgtagcaattg

SEQ ID NO: 735330 - DNA, 25 bp, Homo sapien
tctttggggtgtctcctattctgaa

SEQ ID NO: 735331 - DNA, 25 bp, Homo sapien
aggatggtttaggaagatcccactg

SEQ ID NO: 735332 - DNA, 25 bp, Homo sapien
ccactgtttggtgaatacaatggtt

SEQ ID NO: 735333 - DNA, 25 bp, Homo sapien
ttaggaagatcccactgtttggtga

SEQ ID NO: 735334 - DNA, 25 bp, Homo sapien
tggtttaggaagatcccactgtttg

SEQ ID NO: 735335 - DNA, 25 bp, Homo sapien
tgagaattgctgagtgggtcaagca

SEQ ID NO: 735336 - DNA, 25 bp, Homo sapien
gactagcaatcatcggggagaagct

SEQ ID NO: 735337 - DNA, 25 bp, Homo sapien
gagtaaggggtgagaattgctgagt

SEQ ID NO: 735338 - DNA, 25 bp, Homo sapien
caagcaggtggggactagcaatcat

SEQ ID NO: 735339 - DNA, 25 bp, Homo sapien
gatgctcccggaagatgaatcaggg

SEQ ID NO: 735340 - DNA, 25 bp, Homo sapien
aaatttgggagccacataggcagtg

SEQ ID NO: 735341 - DNA, 25 bp, Homo sapien
cagtgggatggagctgttattgggt

SEQ ID NO: 735342 - DNA, 25 bp, Homo sapien
gctgttattgggttgatgctcccgg

SEQ ID NO: 735343 - DNA, 25 bp, Homo sapien
cttgttgctgtgttaatagctcagt

SEQ ID NO: 735344 - DNA, 25 bp, Homo sapien
ctttttcagccagtcgaatctcttg

SEQ ID NO: 735345 - DNA, 25 bp, Homo sapien
attcactttttcagccagtcgaatc

SEQ ID NO: 735346 - DNA, 25 bp, Homo sapien
tgttgctgtgttaatagctcagtca

SEQ ID NO: 735347 - DNA, 25 bp, Homo sapien
tcaatatttgtgtatccctttctta

SEQ ID NO: 735348 - DNA, 25 bp, Homo sapien
agacttgtccggtggggtgctctgt

SEQ ID NO: 735349 - DNA, 25 bp, Homo sapien
cagacttgtccggtggggtgctctg

SEQ ID NO: 735350 - DNA, 25 bp, Homo sapien
tatttgtgtatccctttcttaccat

SEQ ID NO: 735351 - DNA, 25 bp, Homo sapien
tcctttaattttacattgccagaac

SEQ ID NO: 735352 - DNA, 25 bp, Homo sapien
cacagagggcatcaatcgtaataaa

SEQ ID NO: 735353 - DNA, 25 bp, Homo sapien
gacacagagggcatcaatcgtaata

SEQ ID NO: 735354 - DNA, 25 bp, Homo sapien
gagggcatcaatcgtaataaataca

SEQ ID NO: 735355 - DNA, 25 bp, Homo sapien
ctcaagacacagagggcatcaatcg

SEQ ID NO: 735356 - DNA, 25 bp, Homo sapien
caccacatgtttctcaggtccttct

SEQ ID NO: 735357 - DNA, 25 bp, Homo sapien
tcccaaacactatggctccctcctc

SEQ ID NO: 735358 - DNA, 25 bp, Homo sapien
ggttgacagcttgtctgggggcagg

SEQ ID NO: 735359 - DNA, 25 bp, Homo sapien
cagattgctgtagaaggggaagact

SEQ ID NO: 735360 - DNA, 25 bp, Homo sapien
tgggcagggtacacctagctctgct

SEQ ID NO: 735361 - DNA, 25 bp, Homo sapien
aaggttcttgagagcctgtgaggac

SEQ ID NO: 735362 - DNA, 25 bp, Homo sapien
caaaggttcttgagagcctgtgagg

SEQ ID NO: 735363 - DNA, 25 bp, Homo sapien
tccctgggaatgtggcccccaaaca

SEQ ID NO: 735364 - DNA, 25 bp, Homo sapien
ttcttgagagcctgtgaggacacag

SEQ ID NO: 735365 - DNA, 25 bp, Homo sapien
aacagtccttgggagcaagcttgga

SEQ ID NO: 735366 - DNA, 25 bp, Homo sapien
ggcacaatactgcaacaggtgagct

SEQ ID NO: 735367 - DNA, 25 bp, Homo sapien
caaacagcacagaggtgaacagtcc

SEQ ID NO: 735368 - DNA, 25 bp, Homo sapien
tctgaggtcactaaaggtacagggc

SEQ ID NO: 735369 - DNA, 25 bp, Homo sapien
ccattatctgtgtttgagcctgggt

SEQ ID NO: 735370 - DNA, 25 bp, Homo sapien
gacagacaggtaaagtcagccttct

SEQ ID NO: 735371 - DNA, 25 bp, Homo sapien
gatgttggctctaccgcatgttaag

SEQ ID NO: 735372 - DNA, 25 bp, Homo sapien
gattcagatcagctcgacagacagg

SEQ ID NO: 735373 - DNA, 25 bp, Homo sapien
gggcagatcataagaggaactcaga

SEQ ID NO: 735374 - DNA, 25 bp, Homo sapien
cacagagaggaatggagtgtcctga

SEQ ID NO: 735375 - DNA, 25 bp, Homo sapien
aggaatggagtgtcctgagcaccag

SEQ ID NO: 735376 - DNA, 25 bp, Homo sapien
ggaatggagtgtcctgagcaccagc

SEQ ID NO: 735377 - DNA, 25 bp, Homo sapien
acagagaggaatggagtgtcctgag

SEQ ID NO: 735378 - DNA, 25 bp, Homo sapien
gacttccagttaggtcacaaaaggc

SEQ ID NO: 735379 - DNA, 25 bp, Homo sapien
catcctgatgttcctacccggagaa

SEQ ID NO: 735380 - DNA, 25 bp, Homo sapien
ttctgtgtcagtctcttgaattatt

SEQ ID NO: 735381 - DNA, 25 bp, Homo sapien
ccttctatgcggaatcaggaatcag

SEQ ID NO: 735382 - DNA, 25 bp, Homo sapien
agggtttctataagtggcattcaga

SEQ ID NO: 735383 - DNA, 25 bp, Homo sapien
gtttctataagtggcattcagatac

SEQ ID NO: 735384 - DNA, 25 bp, Homo sapien
aagggtttctataagtggcattcag

SEQ ID NO: 735385 - DNA, 25 bp, Homo sapien
gggtttctataagtggcattcagat

SEQ ID NO: 735386 - DNA, 25 bp, Homo sapien
tggtaaatggaaccagcagattcca

SEQ ID NO: 735387 - DNA, 25 bp, Homo sapien
ccatctggtctgtagccttcaaact

SEQ ID NO: 735388 - DNA, 25 bp, Homo sapien
gcagattccacttcaccacaaattt

SEQ ID NO: 735389 - DNA, 25 bp, Homo sapien
tttggtccataactgagatatagct

SEQ ID NO: 735390 - DNA, 25 bp, Homo sapien
ctatatgtgctgccgaagcgagcac

SEQ ID NO: 735391 - DNA, 25 bp, Homo sapien
tttctgtatagttccaattttacta

SEQ ID NO: 735392 - DNA, 25 bp, Homo sapien
aatatgcaatgcttcacaaatctgt

SEQ ID NO: 735393 - DNA, 25 bp, Homo sapien
gtgtcatccttgtgcaggggccatg

SEQ ID NO: 735394 - DNA, 25 bp, Homo sapien
agaaggtgatagggagttctctcga

SEQ ID NO: 735395 - DNA, 25 bp, Homo sapien
gagaaggtgatagggagttctctcg

SEQ ID NO: 735396 - DNA, 25 bp, Homo sapien
ttaggactctagcaccaatgcttcc

SEQ ID NO: 735397 - DNA, 25 bp, Homo sapien
tgtatctattctcccttgaggcata

SEQ ID NO: 735398 - DNA, 25 bp, Homo sapien
cacatctgtatctattctcccttga

SEQ ID NO: 735399 - DNA, 25 bp, Homo sapien
ttgaggcatattttcaactcgctgt

SEQ ID NO: 735400 - DNA, 25 bp, Homo sapien
gagcatcccgactggcactggttta

SEQ ID NO: 735401 - DNA, 25 bp, Homo sapien
cataataagtgctatgccaggtgtc

SEQ ID NO: 735402 - DNA, 25 bp, Homo sapien
aagtagtccctacctaatggcgaag

SEQ ID NO: 735403 - DNA, 25 bp, Homo sapien
tgataccataccacctgggagctct

SEQ ID NO: 735404 - DNA, 25 bp, Homo sapien
tgagaattttgctaatagccccgaa

SEQ ID NO: 735405 - DNA, 25 bp, Homo sapien
aagctaggtcagattccaatttcca

SEQ ID NO: 735406 - DNA, 25 bp, Homo sapien
gggtagctccaaattacctcgagta

SEQ ID NO: 735407 - DNA, 25 bp, Homo sapien
tagaatagtcccctttcaaaacagc

SEQ ID NO: 735408 - DNA, 25 bp, Homo sapien
ctgcaaactcgtggctcgtagttga

SEQ ID NO: 735409 - DNA, 25 bp, Homo sapien
agaactggaaatgcgtctctcactg

SEQ ID NO: 735410 - DNA, 25 bp, Homo sapien
cgtggctcgtagttgagaactggaa

SEQ ID NO: 735411 - DNA, 25 bp, Homo sapien
ttgagaactggaaatgcgtctctca

SEQ ID NO: 735412 - DNA, 25 bp, Homo sapien
cgccgctcccggtcgctccccgccg

SEQ ID NO: 735413 - DNA, 25 bp, Homo sapien
aagtagcggcggtagttggagaaag

SEQ ID NO: 735414 - DNA, 25 bp, Homo sapien
tagcggcggtagttggagaaagcct

SEQ ID NO: 735415 - DNA, 25 bp, Homo sapien
gcggcggtagttggagaaagcctcc

SEQ ID NO: 735416 - DNA, 25 bp, Homo sapien
agtagcggcggtagttggagaaagc

SEQ ID NO: 735417 - DNA, 25 bp, Homo sapien
agccctaagttaggagcaagccatg

SEQ ID NO: 735418 - DNA, 25 bp, Homo sapien
ttcccaacagagtgaacatagtgca

SEQ ID NO: 735419 - DNA, 25 bp, Homo sapien
gagacaagatcattgatatcacggg

SEQ ID NO: 735420 - DNA, 25 bp, Homo sapien
cattctggaaggatggttaggtagc

SEQ ID NO: 735421 - DNA, 25 bp, Homo sapien
ctgaaacttctttcgagaagcagca

SEQ ID NO: 735422 - DNA, 25 bp, Homo sapien
ggttgtgtgcacatacatgaggtac

SEQ ID NO: 735423 - DNA, 25 bp, Homo sapien
catgcttcctactatgtccagaaat

SEQ ID NO: 735424 - DNA, 25 bp, Homo sapien
gaaagctagatatacggagagtcct

SEQ ID NO: 735425 - DNA, 25 bp, Homo sapien
cacaatgtagtagtcctgctttgag

SEQ ID NO: 735426 - DNA, 25 bp, Homo sapien
ctcttaactggtatactaatcccca

SEQ ID NO: 735427 - DNA, 25 bp, Homo sapien
attcttatccccaagtattgcaata

SEQ ID NO: 735428 - DNA, 25 bp, Homo sapien
ctattcttatccccaagtattgcaa

SEQ ID NO: 735429 - DNA, 25 bp, Homo sapien
tattcttatccccaagtattgcaat

SEQ ID NO: 735430 - DNA, 25 bp, Homo sapien
ttcttatccccaagtattgcaatat

SEQ ID NO: 735431 - DNA, 25 bp, Homo sapien
gatgatgactcacattttcctggta

SEQ ID NO: 735432 - DNA, 25 bp, Homo sapien
tgagcccagtcagagtccgttttat

SEQ ID NO: 735433 - DNA, 25 bp, Homo sapien
cattaaatccaacactgagcccagt

SEQ ID NO: 735434 - DNA, 25 bp, Homo sapien
tgatcatagtcttgaactaccgggc

SEQ ID NO: 735435 - DNA, 25 bp, Homo sapien
tgacagcgggtaaactaagcaaact

SEQ ID NO: 735436 - DNA, 25 bp, Homo sapien
cagtgcctgaccatgacgtcccatt

SEQ ID NO: 735437 - DNA, 25 bp, Homo sapien
cagcaattatatcaccaggcatttg

SEQ ID NO: 735438 - DNA, 25 bp, Homo sapien
ggacaaacccaccacttactcagtg

SEQ ID NO: 735439 - DNA, 25 bp, Homo sapien
gaaatggctgtcctttgttaccaaa

SEQ ID NO: 735440 - DNA, 25 bp, Homo sapien
tgaacaatggaatctgagctggtac

SEQ ID NO: 735441 - DNA, 25 bp, Homo sapien
gctgtttagctgcttaaaatggaaa

SEQ ID NO: 735442 - DNA, 25 bp, Homo sapien
acagaaatctctcctgctgtttagc

SEQ ID NO: 735443 - DNA, 25 bp, Homo sapien
tacaataggattctccataattccc

SEQ ID NO: 735444 - DNA, 25 bp, Homo sapien
gcagctccgtaaggttttccaagac

SEQ ID NO: 735445 - DNA, 25 bp, Homo sapien
gattttacaataggattctccataa

SEQ ID NO: 735446 - DNA, 25 bp, Homo sapien
tcttctgctccagtagacgagggca

SEQ ID NO: 735447 - DNA, 25 bp, Homo sapien
ctcaaaagtcatccaaccattgcaa

SEQ ID NO: 735448 - DNA, 25 bp, Homo sapien
tgctcaaaagtcatccaaccattgc

SEQ ID NO: 735449 - DNA, 25 bp, Homo sapien
ctgctcaaaagtcatccaaccattg

SEQ ID NO: 735450 - DNA, 25 bp, Homo sapien
gctcaaaagtcatccaaccattgca

SEQ ID NO: 735451 - DNA, 25 bp, Homo sapien
cctcggccgaaagtaattctaatca

SEQ ID NO: 735452 - DNA, 25 bp, Homo sapien
ttgagaatgaacactaagcggctcc

SEQ ID NO: 735453 - DNA, 25 bp, Homo sapien
catttcaagtggtaacagtatcaac

SEQ ID NO: 735454 - DNA, 25 bp, Homo sapien
tcatagtaggagtaaagccgagtgt

SEQ ID NO: 735455 - DNA, 25 bp, Homo sapien
gagtataccaaccaattctgccaca

SEQ ID NO: 735456 - DNA, 25 bp, Homo sapien
tagaggagtgatgtcttcaagaatt

SEQ ID NO: 735457 - DNA, 25 bp, Homo sapien
tgtcactgacagcttctagtttgga

SEQ ID NO: 735458 - DNA, 25 bp, Homo sapien
tggaatcttctagcctctcatgagc

SEQ ID NO: 735459 - DNA, 25 bp, Homo sapien
gtcaaaatagcctgtggttatttat

SEQ ID NO: 735460 - DNA, 25 bp, Homo sapien
tataaggagtcaaaatagcctgtgg

SEQ ID NO: 735461 - DNA, 25 bp, Homo sapien
ctataaggagtcaaaatagcctgtg

SEQ ID NO: 735462 - DNA, 25 bp, Homo sapien
aaatagcctgtggttatttatgata

SEQ ID NO: 735463 - DNA, 25 bp, Homo sapien
gatgccacaatatcatgggcctcca

SEQ ID NO: 735464 - DNA, 25 bp, Homo sapien
ccagctcttttgtgaataccaagaa

SEQ ID NO: 735465 - DNA, 25 bp, Homo sapien
catttctgggcttgatggaggtgaa

SEQ ID NO: 735466 - DNA, 25 bp, Homo sapien
taccaagaatacgaatggcatctac

SEQ ID NO: 735467 - DNA, 25 bp, Homo sapien
agatttttagggtgacacttccact

SEQ ID NO: 735468 - DNA, 25 bp, Homo sapien
gaggattcgggcaattaccagatca

SEQ ID NO: 735469 - DNA, 25 bp, Homo sapien
aatggtatctctataacttggtaag

SEQ ID NO: 735470 - DNA, 25 bp, Homo sapien
tctcccacatgaagtagaccttgtc

SEQ ID NO: 735471 - DNA, 25 bp, Homo sapien
gtagcaactgatagttatttccaac

SEQ ID NO: 735472 - DNA, 25 bp, Homo sapien
tagtagcaactgatagttatttcca

SEQ ID NO: 735473 - DNA, 25 bp, Homo sapien
atagtagcaactgatagttatttcc

SEQ ID NO: 735474 - DNA, 25 bp, Homo sapien
ttccaacactgtgattaaaaacatg

SEQ ID NO: 735475 - DNA, 25 bp, Homo sapien
tgaaaagcagagtttgagagggtat

SEQ ID NO: 735476 - DNA, 25 bp, Homo sapien
ggctaaatgtccttgcatttcatgg

SEQ ID NO: 735477 - DNA, 25 bp, Homo sapien
caggctacctcggacttataagact

SEQ ID NO: 735478 - DNA, 25 bp, Homo sapien
tttatgggaggacacgcctcaggct

SEQ ID NO: 735479 - DNA, 25 bp, Homo sapien
agggcagttcctttttaccagtgca

SEQ ID NO: 735480 - DNA, 25 bp, Homo sapien
ccagtgcacaattgtgcttgaaatc

SEQ ID NO: 735481 - DNA, 25 bp, Homo sapien
atgaaaacgaaagtggaatttcgtg

SEQ ID NO: 735482 - DNA, 25 bp, Homo sapien
tcgtgagtggaaattaaacttcgtg

SEQ ID NO: 735483 - DNA, 25 bp, Homo sapien
gccagtttccttaagcttgttgaca

SEQ ID NO: 735484 - DNA, 25 bp, Homo sapien
caaagtgttcgctgctagagatgtc

SEQ ID NO: 735485 - DNA, 25 bp, Homo sapien
tagtaagtggtacttttccatccag

SEQ ID NO: 735486 - DNA, 25 bp, Homo sapien
cagcatgtctggtaatggtcaaagt

SEQ ID NO: 735487 - DNA, 25 bp, Homo sapien
aaagggaaccgctagtggacatgta

SEQ ID NO: 735488 - DNA, 25 bp, Homo sapien
taggcgcccaataatggtggactgg

SEQ ID NO: 735489 - DNA, 25 bp, Homo sapien
ttgagtacatatcgacacaaagagg

SEQ ID NO: 735490 - DNA, 25 bp, Homo sapien
cctttaagcaacatggacatagctg

SEQ ID NO: 735491 - DNA, 25 bp, Homo sapien
gaatggttcaacctcttgggaggac

SEQ ID NO: 735492 - DNA, 25 bp, Homo sapien
tataggctatggatgttaactgttc

SEQ ID NO: 735493 - DNA, 25 bp, Homo sapien
taagcataggagatgttcaacaacc

SEQ ID NO: 735494 - DNA, 25 bp, Homo sapien
gattacaaacgcataaaccctctga

SEQ ID NO: 735495 - DNA, 25 bp, Homo sapien
atgggatgtgtgctggatgcctctc

SEQ ID NO: 735496 - DNA, 25 bp, Homo sapien
tgggatgtgtgctggatgcctctcc

SEQ ID NO: 735497 - DNA, 25 bp, Homo sapien
ctgatgggatgtgtgctggatgcct

SEQ ID NO: 735498 - DNA, 25 bp, Homo sapien
gatgggatgtgtgctggatgcctct

SEQ ID NO: 735499 - DNA, 25 bp, Homo sapien
aaaatactatagttgtatcacttgc

SEQ ID NO: 735500 - DNA, 25 bp, Homo sapien
aaccactctgatttaattgtaactg

SEQ ID NO: 735501 - DNA, 25 bp, Homo sapien
aaaatccttgtcaaaccactctgat

SEQ ID NO: 735502 - DNA, 25 bp, Homo sapien
atactatagttgtatcacttgccac

SEQ ID NO: 735503 - DNA, 25 bp, Homo sapien
tttgcaaggtattaggttgtcattg

SEQ ID NO: 735504 - DNA, 25 bp, Homo sapien
tctttgcaaggtattaggttgtcat

SEQ ID NO: 735505 - DNA, 25 bp, Homo sapien
ctttgcaaggtattaggttgtcatt

SEQ ID NO: 735506 - DNA, 25 bp, Homo sapien
agcgcttcctccctcttttacatgg

SEQ ID NO: 735507 - DNA, 25 bp, Homo sapien
gcttggaatgagaccagcgcttcct

SEQ ID NO: 735508 - DNA, 25 bp, Homo sapien
ttcctccctcttttacatggctagc

SEQ ID NO: 735509 - DNA, 25 bp, Homo sapien
tccaggaactggcttggaatgagac

SEQ ID NO: 735510 - DNA, 25 bp, Homo sapien
ctggttgtgagatacatcatctttt

SEQ ID NO: 735511 - DNA, 25 bp, Homo sapien
tctggttgtgagatacatcatcttt

SEQ ID NO: 735512 - DNA, 25 bp, Homo sapien
ttctggttgtgagatacatcatctt

SEQ ID NO: 735513 - DNA, 25 bp, Homo sapien
gaaatttctgattcatagagctgtt

SEQ ID NO: 735514 - DNA, 25 bp, Homo sapien
atagaggtagctctgaagtcaagaa

SEQ ID NO: 735515 - DNA, 25 bp, Homo sapien
taaaattgccaactcctttgattaa

SEQ ID NO: 735516 - DNA, 25 bp, Homo sapien
aactcctttgattaagcctccagaa

SEQ ID NO: 735517 - DNA, 25 bp, Homo sapien
gagctcctatcaatactaatgtttt

SEQ ID NO: 735518 - DNA, 25 bp, Homo sapien
ggcattttggctacctcctcatata

SEQ ID NO: 735519 - DNA, 25 bp, Homo sapien
tttcaagcttcttcggcctacacct

SEQ ID NO: 735520 - DNA, 25 bp, Homo sapien
tagttccaaatctagtgggattcaa

SEQ ID NO: 735521 - DNA, 25 bp, Homo sapien
tggagggctttaagcccttgataat

SEQ ID NO: 735522 - DNA, 25 bp, Homo sapien
gaagatgtatgatggttgaactaaa

SEQ ID NO: 735523 - DNA, 25 bp, Homo sapien
gatgtatgatggttgaactaaaccc

SEQ ID NO: 735524 - DNA, 25 bp, Homo sapien
ggctttaagcccttgataattgtct

SEQ ID NO: 735525 - DNA, 25 bp, Homo sapien
gacacaaacttatatgcctggccat

SEQ ID NO: 735526 - DNA, 25 bp, Homo sapien
tccatctcagatcgtgacacaaact

SEQ ID NO: 735527 - DNA, 25 bp, Homo sapien
gaatgcaagtccgtccagtttggac

SEQ ID NO: 735528 - DNA, 25 bp, Homo sapien
cagtttggacaacctcaagaataga

SEQ ID NO: 735529 - DNA, 25 bp, Homo sapien
ccttgtgcatggcacgtaacgtctc

SEQ ID NO: 735530 - DNA, 25 bp, Homo sapien
catagggcataaactctgatgtcct

SEQ ID NO: 735531 - DNA, 25 bp, Homo sapien
tctagctccggagccgcaataaata

SEQ ID NO: 735532 - DNA, 25 bp, Homo sapien
tcagaagcttggtagtgattcctgc

SEQ ID NO: 735533 - DNA, 25 bp, Homo sapien
aaggctttgtctagattatcattta

SEQ ID NO: 735534 - DNA, 25 bp, Homo sapien
tcaaaatagtggttgtatgctctct

SEQ ID NO: 735535 - DNA, 25 bp, Homo sapien
tctgaatccgtgcactttcatccac

SEQ ID NO: 735536 - DNA, 25 bp, Homo sapien
tatgatgatcaaatcaaaatagtgg

SEQ ID NO: 735537 - DNA, 25 bp, Homo sapien
gtaaacccagctgattgggacccac

SEQ ID NO: 735538 - DNA, 25 bp, Homo sapien
tatattagtacaccttccaaccaca

SEQ ID NO: 735539 - DNA, 25 bp, Homo sapien
gaaagattatccatacaaagttaga

SEQ ID NO: 735540 - DNA, 25 bp, Homo sapien
tatgagaccaatgttagagtgaatg

SEQ ID NO: 735541 - DNA, 25 bp, Homo sapien
tgcctggacttagcagataatcttc

SEQ ID NO: 735542 - DNA, 25 bp, Homo sapien
tgtcctaggacaagaaacgtgaatt

SEQ ID NO: 735543 - DNA, 25 bp, Homo sapien
tcccagctggcgttccaaatgacaa

SEQ ID NO: 735544 - DNA, 25 bp, Homo sapien
caatgggtttggttctcaacacaac

SEQ ID NO: 735545 - DNA, 25 bp, Homo sapien
tttacaggataaggcactctctcag

SEQ ID NO: 735546 - DNA, 25 bp, Homo sapien
gatttaggctactaatgctgtaggc

SEQ ID NO: 735547 - DNA, 25 bp, Homo sapien
gactgcataataaaggcatggctgt

SEQ ID NO: 735548 - DNA, 25 bp, Homo sapien
tgctgtaggcatactgggtttctct

SEQ ID NO: 735549 - DNA, 25 bp, Homo sapien
tatccaggcacatcacctctatggg

SEQ ID NO: 735550 - DNA, 25 bp, Homo sapien
aaaacagtaagagccagtaggaggg

SEQ ID NO: 735551 - DNA, 25 bp, Homo sapien
ggttcacaaactaagacctcactgt

SEQ ID NO: 735552 - DNA, 25 bp, Homo sapien
gctactttgataggaggagagccaa

SEQ ID NO: 735553 - DNA, 25 bp, Homo sapien
gtagctgagctatgcctgaaatctg

SEQ ID NO: 735554 - DNA, 25 bp, Homo sapien
tcccacagcaaggttttcacatcaa

SEQ ID NO: 735555 - DNA, 25 bp, Homo sapien
agacttaccaaaacgaactggcgtg

SEQ ID NO: 735556 - DNA, 25 bp, Homo sapien
acttgttgctgaatactagtgctca

SEQ ID NO: 735557 - DNA, 25 bp, Homo sapien
aatactcaccataggctccaacaga

SEQ ID NO: 735558 - DNA, 25 bp, Homo sapien
catccatttgcggagctgcctgagc

SEQ ID NO: 735559 - DNA, 25 bp, Homo sapien
gacagctttgagtgacatcttccag

SEQ ID NO: 735560 - DNA, 25 bp, Homo sapien
tccgacgtcgtgagatgtgcatcgc

SEQ ID NO: 735561 - DNA, 25 bp, Homo sapien
tctaagtgcagacaggtagctggca

SEQ ID NO: 735562 - DNA, 25 bp, Homo sapien
caacataatgtgtgtagggatcgaa

SEQ ID NO: 735563 - DNA, 25 bp, Homo sapien
ggctgaccctgtccagacttgttgg

SEQ ID NO: 735564 - DNA, 25 bp, Homo sapien
gctccactgagttacgtctaagatg

SEQ ID NO: 735565 - DNA, 25 bp, Homo sapien
taagatgtgccatcaaggctgggct

SEQ ID NO: 735566 - DNA, 25 bp, Homo sapien
tgggccatggctgtgacgtctgaca

SEQ ID NO: 735567 - DNA, 25 bp, Homo sapien
tctgctgagtgactctggataggcc

SEQ ID NO: 735568 - DNA, 25 bp, Homo sapien
cagggtctaaggtacatggattgca

SEQ ID NO: 735569 - DNA, 25 bp, Homo sapien
tggataggccatgcataaccagcct

SEQ ID NO: 735570 - DNA, 25 bp, Homo sapien
tcaactaggaactctgcagccatca

SEQ ID NO: 735571 - DNA, 25 bp, Homo sapien
ccctggagtgtgttacttggcataa

SEQ ID NO: 735572 - DNA, 25 bp, Homo sapien
tgttgcagcagatgtcagaacttca

SEQ ID NO: 735573 - DNA, 25 bp, Homo sapien
gaacttcttcgtcacctcaactagg

SEQ ID NO: 735574 - DNA, 25 bp, Homo sapien
tgttactatcaagggtttttgtgta

SEQ ID NO: 735575 - DNA, 25 bp, Homo sapien
agtagccaggactatgccgggctga

SEQ ID NO: 735576 - DNA, 25 bp, Homo sapien
ccattgttactatcaagggtttttg

SEQ ID NO: 735577 - DNA, 25 bp, Homo sapien
ctaccattgttactatcaagggttt

SEQ ID NO: 735578 - DNA, 25 bp, Homo sapien
gccagttctttaacaatcaagcatg

SEQ ID NO: 735579 - DNA, 25 bp, Homo sapien
cagtgggcggctgctttcgtttcca

SEQ ID NO: 735580 - DNA, 25 bp, Homo sapien
aagaggatccacttcctgactctgg

SEQ ID NO: 735581 - DNA, 25 bp, Homo sapien
ttaagcgccttctgtatgcagggcc

SEQ ID NO: 735582 - DNA, 25 bp, Homo sapien
gaggtttctagagatttcctgcccc

SEQ ID NO: 735583 - DNA, 25 bp, Homo sapien
tttctgttatgaaacgtggttgaaa

SEQ ID NO: 735584 - DNA, 25 bp, Homo sapien
gagttgaggtttctagagatttcct

SEQ ID NO: 735585 - DNA, 25 bp, Homo sapien
aacgtggttgaaatggggactgcta

SEQ ID NO: 735586 - DNA, 25 bp, Homo sapien
gaagttgcctgcgtctgtgtccgtt

SEQ ID NO: 735587 - DNA, 25 bp, Homo sapien
tctggcgcagtgcctttggcacact

SEQ ID NO: 735588 - DNA, 25 bp, Homo sapien
gtctgtgtccgtttccctcctggaa

SEQ ID NO: 735589 - DNA, 25 bp, Homo sapien
tcaagtgtgtcggaagttgcctgcg

SEQ ID NO: 735590 - DNA, 25 bp, Homo sapien
cggagaagtctgcatagcacacagg

SEQ ID NO: 735591 - DNA, 25 bp, Homo sapien
ctacggagaagtctgcatagcacac

SEQ ID NO: 735592 - DNA, 25 bp, Homo sapien
agtctgcatagcacacaggctgttc

SEQ ID NO: 735593 - DNA, 25 bp, Homo sapien
gagaagtctgcatagcacacaggct

SEQ ID NO: 735594 - DNA, 25 bp, Homo sapien
tctggttcttgcatgcaacccgtgt

SEQ ID NO: 735595 - DNA, 25 bp, Homo sapien
cccaaaataagtgctgatccagacg

SEQ ID NO: 735596 - DNA, 25 bp, Homo sapien
tccttggcgtttccacgtgcagcat

SEQ ID NO: 735597 - DNA, 25 bp, Homo sapien
taggcacctgcgtggtcaccattct

SEQ ID NO: 735598 - DNA, 25 bp, Homo sapien
ttaccacttgcaataagtatagagc

SEQ ID NO: 735599 - DNA, 25 bp, Homo sapien
taccacttgcaataagtatagagcc

SEQ ID NO: 735600 - DNA, 25 bp, Homo sapien
ccacttgcaataagtatagagcctg

SEQ ID NO: 735601 - DNA, 25 bp, Homo sapien
cacttgcaataagtatagagcctgc

SEQ ID NO: 735602 - DNA, 25 bp, Homo sapien
gaggcttgcaaataccatcccatta

SEQ ID NO: 735603 - DNA, 25 bp, Homo sapien
gcttgcaaataccatcccattattg

SEQ ID NO: 735604 - DNA, 25 bp, Homo sapien
tgaatacaaactccacgccttaact

SEQ ID NO: 735605 - DNA, 25 bp, Homo sapien
gaaaatgaatacaaactccacgcct

SEQ ID NO: 735606 - DNA, 25 bp, Homo sapien
ggcccttattgttggttgaagccat

SEQ ID NO: 735607 - DNA, 25 bp, Homo sapien
cagtctggatccctgaataaccata

SEQ ID NO: 735608 - DNA, 25 bp, Homo sapien
gttataaacgatctgccttgtgtca

SEQ ID NO: 735609 - DNA, 25 bp, Homo sapien
cccctgtattgtgcatgtagtatga

SEQ ID NO: 735610 - DNA, 25 bp, Homo sapien
gtaacccatttgcttggcactgtct

SEQ ID NO: 735611 - DNA, 25 bp, Homo sapien
tggtaacccatttgcttggcactgt

SEQ ID NO: 735612 - DNA, 25 bp, Homo sapien
ggtaacccatttgcttggcactgtc

SEQ ID NO: 735613 - DNA, 25 bp, Homo sapien
tccagagcgttgtcatctttgtcca

SEQ ID NO: 735614 - DNA, 25 bp, Homo sapien
gtccagagcgttgtcatctttgtcc

SEQ ID NO: 735615 - DNA, 25 bp, Homo sapien
atagtccagagcgttgtcatctttg

SEQ ID NO: 735616 - DNA, 25 bp, Homo sapien
tagtccagagcgttgtcatctttgt

SEQ ID NO: 735617 - DNA, 25 bp, Homo sapien
tagtgaatgggataatgaaagggat

SEQ ID NO: 735618 - DNA, 25 bp, Homo sapien
tcctccagagtctactctgtccaga

SEQ ID NO: 735619 - DNA, 25 bp, Homo sapien
gatggcttgcggtcgctgtcctcga

SEQ ID NO: 735620 - DNA, 25 bp, Homo sapien
cgctgtcctcgagacgcaggcaggt

SEQ ID NO: 735621 - DNA, 25 bp, Homo sapien
ccgcgtcccgccccaactcgcagtc

SEQ ID NO: 735622 - DNA, 25 bp, Homo sapien
caccgcgtcccgccccaactcgcag

SEQ ID NO: 735623 - DNA, 25 bp, Homo sapien
accgcgtcccgccccaactcgcagt

SEQ ID NO: 735624 - DNA, 25 bp, Homo sapien
cgcgtcccgccccaactcgcagtca

SEQ ID NO: 735625 - DNA, 25 bp, Homo sapien
cctcgctccttcctaggggagacga

SEQ ID NO: 735626 - DNA, 25 bp, Homo sapien
cgccggaacggcaggtcccgtcgct

SEQ ID NO: 735627 - DNA, 25 bp, Homo sapien
ggagacgaatcgattggctgcccgg

SEQ ID NO: 735628 - DNA, 25 bp, Homo sapien
cctaggggagacgaatcgattggct

SEQ ID NO: 735629 - DNA, 25 bp, Homo sapien
ccactcttcccgagaggccccgaca

SEQ ID NO: 735630 - DNA, 25 bp, Homo sapien
gaggaggcgccgctctcaaacccca

SEQ ID NO: 735631 - DNA, 25 bp, Homo sapien
catctcccgggtgagtcccgaaaag

SEQ ID NO: 735632 - DNA, 25 bp, Homo sapien
gtcccgcgcagcgaagaggcgaggc

SEQ ID NO: 735633 - DNA, 25 bp, Homo sapien
tatatctatatggaataagaagatt

SEQ ID NO: 735634 - DNA, 25 bp, Homo sapien
atctatatggaataagaagattgga

SEQ ID NO: 735635 - DNA, 25 bp, Homo sapien
ggaataagaagattggagttccacg

SEQ ID NO: 735636 - DNA, 25 bp, Homo sapien
gaataagaagattggagttccacgt

SEQ ID NO: 735637 - DNA, 25 bp, Homo sapien
tcatcattaggaccactccaattga

SEQ ID NO: 735638 - DNA, 25 bp, Homo sapien
catcatcattaggaccactccaatt

SEQ ID NO: 735639 - DNA, 25 bp, Homo sapien
tcattaggaccactccaattgatct

SEQ ID NO: 735640 - DNA, 25 bp, Homo sapien
attaggaccactccaattgatctcc

SEQ ID NO: 735641 - DNA, 25 bp, Homo sapien
cacgacctccattcacgtcagggat

SEQ ID NO: 735642 - DNA, 25 bp, Homo sapien
gatgataatagccaggccacgacct

SEQ ID NO: 735643 - DNA, 25 bp, Homo sapien
cagctcattctatttctgccggcag

SEQ ID NO: 735644 - DNA, 25 bp, Homo sapien
gagctggaacaggattgactaggac

SEQ ID NO: 735645 - DNA, 25 bp, Homo sapien
tcagaaatgagctaacagtctccag

SEQ ID NO: 735646 - DNA, 25 bp, Homo sapien
tccagtgtagcaggagagccagtca

SEQ ID NO: 735647 - DNA, 25 bp, Homo sapien
taccccacgctgcaggaaatccatt

SEQ ID NO: 735648 - DNA, 25 bp, Homo sapien
ggactttgtgcaggtaaccaccctg

SEQ ID NO: 735649 - DNA, 25 bp, Homo sapien
tatataagacgtatacggcaccttc

SEQ ID NO: 735650 - DNA, 25 bp, Homo sapien
tccctgttgagtatggaatgtccca

SEQ ID NO: 735651 - DNA, 25 bp, Homo sapien
gagctgagtccttgagaagttaaga

SEQ ID NO: 735652 - DNA, 25 bp, Homo sapien
tatcacaatagcatcccagagagac

SEQ ID NO: 735653 - DNA, 25 bp, Homo sapien
tttgacaggagtggaaaagcggttc

SEQ ID NO: 735654 - DNA, 25 bp, Homo sapien
tgaactaggttagaggtgtaggccc

SEQ ID NO: 735655 - DNA, 25 bp, Homo sapien
ctaatatgcagtatggagccactct

SEQ ID NO: 735656 - DNA, 25 bp, Homo sapien
tgggtgggcatgacacaagaagcca

SEQ ID NO: 735657 - DNA, 25 bp, Homo sapien
gaaggcttagcaccatattaggatc

SEQ ID NO: 735658 - DNA, 25 bp, Homo sapien
gaattgctaaagacgccaagacctc

SEQ ID NO: 735659 - DNA, 25 bp, Homo sapien
aagacctcacagtaagggctgccca

SEQ ID NO: 735660 - DNA, 25 bp, Homo sapien
tcccaggcttaggaaatgactcaca

SEQ ID NO: 735661 - DNA, 25 bp, Homo sapien
ccagtgcagagtcaagtctaatatt

SEQ ID NO: 735662 - DNA, 25 bp, Homo sapien
cagtgcagagtcaagtctaatattt

SEQ ID NO: 735663 - DNA, 25 bp, Homo sapien
gttttcatgagggtcactgtgcttg

SEQ ID NO: 735664 - DNA, 25 bp, Homo sapien
ttagtcattggctaatgcatcatgg

SEQ ID NO: 735665 - DNA, 25 bp, Homo sapien
tttcatgagggtcactgtgcttgtc

SEQ ID NO: 735666 - DNA, 25 bp, Homo sapien
tgttttcatgagggtcactgtgctt

SEQ ID NO: 735667 - DNA, 25 bp, Homo sapien
tagattttgccacagacctgacatt

SEQ ID NO: 735668 - DNA, 25 bp, Homo sapien
cacccatgaatctgtgattccagga

SEQ ID NO: 735669 - DNA, 25 bp, Homo sapien
caactgagcgttgcctgggataagg

SEQ ID NO: 735670 - DNA, 25 bp, Homo sapien
gataaggagctttgccacccatgaa

SEQ ID NO: 735671 - DNA, 25 bp, Homo sapien
tattgccttgttggtatcctgttga

SEQ ID NO: 735672 - DNA, 25 bp, Homo sapien
ctgttgataaccctcagggaagccc

SEQ ID NO: 735673 - DNA, 25 bp, Homo sapien
ggtatcctgttgataaccctcaggg

SEQ ID NO: 735674 - DNA, 25 bp, Homo sapien
ccttgttggtatcctgttgataacc

SEQ ID NO: 735675 - DNA, 25 bp, Homo sapien
tactggctctgctgtccaatggctg

SEQ ID NO: 735676 - DNA, 25 bp, Homo sapien
actggctctgctgtccaatggctgg

SEQ ID NO: 735677 - DNA, 25 bp, Homo sapien
ctggctctgctgtccaatggctggc

SEQ ID NO: 735678 - DNA, 25 bp, Homo sapien
ctggatgctgattcaccctgagagt

SEQ ID NO: 735679 - DNA, 25 bp, Homo sapien
ccagtcctgaggagctccactctgt

SEQ ID NO: 735680 - DNA, 25 bp, Homo sapien
gctgattcaccctgagagtggaaga

SEQ ID NO: 735681 - DNA, 25 bp, Homo sapien
cactctgtagagagaggtcaacagg

SEQ ID NO: 735682 - DNA, 25 bp, Homo sapien
aaaaaagtcatcttcacattctacc

SEQ ID NO: 735683 - DNA, 25 bp, Homo sapien
ggaattaaaaaagtcatcttcacat

SEQ ID NO: 735684 - DNA, 25 bp, Homo sapien
tgtgagaatgttaaataatttttgg

SEQ ID NO: 735685 - DNA, 25 bp, Homo sapien
ctgtgagaatgttaaataatttttg

SEQ ID NO: 735686 - DNA, 25 bp, Homo sapien
ctttttgcctctgaacacgtacttc

SEQ ID NO: 735687 - DNA, 25 bp, Homo sapien
actttttgcctctgaacacgtactt

SEQ ID NO: 735688 - DNA, 25 bp, Homo sapien
aaatggatgtctgggagcatctgtc

SEQ ID NO: 735689 - DNA, 25 bp, Homo sapien
gcgtggcctgttattactctctgaa

SEQ ID NO: 735690 - DNA, 25 bp, Homo sapien
tgaatcactgctggccttattaaac

SEQ ID NO: 735691 - DNA, 25 bp, Homo sapien
cacgtgtaattgaatgtccctgtcc

SEQ ID NO: 735692 - DNA, 25 bp, Homo sapien
cattttaaccttgagcagcgaaccc

SEQ ID NO: 735693 - DNA, 25 bp, Homo sapien
tattcacgattgtttccagaatcat

SEQ ID NO: 735694 - DNA, 25 bp, Homo sapien
gcagtctctgtgactagagtgactc

SEQ ID NO: 735695 - DNA, 25 bp, Homo sapien
tcaaagtatttgtgcctgcaggcag

SEQ ID NO: 735696 - DNA, 25 bp, Homo sapien
gtttccagaatcatatcccttcaca

SEQ ID NO: 735697 - DNA, 25 bp, Homo sapien
tgtaatgcacagttaagaatgttgc

SEQ ID NO: 735698 - DNA, 25 bp, Homo sapien
cataatctctatagagttgatgtaa

SEQ ID NO: 735699 - DNA, 25 bp, Homo sapien
tctatagagttgatgtaatgcacag

SEQ ID NO: 735700 - DNA, 25 bp, Homo sapien
gagttgatgtaatgcacagttaaga

SEQ ID NO: 735701 - DNA, 25 bp, Homo sapien
ttcacatccagatgttgactgtggg

SEQ ID NO: 735702 - DNA, 25 bp, Homo sapien
tcagtgagtattttccgtggagact

SEQ ID NO: 735703 - DNA, 25 bp, Homo sapien
ttccgtggagactgatccaggacct

SEQ ID NO: 735704 - DNA, 25 bp, Homo sapien
gatccaggacctgatggaaatgggc

SEQ ID NO: 735705 - DNA, 25 bp, Homo sapien
catcccccagtgatgcccctcactc

SEQ ID NO: 735706 - DNA, 25 bp, Homo sapien
tcccccagtgatgcccctcactcct

SEQ ID NO: 735707 - DNA, 25 bp, Homo sapien
atcccccagtgatgcccctcactcc

SEQ ID NO: 735708 - DNA, 25 bp, Homo sapien
cccccagtgatgcccctcactcctg

SEQ ID NO: 735709 - DNA, 25 bp, Homo sapien
cagatggtaactttcgaacagcttc

SEQ ID NO: 735710 - DNA, 25 bp, Homo sapien
tctgcctttgcggatactcaatagt

SEQ ID NO: 735711 - DNA, 25 bp, Homo sapien
gaacaattgacctccttaaccatta

SEQ ID NO: 735712 - DNA, 25 bp, Homo sapien
tcaatagtccagaacaattgacctc

SEQ ID NO: 735713 - DNA, 25 bp, Homo sapien
cctatttggcatgactaagacaagt

SEQ ID NO: 735714 - DNA, 25 bp, Homo sapien
tttcctatttggcatgactaagaca

SEQ ID NO: 735715 - DNA, 25 bp, Homo sapien
catgactaagacaagtttaccctct

SEQ ID NO: 735716 - DNA, 25 bp, Homo sapien
ttggcatgactaagacaagtttacc

SEQ ID NO: 735717 - DNA, 25 bp, Homo sapien
taatccacgcggctactaattgacc

SEQ ID NO: 735718 - DNA, 25 bp, Homo sapien
gcgactgacaactcgttctctctga

SEQ ID NO: 735719 - DNA, 25 bp, Homo sapien
gcctgagccttcatggtcggtggct

SEQ ID NO: 735720 - DNA, 25 bp, Homo sapien
taattgacctaatgagcgactgaca

SEQ ID NO: 735721 - DNA, 25 bp, Homo sapien
aagtctgtgattctttggctttggt

SEQ ID NO: 735722 - DNA, 25 bp, Homo sapien
ggctttggtttttgtgcctgttaca

SEQ ID NO: 735723 - DNA, 25 bp, Homo sapien
tatctaagaaatagccctgatattg

SEQ ID NO: 735724 - DNA, 25 bp, Homo sapien
tggcttctgtggaatcggtttgaca

SEQ ID NO: 735725 - DNA, 25 bp, Homo sapien
ttccctgcccgttaattagccaggc

SEQ ID NO: 735726 - DNA, 25 bp, Homo sapien
cctgcccgttaattagccaggccac

SEQ ID NO: 735727 - DNA, 25 bp, Homo sapien
gcccgttaattagccaggccactgt

SEQ ID NO: 735728 - DNA, 25 bp, Homo sapien
cgttccctgcccgttaattagccag

SEQ ID NO: 735729 - DNA, 25 bp, Homo sapien
ggccgtcttctaaatcaggacttcc

SEQ ID NO: 735730 - DNA, 25 bp, Homo sapien
gggccgtcttctaaatcaggacttc

SEQ ID NO: 735731 - DNA, 25 bp, Homo sapien
tagggggccgtcttctaaatcagga

SEQ ID NO: 735732 - DNA, 25 bp, Homo sapien
tcactgctggctgtagctaatatag

SEQ ID NO: 735733 - DNA, 25 bp, Homo sapien
gcccacggagtgaatcacaggattt

SEQ ID NO: 735734 - DNA, 25 bp, Homo sapien
agaatactcaatgggacttcactgc

SEQ ID NO: 735735 - DNA, 25 bp, Homo sapien
ggatttccagtagtgcacagaatac

SEQ ID NO: 735736 - DNA, 25 bp, Homo sapien
cacaatctagtagaaaaagtaacac

SEQ ID NO: 735737 - DNA, 25 bp, Homo sapien
tcacaatctagtagaaaaagtaaca

SEQ ID NO: 735738 - DNA, 25 bp, Homo sapien
aaagaggtcacacttggcccagcag

SEQ ID NO: 735739 - DNA, 25 bp, Homo sapien
ttggccagtgtgagttccaattggg

SEQ ID NO: 735740 - DNA, 25 bp, Homo sapien
ccctgccatgcagaaactaaagagg

SEQ ID NO: 735741 - DNA, 25 bp, Homo sapien
cactttggccagtgtgagttccaat

SEQ ID NO: 735742 - DNA, 25 bp, Homo sapien
ggcagcagtgccagattacatctgt

SEQ ID NO: 735743 - DNA, 25 bp, Homo sapien
cattctccaccctgtcaaacgtgga

SEQ ID NO: 735744 - DNA, 25 bp, Homo sapien
ctgtcaaacgtggagctgccagagc

SEQ ID NO: 735745 - DNA, 25 bp, Homo sapien
cctttcccgcttctgatcattttct

SEQ ID NO: 735746 - DNA, 25 bp, Homo sapien
tggcatctgtcctgcaaacagcctg

SEQ ID NO: 735747 - DNA, 25 bp, Homo sapien
aacagcctgagaacagcccagcaat

SEQ ID NO: 735748 - DNA, 25 bp, Homo sapien
tacctgatctgaacaccgtaggaga

SEQ ID NO: 735749 - DNA, 25 bp, Homo sapien
tgctgtccgtcagcaccactgtaaa

SEQ ID NO: 735750 - DNA, 25 bp, Homo sapien
cttattgaaaggcattttagtgtgg

SEQ ID NO: 735751 - DNA, 25 bp, Homo sapien
taaagtaacggagatatacacaaat

SEQ ID NO: 735752 - DNA, 25 bp, Homo sapien
ttacagatctataaggtcacatgct

SEQ ID NO: 735753 - DNA, 25 bp, Homo sapien
gaactgtgtatttgattgggaatgg

SEQ ID NO: 735754 - DNA, 25 bp, Homo sapien
gtgagagcgggtcgcggaggccgca

SEQ ID NO: 735755 - DNA, 25 bp, Homo sapien
cagcgactaaaaagaggtgagagcg

SEQ ID NO: 735756 - DNA, 25 bp, Homo sapien
tccggcttcggagcgggagtgttcg

SEQ ID NO: 735757 - DNA, 25 bp, Homo sapien
ggagtgttcgttgtgccagcgacta

SEQ ID NO: 735758 - DNA, 25 bp, Homo sapien
cgcggagcgagtttggttgcactta

SEQ ID NO: 735759 - DNA, 25 bp, Homo sapien
gcgggagcgcggagcgagtttggtt

SEQ ID NO: 735760 - DNA, 25 bp, Homo sapien
gagtttggttgcacttacaccggta

SEQ ID NO: 735761 - DNA, 25 bp, Homo sapien
gtacttaagcgcggaccggcgtgtc

SEQ ID NO: 735762 - DNA, 25 bp, Homo sapien
gcgcgcgcaggtccttggcgcaggc

SEQ ID NO: 735763 - DNA, 25 bp, Homo sapien
acgttactgcgtagccgccagctcg

SEQ ID NO: 735764 - DNA, 25 bp, Homo sapien
attgggactggagccaatgaggtgc

SEQ ID NO: 735765 - DNA, 25 bp, Homo sapien
ccaatgaggtgcggcgacgttactg

SEQ ID NO: 735766 - DNA, 25 bp, Homo sapien
gacgaggcaagtaaaggactttgcc

SEQ ID NO: 735767 - DNA, 25 bp, Homo sapien
gagactctgttagggcgccatgcca

SEQ ID NO: 735768 - DNA, 25 bp, Homo sapien
tccccaatttttgcgaggtgacctg

SEQ ID NO: 735769 - DNA, 25 bp, Homo sapien
gggactccactggaccggagctctt

SEQ ID NO: 735770 - DNA, 25 bp, Homo sapien
ttatttcttcatgctacctaagggt

SEQ ID NO: 735771 - DNA, 25 bp, Homo sapien
tggaaagtccttgcgcatgtgctct

SEQ ID NO: 735772 - DNA, 25 bp, Homo sapien
ggttccacgtgcaaattcagtgagg

SEQ ID NO: 735773 - DNA, 25 bp, Homo sapien
tagttggccttatatgttccagtgg

SEQ ID NO: 735774 - DNA, 25 bp, Homo sapien
gaatgtgacaccacaggatgctccc

SEQ ID NO: 735775 - DNA, 25 bp, Homo sapien
tgtcagttgcatctagaagtgccat

SEQ ID NO: 735776 - DNA, 25 bp, Homo sapien
tatcaccatgccctgagtacagaat

SEQ ID NO: 735777 - DNA, 25 bp, Homo sapien
ccctccctgactaggtatcaccatg

SEQ ID NO: 735778 - DNA, 25 bp, Homo sapien
gaacagtctacaatgggcagtttct

SEQ ID NO: 735779 - DNA, 25 bp, Homo sapien
catggtgagctgattcgtgaactcc

SEQ ID NO: 735780 - DNA, 25 bp, Homo sapien
cgtgaactcctgttacttatggcaa

SEQ ID NO: 735781 - DNA, 25 bp, Homo sapien
ggcactgctacccaagtactctggt

SEQ ID NO: 735782 - DNA, 25 bp, Homo sapien
agctccagggcaaggaacatgtacg

SEQ ID NO: 735783 - DNA, 25 bp, Homo sapien
ggcaaggaacatgtacgtggtgatt

SEQ ID NO: 735784 - DNA, 25 bp, Homo sapien
tacgtggtgattgtccgctgcagct

SEQ ID NO: 735785 - DNA, 25 bp, Homo sapien
gaacatgtacgtggtgattgtccgc

SEQ ID NO: 735786 - DNA, 25 bp, Homo sapien
tgttgttattgagactgtccatggg

SEQ ID NO: 735787 - DNA, 25 bp, Homo sapien
tgttattgagactgtccatgggctg

SEQ ID NO: 735788 - DNA, 25 bp, Homo sapien
tgggactgtccattcatcccgctct

SEQ ID NO: 735789 - DNA, 25 bp, Homo sapien
ctgtccattcatcccgctctctttg

SEQ ID NO: 735790 - DNA, 25 bp, Homo sapien
gaaggcccacgataggctgttctgg

SEQ ID NO: 735791 - DNA, 25 bp, Homo sapien
tcaaccttagctgagacaacggcat

SEQ ID NO: 735792 - DNA, 25 bp, Homo sapien
ccaggttggtagttctcaaccttag

SEQ ID NO: 735793 - DNA, 25 bp, Homo sapien
caagggtgaaggcccacgataggct

SEQ ID NO: 735794 - DNA, 25 bp, Homo sapien
gatgcaataggatcctgtgggactg

SEQ ID NO: 735795 - DNA, 25 bp, Homo sapien
ggcactcatttatccggtagtaaga

SEQ ID NO: 735796 - DNA, 25 bp, Homo sapien
cgcaggttctcaagtgtgacaataa

SEQ ID NO: 735797 - DNA, 25 bp, Homo sapien
gactggacttggagtctctcggcac

SEQ ID NO: 735798 - DNA, 25 bp, Homo sapien
tgctcaggatcatcctgcgccttct

SEQ ID NO: 735799 - DNA, 25 bp, Homo sapien
caggtctgtacgcattcagagaaac

SEQ ID NO: 735800 - DNA, 25 bp, Homo sapien
gcaaagcaactccatgagccagctt

SEQ ID NO: 735801 - DNA, 25 bp, Homo sapien
tcttctgcaggtctgtacgcattca

SEQ ID NO: 735802 - DNA, 25 bp, Homo sapien
gatggctctttgagacctgcaatct

SEQ ID NO: 735803 - DNA, 25 bp, Homo sapien
ggctctttgagacctgcaatctctg

SEQ ID NO: 735804 - DNA, 25 bp, Homo sapien
tctttgagacctgcaatctctgcat

SEQ ID NO: 735805 - DNA, 25 bp, Homo sapien
tttgatggctctttgagacctgcaa

SEQ ID NO: 735806 - DNA, 25 bp, Homo sapien
cccaggatctagtaagcctcacact

SEQ ID NO: 735807 - DNA, 25 bp, Homo sapien
caggatctagtaagcctcacactaa

SEQ ID NO: 735808 - DNA, 25 bp, Homo sapien
ttccccaggatctagtaagcctcac

SEQ ID NO: 735809 - DNA, 25 bp, Homo sapien
gcatcttggatctctccacacccca

SEQ ID NO: 735810 - DNA, 25 bp, Homo sapien
ccatgctatagagaagatatttacc

SEQ ID NO: 735811 - DNA, 25 bp, Homo sapien
aacaacctgtggtcttggccatcct

SEQ ID NO: 735812 - DNA, 25 bp, Homo sapien
tgtggtcttggccatcctttcccaa

SEQ ID NO: 735813 - DNA, 25 bp, Homo sapien
acagctgtccatgctatagagaaga

SEQ ID NO: 735814 - DNA, 25 bp, Homo sapien
agttgaatcatagagagctatttgg

SEQ ID NO: 735815 - DNA, 25 bp, Homo sapien
ctaagcagctgaataactatatgca

SEQ ID NO: 735816 - DNA, 25 bp, Homo sapien
gctgaataactatatgcatcagtca

SEQ ID NO: 735817 - DNA, 25 bp, Homo sapien
ggttggcactgctaaaacttctgtt

SEQ ID NO: 735818 - DNA, 25 bp, Homo sapien
aattgtgactgttggaattctgcca

SEQ ID NO: 735819 - DNA, 25 bp, Homo sapien
ccacaaattgtgactgttggaattc

SEQ ID NO: 735820 - DNA, 25 bp, Homo sapien
agccccacagtccataatgatccag

SEQ ID NO: 735821 - DNA, 25 bp, Homo sapien
cataatgatccagtgcccaacagtt

SEQ ID NO: 735822 - DNA, 25 bp, Homo sapien
aaaagcaaaagtctgcaaagacagg

SEQ ID NO: 735823 - DNA, 25 bp, Homo sapien
gccaaaagcaaaagtctgcaaagac

SEQ ID NO: 735824 - DNA, 25 bp, Homo sapien
tcagtcccctttttggccaaaagca

SEQ ID NO: 735825 - DNA, 25 bp, Homo sapien
agcaaaagtctgcaaagacaggtga

SEQ ID NO: 735826 - DNA, 25 bp, Homo sapien
tggccacgtggagtcgtagtgggca

SEQ ID NO: 735827 - DNA, 25 bp, Homo sapien
cagggtgtgcacacgctgctttgaa

SEQ ID NO: 735828 - DNA, 25 bp, Homo sapien
gatggtctcaccattgcggtggcct

SEQ ID NO: 735829 - DNA, 25 bp, Homo sapien
gaaaccagagtcaggagcacctgat

SEQ ID NO: 735830 - DNA, 25 bp, Homo sapien
gccagaacagctcctagcgagagga

SEQ ID NO: 735831 - DNA, 25 bp, Homo sapien
catttgatgctctggtggactcgct

SEQ ID NO: 735832 - DNA, 25 bp, Homo sapien
aacatagccaaagtcctccgggaat

SEQ ID NO: 735833 - DNA, 25 bp, Homo sapien
taacacaggaactttatgggcacca

SEQ ID NO: 735834 - DNA, 25 bp, Homo sapien
gaatctttggtcatacaatctctcg

SEQ ID NO: 735835 - DNA, 25 bp, Homo sapien
tgagtaagttactaggctacaggcc

SEQ ID NO: 735836 - DNA, 25 bp, Homo sapien
gaatcgatgttaaccatgagtaagt

SEQ ID NO: 735837 - DNA, 25 bp, Homo sapien
cctggtacaccaattgtttgaaact

SEQ ID NO: 735838 - DNA, 25 bp, Homo sapien
ggtccggtcacagctggcagctttg

SEQ ID NO: 735839 - DNA, 25 bp, Homo sapien
tcctttgcttatggtggtccggtca

SEQ ID NO: 735840 - DNA, 25 bp, Homo sapien
cttcagtaagaaagggtgcacttag

SEQ ID NO: 735841 - DNA, 25 bp, Homo sapien
tgaaggccgggatacaaaggaccat

SEQ ID NO: 735842 - DNA, 25 bp, Homo sapien
gatatagcttgggatgattcatcgg

SEQ ID NO: 735843 - DNA, 25 bp, Homo sapien
gaatgttgctaaagatagggcagta

SEQ ID NO: 735844 - DNA, 25 bp, Homo sapien
cagtataatatggaagccggcccaa

SEQ ID NO: 735845 - DNA, 25 bp, Homo sapien
ggagaaattgttacgacatagataa

SEQ ID NO: 735846 - DNA, 25 bp, Homo sapien
ctcttcacaatttgcaaagctactg

SEQ ID NO: 735847 - DNA, 25 bp, Homo sapien
tgcagccagggcttttgactcttca

SEQ ID NO: 735848 - DNA, 25 bp, Homo sapien
tgtgtgctggtggtgtgagcaagca

SEQ ID NO: 735849 - DNA, 25 bp, Homo sapien
gggcaccagacactcggtgggcagc

SEQ ID NO: 735850 - DNA, 25 bp, Homo sapien
tcccctgggagatccatgtattctg

SEQ ID NO: 735851 - DNA, 25 bp, Homo sapien
aaggtcactcttagcgctcccctgg

SEQ ID NO: 735852 - DNA, 25 bp, Homo sapien
tgaatcaaacatgccaaagggcctg

SEQ ID NO: 735853 - DNA, 25 bp, Homo sapien
gcatcctttaagttccatcggctgg

SEQ ID NO: 735854 - DNA, 25 bp, Homo sapien
cattggtctgaaccagacatgccca

SEQ ID NO: 735855 - DNA, 25 bp, Homo sapien
agaagccccacattggtctgaacca

SEQ ID NO: 735856 - DNA, 25 bp, Homo sapien
gccccacattggtctgaaccagaca

SEQ ID NO: 735857 - DNA, 25 bp, Homo sapien
cacattggtctgaaccagacatgcc

SEQ ID NO: 735858 - DNA, 25 bp, Homo sapien
caacaggattgaaggtggccgacta

SEQ ID NO: 735859 - DNA, 25 bp, Homo sapien
tacaactccaattgttcccaacagg

SEQ ID NO: 735860 - DNA, 25 bp, Homo sapien
tctgatgatttacaactccaattgt

SEQ ID NO: 735861 - DNA, 25 bp, Homo sapien
ggtggccgactactgtctaacatac

SEQ ID NO: 735862 - DNA, 25 bp, Homo sapien
gacattacatttggactcacacctg

SEQ ID NO: 735863 - DNA, 25 bp, Homo sapien
tgggtgcctggttcttcctagggca

SEQ ID NO: 735864 - DNA, 25 bp, Homo sapien
ctgacttgagagaataggccctgga

SEQ ID NO: 735865 - DNA, 25 bp, Homo sapien
catttttgtcgagttcccaatctga

SEQ ID NO: 735866 - DNA, 25 bp, Homo sapien
gcgttatatccaggccttgcaacag

SEQ ID NO: 735867 - DNA, 25 bp, Homo sapien
taatgagtccgttattaaaacacgc

SEQ ID NO: 735868 - DNA, 25 bp, Homo sapien
ggctggtatttacagattgcgttat

SEQ ID NO: 735869 - DNA, 25 bp, Homo sapien
cacgctttgggattcttggatgaat

SEQ ID NO: 735870 - DNA, 25 bp, Homo sapien
cttcggcccatctccaaagtctatt

SEQ ID NO: 735871 - DNA, 25 bp, Homo sapien
tccttgtcaatcttatactcctctt

SEQ ID NO: 735872 - DNA, 25 bp, Homo sapien
ttcaatcagtggatacttcggccca

SEQ ID NO: 735873 - DNA, 25 bp, Homo sapien
tactagccacactttcttggacaca

SEQ ID NO: 735874 - DNA, 25 bp, Homo sapien
ctttctcgtctttggatgtaaccat

SEQ ID NO: 735875 - DNA, 25 bp, Homo sapien
gctttctcgtctttggatgtaacca

SEQ ID NO: 735876 - DNA, 25 bp, Homo sapien
ggctttctcgtctttggatgtaacc

SEQ ID NO: 735877 - DNA, 25 bp, Homo sapien
agggctttctcgtctttggatgtaa

SEQ ID NO: 735878 - DNA, 25 bp, Homo sapien
tttgccaaccatcttctcgccagca

SEQ ID NO: 735879 - DNA, 25 bp, Homo sapien
atgcccgctgaaaacactctccaag

SEQ ID NO: 735880 - DNA, 25 bp, Homo sapien
cgatgggccttgaaagtatgtttca

SEQ ID NO: 735881 - DNA, 25 bp, Homo sapien
ccaaggccataaagcgatgggcctt

SEQ ID NO: 735882 - DNA, 25 bp, Homo sapien
tgattccatccctaacaaccaaatc

SEQ ID NO: 735883 - DNA, 25 bp, Homo sapien
aagatcagctcaaatcccgtgtctt

SEQ ID NO: 735884 - DNA, 25 bp, Homo sapien
ttgattccatccctaacaaccaaat

SEQ ID NO: 735885 - DNA, 25 bp, Homo sapien
atcccgtgtcttgtttgattccatc

SEQ ID NO: 735886 - DNA, 25 bp, Homo sapien
caactgtgcctctaaatccttttga

SEQ ID NO: 735887 - DNA, 25 bp, Homo sapien
ggctttttgtttaatcgtgattcca

SEQ ID NO: 735888 - DNA, 25 bp, Homo sapien
gcaccagaagtcatgtgtggctttt

SEQ ID NO: 735889 - DNA, 25 bp, Homo sapien
ttctttctaagattgccatgcagcc

SEQ ID NO: 735890 - DNA, 25 bp, Homo sapien
gataaccctgcacttggccctaaag

SEQ ID NO: 735891 - DNA, 25 bp, Homo sapien
ctgggataaccctgcacttggccct

SEQ ID NO: 735892 - DNA, 25 bp, Homo sapien
ataaccctgcacttggccctaaagc

SEQ ID NO: 735893 - DNA, 25 bp, Homo sapien
gggataaccctgcacttggccctaa

SEQ ID NO: 735894 - DNA, 25 bp, Homo sapien
tgccacagaagaatgcccctaagca

SEQ ID NO: 735895 - DNA, 25 bp, Homo sapien
tctgatcaccgaaattatgccacag

SEQ ID NO: 735896 - DNA, 25 bp, Homo sapien
ctgatcaccgaaattatgccacaga

SEQ ID NO: 735897 - DNA, 25 bp, Homo sapien
tactctgatcaccgaaattatgcca

SEQ ID NO: 735898 - DNA, 25 bp, Homo sapien
gccttctgagtctaaataattaatg

SEQ ID NO: 735899 - DNA, 25 bp, Homo sapien
actttgccaatgaatcaagatgttt

SEQ ID NO: 735900 - DNA, 25 bp, Homo sapien
tttgccaatgaatcaagatgttttt

SEQ ID NO: 735901 - DNA, 25 bp, Homo sapien
cagccttctgagtctaaataattaa

SEQ ID NO: 735902 - DNA, 25 bp, Homo sapien
ggttcgttgagcttgcttctctcaa

SEQ ID NO: 735903 - DNA, 25 bp, Homo sapien
tcctggaattttgagcagcggttcg

SEQ ID NO: 735904 - DNA, 25 bp, Homo sapien
tttgagcagcggttcgttgagcttg

SEQ ID NO: 735905 - DNA, 25 bp, Homo sapien
cagcggttcgttgagcttgcttctc

SEQ ID NO: 735906 - DNA, 25 bp, Homo sapien
tccagctgccggctggttgcagttt

SEQ ID NO: 735907 - DNA, 25 bp, Homo sapien
agcagaccatagacctggaggccgc

SEQ ID NO: 735908 - DNA, 25 bp, Homo sapien
gccttaggcggtctgcagcaatttt

SEQ ID NO: 735909 - DNA, 25 bp, Homo sapien
gacatcgcatcctttgctgctccag

SEQ ID NO: 735910 - DNA, 25 bp, Homo sapien
aaagatcatgaacatgtccctttcc

SEQ ID NO: 735911 - DNA, 25 bp, Homo sapien
acaaactctctgaaaggtctgctct

SEQ ID NO: 735912 - DNA, 25 bp, Homo sapien
gatcatgaacatgtccctttccaac

SEQ ID NO: 735913 - DNA, 25 bp, Homo sapien
tgaacatgtccctttccaacctctt

SEQ ID NO: 735914 - DNA, 25 bp, Homo sapien
ggaatgaaagggccatatgactgac

SEQ ID NO: 735915 - DNA, 25 bp, Homo sapien
aggaatgaaagggccatatgactga

SEQ ID NO: 735916 - DNA, 25 bp, Homo sapien
tccacgcccagttctacctctgcct

SEQ ID NO: 735917 - DNA, 25 bp, Homo sapien
aacactggggagcattctcactcac

SEQ ID NO: 735918 - DNA, 25 bp, Homo sapien
gttggttgctgagggtctgacacct

SEQ ID NO: 735919 - DNA, 25 bp, Homo sapien
ccacacacaagaaggttctgtgaga

SEQ ID NO: 735920 - DNA, 25 bp, Homo sapien
atggatgaggaagctagagggttgt

SEQ ID NO: 735921 - DNA, 25 bp, Homo sapien
ctagagggttgttttgtgaaacagc

SEQ ID NO: 735922 - DNA, 25 bp, Homo sapien
aatggatgaggaagctagagggttg

SEQ ID NO: 735923 - DNA, 25 bp, Homo sapien
aatccagagcagggttgccttgccc

SEQ ID NO: 735924 - DNA, 25 bp, Homo sapien
tgctgggcaggttacgagatacgtc

SEQ ID NO: 735925 - DNA, 25 bp, Homo sapien
ctaaattctctttgtgggtccacac

SEQ ID NO: 735926 - DNA, 25 bp, Homo sapien
ccttgtgcatatcaaatgctgggca

SEQ ID NO: 735927 - DNA, 25 bp, Homo sapien
acaccagtcctgttgggtaactcag

SEQ ID NO: 735928 - DNA, 25 bp, Homo sapien
aaaacagcgtgtgaagaatgatgaa

SEQ ID NO: 735929 - DNA, 25 bp, Homo sapien
aaacagcgtgtgaagaatgatgaaa

SEQ ID NO: 735930 - DNA, 25 bp, Homo sapien
ctttgaagtgaagcccagggcctgt

SEQ ID NO: 735931 - DNA, 25 bp, Homo sapien
cacgagaatttggttcccgggagag

SEQ ID NO: 735932 - DNA, 25 bp, Homo sapien
atctccacgagaatttggttcccgg

SEQ ID NO: 735933 - DNA, 25 bp, Homo sapien
gaaaatctccacgagaatttggttc

SEQ ID NO: 735934 - DNA, 25 bp, Homo sapien
tgaggaaaatctccacgagaatttg

SEQ ID NO: 735935 - DNA, 25 bp, Homo sapien
tgtggacaagtacaaatcagataga

SEQ ID NO: 735936 - DNA, 25 bp, Homo sapien
tggacaagtacaaatcagatagaaa

SEQ ID NO: 735937 - DNA, 25 bp, Homo sapien
gtggacaagtacaaatcagatagaa

SEQ ID NO: 735938 - DNA, 25 bp, Homo sapien
tgatccagcaacttgatttcagcaa

SEQ ID NO: 735939 - DNA, 25 bp, Homo sapien
gggatgtgtagcacgggttttacaa

SEQ ID NO: 735940 - DNA, 25 bp, Homo sapien
tccagcaacttgatttcagcaaagc

SEQ ID NO: 735941 - DNA, 25 bp, Homo sapien
gggttttacaatgcgaactatctgg

SEQ ID NO: 735942 - DNA, 25 bp, Homo sapien
cgtggaaggctagcctcctgctctg

SEQ ID NO: 735943 - DNA, 25 bp, Homo sapien
tgctctgcaaaacctccattaccta

SEQ ID NO: 735944 - DNA, 25 bp, Homo sapien
caaaccgggtactgcacatgcactg

SEQ ID NO: 735945 - DNA, 25 bp, Homo sapien
ctgaggtgcccaaaccgggtactgc

SEQ ID NO: 735946 - DNA, 25 bp, Homo sapien
gaggcaaagcgaggcaatctgaagc

SEQ ID NO: 735947 - DNA, 25 bp, Homo sapien
cactctgtagcccaaatcttggaaa

SEQ ID NO: 735948 - DNA, 25 bp, Homo sapien
ctggaaattcttctctgctcgggag

SEQ ID NO: 735949 - DNA, 25 bp, Homo sapien
ggtcaggtctgacatagcaggaaag

SEQ ID NO: 735950 - DNA, 25 bp, Homo sapien
gaccacttgagaatattcctccagg

SEQ ID NO: 735951 - DNA, 25 bp, Homo sapien
caggaagccatttgacactgtggtt

SEQ ID NO: 735952 - DNA, 25 bp, Homo sapien
tcctccaggttctagaaaagatcta

SEQ ID NO: 735953 - DNA, 25 bp, Homo sapien
tcttgtccaatagtcacccactgga

SEQ ID NO: 735954 - DNA, 25 bp, Homo sapien
gaagcacgaacatccaaaaagatgc

SEQ ID NO: 735955 - DNA, 25 bp, Homo sapien
gccaatttgaagcacgaacatccaa

SEQ ID NO: 735956 - DNA, 25 bp, Homo sapien
aacggcccccagccaatttgaagca

SEQ ID NO: 735957 - DNA, 25 bp, Homo sapien
tttgaagcacgaacatccaaaaaga

SEQ ID NO: 735958 - DNA, 25 bp, Homo sapien
attattggcataatcattctttcag

SEQ ID NO: 735959 - DNA, 25 bp, Homo sapien
gctcctttcacaggccttattattg

SEQ ID NO: 735960 - DNA, 25 bp, Homo sapien
tcagggatgatagctcctttcacag

SEQ ID NO: 735961 - DNA, 25 bp, Homo sapien
ggccttattattggcataatcattc

SEQ ID NO: 735962 - DNA, 25 bp, Homo sapien
gcacttgataatgacctatttcatt

SEQ ID NO: 735963 - DNA, 25 bp, Homo sapien
ttgaaaattaagcacttgataatga

SEQ ID NO: 735964 - DNA, 25 bp, Homo sapien
cacttgataatgacctatttcattt

SEQ ID NO: 735965 - DNA, 25 bp, Homo sapien
attgaaaattaagcacttgataatg

SEQ ID NO: 735966 - DNA, 25 bp, Homo sapien
aaactggggataacacaagcattca

SEQ ID NO: 735967 - DNA, 25 bp, Homo sapien
taatagcatactatggaaaatctag

SEQ ID NO: 735968 - DNA, 25 bp, Homo sapien
gagtaagcaagctctctcacgtatc

SEQ ID NO: 735969 - DNA, 25 bp, Homo sapien
tttggcttctacatgtgaaactggg

SEQ ID NO: 735970 - DNA, 25 bp, Homo sapien
attgtgaccacattggtaaggacaa

SEQ ID NO: 735971 - DNA, 25 bp, Homo sapien
tgtgaccacattggtaaggacaaca

SEQ ID NO: 735972 - DNA, 25 bp, Homo sapien
gaccacattggtaaggacaacaacc

SEQ ID NO: 735973 - DNA, 25 bp, Homo sapien
cacattggtaaggacaacaaccagc

SEQ ID NO: 735974 - DNA, 25 bp, Homo sapien
gaccgcgagttgacaaaggctcttg

SEQ ID NO: 735975 - DNA, 25 bp, Homo sapien
ggctcttggagatcccctttcatct

SEQ ID NO: 735976 - DNA, 25 bp, Homo sapien
gcgagttgacaaaggctcttggaga

SEQ ID NO: 735977 - DNA, 25 bp, Homo sapien
agacaagaccgcgagttgacaaagg

SEQ ID NO: 735978 - DNA, 25 bp, Homo sapien
gagaagtcaacagctgtagctgtaa

SEQ ID NO: 735979 - DNA, 25 bp, Homo sapien
tcttcacaccgtcacaaaggtcaat

SEQ ID NO: 735980 - DNA, 25 bp, Homo sapien
tagtagctccatcactcttataagt

SEQ ID NO: 735981 - DNA, 25 bp, Homo sapien
ggtcaataaggacaaccagctctgg

SEQ ID NO: 735982 - DNA, 25 bp, Homo sapien
tctgcagatcacaaacagcgcatgg

SEQ ID NO: 735983 - DNA, 25 bp, Homo sapien
ggatgtgacataagaaaactgggcc

SEQ ID NO: 735984 - DNA, 25 bp, Homo sapien
aaagaacagtttgaacaacgggatg

SEQ ID NO: 735985 - DNA, 25 bp, Homo sapien
tttctgagtgagtggcttcgtcaac

SEQ ID NO: 735986 - DNA, 25 bp, Homo sapien
ttctctgacagcttgactggcaagt

SEQ ID NO: 735987 - DNA, 25 bp, Homo sapien
atcctggcttgcaaatttcgcagca

SEQ ID NO: 735988 - DNA, 25 bp, Homo sapien
gcttgcaaatttcgcagcacagatt

SEQ ID NO: 735989 - DNA, 25 bp, Homo sapien
gatcaacaatctcaatcacattctc

SEQ ID NO: 735990 - DNA, 25 bp, Homo sapien
cattctctttcgatgtagaataatc

SEQ ID NO: 735991 - DNA, 25 bp, Homo sapien
tctgttgactgaatactccgtatct

SEQ ID NO: 735992 - DNA, 25 bp, Homo sapien
tgtaggtcgaatgagcaactttgcc

SEQ ID NO: 735993 - DNA, 25 bp, Homo sapien
gtctggtgctataaactgctgaatt

SEQ ID NO: 735994 - DNA, 25 bp, Homo sapien
tacgacaaagttgggacataaactg

SEQ ID NO: 735995 - DNA, 25 bp, Homo sapien
gaacttgtaccccatttgctcagga

SEQ ID NO: 735996 - DNA, 25 bp, Homo sapien
cagtccaaacctggagaacttgtac

SEQ ID NO: 735997 - DNA, 25 bp, Homo sapien
gataagacatgatgcggattcccag

SEQ ID NO: 735998 - DNA, 25 bp, Homo sapien
caggtgaattaatctgtgataagac

SEQ ID NO: 735999 - DNA, 25 bp, Homo sapien
cagctccttctggtccccctctcca

SEQ ID NO: 736000 - DNA, 25 bp, Homo sapien
ccagctccttctggtccccctctcc

SEQ ID NO: 736001 - DNA, 25 bp, Homo sapien
agctccttctggtccccctctccac

SEQ ID NO: 736002 - DNA, 25 bp, Homo sapien
cccagctccttctggtccccctctc

SEQ ID NO: 736003 - DNA, 25 bp, Homo sapien
caggtttctgccactgtgttttcct

SEQ ID NO: 736004 - DNA, 25 bp, Homo sapien
ggcaaagaaggagggcatgtcctct

SEQ ID NO: 736005 - DNA, 25 bp, Homo sapien
aaagaaggagggcatgtcctctttt

SEQ ID NO: 736006 - DNA, 25 bp, Homo sapien
aaggagggcatgtcctcttttttca

SEQ ID NO: 736007 - DNA, 25 bp, Homo sapien
aacaaggtttcaggagtgtggagga

SEQ ID NO: 736008 - DNA, 25 bp, Homo sapien
agcaaacaaggtttcaggagtgtgg

SEQ ID NO: 736009 - DNA, 25 bp, Homo sapien
caaacaaggtttcaggagtgtggag

SEQ ID NO: 736010 - DNA, 25 bp, Homo sapien
aagcaaacaaggtttcaggagtgtg

SEQ ID NO: 736011 - DNA, 25 bp, Homo sapien
tatttacggcctttgcagactgctg

SEQ ID NO: 736012 - DNA, 25 bp, Homo sapien
aaacagcagggtgattaggagcagc

SEQ ID NO: 736013 - DNA, 25 bp, Homo sapien
tcacatggtgaagacagcgcaagct

SEQ ID NO: 736014 - DNA, 25 bp, Homo sapien
taggctgagtgctcccattcaagaa

SEQ ID NO: 736015 - DNA, 25 bp, Homo sapien
caggcagttgttggtgaattgagca

SEQ ID NO: 736016 - DNA, 25 bp, Homo sapien
gggctgctcctggattggctggaca

SEQ ID NO: 736017 - DNA, 25 bp, Homo sapien
tcctggattggctggacaggcagtt

SEQ ID NO: 736018 - DNA, 25 bp, Homo sapien
acaggcagttgttggtgaattgagc

SEQ ID NO: 736019 - DNA, 25 bp, Homo sapien
tagcatcaggtgactggagaacagg

SEQ ID NO: 736020 - DNA, 25 bp, Homo sapien
acaggctgagggacacgctccccat

SEQ ID NO: 736021 - DNA, 25 bp, Homo sapien
agaacaggctgagggacacgctccc

SEQ ID NO: 736022 - DNA, 25 bp, Homo sapien
ggagaacaggctgagggacacgctc

SEQ ID NO: 736023 - DNA, 25 bp, Homo sapien
ctccccacaacttgtcagcaggtgg

SEQ ID NO: 736024 - DNA, 25 bp, Homo sapien
gcaggtgggccactctgccggcact

SEQ ID NO: 736025 - DNA, 25 bp, Homo sapien
tccagaaagcccaatgtctcccagg

SEQ ID NO: 736026 - DNA, 25 bp, Homo sapien
gtgggccactctgccggcactggca

SEQ ID NO: 736027 - DNA, 25 bp, Homo sapien
ctgagtggcttacaacagggatgct

SEQ ID NO: 736028 - DNA, 25 bp, Homo sapien
cagatctgtttggatggatgtggac

SEQ ID NO: 736029 - DNA, 25 bp, Homo sapien
ttttaaagggcaacgggagatgtca

SEQ ID NO: 736030 - DNA, 25 bp, Homo sapien
gctaagagctctagtaccaaagcat

SEQ ID NO: 736031 - DNA, 25 bp, Homo sapien
tgctggtgataaaataaagggtagg

SEQ ID NO: 736032 - DNA, 25 bp, Homo sapien
gtaaagcaggctcgccctttaatgg

SEQ ID NO: 736033 - DNA, 25 bp, Homo sapien
ttgggccttgtttgctggtgataaa

SEQ ID NO: 736034 - DNA, 25 bp, Homo sapien
tccagagttgatgtgtggccgaacg

SEQ ID NO: 736035 - DNA, 25 bp, Homo sapien
tctgggagtcgcctcatggaaatct

SEQ ID NO: 736036 - DNA, 25 bp, Homo sapien
gagtcgcctcatggaaatcttgcaa

SEQ ID NO: 736037 - DNA, 25 bp, Homo sapien
gaaatcttgcaaagtggaggaccca

SEQ ID NO: 736038 - DNA, 25 bp, Homo sapien
tcaaatcatctctgggagtcgcctc

SEQ ID NO: 736039 - DNA, 25 bp, Homo sapien
ggcaagatgaggagtataatgtgtc

SEQ ID NO: 736040 - DNA, 25 bp, Homo sapien
caatacaattgtctcagcccatctg

SEQ ID NO: 736041 - DNA, 25 bp, Homo sapien
catctgactgctgaactaccaaggg

SEQ ID NO: 736042 - DNA, 25 bp, Homo sapien
gcaaaccaaagctgacgctctgtct

SEQ ID NO: 736043 - DNA, 25 bp, Homo sapien
tctctgtatttggtagatgattttt

SEQ ID NO: 736044 - DNA, 25 bp, Homo sapien
catcgtcacttagcattacaagctg

SEQ ID NO: 736045 - DNA, 25 bp, Homo sapien
cacctgagaggggaatgtgtcttca

SEQ ID NO: 736046 - DNA, 25 bp, Homo sapien
gcagcctctagatgacaacttgtta

SEQ ID NO: 736047 - DNA, 25 bp, Homo sapien
tgggattataattactacatcctca

SEQ ID NO: 736048 - DNA, 25 bp, Homo sapien
gggattataattactacatcctcag

SEQ ID NO: 736049 - DNA, 25 bp, Homo sapien
gaggcgtcaactatgctgcaccctt

SEQ ID NO: 736050 - DNA, 25 bp, Homo sapien
agtgaggcgtcaactatgctgcacc

SEQ ID NO: 736051 - DNA, 25 bp, Homo sapien
gtccagtgaggcgtcaactatgctg

SEQ ID NO: 736052 - DNA, 25 bp, Homo sapien
agatctgtccagtgaggcgtcaact

SEQ ID NO: 736053 - DNA, 25 bp, Homo sapien
ggcttgcgcaaaagctctccctgtg

SEQ ID NO: 736054 - DNA, 25 bp, Homo sapien
gctcaggggcttgcgcaaaagctct

SEQ ID NO: 736055 - DNA, 25 bp, Homo sapien
caactggaggcgatgagggaggtca

SEQ ID NO: 736056 - DNA, 25 bp, Homo sapien
gaatcatcaaagatccttgaagcca

SEQ ID NO: 736057 - DNA, 25 bp, Homo sapien
agtgcctgagaccttggaggcagtc

SEQ ID NO: 736058 - DNA, 25 bp, Homo sapien
ctgagaccttggaggcagtccaaaa

SEQ ID NO: 736059 - DNA, 25 bp, Homo sapien
tgcctgagaccttggaggcagtcca

SEQ ID NO: 736060 - DNA, 25 bp, Homo sapien
tgtggagggtgagtgcctgagacct

SEQ ID NO: 736061 - DNA, 25 bp, Homo sapien
tctgcaataaggcataatgaaggta

SEQ ID NO: 736062 - DNA, 25 bp, Homo sapien
ctgaacagctgtgaatctattttta

SEQ ID NO: 736063 - DNA, 25 bp, Homo sapien
gcaataaggcataatgaaggtaaaa

SEQ ID NO: 736064 - DNA, 25 bp, Homo sapien
gaacagctgtgaatctatttttaat

SEQ ID NO: 736065 - DNA, 25 bp, Homo sapien
aataatatcactaggttcttatatt

SEQ ID NO: 736066 - DNA, 25 bp, Homo sapien
aagtaactttagaataggcctctct

SEQ ID NO: 736067 - DNA, 25 bp, Homo sapien
aaataatatcactaggttcttatat

SEQ ID NO: 736068 - DNA, 25 bp, Homo sapien
ataatatcactaggttcttatattt

SEQ ID NO: 736069 - DNA, 25 bp, Homo sapien
tctgtaacctgttcgtcttgaatac

SEQ ID NO: 736070 - DNA, 25 bp, Homo sapien
cgtcttgaatacaaaggcctgcatc

SEQ ID NO: 736071 - DNA, 25 bp, Homo sapien
tgttcgtcttgaatacaaaggcctg

SEQ ID NO: 736072 - DNA, 25 bp, Homo sapien
cttggaaatcggtctgtaacctgtt

SEQ ID NO: 736073 - DNA, 25 bp, Homo sapien
tccctgccttcccatgtgtgctgtg

SEQ ID NO: 736074 - DNA, 25 bp, Homo sapien
tccgattggcggtgtgacaactggc

SEQ ID NO: 736075 - DNA, 25 bp, Homo sapien
caactggcggagagcagttgtccct

SEQ ID NO: 736076 - DNA, 25 bp, Homo sapien
tgacaactggcggagagcagttgtc

SEQ ID NO: 736077 - DNA, 25 bp, Homo sapien
ctagtcaatccgattggcggtgtga

SEQ ID NO: 736078 - DNA, 25 bp, Homo sapien
tttgtaaaatcactctagtctttta

SEQ ID NO: 736079 - DNA, 25 bp, Homo sapien
taaagagtttctgaatatatcatgt

SEQ ID NO: 736080 - DNA, 25 bp, Homo sapien
ttaagtactgtctaccaagagtttc

SEQ ID NO: 736081 - DNA, 25 bp, Homo sapien
aattaagtactgtctaccaagagtt

SEQ ID NO: 736082 - DNA, 25 bp, Homo sapien
gccatgggcttgtctacttcagtct

SEQ ID NO: 736083 - DNA, 25 bp, Homo sapien
tggccatgggcttgtctacttcagt

SEQ ID NO: 736084 - DNA, 25 bp, Homo sapien
tagggtggccatgggcttgtctact

SEQ ID NO: 736085 - DNA, 25 bp, Homo sapien
catgggcttgtctacttcagtctcc

SEQ ID NO: 736086 - DNA, 25 bp, Homo sapien
tgtggataaggcctaatggacacca

SEQ ID NO: 736087 - DNA, 25 bp, Homo sapien
gcaaaagttgaagatagcccctgtg

SEQ ID NO: 736088 - DNA, 25 bp, Homo sapien
gtggcaaaagttgaagatagcccct

SEQ ID NO: 736089 - DNA, 25 bp, Homo sapien
tggataaggcctaatggacaccatc

SEQ ID NO: 736090 - DNA, 25 bp, Homo sapien
cgatggcagccgcaatgatttagat

SEQ ID NO: 736091 - DNA, 25 bp, Homo sapien
attcaaagtgaaaaaccgatggcag

SEQ ID NO: 736092 - DNA, 25 bp, Homo sapien
aaaaccgatggcagccgcaatgatt

SEQ ID NO: 736093 - DNA, 25 bp, Homo sapien
aagtgaaaaaccgatggcagccgca

SEQ ID NO: 736094 - DNA, 25 bp, Homo sapien
gaagggcgccttttgatctagctgc

SEQ ID NO: 736095 - DNA, 25 bp, Homo sapien
gacacggatttttcatggctctaga

SEQ ID NO: 736096 - DNA, 25 bp, Homo sapien
tggcctctcctatcagtcgctgaag

SEQ ID NO: 736097 - DNA, 25 bp, Homo sapien
aagtacaacactccttcctcgatgg

SEQ ID NO: 736098 - DNA, 25 bp, Homo sapien
ggaggacagtcaaaatccagggctc

SEQ ID NO: 736099 - DNA, 25 bp, Homo sapien
cccagatttctttcactaccaggct

SEQ ID NO: 736100 - DNA, 25 bp, Homo sapien
ccagatttctttcactaccaggctg

SEQ ID NO: 736101 - DNA, 25 bp, Homo sapien
gctggccactggctttggaggacag

SEQ ID NO: 736102 - DNA, 25 bp, Homo sapien
gggcaggcaaatgttggtttataac

SEQ ID NO: 736103 - DNA, 25 bp, Homo sapien
caagaattcagctcgggcaggcaaa

SEQ ID NO: 736104 - DNA, 25 bp, Homo sapien
ggtttataacatgaacactgaccat

SEQ ID NO: 736105 - DNA, 25 bp, Homo sapien
cagtagcttcagaggttgacaagaa

SEQ ID NO: 736106 - DNA, 25 bp, Homo sapien
tgttatggttattgccatgtccctg

SEQ ID NO: 736107 - DNA, 25 bp, Homo sapien
tacagactgctaatgaggacatcca

SEQ ID NO: 736108 - DNA, 25 bp, Homo sapien
catcacagggtaagtatggtttcct

SEQ ID NO: 736109 - DNA, 25 bp, Homo sapien
tggaaaagacactggtacagactgc

SEQ ID NO: 736110 - DNA, 25 bp, Homo sapien
gtttactcttcctgctaacatcctc

SEQ ID NO: 736111 - DNA, 25 bp, Homo sapien
atgaggccacaaaccggactgagtc

SEQ ID NO: 736112 - DNA, 25 bp, Homo sapien
tgggagagagtaaccatgaggccac

SEQ ID NO: 736113 - DNA, 25 bp, Homo sapien
gacatgcttgggaaaacgacttgcc

SEQ ID NO: 736114 - DNA, 25 bp, Homo sapien
gactggtgcccaaagctacttcaac

SEQ ID NO: 736115 - DNA, 25 bp, Homo sapien
accacgcgactggtgcccaaagcta

SEQ ID NO: 736116 - DNA, 25 bp, Homo sapien
gtgcccaaagctacttcaacctcag

SEQ ID NO: 736117 - DNA, 25 bp, Homo sapien
cttctgtgctcaccacgcgactggt

SEQ ID NO: 736118 - DNA, 25 bp, Homo sapien
tcagcacgaggaacttccgttttct

SEQ ID NO: 736119 - DNA, 25 bp, Homo sapien
tatcttgaacatcatgtactgttcc

SEQ ID NO: 736120 - DNA, 25 bp, Homo sapien
ttcttatcttgaacatcatgtactg

SEQ ID NO: 736121 - DNA, 25 bp, Homo sapien
tcatttggttaagctcagcacgagg

SEQ ID NO: 736122 - DNA, 25 bp, Homo sapien
tggcttcatgccttgttcatcaatg

SEQ ID NO: 736123 - DNA, 25 bp, Homo sapien
ccaggaggaaagtatggacccatcc

SEQ ID NO: 736124 - DNA, 25 bp, Homo sapien
cctgtagcagttgctttggtacctg

SEQ ID NO: 736125 - DNA, 25 bp, Homo sapien
gggagcttcatgactgtctggcttc

SEQ ID NO: 736126 - DNA, 25 bp, Homo sapien
gaaaactcagttagtaacaagtgca

SEQ ID NO: 736127 - DNA, 25 bp, Homo sapien
agctgagtatccagcccttggtaat

SEQ ID NO: 736128 - DNA, 25 bp, Homo sapien
tgagtatccagcccttggtaatata

SEQ ID NO: 736129 - DNA, 25 bp, Homo sapien
aactcttcattataattgcttgcag

SEQ ID NO: 736130 - DNA, 25 bp, Homo sapien
tcctttgccattgggccggcacagt

SEQ ID NO: 736131 - DNA, 25 bp, Homo sapien
gaaggcaactcctttgccattgggc

SEQ ID NO: 736132 - DNA, 25 bp, Homo sapien
gggaagaaggcaactcctttgccat

SEQ ID NO: 736133 - DNA, 25 bp, Homo sapien
attgggccggcacagtccccaaagg

SEQ ID NO: 736134 - DNA, 25 bp, Homo sapien
ctgtttttccatcacagcatggggc

SEQ ID NO: 736135 - DNA, 25 bp, Homo sapien
cctgtttttccatcacagcatgggg

SEQ ID NO: 736136 - DNA, 25 bp, Homo sapien
tgtgttttcatagaaccaaggcaga

SEQ ID NO: 736137 - DNA, 25 bp, Homo sapien
aaggcagagcttccgttctcagagg

SEQ ID NO: 736138 - DNA, 25 bp, Homo sapien
aagccaagccgatcctgaggactcc

SEQ ID NO: 736139 - DNA, 25 bp, Homo sapien
tgcgtgttgatgtgaagtatcctcc

SEQ ID NO: 736140 - DNA, 25 bp, Homo sapien
cagaaacaagggcaagggctggcat

SEQ ID NO: 736141 - DNA, 25 bp, Homo sapien
gggctggcatttcactggtccctgc

SEQ ID NO: 736142 - DNA, 25 bp, Homo sapien
gacaagctgtcatttctaagagcag

SEQ ID NO: 736143 - DNA, 25 bp, Homo sapien
ggcatttcactggtccctgcatacc

SEQ ID NO: 736144 - DNA, 25 bp, Homo sapien
tattgtcatccactttgcactcctc

SEQ ID NO: 736145 - DNA, 25 bp, Homo sapien
tgccctgaatcaccaaatcagttct

SEQ ID NO: 736146 - DNA, 25 bp, Homo sapien
ggccacacggtattgtcatccactt

SEQ ID NO: 736147 - DNA, 25 bp, Homo sapien
ccttctgtaaatggccacacggtat

SEQ ID NO: 736148 - DNA, 25 bp, Homo sapien
tgcagccattatggaaatgcacacc

SEQ ID NO: 736149 - DNA, 25 bp, Homo sapien
aaaagcagcaaacaccacttggttg

SEQ ID NO: 736150 - DNA, 25 bp, Homo sapien
tcagttggttttgggacagtcttca

SEQ ID NO: 736151 - DNA, 25 bp, Homo sapien
aattcagttcacaagcaaaagcagc

SEQ ID NO: 736152 - DNA, 25 bp, Homo sapien
ttgaataccagaagagccgaccatg

SEQ ID NO: 736153 - DNA, 25 bp, Homo sapien
ttccacacatgattaattttgcagt

SEQ ID NO: 736154 - DNA, 25 bp, Homo sapien
gaagagccgaccatgtgctggctct

SEQ ID NO: 736155 - DNA, 25 bp, Homo sapien
ccacacatgattaattttgcagttg

SEQ ID NO: 736156 - DNA, 25 bp, Homo sapien
tttgcctgtcagacgcttgcctttg

SEQ ID NO: 736157 - DNA, 25 bp, Homo sapien
gagagtagagaccatcggcatctcc

SEQ ID NO: 736158 - DNA, 25 bp, Homo sapien
gacgcttgcctttggcccaatcata

SEQ ID NO: 736159 - DNA, 25 bp, Homo sapien
catctccaaacgtgctttctgcctt

SEQ ID NO: 736160 - DNA, 25 bp, Homo sapien
gatgttatcagaacggccagacttt

SEQ ID NO: 736161 - DNA, 25 bp, Homo sapien
tgatgttatcagaacggccagactt

SEQ ID NO: 736162 - DNA, 25 bp, Homo sapien
gattccaagtgactgggttggaaag

SEQ ID NO: 736163 - DNA, 25 bp, Homo sapien
ttccaagtgactgggttggaaagca

SEQ ID NO: 736164 - DNA, 25 bp, Homo sapien
ccaagtgactgggttggaaagcaca

SEQ ID NO: 736165 - DNA, 25 bp, Homo sapien
attccaagtgactgggttggaaagc

SEQ ID NO: 736166 - DNA, 25 bp, Homo sapien
ctgcagtgccccagatggtattgtt

SEQ ID NO: 736167 - DNA, 25 bp, Homo sapien
gatcattttgctgcagttaacattc

SEQ ID NO: 736168 - DNA, 25 bp, Homo sapien
agatcattttgctgcagttaacatt

SEQ ID NO: 736169 - DNA, 25 bp, Homo sapien
gtgccccagatggtattgtttgaat

SEQ ID NO: 736170 - DNA, 25 bp, Homo sapien
atcatcaatcgcctattgagaaggg

SEQ ID NO: 736171 - DNA, 25 bp, Homo sapien
tcaagtgtgggtgggactccctgga

SEQ ID NO: 736172 - DNA, 25 bp, Homo sapien
ctctgaggtgcaggatccagaaagg

SEQ ID NO: 736173 - DNA, 25 bp, Homo sapien
aaaggagaggttgagagaaagctca

SEQ ID NO: 736174 - DNA, 25 bp, Homo sapien
gcactgatggggtgtcctcgcagac

SEQ ID NO: 736175 - DNA, 25 bp, Homo sapien
ccctggtctcaacaacctgatttgg

SEQ ID NO: 736176 - DNA, 25 bp, Homo sapien
gggtgtcctcgcagacacagctttc

SEQ ID NO: 736177 - DNA, 25 bp, Homo sapien
acaacctgatttggccttcctcttc

SEQ ID NO: 736178 - DNA, 25 bp, Homo sapien
ggtggtccccacagacgtggctgca

SEQ ID NO: 736179 - DNA, 25 bp, Homo sapien
gagatgcttttagagaacgggttgg

SEQ ID NO: 736180 - DNA, 25 bp, Homo sapien
gggactgaagacccaacaagggctc

SEQ ID NO: 736181 - DNA, 25 bp, Homo sapien
tctgcaaattctgcaaggagcccca

SEQ ID NO: 736182 - DNA, 25 bp, Homo sapien
agacagacacctccaaaagggagga

SEQ ID NO: 736183 - DNA, 25 bp, Homo sapien
ctggggaagacagacacctccaaaa

SEQ ID NO: 736184 - DNA, 25 bp, Homo sapien
acagacacctccaaaagggaggagc

SEQ ID NO: 736185 - DNA, 25 bp, Homo sapien
ggaagacagacacctccaaaaggga

SEQ ID NO: 736186 - DNA, 25 bp, Homo sapien
cctttgacaaatgccttggggtgag

SEQ ID NO: 736187 - DNA, 25 bp, Homo sapien
gagaaaagggttggagaagtcagag

SEQ ID NO: 736188 - DNA, 25 bp, Homo sapien
gaggggtgagtaggaggatggagaa

SEQ ID NO: 736189 - DNA, 25 bp, Homo sapien
acacttgaatccagagttcacactg

SEQ ID NO: 736190 - DNA, 25 bp, Homo sapien
cagaacggtttgtctctgagtgggt

SEQ ID NO: 736191 - DNA, 25 bp, Homo sapien
caacatgaagtattccagaacggtt

SEQ ID NO: 736192 - DNA, 25 bp, Homo sapien
ttctctagctctatctcttgagatg

SEQ ID NO: 736193 - DNA, 25 bp, Homo sapien
gggaaccaattcatagatgcttctg

SEQ ID NO: 736194 - DNA, 25 bp, Homo sapien
tctgctgcagtagaaccagccctgt

SEQ ID NO: 736195 - DNA, 25 bp, Homo sapien
gaagtgtggattcgtcctgtcctgt

SEQ ID NO: 736196 - DNA, 25 bp, Homo sapien
catggtgccctgtggtaccttaagg

SEQ ID NO: 736197 - DNA, 25 bp, Homo sapien
aagttttggcagaggacatggtgcc

SEQ ID NO: 736198 - DNA, 25 bp, Homo sapien
tgggcttcaaccacagccaaatcct

SEQ ID NO: 736199 - DNA, 25 bp, Homo sapien
ttcaaccacagccaaatcctgccag

SEQ ID NO: 736200 - DNA, 25 bp, Homo sapien
caaccacagccaaatcctgccaggg

SEQ ID NO: 736201 - DNA, 25 bp, Homo sapien
ccttgggcttcaaccacagccaaat

SEQ ID NO: 736202 - DNA, 25 bp, Homo sapien
tccgcagcgctacatgaggcccttt

SEQ ID NO: 736203 - DNA, 25 bp, Homo sapien
tgatggcctgacagacagtttccgc

SEQ ID NO: 736204 - DNA, 25 bp, Homo sapien
gaggcgatgtcgtcatagcagctgc

SEQ ID NO: 736205 - DNA, 25 bp, Homo sapien
gccgggcctgtattccctctgggaa

SEQ ID NO: 736206 - DNA, 25 bp, Homo sapien
ttgtgtatatccctggtggcctgcc

SEQ ID NO: 736207 - DNA, 25 bp, Homo sapien
tagtgaactatcagtgcctcccatg

SEQ ID NO: 736208 - DNA, 25 bp, Homo sapien
tgcagagcaggaaggtgacaatcac

SEQ ID NO: 736209 - DNA, 25 bp, Homo sapien
caatagcctttgatccagcgactaa

SEQ ID NO: 736210 - DNA, 25 bp, Homo sapien
ttctaagagatgacaacaggtccat

SEQ ID NO: 736211 - DNA, 25 bp, Homo sapien
ggtaaaatgtgagtcgtcttcttcc

SEQ ID NO: 736212 - DNA, 25 bp, Homo sapien
ataggatataaggaatgttaaatgc

SEQ ID NO: 736213 - DNA, 25 bp, Homo sapien
ctgcagccatgaagtgataggatat

SEQ ID NO: 736214 - DNA, 25 bp, Homo sapien
tatgagtcctgacatgatgagcccc

SEQ ID NO: 736215 - DNA, 25 bp, Homo sapien
tcctgacatgatgagccccactctg

SEQ ID NO: 736216 - DNA, 25 bp, Homo sapien
gagtcctgacatgatgagccccact

SEQ ID NO: 736217 - DNA, 25 bp, Homo sapien
agaagtatgagtcctgacatgatga

SEQ ID NO: 736218 - DNA, 25 bp, Homo sapien
gaagtggcaggtggcggttccagac

SEQ ID NO: 736219 - DNA, 25 bp, Homo sapien
gagggaactgtcaggcttccataca

SEQ ID NO: 736220 - DNA, 25 bp, Homo sapien
gacattccatgctgacatggctgtg

SEQ ID NO: 736221 - DNA, 25 bp, Homo sapien
gaaacgctgtaatgcagagccaggg

SEQ ID NO: 736222 - DNA, 25 bp, Homo sapien
ccatacagtgagaggtaaccggagc

SEQ ID NO: 736223 - DNA, 25 bp, Homo sapien
actgaaaagccatctttggcttgac

SEQ ID NO: 736224 - DNA, 25 bp, Homo sapien
cactgaaaagccatctttggcttga

SEQ ID NO: 736225 - DNA, 25 bp, Homo sapien
tcactgaaaagccatctttggcttg

SEQ ID NO: 736226 - DNA, 25 bp, Homo sapien
cagaaagccatttgaatcctgctgc

SEQ ID NO: 736227 - DNA, 25 bp, Homo sapien
attgaaagtattacaactgagtgac

SEQ ID NO: 736228 - DNA, 25 bp, Homo sapien
agccccaggcggataagagcagaaa

SEQ ID NO: 736229 - DNA, 25 bp, Homo sapien
gagccatttgctgttgcggaattga

SEQ ID NO: 736230 - DNA, 25 bp, Homo sapien
aacattcctccaacaggatgttctt

SEQ ID NO: 736231 - DNA, 25 bp, Homo sapien
aatgggaaacattcctccaacagga

SEQ ID NO: 736232 - DNA, 25 bp, Homo sapien
aagccagtttctaaatgggaaacat

SEQ ID NO: 736233 - DNA, 25 bp, Homo sapien
ccccatggaatagcgctactcagcg

SEQ ID NO: 736234 - DNA, 25 bp, Homo sapien
gagatattaaacagacccgatggaa

SEQ ID NO: 736235 - DNA, 25 bp, Homo sapien
ttgaggccagcacaacgggcttgca

SEQ ID NO: 736236 - DNA, 25 bp, Homo sapien
cctgcactccttgggttgaggccag

SEQ ID NO: 736237 - DNA, 25 bp, Homo sapien
tacacagcctgataaacatgtctgc

SEQ ID NO: 736238 - DNA, 25 bp, Homo sapien
taccaggtaacaatggagtccactg

SEQ ID NO: 736239 - DNA, 25 bp, Homo sapien
tcttatccaagaatccagggacctg

SEQ ID NO: 736240 - DNA, 25 bp, Homo sapien
taggtacagatactgggccgccctt

SEQ ID NO: 736241 - DNA, 25 bp, Homo sapien
tacctgaagtacgaaagtgacacct

SEQ ID NO: 736242 - DNA, 25 bp, Homo sapien
tactaaagagaatttgaatggaaaa

SEQ ID NO: 736243 - DNA, 25 bp, Homo sapien
gaatttgaatggaaaacaagagcat

SEQ ID NO: 736244 - DNA, 25 bp, Homo sapien
agagaatttgaatggaaaacaagag

SEQ ID NO: 736245 - DNA, 25 bp, Homo sapien
aatttgaatggaaaacaagagcatt

SEQ ID NO: 736246 - DNA, 25 bp, Homo sapien
tcatctgggtgcgtgtacaaagtca

SEQ ID NO: 736247 - DNA, 25 bp, Homo sapien
tattgctgttctcgtatgtggatcg

SEQ ID NO: 736248 - DNA, 25 bp, Homo sapien
ggcttcaagccatgattaaggaata

SEQ ID NO: 736249 - DNA, 25 bp, Homo sapien
tgtcattatactgcaaatgcccttg

SEQ ID NO: 736250 - DNA, 25 bp, Homo sapien
cttgcagcatatgtaaacgcttcca

SEQ ID NO: 736251 - DNA, 25 bp, Homo sapien
tctttcttgtggcccctgcgcacac

SEQ ID NO: 736252 - DNA, 25 bp, Homo sapien
caggaaaattttgtaactccgcagt

SEQ ID NO: 736253 - DNA, 25 bp, Homo sapien
catatgtaaacgcttccattttggt

SEQ ID NO: 736254 - DNA, 25 bp, Homo sapien
atttggcgtgaattcctttttccag

SEQ ID NO: 736255 - DNA, 25 bp, Homo sapien
caatagagcccaaggatagaggagc

SEQ ID NO: 736256 - DNA, 25 bp, Homo sapien
tggccgcgtttgtctcggagaaacc

SEQ ID NO: 736257 - DNA, 25 bp, Homo sapien
tgtaaattgcgcagagtgatttcaa

SEQ ID NO: 736258 - DNA, 25 bp, Homo sapien
agctccagcccgcagggcaggacac

SEQ ID NO: 736259 - DNA, 25 bp, Homo sapien
gccccactgcgtcccagagagcagc

SEQ ID NO: 736260 - DNA, 25 bp, Homo sapien
tcagccccactgcgtcccagagagc

SEQ ID NO: 736261 - DNA, 25 bp, Homo sapien
cagagagcagctccagcccgcaggg

SEQ ID NO: 736262 - DNA, 25 bp, Homo sapien
cggcggcctgaggagtagtatgcaa

SEQ ID NO: 736263 - DNA, 25 bp, Homo sapien
ctgccacagccgactgacaggctcc

SEQ ID NO: 736264 - DNA, 25 bp, Homo sapien
cctgaggagtagtatgcaaattttg

SEQ ID NO: 736265 - DNA, 25 bp, Homo sapien
gactgacaggctcccggcggcctga

SEQ ID NO: 736266 - DNA, 25 bp, Homo sapien
attggctacttccttgtggcccgcc

SEQ ID NO: 736267 - DNA, 25 bp, Homo sapien
tggcttccaaccgcgctctcattgg

SEQ ID NO: 736268 - DNA, 25 bp, Homo sapien
tctcttattggtgcgtctggtccca

SEQ ID NO: 736269 - DNA, 25 bp, Homo sapien
tcccagacgcagagacagggcgtag

SEQ ID NO: 736270 - DNA, 25 bp, Homo sapien
aggaggaagcagtagatcttccttt

SEQ ID NO: 736271 - DNA, 25 bp, Homo sapien
gaggaagcagtagatcttcctttta

SEQ ID NO: 736272 - DNA, 25 bp, Homo sapien
gaagcagtagatcttccttttaata

SEQ ID NO: 736273 - DNA, 25 bp, Homo sapien
aataataaaaaggacgcataaatca

SEQ ID NO: 736274 - DNA, 25 bp, Homo sapien
ctccccatgcagatctctaaaggga

SEQ ID NO: 736275 - DNA, 25 bp, Homo sapien
tcccgcaggcgcctgctgaaaaggc

SEQ ID NO: 736276 - DNA, 25 bp, Homo sapien
tctaaagggaatctgtctcctgcgg

SEQ ID NO: 736277 - DNA, 25 bp, Homo sapien
tgtctcctgcggttctttcccgcag

SEQ ID NO: 736278 - DNA, 25 bp, Homo sapien
ttggggaaccaggcaggaccggcaa

SEQ ID NO: 736279 - DNA, 25 bp, Homo sapien
tggggaaccaggcaggaccggcaag

SEQ ID NO: 736280 - DNA, 25 bp, Homo sapien
gatttatgaccctgatcaaactttt

SEQ ID NO: 736281 - DNA, 25 bp, Homo sapien
gggtggaccgagtgatttatgaccc

SEQ ID NO: 736282 - DNA, 25 bp, Homo sapien
gcttcctgcacggaaaggccaatag

SEQ ID NO: 736283 - DNA, 25 bp, Homo sapien
agtgcttggtctacatctagggctt

SEQ ID NO: 736284 - DNA, 25 bp, Homo sapien
ctcctcgggactggaggcggatcct

SEQ ID NO: 736285 - DNA, 25 bp, Homo sapien
gacttttacgccacatcactacagc

SEQ ID NO: 736286 - DNA, 25 bp, Homo sapien
ttcacaagtcttacactcctgcttc

SEQ ID NO: 736287 - DNA, 25 bp, Homo sapien
gcttcacaagtcttacactcctgct

SEQ ID NO: 736288 - DNA, 25 bp, Homo sapien
cttcacaagtcttacactcctgctt

SEQ ID NO: 736289 - DNA, 25 bp, Homo sapien
ctgtgatgacacaagaaagaaccat

SEQ ID NO: 736290 - DNA, 25 bp, Homo sapien
taatgaggcactctcttcaactgcg

SEQ ID NO: 736291 - DNA, 25 bp, Homo sapien
ctggtttggcactcaataatgaggc

SEQ ID NO: 736292 - DNA, 25 bp, Homo sapien
catccacctaagcttttgctcatgc

SEQ ID NO: 736293 - DNA, 25 bp, Homo sapien
ggcactcaataatgaggcactctct

SEQ ID NO: 736294 - DNA, 25 bp, Homo sapien
ctccagctctcaactgttcccagaa

SEQ ID NO: 736295 - DNA, 25 bp, Homo sapien
gctctcaactgttcccagaatcttc

SEQ ID NO: 736296 - DNA, 25 bp, Homo sapien
cagctctcaactgttcccagaatct

SEQ ID NO: 736297 - DNA, 25 bp, Homo sapien
ctcaactgttcccagaatcttccat

SEQ ID NO: 736298 - DNA, 25 bp, Homo sapien
cggcagcagagcactcagtgatgct

SEQ ID NO: 736299 - DNA, 25 bp, Homo sapien
actcatcggcagcagagcactcagt

SEQ ID NO: 736300 - DNA, 25 bp, Homo sapien
tgcactcatcggcagcagagcactc

SEQ ID NO: 736301 - DNA, 25 bp, Homo sapien
catcggcagcagagcactcagtgat

SEQ ID NO: 736302 - DNA, 25 bp, Homo sapien
ggcgctcctttcgagaacgtttctg

SEQ ID NO: 736303 - DNA, 25 bp, Homo sapien
taacacacatcccagagagacatcc

SEQ ID NO: 736304 - DNA, 25 bp, Homo sapien
tcttggcctgacactaatgaaagga

SEQ ID NO: 736305 - DNA, 25 bp, Homo sapien
tctcgactttttggaaggcgctcct

SEQ ID NO: 736306 - DNA, 25 bp, Homo sapien
gaaatgattttagtcttaggaagga

SEQ ID NO: 736307 - DNA, 25 bp, Homo sapien
cttaggaaggaaacacatggctttc

SEQ ID NO: 736308 - DNA, 25 bp, Homo sapien
tcatagggaaatgattttagtctta

SEQ ID NO: 736309 - DNA, 25 bp, Homo sapien
tagggaaatgattttagtcttagga

SEQ ID NO: 736310 - DNA, 25 bp, Homo sapien
gtgttgtccgcatccccgaaagttc

SEQ ID NO: 736311 - DNA, 25 bp, Homo sapien
tttgaaaggcgcagggaacagacac

SEQ ID NO: 736312 - DNA, 25 bp, Homo sapien
gcatcaatttccaacggcagcagaa

SEQ ID NO: 736313 - DNA, 25 bp, Homo sapien
gaacagacactttgtactcagatgc

SEQ ID NO: 736314 - DNA, 25 bp, Homo sapien
caccgtgtgtggtgggcctcgggca

SEQ ID NO: 736315 - DNA, 25 bp, Homo sapien
ttgatttctctccaccgtgtgtggt

SEQ ID NO: 736316 - DNA, 25 bp, Homo sapien
tgatttctctccaccgtgtgtggtg

SEQ ID NO: 736317 - DNA, 25 bp, Homo sapien
ctttggtccttaaagcagcagtgat

SEQ ID NO: 736318 - DNA, 25 bp, Homo sapien
tttggtccttaaagcagcagtgatt

SEQ ID NO: 736319 - DNA, 25 bp, Homo sapien
aaatgcgagggctgcatgtaaaagc

SEQ ID NO: 736320 - DNA, 25 bp, Homo sapien
atgcgagggctgcatgtaaaagcat

SEQ ID NO: 736321 - DNA, 25 bp, Homo sapien
gactccaggttgattcaagtgaaac

SEQ ID NO: 736322 - DNA, 25 bp, Homo sapien
aaaacttgagatattatgctttcgg

SEQ ID NO: 736323 - DNA, 25 bp, Homo sapien
atctgccatccatccgttccgtaat

SEQ ID NO: 736324 - DNA, 25 bp, Homo sapien
tcctctagccaaagaatggttttcc

SEQ ID NO: 736325 - DNA, 25 bp, Homo sapien
cactgagatacttatgataagggta

SEQ ID NO: 736326 - DNA, 25 bp, Homo sapien
gatacttatgataagggtaaacaaa

SEQ ID NO: 736327 - DNA, 25 bp, Homo sapien
catctgcactgagatacttatgata

SEQ ID NO: 736328 - DNA, 25 bp, Homo sapien
tgtgcctattgtggggagagcccaa

SEQ ID NO: 736329 - DNA, 25 bp, Homo sapien
ccccactcatcagcatgggtcgagg

SEQ ID NO: 736330 - DNA, 25 bp, Homo sapien
ctttgtacaacgtcttcctgttgct

SEQ ID NO: 736331 - DNA, 25 bp, Homo sapien
ccactcatcagcatgggtcgagggc

SEQ ID NO: 736332 - DNA, 25 bp, Homo sapien
tatgagtaagtttggtgtcgtttaa

SEQ ID NO: 736333 - DNA, 25 bp, Homo sapien
ctaaaatcctggtctctggagggtt

SEQ ID NO: 736334 - DNA, 25 bp, Homo sapien
cgaccctccctaactcctccttctg

SEQ ID NO: 736335 - DNA, 25 bp, Homo sapien
gaccctccctaactcctccttctga

SEQ ID NO: 736336 - DNA, 25 bp, Homo sapien
actcctccttctgaaatcagagagg

SEQ ID NO: 736337 - DNA, 25 bp, Homo sapien
tccttctgaaatcagagagggagga

SEQ ID NO: 736338 - DNA, 25 bp, Homo sapien
gccatggccaacagtctcagtttgg

SEQ ID NO: 736339 - DNA, 25 bp, Homo sapien
agccatggccaacagtctcagtttg

SEQ ID NO: 736340 - DNA, 25 bp, Homo sapien
catggccaacagtctcagtttggca

SEQ ID NO: 736341 - DNA, 25 bp, Homo sapien
atggccaacagtctcagtttggcaa

SEQ ID NO: 736342 - DNA, 25 bp, Homo sapien
cctccactgaagaatcctttgagat

SEQ ID NO: 736343 - DNA, 25 bp, Homo sapien
cactgaagaatcctttgagattggc

SEQ ID NO: 736344 - DNA, 25 bp, Homo sapien
cagttccctccactgaagaatcctt

SEQ ID NO: 736345 - DNA, 25 bp, Homo sapien
gttccctccactgaagaatcctttg

SEQ ID NO: 736346 - DNA, 25 bp, Homo sapien
tgctgaagatgtggagtgggcatct

SEQ ID NO: 736347 - DNA, 25 bp, Homo sapien
tctgccatccaggtagtgctgaaga

SEQ ID NO: 736348 - DNA, 25 bp, Homo sapien
gcagagcagttggcgttgacccaaa

SEQ ID NO: 736349 - DNA, 25 bp, Homo sapien
cagttggcgttgacccaaagtaggg

SEQ ID NO: 736350 - DNA, 25 bp, Homo sapien
tcagctgtgactgtagatcttgaca

SEQ ID NO: 736351 - DNA, 25 bp, Homo sapien
tggcatgaggatttagcaattcctg

SEQ ID NO: 736352 - DNA, 25 bp, Homo sapien
tcctggatttcagctgtgactgtag

SEQ ID NO: 736353 - DNA, 25 bp, Homo sapien
gactgtagatcttgacattggaaaa

SEQ ID NO: 736354 - DNA, 25 bp, Homo sapien
tcattggtagaaatggcacccttaa

SEQ ID NO: 736355 - DNA, 25 bp, Homo sapien
gaaatggcacccttaattagggctc

SEQ ID NO: 736356 - DNA, 25 bp, Homo sapien
gttcatcttcattggtagaaatggc

SEQ ID NO: 736357 - DNA, 25 bp, Homo sapien
ttagggctccattagaattgttttc

SEQ ID NO: 736358 - DNA, 25 bp, Homo sapien
cttcttgtcggttttccaaaagctg

SEQ ID NO: 736359 - DNA, 25 bp, Homo sapien
tcttgtcggttttccaaaagctgaa

SEQ ID NO: 736360 - DNA, 25 bp, Homo sapien
aatgaagtttagtagcagctgtgta

SEQ ID NO: 736361 - DNA, 25 bp, Homo sapien
tagcagctgtgtacccagttttctg

SEQ ID NO: 736362 - DNA, 25 bp, Homo sapien
cagacttcagattcattctctgtct

SEQ ID NO: 736363 - DNA, 25 bp, Homo sapien
ctgtgtctttctgttggtggagagg

SEQ ID NO: 736364 - DNA, 25 bp, Homo sapien
ttccttctgtgtctttctgttggtg

SEQ ID NO: 736365 - DNA, 25 bp, Homo sapien
tcagacttcagattcattctctgtc

SEQ ID NO: 736366 - DNA, 25 bp, Homo sapien
acacaggaacgttcagggcagtctg

SEQ ID NO: 736367 - DNA, 25 bp, Homo sapien
cacacaggaacgttcagggcagtct

SEQ ID NO: 736368 - DNA, 25 bp, Homo sapien
cacaggaacgttcagggcagtctgt

SEQ ID NO: 736369 - DNA, 25 bp, Homo sapien
acacacaggaacgttcagggcagtc

SEQ ID NO: 736370 - DNA, 25 bp, Homo sapien
tatgatagaagtcagtgcactacag

SEQ ID NO: 736371 - DNA, 25 bp, Homo sapien
tctagaggctgtggtcgccgatgcc

SEQ ID NO: 736372 - DNA, 25 bp, Homo sapien
agttctgagacactccgactctgag

SEQ ID NO: 736373 - DNA, 25 bp, Homo sapien
aaacttctggaggaagacagcacgt

SEQ ID NO: 736374 - DNA, 25 bp, Homo sapien
tcaaaccagatccttggcgggaacc

SEQ ID NO: 736375 - DNA, 25 bp, Homo sapien
cctctgttttcaaaccagatccttg

SEQ ID NO: 736376 - DNA, 25 bp, Homo sapien
tgttttcaaaccagatccttggcgg

SEQ ID NO: 736377 - DNA, 25 bp, Homo sapien
aaccagatccttggcgggaacctgc

SEQ ID NO: 736378 - DNA, 25 bp, Homo sapien
taggagcagccttataaagacgtaa

SEQ ID NO: 736379 - DNA, 25 bp, Homo sapien
cagctcagtggttgggacactttta

SEQ ID NO: 736380 - DNA, 25 bp, Homo sapien
aatgcctttgtggaaccagctcagt

SEQ ID NO: 736381 - DNA, 25 bp, Homo sapien
taaggcaatgctgacctctctcgtg

SEQ ID NO: 736382 - DNA, 25 bp, Homo sapien
cccttggcaaggctatgttaaaaca

SEQ ID NO: 736383 - DNA, 25 bp, Homo sapien
caaaggatgttatgggttacctaat

SEQ ID NO: 736384 - DNA, 25 bp, Homo sapien
cggcccttggcaaggctatgttaaa

SEQ ID NO: 736385 - DNA, 25 bp, Homo sapien
ggcaaggctatgttaaaacaaagga

SEQ ID NO: 736386 - DNA, 25 bp, Homo sapien
ggtagaatagtttctcggattctaa

SEQ ID NO: 736387 - DNA, 25 bp, Homo sapien
tcagctgccatgttctttaagtcca

SEQ ID NO: 736388 - DNA, 25 bp, Homo sapien
ttaagtccaagtccgtggtccgagc

SEQ ID NO: 736389 - DNA, 25 bp, Homo sapien
gtggtccgagcctgcccatctgaca

SEQ ID NO: 736390 - DNA, 25 bp, Homo sapien
ttttctttccctgcccacttatcat

SEQ ID NO: 736391 - DNA, 25 bp, Homo sapien
tttctttccctgcccacttatcatt

SEQ ID NO: 736392 - DNA, 25 bp, Homo sapien
tttttctttccctgcccacttatca

SEQ ID NO: 736393 - DNA, 25 bp, Homo sapien
tcattcccatgaccgcttggctctg

SEQ ID NO: 736394 - DNA, 25 bp, Homo sapien
actgcgagtagttcttagaatgtcc

SEQ ID NO: 736395 - DNA, 25 bp, Homo sapien
tcttttatgactccatgtgagtccc

SEQ ID NO: 736396 - DNA, 25 bp, Homo sapien
tgactccatgtgagtccctgtcttc

SEQ ID NO: 736397 - DNA, 25 bp, Homo sapien
cagtcctgcctgaatccagtcatgt

SEQ ID NO: 736398 - DNA, 25 bp, Homo sapien
tttctgcagggcacacactagcaca

SEQ ID NO: 736399 - DNA, 25 bp, Homo sapien
gacctttctgcagggcacacactag

SEQ ID NO: 736400 - DNA, 25 bp, Homo sapien
tttgggatacagttcagacctttct

SEQ ID NO: 736401 - DNA, 25 bp, Homo sapien
tcgtattcttgtccatccagaatgg

SEQ ID NO: 736402 - DNA, 25 bp, Homo sapien
ccagaatggcatttcttctccctct

SEQ ID NO: 736403 - DNA, 25 bp, Homo sapien
cgtattcttgtccatccagaatggc

SEQ ID NO: 736404 - DNA, 25 bp, Homo sapien
cagaatggcatttcttctccctctt

SEQ ID NO: 736405 - DNA, 25 bp, Homo sapien
tccttcatcggctccatcttcttcc

SEQ ID NO: 736406 - DNA, 25 bp, Homo sapien
ggggcaggattcagggtccaactgt

SEQ ID NO: 736407 - DNA, 25 bp, Homo sapien
tccatcagcccatccttcatcggct

SEQ ID NO: 736408 - DNA, 25 bp, Homo sapien
ttggacccgagaggcttgctttgac

SEQ ID NO: 736409 - DNA, 25 bp, Homo sapien
ccaatccagctgaagcccggctcca

SEQ ID NO: 736410 - DNA, 25 bp, Homo sapien
caatccagctgaagcccggctccac

SEQ ID NO: 736411 - DNA, 25 bp, Homo sapien
ccccaatccagctgaagcccggctc

SEQ ID NO: 736412 - DNA, 25 bp, Homo sapien
cccccaatccagctgaagcccggct

SEQ ID NO: 736413 - DNA, 25 bp, Homo sapien
tccaccccgctgtgcctaccctgta

SEQ ID NO: 736414 - DNA, 25 bp, Homo sapien
cctgtactggcagggtgacgcccag

SEQ ID NO: 736415 - DNA, 25 bp, Homo sapien
tactggcagggtgacgcccaggact

SEQ ID NO: 736416 - DNA, 25 bp, Homo sapien
ccgctgtgcctaccctgtactggca

SEQ ID NO: 736417 - DNA, 25 bp, Homo sapien
gctttgttcgcctgcaatgtggtcc

SEQ ID NO: 736418 - DNA, 25 bp, Homo sapien
aatgtggtcccggtggcggacactc

SEQ ID NO: 736419 - DNA, 25 bp, Homo sapien
tgttaatgctttgttcgcctgcaat

SEQ ID NO: 736420 - DNA, 25 bp, Homo sapien
tttcgtaaccagtggatctgtgtgt

SEQ ID NO: 736421 - DNA, 25 bp, Homo sapien
gatgaactatcaagctgcactttca

SEQ ID NO: 736422 - DNA, 25 bp, Homo sapien
aacagccaacttcacctgagcggga

SEQ ID NO: 736423 - DNA, 25 bp, Homo sapien
gttggcagtgccagaatcatattgg

SEQ ID NO: 736424 - DNA, 25 bp, Homo sapien
gagatgaggtcccaagatgaactat

SEQ ID NO: 736425 - DNA, 25 bp, Homo sapien
tgttacaatctgacaccgagaggtt

SEQ ID NO: 736426 - DNA, 25 bp, Homo sapien
ccaccactgaatgggcacatctggg

SEQ ID NO: 736427 - DNA, 25 bp, Homo sapien
gttgccagacatccaaaggcttcag

SEQ ID NO: 736428 - DNA, 25 bp, Homo sapien
cacatctgggtgtttagtgaggcga

SEQ ID NO: 736429 - DNA, 25 bp, Homo sapien
ggtgagtggtgtccgatccaagatg

SEQ ID NO: 736430 - DNA, 25 bp, Homo sapien
gtggtgtccgatccaagatgtctgc

SEQ ID NO: 736431 - DNA, 25 bp, Homo sapien
tggtgtccgatccaagatgtctgca

SEQ ID NO: 736432 - DNA, 25 bp, Homo sapien
tgagtggtgtccgatccaagatgtc

SEQ ID NO: 736433 - DNA, 25 bp, Homo sapien
tcctgggtcaacaggtggtccgtca

SEQ ID NO: 736434 - DNA, 25 bp, Homo sapien
ggtccgtcagagaggcaacattcat

SEQ ID NO: 736435 - DNA, 25 bp, Homo sapien
gcttctcctgggtcaacaggtggtc

SEQ ID NO: 736436 - DNA, 25 bp, Homo sapien
tcaacaggtggtccgtcagagaggc

SEQ ID NO: 736437 - DNA, 25 bp, Homo sapien
gggtgttcatggactttccacactt

SEQ ID NO: 736438 - DNA, 25 bp, Homo sapien
tccccaacatgagcagacacagcct

SEQ ID NO: 736439 - DNA, 25 bp, Homo sapien
cctctagagatatggaagccttgca

SEQ ID NO: 736440 - DNA, 25 bp, Homo sapien
cagccttaaagcctctagagatatg

SEQ ID NO: 736441 - DNA, 25 bp, Homo sapien
tttttcagacttctgtaggaacacc

SEQ ID NO: 736442 - DNA, 25 bp, Homo sapien
caccaattcggatgttttttcagac

SEQ ID NO: 736443 - DNA, 25 bp, Homo sapien
cagacttctgtaggaacacctctgg

SEQ ID NO: 736444 - DNA, 25 bp, Homo sapien
tccagttggtaagcatgggagtccg

SEQ ID NO: 736445 - DNA, 25 bp, Homo sapien
tactaagtgcctagcagatgggaag

SEQ ID NO: 736446 - DNA, 25 bp, Homo sapien
gattgaagccttacagaggacccag

SEQ ID NO: 736447 - DNA, 25 bp, Homo sapien
ccgtgggtacctgcaactgtggata

SEQ ID NO: 736448 - DNA, 25 bp, Homo sapien
ttttgacctgataaccgagacagct

SEQ ID NO: 736449 - DNA, 25 bp, Homo sapien
aagctgtctccacgttctgctgccg

SEQ ID NO: 736450 - DNA, 25 bp, Homo sapien
gatggtccgtgtattgccccgtgga

SEQ ID NO: 736451 - DNA, 25 bp, Homo sapien
cagcatggccctgttgtgaacggaa

SEQ ID NO: 736452 - DNA, 25 bp, Homo sapien
aaggagctttatgcttctgcaccgc

SEQ ID NO: 736453 - DNA, 25 bp, Homo sapien
agccttgaatacacaggcaggatta

SEQ ID NO: 736454 - DNA, 25 bp, Homo sapien
ggagccttgaatacacaggcaggat

SEQ ID NO: 736455 - DNA, 25 bp, Homo sapien
ttctattcttgcctgaacagaggaa

SEQ ID NO: 736456 - DNA, 25 bp, Homo sapien
gagccttgaatacacaggcaggatt

SEQ ID NO: 736457 - DNA, 25 bp, Homo sapien
actccttttattgtagatccagcta

SEQ ID NO: 736458 - DNA, 25 bp, Homo sapien
ccagctaagactccatggctgtcca

SEQ ID NO: 736459 - DNA, 25 bp, Homo sapien
ttattgtagatccagctaagactcc

SEQ ID NO: 736460 - DNA, 25 bp, Homo sapien
ctccatggctgtccagagctttctc

SEQ ID NO: 736461 - DNA, 25 bp, Homo sapien
cctacgcgtcttaactccaaatgaa

SEQ ID NO: 736462 - DNA, 25 bp, Homo sapien
aaggactaggtctcgtccctctttg

SEQ ID NO: 736463 - DNA, 25 bp, Homo sapien
tcatgactgaaattaggcctacgcg

SEQ ID NO: 736464 - DNA, 25 bp, Homo sapien
tccctctttgggtttacctccatgc

SEQ ID NO: 736465 - DNA, 25 bp, Homo sapien
cactgtgagcagctctatcgcgtta

SEQ ID NO: 736466 - DNA, 25 bp, Homo sapien
gcctggtctaacactgtgagcagct

SEQ ID NO: 736467 - DNA, 25 bp, Homo sapien
gtgcaaagttttcataggcctggtc

SEQ ID NO: 736468 - DNA, 25 bp, Homo sapien
tctatcgcgttagctgtggccctct

SEQ ID NO: 736469 - DNA, 25 bp, Homo sapien
gaaaagcgaggtggagcaagagtcc

SEQ ID NO: 736470 - DNA, 25 bp, Homo sapien
gcttggcgaatacaatactctagtt

SEQ ID NO: 736471 - DNA, 25 bp, Homo sapien
tgctctagtgtaacagcttggcgaa

SEQ ID NO: 736472 - DNA, 25 bp, Homo sapien
agagtccacgacttccagaggagcc

SEQ ID NO: 736473 - DNA, 25 bp, Homo sapien
tgctgtctgagacaaccatccagcc

SEQ ID NO: 736474 - DNA, 25 bp, Homo sapien
caaaattgttcaagagcccatgctc

SEQ ID NO: 736475 - DNA, 25 bp, Homo sapien
tcactgtggcctttactgggccgag

SEQ ID NO: 736476 - DNA, 25 bp, Homo sapien
tgggccgagttctctccagttgaaa

SEQ ID NO: 736477 - DNA, 25 bp, Homo sapien
ggcttgggcaccctcatttgggcat

SEQ ID NO: 736478 - DNA, 25 bp, Homo sapien
ctcatttgggcatgagcccatccca

SEQ ID NO: 736479 - DNA, 25 bp, Homo sapien
gggcatgagcccatcccatggccag

SEQ ID NO: 736480 - DNA, 25 bp, Homo sapien
gcaccctcatttgggcatgagccca

SEQ ID NO: 736481 - DNA, 25 bp, Homo sapien
tagcggcgtgtgttgctgggagaca

SEQ ID NO: 736482 - DNA, 25 bp, Homo sapien
ggctgattggataagtttgacccca

SEQ ID NO: 736483 - DNA, 25 bp, Homo sapien
ccttcattgggaatttggaaatttg

SEQ ID NO: 736484 - DNA, 25 bp, Homo sapien
aaacattccgccctggtcaggctag

SEQ ID NO: 736485 - DNA, 25 bp, Homo sapien
aggggtcacgcagactggtggcccc

SEQ ID NO: 736486 - DNA, 25 bp, Homo sapien
gcaggggtcacgcagactggtggcc

SEQ ID NO: 736487 - DNA, 25 bp, Homo sapien
ctgcaggggtcacgcagactggtgg

SEQ ID NO: 736488 - DNA, 25 bp, Homo sapien
caggggtcacgcagactggtggccc

SEQ ID NO: 736489 - DNA, 25 bp, Homo sapien
tgggcacctgcattgttcccctctg

SEQ ID NO: 736490 - DNA, 25 bp, Homo sapien
cctctgccagaatccacgttggtat

SEQ ID NO: 736491 - DNA, 25 bp, Homo sapien
tgcccgtttcctgctatcgtacttc

SEQ ID NO: 736492 - DNA, 25 bp, Homo sapien
ctcatctgagctctgcccgtttcct

SEQ ID NO: 736493 - DNA, 25 bp, Homo sapien
gatggttgggcctgggatgtcaagt

SEQ ID NO: 736494 - DNA, 25 bp, Homo sapien
taggagcagggatggttgggcctgg

SEQ ID NO: 736495 - DNA, 25 bp, Homo sapien
cttcagggaacaattaggagcaggg

SEQ ID NO: 736496 - DNA, 25 bp, Homo sapien
ggcaccttcagggaacaattaggag

SEQ ID NO: 736497 - DNA, 25 bp, Homo sapien
gtaggccttccctagtgaggagggc

SEQ ID NO: 736498 - DNA, 25 bp, Homo sapien
cagtaggccttccctagtgaggagg

SEQ ID NO: 736499 - DNA, 25 bp, Homo sapien
ccagtaggccttccctagtgaggag

SEQ ID NO: 736500 - DNA, 25 bp, Homo sapien
agtaggccttccctagtgaggaggg

SEQ ID NO: 736501 - DNA, 25 bp, Homo sapien
gcaactccagcttgcattcctagca

SEQ ID NO: 736502 - DNA, 25 bp, Homo sapien
gcttgcattcctagcaggagagctg

SEQ ID NO: 736503 - DNA, 25 bp, Homo sapien
atgaggaatactttgggttcaaaga

SEQ ID NO: 736504 - DNA, 25 bp, Homo sapien
ctttgggttcaaagatggcaatgtc

SEQ ID NO: 736505 - DNA, 25 bp, Homo sapien
gtcatactggcctggtgaactggag

SEQ ID NO: 736506 - DNA, 25 bp, Homo sapien
ctgtgatcacatatgctgttgaggc

SEQ ID NO: 736507 - DNA, 25 bp, Homo sapien
gatgcagttataacagtgtgattca

SEQ ID NO: 736508 - DNA, 25 bp, Homo sapien
gattcacttttgtcatactggcctg

SEQ ID NO: 736509 - DNA, 25 bp, Homo sapien
acggagtctcgttcctgtcacgcag

SEQ ID NO: 736510 - DNA, 25 bp, Homo sapien
gttgaaagactaacccacagtgtga

SEQ ID NO: 736511 - DNA, 25 bp, Homo sapien
gatctgagacccatggcaagccagt

SEQ ID NO: 736512 - DNA, 25 bp, Homo sapien
ggaactgtcaatcaaggagccttgg

SEQ ID NO: 736513 - DNA, 25 bp, Homo sapien
tctcatttgtccaagcagcaggctg

SEQ ID NO: 736514 - DNA, 25 bp, Homo sapien
ggcagaaatgccgtcaccaagctct

SEQ ID NO: 736515 - DNA, 25 bp, Homo sapien
tccaagtggtcctcacggagtgggt

SEQ ID NO: 736516 - DNA, 25 bp, Homo sapien
gaaatcaatttaccggtctccagga

SEQ ID NO: 736517 - DNA, 25 bp, Homo sapien
gcaccaggcagacatctggtcctgc

SEQ ID NO: 736518 - DNA, 25 bp, Homo sapien
aggcagacatctggtcctgcacaca

SEQ ID NO: 736519 - DNA, 25 bp, Homo sapien
acgctcctacccatcgcatggaagg

SEQ ID NO: 736520 - DNA, 25 bp, Homo sapien
tcttctcggataaacttccatctca

SEQ ID NO: 736521 - DNA, 25 bp, Homo sapien
ttaggcaggatttcttggacaggta

SEQ ID NO: 736522 - DNA, 25 bp, Homo sapien
ggacaggtagcatgagcatgtgaaa

SEQ ID NO: 736523 - DNA, 25 bp, Homo sapien
ggcaggatttcttggacaggtagca

SEQ ID NO: 736524 - DNA, 25 bp, Homo sapien
ttcttggacaggtagcatgagcatg

SEQ ID NO: 736525 - DNA, 25 bp, Homo sapien
tagatggttgaacatgtccaggacc

SEQ ID NO: 736526 - DNA, 25 bp, Homo sapien
ggtaaaacctaaggcttggcagcat

SEQ ID NO: 736527 - DNA, 25 bp, Homo sapien
ccagggactgcagctaatgtgaaaa

SEQ ID NO: 736528 - DNA, 25 bp, Homo sapien
tagaactcaaggcttactccgtaag

SEQ ID NO: 736529 - DNA, 25 bp, Homo sapien
ggtttgctttgataggatcccagcc

SEQ ID NO: 736530 - DNA, 25 bp, Homo sapien
taagaggtttgctttgataggatcc

SEQ ID NO: 736531 - DNA, 25 bp, Homo sapien
tcccaggtaagaggtttgctttgat

SEQ ID NO: 736532 - DNA, 25 bp, Homo sapien
cccaggtaagaggtttgctttgata

SEQ ID NO: 736533 - DNA, 25 bp, Homo sapien
gtgactgctgtgaagtaaccaggat

SEQ ID NO: 736534 - DNA, 25 bp, Homo sapien
tcctgtgactgctgtgaagtaacca

SEQ ID NO: 736535 - DNA, 25 bp, Homo sapien
attaagagggtccagtcctgtgact

SEQ ID NO: 736536 - DNA, 25 bp, Homo sapien
cattaagagggtccagtcctgtgac

SEQ ID NO: 736537 - DNA, 25 bp, Homo sapien
cgttaaagccgctctgttttgggca

SEQ ID NO: 736538 - DNA, 25 bp, Homo sapien
tgggcaaccaagttcatgggactct

SEQ ID NO: 736539 - DNA, 25 bp, Homo sapien
tagggttcctatagtgtgcttttca

SEQ ID NO: 736540 - DNA, 25 bp, Homo sapien
tgcagtagggttcctatagtgtgct

SEQ ID NO: 736541 - DNA, 25 bp, Homo sapien
ctttccctaattgcacactacttga

SEQ ID NO: 736542 - DNA, 25 bp, Homo sapien
atgtatctgccggatgacgttgtga

SEQ ID NO: 736543 - DNA, 25 bp, Homo sapien
tgcacactacttgatagtaggaaag

SEQ ID NO: 736544 - DNA, 25 bp, Homo sapien
tgtgaacgtgtgacactcatattga

SEQ ID NO: 736545 - DNA, 25 bp, Homo sapien
gaagcgaagaaggagccacctgagc

SEQ ID NO: 736546 - DNA, 25 bp, Homo sapien
agaagcgaagaaggagccacctgag

SEQ ID NO: 736547 - DNA, 25 bp, Homo sapien
aagatctaggtctacgcggagcccc

SEQ ID NO: 736548 - DNA, 25 bp, Homo sapien
gatctaggtctacgcggagccccgc

SEQ ID NO: 736549 - DNA, 25 bp, Homo sapien
tctaggtctacgcggagccccgcca

SEQ ID NO: 736550 - DNA, 25 bp, Homo sapien
taggtctacgcggagccccgccaag

SEQ ID NO: 736551 - DNA, 25 bp, Homo sapien
cacctgagccgtcggttccgcgggt

SEQ ID NO: 736552 - DNA, 25 bp, Homo sapien
ctgagccgtcggttccgcgggtgcc

SEQ ID NO: 736553 - DNA, 25 bp, Homo sapien
cctgagccgtcggttccgcgggtgc

SEQ ID NO: 736554 - DNA, 25 bp, Homo sapien
tgagccgtcggttccgcgggtgcct

SEQ ID NO: 736555 - DNA, 25 bp, Homo sapien
cccttcattcggaatcagagcagca

SEQ ID NO: 736556 - DNA, 25 bp, Homo sapien
cagcatctgcgaacctgcaaagacc

SEQ ID NO: 736557 - DNA, 25 bp, Homo sapien
cacagcgacagcactagtagccctt

SEQ ID NO: 736558 - DNA, 25 bp, Homo sapien
taaacacctaaaaaccacagcgaca

SEQ ID NO: 736559 - DNA, 25 bp, Homo sapien
tggtgcacgccagttctcctagcta

SEQ ID NO: 736560 - DNA, 25 bp, Homo sapien
cagccaagggaaggccactttgtct

SEQ ID NO: 736561 - DNA, 25 bp, Homo sapien
gcagagtgccatctggtacagcatc

SEQ ID NO: 736562 - DNA, 25 bp, Homo sapien
agtttccgaggactgaacagcttcc

SEQ ID NO: 736563 - DNA, 25 bp, Homo sapien
tttgccacccgggtaagaagcagag

SEQ ID NO: 736564 - DNA, 25 bp, Homo sapien
gaagcagagcagaagagtcttgcgc

SEQ ID NO: 736565 - DNA, 25 bp, Homo sapien
agtcatgtggtagagggtttgcccc

SEQ ID NO: 736566 - DNA, 25 bp, Homo sapien
cgcttatgctgtactgggatctgag

SEQ ID NO: 736567 - DNA, 25 bp, Homo sapien
cctgtcaggcgagggtaaagagaca

SEQ ID NO: 736568 - DNA, 25 bp, Homo sapien
cacatcccatgacctgtcaggcgag

SEQ ID NO: 736569 - DNA, 25 bp, Homo sapien
aagagtcgcctcccctaaggtcaca

SEQ ID NO: 736570 - DNA, 25 bp, Homo sapien
agcagccaagagtcgcctcccctaa

SEQ ID NO: 736571 - DNA, 25 bp, Homo sapien
gaggccacaggggaagagactgcat

SEQ ID NO: 736572 - DNA, 25 bp, Homo sapien
gccacaggggaagagactgcatagc

SEQ ID NO: 736573 - DNA, 25 bp, Homo sapien
aggccacaggggaagagactgcata

SEQ ID NO: 736574 - DNA, 25 bp, Homo sapien
ctgaggccacaggggaagagactgc

SEQ ID NO: 736575 - DNA, 25 bp, Homo sapien
cctgcaacaatactgattcctatat

SEQ ID NO: 736576 - DNA, 25 bp, Homo sapien
ttctttcctgcaacaatactgattc

SEQ ID NO: 736577 - DNA, 25 bp, Homo sapien
ttcctgcaacaatactgattcctat

SEQ ID NO: 736578 - DNA, 25 bp, Homo sapien
tgttctttcctgcaacaatactgat

SEQ ID NO: 736579 - DNA, 25 bp, Homo sapien
ccacagcttcgtgcttttctcttag

SEQ ID NO: 736580 - DNA, 25 bp, Homo sapien
cacagcttcgtgcttttctcttagt

SEQ ID NO: 736581 - DNA, 25 bp, Homo sapien
acagcttcgtgcttttctcttagta

SEQ ID NO: 736582 - DNA, 25 bp, Homo sapien
tatctagaatttatgggacctgccc

SEQ ID NO: 736583 - DNA, 25 bp, Homo sapien
tatcaattgctgcactgggatggcc

SEQ ID NO: 736584 - DNA, 25 bp, Homo sapien
gcaactgtacatggacacactgggt

SEQ ID NO: 736585 - DNA, 25 bp, Homo sapien
tgatgcctaagaaaaccgtcagggc

SEQ ID NO: 736586 - DNA, 25 bp, Homo sapien
agcacctactaagtaatagcccaat

SEQ ID NO: 736587 - DNA, 25 bp, Homo sapien
gcacctactaagtaatagcccaata

SEQ ID NO: 736588 - DNA, 25 bp, Homo sapien
gccagtgattcactggtctaactca

SEQ ID NO: 736589 - DNA, 25 bp, Homo sapien
ggaaatgccagtgattcactggtct

SEQ ID NO: 736590 - DNA, 25 bp, Homo sapien
ttcttgatggtgatggtagtgtgca

SEQ ID NO: 736591 - DNA, 25 bp, Homo sapien
gtgcattcagatcttatatctagct

SEQ ID NO: 736592 - DNA, 25 bp, Homo sapien
tctaaagggtagctagaattgtacc

SEQ ID NO: 736593 - DNA, 25 bp, Homo sapien
tctcttggccgaggattcttgatgg

SEQ ID NO: 736594 - DNA, 25 bp, Homo sapien
tttggggagcagttttgcatttttc

SEQ ID NO: 736595 - DNA, 25 bp, Homo sapien
agagtctttttcagaggactaggaa

SEQ ID NO: 736596 - DNA, 25 bp, Homo sapien
gtctttttcagaggactaggaatcc

SEQ ID NO: 736597 - DNA, 25 bp, Homo sapien
gactcatggctatttatgtcatttt

SEQ ID NO: 736598 - DNA, 25 bp, Homo sapien
gtgaattttcaggctgtgatgaaag

SEQ ID NO: 736599 - DNA, 25 bp, Homo sapien
taattctaagctgaagtgcttctgt

SEQ ID NO: 736600 - DNA, 25 bp, Homo sapien
tatgttcctgcgaggataaaagcca

SEQ ID NO: 736601 - DNA, 25 bp, Homo sapien
gcattactttaaactgctgtgtcat

SEQ ID NO: 736602 - DNA, 25 bp, Homo sapien
taaaggagttgtatttgttcaccaa

SEQ ID NO: 736603 - DNA, 25 bp, Homo sapien
tgaatagccctatttctgaagcagt

SEQ ID NO: 736604 - DNA, 25 bp, Homo sapien
tgtgagtccaaatcagaatacctgg

SEQ ID NO: 736605 - DNA, 25 bp, Homo sapien
caatacaatacgagatgtgagtcca

SEQ ID NO: 736606 - DNA, 25 bp, Homo sapien
tcctagcggttggtaatcacattgt

SEQ ID NO: 736607 - DNA, 25 bp, Homo sapien
ggaagaggaatatctcccaatgaga

SEQ ID NO: 736608 - DNA, 25 bp, Homo sapien
gattgtcaaccggtgaaagaaatcc

SEQ ID NO: 736609 - DNA, 25 bp, Homo sapien
ggccaatgacattaagtttatctca

SEQ ID NO: 736610 - DNA, 25 bp, Homo sapien
catatgattgtcaaccggtgaaaga

SEQ ID NO: 736611 - DNA, 25 bp, Homo sapien
actgcagaaatggttcttgtgactg

SEQ ID NO: 736612 - DNA, 25 bp, Homo sapien
tcagaatcactttgatccaagtgac

SEQ ID NO: 736613 - DNA, 25 bp, Homo sapien
ccaggccacggaaaaggttcagaag

SEQ ID NO: 736614 - DNA, 25 bp, Homo sapien
aatgtaagatctccatggaaatcag

SEQ ID NO: 736615 - DNA, 25 bp, Homo sapien
agattctggtgcagttggctgtaag

SEQ ID NO: 736616 - DNA, 25 bp, Homo sapien
gcaaagctttagcacgctgttcatc

SEQ ID NO: 736617 - DNA, 25 bp, Homo sapien
gggatatgcaaagctttagcacgct

SEQ ID NO: 736618 - DNA, 25 bp, Homo sapien
cgctgttcatcacggctcaagtttc

SEQ ID NO: 736619 - DNA, 25 bp, Homo sapien
tatctgtgtcttcaaggtatctact

SEQ ID NO: 736620 - DNA, 25 bp, Homo sapien
gaatcaacaggcatgccgacaattt

SEQ ID NO: 736621 - DNA, 25 bp, Homo sapien
aattatgtccaatttgcgtttacga

SEQ ID NO: 736622 - DNA, 25 bp, Homo sapien
gtgagacttgtaggtctgtcagata

SEQ ID NO: 736623 - DNA, 25 bp, Homo sapien
cacggataagtgagacttgtaggtc

SEQ ID NO: 736624 - DNA, 25 bp, Homo sapien
cattgtgcttgctctctcttaagag

SEQ ID NO: 736625 - DNA, 25 bp, Homo sapien
tcatgataaaggtcatgcagtttct

SEQ ID NO: 736626 - DNA, 25 bp, Homo sapien
taaaggtcatgcagtttctgtttca

SEQ ID NO: 736627 - DNA, 25 bp, Homo sapien
aatagctttgttacattgtgcttgc

SEQ ID NO: 736628 - DNA, 25 bp, Homo sapien
gttctttgggtactatcaagatact

SEQ ID NO: 736629 - DNA, 25 bp, Homo sapien
tgggtactatcaagatacttccatc

SEQ ID NO: 736630 - DNA, 25 bp, Homo sapien
ccagttctttgggtactatcaagat

SEQ ID NO: 736631 - DNA, 25 bp, Homo sapien
tctttgggtactatcaagatacttc

SEQ ID NO: 736632 - DNA, 25 bp, Homo sapien
aacctattctttggacataactatg

SEQ ID NO: 736633 - DNA, 25 bp, Homo sapien
caagtgtgatcttgaagtcctaaac

SEQ ID NO: 736634 - DNA, 25 bp, Homo sapien
cagtttctgaacattactacttcac

SEQ ID NO: 736635 - DNA, 25 bp, Homo sapien
ggacataactatgaattttgtatac

SEQ ID NO: 736636 - DNA, 25 bp, Homo sapien
aatagtgtttgaaaagctcactata

SEQ ID NO: 736637 - DNA, 25 bp, Homo sapien
tataaagattaaaatagtgtttgaa

SEQ ID NO: 736638 - DNA, 25 bp, Homo sapien
gtgtttgaaaagctcactatagtgc

SEQ ID NO: 736639 - DNA, 25 bp, Homo sapien
ttaaaatagtgtttgaaaagctcac

SEQ ID NO: 736640 - DNA, 25 bp, Homo sapien
tacactgtagctcctatggcagaaa

SEQ ID NO: 736641 - DNA, 25 bp, Homo sapien
gagttacgtttttgcaagtagccca

SEQ ID NO: 736642 - DNA, 25 bp, Homo sapien
aaggcctgtggctcaaactaccagt

SEQ ID NO: 736643 - DNA, 25 bp, Homo sapien
tcagtattctaagatggtgaggcca

SEQ ID NO: 736644 - DNA, 25 bp, Homo sapien
gctggctgcttaatgcgccgattaa

SEQ ID NO: 736645 - DNA, 25 bp, Homo sapien
gcttgtgacgctggctgcttaatgc

SEQ ID NO: 736646 - DNA, 25 bp, Homo sapien
ccagcccatagccaattagagcttg

SEQ ID NO: 736647 - DNA, 25 bp, Homo sapien
aattagagcttgtgacgctggctgc

SEQ ID NO: 736648 - DNA, 25 bp, Homo sapien
tatccagagtggcatactaacagct

SEQ ID NO: 736649 - DNA, 25 bp, Homo sapien
ggtacaattaccaagcaggcaggga

SEQ ID NO: 736650 - DNA, 25 bp, Homo sapien
gattctgggtaaagctcaaggttcc

SEQ ID NO: 736651 - DNA, 25 bp, Homo sapien
tatgggtcagcaattgggagcaact

SEQ ID NO: 736652 - DNA, 25 bp, Homo sapien
caggtaactaatgaagaagtggtca

SEQ ID NO: 736653 - DNA, 25 bp, Homo sapien
aggtaactaatgaagaagtggtcaa

SEQ ID NO: 736654 - DNA, 25 bp, Homo sapien
gcaggtaactaatgaagaagtggtc

SEQ ID NO: 736655 - DNA, 25 bp, Homo sapien
ttgctgcaggtaactaatgaagaag

SEQ ID NO: 736656 - DNA, 25 bp, Homo sapien
gacaagtatattctgctgccacaaa

SEQ ID NO: 736657 - DNA, 25 bp, Homo sapien
aattaaggtccgttgcaaagctgtt

SEQ ID NO: 736658 - DNA, 25 bp, Homo sapien
taaggatgccaacgaaagctgaggg

SEQ ID NO: 736659 - DNA, 25 bp, Homo sapien
taaccccagcgaggtactcttcagg

SEQ ID NO: 736660 - DNA, 25 bp, Homo sapien
tgggagacatagctgcaggagtaaa

SEQ ID NO: 736661 - DNA, 25 bp, Homo sapien
caggcttcactgtataaataggaga

SEQ ID NO: 736662 - DNA, 25 bp, Homo sapien
gagcccagaggtaacagaacagctt

SEQ ID NO: 736663 - DNA, 25 bp, Homo sapien
gaaaagctattagccaggatcatgg

SEQ ID NO: 736664 - DNA, 25 bp, Homo sapien
ttatggtgggaggagccgatactga

SEQ ID NO: 736665 - DNA, 25 bp, Homo sapien
tgggaggagccgatactgagcttct

SEQ ID NO: 736666 - DNA, 25 bp, Homo sapien
gaggagccgatactgagcttcttcc

SEQ ID NO: 736667 - DNA, 25 bp, Homo sapien
ggagccgatactgagcttcttccta

SEQ ID NO: 736668 - DNA, 25 bp, Homo sapien
tagccccggttatggaggaggaaga

SEQ ID NO: 736669 - DNA, 25 bp, Homo sapien
tggaggtagccccggttatggagga

SEQ ID NO: 736670 - DNA, 25 bp, Homo sapien
tcaacttcccgtactgctgggatta

SEQ ID NO: 736671 - DNA, 25 bp, Homo sapien
gctagtactacaggttgctgccacc

SEQ ID NO: 736672 - DNA, 25 bp, Homo sapien
ccgcctcaacttcccgtactgctgg

SEQ ID NO: 736673 - DNA, 25 bp, Homo sapien
caagaacattgtttcgttttttgag

SEQ ID NO: 736674 - DNA, 25 bp, Homo sapien
atggcagtggacgtggatttgggga

SEQ ID NO: 736675 - DNA, 25 bp, Homo sapien
ggaagtaactttagaggaggatctg

SEQ ID NO: 736676 - DNA, 25 bp, Homo sapien
tggaaatttcggaccaggaccagga

SEQ ID NO: 736677 - DNA, 25 bp, Homo sapien
aggaagtaactttagaggaggatct

SEQ ID NO: 736678 - DNA, 25 bp, Homo sapien
gggattcacgtggtggcggtggaaa

SEQ ID NO: 736679 - DNA, 25 bp, Homo sapien
ggaagttcagagttctaggagtgga

SEQ ID NO: 736680 - DNA, 25 bp, Homo sapien
gaagttcagagttctaggagtggaa

SEQ ID NO: 736681 - DNA, 25 bp, Homo sapien
agttcagagttctaggagtggaaga

SEQ ID NO: 736682 - DNA, 25 bp, Homo sapien
ttcagagttctaggagtggaagagg

SEQ ID NO: 736683 - DNA, 25 bp, Homo sapien
tattggtggcttaagctttgaaacc

SEQ ID NO: 736684 - DNA, 25 bp, Homo sapien
gtgtaacacaactaatatgcagttt

SEQ ID NO: 736685 - DNA, 25 bp, Homo sapien
aacagttccgtaagctctttattgg

SEQ ID NO: 736686 - DNA, 25 bp, Homo sapien
aaacttgtgtagatcagctgaggca

SEQ ID NO: 736687 - DNA, 25 bp, Homo sapien
gtaaaacgacagatgaaccgcggca

SEQ ID NO: 736688 - DNA, 25 bp, Homo sapien
tcgattaaaacatggcttcagaggc

SEQ ID NO: 736689 - DNA, 25 bp, Homo sapien
tgcgagccgtaggacaaagaaacca

SEQ ID NO: 736690 - DNA, 25 bp, Homo sapien
taaattggaagccatcggccacgag

SEQ ID NO: 736691 - DNA, 25 bp, Homo sapien
cattgagcgcatttacggaagtaac

SEQ ID NO: 736692 - DNA, 25 bp, Homo sapien
aagtaacgtcgggtactgtctctgg

SEQ ID NO: 736693 - DNA, 25 bp, Homo sapien
gagccttcccgccattggcggcgga

SEQ ID NO: 736694 - DNA, 25 bp, Homo sapien
atagggcgtttacgcgacggcctga

SEQ ID NO: 736695 - DNA, 25 bp, Homo sapien
ctttgggaccactttcagcagcgaa

SEQ ID NO: 736696 - DNA, 25 bp, Homo sapien
gcgaggacagtgaccggagtctcct

SEQ ID NO: 736697 - DNA, 25 bp, Homo sapien
tatcattggcgtaactgcagggacc

SEQ ID NO: 736698 - DNA, 25 bp, Homo sapien
gcagcgaactctcctgtacaccagg

SEQ ID NO: 736699 - DNA, 25 bp, Homo sapien
cctcccccttcggatgtggcttgag

SEQ ID NO: 736700 - DNA, 25 bp, Homo sapien
ctcccccttcggatgtggcttgagc

SEQ ID NO: 736701 - DNA, 25 bp, Homo sapien
gcttgagctgtaggcgcggagggcc

SEQ ID NO: 736702 - DNA, 25 bp, Homo sapien
tgtggcttgagctgtaggcgcggag

SEQ ID NO: 736703 - DNA, 25 bp, Homo sapien
ggcgcggagggccggagacgctgca

SEQ ID NO: 736704 - DNA, 25 bp, Homo sapien
tggcttgagctgtaggcgcggaggg

SEQ ID NO: 736705 - DNA, 25 bp, Homo sapien
tgcagcgtctccggccctccgcgcc

SEQ ID NO: 736706 - DNA, 25 bp, Homo sapien
ctcaagccacatccgaagggggagg

SEQ ID NO: 736707 - DNA, 25 bp, Homo sapien
ctccgcgcctacagctcaagccaca

SEQ ID NO: 736708 - DNA, 25 bp, Homo sapien
tccgcgcctacagctcaagccacat

SEQ ID NO: 736709 - DNA, 25 bp, Homo sapien
ggccctccgcgcctacagctcaagc

SEQ ID NO: 736710 - DNA, 25 bp, Homo sapien
gctcaagccacatccgaagggggag

SEQ ID NO: 736711 - DNA, 25 bp, Homo sapien
gcggagggccggagacgctgcagac

SEQ ID NO: 736712 - DNA, 25 bp, Homo sapien
ccccttcggatgtggcttgagctgt

SEQ ID NO: 736713 - DNA, 25 bp, Homo sapien
gcttgagctgtaggcgcggagggcc

SEQ ID NO: 736714 - DNA, 25 bp, Homo sapien
acccggagcagctcggaggcggtga

SEQ ID NO: 736715 - DNA, 25 bp, Homo sapien
cccttcggatgtggcttgagctgta

SEQ ID NO: 736716 - DNA, 25 bp, Homo sapien
tgtggcttgagctgtaggcgcggag

SEQ ID NO: 736717 - DNA, 25 bp, Homo sapien
gctgctccgggtcgcgggtctgcag

SEQ ID NO: 736718 - DNA, 25 bp, Homo sapien
ggtcgcgggtctgcagcgtctccgg

SEQ ID NO: 736719 - DNA, 25 bp, Homo sapien
tacagctcaagccacatccgaaggg

SEQ ID NO: 736720 - DNA, 25 bp, Homo sapien
ggccctccgcgcctacagctcaagc

SEQ ID NO: 736721 - DNA, 25 bp, Homo sapien
tccgcgcctacagctcaagccacat

SEQ ID NO: 736722 - DNA, 25 bp, Homo sapien
ttcaccgcctccgagctgctccggg

SEQ ID NO: 736723 - DNA, 25 bp, Homo sapien
ccaagttgggattgcagaacagaga

SEQ ID NO: 736724 - DNA, 25 bp, Homo sapien
gggcacccgcgcttaggcctctgga

SEQ ID NO: 736725 - DNA, 25 bp, Homo sapien
gcggcgaccgcccagttaacgtggc

SEQ ID NO: 736726 - DNA, 25 bp, Homo sapien
catttcgagacaaagcgcatttccc

SEQ ID NO: 736727 - DNA, 25 bp, Homo sapien
gctctcgctcgctggtggtgcttca

SEQ ID NO: 736728 - DNA, 25 bp, Homo sapien
tgtggcgacggttgccccatttcga

SEQ ID NO: 736729 - DNA, 25 bp, Homo sapien
gttaactgggcggtcgccgcagcct

SEQ ID NO: 736730 - DNA, 25 bp, Homo sapien
tctctgttctgcaatcccaacttgg

SEQ ID NO: 736731 - DNA, 25 bp, Homo sapien
taagatgcttcaaccccgtttcgtg

SEQ ID NO: 736732 - DNA, 25 bp, Homo sapien
gaaatgcgctttgtctcgaaatggg

SEQ ID NO: 736733 - DNA, 25 bp, Homo sapien
caccagcgagcgagagctagagaga

SEQ ID NO: 736734 - DNA, 25 bp, Homo sapien
ccccgggacgcgtgtggcatctgaa

SEQ ID NO: 736735 - DNA, 25 bp, Homo sapien
caggatccccagtaaagtctttcta

SEQ ID NO: 736736 - DNA, 25 bp, Homo sapien
gctgttttaggtaccaggatcccca

SEQ ID NO: 736737 - DNA, 25 bp, Homo sapien
gtcccctattttaagccatgtgaag

SEQ ID NO: 736738 - DNA, 25 bp, Homo sapien
cataagcaatgtaggtaggagcgca

SEQ ID NO: 736739 - DNA, 25 bp, Homo sapien
tagactcacatggttaggacacgta

SEQ ID NO: 736740 - DNA, 25 bp, Homo sapien
cacgtttgaaatgtgcgctctctac

SEQ ID NO: 736741 - DNA, 25 bp, Homo sapien
tcaaacgtgaatacaaatccagagt

SEQ ID NO: 736742 - DNA, 25 bp, Homo sapien
tggtacctaaaacagcttcacatgg

SEQ ID NO: 736743 - DNA, 25 bp, Homo sapien
taagtacgtgtcctaaccatgtgag

SEQ ID NO: 736744 - DNA, 25 bp, Homo sapien
cagttaaggtaagtttgcatgacac

SEQ ID NO: 736745 - DNA, 25 bp, Homo sapien
tagatctgcgctcctacctacattg

SEQ ID NO: 736746 - DNA, 25 bp, Homo sapien
tagagagcgcacatttcaaacgtga

SEQ ID NO: 736747 - DNA, 25 bp, Homo sapien
taatagctcttcaagtctgcaataa

SEQ ID NO: 736748 - DNA, 25 bp, Homo sapien
aatagctcttcaagtctgcaataaa

SEQ ID NO: 736749 - DNA, 25 bp, Homo sapien
tagctcttcaagtctgcaataaaaa

SEQ ID NO: 736750 - DNA, 25 bp, Homo sapien
atagctcttcaagtctgcaataaaa

SEQ ID NO: 736751 - DNA, 25 bp, Homo sapien
tttttattgcagacttgaagagcta

SEQ ID NO: 736752 - DNA, 25 bp, Homo sapien
ttttattgcagacttgaagagctat

SEQ ID NO: 736753 - DNA, 25 bp, Homo sapien
ttattgcagacttgaagagctatta

SEQ ID NO: 736754 - DNA, 25 bp, Homo sapien
tttattgcagacttgaagagctatt

SEQ ID NO: 736755 - DNA, 25 bp, Homo sapien
tgtttttgtgtttttttgagacaga

SEQ ID NO: 736756 - DNA, 25 bp, Homo sapien
ttttgagacagagtttttctcttgt

SEQ ID NO: 736757 - DNA, 25 bp, Homo sapien
tttttgagacagagtttttctcttg

SEQ ID NO: 736758 - DNA, 25 bp, Homo sapien
ttgagacagagtttttctcttgttg

SEQ ID NO: 736759 - DNA, 25 bp, Homo sapien
cagagtttttctcttgttgtccagg

SEQ ID NO: 736760 - DNA, 25 bp, Homo sapien
tttgagacagagtttttctcttgtt

SEQ ID NO: 736761 - DNA, 25 bp, Homo sapien
caacaagagaaaaactctgtctcaa

SEQ ID NO: 736762 - DNA, 25 bp, Homo sapien
aacaagagaaaaactctgtctcaaa

SEQ ID NO: 736763 - DNA, 25 bp, Homo sapien
caagagaaaaactctgtctcaaaaa

SEQ ID NO: 736764 - DNA, 25 bp, Homo sapien
tctgtctcaaaaaaacacaaaaaca

SEQ ID NO: 736765 - DNA, 25 bp, Homo sapien
cctggacaacaagagaaaaactctg

SEQ ID NO: 736766 - DNA, 25 bp, Homo sapien
acaagagaaaaactctgtctcaaaa

SEQ ID NO: 736767 - DNA, 25 bp, Homo sapien
atgtgctcaaaattcaagaggaata

SEQ ID NO: 736768 - DNA, 25 bp, Homo sapien
ataactgtttccagatagtgttttt

SEQ ID NO: 736769 - DNA, 25 bp, Homo sapien
gtgctcaaaattcaagaggaatatt

SEQ ID NO: 736770 - DNA, 25 bp, Homo sapien
tgtgctcaaaattcaagaggaatat

SEQ ID NO: 736771 - DNA, 25 bp, Homo sapien
aatattcctcttgaattttgagcac

SEQ ID NO: 736772 - DNA, 25 bp, Homo sapien
tattcctcttgaattttgagcacat

SEQ ID NO: 736773 - DNA, 25 bp, Homo sapien
aaaaacactatctggaaacagttat

SEQ ID NO: 736774 - DNA, 25 bp, Homo sapien
atattcctcttgaattttgagcaca

SEQ ID NO: 736775 - DNA, 25 bp, Homo sapien
tgataataatataagcaattgagcc

SEQ ID NO: 736776 - DNA, 25 bp, Homo sapien
aaaaaataactgtttccagatagtg

SEQ ID NO: 736777 - DNA, 25 bp, Homo sapien
taatctttccagaaggtgtctgccc

SEQ ID NO: 736778 - DNA, 25 bp, Homo sapien
gcaattgagccttgaaaatgtgctc

SEQ ID NO: 736779 - DNA, 25 bp, Homo sapien
tctgccctgggatatagaagtaaaa

SEQ ID NO: 736780 - DNA, 25 bp, Homo sapien
tgtgctcaaaattcaagaggaatat

SEQ ID NO: 736781 - DNA, 25 bp, Homo sapien
gcacattttcaaggctcaattgctt

SEQ ID NO: 736782 - DNA, 25 bp, Homo sapien
aatattcctcttgaattttgagcac

SEQ ID NO: 736783 - DNA, 25 bp, Homo sapien
aaaaacactatctggaaacagttat

SEQ ID NO: 736784 - DNA, 25 bp, Homo sapien
tatatcccagggcagacaccttctg

SEQ ID NO: 736785 - DNA, 25 bp, Homo sapien
tttttacttctatatcccagggcag

SEQ ID NO: 736786 - DNA, 25 bp, Homo sapien
caccttctggaaagattaaaagtca

SEQ ID NO: 736787 - DNA, 25 bp, Homo sapien
ttgtcgtggaaaaagtactagatcg

SEQ ID NO: 736788 - DNA, 25 bp, Homo sapien
cagaatggaaagagtaaaaaagttg

SEQ ID NO: 736789 - DNA, 25 bp, Homo sapien
tagatcgacgtgtagtgaatgggaa

SEQ ID NO: 736790 - DNA, 25 bp, Homo sapien
gaatatttcctgaagtggaagggat

SEQ ID NO: 736791 - DNA, 25 bp, Homo sapien
cagagcctgaagaatttgtcgtgga

SEQ ID NO: 736792 - DNA, 25 bp, Homo sapien
tcgtggaaaaagtactagatcgacg

SEQ ID NO: 736793 - DNA, 25 bp, Homo sapien
caacttttttactctttccattctg

SEQ ID NO: 736794 - DNA, 25 bp, Homo sapien
tccacgacaaattcttcaggctctg

SEQ ID NO: 736795 - DNA, 25 bp, Homo sapien
tcccattcactacacgtcgatctag

SEQ ID NO: 736796 - DNA, 25 bp, Homo sapien
cgtcgatctagtactttttccacga

SEQ ID NO: 736797 - DNA, 25 bp, Homo sapien
tctgtaaatcccttccacttcagga

SEQ ID NO: 736798 - DNA, 25 bp, Homo sapien
cgatctagtactttttccacgacaa

SEQ ID NO: 736799 - DNA, 25 bp, Homo sapien
ggaaatgattagtatctgcagtaca

SEQ ID NO: 736800 - DNA, 25 bp, Homo sapien
gaatcatatttaattcaatcacctt

SEQ ID NO: 736801 - DNA, 25 bp, Homo sapien
gaccctgtctctggcggaggcaggc

SEQ ID NO: 736802 - DNA, 25 bp, Homo sapien
tatgattccactactgcactctcgt

SEQ ID NO: 736803 - DNA, 25 bp, Homo sapien
atgattagtatctgcagtacagagg

SEQ ID NO: 736804 - DNA, 25 bp, Homo sapien
tgattccactactgcactctcgtct

SEQ ID NO: 736805 - DNA, 25 bp, Homo sapien
agacgagagtgcagtagtggaatca

SEQ ID NO: 736806 - DNA, 25 bp, Homo sapien
cctctgtactgcagatactaatcat

SEQ ID NO: 736807 - DNA, 25 bp, Homo sapien
aaggtgattgaattaaatatgattc

SEQ ID NO: 736808 - DNA, 25 bp, Homo sapien
acgagagtgcagtagtggaatcata

SEQ ID NO: 736809 - DNA, 25 bp, Homo sapien
gcctgcctccgccagagacagggtc

SEQ ID NO: 736810 - DNA, 25 bp, Homo sapien
tgtactgcagatactaatcatttcc

SEQ ID NO: 736811 - DNA, 25 bp, Homo sapien
gattgaagcgtttcttaactctcag

SEQ ID NO: 736812 - DNA, 25 bp, Homo sapien
gattgtccagaattgattgaagcgt

SEQ ID NO: 736813 - DNA, 25 bp, Homo sapien
agattgtccagaattgattgaagcg

SEQ ID NO: 736814 - DNA, 25 bp, Homo sapien
caatacttgggaacctgaagaaaat

SEQ ID NO: 736815 - DNA, 25 bp, Homo sapien
tgctgacaatacttgggaacctgaa

SEQ ID NO: 736816 - DNA, 25 bp, Homo sapien
gaattgattgaagcgtttcttaact

SEQ ID NO: 736817 - DNA, 25 bp, Homo sapien
ctgagagttaagaaacgcttcaatc

SEQ ID NO: 736818 - DNA, 25 bp, Homo sapien
attttcttcaggttcccaagtattg

SEQ ID NO: 736819 - DNA, 25 bp, Homo sapien
acgcttcaatcaattctggacaatc

SEQ ID NO: 736820 - DNA, 25 bp, Homo sapien
ttcaggttcccaagtattgtcagca

SEQ ID NO: 736821 - DNA, 25 bp, Homo sapien
gttaagaaacgcttcaatcaattct

SEQ ID NO: 736822 - DNA, 25 bp, Homo sapien
cgcttcaatcaattctggacaatct

SEQ ID NO: 736823 - DNA, 25 bp, Homo sapien
aaagctggcaaagaaaaagatggta

SEQ ID NO: 736824 - DNA, 25 bp, Homo sapien
tggcaaagaaaaagatggtacaaaa

SEQ ID NO: 736825 - DNA, 25 bp, Homo sapien
caaaaagaaaatctttatctgacag

SEQ ID NO: 736826 - DNA, 25 bp, Homo sapien
gctggcaaagaaaaagatggtacaa

SEQ ID NO: 736827 - DNA, 25 bp, Homo sapien
ctggcaaagaaaaagatggtacaaa

SEQ ID NO: 736828 - DNA, 25 bp, Homo sapien
agctggcaaagaaaaagatggtaca

SEQ ID NO: 736829 - DNA, 25 bp, Homo sapien
gtaccatctttttctttgccagctt

SEQ ID NO: 736830 - DNA, 25 bp, Homo sapien
tttgtaccatctttttctttgccag

SEQ ID NO: 736831 - DNA, 25 bp, Homo sapien
ttttgtaccatctttttctttgcca

SEQ ID NO: 736832 - DNA, 25 bp, Homo sapien
taccatctttttctttgccagcttt

SEQ ID NO: 736833 - DNA, 25 bp, Homo sapien
tgtaccatctttttctttgccagct

SEQ ID NO: 736834 - DNA, 25 bp, Homo sapien
ttgtaccatctttttctttgccagc

SEQ ID NO: 736835 - DNA, 25 bp, Homo sapien
ctgatgacagcaaatcaaagaagaa

SEQ ID NO: 736836 - DNA, 25 bp, Homo sapien
gacagcaaatcaaagaagaaaagag

SEQ ID NO: 736837 - DNA, 25 bp, Homo sapien
gaatctgatgacagcaaatcaaaga

SEQ ID NO: 736838 - DNA, 25 bp, Homo sapien
aatctgatgacagcaaatcaaagaa

SEQ ID NO: 736839 - DNA, 25 bp, Homo sapien
tgaatctgatgacagcaaatcaaag

SEQ ID NO: 736840 - DNA, 25 bp, Homo sapien
tgatgacagcaaatcaaagaagaaa

SEQ ID NO: 736841 - DNA, 25 bp, Homo sapien
ctttgatttgctgtcatcagattca

SEQ ID NO: 736842 - DNA, 25 bp, Homo sapien
ctcttttcttctttgatttgctgtc

SEQ ID NO: 736843 - DNA, 25 bp, Homo sapien
ttctttgatttgctgtcatcagatt

SEQ ID NO: 736844 - DNA, 25 bp, Homo sapien
tctttgatttgctgtcatcagattc

SEQ ID NO: 736845 - DNA, 25 bp, Homo sapien
tttcttctttgatttgctgtcatca

SEQ ID NO: 736846 - DNA, 25 bp, Homo sapien
ttcttctttgatttgctgtcatcag

SEQ ID NO: 736847 - DNA, 25 bp, Homo sapien
tggcattgaccaccgaaaagtactt

SEQ ID NO: 736848 - DNA, 25 bp, Homo sapien
ggcgtcaggcaaatcaggtaacttc

SEQ ID NO: 736849 - DNA, 25 bp, Homo sapien
gacaactctgtataaggtcataggt

SEQ ID NO: 736850 - DNA, 25 bp, Homo sapien
tcttgcctactgacctagtgtggca

SEQ ID NO: 736851 - DNA, 25 bp, Homo sapien
tacttatgtctctgtggcgtcaggc

SEQ ID NO: 736852 - DNA, 25 bp, Homo sapien
tgaactagaagccaagtacaacctt

SEQ ID NO: 736853 - DNA, 25 bp, Homo sapien
gaagttacctgatttgcctgacgcc

SEQ ID NO: 736854 - DNA, 25 bp, Homo sapien
gcctgacgccacagagacataagta

SEQ ID NO: 736855 - DNA, 25 bp, Homo sapien
gcaaagactggaccaaaacacatgt

SEQ ID NO: 736856 - DNA, 25 bp, Homo sapien
aagtacttttcggtggtcaatgcca

SEQ ID NO: 736857 - DNA, 25 bp, Homo sapien
gccacactaggtcagtaggcaagac

SEQ ID NO: 736858 - DNA, 25 bp, Homo sapien
gaatgtctcaattcatgccaagaaa

SEQ ID NO: 736859 - DNA, 25 bp, Homo sapien
gggaaaccaaagcaggaacatcgct

SEQ ID NO: 736860 - DNA, 25 bp, Homo sapien
ggtaggtccatcattctcacccagg

SEQ ID NO: 736861 - DNA, 25 bp, Homo sapien
atattaagtactttctagcgcaggg

SEQ ID NO: 736862 - DNA, 25 bp, Homo sapien
cattaggagaattgtcgagggctac

SEQ ID NO: 736863 - DNA, 25 bp, Homo sapien
gaatccccagtgaatccgtagacca

SEQ ID NO: 736864 - DNA, 25 bp, Homo sapien
cacatttgattgctgtggcggatca

SEQ ID NO: 736865 - DNA, 25 bp, Homo sapien
ggacctaccccacttacgagctgtg

SEQ ID NO: 736866 - DNA, 25 bp, Homo sapien
caaagtcagagttgtgtgggcatac

SEQ ID NO: 736867 - DNA, 25 bp, Homo sapien
cctgggtgagaatgatggacctacc

SEQ ID NO: 736868 - DNA, 25 bp, Homo sapien
aaatgtggtctacggattcactggg

SEQ ID NO: 736869 - DNA, 25 bp, Homo sapien
tacatcaatgtcacaagctctggag

SEQ ID NO: 736870 - DNA, 25 bp, Homo sapien
gaacaaacttgtgtaacctgtggcc

SEQ ID NO: 736871 - DNA, 25 bp, Homo sapien
aaccaagaggatttgccagaggtct

SEQ ID NO: 736872 - DNA, 25 bp, Homo sapien
tgacaaaccaagaggatttgccaga

SEQ ID NO: 736873 - DNA, 25 bp, Homo sapien
gaggatttgccagaggtcttgatcc

SEQ ID NO: 736874 - DNA, 25 bp, Homo sapien
ccaagaggatttgccagaggtcttg

SEQ ID NO: 736875 - DNA, 25 bp, Homo sapien
gacagcagtggagaattgatgtttc

SEQ ID NO: 736876 - DNA, 25 bp, Homo sapien
tttgccagaggtcttgatcctgaaa

SEQ ID NO: 736877 - DNA, 25 bp, Homo sapien
gagaaacatcaattctccactgctg

SEQ ID NO: 736878 - DNA, 25 bp, Homo sapien
ggatcaagacctctggcaaatcctc

SEQ ID NO: 736879 - DNA, 25 bp, Homo sapien
tttcaggatcaagacctctggcaaa

SEQ ID NO: 736880 - DNA, 25 bp, Homo sapien
gatcaagacctctggcaaatcctct

SEQ ID NO: 736881 - DNA, 25 bp, Homo sapien
agacctctggcaaatcctcttggtt

SEQ ID NO: 736882 - DNA, 25 bp, Homo sapien
caagacctctggcaaatcctcttgg

SEQ ID NO: 736883 - DNA, 25 bp, Homo sapien
ggttgacatgaacaacttcgacttg

SEQ ID NO: 736884 - DNA, 25 bp, Homo sapien
tattagaacatagcaacaagtaaca

SEQ ID NO: 736885 - DNA, 25 bp, Homo sapien
agtaacataactctcctggagcact

SEQ ID NO: 736886 - DNA, 25 bp, Homo sapien
gcaacaagtaacataactctcctgg

SEQ ID NO: 736887 - DNA, 25 bp, Homo sapien
gaacaacttcgacttgtaactgaat

SEQ ID NO: 736888 - DNA, 25 bp, Homo sapien
taaatgaatggctgtcggttgacat

SEQ ID NO: 736889 - DNA, 25 bp, Homo sapien
aagtcgaagttgttcatgtcaaccg

SEQ ID NO: 736890 - DNA, 25 bp, Homo sapien
aagtgctccaggagagttatgttac

SEQ ID NO: 736891 - DNA, 25 bp, Homo sapien
atgtcaaccgacagccattcattta

SEQ ID NO: 736892 - DNA, 25 bp, Homo sapien
ccaggagagttatgttacttgttgc

SEQ ID NO: 736893 - DNA, 25 bp, Homo sapien
ttcagttacaagtcgaagttgttca

SEQ ID NO: 736894 - DNA, 25 bp, Homo sapien
gttacttgttgctatgttctaataa

SEQ ID NO: 736895 - DNA, 25 bp, Homo sapien
tggtgctggcgaaagaggcaaatat

SEQ ID NO: 736896 - DNA, 25 bp, Homo sapien
gaaagattcagatgaggcagacttg

SEQ ID NO: 736897 - DNA, 25 bp, Homo sapien
tgctggcgaaagaggcaaatatgaa

SEQ ID NO: 736898 - DNA, 25 bp, Homo sapien
ttggtgctggcgaaagaggcaaata

SEQ ID NO: 736899 - DNA, 25 bp, Homo sapien
cgaaagaggcaaatatgaagtgtcc

SEQ ID NO: 736900 - DNA, 25 bp, Homo sapien
cattcttgtccagaagatgaagctc

SEQ ID NO: 736901 - DNA, 25 bp, Homo sapien
aaagcaattacaatttgaggacact

SEQ ID NO: 736902 - DNA, 25 bp, Homo sapien
gagcttcatcttctggacaagaatg

SEQ ID NO: 736903 - DNA, 25 bp, Homo sapien
caagtctgcctcatctgaatctttc

SEQ ID NO: 736904 - DNA, 25 bp, Homo sapien
ggacacttcatatttgcctctttcg

SEQ ID NO: 736905 - DNA, 25 bp, Homo sapien
tatttgcctctttcgccagcaccaa

SEQ ID NO: 736906 - DNA, 25 bp, Homo sapien
ttcatatttgcctctttcgccagca

SEQ ID NO: 736907 - DNA, 25 bp, Homo sapien
tttgaaagtagcgttggaagagttg

SEQ ID NO: 736908 - DNA, 25 bp, Homo sapien
atccatagcactggttactttgaac

SEQ ID NO: 736909 - DNA, 25 bp, Homo sapien
ccatagcactggttactttgaacaa

SEQ ID NO: 736910 - DNA, 25 bp, Homo sapien
tccatagcactggttactttgaaca

SEQ ID NO: 736911 - DNA, 25 bp, Homo sapien
catagcactggttactttgaacaaa

SEQ ID NO: 736912 - DNA, 25 bp, Homo sapien
aaataactacatcctaatgaaaatc

SEQ ID NO: 736913 - DNA, 25 bp, Homo sapien
gttcaaagtaaccagtgctatggat

SEQ ID NO: 736914 - DNA, 25 bp, Homo sapien
ttgttcaaagtaaccagtgctatgg

SEQ ID NO: 736915 - DNA, 25 bp, Homo sapien
tttgttcaaagtaaccagtgctatg

SEQ ID NO: 736916 - DNA, 25 bp, Homo sapien
tgttcaaagtaaccagtgctatgga

SEQ ID NO: 736917 - DNA, 25 bp, Homo sapien
caactcttccaacgctactttcaaa

SEQ ID NO: 736918 - DNA, 25 bp, Homo sapien
gattttcattaggatgtagttattt

SEQ ID NO: 736919 - DNA, 25 bp, Homo sapien
gaacatttgataccatggtatatca

SEQ ID NO: 736920 - DNA, 25 bp, Homo sapien
gataccatggtatatcatttcctct

SEQ ID NO: 736921 - DNA, 25 bp, Homo sapien
accatggtatatcatttcctcttca

SEQ ID NO: 736922 - DNA, 25 bp, Homo sapien
gtatatcatttcctcttcattaaag

SEQ ID NO: 736923 - DNA, 25 bp, Homo sapien
tcctttatcagaaaagaacatttga

SEQ ID NO: 736924 - DNA, 25 bp, Homo sapien
tcttcattaaagaacagcttttcta

SEQ ID NO: 736925 - DNA, 25 bp, Homo sapien
caaatgttcttttctgataaaggaa

SEQ ID NO: 736926 - DNA, 25 bp, Homo sapien
tgaagaggaaatgatataccatggt

SEQ ID NO: 736927 - DNA, 25 bp, Homo sapien
tttaatgaagaggaaatgatatacc

SEQ ID NO: 736928 - DNA, 25 bp, Homo sapien
gatataccatggtatcaaatgttct

SEQ ID NO: 736929 - DNA, 25 bp, Homo sapien
agaggaaatgatataccatggtatc

SEQ ID NO: 736930 - DNA, 25 bp, Homo sapien
gaaaagctgttctttaatgaagagg

SEQ ID NO: 736931 - DNA, 25 bp, Homo sapien
aacttgtgttctcatgagcctaagg

SEQ ID NO: 736932 - DNA, 25 bp, Homo sapien
cctagcgggccattccttagcaaaa

SEQ ID NO: 736933 - DNA, 25 bp, Homo sapien
catgagcctaaggaccattctagat

SEQ ID NO: 736934 - DNA, 25 bp, Homo sapien
ggaatccctgttgctacattgacta

SEQ ID NO: 736935 - DNA, 25 bp, Homo sapien
catggaggctcaatcttgagtttgc

SEQ ID NO: 736936 - DNA, 25 bp, Homo sapien
taccccaattcattacatggaggct

SEQ ID NO: 736937 - DNA, 25 bp, Homo sapien
cataaatgtgtgaacaaccttttgt

SEQ ID NO: 736938 - DNA, 25 bp, Homo sapien
ggaatatgtaagacttggctcatag

SEQ ID NO: 736939 - DNA, 25 bp, Homo sapien
tatgtaagacttggctcatagaaac

SEQ ID NO: 736940 - DNA, 25 bp, Homo sapien
tagaaacctaatcagatggttagag

SEQ ID NO: 736941 - DNA, 25 bp, Homo sapien
ggctcatagaaacctaatcagatgg

SEQ ID NO: 736942 - DNA, 25 bp, Homo sapien
gccaggaagaacaactttgtagtaa

SEQ ID NO: 736943 - DNA, 25 bp, Homo sapien
ctctaaccatctgattaggtttcta

SEQ ID NO: 736944 - DNA, 25 bp, Homo sapien
gattactacaaagttgttcttcctg

SEQ ID NO: 736945 - DNA, 25 bp, Homo sapien
tacaaaaggttgttcacacatttat

SEQ ID NO: 736946 - DNA, 25 bp, Homo sapien
ctatgagccaagtcttacatattcc

SEQ ID NO: 736947 - DNA, 25 bp, Homo sapien
tactacaaagttgttcttcctggct

SEQ ID NO: 736948 - DNA, 25 bp, Homo sapien
ccatctgattaggtttctatgagcc

SEQ ID NO: 736949 - DNA, 25 bp, Homo sapien
tttgctaaggaatggcccgctaggg

SEQ ID NO: 736950 - DNA, 25 bp, Homo sapien
caagattgagcctccatgtaatgaa

SEQ ID NO: 736951 - DNA, 25 bp, Homo sapien
gaatggtccttaggctcatgagaac

SEQ ID NO: 736952 - DNA, 25 bp, Homo sapien
tagtcaatgtagcaacagggattcc

SEQ ID NO: 736953 - DNA, 25 bp, Homo sapien
taaaccactgcaattatagacactt

SEQ ID NO: 736954 - DNA, 25 bp, Homo sapien
taaagcaaactcaagattgagcctc

SEQ ID NO: 736955 - DNA, 25 bp, Homo sapien
tgagcttacgagttttaaacttgaa

SEQ ID NO: 736956 - DNA, 25 bp, Homo sapien
tcctagatcttttgagcttacgagt

SEQ ID NO: 736957 - DNA, 25 bp, Homo sapien
gatgataccagtaaggcattacagt

SEQ ID NO: 736958 - DNA, 25 bp, Homo sapien
gtttataagttagatgataccagta

SEQ ID NO: 736959 - DNA, 25 bp, Homo sapien
ggcattacagtacatatcctagatc

SEQ ID NO: 736960 - DNA, 25 bp, Homo sapien
gaaatgcccacactcattggattat

SEQ ID NO: 736961 - DNA, 25 bp, Homo sapien
gatctaggatatgtactgtaatgcc

SEQ ID NO: 736962 - DNA, 25 bp, Homo sapien
tactggtatcatctaacttataaac

SEQ ID NO: 736963 - DNA, 25 bp, Homo sapien
tcaagtttaaaactcgtaagctcaa

SEQ ID NO: 736964 - DNA, 25 bp, Homo sapien
tactgtaatgccttactggtatcat

SEQ ID NO: 736965 - DNA, 25 bp, Homo sapien
aagataatccaatgagtgtgggcat

SEQ ID NO: 736966 - DNA, 25 bp, Homo sapien
ctcgtaagctcaaaagatctaggat

SEQ ID NO: 736967 - DNA, 25 bp, Homo sapien
taaagcttgttcaaccagaggcatg

SEQ ID NO: 736968 - DNA, 25 bp, Homo sapien
aggtgtcccaattgcatatgtctgc

SEQ ID NO: 736969 - DNA, 25 bp, Homo sapien
tacagtaccagctcagtatagagcg

SEQ ID NO: 736970 - DNA, 25 bp, Homo sapien
gctgtgtagaatagacctgggtcca

SEQ ID NO: 736971 - DNA, 25 bp, Homo sapien
gttcaatagacagttattgaccaag

SEQ ID NO: 736972 - DNA, 25 bp, Homo sapien
gcagacaccctaaacctctcagagt

SEQ ID NO: 736973 - DNA, 25 bp, Homo sapien
gaagtaggagttcaatagacagtta

SEQ ID NO: 736974 - DNA, 25 bp, Homo sapien
ccaaagacagttgagaggagttgct

SEQ ID NO: 736975 - DNA, 25 bp, Homo sapien
ttactttgtattaaatccagctttc

SEQ ID NO: 736976 - DNA, 25 bp, Homo sapien
actgtctgcgacaaagttcatagtc

SEQ ID NO: 736977 - DNA, 25 bp, Homo sapien
gtatgactgtctgcgacaaagttca

SEQ ID NO: 736978 - DNA, 25 bp, Homo sapien
ctagaggattccggccagtatgact

SEQ ID NO: 736979 - DNA, 25 bp, Homo sapien
ccggccagtatgactgtctgcgaca

SEQ ID NO: 736980 - DNA, 25 bp, Homo sapien
tccagagatgcaattgatgataccc

SEQ ID NO: 736981 - DNA, 25 bp, Homo sapien
tgatccagagatgcaattgatgata

SEQ ID NO: 736982 - DNA, 25 bp, Homo sapien
cagagatgcaattgatgatacccta

SEQ ID NO: 736983 - DNA, 25 bp, Homo sapien
tcattgaacaccatctcgtatgcag

SEQ ID NO: 736984 - DNA, 25 bp, Homo sapien
tacatcagcatgaactacagcaaaa

SEQ ID NO: 736985 - DNA, 25 bp, Homo sapien
ctacagcaaaaatttgagcaatatg

SEQ ID NO: 736986 - DNA, 25 bp, Homo sapien
ggatttccctgctcaacatttacat

SEQ ID NO: 736987 - DNA, 25 bp, Homo sapien
catgaggatcttcattcaccgcagg

SEQ ID NO: 736988 - DNA, 25 bp, Homo sapien
aggaaatccagaattttgcaccaga

SEQ ID NO: 736989 - DNA, 25 bp, Homo sapien
cagaggactcaccacatccttgctt

SEQ ID NO: 736990 - DNA, 25 bp, Homo sapien
tccagaattttgcaccagaggactc

SEQ ID NO: 736991 - DNA, 25 bp, Homo sapien
gactcaccacatccttgcttcgaca

SEQ ID NO: 736992 - DNA, 25 bp, Homo sapien
ttgtcagcattgttgatcagggatc

SEQ ID NO: 736993 - DNA, 25 bp, Homo sapien
ttggctcctgtattgtcagcattgt

SEQ ID NO: 736994 - DNA, 25 bp, Homo sapien
tccctgatcctcttcacggagatga

SEQ ID NO: 736995 - DNA, 25 bp, Homo sapien
cgtccctgatcctcttcacggagat

SEQ ID NO: 736996 - DNA, 25 bp, Homo sapien
gccatccccatgtcacccacactgg

SEQ ID NO: 736997 - DNA, 25 bp, Homo sapien
cacccacactggcagggaagtctgt

SEQ ID NO: 736998 - DNA, 25 bp, Homo sapien
ggccatccccatgtcacccacactg

SEQ ID NO: 736999 - DNA, 25 bp, Homo sapien
ccatgtcacccacactggcagggaa

SEQ ID NO: 737000 - DNA, 25 bp, Homo sapien
acttttgttgtcaagtgaccactgc

SEQ ID NO: 737001 - DNA, 25 bp, Homo sapien
cttttgttgtcaagtgaccactgct

SEQ ID NO: 737002 - DNA, 25 bp, Homo sapien
ctgccagtattgaacgcaatccggg

SEQ ID NO: 737003 - DNA, 25 bp, Homo sapien
tgctgccagtattgaacgcaatccg

SEQ ID NO: 737004 - DNA, 25 bp, Homo sapien
atgcaatgctgccagtattgaacgc

SEQ ID NO: 737005 - DNA, 25 bp, Homo sapien
gcaatgctgccagtattgaacgcaa

SEQ ID NO: 737006 - DNA, 25 bp, Homo sapien
cacgacttgctacatgttcatttgg

SEQ ID NO: 737007 - DNA, 25 bp, Homo sapien
catttggctttacacgactgacagg

SEQ ID NO: 737008 - DNA, 25 bp, Homo sapien
acccaagcagaggtaggcaccttgc

SEQ ID NO: 737009 - DNA, 25 bp, Homo sapien
gaccaccaagggatgctctgcagtg

SEQ ID NO: 737010 - DNA, 25 bp, Homo sapien
gcttgtcgctgatcatcctccaggg

SEQ ID NO: 737011 - DNA, 25 bp, Homo sapien
tcgctgatcatcctccagggaccat

SEQ ID NO: 737012 - DNA, 25 bp, Homo sapien
tacagcttgtcgctgatcatcctcc

SEQ ID NO: 737013 - DNA, 25 bp, Homo sapien
tagatacagcttgtcgctgatcatc

SEQ ID NO: 737014 - DNA, 25 bp, Homo sapien
tgctgactcaaaggcgcgcggcggc

SEQ ID NO: 737015 - DNA, 25 bp, Homo sapien
cgggccgagccgggcttgcgggccg

SEQ ID NO: 737016 - DNA, 25 bp, Homo sapien
ttgcgggccgcggagtttgctgact

SEQ ID NO: 737017 - DNA, 25 bp, Homo sapien
ggccgcggagtttgctgactcaaag

SEQ ID NO: 737018 - DNA, 25 bp, Homo sapien
cctcagcgggtctcttgtcacttac

SEQ ID NO: 737019 - DNA, 25 bp, Homo sapien
ccccctcagcgggtctcttgtcact

SEQ ID NO: 737020 - DNA, 25 bp, Homo sapien
gaagggcccgcgcctctggaaagaa

SEQ ID NO: 737021 - DNA, 25 bp, Homo sapien
gcctctggaaagaagggccgccgtc

SEQ ID NO: 737022 - DNA, 25 bp, Homo sapien
tgctccaagcccaagggacccaaac

SEQ ID NO: 737023 - DNA, 25 bp, Homo sapien
ccattctctcactgaggagcccctg

SEQ ID NO: 737024 - DNA, 25 bp, Homo sapien
tccattctctcactgaggagcccct

SEQ ID NO: 737025 - DNA, 25 bp, Homo sapien
cattctctcactgaggagcccctgc

SEQ ID NO: 737026 - DNA, 25 bp, Homo sapien
attctctcactgaggagcccctgca

SEQ ID NO: 737027 - DNA, 25 bp, Homo sapien
cctgttctcaaccagttgtctgcct

SEQ ID NO: 737028 - DNA, 25 bp, Homo sapien
taacttaacgagcaaaatgaagcct

SEQ ID NO: 737029 - DNA, 25 bp, Homo sapien
ccgccatgctaggaaatgaaaatct

SEQ ID NO: 737030 - DNA, 25 bp, Homo sapien
gaaaatctgcatagactggcccctg

SEQ ID NO: 737031 - DNA, 25 bp, Homo sapien
taagtcgtgttaaaagtctggccta

SEQ ID NO: 737032 - DNA, 25 bp, Homo sapien
caaaaatgtattgcctacaagtaca

SEQ ID NO: 737033 - DNA, 25 bp, Homo sapien
tttgatagctggctgaacaagcctc

SEQ ID NO: 737034 - DNA, 25 bp, Homo sapien
tctggcctaaactattaaaggtctc

SEQ ID NO: 737035 - DNA, 25 bp, Homo sapien
gatgctcgcattaggacaggcagag

SEQ ID NO: 737036 - DNA, 25 bp, Homo sapien
tagcagggctaaccggaagaatgga

SEQ ID NO: 737037 - DNA, 25 bp, Homo sapien
gaaacaggccacttctaacgcaatg

SEQ ID NO: 737038 - DNA, 25 bp, Homo sapien
tcactgtgatgtgccagaagaactg

SEQ ID NO: 737039 - DNA, 25 bp, Homo sapien
gatttcattaccagtctgatgacgg

SEQ ID NO: 737040 - DNA, 25 bp, Homo sapien
tttcattaccagtctgatgacggct

SEQ ID NO: 737041 - DNA, 25 bp, Homo sapien
gatgacggctcaatttcacattttt

SEQ ID NO: 737042 - DNA, 25 bp, Homo sapien
tctgatgacggctcaatttcacatt

SEQ ID NO: 737043 - DNA, 25 bp, Homo sapien
aagccatttcagtctaacaagatta

SEQ ID NO: 737044 - DNA, 25 bp, Homo sapien
caagccatttcagtctaacaagatt

SEQ ID NO: 737045 - DNA, 25 bp, Homo sapien
acaagccatttcagtctaacaagat

SEQ ID NO: 737046 - DNA, 25 bp, Homo sapien
aaaacagtgatcaacaacagaacct

SEQ ID NO: 737047 - DNA, 25 bp, Homo sapien
cctggtccacctgcttaccctctgt

SEQ ID NO: 737048 - DNA, 25 bp, Homo sapien
tgtgcgcctcggtatcctcatctat

SEQ ID NO: 737049 - DNA, 25 bp, Homo sapien
aatcctgctaagtgaccctggtcca

SEQ ID NO: 737050 - DNA, 25 bp, Homo sapien
gaaacgtcctggagaagtgaacact

SEQ ID NO: 737051 - DNA, 25 bp, Homo sapien
gccttagctagcacatcaggttgta

SEQ ID NO: 737052 - DNA, 25 bp, Homo sapien
tggtctagaagcaagctaagcccag

SEQ ID NO: 737053 - DNA, 25 bp, Homo sapien
gaactgcagagcaaatccaaatggg

SEQ ID NO: 737054 - DNA, 25 bp, Homo sapien
gatccattctccatgcgctcagagt

SEQ ID NO: 737055 - DNA, 25 bp, Homo sapien
gagatacatgtcctgttggcactac

SEQ ID NO: 737056 - DNA, 25 bp, Homo sapien
ctttcatgaacacggcagtcctctg

SEQ ID NO: 737057 - DNA, 25 bp, Homo sapien
tggttaccaccatgcatcagccaga

SEQ ID NO: 737058 - DNA, 25 bp, Homo sapien
tatgtaagctcattagatttaacac

SEQ ID NO: 737059 - DNA, 25 bp, Homo sapien
taagctcattagatttaacacctgc

SEQ ID NO: 737060 - DNA, 25 bp, Homo sapien
gctcattagatttaacacctgctcc

SEQ ID NO: 737061 - DNA, 25 bp, Homo sapien
ttggtatgtaagctcattagattta

SEQ ID NO: 737062 - DNA, 25 bp, Homo sapien
taaaattttccatcatagcttagtt

SEQ ID NO: 737063 - DNA, 25 bp, Homo sapien
ttaaaattttccatcatagcttagt

SEQ ID NO: 737064 - DNA, 25 bp, Homo sapien
taaaatgccagttcagacaacatgc

SEQ ID NO: 737065 - DNA, 25 bp, Homo sapien
gcagaggtcctctatgctgaaaatc

SEQ ID NO: 737066 - DNA, 25 bp, Homo sapien
tagcaccaagcatggtactagcaca

SEQ ID NO: 737067 - DNA, 25 bp, Homo sapien
ggaatcaaagcagagacacactatg

SEQ ID NO: 737068 - DNA, 25 bp, Homo sapien
tcctctagcagacgctaagctcctg

SEQ ID NO: 737069 - DNA, 25 bp, Homo sapien
tgaatgcctcatacatccaatgcct

SEQ ID NO: 737070 - DNA, 25 bp, Homo sapien
tgccttccattagtatcatttaatg

SEQ ID NO: 737071 - DNA, 25 bp, Homo sapien
tcctgtagggcagcttaggctgtct

SEQ ID NO: 737072 - DNA, 25 bp, Homo sapien
cataaacaaagaaatattcttcaga

SEQ ID NO: 737073 - DNA, 25 bp, Homo sapien
taaacaaagaaatattcttcagaac

SEQ ID NO: 737074 - DNA, 25 bp, Homo sapien
ataaacaaagaaatattcttcagaa

SEQ ID NO: 737075 - DNA, 25 bp, Homo sapien
tccttctgaatcctaggatctcgaa

SEQ ID NO: 737076 - DNA, 25 bp, Homo sapien
tacatatctcatagtcaatgtaaga

SEQ ID NO: 737077 - DNA, 25 bp, Homo sapien
tagtcaatgtaagaatgccagaagt

SEQ ID NO: 737078 - DNA, 25 bp, Homo sapien
ggatctcgaacccagacacttacaa

SEQ ID NO: 737079 - DNA, 25 bp, Homo sapien
aacataacagccctgaagacagcca

SEQ ID NO: 737080 - DNA, 25 bp, Homo sapien
tataattcacaatatgatctcaaca

SEQ ID NO: 737081 - DNA, 25 bp, Homo sapien
tatatttatgccagtactctgaaat

SEQ ID NO: 737082 - DNA, 25 bp, Homo sapien
ctctgaaatcttgcacataacccag

SEQ ID NO: 737083 - DNA, 25 bp, Homo sapien
ctctatatcttcttcgtacacagga

SEQ ID NO: 737084 - DNA, 25 bp, Homo sapien
accagcaacgcattactttggagtc

SEQ ID NO: 737085 - DNA, 25 bp, Homo sapien
cttcttcgtacacaggatgttttca

SEQ ID NO: 737086 - DNA, 25 bp, Homo sapien
tcagccacacgaattctctatatct

SEQ ID NO: 737087 - DNA, 25 bp, Homo sapien
ttttagatggaagttctggcagttg

SEQ ID NO: 737088 - DNA, 25 bp, Homo sapien
tttagatggaagttctggcagttgt

SEQ ID NO: 737089 - DNA, 25 bp, Homo sapien
gacgctgatccacgtgctggcgatt

SEQ ID NO: 737090 - DNA, 25 bp, Homo sapien
gatccacgtgctggcgattgttcat

SEQ ID NO: 737091 - DNA, 25 bp, Homo sapien
aggaaatcttccagaccctggcgac

SEQ ID NO: 737092 - DNA, 25 bp, Homo sapien
agaccctggcgacgctgatccacgt

SEQ ID NO: 737093 - DNA, 25 bp, Homo sapien
tgatcgggacctcaaggctactgtc

SEQ ID NO: 737094 - DNA, 25 bp, Homo sapien
caaaccagtgagtcggctaggtaca

SEQ ID NO: 737095 - DNA, 25 bp, Homo sapien
tagtaacttaacacatgggtacagc

SEQ ID NO: 737096 - DNA, 25 bp, Homo sapien
ggtttgaggcattacaccacaacag

SEQ ID NO: 737097 - DNA, 25 bp, Homo sapien
tttgtatcaattatgggctctgccc

SEQ ID NO: 737098 - DNA, 25 bp, Homo sapien
tctttaggagcactgaatctctgtg

SEQ ID NO: 737099 - DNA, 25 bp, Homo sapien
tacttaagggcatgtttacgacagc

SEQ ID NO: 737100 - DNA, 25 bp, Homo sapien
cagatttcaaccagggcatcagaac

SEQ ID NO: 737101 - DNA, 25 bp, Homo sapien
tgcccagaaacacacgcctcaatgt

SEQ ID NO: 737102 - DNA, 25 bp, Homo sapien
tgaaggctgctatctgaaagcaaaa

SEQ ID NO: 737103 - DNA, 25 bp, Homo sapien
cagggaaacgtctattcattaaggc

SEQ ID NO: 737104 - DNA, 25 bp, Homo sapien
cacagagtacttagtctgcccagaa

SEQ ID NO: 737105 - DNA, 25 bp, Homo sapien
taattatctccagtcacaaagagag

SEQ ID NO: 737106 - DNA, 25 bp, Homo sapien
taattagccatttggagtgcagttg

SEQ ID NO: 737107 - DNA, 25 bp, Homo sapien
tttcacaacacactcaaagcctgag

SEQ ID NO: 737108 - DNA, 25 bp, Homo sapien
gactactatgatgagctgtcacagc

SEQ ID NO: 737109 - DNA, 25 bp, Homo sapien
catcactactgtgtccaagcccaga

SEQ ID NO: 737110 - DNA, 25 bp, Homo sapien
aggattcctgcggagctgtatttac

SEQ ID NO: 737111 - DNA, 25 bp, Homo sapien
ctgtcatcactactgtgtccaagcc

SEQ ID NO: 737112 - DNA, 25 bp, Homo sapien
gattcctgcggagctgtatttactt

SEQ ID NO: 737113 - DNA, 25 bp, Homo sapien
gggaggtatccacaaaatatcaggc

SEQ ID NO: 737114 - DNA, 25 bp, Homo sapien
tctgaaattagcaagtcgacatcct

SEQ ID NO: 737115 - DNA, 25 bp, Homo sapien
cactgccccactgatacaagaagga

SEQ ID NO: 737116 - DNA, 25 bp, Homo sapien
cactcttcaattaggctgggtaaca

SEQ ID NO: 737117 - DNA, 25 bp, Homo sapien
tagtgtgaactcaaatacatattgc

SEQ ID NO: 737118 - DNA, 25 bp, Homo sapien
gatggcatgaactttacatattagc

SEQ ID NO: 737119 - DNA, 25 bp, Homo sapien
gatctcgtgacatttacatactaag

SEQ ID NO: 737120 - DNA, 25 bp, Homo sapien
gatcgctcttaaatgcctggatggc

SEQ ID NO: 737121 - DNA, 25 bp, Homo sapien
ttacattactccatgacacaaggcc

SEQ ID NO: 737122 - DNA, 25 bp, Homo sapien
cagcccagattgtgtcttacattac

SEQ ID NO: 737123 - DNA, 25 bp, Homo sapien
gattcattgtgcgtttgcagcccag

SEQ ID NO: 737124 - DNA, 25 bp, Homo sapien
cctgttgttccgcagaaaggcccca

SEQ ID NO: 737125 - DNA, 25 bp, Homo sapien
aatgcaaatagctcgcctgtctcag

SEQ ID NO: 737126 - DNA, 25 bp, Homo sapien
tgtctcagccgcctgccctcgttcc

SEQ ID NO: 737127 - DNA, 25 bp, Homo sapien
tccgcatataaaaatgactgccggg

SEQ ID NO: 737128 - DNA, 25 bp, Homo sapien
gggaatgcaaatagctcgcctgtct

SEQ ID NO: 737129 - DNA, 25 bp, Homo sapien
tctggcccgacacaaaagaggaggg

SEQ ID NO: 737130 - DNA, 25 bp, Homo sapien
ggggcgccgctgacaacttcattac

SEQ ID NO: 737131 - DNA, 25 bp, Homo sapien
agaaggagacggaaacaaaggcgcg

SEQ ID NO: 737132 - DNA, 25 bp, Homo sapien
agcgggcagggcgatttgaatatca

SEQ ID NO: 737133 - DNA, 25 bp, Homo sapien
ctcggcagcctcttgtggtcagtgg

SEQ ID NO: 737134 - DNA, 25 bp, Homo sapien
gatgttcactgccttccttcaacca

SEQ ID NO: 737135 - DNA, 25 bp, Homo sapien
tctcggcagcctgacagaatagctg

SEQ ID NO: 737136 - DNA, 25 bp, Homo sapien
ccaaccccaggagcgtggatgttca

SEQ ID NO: 737137 - DNA, 25 bp, Homo sapien
taagacactgccattatccccggat

SEQ ID NO: 737138 - DNA, 25 bp, Homo sapien
tttaacacacggatcattggcgagc

SEQ ID NO: 737139 - DNA, 25 bp, Homo sapien
gccaactaggttttctcaggactga

SEQ ID NO: 737140 - DNA, 25 bp, Homo sapien
tactgggcgccatggtgggacttaa

SEQ ID NO: 737141 - DNA, 25 bp, Homo sapien
ccggagctcctggaaccaagaataa

SEQ ID NO: 737142 - DNA, 25 bp, Homo sapien
tcctggaaccaagaataacatgtca

SEQ ID NO: 737143 - DNA, 25 bp, Homo sapien
ggagctcctggaaccaagaataaca

SEQ ID NO: 737144 - DNA, 25 bp, Homo sapien
gaaccaagaataacatgtcagccat

SEQ ID NO: 737145 - DNA, 25 bp, Homo sapien
cctgtgctgcccttgaatttctgag

SEQ ID NO: 737146 - DNA, 25 bp, Homo sapien
caatatcaatgtgggacagatggct

SEQ ID NO: 737147 - DNA, 25 bp, Homo sapien
tccaagactctagtgactgacaggg

SEQ ID NO: 737148 - DNA, 25 bp, Homo sapien
gactctcggaggttttagcagagcc

SEQ ID NO: 737149 - DNA, 25 bp, Homo sapien
tactctgggagtatctgggagtgaa

SEQ ID NO: 737150 - DNA, 25 bp, Homo sapien
gcaggtccccaaaatcctgacagta

SEQ ID NO: 737151 - DNA, 25 bp, Homo sapien
gtaatttgggattggcacctcctca

SEQ ID NO: 737152 - DNA, 25 bp, Homo sapien
tgtctgaacaaagactgcaggtccc

SEQ ID NO: 737153 - DNA, 25 bp, Homo sapien
gatgcctgtgtattctcactgcagc

SEQ ID NO: 737154 - DNA, 25 bp, Homo sapien
cttgaagatgcctgtgtattctcac

SEQ ID NO: 737155 - DNA, 25 bp, Homo sapien
tattctcactgcagctgagtgtctc

SEQ ID NO: 737156 - DNA, 25 bp, Homo sapien
cagctgagtgtctctctagtgtctc

SEQ ID NO: 737157 - DNA, 25 bp, Homo sapien
ttctcattggtaagacctttcatct

SEQ ID NO: 737158 - DNA, 25 bp, Homo sapien
tggctctgtgcgcagaaagcagacg

SEQ ID NO: 737159 - DNA, 25 bp, Homo sapien
tgcgcagaaagcagacgggctgctt

SEQ ID NO: 737160 - DNA, 25 bp, Homo sapien
tgtcatgatcggtttgggtggctct

SEQ ID NO: 737161 - DNA, 25 bp, Homo sapien
atgaagcagagccgaccctggccag

SEQ ID NO: 737162 - DNA, 25 bp, Homo sapien
gatgaagcagagccgaccctggcca

SEQ ID NO: 737163 - DNA, 25 bp, Homo sapien
ggatgaagcagagccgaccctggcc

SEQ ID NO: 737164 - DNA, 25 bp, Homo sapien
aggatgaagcagagccgaccctggc

SEQ ID NO: 737165 - DNA, 25 bp, Homo sapien
cttgagaagactgtgtcccagttag

SEQ ID NO: 737166 - DNA, 25 bp, Homo sapien
agaagactgtgtcccagttagatcc

SEQ ID NO: 737167 - DNA, 25 bp, Homo sapien
cccagttagatccttgatctgagaa

SEQ ID NO: 737168 - DNA, 25 bp, Homo sapien
ctgtgtcccagttagatccttgatc

SEQ ID NO: 737169 - DNA, 25 bp, Homo sapien
tgattctaaggtgactccatcaggg

SEQ ID NO: 737170 - DNA, 25 bp, Homo sapien
cttcacctctgattctaaggtgact

SEQ ID NO: 737171 - DNA, 25 bp, Homo sapien
tctgattctaaggtgactccatcag

SEQ ID NO: 737172 - DNA, 25 bp, Homo sapien
cacctctgattctaaggtgactcca

SEQ ID NO: 737173 - DNA, 25 bp, Homo sapien
ttcttgccctcagtcacgcctctga

SEQ ID NO: 737174 - DNA, 25 bp, Homo sapien
cctcagtcacgcctctgaagccagt

SEQ ID NO: 737175 - DNA, 25 bp, Homo sapien
tgccctcagtcacgcctctgaagcc

SEQ ID NO: 737176 - DNA, 25 bp, Homo sapien
ccttcttgccctcagtcacgcctct

SEQ ID NO: 737177 - DNA, 25 bp, Homo sapien
atcaataaagttcagggagagatgg

SEQ ID NO: 737178 - DNA, 25 bp, Homo sapien
gagtaaatggttgttttgcttcaaa

SEQ ID NO: 737179 - DNA, 25 bp, Homo sapien
aggagtaaatggttgttttgcttca

SEQ ID NO: 737180 - DNA, 25 bp, Homo sapien
agggagagatggcacaatgtacaat

SEQ ID NO: 737181 - DNA, 25 bp, Homo sapien
caccgtgatggcgagttgaagctga

SEQ ID NO: 737182 - DNA, 25 bp, Homo sapien
gtcgtctttcctgagcagaacggca

SEQ ID NO: 737183 - DNA, 25 bp, Homo sapien
ttctgatgttgcagcgaccgtgcct

SEQ ID NO: 737184 - DNA, 25 bp, Homo sapien
tgcttgctgaaatgccgcccttctg

SEQ ID NO: 737185 - DNA, 25 bp, Homo sapien
catgtgctggtaattaccactaccc

SEQ ID NO: 737186 - DNA, 25 bp, Homo sapien
agaatcaatgcaagtgggattgaac

SEQ ID NO: 737187 - DNA, 25 bp, Homo sapien
tcattccctaatatccccttccctc

SEQ ID NO: 737188 - DNA, 25 bp, Homo sapien
cttgctctgggtagaatcaatgcaa

SEQ ID NO: 737189 - DNA, 25 bp, Homo sapien
catctgtcgccgttgtcatggcagc

SEQ ID NO: 737190 - DNA, 25 bp, Homo sapien
gcatagtgagaggtcaggcctgaca

SEQ ID NO: 737191 - DNA, 25 bp, Homo sapien
tcaaggttaacagccaatggaccaa

SEQ ID NO: 737192 - DNA, 25 bp, Homo sapien
gtacagtcaattccagttaaggaaa

SEQ ID NO: 737193 - DNA, 25 bp, Homo sapien
tcacggctgaaggattatgattttc

SEQ ID NO: 737194 - DNA, 25 bp, Homo sapien
ttccaagaatagtgacgttgacgcc

SEQ ID NO: 737195 - DNA, 25 bp, Homo sapien
gcttgttccaagaatagtgacgttg

SEQ ID NO: 737196 - DNA, 25 bp, Homo sapien
tagtgacgttgacgccatcacggct

SEQ ID NO: 737197 - DNA, 25 bp, Homo sapien
ccagaggtccctcacacaagactgt

SEQ ID NO: 737198 - DNA, 25 bp, Homo sapien
gaatctggaaaggagtgactgcgcc

SEQ ID NO: 737199 - DNA, 25 bp, Homo sapien
tgactgcgcccaggcttgagcctgt

SEQ ID NO: 737200 - DNA, 25 bp, Homo sapien
tttggtatcacaactgccacactcc

SEQ ID NO: 737201 - DNA, 25 bp, Homo sapien
tcacatgggagtatatccataagcc

SEQ ID NO: 737202 - DNA, 25 bp, Homo sapien
gcacacaaagaggtgtctccatcat

SEQ ID NO: 737203 - DNA, 25 bp, Homo sapien
gatcccattgtatggctgtgccaaa

SEQ ID NO: 737204 - DNA, 25 bp, Homo sapien
tttacagctgtactggatcccattg

SEQ ID NO: 737205 - DNA, 25 bp, Homo sapien
tgcgggaagtcattcaggatggcct

SEQ ID NO: 737206 - DNA, 25 bp, Homo sapien
gtcattcaggatggcctcgggaagc

SEQ ID NO: 737207 - DNA, 25 bp, Homo sapien
aagtcattcaggatggcctcgggaa

SEQ ID NO: 737208 - DNA, 25 bp, Homo sapien
ttcaggatggcctcgggaagcctga

SEQ ID NO: 737209 - DNA, 25 bp, Homo sapien
gggcaagcccaagggcaggactctc

SEQ ID NO: 737210 - DNA, 25 bp, Homo sapien
gcaggactctcagaacaagggcaag

SEQ ID NO: 737211 - DNA, 25 bp, Homo sapien
gggcaggactctcagaacaagggca

SEQ ID NO: 737212 - DNA, 25 bp, Homo sapien
aggactctcagaacaagggcaaggg

SEQ ID NO: 737213 - DNA, 25 bp, Homo sapien
tactccagtcccattggtttctgtt

SEQ ID NO: 737214 - DNA, 25 bp, Homo sapien
tcctctgcatactccagtcccattg

SEQ ID NO: 737215 - DNA, 25 bp, Homo sapien
tctgcatactccagtcccattggtt

SEQ ID NO: 737216 - DNA, 25 bp, Homo sapien
gcatactccagtcccattggtttct

SEQ ID NO: 737217 - DNA, 25 bp, Homo sapien
ttctttccagtgtctagggctgtac

SEQ ID NO: 737218 - DNA, 25 bp, Homo sapien
acataatttctttccagtgtctagg

SEQ ID NO: 737219 - DNA, 25 bp, Homo sapien
cataatttctttccagtgtctaggg

SEQ ID NO: 737220 - DNA, 25 bp, Homo sapien
gacataatttctttccagtgtctag

SEQ ID NO: 737221 - DNA, 25 bp, Homo sapien
gccatgatcaaaagtccagagcctt

SEQ ID NO: 737222 - DNA, 25 bp, Homo sapien
agccatccaggacagcggcccgagg

SEQ ID NO: 737223 - DNA, 25 bp, Homo sapien
aatgaatcccctggtagccaaagct

SEQ ID NO: 737224 - DNA, 25 bp, Homo sapien
aagatgagaaatgaatcccctggta

SEQ ID NO: 737225 - DNA, 25 bp, Homo sapien
tactgagagtgttgagttttgccaa

SEQ ID NO: 737226 - DNA, 25 bp, Homo sapien
agcacaaagatgacccttgccaagg

SEQ ID NO: 737227 - DNA, 25 bp, Homo sapien
tgaagaaatccccatctagtcctgg

SEQ ID NO: 737228 - DNA, 25 bp, Homo sapien
tagctgacctcataacaggttgaag

SEQ ID NO: 737229 - DNA, 25 bp, Homo sapien
ggtgacaactggtaagaattggccc

SEQ ID NO: 737230 - DNA, 25 bp, Homo sapien
agggtgacaactggtaagaattggc

SEQ ID NO: 737231 - DNA, 25 bp, Homo sapien
tgcacttgtcagcagggtgacaact

SEQ ID NO: 737232 - DNA, 25 bp, Homo sapien
tgacaactggtaagaattggcccag

SEQ ID NO: 737233 - DNA, 25 bp, Homo sapien
tcaaggtatacgctgaggtgaagca

SEQ ID NO: 737234 - DNA, 25 bp, Homo sapien
gaagcctccttagcaggcaccagct

SEQ ID NO: 737235 - DNA, 25 bp, Homo sapien
agctctaagtcaaaggctcggcacc

SEQ ID NO: 737236 - DNA, 25 bp, Homo sapien
agcagcttttctgtgggaagcctcc

SEQ ID NO: 737237 - DNA, 25 bp, Homo sapien
gagacattgttcagtggacacagga

SEQ ID NO: 737238 - DNA, 25 bp, Homo sapien
gaacaatgagacattgttcagtgga

SEQ ID NO: 737239 - DNA, 25 bp, Homo sapien
aacaatgagacattgttcagtggac

SEQ ID NO: 737240 - DNA, 25 bp, Homo sapien
tgaacaatgagacattgttcagtgg

SEQ ID NO: 737241 - DNA, 25 bp, Homo sapien
tatttgtagatgcccagtgctagga

SEQ ID NO: 737242 - DNA, 25 bp, Homo sapien
tttgtagatgcccagtgctaggagg

SEQ ID NO: 737243 - DNA, 25 bp, Homo sapien
gcccttgacctcacgctcatccaat

SEQ ID NO: 737244 - DNA, 25 bp, Homo sapien
tgcccttgacctcacgctcatccaa

SEQ ID NO: 737245 - DNA, 25 bp, Homo sapien
gattccgcttaaatccatccagtgt

SEQ ID NO: 737246 - DNA, 25 bp, Homo sapien
tcaccgataactaccacagaggaaa

SEQ ID NO: 737247 - DNA, 25 bp, Homo sapien
gcagcccctccgattccgcttaaat

SEQ ID NO: 737248 - DNA, 25 bp, Homo sapien
tgaagattctctggttcaccgataa

SEQ ID NO: 737249 - DNA, 25 bp, Homo sapien
gcttacgctggggaccacaaggcga

SEQ ID NO: 737250 - DNA, 25 bp, Homo sapien
ggcatgctggtgggcttacgctggg

SEQ ID NO: 737251 - DNA, 25 bp, Homo sapien
ggaccacaaggcgacagtccccgta

SEQ ID NO: 737252 - DNA, 25 bp, Homo sapien
gcgacagtccccgtatctctgctat

SEQ ID NO: 737253 - DNA, 25 bp, Homo sapien
agctgaatggtctgttttcacagcc

SEQ ID NO: 737254 - DNA, 25 bp, Homo sapien
tcccaagctgaatggtctgttttca

SEQ ID NO: 737255 - DNA, 25 bp, Homo sapien
ccaagctgaatggtctgttttcaca

SEQ ID NO: 737256 - DNA, 25 bp, Homo sapien
caagctgaatggtctgttttcacag

SEQ ID NO: 737257 - DNA, 25 bp, Homo sapien
agcaggctagccctgggcaataact

SEQ ID NO: 737258 - DNA, 25 bp, Homo sapien
tgcaaatgactgaaacttgttgagt

SEQ ID NO: 737259 - DNA, 25 bp, Homo sapien
tagccctgggcaataactgggtcag

SEQ ID NO: 737260 - DNA, 25 bp, Homo sapien
ctgaaacttgttgagtaggaagcag

SEQ ID NO: 737261 - DNA, 25 bp, Homo sapien
aagagcactgaaagaccagagctga

SEQ ID NO: 737262 - DNA, 25 bp, Homo sapien
atgacacctcagattatccaagata

SEQ ID NO: 737263 - DNA, 25 bp, Homo sapien
agcactgaaagaccagagctgagag

SEQ ID NO: 737264 - DNA, 25 bp, Homo sapien
cctcagattatccaagatattttac

SEQ ID NO: 737265 - DNA, 25 bp, Homo sapien
gaaaatgtcggaagcactcggtaaa

SEQ ID NO: 737266 - DNA, 25 bp, Homo sapien
tgttgcccatcatctgttacagtgc

SEQ ID NO: 737267 - DNA, 25 bp, Homo sapien
tccttagctgacgaagagagtggcg

SEQ ID NO: 737268 - DNA, 25 bp, Homo sapien
ggtatttggcttgaggcttcccctc

SEQ ID NO: 737269 - DNA, 25 bp, Homo sapien
atttctaatgagatattggactttg

SEQ ID NO: 737270 - DNA, 25 bp, Homo sapien
catttctaatgagatattggacttt

SEQ ID NO: 737271 - DNA, 25 bp, Homo sapien
ttctaatgagatattggactttgct

SEQ ID NO: 737272 - DNA, 25 bp, Homo sapien
tttctaatgagatattggactttgc

SEQ ID NO: 737273 - DNA, 25 bp, Homo sapien
gccttgataataagccctgtttaga

SEQ ID NO: 737274 - DNA, 25 bp, Homo sapien
cacagggcatttaaattaaacagga

SEQ ID NO: 737275 - DNA, 25 bp, Homo sapien
ggccacagggcatttaaattaaaca

SEQ ID NO: 737276 - DNA, 25 bp, Homo sapien
ttttatgccttgataataagccctg

SEQ ID NO: 737277 - DNA, 25 bp, Homo sapien
gctgaatgcttagtgtgctcggcac

SEQ ID NO: 737278 - DNA, 25 bp, Homo sapien
tgctgaatgcttagtgtgctcggca

SEQ ID NO: 737279 - DNA, 25 bp, Homo sapien
ttgctgaatgcttagtgtgctcggc

SEQ ID NO: 737280 - DNA, 25 bp, Homo sapien
atttgctgaatgcttagtgtgctcg

SEQ ID NO: 737281 - DNA, 25 bp, Homo sapien
caagcagttcttcatcattttctcc

SEQ ID NO: 737282 - DNA, 25 bp, Homo sapien
ccaagcagttcttcatcattttctc

SEQ ID NO: 737283 - DNA, 25 bp, Homo sapien
ctctccaaccaagcagttcttcatc

SEQ ID NO: 737284 - DNA, 25 bp, Homo sapien
tccaaccaagcagttcttcatcatt

SEQ ID NO: 737285 - DNA, 25 bp, Homo sapien
tgttctcagcacccccctgccccac

SEQ ID NO: 737286 - DNA, 25 bp, Homo sapien
tgcgggactctcctgttctcagcac

SEQ ID NO: 737287 - DNA, 25 bp, Homo sapien
tcctgttctcagcacccccctgccc

SEQ ID NO: 737288 - DNA, 25 bp, Homo sapien
ctgcgggactctcctgttctcagca

SEQ ID NO: 737289 - DNA, 25 bp, Homo sapien
cttttaagccaacacttggcttctg

SEQ ID NO: 737290 - DNA, 25 bp, Homo sapien
gctgagttatgtcttttaagccaac

SEQ ID NO: 737291 - DNA, 25 bp, Homo sapien
ggctgctgagttatgtcttttaagc

SEQ ID NO: 737292 - DNA, 25 bp, Homo sapien
gagctaagcttctgactggctttgt

SEQ ID NO: 737293 - DNA, 25 bp, Homo sapien
ctcagattcggcagactcagcaggg

SEQ ID NO: 737294 - DNA, 25 bp, Homo sapien
actgaggctcagattcggcagactc

SEQ ID NO: 737295 - DNA, 25 bp, Homo sapien
gctgttgggcatgcagccattcctg

SEQ ID NO: 737296 - DNA, 25 bp, Homo sapien
gtatgacaggagcacactcgtccca

SEQ ID NO: 737297 - DNA, 25 bp, Homo sapien
tccataggaatggtaaggctgcaca

SEQ ID NO: 737298 - DNA, 25 bp, Homo sapien
tctcctgtgtttggaggtgacattc

SEQ ID NO: 737299 - DNA, 25 bp, Homo sapien
ctcctgtgtttggaggtgacattcc

SEQ ID NO: 737300 - DNA, 25 bp, Homo sapien
ctgcttctgtccataggaatggtaa

SEQ ID NO: 737301 - DNA, 25 bp, Homo sapien
catgtggattgctctaaatatccat

SEQ ID NO: 737302 - DNA, 25 bp, Homo sapien
ctctaaatatccattgctgcagggc

SEQ ID NO: 737303 - DNA, 25 bp, Homo sapien
cagccatcagtactgtgcatgtgga

SEQ ID NO: 737304 - DNA, 25 bp, Homo sapien
ataagagaccggcagactcccctgg

SEQ ID NO: 737305 - DNA, 25 bp, Homo sapien
tcagatccagatagctggggttgct

SEQ ID NO: 737306 - DNA, 25 bp, Homo sapien
catatccacttcagatccagatagc

SEQ ID NO: 737307 - DNA, 25 bp, Homo sapien
ctgagcatatccacttcagatccag

SEQ ID NO: 737308 - DNA, 25 bp, Homo sapien
gagcatatccacttcagatccagat

SEQ ID NO: 737309 - DNA, 25 bp, Homo sapien
gagacaaagccttcgctgagcaggc

SEQ ID NO: 737310 - DNA, 25 bp, Homo sapien
ggtcaggcagggtaatgacagccct

SEQ ID NO: 737311 - DNA, 25 bp, Homo sapien
ccacgacagtgtttgagcggaggct

SEQ ID NO: 737312 - DNA, 25 bp, Homo sapien
tgacagccctccatagtcattgtgg

SEQ ID NO: 737313 - DNA, 25 bp, Homo sapien
tgagaggagataggaatgtgggtag

SEQ ID NO: 737314 - DNA, 25 bp, Homo sapien
aagcatttaatctgcgtaaatgaga

SEQ ID NO: 737315 - DNA, 25 bp, Homo sapien
taggaatgtgggtagaagtatctgt

SEQ ID NO: 737316 - DNA, 25 bp, Homo sapien
tttaatctgcgtaaatgagaggaga

SEQ ID NO: 737317 - DNA, 25 bp, Homo sapien
tatgccagtacattggagatggaca

SEQ ID NO: 737318 - DNA, 25 bp, Homo sapien
agtccgaatgcaatccccttgaagg

SEQ ID NO: 737319 - DNA, 25 bp, Homo sapien
ttcagagtccaaagtaaggagcact

SEQ ID NO: 737320 - DNA, 25 bp, Homo sapien
aaggagcactttgcttggctcacag

SEQ ID NO: 737321 - DNA, 25 bp, Homo sapien
tattttaccatggaccaaattgtgt

SEQ ID NO: 737322 - DNA, 25 bp, Homo sapien
tacattacgtttgttaattgcccca

SEQ ID NO: 737323 - DNA, 25 bp, Homo sapien
cctctgttggtgagtcaatgatttc

SEQ ID NO: 737324 - DNA, 25 bp, Homo sapien
aattgtgttccctctgttggtgagt

SEQ ID NO: 737325 - DNA, 25 bp, Homo sapien
tgcaatcagccccaaggaagaggaa

SEQ ID NO: 737326 - DNA, 25 bp, Homo sapien
tattttcattcacgaggagcatctc

SEQ ID NO: 737327 - DNA, 25 bp, Homo sapien
cctgggcacatcatgggatgcaatc

SEQ ID NO: 737328 - DNA, 25 bp, Homo sapien
taaatgtagctggagaaatgcacag

SEQ ID NO: 737329 - DNA, 25 bp, Homo sapien
gaagcatgattgaatacctcactga

SEQ ID NO: 737330 - DNA, 25 bp, Homo sapien
catttgtgttagctcctgcccttga

SEQ ID NO: 737331 - DNA, 25 bp, Homo sapien
cccagattagagatgtgtgatgcac

SEQ ID NO: 737332 - DNA, 25 bp, Homo sapien
tctaaacggaggtagcaagtgcaca

SEQ ID NO: 737333 - DNA, 25 bp, Homo sapien
gtaaatacagttaacctcacgtaga

SEQ ID NO: 737334 - DNA, 25 bp, Homo sapien
cacactctttcaggtatctggcatt

SEQ ID NO: 737335 - DNA, 25 bp, Homo sapien
taacctcacgtagacatattttcag

SEQ ID NO: 737336 - DNA, 25 bp, Homo sapien
aatttttcacactctttcaggtatc

SEQ ID NO: 737337 - DNA, 25 bp, Homo sapien
tagagacactaattccaactttgga

SEQ ID NO: 737338 - DNA, 25 bp, Homo sapien
ggaattacgtatccaccctgtctga

SEQ ID NO: 737339 - DNA, 25 bp, Homo sapien
gacaccatcatccagctatttggag

SEQ ID NO: 737340 - DNA, 25 bp, Homo sapien
tgtctgatgttattcactgccaccc

SEQ ID NO: 737341 - DNA, 25 bp, Homo sapien
aatataccacaatcattaatagctg

SEQ ID NO: 737342 - DNA, 25 bp, Homo sapien
aaatataccacaatcattaatagct

SEQ ID NO: 737343 - DNA, 25 bp, Homo sapien
taaatataccacaatcattaatagc

SEQ ID NO: 737344 - DNA, 25 bp, Homo sapien
agcatttagagttgtataaacaata

SEQ ID NO: 737345 - DNA, 25 bp, Homo sapien
tataaacaatataataccagtgtcc

SEQ ID NO: 737346 - DNA, 25 bp, Homo sapien
acaatataataccagtgtccattct

SEQ ID NO: 737347 - DNA, 25 bp, Homo sapien
taataccagtgtccattctttaaaa

SEQ ID NO: 737348 - DNA, 25 bp, Homo sapien
ttttcagagctgttaacatgtattt

SEQ ID NO: 737349 - DNA, 25 bp, Homo sapien
tttcagagctgttaacatgtattta

SEQ ID NO: 737350 - DNA, 25 bp, Homo sapien
gaaaaagaataagggcatggagtaa

SEQ ID NO: 737351 - DNA, 25 bp, Homo sapien
agaaaaagaataagggcatggagta

SEQ ID NO: 737352 - DNA, 25 bp, Homo sapien
ggaaaatgcttacctagacatatgc

SEQ ID NO: 737353 - DNA, 25 bp, Homo sapien
tgtggtatgtgaagagtatgaactc

SEQ ID NO: 737354 - DNA, 25 bp, Homo sapien
tcagacatgatcagcgtttctcaaa

SEQ ID NO: 737355 - DNA, 25 bp, Homo sapien
tccacagtgcctagcgtatagcatg

SEQ ID NO: 737356 - DNA, 25 bp, Homo sapien
gaattacgtcctctgaaagcctata

SEQ ID NO: 737357 - DNA, 25 bp, Homo sapien
gatcacgtgtcctggtgctaggtcc

SEQ ID NO: 737358 - DNA, 25 bp, Homo sapien
ttgactcagcactcgcttacgccgg

SEQ ID NO: 737359 - DNA, 25 bp, Homo sapien
catccacgccatggacctgggaaag

SEQ ID NO: 737360 - DNA, 25 bp, Homo sapien
ccttgctggctagcagatgatgaac

SEQ ID NO: 737361 - DNA, 25 bp, Homo sapien
gcttttgactcagcacttatgccga

SEQ ID NO: 737362 - DNA, 25 bp, Homo sapien
cgggctcagtccctgtaacctgtac

SEQ ID NO: 737363 - DNA, 25 bp, Homo sapien
tgaagacaacgagtggtagagccca

SEQ ID NO: 737364 - DNA, 25 bp, Homo sapien
gactgtcttagatctgccagtagag

SEQ ID NO: 737365 - DNA, 25 bp, Homo sapien
taccacagtgcgatacaatgctaaa

SEQ ID NO: 737366 - DNA, 25 bp, Homo sapien
tccaagagtctctaaccgatcagaa

SEQ ID NO: 737367 - DNA, 25 bp, Homo sapien
tcaggtacctgagtcaacagactgt

SEQ ID NO: 737368 - DNA, 25 bp, Homo sapien
ggaaagagtcactatatccattttt

SEQ ID NO: 737369 - DNA, 25 bp, Homo sapien
tggggactgccctaaaacgatcgtc

SEQ ID NO: 737370 - DNA, 25 bp, Homo sapien
tctccaaaagagtgattgtcctgtc

SEQ ID NO: 737371 - DNA, 25 bp, Homo sapien
aaagagtgattgtcctgtcaccatc

SEQ ID NO: 737372 - DNA, 25 bp, Homo sapien
caaaagagtgattgtcctgtcacca

SEQ ID NO: 737373 - DNA, 25 bp, Homo sapien
tggaagtagagagattcttcagaga

SEQ ID NO: 737374 - DNA, 25 bp, Homo sapien
ttcttcagagacaggagctcagaac

SEQ ID NO: 737375 - DNA, 25 bp, Homo sapien
aatggaagtagagagattcttcaga

SEQ ID NO: 737376 - DNA, 25 bp, Homo sapien
cttcagagacaggagctcagaacag

SEQ ID NO: 737377 - DNA, 25 bp, Homo sapien
gaaattgctagcattgattgaaggc

SEQ ID NO: 737378 - DNA, 25 bp, Homo sapien
tcaaggtctcacaattattcagtaa

SEQ ID NO: 737379 - DNA, 25 bp, Homo sapien
gattgaaggcttatatgtcaagcac

SEQ ID NO: 737380 - DNA, 25 bp, Homo sapien
gagaaaaggacaccatgaggttaag

SEQ ID NO: 737381 - DNA, 25 bp, Homo sapien
tcagtctgcaatgtcgctgcccgag

SEQ ID NO: 737382 - DNA, 25 bp, Homo sapien
ccaaatggtccatctggacctggct

SEQ ID NO: 737383 - DNA, 25 bp, Homo sapien
cattcttgcccaaatggtccatctg

SEQ ID NO: 737384 - DNA, 25 bp, Homo sapien
gctgcccgagggtctacattcttgc

SEQ ID NO: 737385 - DNA, 25 bp, Homo sapien
gacaagatcatggagatttactcct

SEQ ID NO: 737386 - DNA, 25 bp, Homo sapien
ctttacgtaagacaagatcatggag

SEQ ID NO: 737387 - DNA, 25 bp, Homo sapien
tggtttgccttgaaacctttgtcaa

SEQ ID NO: 737388 - DNA, 25 bp, Homo sapien
tcaattgaccaaatatatgttgagt

SEQ ID NO: 737389 - DNA, 25 bp, Homo sapien
gataaatggccagtgtcctacctct

SEQ ID NO: 737390 - DNA, 25 bp, Homo sapien
tcagacagtacttttcttaagccag

SEQ ID NO: 737391 - DNA, 25 bp, Homo sapien
tcaaatgccttacatagcagtgaga

SEQ ID NO: 737392 - DNA, 25 bp, Homo sapien
taatgggaagccagtcagtctcaca

SEQ ID NO: 737393 - DNA, 25 bp, Homo sapien
tacgtatgtacttaatagtgcctgc

SEQ ID NO: 737394 - DNA, 25 bp, Homo sapien
tgataagtgaaattcccaaggcaac

SEQ ID NO: 737395 - DNA, 25 bp, Homo sapien
caacagagtaggaatcctgagagag

SEQ ID NO: 737396 - DNA, 25 bp, Homo sapien
gcttcataaataaggccagtcctgt

SEQ ID NO: 737397 - DNA, 25 bp, Homo sapien
tggttaactgtcaccactccacaga

SEQ ID NO: 737398 - DNA, 25 bp, Homo sapien
gaatctgggcattggtaaacttaca

SEQ ID NO: 737399 - DNA, 25 bp, Homo sapien
taatccagatgacagagctcctttg

SEQ ID NO: 737400 - DNA, 25 bp, Homo sapien
gacatgtcacattttgggcctggca

SEQ ID NO: 737401 - DNA, 25 bp, Homo sapien
gacagagggcaaatggcttttacgg

SEQ ID NO: 737402 - DNA, 25 bp, Homo sapien
tgaatgatgtatgaccgtaaaatgg

SEQ ID NO: 737403 - DNA, 25 bp, Homo sapien
tacggctatgaatgatgtatgaccg

SEQ ID NO: 737404 - DNA, 25 bp, Homo sapien
catgcctgctgatttaacggacacc

SEQ ID NO: 737405 - DNA, 25 bp, Homo sapien
tcagcgggtcttgagtatccatcat

SEQ ID NO: 737406 - DNA, 25 bp, Homo sapien
ctgctcagcactaacagccatgatg

SEQ ID NO: 737407 - DNA, 25 bp, Homo sapien
cagactttggcgacgggaaacttca

SEQ ID NO: 737408 - DNA, 25 bp, Homo sapien
gagttaaatggaagtacaatgcagt

SEQ ID NO: 737409 - DNA, 25 bp, Homo sapien
gaaacctcagggattgtctggctca

SEQ ID NO: 737410 - DNA, 25 bp, Homo sapien
cctagagaggtgaaatggcttgccc

SEQ ID NO: 737411 - DNA, 25 bp, Homo sapien
acagctcgagctaaggttcaggcca

SEQ ID NO: 737412 - DNA, 25 bp, Homo sapien
cagctgactccagtactgtgtgcca

SEQ ID NO: 737413 - DNA, 25 bp, Homo sapien
ctggatacattggagcctgaacacg

SEQ ID NO: 737414 - DNA, 25 bp, Homo sapien
tacattggagcctgaacacgggaac

SEQ ID NO: 737415 - DNA, 25 bp, Homo sapien
cattggagcctgaacacgggaacag

SEQ ID NO: 737416 - DNA, 25 bp, Homo sapien
cttcatgcatatgattcctagtcat

SEQ ID NO: 737417 - DNA, 25 bp, Homo sapien
aatatgagggctccgatcagtggcc

SEQ ID NO: 737418 - DNA, 25 bp, Homo sapien
tcagagagggtcagtactccacgtc

SEQ ID NO: 737419 - DNA, 25 bp, Homo sapien
caactggtcatggagggtaccctgc

SEQ ID NO: 737420 - DNA, 25 bp, Homo sapien
catgcacttaaacaggaacccaggt

SEQ ID NO: 737421 - DNA, 25 bp, Homo sapien
tagttttattggatccaatgcacta

SEQ ID NO: 737422 - DNA, 25 bp, Homo sapien
caatgcactaccactaaaacaaata

SEQ ID NO: 737423 - DNA, 25 bp, Homo sapien
gatccaatgcactaccactaaaaca

SEQ ID NO: 737424 - DNA, 25 bp, Homo sapien
tattggatccaatgcactaccacta

SEQ ID NO: 737425 - DNA, 25 bp, Homo sapien
ttacagctacacaatgcagtcgtgg

SEQ ID NO: 737426 - DNA, 25 bp, Homo sapien
tacacaatgcagtcgtggcacttgg

SEQ ID NO: 737427 - DNA, 25 bp, Homo sapien
caatgcagtcgtggcacttggcaga

SEQ ID NO: 737428 - DNA, 25 bp, Homo sapien
cagctacacaatgcagtcgtggcac

SEQ ID NO: 737429 - DNA, 25 bp, Homo sapien
acctatgcaaaggagtatctgtggc

SEQ ID NO: 737430 - DNA, 25 bp, Homo sapien
cagggcacctatgcaaaggagtatc

SEQ ID NO: 737431 - DNA, 25 bp, Homo sapien
taacaccggcttttgggtcagggca

SEQ ID NO: 737432 - DNA, 25 bp, Homo sapien
ttgggtcagggcacctatgcaaagg

SEQ ID NO: 737433 - DNA, 25 bp, Homo sapien
tttctttaatcgagagacagtcacg

SEQ ID NO: 737434 - DNA, 25 bp, Homo sapien
gacagtcacgtagggatagcagcca

SEQ ID NO: 737435 - DNA, 25 bp, Homo sapien
cacgtagggatagcagccaatattg

SEQ ID NO: 737436 - DNA, 25 bp, Homo sapien
taatcgagagacagtcacgtaggga

SEQ ID NO: 737437 - DNA, 25 bp, Homo sapien
ttatttctcatcaaggctaaatgaa

SEQ ID NO: 737438 - DNA, 25 bp, Homo sapien
tgcatttatttctcatcaaggctaa

SEQ ID NO: 737439 - DNA, 25 bp, Homo sapien
aactgggtagaggagtcagatcaag

SEQ ID NO: 737440 - DNA, 25 bp, Homo sapien
ctaaatgaaactgggtagaggagtc

SEQ ID NO: 737441 - DNA, 25 bp, Homo sapien
agctgggtgatagctgcgagcccct

SEQ ID NO: 737442 - DNA, 25 bp, Homo sapien
aaaggatgaatacgaaagagggaca

SEQ ID NO: 737443 - DNA, 25 bp, Homo sapien
gtcacaaagcagcttgcagctagca

SEQ ID NO: 737444 - DNA, 25 bp, Homo sapien
tgcagctagcaagcacggctgaaat

SEQ ID NO: 737445 - DNA, 25 bp, Homo sapien
acactgatccttctcctatcagcaa

SEQ ID NO: 737446 - DNA, 25 bp, Homo sapien
gaattgtcatatgagatattagccc

SEQ ID NO: 737447 - DNA, 25 bp, Homo sapien
tcatatgagatattagcccagggaa

SEQ ID NO: 737448 - DNA, 25 bp, Homo sapien
ttagcccagggaataacactgatcc

SEQ ID NO: 737449 - DNA, 25 bp, Homo sapien
cacaatgccgtcttcatcctctcca

SEQ ID NO: 737450 - DNA, 25 bp, Homo sapien
ttcaagttcttgaatggcagcaact

SEQ ID NO: 737451 - DNA, 25 bp, Homo sapien
cagaggtccattggcgcctagcagt

SEQ ID NO: 737452 - DNA, 25 bp, Homo sapien
tttctcccaatcttcacaatgccgt

SEQ ID NO: 737453 - DNA, 25 bp, Homo sapien
tcgcggctccggatagccgacaagt

SEQ ID NO: 737454 - DNA, 25 bp, Homo sapien
tgccgcaagcgttcacactgtgaat

SEQ ID NO: 737455 - DNA, 25 bp, Homo sapien
aagtgttcgtccatctgccgcaagc

SEQ ID NO: 737456 - DNA, 25 bp, Homo sapien
aaataaatctgactctctcgcggct

SEQ ID NO: 737457 - DNA, 25 bp, Homo sapien
cacactataaaatagttggagatct

SEQ ID NO: 737458 - DNA, 25 bp, Homo sapien
cacacactataaaatagttggagat

SEQ ID NO: 737459 - DNA, 25 bp, Homo sapien
tataaaatagttggagatctcttac

SEQ ID NO: 737460 - DNA, 25 bp, Homo sapien
cactataaaatagttggagatctct

SEQ ID NO: 737461 - DNA, 25 bp, Homo sapien
aagcctgcactcctttgtcctcatt

SEQ ID NO: 737462 - DNA, 25 bp, Homo sapien
taagcctgcactcctttgtcctcat

SEQ ID NO: 737463 - DNA, 25 bp, Homo sapien
ctaagcctgcactcctttgtcctca

SEQ ID NO: 737464 - DNA, 25 bp, Homo sapien
tggaattaaccaggcctgcacatgg

SEQ ID NO: 737465 - DNA, 25 bp, Homo sapien
ctcctccgcaggatataaactgctg

SEQ ID NO: 737466 - DNA, 25 bp, Homo sapien
cacttagaggaaggccgtcagatcc

SEQ ID NO: 737467 - DNA, 25 bp, Homo sapien
tgctgaagtagaccccagagtgcag

SEQ ID NO: 737468 - DNA, 25 bp, Homo sapien
aagaaactcgcagctcaatttggag

SEQ ID NO: 737469 - DNA, 25 bp, Homo sapien
ggaggctgctgtcaatggcaccgaa

SEQ ID NO: 737470 - DNA, 25 bp, Homo sapien
gaactgaggagagcttccgatgcaa

SEQ ID NO: 737471 - DNA, 25 bp, Homo sapien
ctctaaaattaggatggcggccaga

SEQ ID NO: 737472 - DNA, 25 bp, Homo sapien
taaaaggagaatggacattgccctg

SEQ ID NO: 737473 - DNA, 25 bp, Homo sapien
acacacacggaggaacacatgcttt

SEQ ID NO: 737474 - DNA, 25 bp, Homo sapien
agcctggagtccgagaaaagaaagg

SEQ ID NO: 737475 - DNA, 25 bp, Homo sapien
tgcaaataagcagtcatgagcctgg

SEQ ID NO: 737476 - DNA, 25 bp, Homo sapien
taacaatgctgaagaagttaaactc

SEQ ID NO: 737477 - DNA, 25 bp, Homo sapien
gaaactgaggtcaccggggacctca

SEQ ID NO: 737478 - DNA, 25 bp, Homo sapien
tcaccggggacctcataacaatgct

SEQ ID NO: 737479 - DNA, 25 bp, Homo sapien
tgaagtcctggatgacgcggagagg

SEQ ID NO: 737480 - DNA, 25 bp, Homo sapien
tagatgaagtcttacgtgtagctca

SEQ ID NO: 737481 - DNA, 25 bp, Homo sapien
caaggtagatgaagtcttacgtgta

SEQ ID NO: 737482 - DNA, 25 bp, Homo sapien
cattgccctgtgcaaggtagatgaa

SEQ ID NO: 737483 - DNA, 25 bp, Homo sapien
tctccattgccctgtgcaaggtaga

SEQ ID NO: 737484 - DNA, 25 bp, Homo sapien
taagctccggatgttggtcaccatg

SEQ ID NO: 737485 - DNA, 25 bp, Homo sapien
tatcagtgatagctacagcaggctg

SEQ ID NO: 737486 - DNA, 25 bp, Homo sapien
tataccaagagtgaagcaaactgcc

SEQ ID NO: 737487 - DNA, 25 bp, Homo sapien
gaagaatcttagctcccctgcaaag

SEQ ID NO: 737488 - DNA, 25 bp, Homo sapien
agtctccatgcaccaagggtcagct

SEQ ID NO: 737489 - DNA, 25 bp, Homo sapien
tcaagcccgtcacctagagagaaag

SEQ ID NO: 737490 - DNA, 25 bp, Homo sapien
tcctcagtgtgcaggtcaagccaca

SEQ ID NO: 737491 - DNA, 25 bp, Homo sapien
tgggcccaaaatcctccgtggagca

SEQ ID NO: 737492 - DNA, 25 bp, Homo sapien
catggcagttactgattgcagatac

SEQ ID NO: 737493 - DNA, 25 bp, Homo sapien
taggttgtaagatgacctccaacgg

SEQ ID NO: 737494 - DNA, 25 bp, Homo sapien
tcttggtatgctgcgaatagtaact

SEQ ID NO: 737495 - DNA, 25 bp, Homo sapien
taacaaatacttgcatggcagttac

SEQ ID NO: 737496 - DNA, 25 bp, Homo sapien
ggttgtctcatgagctcctcaaccc

SEQ ID NO: 737497 - DNA, 25 bp, Homo sapien
ctggttgtctcatgagctcctcaac

SEQ ID NO: 737498 - DNA, 25 bp, Homo sapien
tggttgtctcatgagctcctcaacc

SEQ ID NO: 737499 - DNA, 25 bp, Homo sapien
aaacagctctcaagatctctgcatg

SEQ ID NO: 737500 - DNA, 25 bp, Homo sapien
tgcaatatcagcacccatgggtcct

SEQ ID NO: 737501 - DNA, 25 bp, Homo sapien
tttctccactgatcaaagacccagc

SEQ ID NO: 737502 - DNA, 25 bp, Homo sapien
aatacaggcactgatgttccaggtg

SEQ ID NO: 737503 - DNA, 25 bp, Homo sapien
tgtctaggttgttgtatcaatcatt

SEQ ID NO: 737504 - DNA, 25 bp, Homo sapien
cccattgaagggcatctggttgttt

SEQ ID NO: 737505 - DNA, 25 bp, Homo sapien
ctccctgaagatttgtctaggttgt

SEQ ID NO: 737506 - DNA, 25 bp, Homo sapien
tgtttccatattgggtattgccaat

SEQ ID NO: 737507 - DNA, 25 bp, Homo sapien
caggcagtacagagagcatggtgct

SEQ ID NO: 737508 - DNA, 25 bp, Homo sapien
aaacttacagtcatgacaggcgaga

SEQ ID NO: 737509 - DNA, 25 bp, Homo sapien
aacttacagtcatgacaggcgagaa

SEQ ID NO: 737510 - DNA, 25 bp, Homo sapien
agttctgcaggcagtacagagagca

SEQ ID NO: 737511 - DNA, 25 bp, Homo sapien
agacacacatctgggtcaatccccg

SEQ ID NO: 737512 - DNA, 25 bp, Homo sapien
ggtcaatccccggatgcagacacac

SEQ ID NO: 737513 - DNA, 25 bp, Homo sapien
tcaatccccggatgcagacacacat

SEQ ID NO: 737514 - DNA, 25 bp, Homo sapien
acatctgggtcaatccccggatgca

SEQ ID NO: 737515 - DNA, 25 bp, Homo sapien
atgagagcaaagtcaaattgacttg

SEQ ID NO: 737516 - DNA, 25 bp, Homo sapien
aatccagagtagcaataatgagagc

SEQ ID NO: 737517 - DNA, 25 bp, Homo sapien
tcaaattgacttgggtctagagggc

SEQ ID NO: 737518 - DNA, 25 bp, Homo sapien
gaggaccacctcaaacacataagca

SEQ ID NO: 737519 - DNA, 25 bp, Homo sapien
tgacatttcgtggtttaacataaag

SEQ ID NO: 737520 - DNA, 25 bp, Homo sapien
gacatttcgtggtttaacataaaga

SEQ ID NO: 737521 - DNA, 25 bp, Homo sapien
cattgacatttcgtggtttaacata

SEQ ID NO: 737522 - DNA, 25 bp, Homo sapien
tctcattgacatttcgtggtttaac

SEQ ID NO: 737523 - DNA, 25 bp, Homo sapien
gagttctcattcatctcaccagctc

SEQ ID NO: 737524 - DNA, 25 bp, Homo sapien
cctagacacatgacatcattgaaca

SEQ ID NO: 737525 - DNA, 25 bp, Homo sapien
tccatccctccctgagttctcattc

SEQ ID NO: 737526 - DNA, 25 bp, Homo sapien
tcaccagctcctcctagacacatga

SEQ ID NO: 737527 - DNA, 25 bp, Homo sapien
gttctctcattgaaatgccttccat

SEQ ID NO: 737528 - DNA, 25 bp, Homo sapien
ctttttcaacgcagttctctcattg

SEQ ID NO: 737529 - DNA, 25 bp, Homo sapien
catggccttgatgacagtgggtttt

SEQ ID NO: 737530 - DNA, 25 bp, Homo sapien
accccagcccctgaagcttataagg

SEQ ID NO: 737531 - DNA, 25 bp, Homo sapien
tgttcagcaccatcttttgttatct

SEQ ID NO: 737532 - DNA, 25 bp, Homo sapien
tttttgcatctcagtgtattccccg

SEQ ID NO: 737533 - DNA, 25 bp, Homo sapien
catcctctctaggagactgttcagc

SEQ ID NO: 737534 - DNA, 25 bp, Homo sapien
tgtattccccgcaatgtttcagcat

SEQ ID NO: 737535 - DNA, 25 bp, Homo sapien
actttgaattcccatccaaagtcat

SEQ ID NO: 737536 - DNA, 25 bp, Homo sapien
tcagactttgaattcccatccaaag

SEQ ID NO: 737537 - DNA, 25 bp, Homo sapien
agactttgaattcccatccaaagtc

SEQ ID NO: 737538 - DNA, 25 bp, Homo sapien
tttgaattcccatccaaagtcattc

SEQ ID NO: 737539 - DNA, 25 bp, Homo sapien
tctctaggaggaactgtaggaccct

SEQ ID NO: 737540 - DNA, 25 bp, Homo sapien
aaaagttacactgttccagctggga

SEQ ID NO: 737541 - DNA, 25 bp, Homo sapien
agtgcaattcccacattggtgcaag

SEQ ID NO: 737542 - DNA, 25 bp, Homo sapien
gtaggaccctccaacacatcaatga

SEQ ID NO: 737543 - DNA, 25 bp, Homo sapien
cagttttctatggactcagccatgt

SEQ ID NO: 737544 - DNA, 25 bp, Homo sapien
ttgctgggtgttgtcagtagcaaag

SEQ ID NO: 737545 - DNA, 25 bp, Homo sapien
gctgttactgctgtcacaattacca

SEQ ID NO: 737546 - DNA, 25 bp, Homo sapien
cagtagcaaagcagggtatttcaca

SEQ ID NO: 737547 - DNA, 25 bp, Homo sapien
tgtttgctgtgctacaaccctgcgg

SEQ ID NO: 737548 - DNA, 25 bp, Homo sapien
aaccctgcggatagatggttctgcc

SEQ ID NO: 737549 - DNA, 25 bp, Homo sapien
gcaggacagcctattatcaccgtac

SEQ ID NO: 737550 - DNA, 25 bp, Homo sapien
cataagccatgtaacagcaggacag

SEQ ID NO: 737551 - DNA, 25 bp, Homo sapien
tcagtcccacttatgatgcggggct

SEQ ID NO: 737552 - DNA, 25 bp, Homo sapien
ttcaggggcaccacggacatgctcc

SEQ ID NO: 737553 - DNA, 25 bp, Homo sapien
ggcttcaggggcaccacggacatgc

SEQ ID NO: 737554 - DNA, 25 bp, Homo sapien
gggcaccacggacatgctccgcatt

SEQ ID NO: 737555 - DNA, 25 bp, Homo sapien
tagttactgcctagcatgcagcgaa

SEQ ID NO: 737556 - DNA, 25 bp, Homo sapien
gagctctaagtaccaagttattgtt

SEQ ID NO: 737557 - DNA, 25 bp, Homo sapien
ctttaagctcgggtgacgtcctcgg

SEQ ID NO: 737558 - DNA, 25 bp, Homo sapien
ccctgccctgctgtgtaaaagatgt

SEQ ID NO: 737559 - DNA, 25 bp, Homo sapien
cctgactcaggggtccactctgcag

SEQ ID NO: 737560 - DNA, 25 bp, Homo sapien
agcacctgctctggtaagcttttcc

SEQ ID NO: 737561 - DNA, 25 bp, Homo sapien
tgcagccaggtcatccctctcacag

SEQ ID NO: 737562 - DNA, 25 bp, Homo sapien
gcttctaggtcctgtctatgccaca

SEQ ID NO: 737563 - DNA, 25 bp, Homo sapien
cacctgcaagctttgggcaggcacc

SEQ ID NO: 737564 - DNA, 25 bp, Homo sapien
ctgggtaacctcaataggttctgaa

SEQ ID NO: 737565 - DNA, 25 bp, Homo sapien
catccccggcatttgcaggacaagg

SEQ ID NO: 737566 - DNA, 25 bp, Homo sapien
catgcatggcccaccagatgaggta

SEQ ID NO: 737567 - DNA, 25 bp, Homo sapien
cagcccctggttcttagcgtgatag

SEQ ID NO: 737568 - DNA, 25 bp, Homo sapien
cagctgagaatgtgtgtctcacccc

SEQ ID NO: 737569 - DNA, 25 bp, Homo sapien
tcaggtggcccctgatgcagcacca

SEQ ID NO: 737570 - DNA, 25 bp, Homo sapien
aacggccgccttccagagagagtga

SEQ ID NO: 737571 - DNA, 25 bp, Homo sapien
atgcagtccagggacgtcttccagg

SEQ ID NO: 737572 - DNA, 25 bp, Homo sapien
gccacagcccgcttagaaagtcatg

SEQ ID NO: 737573 - DNA, 25 bp, Homo sapien
tcaaatgacttctgcgccaaacaca

SEQ ID NO: 737574 - DNA, 25 bp, Homo sapien
ttcatggtgcagcatagatgaaaaa

SEQ ID NO: 737575 - DNA, 25 bp, Homo sapien
tgaggctggcttcacgttcaaatga

SEQ ID NO: 737576 - DNA, 25 bp, Homo sapien
atccatttttcatggtgcagcatag

SEQ ID NO: 737577 - DNA, 25 bp, Homo sapien
ggtgctgaatatagagccaggcact

SEQ ID NO: 737578 - DNA, 25 bp, Homo sapien
tggtgctgaatatagagccaggcac

SEQ ID NO: 737579 - DNA, 25 bp, Homo sapien
aagacttgcaaagcaagaacagcag

SEQ ID NO: 737580 - DNA, 25 bp, Homo sapien
ttgctccagagtagaaaagacttgc

SEQ ID NO: 737581 - DNA, 25 bp, Homo sapien
gacttgcaaagcaagaacagcagtg

SEQ ID NO: 737582 - DNA, 25 bp, Homo sapien
ctccagagtagaaaagacttgcaaa

SEQ ID NO: 737583 - DNA, 25 bp, Homo sapien
agccttttcactcatcacattgcaa

SEQ ID NO: 737584 - DNA, 25 bp, Homo sapien
gccttttcactcatcacattgcaag

SEQ ID NO: 737585 - DNA, 25 bp, Homo sapien
agaagcgcatccactctcctcgcac

SEQ ID NO: 737586 - DNA, 25 bp, Homo sapien
ctgaagaagcgcatccactctcctc

SEQ ID NO: 737587 - DNA, 25 bp, Homo sapien
cttgtcttttatgcacctggctttg

SEQ ID NO: 737588 - DNA, 25 bp, Homo sapien
ccccagctcagttcgcttgtctttt

SEQ ID NO: 737589 - DNA, 25 bp, Homo sapien
ccttgatttacaaagactgctccac

SEQ ID NO: 737590 - DNA, 25 bp, Homo sapien
tccttgatttacaaagactgctcca

SEQ ID NO: 737591 - DNA, 25 bp, Homo sapien
ttgatggcccagatagaaaacatta

SEQ ID NO: 737592 - DNA, 25 bp, Homo sapien
tgttgtttccagtgaccttacatcc

SEQ ID NO: 737593 - DNA, 25 bp, Homo sapien
gaccttacatccaaaatcagtagcg

SEQ ID NO: 737594 - DNA, 25 bp, Homo sapien
atcagtagcgtgtgacatttgatgg

SEQ ID NO: 737595 - DNA, 25 bp, Homo sapien
cagatttcccaaggcccgaaacagt

SEQ ID NO: 737596 - DNA, 25 bp, Homo sapien
ctgctgtgcctccagggcggaaaga

SEQ ID NO: 737597 - DNA, 25 bp, Homo sapien
gatagagaaattcagcacagagcct

SEQ ID NO: 737598 - DNA, 25 bp, Homo sapien
acagagcctgtcctggtgtcgtaca

SEQ ID NO: 737599 - DNA, 25 bp, Homo sapien
catgggtaattaatccatgacacac

SEQ ID NO: 737600 - DNA, 25 bp, Homo sapien
tcatgggtaattaatccatgacaca

SEQ ID NO: 737601 - DNA, 25 bp, Homo sapien
tcttgagagctcactgaccatggga

SEQ ID NO: 737602 - DNA, 25 bp, Homo sapien
agagttcttctgagagtagaacccc

SEQ ID NO: 737603 - DNA, 25 bp, Homo sapien
gaccatgggatgtaagggagactca

SEQ ID NO: 737604 - DNA, 25 bp, Homo sapien
gaagaggctgtgtccaagtgaatga

SEQ ID NO: 737605 - DNA, 25 bp, Homo sapien
gctgcacttgacagcaaggagacca

SEQ ID NO: 737606 - DNA, 25 bp, Homo sapien
gcaaggagaccaggtaacgccagga

SEQ ID NO: 737607 - DNA, 25 bp, Homo sapien
cacttgacagcaaggagaccaggta

SEQ ID NO: 737608 - DNA, 25 bp, Homo sapien
tgacagcaaggagaccaggtaacgc

SEQ ID NO: 737609 - DNA, 25 bp, Homo sapien
cttgcattgcacactcccggtggag

SEQ ID NO: 737610 - DNA, 25 bp, Homo sapien
gatccttgctttctcgggtccacct

SEQ ID NO: 737611 - DNA, 25 bp, Homo sapien
ggcctttgaatcctcccagccatag

SEQ ID NO: 737612 - DNA, 25 bp, Homo sapien
tctggccacataagcgctccttctt

SEQ ID NO: 737613 - DNA, 25 bp, Homo sapien
gagactgaagcccatggcaacctct

SEQ ID NO: 737614 - DNA, 25 bp, Homo sapien
ggtcgttcctctgaggagactgaag

SEQ ID NO: 737615 - DNA, 25 bp, Homo sapien
aaacaaccgcctggtcgttcctctg

SEQ ID NO: 737616 - DNA, 25 bp, Homo sapien
ctgggagtctaagggcgcctgtgtc

SEQ ID NO: 737617 - DNA, 25 bp, Homo sapien
ccgactaagataggggagcggtctt

SEQ ID NO: 737618 - DNA, 25 bp, Homo sapien
aagacactcagagccgactaagata

SEQ ID NO: 737619 - DNA, 25 bp, Homo sapien
acactcagagccgactaagataggg

SEQ ID NO: 737620 - DNA, 25 bp, Homo sapien
ctaagataggggagcggtcttgttt

SEQ ID NO: 737621 - DNA, 25 bp, Homo sapien
caacatgatgctcggtaggaagtga

SEQ ID NO: 737622 - DNA, 25 bp, Homo sapien
gaacatgtctctgggaacggccgta

SEQ ID NO: 737623 - DNA, 25 bp, Homo sapien
atttgcaaaacggtggtgccaaggt

SEQ ID NO: 737624 - DNA, 25 bp, Homo sapien
agcagcacgggaacatgtctctggg

SEQ ID NO: 737625 - DNA, 25 bp, Homo sapien
tttggagttaggatgggtctgtctg

SEQ ID NO: 737626 - DNA, 25 bp, Homo sapien
gagtttcatgttgcaccccacagag

SEQ ID NO: 737627 - DNA, 25 bp, Homo sapien
gtctgtcctccacgtagggagttag

SEQ ID NO: 737628 - DNA, 25 bp, Homo sapien
cgtagggagttagagcgagtttcat

SEQ ID NO: 737629 - DNA, 25 bp, Homo sapien
agaccagcgtcgtccattcttgcac

SEQ ID NO: 737630 - DNA, 25 bp, Homo sapien
attggaagaccagcgtcgtccattc

SEQ ID NO: 737631 - DNA, 25 bp, Homo sapien
gcaaattggaagaccagcgtcgtcc

SEQ ID NO: 737632 - DNA, 25 bp, Homo sapien
tccagcaaattggaagaccagcgtc

SEQ ID NO: 737633 - DNA, 25 bp, Homo sapien
gaacatgaatgtggccactctgctt

SEQ ID NO: 737634 - DNA, 25 bp, Homo sapien
aacatgaatgtggccactctgcttc

SEQ ID NO: 737635 - DNA, 25 bp, Homo sapien
gagaacatgaatgtggccactctgc

SEQ ID NO: 737636 - DNA, 25 bp, Homo sapien
gggagaacatgaatgtggccactct

SEQ ID NO: 737637 - DNA, 25 bp, Homo sapien
gacttttctccaagcgtgcagggtt

SEQ ID NO: 737638 - DNA, 25 bp, Homo sapien
gcgtctgtgcgttcagaacccctga

SEQ ID NO: 737639 - DNA, 25 bp, Homo sapien
gaacccctgagtctgtagacacggg

SEQ ID NO: 737640 - DNA, 25 bp, Homo sapien
aggtcctatctcaagccctggctgg

SEQ ID NO: 737641 - DNA, 25 bp, Homo sapien
gatgtcactcgtggcttctcggaga

SEQ ID NO: 737642 - DNA, 25 bp, Homo sapien
agtacttcgtgtaggcttggaatcg

SEQ ID NO: 737643 - DNA, 25 bp, Homo sapien
cagaaagctcttgcccgaataggac

SEQ ID NO: 737644 - DNA, 25 bp, Homo sapien
gaaaatatttgacaggtttggcaga

SEQ ID NO: 737645 - DNA, 25 bp, Homo sapien
cgggatagagcagaaattgcactgg

SEQ ID NO: 737646 - DNA, 25 bp, Homo sapien
aggtcagcgggatagagcagaaatt

SEQ ID NO: 737647 - DNA, 25 bp, Homo sapien
ctcaacaatgaggtcagcgggatag

SEQ ID NO: 737648 - DNA, 25 bp, Homo sapien
acaatgaggtcagcgggatagagca

SEQ ID NO: 737649 - DNA, 25 bp, Homo sapien
aaaacacttcctttgcgacgtggca

SEQ ID NO: 737650 - DNA, 25 bp, Homo sapien
aaacacttcctttgcgacgtggcag

SEQ ID NO: 737651 - DNA, 25 bp, Homo sapien
gaaaacacttcctttgcgacgtggc

SEQ ID NO: 737652 - DNA, 25 bp, Homo sapien
gcttttgatagatggccgacctggg

SEQ ID NO: 737653 - DNA, 25 bp, Homo sapien
ctatgctccaaggtggtagccctgg

SEQ ID NO: 737654 - DNA, 25 bp, Homo sapien
gaggtaacacactagactgcttcgg

SEQ ID NO: 737655 - DNA, 25 bp, Homo sapien
ggaatgacatttgcggctcccttgc

SEQ ID NO: 737656 - DNA, 25 bp, Homo sapien
gcttgcaggtagccgccttgtctct

SEQ ID NO: 737657 - DNA, 25 bp, Homo sapien
ggcttgcaggtagccgccttgtctc

SEQ ID NO: 737658 - DNA, 25 bp, Homo sapien
taggcagggttggcttccccgaggc

SEQ ID NO: 737659 - DNA, 25 bp, Homo sapien
ccactgggcagcccgtgtgcctgct

SEQ ID NO: 737660 - DNA, 25 bp, Homo sapien
tggatgggtctgtagacggccctca

SEQ ID NO: 737661 - DNA, 25 bp, Homo sapien
gctgtggatgggtctgtagacggcc

SEQ ID NO: 737662 - DNA, 25 bp, Homo sapien
tgggtctgtagacggccctcaaaag

SEQ ID NO: 737663 - DNA, 25 bp, Homo sapien
taattgaactgtatcctagctcatg

SEQ ID NO: 737664 - DNA, 25 bp, Homo sapien
tttcatcataggaataattgaactg

SEQ ID NO: 737665 - DNA, 25 bp, Homo sapien
gatttatacccatttcactcagatt

SEQ ID NO: 737666 - DNA, 25 bp, Homo sapien
tatcctagctcatgatttataccca

SEQ ID NO: 737667 - DNA, 25 bp, Homo sapien
gaatgaatacgcaacatgtgacatg

SEQ ID NO: 737668 - DNA, 25 bp, Homo sapien
gatgaatgaatacgcaacatgtgac

SEQ ID NO: 737669 - DNA, 25 bp, Homo sapien
acccaccgatgaatgaatacgcaac

SEQ ID NO: 737670 - DNA, 25 bp, Homo sapien
caccgatgaatgaatacgcaacatg

SEQ ID NO: 737671 - DNA, 25 bp, Homo sapien
taaaagcaggatagcacatgtccat

SEQ ID NO: 737672 - DNA, 25 bp, Homo sapien
tggaggcacggacaaccatgtggaa

SEQ ID NO: 737673 - DNA, 25 bp, Homo sapien
tggcctttacggagacatcactgga

SEQ ID NO: 737674 - DNA, 25 bp, Homo sapien
tgaagacgcataggagaaggcacgt

SEQ ID NO: 737675 - DNA, 25 bp, Homo sapien
ggacacaaagggtaccatccagcag

SEQ ID NO: 737676 - DNA, 25 bp, Homo sapien
tcagatgaattcctcttccgtcttg

SEQ ID NO: 737677 - DNA, 25 bp, Homo sapien
tgccactgccattggtagcagcaaa

SEQ ID NO: 737678 - DNA, 25 bp, Homo sapien
gcagcaaagtttcttggacagaatt

SEQ ID NO: 737679 - DNA, 25 bp, Homo sapien
gatgaattcctcttccgtcttgcca

SEQ ID NO: 737680 - DNA, 25 bp, Homo sapien
ggagcgcacagaagtaataagtatg

SEQ ID NO: 737681 - DNA, 25 bp, Homo sapien
tattctataaaagatggagcgcaca

SEQ ID NO: 737682 - DNA, 25 bp, Homo sapien
actgtcacatccagcggcagggtta

SEQ ID NO: 737683 - DNA, 25 bp, Homo sapien
tgtcgggacagtaattttccatctc

SEQ ID NO: 737684 - DNA, 25 bp, Homo sapien
tggttacttggccataatatctttt

SEQ ID NO: 737685 - DNA, 25 bp, Homo sapien
gacgatttgttacagttatgtggtt

SEQ ID NO: 737686 - DNA, 25 bp, Homo sapien
gaggaggacgatttgttacagttat

SEQ ID NO: 737687 - DNA, 25 bp, Homo sapien
gaggacgatttgttacagttatgtg

SEQ ID NO: 737688 - DNA, 25 bp, Homo sapien
gagagtcccacatgcggagaaagct

SEQ ID NO: 737689 - DNA, 25 bp, Homo sapien
gatgccactcataatgaggccgaga

SEQ ID NO: 737690 - DNA, 25 bp, Homo sapien
gcatggtgaatgctttcttcaaggt

SEQ ID NO: 737691 - DNA, 25 bp, Homo sapien
tcaaggattccagcctggtatagac

SEQ ID NO: 737692 - DNA, 25 bp, Homo sapien
tgtgtcccacatattgctgcaagct

SEQ ID NO: 737693 - DNA, 25 bp, Homo sapien
ggctatcagctacaaatgggaggtc

SEQ ID NO: 737694 - DNA, 25 bp, Homo sapien
ccctaatgaattcctgggtgagcca

SEQ ID NO: 737695 - DNA, 25 bp, Homo sapien
gatgatttgacatccgcggctgtcg

SEQ ID NO: 737696 - DNA, 25 bp, Homo sapien
aaatgtgctcctgctaattcaagaa

SEQ ID NO: 737697 - DNA, 25 bp, Homo sapien
aatgtgctcctgctaattcaagaaa

SEQ ID NO: 737698 - DNA, 25 bp, Homo sapien
cagccccacacatcaagatgagaat

SEQ ID NO: 737699 - DNA, 25 bp, Homo sapien
cattaatgctaatggcatttatgtc

SEQ ID NO: 737700 - DNA, 25 bp, Homo sapien
gcatttatgtctgtacagccccaca

SEQ ID NO: 737701 - DNA, 25 bp, Homo sapien
gccccacacatcaagatgagaatat

SEQ ID NO: 737702 - DNA, 25 bp, Homo sapien
tctttggcacacgtgcttgtctatc

SEQ ID NO: 737703 - DNA, 25 bp, Homo sapien
agatccctgacctctttggcacacg

SEQ ID NO: 737704 - DNA, 25 bp, Homo sapien
ggcccaaagcatccaagatccctga

SEQ ID NO: 737705 - DNA, 25 bp, Homo sapien
cgtgcttgtctatcgtgaagacccc

SEQ ID NO: 737706 - DNA, 25 bp, Homo sapien
gggctaccgctgttgttgattacaa

SEQ ID NO: 737707 - DNA, 25 bp, Homo sapien
tgttgttgattacaagacatttgct

SEQ ID NO: 737708 - DNA, 25 bp, Homo sapien
gttgttggtttttgctggcatcgtg

SEQ ID NO: 737709 - DNA, 25 bp, Homo sapien
cagttggggctaccgctgttgttga

SEQ ID NO: 737710 - DNA, 25 bp, Homo sapien
gaggacttggagtggttactgtaca

SEQ ID NO: 737711 - DNA, 25 bp, Homo sapien
ccaaattcagtgtaggactcctatc

SEQ ID NO: 737712 - DNA, 25 bp, Homo sapien
aatcagtatattgagaagcctccgc

SEQ ID NO: 737713 - DNA, 25 bp, Homo sapien
gcaatcactttatggcacttgtggg

SEQ ID NO: 737714 - DNA, 25 bp, Homo sapien
tctgtaaatcagcagtaaattgcgg

SEQ ID NO: 737715 - DNA, 25 bp, Homo sapien
tgtaaatcagcagtaaattgcggca

SEQ ID NO: 737716 - DNA, 25 bp, Homo sapien
tgcggcatttacactgagcaaaggc

SEQ ID NO: 737717 - DNA, 25 bp, Homo sapien
gtaaattgcggcatttacactgagc

SEQ ID NO: 737718 - DNA, 25 bp, Homo sapien
tttttgcactggggccggagacaca

SEQ ID NO: 737719 - DNA, 25 bp, Homo sapien
gcagccgtggggttcatagactcat

SEQ ID NO: 737720 - DNA, 25 bp, Homo sapien
tgggagtataggtgcttgcttttgt

SEQ ID NO: 737721 - DNA, 25 bp, Homo sapien
gactcataatctgggagtataggtg

SEQ ID NO: 737722 - DNA, 25 bp, Homo sapien
aaacacttagatggtgctttaaggc

SEQ ID NO: 737723 - DNA, 25 bp, Homo sapien
tgcgaaggctgtggaagattcccct

SEQ ID NO: 737724 - DNA, 25 bp, Homo sapien
ggagttccaacttgtgccttaagtg

SEQ ID NO: 737725 - DNA, 25 bp, Homo sapien
gttgttaatgataccccagtcctcc

SEQ ID NO: 737726 - DNA, 25 bp, Homo sapien
cagaattatgatatcacgtcgaaca

SEQ ID NO: 737727 - DNA, 25 bp, Homo sapien
cctatatgctctgctaggagaagaa

SEQ ID NO: 737728 - DNA, 25 bp, Homo sapien
cgtcgaacataattgtggaataagc

SEQ ID NO: 737729 - DNA, 25 bp, Homo sapien
tattgaattctaatgaggtctggcc

SEQ ID NO: 737730 - DNA, 25 bp, Homo sapien
ttatgtgttggtgtttttgttttca

SEQ ID NO: 737731 - DNA, 25 bp, Homo sapien
aaattgtatttttatgtgttggtgt

SEQ ID NO: 737732 - DNA, 25 bp, Homo sapien
aaagggcataaattgtatttttatg

SEQ ID NO: 737733 - DNA, 25 bp, Homo sapien
gcataaattgtatttttatgtgttg

SEQ ID NO: 737734 - DNA, 25 bp, Homo sapien
caacatggcttgttagaaaatatgc

SEQ ID NO: 737735 - DNA, 25 bp, Homo sapien
cttaaaactggagtgacaggacaaa

SEQ ID NO: 737736 - DNA, 25 bp, Homo sapien
tgtatacaaaccagggagagttttc

SEQ ID NO: 737737 - DNA, 25 bp, Homo sapien
gagagttttctttacacccttgaca

SEQ ID NO: 737738 - DNA, 25 bp, Homo sapien
tgagagggtctgctttaccattacc

SEQ ID NO: 737739 - DNA, 25 bp, Homo sapien
tttacagttaatccaggagagggag

SEQ ID NO: 737740 - DNA, 25 bp, Homo sapien
gcaaaagccgttgtttcccatgaca

SEQ ID NO: 737741 - DNA, 25 bp, Homo sapien
ccaacagttccaagccagatagtct

SEQ ID NO: 737742 - DNA, 25 bp, Homo sapien
tacctatgagataccaatgtagcct

SEQ ID NO: 737743 - DNA, 25 bp, Homo sapien
cagaggagagtgtagaaatcccagt

SEQ ID NO: 737744 - DNA, 25 bp, Homo sapien
taaaaaggcataaccaagcactctc

SEQ ID NO: 737745 - DNA, 25 bp, Homo sapien
gagttatactctgtgctgcctgagc

SEQ ID NO: 737746 - DNA, 25 bp, Homo sapien
gatgggcctggcaacattttctact

SEQ ID NO: 737747 - DNA, 25 bp, Homo sapien
caacagaagtgcgtaccagaagtat

SEQ ID NO: 737748 - DNA, 25 bp, Homo sapien
atatcctggtgcgatgatgggcctg

SEQ ID NO: 737749 - DNA, 25 bp, Homo sapien
caagtgtggtaatgttcacctgcag

SEQ ID NO: 737750 - DNA, 25 bp, Homo sapien
cagagctctcatacgggacacaaaa

SEQ ID NO: 737751 - DNA, 25 bp, Homo sapien
caaacctgcgcttttgaggctgtcg

SEQ ID NO: 737752 - DNA, 25 bp, Homo sapien
taagctagaggagattgctgccctt

SEQ ID NO: 737753 - DNA, 25 bp, Homo sapien
cattacttccctgagactaaggcta

SEQ ID NO: 737754 - DNA, 25 bp, Homo sapien
tagtaagccgtaaatgcccattttg

SEQ ID NO: 737755 - DNA, 25 bp, Homo sapien
gaacatcgcataccttgagttggtg

SEQ ID NO: 737756 - DNA, 25 bp, Homo sapien
gcagtgtcagctaaatggtgccatt

SEQ ID NO: 737757 - DNA, 25 bp, Homo sapien
catagctagacagatttgcaatccc

SEQ ID NO: 737758 - DNA, 25 bp, Homo sapien
cctgaattactttagtgaggctgac

SEQ ID NO: 737759 - DNA, 25 bp, Homo sapien
gggccttcctagaacagaatcacag

SEQ ID NO: 737760 - DNA, 25 bp, Homo sapien
aaagccaaacgaagcactttccagg

SEQ ID NO: 737761 - DNA, 25 bp, Homo sapien
ggcaacagccaggttaagcagggcc

SEQ ID NO: 737762 - DNA, 25 bp, Homo sapien
caaagttaggtctttctttgatgga

SEQ ID NO: 737763 - DNA, 25 bp, Homo sapien
tctgctgagtgagcttttcaaggta

SEQ ID NO: 737764 - DNA, 25 bp, Homo sapien
tatttatcatactcccttttgtccc

SEQ ID NO: 737765 - DNA, 25 bp, Homo sapien
tcttttgctatattatgtctttggt

SEQ ID NO: 737766 - DNA, 25 bp, Homo sapien
caggttctcctatgcccaaactggc

SEQ ID NO: 737767 - DNA, 25 bp, Homo sapien
ctatgcccaaactggcatgcaccat

SEQ ID NO: 737768 - DNA, 25 bp, Homo sapien
cagtatctcaatgggctgagcagca

SEQ ID NO: 737769 - DNA, 25 bp, Homo sapien
gcagcaggttctcctatgcccaaac

SEQ ID NO: 737770 - DNA, 25 bp, Homo sapien
tggagatgcgagtatctcttcttgc

SEQ ID NO: 737771 - DNA, 25 bp, Homo sapien
gtgagtggagatgcgagtatctctt

SEQ ID NO: 737772 - DNA, 25 bp, Homo sapien
gctgtattaagctatactccccaaa

SEQ ID NO: 737773 - DNA, 25 bp, Homo sapien
tgcgagtatctcttcttgccctcct

SEQ ID NO: 737774 - DNA, 25 bp, Homo sapien
catgcctggcctcgcctataatatt

SEQ ID NO: 737775 - DNA, 25 bp, Homo sapien
aagcgaattagagccagttgtcttg

SEQ ID NO: 737776 - DNA, 25 bp, Homo sapien
taatattgccctagtattgctgtct

SEQ ID NO: 737777 - DNA, 25 bp, Homo sapien
tcagcttccttcagtaaagcgaatt

SEQ ID NO: 737778 - DNA, 25 bp, Homo sapien
ttgggaaaactgcctagtcatatgc

SEQ ID NO: 737779 - DNA, 25 bp, Homo sapien
ggtgttgggaaaactgcctagtcat

SEQ ID NO: 737780 - DNA, 25 bp, Homo sapien
tgttgggaaaactgcctagtcatat

SEQ ID NO: 737781 - DNA, 25 bp, Homo sapien
tcatatgcagaaaactgaaaccgga

SEQ ID NO: 737782 - DNA, 25 bp, Homo sapien
ctggccagtgtgcaagcggtagtac

SEQ ID NO: 737783 - DNA, 25 bp, Homo sapien
ggcatgcagtcttgtaaagggcttt

SEQ ID NO: 737784 - DNA, 25 bp, Homo sapien
ctgctctgacactggtaatatatca

SEQ ID NO: 737785 - DNA, 25 bp, Homo sapien
ggccatcagctggtaggcatgcagt

SEQ ID NO: 737786 - DNA, 25 bp, Homo sapien
ccaagccagcggcattgctgagctg

SEQ ID NO: 737787 - DNA, 25 bp, Homo sapien
ttgcacaacccatagtcctttactg

SEQ ID NO: 737788 - DNA, 25 bp, Homo sapien
tcaggaagggttcagccagcggtca

SEQ ID NO: 737789 - DNA, 25 bp, Homo sapien
tcaagactgtttctaagtttgtggc

SEQ ID NO: 737790 - DNA, 25 bp, Homo sapien
tgatcaatttcttgtagcctgagct

SEQ ID NO: 737791 - DNA, 25 bp, Homo sapien
cctgtttgatcaatttcttgtagcc

SEQ ID NO: 737792 - DNA, 25 bp, Homo sapien
tttcttgtagcctgagctgtagcat

SEQ ID NO: 737793 - DNA, 25 bp, Homo sapien
caatttcttgtagcctgagctgtag

SEQ ID NO: 737794 - DNA, 25 bp, Homo sapien
ctttcgaatcacagagagttcagtg

SEQ ID NO: 737795 - DNA, 25 bp, Homo sapien
tttttctttcgaatcacagagagtt

SEQ ID NO: 737796 - DNA, 25 bp, Homo sapien
tcgaatcacagagagttcagtgacc

SEQ ID NO: 737797 - DNA, 25 bp, Homo sapien
gaatcacagagagttcagtgacctt

SEQ ID NO: 737798 - DNA, 25 bp, Homo sapien
cctacaacttctttgcggcgcttgg

SEQ ID NO: 737799 - DNA, 25 bp, Homo sapien
tctttgcgttgcgagatcaggatcg

SEQ ID NO: 737800 - DNA, 25 bp, Homo sapien
accggcacgtctaggagtctcctgt

SEQ ID NO: 737801 - DNA, 25 bp, Homo sapien
tcaggatcggtgtgttgctcagaca

SEQ ID NO: 737802 - DNA, 25 bp, Homo sapien
ctctgccccagacccggctctccat

SEQ ID NO: 737803 - DNA, 25 bp, Homo sapien
tgccccagacccggctctccatgct

SEQ ID NO: 737804 - DNA, 25 bp, Homo sapien
tctgccccagacccggctctccatg

SEQ ID NO: 737805 - DNA, 25 bp, Homo sapien
ccccagacccggctctccatgctca

SEQ ID NO: 737806 - DNA, 25 bp, Homo sapien
tgggactgactgttacgcagaaggc

SEQ ID NO: 737807 - DNA, 25 bp, Homo sapien
cgcagaaggcgtaatcgcaaaactt

SEQ ID NO: 737808 - DNA, 25 bp, Homo sapien
aaaatggctgtaaggcgctccggac

SEQ ID NO: 737809 - DNA, 25 bp, Homo sapien
aacgatcagcagttgtgatggcacc

SEQ ID NO: 737810 - DNA, 25 bp, Homo sapien
tgtcaccccaaggatacgaattagg

SEQ ID NO: 737811 - DNA, 25 bp, Homo sapien
ccgttcaatcggacaaagaaggcca

SEQ ID NO: 737812 - DNA, 25 bp, Homo sapien
gacgactggcggaagacgagacttc

SEQ ID NO: 737813 - DNA, 25 bp, Homo sapien
aaggacggtgcttagaacttcccag

SEQ ID NO: 737814 - DNA, 25 bp, Homo sapien
tgcactcgattaggcgttggcttaa

SEQ ID NO: 737815 - DNA, 25 bp, Homo sapien
caagagccctagcttttggtctgtc

SEQ ID NO: 737816 - DNA, 25 bp, Homo sapien
tatagggttggtagagcagtcagaa

SEQ ID NO: 737817 - DNA, 25 bp, Homo sapien
cgtttctttaccagcaataagcctc

SEQ ID NO: 737818 - DNA, 25 bp, Homo sapien
tgtgctttaatgtattatgacttag

SEQ ID NO: 737819 - DNA, 25 bp, Homo sapien
tttgtagtctaataaaccttcctgc

SEQ ID NO: 737820 - DNA, 25 bp, Homo sapien
ttcctgctgcagatggcacgttcat

SEQ ID NO: 737821 - DNA, 25 bp, Homo sapien
gcatacgtagctttccctccaacat

SEQ ID NO: 737822 - DNA, 25 bp, Homo sapien
ggctggagccaccttattccccttg

SEQ ID NO: 737823 - DNA, 25 bp, Homo sapien
gctggagccaccttattccccttgg

SEQ ID NO: 737824 - DNA, 25 bp, Homo sapien
caggggctggagccaccttattccc

SEQ ID NO: 737825 - DNA, 25 bp, Homo sapien
cagcaggggctggagccaccttatt

SEQ ID NO: 737826 - DNA, 25 bp, Homo sapien
tgatatagtgggaccatttcttgaa

SEQ ID NO: 737827 - DNA, 25 bp, Homo sapien
acctgatatagtgggaccatttctt

SEQ ID NO: 737828 - DNA, 25 bp, Homo sapien
catttcttgaagcaagtgaggtctc

SEQ ID NO: 737829 - DNA, 25 bp, Homo sapien
ctgatatagtgggaccatttcttga

SEQ ID NO: 737830 - DNA, 25 bp, Homo sapien
caggtaggaagacaagcttgatggg

SEQ ID NO: 737831 - DNA, 25 bp, Homo sapien
aggcaggtaggaagacaagcttgat

SEQ ID NO: 737832 - DNA, 25 bp, Homo sapien
cacaaggcaggtaggaagacaagct

SEQ ID NO: 737833 - DNA, 25 bp, Homo sapien
caaggcaggtaggaagacaagcttg

SEQ ID NO: 737834 - DNA, 25 bp, Homo sapien
ggtgacagtgatccaggtcttcctg

SEQ ID NO: 737835 - DNA, 25 bp, Homo sapien
tgaaggtgacagtgatccaggtctt

SEQ ID NO: 737836 - DNA, 25 bp, Homo sapien
gtgaaggtgacagtgatccaggtct

SEQ ID NO: 737837 - DNA, 25 bp, Homo sapien
aaggtgacagtgatccaggtcttcc

SEQ ID NO: 737838 - DNA, 25 bp, Homo sapien
tctcatcgtatctgttgttgtagtt

SEQ ID NO: 737839 - DNA, 25 bp, Homo sapien
cttccactagcttagccaaagcttc

SEQ ID NO: 737840 - DNA, 25 bp, Homo sapien
cttttcaagcttggcaatgcgagcc

SEQ ID NO: 737841 - DNA, 25 bp, Homo sapien
actagcttagccaaagcttctttgt

SEQ ID NO: 737842 - DNA, 25 bp, Homo sapien
tctcctgcgtctttacacagtgctc

SEQ ID NO: 737843 - DNA, 25 bp, Homo sapien
acagtgctctgtctgacagcaagct

SEQ ID NO: 737844 - DNA, 25 bp, Homo sapien
tctgacagcaagctggataaatcat

SEQ ID NO: 737845 - DNA, 25 bp, Homo sapien
ttctctcctgcgtctttacacagtg

SEQ ID NO: 737846 - DNA, 25 bp, Homo sapien
tttcctggaaatgcttgttaaacac

SEQ ID NO: 737847 - DNA, 25 bp, Homo sapien
ctggaaatgcttgttaaacacactc

SEQ ID NO: 737848 - DNA, 25 bp, Homo sapien
tcttttcctggaaatgcttgttaaa

SEQ ID NO: 737849 - DNA, 25 bp, Homo sapien
ggaaatgcttgttaaacacactcat

SEQ ID NO: 737850 - DNA, 25 bp, Homo sapien
gacactgacatggatctgtggagag

SEQ ID NO: 737851 - DNA, 25 bp, Homo sapien
gaactgcctggaccagatttccaaa

SEQ ID NO: 737852 - DNA, 25 bp, Homo sapien
tctcggttcctcttaatgttgacac

SEQ ID NO: 737853 - DNA, 25 bp, Homo sapien
tcatgtcacgcacacaaatgcttcc

SEQ ID NO: 737854 - DNA, 25 bp, Homo sapien
atttagctgtgagagcataggaagc

SEQ ID NO: 737855 - DNA, 25 bp, Homo sapien
tgtttcccttgtgtcaggatctgag

SEQ ID NO: 737856 - DNA, 25 bp, Homo sapien
gtttcccttgtgtcaggatctgagt

SEQ ID NO: 737857 - DNA, 25 bp, Homo sapien
tctgagtgagctggtatttagctgt

SEQ ID NO: 737858 - DNA, 25 bp, Homo sapien
taatgctgacagcatacatcagcca

SEQ ID NO: 737859 - DNA, 25 bp, Homo sapien
cccggctggcctcgaataatgctga

SEQ ID NO: 737860 - DNA, 25 bp, Homo sapien
gtagcagttaatgcccggatactca

SEQ ID NO: 737861 - DNA, 25 bp, Homo sapien
ggccatgtagacattccccggctgg

SEQ ID NO: 737862 - DNA, 25 bp, Homo sapien
gcagggacttcctaatgacagtgct

SEQ ID NO: 737863 - DNA, 25 bp, Homo sapien
tgacagtgctgtctataacagtatc

SEQ ID NO: 737864 - DNA, 25 bp, Homo sapien
gagggttcgatctttgggctcacct

SEQ ID NO: 737865 - DNA, 25 bp, Homo sapien
tcatcaagcaagacattggcataaa

SEQ ID NO: 737866 - DNA, 25 bp, Homo sapien
gggctgtagctcaggatatgcactg

SEQ ID NO: 737867 - DNA, 25 bp, Homo sapien
gatgccttttgaaggggctgtagct

SEQ ID NO: 737868 - DNA, 25 bp, Homo sapien
accgagacaaactcttaatgctcct

SEQ ID NO: 737869 - DNA, 25 bp, Homo sapien
tccttgctcggcgttgaggctatgg

SEQ ID NO: 737870 - DNA, 25 bp, Homo sapien
ttggagtctctacctaaattctgta

SEQ ID NO: 737871 - DNA, 25 bp, Homo sapien
gttcagccacttggagtctctacct

SEQ ID NO: 737872 - DNA, 25 bp, Homo sapien
gaggatacacgacctataccagggc

SEQ ID NO: 737873 - DNA, 25 bp, Homo sapien
gcttttaataagacagtcctccaga

SEQ ID NO: 737874 - DNA, 25 bp, Homo sapien
tttccaattttgtgatcaaggaaca

SEQ ID NO: 737875 - DNA, 25 bp, Homo sapien
tctaaatacagagcattgtgggaag

SEQ ID NO: 737876 - DNA, 25 bp, Homo sapien
ttttgtgatcaaggaacaaggttcc

SEQ ID NO: 737877 - DNA, 25 bp, Homo sapien
gcattgtgggaaggttctatttctt

SEQ ID NO: 737878 - DNA, 25 bp, Homo sapien
catggatgccctctctcatcactcc

SEQ ID NO: 737879 - DNA, 25 bp, Homo sapien
tgtgcaaaaatcacaaacattcgta

SEQ ID NO: 737880 - DNA, 25 bp, Homo sapien
atgtgcaaaaatcacaaacattcgt

SEQ ID NO: 737881 - DNA, 25 bp, Homo sapien
agacatggatgccctctctcatcac

SEQ ID NO: 737882 - DNA, 25 bp, Homo sapien
gcacttcacttcctccatggtggcg

SEQ ID NO: 737883 - DNA, 25 bp, Homo sapien
tggatcttgcacttcacttcctcca

SEQ ID NO: 737884 - DNA, 25 bp, Homo sapien
acttcacttcctccatggtggcgat

SEQ ID NO: 737885 - DNA, 25 bp, Homo sapien
ttcacttcctccatggtggcgatcc

SEQ ID NO: 737886 - DNA, 25 bp, Homo sapien
cagcctccttgttcccggcccactt

SEQ ID NO: 737887 - DNA, 25 bp, Homo sapien
tgctggatcctacgattcaaggagg

SEQ ID NO: 737888 - DNA, 25 bp, Homo sapien
ctgctggatcctacgattcaaggag

SEQ ID NO: 737889 - DNA, 25 bp, Homo sapien
cctcagcctccttgttcccggccca

SEQ ID NO: 737890 - DNA, 25 bp, Homo sapien
tgagcatggtccagctcctcttcaa

SEQ ID NO: 737891 - DNA, 25 bp, Homo sapien
gagcatggtccagctcctcttcaaa

SEQ ID NO: 737892 - DNA, 25 bp, Homo sapien
ctgagcatggtccagctcctcttca

SEQ ID NO: 737893 - DNA, 25 bp, Homo sapien
agcatggtccagctcctcttcaaac

SEQ ID NO: 737894 - DNA, 25 bp, Homo sapien
cttttgcagggcagtggtcaggcgc

SEQ ID NO: 737895 - DNA, 25 bp, Homo sapien
tttgcagggcagtggtcaggcgctc

SEQ ID NO: 737896 - DNA, 25 bp, Homo sapien
tcatatctctttcactctcatcagc

SEQ ID NO: 737897 - DNA, 25 bp, Homo sapien
cttcatatctctttcactctcatca

SEQ ID NO: 737898 - DNA, 25 bp, Homo sapien
ctcggcaaggcctggttttcaataa

SEQ ID NO: 737899 - DNA, 25 bp, Homo sapien
gggcctcggcaaggcctggttttca

SEQ ID NO: 737900 - DNA, 25 bp, Homo sapien
gcctcggcaaggcctggttttcaat

SEQ ID NO: 737901 - DNA, 25 bp, Homo sapien
tcggcaaggcctggttttcaataac

SEQ ID NO: 737902 - DNA, 25 bp, Homo sapien
tctgatctgctcatctgtctcttgg

SEQ ID NO: 737903 - DNA, 25 bp, Homo sapien
catctgtctcttggcagcgggactc

SEQ ID NO: 737904 - DNA, 25 bp, Homo sapien
tgtctcttggcagcgggactctgcc

SEQ ID NO: 737905 - DNA, 25 bp, Homo sapien
tgctcatctgtctcttggcagcggg

SEQ ID NO: 737906 - DNA, 25 bp, Homo sapien
aatctctcagtaaactcagcacggg

SEQ ID NO: 737907 - DNA, 25 bp, Homo sapien
ccaatctctcagtaaactcagcacg

SEQ ID NO: 737908 - DNA, 25 bp, Homo sapien
gtttgtcagtgagaatcttgatctc

SEQ ID NO: 737909 - DNA, 25 bp, Homo sapien
tctgcctccttgagtttgtcagtga

SEQ ID NO: 737910 - DNA, 25 bp, Homo sapien
ttgtatataaggtattcaaggtttc

SEQ ID NO: 737911 - DNA, 25 bp, Homo sapien
tatataaggtattcaaggtttctcc

SEQ ID NO: 737912 - DNA, 25 bp, Homo sapien
aattttgtatataaggtattcaagg

SEQ ID NO: 737913 - DNA, 25 bp, Homo sapien
attttgtatataaggtattcaaggt

SEQ ID NO: 737914 - DNA, 25 bp, Homo sapien
tctgtacctgttaccaccagctgga

SEQ ID NO: 737915 - DNA, 25 bp, Homo sapien
ttctgtttcatgtggcaccagctgt

SEQ ID NO: 737916 - DNA, 25 bp, Homo sapien
tttccttacggcgaagcacagatct

SEQ ID NO: 737917 - DNA, 25 bp, Homo sapien
ttacggcgaagcacagatctttctg

SEQ ID NO: 737918 - DNA, 25 bp, Homo sapien
tcaagattcccctaagggaggacaa

SEQ ID NO: 737919 - DNA, 25 bp, Homo sapien
tgacagccttcaagattcccctaag

SEQ ID NO: 737920 - DNA, 25 bp, Homo sapien
aacattgacagccttcaagattccc

SEQ ID NO: 737921 - DNA, 25 bp, Homo sapien
actctctggttacagatggagggcg

SEQ ID NO: 737922 - DNA, 25 bp, Homo sapien
gaacattgctctgagacctatcagg

SEQ ID NO: 737923 - DNA, 25 bp, Homo sapien
cctgcacatgttggaatgttccgta

SEQ ID NO: 737924 - DNA, 25 bp, Homo sapien
ggaatgttccgtatagattttgtga

SEQ ID NO: 737925 - DNA, 25 bp, Homo sapien
tgacattcccagtccaccaagtgag

SEQ ID NO: 737926 - DNA, 25 bp, Homo sapien
tattttggtcatcgcagcagccgcg

SEQ ID NO: 737927 - DNA, 25 bp, Homo sapien
tggtcatcgcagcagccgcggaaac

SEQ ID NO: 737928 - DNA, 25 bp, Homo sapien
ctttattttggtcatcgcagcagcc

SEQ ID NO: 737929 - DNA, 25 bp, Homo sapien
tttggtcatcgcagcagccgcggaa

SEQ ID NO: 737930 - DNA, 25 bp, Homo sapien
tgagcctcgggcccatcgaatctac

SEQ ID NO: 737931 - DNA, 25 bp, Homo sapien
ctgagcctcgggcccatcgaatcta

SEQ ID NO: 737932 - DNA, 25 bp, Homo sapien
tttctcctttgttgacaaatttctg

SEQ ID NO: 737933 - DNA, 25 bp, Homo sapien
ctcctttgttgacaaatttctgaac

SEQ ID NO: 737934 - DNA, 25 bp, Homo sapien
tcctttgttgacaaatttctgaacc

SEQ ID NO: 737935 - DNA, 25 bp, Homo sapien
agggatagagacataggccagattt

SEQ ID NO: 737936 - DNA, 25 bp, Homo sapien
agagggatagagacataggccagat

SEQ ID NO: 737937 - DNA, 25 bp, Homo sapien
tagagggatagagacataggccaga

SEQ ID NO: 737938 - DNA, 25 bp, Homo sapien
gagggatagagacataggccagatt

SEQ ID NO: 737939 - DNA, 25 bp, Homo sapien
gcacttgtcgtaggcctcctggtac

SEQ ID NO: 737940 - DNA, 25 bp, Homo sapien
caggcacttgtcgtaggcctcctgg

SEQ ID NO: 737941 - DNA, 25 bp, Homo sapien
tcctccaggcacttgtcgtaggcct

SEQ ID NO: 737942 - DNA, 25 bp, Homo sapien
tccaggcacttgtcgtaggcctcct

SEQ ID NO: 737943 - DNA, 25 bp, Homo sapien
agtatgctggaactctgctgcagaa

SEQ ID NO: 737944 - DNA, 25 bp, Homo sapien
acaaagctagtgacagtatgctgga

SEQ ID NO: 737945 - DNA, 25 bp, Homo sapien
cacagtagcttcacaaagctagtga

SEQ ID NO: 737946 - DNA, 25 bp, Homo sapien
gacagtatgctggaactctgctgca

SEQ ID NO: 737947 - DNA, 25 bp, Homo sapien
gctcttccctggttcgcgctcagag

SEQ ID NO: 737948 - DNA, 25 bp, Homo sapien
tcttccctggttcgcgctcagagcc

SEQ ID NO: 737949 - DNA, 25 bp, Homo sapien
ttccctggttcgcgctcagagccca

SEQ ID NO: 737950 - DNA, 25 bp, Homo sapien
tccctggttcgcgctcagagcccat

SEQ ID NO: 737951 - DNA, 25 bp, Homo sapien
ggtccggggcgggaaaggagcagca

SEQ ID NO: 737952 - DNA, 25 bp, Homo sapien
gtccggggcgggaaaggagcagcat

SEQ ID NO: 737953 - DNA, 25 bp, Homo sapien
gcaggcttcgcgcctctggatggac

SEQ ID NO: 737954 - DNA, 25 bp, Homo sapien
caacgtcgccgttccgtttctcctg

SEQ ID NO: 737955 - DNA, 25 bp, Homo sapien
tggcctgcaggcttcgcgcctctgg

SEQ ID NO: 737956 - DNA, 25 bp, Homo sapien
gcctgcaggcttcgcgcctctggat

SEQ ID NO: 737957 - DNA, 25 bp, Homo sapien
ctaggctgcggcaactgcgagagga

SEQ ID NO: 737958 - DNA, 25 bp, Homo sapien
ggcaactgcgagaggagatgccgca

SEQ ID NO: 737959 - DNA, 25 bp, Homo sapien
cccggccggctaggctgcggcaact

SEQ ID NO: 737960 - DNA, 25 bp, Homo sapien
tgcggcaactgcgagaggagatgcc

SEQ ID NO: 737961 - DNA, 25 bp, Homo sapien
gccgcgggaactccggctctgctgg

SEQ ID NO: 737962 - DNA, 25 bp, Homo sapien
cgatcgagtcgctcgggcagcggcg

SEQ ID NO: 737963 - DNA, 25 bp, Homo sapien
ggaagaggtcggctcgggcgatcga

SEQ ID NO: 737964 - DNA, 25 bp, Homo sapien
tgcgcaggggtcagctgtccaaggc

SEQ ID NO: 737965 - DNA, 25 bp, Homo sapien
tcagcaacacggttctggcaaagta

SEQ ID NO: 737966 - DNA, 25 bp, Homo sapien
ccattctgaggaacagatggggtct

SEQ ID NO: 737967 - DNA, 25 bp, Homo sapien
cggttctggcaaagtatgcacggga

SEQ ID NO: 737968 - DNA, 25 bp, Homo sapien
tatgcacgggaattttcccattctg

SEQ ID NO: 737969 - DNA, 25 bp, Homo sapien
aaatgcatactaaatagggatttat

SEQ ID NO: 737970 - DNA, 25 bp, Homo sapien
ggtcaaagttcatgtaatcactgca

SEQ ID NO: 737971 - DNA, 25 bp, Homo sapien
ctgagcacgtctgtgaaaaatggtc

SEQ ID NO: 737972 - DNA, 25 bp, Homo sapien
tattaagctttcctgatggctgagc

SEQ ID NO: 737973 - DNA, 25 bp, Homo sapien
aatcggcctttgcagtcgccgcagc

SEQ ID NO: 737974 - DNA, 25 bp, Homo sapien
cggagcgccggggatttaaatgcca

SEQ ID NO: 737975 - DNA, 25 bp, Homo sapien
actgcgcgtcacctagacggcggag

SEQ ID NO: 737976 - DNA, 25 bp, Homo sapien
gcgcgcagaacgcagcttttgctct

SEQ ID NO: 737977 - DNA, 25 bp, Homo sapien
gagtgcaagctcgtgatcccaagaa

SEQ ID NO: 737978 - DNA, 25 bp, Homo sapien
gaaaatgtaccgacttgctcaggct

SEQ ID NO: 737979 - DNA, 25 bp, Homo sapien
aaaatccggcggtcgagtagctccg

SEQ ID NO: 737980 - DNA, 25 bp, Homo sapien
actatgttggagctgtggaccggcc

SEQ ID NO: 737981 - DNA, 25 bp, Homo sapien
aggctgcctttgtgtgctgttcccg

SEQ ID NO: 737982 - DNA, 25 bp, Homo sapien
taaaacaacagcttggctgagccgc

SEQ ID NO: 737983 - DNA, 25 bp, Homo sapien
caagagaaccgcttgtaggcgatca

SEQ ID NO: 737984 - DNA, 25 bp, Homo sapien
cccaaggcgttgaaagagaccagct

SEQ ID NO: 737985 - DNA, 25 bp, Homo sapien
tgagccgcggatgccatgaacagtt

SEQ ID NO: 737986 - DNA, 25 bp, Homo sapien
ggctcttaacagcaaaggcttggaa

SEQ ID NO: 737987 - DNA, 25 bp, Homo sapien
gctaaatctcagctgcggcggcgga

SEQ ID NO: 737988 - DNA, 25 bp, Homo sapien
tggaagttccaatgacaacgcgatg

SEQ ID NO: 737989 - DNA, 25 bp, Homo sapien
cgggttgatttaagaacctggctct

SEQ ID NO: 737990 - DNA, 25 bp, Homo sapien
taaattaacgcaggttctagagaga

SEQ ID NO: 737991 - DNA, 25 bp, Homo sapien
tgtgtttctacaccctaggttataa

SEQ ID NO: 737992 - DNA, 25 bp, Homo sapien
gatcgttaatgcttcgaagtcaggt

SEQ ID NO: 737993 - DNA, 25 bp, Homo sapien
ccttgttaggtctccccatgtttat

SEQ ID NO: 737994 - DNA, 25 bp, Homo sapien
ccaatcctctggttcagtcactcta

SEQ ID NO: 737995 - DNA, 25 bp, Homo sapien
cagtgattactatctggaaaatgca

SEQ ID NO: 737996 - DNA, 25 bp, Homo sapien
ggaaaatgcaccctagaaaatgttc

SEQ ID NO: 737997 - DNA, 25 bp, Homo sapien
tctttccaatcctctggttcagtca

SEQ ID NO: 737998 - DNA, 25 bp, Homo sapien
ggttgattaatctcccagctgttga

SEQ ID NO: 737999 - DNA, 25 bp, Homo sapien
gctgttgatgggttcaggcaaaaca

SEQ ID NO: 738000 - DNA, 25 bp, Homo sapien
tgagtaacacggagtttctttaata

SEQ ID NO: 738001 - DNA, 25 bp, Homo sapien
ctttaataagctaccagtctccagg

SEQ ID NO: 738002 - DNA, 25 bp, Homo sapien
gacagtctaagatttgggccaagcc

SEQ ID NO: 738003 - DNA, 25 bp, Homo sapien
ggttcaagccatagatttaaattgg

SEQ ID NO: 738004 - DNA, 25 bp, Homo sapien
ggtaatagaggcagaattggacagt

SEQ ID NO: 738005 - DNA, 25 bp, Homo sapien
gattttcagtgcacaggttcaagcc

SEQ ID NO: 738006 - DNA, 25 bp, Homo sapien
tggaaatcgccgatggcagcggcgg

SEQ ID NO: 738007 - DNA, 25 bp, Homo sapien
acaagtacctttgcagaccccgaag

SEQ ID NO: 738008 - DNA, 25 bp, Homo sapien
tgagaactgcttacaccaacacaca

SEQ ID NO: 738009 - DNA, 25 bp, Homo sapien
tttcaacaagtacctttgcagaccc

SEQ ID NO: 738010 - DNA, 25 bp, Homo sapien
gcggccaagaaaaccgcacttctgc

SEQ ID NO: 738011 - DNA, 25 bp, Homo sapien
agccaccggccctgcttgcctcagc

SEQ ID NO: 738012 - DNA, 25 bp, Homo sapien
ccgcagccaccggccctgcttgcct

SEQ ID NO: 738013 - DNA, 25 bp, Homo sapien
gccaagaaaaccgcacttctgccgg

SEQ ID NO: 738014 - DNA, 25 bp, Homo sapien
gcttcccgccggagccagatgcaaa

SEQ ID NO: 738015 - DNA, 25 bp, Homo sapien
gtcgggaagcttcgagagccgcctc

SEQ ID NO: 738016 - DNA, 25 bp, Homo sapien
tacggggatttggacacatggacct

SEQ ID NO: 738017 - DNA, 25 bp, Homo sapien
gttgttgtctcgcttggcacatgca

SEQ ID NO: 738018 - DNA, 25 bp, Homo sapien
atttctttggctggccgccgccctg

SEQ ID NO: 738019 - DNA, 25 bp, Homo sapien
cgcacccgagccctacgggtatgaa

SEQ ID NO: 738020 - DNA, 25 bp, Homo sapien
tacgggtatgaaacccagaatgcca

SEQ ID NO: 738021 - DNA, 25 bp, Homo sapien
agaatgccaggagccgcacgcgcct

SEQ ID NO: 738022 - DNA, 25 bp, Homo sapien
gtgagcaagattgatcgcgcccaga

SEQ ID NO: 738023 - DNA, 25 bp, Homo sapien
tatttgaattaaggcggctgaggca

SEQ ID NO: 738024 - DNA, 25 bp, Homo sapien
tctgggctggtcaatgatataggcc

SEQ ID NO: 738025 - DNA, 25 bp, Homo sapien
gatttcccgcatcttaccagtcaag

SEQ ID NO: 738026 - DNA, 25 bp, Homo sapien
tatggcgcacctcagaaatgcagag

SEQ ID NO: 738027 - DNA, 25 bp, Homo sapien
taaacctcggtattagccagccgcg

SEQ ID NO: 738028 - DNA, 25 bp, Homo sapien
gattatccttagaagcaggcactgg

SEQ ID NO: 738029 - DNA, 25 bp, Homo sapien
tctgcacgcggagcgaaacagtttg

SEQ ID NO: 738030 - DNA, 25 bp, Homo sapien
gagtctcgacaaaacacaaagcaga

SEQ ID NO: 738031 - DNA, 25 bp, Homo sapien
ctccagctcaggtaaaggagtgcct

SEQ ID NO: 738032 - DNA, 25 bp, Homo sapien
gtggccaaacaaatcttcccctgga

SEQ ID NO: 738033 - DNA, 25 bp, Homo sapien
aagctactgcccacgacatccagca

SEQ ID NO: 738034 - DNA, 25 bp, Homo sapien
ccagagagacaatagggcttgcttc

SEQ ID NO: 738035 - DNA, 25 bp, Homo sapien
cagagagacaatagggcttgcttct

SEQ ID NO: 738036 - DNA, 25 bp, Homo sapien
tgcactcaatttagcctcttcaact

SEQ ID NO: 738037 - DNA, 25 bp, Homo sapien
gggcttgcttcttgcactcaattta

SEQ ID NO: 738038 - DNA, 25 bp, Homo sapien
aagtcggtgccactagcccaggcag

SEQ ID NO: 738039 - DNA, 25 bp, Homo sapien
gtcggtgccactagcccaggcagag

SEQ ID NO: 738040 - DNA, 25 bp, Homo sapien
cggtgccactagcccaggcagagcc

SEQ ID NO: 738041 - DNA, 25 bp, Homo sapien
caagtcggtgccactagcccaggca

SEQ ID NO: 738042 - DNA, 25 bp, Homo sapien
gaattcctaagaaatagagcccagc

SEQ ID NO: 738043 - DNA, 25 bp, Homo sapien
agcccctttgtgagagccgtttgtc

SEQ ID NO: 738044 - DNA, 25 bp, Homo sapien
ggcagaggaatacgaagtttctcaa

SEQ ID NO: 738045 - DNA, 25 bp, Homo sapien
cccacaattggaagtgtccagggca

SEQ ID NO: 738046 - DNA, 25 bp, Homo sapien
aaaaccattggtatgcatgaggcca

SEQ ID NO: 738047 - DNA, 25 bp, Homo sapien
gcgccgagtcataaatcttgcccag

SEQ ID NO: 738048 - DNA, 25 bp, Homo sapien
cgaacggatttttgcggctggctct

SEQ ID NO: 738049 - DNA, 25 bp, Homo sapien
tttgaagagaaaatgccgccgaacg

SEQ ID NO: 738050 - DNA, 25 bp, Homo sapien
tctgcatgccaggacgctggacctt

SEQ ID NO: 738051 - DNA, 25 bp, Homo sapien
tcttggcgccagtggaaaggtatgc

SEQ ID NO: 738052 - DNA, 25 bp, Homo sapien
ttaaaataatctcgcctacgcttgc

SEQ ID NO: 738053 - DNA, 25 bp, Homo sapien
tcctttggatttaagcagagcggct

SEQ ID NO: 738054 - DNA, 25 bp, Homo sapien
ctggatgagagatcgggagccacgg

SEQ ID NO: 738055 - DNA, 25 bp, Homo sapien
ggatttgtctagaaagggcgcagcg

SEQ ID NO: 738056 - DNA, 25 bp, Homo sapien
gcggctggtaatttctggaggtgga

SEQ ID NO: 738057 - DNA, 25 bp, Homo sapien
tcagtaaagaaaagctctgcggttt

SEQ ID NO: 738058 - DNA, 25 bp, Homo sapien
ggctgcacagccttggaaccgccag

SEQ ID NO: 738059 - DNA, 25 bp, Homo sapien
ccaagtattcttctagtgctgagaa

SEQ ID NO: 738060 - DNA, 25 bp, Homo sapien
caccccttgaatggtagaaagacac

SEQ ID NO: 738061 - DNA, 25 bp, Homo sapien
ggccctctcagacgccttcaggagg

SEQ ID NO: 738062 - DNA, 25 bp, Homo sapien
tcacaggcaagtacatttcctcaat

SEQ ID NO: 738063 - DNA, 25 bp, Homo sapien
agcttcaccctcacaggcaagtaca

SEQ ID NO: 738064 - DNA, 25 bp, Homo sapien
accctcacaggcaagtacatttcct

SEQ ID NO: 738065 - DNA, 25 bp, Homo sapien
caggcaagtacatttcctcaataat

SEQ ID NO: 738066 - DNA, 25 bp, Homo sapien
tagatatcaaaaaaggctagtcccc

SEQ ID NO: 738067 - DNA, 25 bp, Homo sapien
tcatcagtgcgcctggtctgggcat

SEQ ID NO: 738068 - DNA, 25 bp, Homo sapien
tattctaacattcgggagacagagg

SEQ ID NO: 738069 - DNA, 25 bp, Homo sapien
tgatttatgacctagttctggcgca

SEQ ID NO: 738070 - DNA, 25 bp, Homo sapien
gagctgatccccaggcggaaagagg

SEQ ID NO: 738071 - DNA, 25 bp, Homo sapien
tggaccggcttgcagggctagattg

SEQ ID NO: 738072 - DNA, 25 bp, Homo sapien
gtggaccggcttgcagggctagatt

SEQ ID NO: 738073 - DNA, 25 bp, Homo sapien
ggaccggcttgcagggctagattgc

SEQ ID NO: 738074 - DNA, 25 bp, Homo sapien
cttttgatatactggcctgtgggcc

SEQ ID NO: 738075 - DNA, 25 bp, Homo sapien
gaagtcgaggctataccaggaggat

SEQ ID NO: 738076 - DNA, 25 bp, Homo sapien
caaaactgctggtcaaggttcccca

SEQ ID NO: 738077 - DNA, 25 bp, Homo sapien
tgaaagattcccagtagcgcctcag

SEQ ID NO: 738078 - DNA, 25 bp, Homo sapien
ttttcatcagaccccttctgttcct

SEQ ID NO: 738079 - DNA, 25 bp, Homo sapien
attttcatcagaccccttctgttcc

SEQ ID NO: 738080 - DNA, 25 bp, Homo sapien
tccactagatttaagtaatgggaca

SEQ ID NO: 738081 - DNA, 25 bp, Homo sapien
gagaaatcagattgcagtgtttgag

SEQ ID NO: 738082 - DNA, 25 bp, Homo sapien
gttaagtgtacttttgacagagaaa

SEQ ID NO: 738083 - DNA, 25 bp, Homo sapien
caaatattggctaacggtgtgtacc

SEQ ID NO: 738084 - DNA, 25 bp, Homo sapien
aaagcgtggttttctatgtcttggc

SEQ ID NO: 738085 - DNA, 25 bp, Homo sapien
gcgtggttttctatgtcttggcgtt

SEQ ID NO: 738086 - DNA, 25 bp, Homo sapien
ttctatgtcttggcgtttccttttc

SEQ ID NO: 738087 - DNA, 25 bp, Homo sapien
tggttttctatgtcttggcgtttcc

SEQ ID NO: 738088 - DNA, 25 bp, Homo sapien
ggccttcgcagacagcgggtcttct

SEQ ID NO: 738089 - DNA, 25 bp, Homo sapien
taggccttcgcagacagcgggtctt

SEQ ID NO: 738090 - DNA, 25 bp, Homo sapien
ctttaggccttcgcagacagcgggt

SEQ ID NO: 738091 - DNA, 25 bp, Homo sapien
ccttcgcagacagcgggtcttcttc

SEQ ID NO: 738092 - DNA, 25 bp, Homo sapien
cttcggcatgagaaaaattgctgta

SEQ ID NO: 738093 - DNA, 25 bp, Homo sapien
tgagaaaaattgctgtatttctaac

SEQ ID NO: 738094 - DNA, 25 bp, Homo sapien
tcggcatgagaaaaattgctgtatt

SEQ ID NO: 738095 - DNA, 25 bp, Homo sapien
ggcatgagaaaaattgctgtatttc

SEQ ID NO: 738096 - DNA, 25 bp, Homo sapien
cgtgggctgctctctttgtcgacta

SEQ ID NO: 738097 - DNA, 25 bp, Homo sapien
tcccagctcgctgttgaggaaaact

SEQ ID NO: 738098 - DNA, 25 bp, Homo sapien
ttaagaaattgtcgccagtcccagc

SEQ ID NO: 738099 - DNA, 25 bp, Homo sapien
gaaaacttgtatcacactcttgcag

SEQ ID NO: 738100 - DNA, 25 bp, Homo sapien
cgagtgcggggcctcaggcagacaa

SEQ ID NO: 738101 - DNA, 25 bp, Homo sapien
cggggcctcaggcagacaaagagcc

SEQ ID NO: 738102 - DNA, 25 bp, Homo sapien
tgcggggcctcaggcagacaaagag

SEQ ID NO: 738103 - DNA, 25 bp, Homo sapien
ggcctcaggcagacaaagagcctac

SEQ ID NO: 738104 - DNA, 25 bp, Homo sapien
ttggagttggattcctttaagcttc

SEQ ID NO: 738105 - DNA, 25 bp, Homo sapien
caatatttaacttcggaggagtttg

SEQ ID NO: 738106 - DNA, 25 bp, Homo sapien
ctggtcaatatttaacttcggagga

SEQ ID NO: 738107 - DNA, 25 bp, Homo sapien
ctgttgaaagaggttctggtcaata

SEQ ID NO: 738108 - DNA, 25 bp, Homo sapien
gttggccctccacggttcctggcaa

SEQ ID NO: 738109 - DNA, 25 bp, Homo sapien
tgcaccagggcggttgggaggagtt

SEQ ID NO: 738110 - DNA, 25 bp, Homo sapien
ctaggtaagcgctgctccaaaactc

SEQ ID NO: 738111 - DNA, 25 bp, Homo sapien
ttcgccgcgtgggactttgcaccag

SEQ ID NO: 738112 - DNA, 25 bp, Homo sapien
gagttggagacaattcctggttcag

SEQ ID NO: 738113 - DNA, 25 bp, Homo sapien
aaaggcgattccctgagcgcctgga

SEQ ID NO: 738114 - DNA, 25 bp, Homo sapien
agagcgcctggacaccggaaaaggc

SEQ ID NO: 738115 - DNA, 25 bp, Homo sapien
tgtttatttgtctgcagagcgcctg

SEQ ID NO: 738116 - DNA, 25 bp, Homo sapien
cttggcgcccgcatgagcctcgctt

SEQ ID NO: 738117 - DNA, 25 bp, Homo sapien
tggtgactccctgatgttcgcgtca

SEQ ID NO: 738118 - DNA, 25 bp, Homo sapien
agactggaacatttcgagcaatgag

SEQ ID NO: 738119 - DNA, 25 bp, Homo sapien
acacggacgagtgccctggtgactc

SEQ ID NO: 738120 - DNA, 25 bp, Homo sapien
gagatggagtatgtatttattttac

SEQ ID NO: 738121 - DNA, 25 bp, Homo sapien
agatggagtatgtatttattttaca

SEQ ID NO: 738122 - DNA, 25 bp, Homo sapien
gatggagtatgtatttattttacaa

SEQ ID NO: 738123 - DNA, 25 bp, Homo sapien
ctggttagagggcaagagagggttg

SEQ ID NO: 738124 - DNA, 25 bp, Homo sapien
agagggcaagagagggttgcaaata

SEQ ID NO: 738125 - DNA, 25 bp, Homo sapien
tagagggcaagagagggttgcaaat

SEQ ID NO: 738126 - DNA, 25 bp, Homo sapien
gttagagggcaagagagggttgcaa

SEQ ID NO: 738127 - DNA, 25 bp, Homo sapien
gcggagcgcagaacttctccaagcc

SEQ ID NO: 738128 - DNA, 25 bp, Homo sapien
tccggcgagcggacgattctttcct

SEQ ID NO: 738129 - DNA, 25 bp, Homo sapien
tgactgccggctcggtgaccatttg

SEQ ID NO: 738130 - DNA, 25 bp, Homo sapien
taggtctgtagacgcaaagggcccg

SEQ ID NO: 738131 - DNA, 25 bp, Homo sapien
gcagccattgtaaagtgagagacct

SEQ ID NO: 738132 - DNA, 25 bp, Homo sapien
tgtgcggccacttgttccacgtgct

SEQ ID NO: 738133 - DNA, 25 bp, Homo sapien
tacatactcctaagtgtcacgcagg

SEQ ID NO: 738134 - DNA, 25 bp, Homo sapien
ggcggcatagcggatctttctggaa

SEQ ID NO: 738135 - DNA, 25 bp, Homo sapien
gggacggatgcgcagacagttggta

SEQ ID NO: 738136 - DNA, 25 bp, Homo sapien
tggtgatgaagtgggacggatgcgc

SEQ ID NO: 738137 - DNA, 25 bp, Homo sapien
ggatgcgcagacagttggtaatgtt

SEQ ID NO: 738138 - DNA, 25 bp, Homo sapien
tttggtgatgaagtgggacggatgc

SEQ ID NO: 738139 - DNA, 25 bp, Homo sapien
tccgcagggtttctgcgagtccagg

SEQ ID NO: 738140 - DNA, 25 bp, Homo sapien
ccttttccgcagggtttctgcgagt

SEQ ID NO: 738141 - DNA, 25 bp, Homo sapien
ttttccgcagggtttctgcgagtcc

SEQ ID NO: 738142 - DNA, 25 bp, Homo sapien
tttccgcagggtttctgcgagtcca

SEQ ID NO: 738143 - DNA, 25 bp, Homo sapien
ctcggcagggaggacggagctggca

SEQ ID NO: 738144 - DNA, 25 bp, Homo sapien
gttttgtcaacatctgaaatcgacc

SEQ ID NO: 738145 - DNA, 25 bp, Homo sapien
aatggtcacagtttgaattaagtac

SEQ ID NO: 738146 - DNA, 25 bp, Homo sapien
tgcatgactccggagacaaaagttt

SEQ ID NO: 738147 - DNA, 25 bp, Homo sapien
gaaatcgacctaaatcggataggag

SEQ ID NO: 738148 - DNA, 25 bp, Homo sapien
cacttggattctgacggctcacata

SEQ ID NO: 738149 - DNA, 25 bp, Homo sapien
tctgtaaggcatagaaacgtgtcct

SEQ ID NO: 738150 - DNA, 25 bp, Homo sapien
aaccttgtagatagcttgagctgga

SEQ ID NO: 738151 - DNA, 25 bp, Homo sapien
tcaagcttggcctactgtggaaaag

SEQ ID NO: 738152 - DNA, 25 bp, Homo sapien
tataacggaggggagcctaagcgct

SEQ ID NO: 738153 - DNA, 25 bp, Homo sapien
ggagaaggagttccacttcaatcga

SEQ ID NO: 738154 - DNA, 25 bp, Homo sapien
acttcaatcgatacctgacccggcg

SEQ ID NO: 738155 - DNA, 25 bp, Homo sapien
gagatcgcccacacgctctgtttgt

SEQ ID NO: 738156 - DNA, 25 bp, Homo sapien
cgtggtgtacccctggatgaagaag

SEQ ID NO: 738157 - DNA, 25 bp, Homo sapien
tcaggagatttacgagacgccaaac

SEQ ID NO: 738158 - DNA, 25 bp, Homo sapien
catgagaacccttttgtacccaggg

SEQ ID NO: 738159 - DNA, 25 bp, Homo sapien
gaagaagatccatgtcagcgccggt

SEQ ID NO: 738160 - DNA, 25 bp, Homo sapien
tggaaaagacccatcagcgatcaga

SEQ ID NO: 738161 - DNA, 25 bp, Homo sapien
caatcgcacctagtaaatgcgggca

SEQ ID NO: 738162 - DNA, 25 bp, Homo sapien
cagacccggcaaggtgtttattcta

SEQ ID NO: 738163 - DNA, 25 bp, Homo sapien
taccaaatagcaggcaacagtctcc

SEQ ID NO: 738164 - DNA, 25 bp, Homo sapien
ttagtacacatgatgacccctaaag

SEQ ID NO: 738165 - DNA, 25 bp, Homo sapien
tacacatgatgacccctaaagtgtg

SEQ ID NO: 738166 - DNA, 25 bp, Homo sapien
tttttctgaaactacagtccgctga

SEQ ID NO: 738167 - DNA, 25 bp, Homo sapien
actacagtccgctgaatgcaaagcg

SEQ ID NO: 738168 - DNA, 25 bp, Homo sapien
cactgatgccgtctttccttttaaa

SEQ ID NO: 738169 - DNA, 25 bp, Homo sapien
gagatttgcacatttaccgactgct

SEQ ID NO: 738170 - DNA, 25 bp, Homo sapien
gcagctaaagcgcaactagagattt

SEQ ID NO: 738171 - DNA, 25 bp, Homo sapien
cctagctcgattgggaaactcctca

SEQ ID NO: 738172 - DNA, 25 bp, Homo sapien
tataggaccctttgcacgaactctg

SEQ ID NO: 738173 - DNA, 25 bp, Homo sapien
gtgttcctgtctcaatagctccaag

SEQ ID NO: 738174 - DNA, 25 bp, Homo sapien
tgactagtgactctgtgatgaaaac

SEQ ID NO: 738175 - DNA, 25 bp, Homo sapien
tggaagtggctcttataagcgcagc

SEQ ID NO: 738176 - DNA, 25 bp, Homo sapien
ctgacccgcagaaggaggattgaaa

SEQ ID NO: 738177 - DNA, 25 bp, Homo sapien
ggattgaaatagcacatgctctttg

SEQ ID NO: 738178 - DNA, 25 bp, Homo sapien
ctggttccaaaaccggagaatgaag

SEQ ID NO: 738179 - DNA, 25 bp, Homo sapien
cctctccgagagacaaattaaaatc

SEQ ID NO: 738180 - DNA, 25 bp, Homo sapien
tacggctacggctacaatggcatgg

SEQ ID NO: 738181 - DNA, 25 bp, Homo sapien
atgcactccggcaggtacggctacg

SEQ ID NO: 738182 - DNA, 25 bp, Homo sapien
tccgtgagcgagcaattcagggact

SEQ ID NO: 738183 - DNA, 25 bp, Homo sapien
caaatggcccggactaccagttgca

SEQ ID NO: 738184 - DNA, 25 bp, Homo sapien
aaagcactccatgacgaaggcgccg

SEQ ID NO: 738185 - DNA, 25 bp, Homo sapien
ggatgaactcctgcgcgggtaagac

SEQ ID NO: 738186 - DNA, 25 bp, Homo sapien
ggtaagacatatcccaagacagtgg

SEQ ID NO: 738187 - DNA, 25 bp, Homo sapien
tacccttggatgcagcggatgaact

SEQ ID NO: 738188 - DNA, 25 bp, Homo sapien
agtccaactcggtcctggcctgcaa

SEQ ID NO: 738189 - DNA, 25 bp, Homo sapien
tgcaaccgggcgtcctacgagtacg

SEQ ID NO: 738190 - DNA, 25 bp, Homo sapien
taccaacagtccaactcggtcctgg

SEQ ID NO: 738191 - DNA, 25 bp, Homo sapien
tcggtcctggcctgcaaccgggcgt

SEQ ID NO: 738192 - DNA, 25 bp, Homo sapien
ggcgttcggccatccagaaacaaac

SEQ ID NO: 738193 - DNA, 25 bp, Homo sapien
gccgccgcgtcagctggtgcgattt

SEQ ID NO: 738194 - DNA, 25 bp, Homo sapien
cagctggtgcgatttgctgctgtcg

SEQ ID NO: 738195 - DNA, 25 bp, Homo sapien
tgctgtcgcttttggcgttcggcca

SEQ ID NO: 738196 - DNA, 25 bp, Homo sapien
taaagcggcgcatttgcatcctagg

SEQ ID NO: 738197 - DNA, 25 bp, Homo sapien
gcagggtcccgcagctaaggttgaa

SEQ ID NO: 738198 - DNA, 25 bp, Homo sapien
cataatgctgttagcgcgcgtggca

SEQ ID NO: 738199 - DNA, 25 bp, Homo sapien
tctgcaatcggagagactacctgta

SEQ ID NO: 738200 - DNA, 25 bp, Homo sapien
ccttcgcccggtttttcgatgagag

SEQ ID NO: 738201 - DNA, 25 bp, Homo sapien
agccagagttctccgctcgttgccg

SEQ ID NO: 738202 - DNA, 25 bp, Homo sapien
tcagccagagttctccgctcgttgc

SEQ ID NO: 738203 - DNA, 25 bp, Homo sapien
ccggtttttcgatgagagaggtgtc

SEQ ID NO: 738204 - DNA, 25 bp, Homo sapien
tatgtgcctttatccgtgtagagac

SEQ ID NO: 738205 - DNA, 25 bp, Homo sapien
gagctgattccggattcgcatgcgc

SEQ ID NO: 738206 - DNA, 25 bp, Homo sapien
tctgtaaaacctgaggccccaagtc

SEQ ID NO: 738207 - DNA, 25 bp, Homo sapien
aatttcccttgcgagaatagagccg

SEQ ID NO: 738208 - DNA, 25 bp, Homo sapien
actacctatgtatccagccccagag

SEQ ID NO: 738209 - DNA, 25 bp, Homo sapien
tgctctggcgcgtccaaaatactac

SEQ ID NO: 738210 - DNA, 25 bp, Homo sapien
tcccagacccgcaagaaagtgaatc

SEQ ID NO: 738211 - DNA, 25 bp, Homo sapien
caggaagtccctatgtatcccaaca

SEQ ID NO: 738212 - DNA, 25 bp, Homo sapien
gaaagagcataaggacgaaggtccg

SEQ ID NO: 738213 - DNA, 25 bp, Homo sapien
gacgaaggtccgactgccgccgcag

SEQ ID NO: 738214 - DNA, 25 bp, Homo sapien
gagcataaggacgaaggtccgactg

SEQ ID NO: 738215 - DNA, 25 bp, Homo sapien
cataaggacgaaggtccgactgccg

SEQ ID NO: 738216 - DNA, 25 bp, Homo sapien
aatggccgggctcatctttgaatgg

SEQ ID NO: 738217 - DNA, 25 bp, Homo sapien
gaatggcaaaagtgcagcgtttccc

SEQ ID NO: 738218 - DNA, 25 bp, Homo sapien
aggacattgtggaagcttagccggc

SEQ ID NO: 738219 - DNA, 25 bp, Homo sapien
tcaaaagctaggagagccaagccct

SEQ ID NO: 738220 - DNA, 25 bp, Homo sapien
catcgggcaaaaccggagcaggaat

SEQ ID NO: 738221 - DNA, 25 bp, Homo sapien
tgttggccccttcagtcgcttgagt

SEQ ID NO: 738222 - DNA, 25 bp, Homo sapien
tcgcttgagtctagacagacggcgg

SEQ ID NO: 738223 - DNA, 25 bp, Homo sapien
gctgacttgggtccataaaggccga

SEQ ID NO: 738224 - DNA, 25 bp, Homo sapien
taaaggcaatctcggtgtctgacca

SEQ ID NO: 738225 - DNA, 25 bp, Homo sapien
gaatggttccagaggcaaaacgcaa

SEQ ID NO: 738226 - DNA, 25 bp, Homo sapien
tcagccacggatgtcgaatggttcc

SEQ ID NO: 738227 - DNA, 25 bp, Homo sapien
tgctctggcgttcacccatcaggag

SEQ ID NO: 738228 - DNA, 25 bp, Homo sapien
tttccaaggcaaaccctgttcaggc

SEQ ID NO: 738229 - DNA, 25 bp, Homo sapien
caaagaccgagcaaaagacgagtga

SEQ ID NO: 738230 - DNA, 25 bp, Homo sapien
tggctcgtaggcctgccgctttgat

SEQ ID NO: 738231 - DNA, 25 bp, Homo sapien
gcacaactgttgatggtaggctgta

SEQ ID NO: 738232 - DNA, 25 bp, Homo sapien
atgagctgagcgttggccgctatgc

SEQ ID NO: 738233 - DNA, 25 bp, Homo sapien
gccaacgctgtacccgctgcggtgt

SEQ ID NO: 738234 - DNA, 25 bp, Homo sapien
ggtgtttggcgcctcgtggaaccca

SEQ ID NO: 738235 - DNA, 25 bp, Homo sapien
gcttccagtccaaggcgacggtgtt

SEQ ID NO: 738236 - DNA, 25 bp, Homo sapien
ccacggcgaggcaaacgaatctgtt

SEQ ID NO: 738237 - DNA, 25 bp, Homo sapien
cgcgccttcttgatggcgtgattaa

SEQ ID NO: 738238 - DNA, 25 bp, Homo sapien
taaatacagtagagcgacaatgcga

SEQ ID NO: 738239 - DNA, 25 bp, Homo sapien
tcgtaaatttttacagctgggagcc

SEQ ID NO: 738240 - DNA, 25 bp, Homo sapien
gacaaggcctcggttatgatcacga

SEQ ID NO: 738241 - DNA, 25 bp, Homo sapien
tgggcctggtgtgttactctgcaga

SEQ ID NO: 738242 - DNA, 25 bp, Homo sapien
ttctctctgtaagctcggccgctgc

SEQ ID NO: 738243 - DNA, 25 bp, Homo sapien
cctctgcggctcaagtagaggttgg

SEQ ID NO: 738244 - DNA, 25 bp, Homo sapien
ttggctgctccttcgcggacgccgg

SEQ ID NO: 738245 - DNA, 25 bp, Homo sapien
tcacagcaggtagggttaggttggc

SEQ ID NO: 738246 - DNA, 25 bp, Homo sapien
gggcgcccgcttccatcctgagcct

SEQ ID NO: 738247 - DNA, 25 bp, Homo sapien
attctgggctttgggccattcaagg

SEQ ID NO: 738248 - DNA, 25 bp, Homo sapien
gtctttctccgcagcgctttgccag

SEQ ID NO: 738249 - DNA, 25 bp, Homo sapien
tccttgacgcatttgcggccgcctg

SEQ ID NO: 738250 - DNA, 25 bp, Homo sapien
ggcgcgatggcagggttctctcctt

SEQ ID NO: 738251 - DNA, 25 bp, Homo sapien
tacttcagttgaaatcgtctccagg

SEQ ID NO: 738252 - DNA, 25 bp, Homo sapien
tgcagaggccggttattttgcgggt

SEQ ID NO: 738253 - DNA, 25 bp, Homo sapien
ttatggcttgctagtatatctggat

SEQ ID NO: 738254 - DNA, 25 bp, Homo sapien
gtggctgtcttggaccagtgatttc

SEQ ID NO: 738255 - DNA, 25 bp, Homo sapien
ggagctacatagacagaggaagcca

SEQ ID NO: 738256 - DNA, 25 bp, Homo sapien
ctgatttaaaaagtgagaaagaaag

SEQ ID NO: 738257 - DNA, 25 bp, Homo sapien
gcatggacatgcaggttggcaaacg

SEQ ID NO: 738258 - DNA, 25 bp, Homo sapien
gccgaggtcccattgttggcgctga

SEQ ID NO: 738259 - DNA, 25 bp, Homo sapien
cactgctcgaaatggcccctgtctt

SEQ ID NO: 738260 - DNA, 25 bp, Homo sapien
ctgaggtcaatggtgcaaaggagcc

SEQ ID NO: 738261 - DNA, 25 bp, Homo sapien
ccaggaactcgcacctgtgctggag

SEQ ID NO: 738262 - DNA, 25 bp, Homo sapien
cccaggaactcgcacctgtgctgga

SEQ ID NO: 738263 - DNA, 25 bp, Homo sapien
cgagagcggcgcctagagattagcc

SEQ ID NO: 738264 - DNA, 25 bp, Homo sapien
actggctcacggcaaagagtggtcg

SEQ ID NO: 738265 - DNA, 25 bp, Homo sapien
tccaaaggtgaaaacgcagccaact

SEQ ID NO: 738266 - DNA, 25 bp, Homo sapien
aatatgtaccttactcgagagcggc

SEQ ID NO: 738267 - DNA, 25 bp, Homo sapien
ggcatccaaaataagcagccgccag

SEQ ID NO: 738268 - DNA, 25 bp, Homo sapien
cagatagcgcggatgtttgtaaggc

SEQ ID NO: 738269 - DNA, 25 bp, Homo sapien
gaagaaaaggcaaatccggcctgga

SEQ ID NO: 738270 - DNA, 25 bp, Homo sapien
tcgagtcttgggcaatcagggccct

SEQ ID NO: 738271 - DNA, 25 bp, Homo sapien
aaattcatgtccggcttagcgcccc

SEQ ID NO: 738272 - DNA, 25 bp, Homo sapien
taaaattcatgtccggcttagcgcc

SEQ ID NO: 738273 - DNA, 25 bp, Homo sapien
aattcatgtccggcttagcgcccca

SEQ ID NO: 738274 - DNA, 25 bp, Homo sapien
aaaattcatgtccggcttagcgccc

SEQ ID NO: 738275 - DNA, 25 bp, Homo sapien
tcgccaaattatcccacaacaatgt

SEQ ID NO: 738276 - DNA, 25 bp, Homo sapien
cagaaagggctatctgctcccttcg

SEQ ID NO: 738277 - DNA, 25 bp, Homo sapien
caacaatgtcatgctcggagagccc

SEQ ID NO: 738278 - DNA, 25 bp, Homo sapien
gaactcttttttggtcgactcgctc

SEQ ID NO: 738279 - DNA, 25 bp, Homo sapien
gtgtcggggtgcgtctcctggccca

SEQ ID NO: 738280 - DNA, 25 bp, Homo sapien
caaggtgtcggggtgcgtctcctgg

SEQ ID NO: 738281 - DNA, 25 bp, Homo sapien
aaggtgtcggggtgcgtctcctggc

SEQ ID NO: 738282 - DNA, 25 bp, Homo sapien
aggtgtcggggtgcgtctcctggcc

SEQ ID NO: 738283 - DNA, 25 bp, Homo sapien
caaggccagcattttacttccccga

SEQ ID NO: 738284 - DNA, 25 bp, Homo sapien
tgagcacaacaccagaggagaagat

SEQ ID NO: 738285 - DNA, 25 bp, Homo sapien
ggcttagagtcttccctaggtgatg

SEQ ID NO: 738286 - DNA, 25 bp, Homo sapien
acaggagttgtagagaaggcaagcc

SEQ ID NO: 738287 - DNA, 25 bp, Homo sapien
catttcctgagactagcatgaggct

SEQ ID NO: 738288 - DNA, 25 bp, Homo sapien
ggcctgagcggtctatttcctggga

SEQ ID NO: 738289 - DNA, 25 bp, Homo sapien
ggctccactggatctggccggaaaa

SEQ ID NO: 738290 - DNA, 25 bp, Homo sapien
tatgacccggatgcaagagtctttc

SEQ ID NO: 738291 - DNA, 25 bp, Homo sapien
ctgccacggctcattatccttgagg

SEQ ID NO: 738292 - DNA, 25 bp, Homo sapien
gacccacttgccaaatgacacagct

SEQ ID NO: 738293 - DNA, 25 bp, Homo sapien
attatccttgaggaaacctcgaagg

SEQ ID NO: 738294 - DNA, 25 bp, Homo sapien
tgggacccacttgccaaatgacaca

SEQ ID NO: 738295 - DNA, 25 bp, Homo sapien
tggattttccagaagggtcctgact

SEQ ID NO: 738296 - DNA, 25 bp, Homo sapien
ttggattttccagaagggtcctgac

SEQ ID NO: 738297 - DNA, 25 bp, Homo sapien
ggattttccagaagggtcctgactc

SEQ ID NO: 738298 - DNA, 25 bp, Homo sapien
gattttccagaagggtcctgactcc

SEQ ID NO: 738299 - DNA, 25 bp, Homo sapien
gatggatcaaattgtgggaatatac

SEQ ID NO: 738300 - DNA, 25 bp, Homo sapien
tggatcaaattgtgggaatatacag

SEQ ID NO: 738301 - DNA, 25 bp, Homo sapien
gggtgtgtgaactccttcgaaatga

SEQ ID NO: 738302 - DNA, 25 bp, Homo sapien
gaactccttcgaaatgatggatcaa

SEQ ID NO: 738303 - DNA, 25 bp, Homo sapien
tgtagcagatgcgatacaaactgac

SEQ ID NO: 738304 - DNA, 25 bp, Homo sapien
aaaggtcactgaagacccaagtgcc

SEQ ID NO: 738305 - DNA, 25 bp, Homo sapien
tatccagcctagaagcccatttggc

SEQ ID NO: 738306 - DNA, 25 bp, Homo sapien
tgtaaccttggttggcacgtgcagg

SEQ ID NO: 738307 - DNA, 25 bp, Homo sapien
gtctcgctgcgtttcccactcagca

SEQ ID NO: 738308 - DNA, 25 bp, Homo sapien
gaactgcagcctaatccttgccgaa

SEQ ID NO: 738309 - DNA, 25 bp, Homo sapien
cttgccgaaggccttaatccatggg

SEQ ID NO: 738310 - DNA, 25 bp, Homo sapien
tactttggccccatagggctggcag

SEQ ID NO: 738311 - DNA, 25 bp, Homo sapien
ctgtgtaaccgctgcataaggcctg

SEQ ID NO: 738312 - DNA, 25 bp, Homo sapien
aaaaggccaattcggagaagtcgca

SEQ ID NO: 738313 - DNA, 25 bp, Homo sapien
tgttataaacccagctgcaatttcg

SEQ ID NO: 738314 - DNA, 25 bp, Homo sapien
cccggcagcttggagaaaacctttg

SEQ ID NO: 738315 - DNA, 25 bp, Homo sapien
ggtcactggtttcctactaggtgca

SEQ ID NO: 738316 - DNA, 25 bp, Homo sapien
gccgggaaccccagcatgattcttg

SEQ ID NO: 738317 - DNA, 25 bp, Homo sapien
taatttaaagcaacgcgcattcgct

SEQ ID NO: 738318 - DNA, 25 bp, Homo sapien
tccgatcaatgtcaaagccgccggg

SEQ ID NO: 738319 - DNA, 25 bp, Homo sapien
tctgatactaagagcagcacggtac

SEQ ID NO: 738320 - DNA, 25 bp, Homo sapien
agttgaggagcaagttatcaggccc

SEQ ID NO: 738321 - DNA, 25 bp, Homo sapien
tagttgaggagcaagttatcaggcc

SEQ ID NO: 738322 - DNA, 25 bp, Homo sapien
ctagttgaggagcaagttatcaggc

SEQ ID NO: 738323 - DNA, 25 bp, Homo sapien
cagctttggctatgagggccttgag

SEQ ID NO: 738324 - DNA, 25 bp, Homo sapien
tttggcaaactctccaccacacgta

SEQ ID NO: 738325 - DNA, 25 bp, Homo sapien
cacacgtaatgaaacttggatttgc

SEQ ID NO: 738326 - DNA, 25 bp, Homo sapien
caggtccccagctttggctatgagg

SEQ ID NO: 738327 - DNA, 25 bp, Homo sapien
aatgagggtcttggttccagcctgc

SEQ ID NO: 738328 - DNA, 25 bp, Homo sapien
cacagagtggactgttccctgaggt

SEQ ID NO: 738329 - DNA, 25 bp, Homo sapien
caaatgagggtcttggttccagcct

SEQ ID NO: 738330 - DNA, 25 bp, Homo sapien
aggcccaaagcctcgacacagagtg

SEQ ID NO: 738331 - DNA, 25 bp, Homo sapien
gctgcccctataccaagtaccagat

SEQ ID NO: 738332 - DNA, 25 bp, Homo sapien
ggaacgggagttcttcttcagcgtc

SEQ ID NO: 738333 - DNA, 25 bp, Homo sapien
ttaacaaagagaagcgcctgcaact

SEQ ID NO: 738334 - DNA, 25 bp, Homo sapien
gcctgcaactgtcccgcatgctcaa

SEQ ID NO: 738335 - DNA, 25 bp, Homo sapien
actggagccgcctttactgccttgg

SEQ ID NO: 738336 - DNA, 25 bp, Homo sapien
gtcttggccgcagccgggaaagact

SEQ ID NO: 738337 - DNA, 25 bp, Homo sapien
aggactcaggctgacaaagacccgg

SEQ ID NO: 738338 - DNA, 25 bp, Homo sapien
gcagccgccccagatgttaaggact

SEQ ID NO: 738339 - DNA, 25 bp, Homo sapien
ggcaacttcaagttcggacagcggc

SEQ ID NO: 738340 - DNA, 25 bp, Homo sapien
gggcgcgccggcaacttcaagttcg

SEQ ID NO: 738341 - DNA, 25 bp, Homo sapien
ccccggggacaagagcgccgagaag

SEQ ID NO: 738342 - DNA, 25 bp, Homo sapien
gcgccggcaacttcaagttcggaca

SEQ ID NO: 738343 - DNA, 25 bp, Homo sapien
gtttttcgagacagcctacggcacc

SEQ ID NO: 738344 - DNA, 25 bp, Homo sapien
aacccgtgcgcgaagtgaccttcag

SEQ ID NO: 738345 - DNA, 25 bp, Homo sapien
aatttctatagcaccgtgggcagga

SEQ ID NO: 738346 - DNA, 25 bp, Homo sapien
tgaccttcagagagtacgccattga

SEQ ID NO: 738347 - DNA, 25 bp, Homo sapien
agaccccgtcttcgcgcccaatgac

SEQ ID NO: 738348 - DNA, 25 bp, Homo sapien
ctgccccagaccccgtcttcgcgcc

SEQ ID NO: 738349 - DNA, 25 bp, Homo sapien
cccagaccccgtcttcgcgcccaat

SEQ ID NO: 738350 - DNA, 25 bp, Homo sapien
gccccagaccccgtcttcgcgccca

SEQ ID NO: 738351 - DNA, 25 bp, Homo sapien
cagctgcagtggagaatcatgttaa

SEQ ID NO: 738352 - DNA, 25 bp, Homo sapien
tgttaagctcggctactgcggagag

SEQ ID NO: 738353 - DNA, 25 bp, Homo sapien
tcacggatccgcttcaaagaggcag

SEQ ID NO: 738354 - DNA, 25 bp, Homo sapien
gagcccaaggtagcccaataatgga

SEQ ID NO: 738355 - DNA, 25 bp, Homo sapien
gaacaccgagtgacgatctgttgct

SEQ ID NO: 738356 - DNA, 25 bp, Homo sapien
gtgctttcggtgagaacaccgagtg

SEQ ID NO: 738357 - DNA, 25 bp, Homo sapien
ggtgagaacaccgagtgacgatctg

SEQ ID NO: 738358 - DNA, 25 bp, Homo sapien
cgagtgacgatctgttgcttcccct

SEQ ID NO: 738359 - DNA, 25 bp, Homo sapien
gccaacatgagttacaccggcgatt

SEQ ID NO: 738360 - DNA, 25 bp, Homo sapien
caacatgagttacaccggcgattac

SEQ ID NO: 738361 - DNA, 25 bp, Homo sapien
cagccaacatgagttacaccggcga

SEQ ID NO: 738362 - DNA, 25 bp, Homo sapien
ccccagccaacatgagttacaccgg

SEQ ID NO: 738363 - DNA, 25 bp, Homo sapien
tgcaattgagcacaagcatgctgca

SEQ ID NO: 738364 - DNA, 25 bp, Homo sapien
ctgcaattgagcacaagcatgctgc

SEQ ID NO: 738365 - DNA, 25 bp, Homo sapien
ctctgcacactcgagaacgaggacc

SEQ ID NO: 738366 - DNA, 25 bp, Homo sapien
ccctctgcacactcgagaacgagga

SEQ ID NO: 738367 - DNA, 25 bp, Homo sapien
cctctgcacactcgagaacgaggac

SEQ ID NO: 738368 - DNA, 25 bp, Homo sapien
gccctctgcacactcgagaacgagg

SEQ ID NO: 738369 - DNA, 25 bp, Homo sapien
gaggtggggacgagagttgagctct

SEQ ID NO: 738370 - DNA, 25 bp, Homo sapien
gtggggacgagagttgagctctcac

SEQ ID NO: 738371 - DNA, 25 bp, Homo sapien
ggtggggacgagagttgagctctca

SEQ ID NO: 738372 - DNA, 25 bp, Homo sapien
aggtggggacgagagttgagctctc

SEQ ID NO: 738373 - DNA, 25 bp, Homo sapien
tggctatccccagtccagggcatcc

SEQ ID NO: 738374 - DNA, 25 bp, Homo sapien
ccagggcatccctcacccacccggg

SEQ ID NO: 738375 - DNA, 25 bp, Homo sapien
cagtccagggcatccctcacccacc

SEQ ID NO: 738376 - DNA, 25 bp, Homo sapien
ccccagtccagggcatccctcaccc

SEQ ID NO: 738377 - DNA, 25 bp, Homo sapien
tgcaaatgcgagactccaggagaac

SEQ ID NO: 738378 - DNA, 25 bp, Homo sapien
gcacatccacggcttcaaactctgg

SEQ ID NO: 738379 - DNA, 25 bp, Homo sapien
ggagaacagactccgagaccacagg

SEQ ID NO: 738380 - DNA, 25 bp, Homo sapien
tgtaatcaagtcaccgtgcaaatcg

SEQ ID NO: 738381 - DNA, 25 bp, Homo sapien
cgggccctgcggatcagtgacaaac

SEQ ID NO: 738382 - DNA, 25 bp, Homo sapien
tcctcggatgtcagcgcctctaaag

SEQ ID NO: 738383 - DNA, 25 bp, Homo sapien
caattgcatggtttcccgagtcctc

SEQ ID NO: 738384 - DNA, 25 bp, Homo sapien
tgtctctgccgagtcactccgaagc

SEQ ID NO: 738385 - DNA, 25 bp, Homo sapien
aacatcccagatccttccaagaaga

SEQ ID NO: 738386 - DNA, 25 bp, Homo sapien
acatcccagatccttccaagaagag

SEQ ID NO: 738387 - DNA, 25 bp, Homo sapien
agcaacatcccagatccttccaaga

SEQ ID NO: 738388 - DNA, 25 bp, Homo sapien
caacatcccagatccttccaagaag

SEQ ID NO: 738389 - DNA, 25 bp, Homo sapien
caagttcagttctcagggattcaaa

SEQ ID NO: 738390 - DNA, 25 bp, Homo sapien
cattaaaccaatgtgtccaagtagc

SEQ ID NO: 738391 - DNA, 25 bp, Homo sapien
gaggtggagagccacataaacatta

SEQ ID NO: 738392 - DNA, 25 bp, Homo sapien
gagtcagttacagtcagctcagcaa

SEQ ID NO: 738393 - DNA, 25 bp, Homo sapien
taaaagccctaatacaagtgcaaga

SEQ ID NO: 738394 - DNA, 25 bp, Homo sapien
ggcaaagtcactgaaacccttcatg

SEQ ID NO: 738395 - DNA, 25 bp, Homo sapien
caatggtggcgcctttgttatggca

SEQ ID NO: 738396 - DNA, 25 bp, Homo sapien
gccagggaacagctcgaataccgct

SEQ ID NO: 738397 - DNA, 25 bp, Homo sapien
ctttctgccgggaccgctctcccgg

SEQ ID NO: 738398 - DNA, 25 bp, Homo sapien
ctgccgggaccgctctcccggacac

SEQ ID NO: 738399 - DNA, 25 bp, Homo sapien
tttctgccgggaccgctctcccgga

SEQ ID NO: 738400 - DNA, 25 bp, Homo sapien
gccgggaccgctctcccggacacca

SEQ ID NO: 738401 - DNA, 25 bp, Homo sapien
gcagtggttatgcggaacagcgcac

SEQ ID NO: 738402 - DNA, 25 bp, Homo sapien
agtggttatgcggaacagcgcacac

SEQ ID NO: 738403 - DNA, 25 bp, Homo sapien
tggttatgcggaacagcgcacaccc

SEQ ID NO: 738404 - DNA, 25 bp, Homo sapien
aggcagtggttatgcggaacagcgc

SEQ ID NO: 738405 - DNA, 25 bp, Homo sapien
tcggtgcagcctgccgaattgccct

SEQ ID NO: 738406 - DNA, 25 bp, Homo sapien
tgtctcctgcggacacccgtgggat

SEQ ID NO: 738407 - DNA, 25 bp, Homo sapien
cgggcactcggcttcggtgcagcct

SEQ ID NO: 738408 - DNA, 25 bp, Homo sapien
tttctccggaattcgcctttgtctc

SEQ ID NO: 738409 - DNA, 25 bp, Homo sapien
gcatattccgaacacgagggcagga

SEQ ID NO: 738410 - DNA, 25 bp, Homo sapien
agtacccgtctcctattcctgctgg

SEQ ID NO: 738411 - DNA, 25 bp, Homo sapien
caaagcggaagagtcaatcataggc

SEQ ID NO: 738412 - DNA, 25 bp, Homo sapien
cctgctgggcaactaaaagtgttcg

SEQ ID NO: 738413 - DNA, 25 bp, Homo sapien
tgttagccgtttccgcctgacaagc

SEQ ID NO: 738414 - DNA, 25 bp, Homo sapien
tttcgggccaagtcagacgaagcct

SEQ ID NO: 738415 - DNA, 25 bp, Homo sapien
tattccgatattccgcctgcaaagg

SEQ ID NO: 738416 - DNA, 25 bp, Homo sapien
cgcgccggcctcttcaagaaatgga

SEQ ID NO: 738417 - DNA, 25 bp, Homo sapien
cctcgagcctaggaaggaggccaac

SEQ ID NO: 738418 - DNA, 25 bp, Homo sapien
tgccatcaagccaaagtaacaactt

SEQ ID NO: 738419 - DNA, 25 bp, Homo sapien
ccctcaaagctggatcaaactgtgt

SEQ ID NO: 738420 - DNA, 25 bp, Homo sapien
taagaacagctccaaaagggactct

SEQ ID NO: 738421 - DNA, 25 bp, Homo sapien
gcgagtcgcgccacgaacccttggg

SEQ ID NO: 738422 - DNA, 25 bp, Homo sapien
tgcctggctacctggatatgccagt

SEQ ID NO: 738423 - DNA, 25 bp, Homo sapien
ttcccatggaaagctaccagccctg

SEQ ID NO: 738424 - DNA, 25 bp, Homo sapien
ccaacggctggaacggccaaatgta

SEQ ID NO: 738425 - DNA, 25 bp, Homo sapien
agatcgcaacccaatcgcgcgccca

SEQ ID NO: 738426 - DNA, 25 bp, Homo sapien
tgctccagatcgcaacccaatcgcg

SEQ ID NO: 738427 - DNA, 25 bp, Homo sapien
ccactgctccagatcgcaacccaat

SEQ ID NO: 738428 - DNA, 25 bp, Homo sapien
tccagatcgcaacccaatcgcgcgc

SEQ ID NO: 738429 - DNA, 25 bp, Homo sapien
cacccattctgagctaggctggtcc

SEQ ID NO: 738430 - DNA, 25 bp, Homo sapien
ttctgagctaggctggtcccgtcct

SEQ ID NO: 738431 - DNA, 25 bp, Homo sapien
taggctggtcccgtcctccccactc

SEQ ID NO: 738432 - DNA, 25 bp, Homo sapien
acccattctgagctaggctggtccc

SEQ ID NO: 738433 - DNA, 25 bp, Homo sapien
aatcgcaactccatcgaagccgaag

SEQ ID NO: 738434 - DNA, 25 bp, Homo sapien
tatccgcaggaaccgataagcagca

SEQ ID NO: 738435 - DNA, 25 bp, Homo sapien
ccctggaaagagcaaaatcgcaact

SEQ ID NO: 738436 - DNA, 25 bp, Homo sapien
tctcactgcagaaatacgcgccggt

SEQ ID NO: 738437 - DNA, 25 bp, Homo sapien
aacatggcagctacaagacgggtcg

SEQ ID NO: 738438 - DNA, 25 bp, Homo sapien
ggcaaagaaggactaggcaccctct

SEQ ID NO: 738439 - DNA, 25 bp, Homo sapien
tagagtgaaatagcgggttcccaga

SEQ ID NO: 738440 - DNA, 25 bp, Homo sapien
tcaggtccggtccacaaagaagcgt

SEQ ID NO: 738441 - DNA, 25 bp, Homo sapien
tgtgaggggtggtatgcgtgctgct

SEQ ID NO: 738442 - DNA, 25 bp, Homo sapien
gtgtgaggggtggtatgcgtgctgc

SEQ ID NO: 738443 - DNA, 25 bp, Homo sapien
tgtgtgaggggtggtatgcgtgctg

SEQ ID NO: 738444 - DNA, 25 bp, Homo sapien
gtgtgtgaggggtggtatgcgtgct

SEQ ID NO: 738445 - DNA, 25 bp, Homo sapien
ggacagataaaagcccaagcccagc

SEQ ID NO: 738446 - DNA, 25 bp, Homo sapien
gacagataaaagcccaagcccagcc

SEQ ID NO: 738447 - DNA, 25 bp, Homo sapien
tcaggacagataaaagcccaagccc

SEQ ID NO: 738448 - DNA, 25 bp, Homo sapien
ggctggactgcaactttcaacttga

SEQ ID NO: 738449 - DNA, 25 bp, Homo sapien
tgtgtctctacgctcgcatggcagt

SEQ ID NO: 738450 - DNA, 25 bp, Homo sapien
gagttttacaatgccacttggaggg

SEQ ID NO: 738451 - DNA, 25 bp, Homo sapien
tgtctgaccagtatgtaaaaccgcc

SEQ ID NO: 738452 - DNA, 25 bp, Homo sapien
ctggccggaaaaccgaagaggctca

SEQ ID NO: 738453 - DNA, 25 bp, Homo sapien
tggccggaaaaccgaagaggctcaa

SEQ ID NO: 738454 - DNA, 25 bp, Homo sapien
tgcgcgcagggttcggggctacggt

SEQ ID NO: 738455 - DNA, 25 bp, Homo sapien
agctgagaccctttctctgcgcgca

SEQ ID NO: 738456 - DNA, 25 bp, Homo sapien
tgtgcaccggcagctgcgccatggc

SEQ ID NO: 738457 - DNA, 25 bp, Homo sapien
ggagctggccttggccgccgtgtgc

SEQ ID NO: 738458 - DNA, 25 bp, Homo sapien
ggctcctcggccgacagatgaaatc

SEQ ID NO: 738459 - DNA, 25 bp, Homo sapien
ttgtggctcctcggccgacagatga

SEQ ID NO: 738460 - DNA, 25 bp, Homo sapien
gctcctcggccgacagatgaaatct

SEQ ID NO: 738461 - DNA, 25 bp, Homo sapien
gtggctcctcggccgacagatgaaa

SEQ ID NO: 738462 - DNA, 25 bp, Homo sapien
caagctttttcttggcgagagcgcc

SEQ ID NO: 738463 - DNA, 25 bp, Homo sapien
taatttgagatgcaatccaaagcct

SEQ ID NO: 738464 - DNA, 25 bp, Homo sapien
taaatttgatcaataaggtgcacca

SEQ ID NO: 738465 - DNA, 25 bp, Homo sapien
ggtgcaccataaatctcaagaattc

SEQ ID NO: 738466 - DNA, 25 bp, Homo sapien
gtctcaatcgtcctccaaactttct

SEQ ID NO: 738467 - DNA, 25 bp, Homo sapien
cgtctcaatcgtcctccaaactttc

SEQ ID NO: 738468 - DNA, 25 bp, Homo sapien
ccgtctcaatcgtcctccaaacttt

SEQ ID NO: 738469 - DNA, 25 bp, Homo sapien
ttctgagtccctgtgcactagtggc

SEQ ID NO: 738470 - DNA, 25 bp, Homo sapien
gatgctcctcatgggagtctggaac

SEQ ID NO: 738471 - DNA, 25 bp, Homo sapien
ctggttgttctgaaatggtgtgtgt

SEQ ID NO: 738472 - DNA, 25 bp, Homo sapien
aggcagggctgtactcaaattggag

SEQ ID NO: 738473 - DNA, 25 bp, Homo sapien
cgcgcactgcgagaaggcgtttcct

SEQ ID NO: 738474 - DNA, 25 bp, Homo sapien
tgccgccggcttcggagtcacttag

SEQ ID NO: 738475 - DNA, 25 bp, Homo sapien
tgaagagcgatcagtggcactgtcg

SEQ ID NO: 738476 - DNA, 25 bp, Homo sapien
tcccagagccgagttttggaggacg

SEQ ID NO: 738477 - DNA, 25 bp, Homo sapien
tttcccgtcgcagccgcacggaatt

SEQ ID NO: 738478 - DNA, 25 bp, Homo sapien
aattctccgggccgtcccgcgctcg

SEQ ID NO: 738479 - DNA, 25 bp, Homo sapien
cctcgtccttttcccgtcgcagccg

SEQ ID NO: 738480 - DNA, 25 bp, Homo sapien
gtcgcagccgcacggaattctccgg

SEQ ID NO: 738481 - DNA, 25 bp, Homo sapien
gccagtggcagcgtcgggtacagag

SEQ ID NO: 738482 - DNA, 25 bp, Homo sapien
ttgggccagtggcagcgtcgggtac

SEQ ID NO: 738483 - DNA, 25 bp, Homo sapien
ctttgggccagtggcagcgtcgggt

SEQ ID NO: 738484 - DNA, 25 bp, Homo sapien
cagtggcagcgtcgggtacagagac

SEQ ID NO: 738485 - DNA, 25 bp, Homo sapien
ggccgtgggagttcttaggagtcta

SEQ ID NO: 738486 - DNA, 25 bp, Homo sapien
tttctcagcgagaaagccgagcccg

SEQ ID NO: 738487 - DNA, 25 bp, Homo sapien
tccttcaaacgctcgaagtcttcag

SEQ ID NO: 738488 - DNA, 25 bp, Homo sapien
gttgacttaaagaatgcactgccca

SEQ ID NO: 738489 - DNA, 25 bp, Homo sapien
aaaactgcggttgctctgataagcc

SEQ ID NO: 738490 - DNA, 25 bp, Homo sapien
tatttaccaagccacaggagaggga

SEQ ID NO: 738491 - DNA, 25 bp, Homo sapien
caaaacttggagatgggtacctagg

SEQ ID NO: 738492 - DNA, 25 bp, Homo sapien
gatgcgccagcgaagtatgtcacca

SEQ ID NO: 738493 - DNA, 25 bp, Homo sapien
agaaaagagagcttaacgcgcgcgg

SEQ ID NO: 738494 - DNA, 25 bp, Homo sapien
aaggaaacccgcagctaatggctcg

SEQ ID NO: 738495 - DNA, 25 bp, Homo sapien
gaaacgtctgccacagcgaagatga

SEQ ID NO: 738496 - DNA, 25 bp, Homo sapien
ctcggcgagcgcaagtggataaata

SEQ ID NO: 738497 - DNA, 25 bp, Homo sapien
gtctggaccgcgaccgcggcggtgg

SEQ ID NO: 738498 - DNA, 25 bp, Homo sapien
cggtggcggtgggagctagggtcac

SEQ ID NO: 738499 - DNA, 25 bp, Homo sapien
gcggccggacggatcttggttgcaa

SEQ ID NO: 738500 - DNA, 25 bp, Homo sapien
ggtcaccttgtgaagcgagcgctcc

SEQ ID NO: 738501 - DNA, 25 bp, Homo sapien
gcaccattttctcgggcggctccgg

SEQ ID NO: 738502 - DNA, 25 bp, Homo sapien
ccacggcttcggacaaatttgagac

SEQ ID NO: 738503 - DNA, 25 bp, Homo sapien
aaacacaaccatgtcctttcggctc

SEQ ID NO: 738504 - DNA, 25 bp, Homo sapien
ttgccaaccagagtgccaagctgac

SEQ ID NO: 738505 - DNA, 25 bp, Homo sapien
ccagctacctggggctcggcgcccg

SEQ ID NO: 738506 - DNA, 25 bp, Homo sapien
gccgcgctgcctgcgagtccatcta

SEQ ID NO: 738507 - DNA, 25 bp, Homo sapien
ggtcctgggccgagcatggccgccc

SEQ ID NO: 738508 - DNA, 25 bp, Homo sapien
gtccggagaggctgtcgactgaggg

SEQ ID NO: 738509 - DNA, 25 bp, Homo sapien
tccgactcggtgtccgagctactgg

SEQ ID NO: 738510 - DNA, 25 bp, Homo sapien
ttcttcatagaaatccgactcggtg

SEQ ID NO: 738511 - DNA, 25 bp, Homo sapien
tcttcatagaaatccgactcggtgt

SEQ ID NO: 738512 - DNA, 25 bp, Homo sapien
cggtgtccgagctactgggttgccc

SEQ ID NO: 738513 - DNA, 25 bp, Homo sapien
ttgctgtgctggtactcggcgttcc

SEQ ID NO: 738514 - DNA, 25 bp, Homo sapien
cggcgttcccggtggcgcagtccgg

SEQ ID NO: 738515 - DNA, 25 bp, Homo sapien
ctttgctgtgctggtactcggcgtt

SEQ ID NO: 738516 - DNA, 25 bp, Homo sapien
tgtgctggtactcggcgttcccggt

SEQ ID NO: 738517 - DNA, 25 bp, Homo sapien
aggggaagggagtgtcttcctcctg

SEQ ID NO: 738518 - DNA, 25 bp, Homo sapien
ctcctggcctgcgccgaagtgaagg

SEQ ID NO: 738519 - DNA, 25 bp, Homo sapien
ggcctgcgccgaagtgaagggtggg

SEQ ID NO: 738520 - DNA, 25 bp, Homo sapien
aagtgaagggtgggcgcagtgggag

SEQ ID NO: 738521 - DNA, 25 bp, Homo sapien
gaagggtggggctccagccccctgc

SEQ ID NO: 738522 - DNA, 25 bp, Homo sapien
cctgcagctccttttcctttgggtg

SEQ ID NO: 738523 - DNA, 25 bp, Homo sapien
cagctccttttcctttgggtggaga

SEQ ID NO: 738524 - DNA, 25 bp, Homo sapien
ctctgagaagggtggggctccagcc

SEQ ID NO: 738525 - DNA, 25 bp, Homo sapien
catgagttgagatgcacctttgtgc

SEQ ID NO: 738526 - DNA, 25 bp, Homo sapien
caagtgcattgtagtatgctgggca

SEQ ID NO: 738527 - DNA, 25 bp, Homo sapien
gatttgggaagggacaccctgtcag

SEQ ID NO: 738528 - DNA, 25 bp, Homo sapien
aactgtttctgctagggtactgcgg

SEQ ID NO: 738529 - DNA, 25 bp, Homo sapien
agagcacaggcgtgtacagacacag

SEQ ID NO: 738530 - DNA, 25 bp, Homo sapien
ctgcacagcgagtccagagcacagg

SEQ ID NO: 738531 - DNA, 25 bp, Homo sapien
gcacaggcgtgtacagacacagaca

SEQ ID NO: 738532 - DNA, 25 bp, Homo sapien
cacacaaacgccattgaagtggggc

SEQ ID NO: 738533 - DNA, 25 bp, Homo sapien
ctgcacgccagggtgccttgcgagc

SEQ ID NO: 738534 - DNA, 25 bp, Homo sapien
cctggatacgtagttctcccggtag

SEQ ID NO: 738535 - DNA, 25 bp, Homo sapien
taacgacgcatctggtcactggcgc

SEQ ID NO: 738536 - DNA, 25 bp, Homo sapien
cgcgcaatctgctctcgggtgaagg

SEQ ID NO: 738537 - DNA, 25 bp, Homo sapien
tggggagaggagcggagcaggttca

SEQ ID NO: 738538 - DNA, 25 bp, Homo sapien
gagaggagcggagcaggttcagtag

SEQ ID NO: 738539 - DNA, 25 bp, Homo sapien
ctggggagaggagcggagcaggttc

SEQ ID NO: 738540 - DNA, 25 bp, Homo sapien
gggagaggagcggagcaggttcagt

SEQ ID NO: 738541 - DNA, 25 bp, Homo sapien
cggccgccgcatggctcatcatgta

SEQ ID NO: 738542 - DNA, 25 bp, Homo sapien
gctgcgacagcacgcggaacgtgtc

SEQ ID NO: 738543 - DNA, 25 bp, Homo sapien
tccctctggtccagcgcgacggagg

SEQ ID NO: 738544 - DNA, 25 bp, Homo sapien
ccttgctgagcaccgagggcgcgaa

SEQ ID NO: 738545 - DNA, 25 bp, Homo sapien
gtgaccccacgggcgtcatggagcc

SEQ ID NO: 738546 - DNA, 25 bp, Homo sapien
aggctgccccggaggaaggtctctc

SEQ ID NO: 738547 - DNA, 25 bp, Homo sapien
tttccaattcttgcggccggatccc

SEQ ID NO: 738548 - DNA, 25 bp, Homo sapien
ggaggaaggtctctcaagctctgct

SEQ ID NO: 738549 - DNA, 25 bp, Homo sapien
ggtgagaagggagtgtgaggtggag

SEQ ID NO: 738550 - DNA, 25 bp, Homo sapien
actggatattggttgctgttgctgc

SEQ ID NO: 738551 - DNA, 25 bp, Homo sapien
tttgtttagctttggagctacagcc

SEQ ID NO: 738552 - DNA, 25 bp, Homo sapien
ttgttcagagagacagcaatttccc

SEQ ID NO: 738553 - DNA, 25 bp, Homo sapien
tcatagaagcggcaaagggctcctg

SEQ ID NO: 738554 - DNA, 25 bp, Homo sapien
gagccgcaagttgagaagtgtcaca

SEQ ID NO: 738555 - DNA, 25 bp, Homo sapien
ttccctgggcgccttgttaacagct

SEQ ID NO: 738556 - DNA, 25 bp, Homo sapien
gtgtagtcgaggctccaggtcccat

SEQ ID NO: 738557 - DNA, 25 bp, Homo sapien
gaatcataacagcaagttctttggg

SEQ ID NO: 738558 - DNA, 25 bp, Homo sapien
tctgaaagtcaagctccagtggtag

SEQ ID NO: 738559 - DNA, 25 bp, Homo sapien
gaaccactacctctcagtcagggtg

SEQ ID NO: 738560 - DNA, 25 bp, Homo sapien
aacaaaccctggtggaggccacaga

SEQ ID NO: 738561 - DNA, 25 bp, Homo sapien
gggtggaggcaggttgctcagagac

SEQ ID NO: 738562 - DNA, 25 bp, Homo sapien
tttctgttgctcaaaggattggaac

SEQ ID NO: 738563 - DNA, 25 bp, Homo sapien
tgctcagagaccacaacctgggtcc

SEQ ID NO: 738564 - DNA, 25 bp, Homo sapien
tctgttgctcaaaggattggaacaa

SEQ ID NO: 738565 - DNA, 25 bp, Homo sapien
ctcaggtctctgcagtactcaggct

SEQ ID NO: 738566 - DNA, 25 bp, Homo sapien
gatgatcccaaccaaggagccttcc

SEQ ID NO: 738567 - DNA, 25 bp, Homo sapien
agatgatcccaaccaaggagccttc

SEQ ID NO: 738568 - DNA, 25 bp, Homo sapien
caagatgatcccaaccaaggagcct

SEQ ID NO: 738569 - DNA, 25 bp, Homo sapien
tgcaaaatttaccaggatttggcac

SEQ ID NO: 738570 - DNA, 25 bp, Homo sapien
tatggagcaactgcaaaatttacca

SEQ ID NO: 738571 - DNA, 25 bp, Homo sapien
gcaatctctgcccaatatggagcaa

SEQ ID NO: 738572 - DNA, 25 bp, Homo sapien
aatttaccaggatttggcactcagg

SEQ ID NO: 738573 - DNA, 25 bp, Homo sapien
caagatgtattgttatatcttccac

SEQ ID NO: 738574 - DNA, 25 bp, Homo sapien
acttcaatttggaggaagagaggct

SEQ ID NO: 738575 - DNA, 25 bp, Homo sapien
tacagtcaattaaaggctgctgatt

SEQ ID NO: 738576 - DNA, 25 bp, Homo sapien
gagaggctcaattacccagaaaata

SEQ ID NO: 738577 - DNA, 25 bp, Homo sapien
atagctgtgtagacctggagcctcc

SEQ ID NO: 738578 - DNA, 25 bp, Homo sapien
gagctcatagctacatcggccacta

SEQ ID NO: 738579 - DNA, 25 bp, Homo sapien
gctacatcggccactaatagctgtg

SEQ ID NO: 738580 - DNA, 25 bp, Homo sapien
tgggagcccggagctcatagctaca

SEQ ID NO: 738581 - DNA, 25 bp, Homo sapien
gcaatcagtttggtcacacttacaa

SEQ ID NO: 738582 - DNA, 25 bp, Homo sapien
cctctttatcctgttgtttaaaatg

SEQ ID NO: 738583 - DNA, 25 bp, Homo sapien
aaaatgagcattatcccaaacatat

SEQ ID NO: 738584 - DNA, 25 bp, Homo sapien
caagaacacgctttaataaggcaat

SEQ ID NO: 738585 - DNA, 25 bp, Homo sapien
cataatcactaaagaaaccgttcgt

SEQ ID NO: 738586 - DNA, 25 bp, Homo sapien
gcctagggcaaggagatgcattctg

SEQ ID NO: 738587 - DNA, 25 bp, Homo sapien
gcatgccacattgggagacaggatc

SEQ ID NO: 738588 - DNA, 25 bp, Homo sapien
ctaggaaggtggagtcaacataatc

SEQ ID NO: 738589 - DNA, 25 bp, Homo sapien
gcttattctccggcggacatatggt

SEQ ID NO: 738590 - DNA, 25 bp, Homo sapien
ggtggctggtgtttccgcagttggg

SEQ ID NO: 738591 - DNA, 25 bp, Homo sapien
tccgcagttggggaataatggaagc

SEQ ID NO: 738592 - DNA, 25 bp, Homo sapien
ttctccggcggacatatggtggctg

SEQ ID NO: 738593 - DNA, 25 bp, Homo sapien
gcggcaactgtccaccgcgacactc

SEQ ID NO: 738594 - DNA, 25 bp, Homo sapien
ggcaactgtccaccgcgacactcac

SEQ ID NO: 738595 - DNA, 25 bp, Homo sapien
ctttggcggcaactgtccaccgcga

SEQ ID NO: 738596 - DNA, 25 bp, Homo sapien
ttggcggcaactgtccaccgcgaca

SEQ ID NO: 738597 - DNA, 25 bp, Homo sapien
cattcttgggtgatgatgtatggag

SEQ ID NO: 738598 - DNA, 25 bp, Homo sapien
ctttgccataacaaatggtggcagg

SEQ ID NO: 738599 - DNA, 25 bp, Homo sapien
tgtatggagaggatgctaagatccc

SEQ ID NO: 738600 - DNA, 25 bp, Homo sapien
tactttgagaatgccatccgtctgg

SEQ ID NO: 738601 - DNA, 25 bp, Homo sapien
catatcccaaaggtatcccttagaa

SEQ ID NO: 738602 - DNA, 25 bp, Homo sapien
tccaacatatcccaaaggtatccct

SEQ ID NO: 738603 - DNA, 25 bp, Homo sapien
attccaacatatcccaaaggtatcc

SEQ ID NO: 738604 - DNA, 25 bp, Homo sapien
caacatatcccaaaggtatccctta

SEQ ID NO: 738605 - DNA, 25 bp, Homo sapien
ttctgatttgtactgatgaccgtca

SEQ ID NO: 738606 - DNA, 25 bp, Homo sapien
gatttgtactgatgaccgtcatcat

SEQ ID NO: 738607 - DNA, 25 bp, Homo sapien
tctgatttgtactgatgaccgtcat

SEQ ID NO: 738608 - DNA, 25 bp, Homo sapien
ctgatttgtactgatgaccgtcatc

SEQ ID NO: 738609 - DNA, 25 bp, Homo sapien
taaataatctcgatgaagacgcaag

SEQ ID NO: 738610 - DNA, 25 bp, Homo sapien
cccgcgatggcgaataatattggaa

SEQ ID NO: 738611 - DNA, 25 bp, Homo sapien
tttcacaagattggacaattgattc

SEQ ID NO: 738612 - DNA, 25 bp, Homo sapien
caattgattcaatctgtgacccgcg

SEQ ID NO: 738613 - DNA, 25 bp, Homo sapien
ccacctcctgcaactaattactccc

SEQ ID NO: 738614 - DNA, 25 bp, Homo sapien
tgtggggtacatgtaccgtccctgt

SEQ ID NO: 738615 - DNA, 25 bp, Homo sapien
tacatgtaccgtccctgtcttctga

SEQ ID NO: 738616 - DNA, 25 bp, Homo sapien
ataaaatgtatggccccattaggaa

SEQ ID NO: 738617 - DNA, 25 bp, Homo sapien
gactggatggagaaaggatcagcca

SEQ ID NO: 738618 - DNA, 25 bp, Homo sapien
caccaccagttcttgcatagggatg

SEQ ID NO: 738619 - DNA, 25 bp, Homo sapien
taaagggctctttgagtgtttagac

SEQ ID NO: 738620 - DNA, 25 bp, Homo sapien
gaaggtagccacgatattgtcccga

SEQ ID NO: 738621 - DNA, 25 bp, Homo sapien
agttgtccctgggtatccacatggt

SEQ ID NO: 738622 - DNA, 25 bp, Homo sapien
tggtattagttccaagacccaactc

SEQ ID NO: 738623 - DNA, 25 bp, Homo sapien
gaaagagcgaatgtacagttgtccc

SEQ ID NO: 738624 - DNA, 25 bp, Homo sapien
taaaaaagaaagagcgaatgtacag

SEQ ID NO: 738625 - DNA, 25 bp, Homo sapien
tttctccagcttgggcgtaagccac

SEQ ID NO: 738626 - DNA, 25 bp, Homo sapien
aattttgtgcgttttctccagcttg

SEQ ID NO: 738627 - DNA, 25 bp, Homo sapien
ttaattttgtgcgttttctccagct

SEQ ID NO: 738628 - DNA, 25 bp, Homo sapien
ttttctccagcttgggcgtaagcca

SEQ ID NO: 738629 - DNA, 25 bp, Homo sapien
gcagatttaagcaccaatcgtccag

SEQ ID NO: 738630 - DNA, 25 bp, Homo sapien
tccagtgcgtgaataaaagactcca

SEQ ID NO: 738631 - DNA, 25 bp, Homo sapien
cgtgaataaaagactccacatcctt

SEQ ID NO: 738632 - DNA, 25 bp, Homo sapien
cacgtgtccaggttcccgcagattt

SEQ ID NO: 738633 - DNA, 25 bp, Homo sapien
ttatggccccataaatgagtcctga

SEQ ID NO: 738634 - DNA, 25 bp, Homo sapien
tgagtcctgacttaccaatgtgaat

SEQ ID NO: 738635 - DNA, 25 bp, Homo sapien
caaattatagctggcccacccattt

SEQ ID NO: 738636 - DNA, 25 bp, Homo sapien
gaattcttgttcctagcagtgtcag

SEQ ID NO: 738637 - DNA, 25 bp, Homo sapien
ccatgggtatgaaatagtgagctcc

SEQ ID NO: 738638 - DNA, 25 bp, Homo sapien
gagccactgtagattcagcactgca

SEQ ID NO: 738639 - DNA, 25 bp, Homo sapien
gagatccagcataaaaaagggccgc

SEQ ID NO: 738640 - DNA, 25 bp, Homo sapien
tttaatgagcattttacccagggca

SEQ ID NO: 738641 - DNA, 25 bp, Homo sapien
gactctctttccagcaacgacacct

SEQ ID NO: 738642 - DNA, 25 bp, Homo sapien
ggtggaggtgaaggagagttgtaac

SEQ ID NO: 738643 - DNA, 25 bp, Homo sapien
gagagttgtaacatcctctgaaagg

SEQ ID NO: 738644 - DNA, 25 bp, Homo sapien
cacccctggatgctgtgactctctt

SEQ ID NO: 738645 - DNA, 25 bp, Homo sapien
tttttgccggccttacactgtgtaa

SEQ ID NO: 738646 - DNA, 25 bp, Homo sapien
ctgcaaagtcagctctatggaaatg

SEQ ID NO: 738647 - DNA, 25 bp, Homo sapien
cactgtgtaataggttaaactgagc

SEQ ID NO: 738648 - DNA, 25 bp, Homo sapien
tattaagagcagcatatttatttcc

SEQ ID NO: 738649 - DNA, 25 bp, Homo sapien
ttgacgattattgccccagtctgct

SEQ ID NO: 738650 - DNA, 25 bp, Homo sapien
taaatattactttgacgattattgc

SEQ ID NO: 738651 - DNA, 25 bp, Homo sapien
tgctttctctgggagaggtaataaa

SEQ ID NO: 738652 - DNA, 25 bp, Homo sapien
ctttctctgggagaggtaataaata

SEQ ID NO: 738653 - DNA, 25 bp, Homo sapien
gccctgagatgcaatttctgagcaa

SEQ ID NO: 738654 - DNA, 25 bp, Homo sapien
tggctgccctggtaaatcatttatt

SEQ ID NO: 738655 - DNA, 25 bp, Homo sapien
aaaataatgtactctgcaagcagtc

SEQ ID NO: 738656 - DNA, 25 bp, Homo sapien
caacctctcccacaagatacataaa

SEQ ID NO: 738657 - DNA, 25 bp, Homo sapien
gccagtgcagtagaaaagtcagaga

SEQ ID NO: 738658 - DNA, 25 bp, Homo sapien
cagccagtgcagtagaaaagtcaga

SEQ ID NO: 738659 - DNA, 25 bp, Homo sapien
gcagccagtgcagtagaaaagtcag

SEQ ID NO: 738660 - DNA, 25 bp, Homo sapien
tgcagccagtgcagtagaaaagtca

SEQ ID NO: 738661 - DNA, 25 bp, Homo sapien
caggacctggcttttaccgagtgag

SEQ ID NO: 738662 - DNA, 25 bp, Homo sapien
ggttcatgtgtacagaccacctact

SEQ ID NO: 738663 - DNA, 25 bp, Homo sapien
tcaagacctggaggaaccaagggca

SEQ ID NO: 738664 - DNA, 25 bp, Homo sapien
cagtaacaactctaggcattttgga

SEQ ID NO: 738665 - DNA, 25 bp, Homo sapien
ctttctggcatctgacatgattgaa

SEQ ID NO: 738666 - DNA, 25 bp, Homo sapien
cagcttcgttccctttataactggc

SEQ ID NO: 738667 - DNA, 25 bp, Homo sapien
gtttcgattgcaaaatggctcttgg

SEQ ID NO: 738668 - DNA, 25 bp, Homo sapien
tctttcttccaaatggacatgggaa

SEQ ID NO: 738669 - DNA, 25 bp, Homo sapien
catctccacgaggaagtcttacccg

SEQ ID NO: 738670 - DNA, 25 bp, Homo sapien
aagtctatcctaacaagggtgggag

SEQ ID NO: 738671 - DNA, 25 bp, Homo sapien
gaaaaggaacactctggttgcttca

SEQ ID NO: 738672 - DNA, 25 bp, Homo sapien
ccacattgaaggcagattgagtgtc

SEQ ID NO: 738673 - DNA, 25 bp, Homo sapien
ttactctaaacttgtccattgcttt

SEQ ID NO: 738674 - DNA, 25 bp, Homo sapien
tactctaaacttgtccattgctttt

SEQ ID NO: 738675 - DNA, 25 bp, Homo sapien
actctaaacttgtccattgcttttt

SEQ ID NO: 738676 - DNA, 25 bp, Homo sapien
gaagtcatcatttactctaaacttg

SEQ ID NO: 738677 - DNA, 25 bp, Homo sapien
aaactcctgcgcagtcttgattcag

SEQ ID NO: 738678 - DNA, 25 bp, Homo sapien
ctggcagcaagagtaggctaaactc

SEQ ID NO: 738679 - DNA, 25 bp, Homo sapien
ggtggtcaacaaagccagcacctgg

SEQ ID NO: 738680 - DNA, 25 bp, Homo sapien
aatccactcggagactcacattgag

SEQ ID NO: 738681 - DNA, 25 bp, Homo sapien
tctgatgttataagatctcttaagg

SEQ ID NO: 738682 - DNA, 25 bp, Homo sapien
atctcatcggggctggagtcagact

SEQ ID NO: 738683 - DNA, 25 bp, Homo sapien
tgggcatgtgagctgaccacatctc

SEQ ID NO: 738684 - DNA, 25 bp, Homo sapien
ctcttaagggagttctcttgccaag

SEQ ID NO: 738685 - DNA, 25 bp, Homo sapien
cagggacaggattggccaccttctt

SEQ ID NO: 738686 - DNA, 25 bp, Homo sapien
ccttgtcttggcaaaatgcaggtgc

SEQ ID NO: 738687 - DNA, 25 bp, Homo sapien
gagaggccagtgattcccaaggaat

SEQ ID NO: 738688 - DNA, 25 bp, Homo sapien
ctctgaggagcctgaggaaataaat

SEQ ID NO: 738689 - DNA, 25 bp, Homo sapien
tcagactagcagtggatccctcgga

SEQ ID NO: 738690 - DNA, 25 bp, Homo sapien
gcagtggatccctcggaagaaaccc

SEQ ID NO: 738691 - DNA, 25 bp, Homo sapien
ctagcagtggatccctcggaagaaa

SEQ ID NO: 738692 - DNA, 25 bp, Homo sapien
gactagcagtggatccctcggaaga

SEQ ID NO: 738693 - DNA, 25 bp, Homo sapien
tgagatccgcctagttctgtctcct

SEQ ID NO: 738694 - DNA, 25 bp, Homo sapien
tgacaccactttcgctcaggctctt

SEQ ID NO: 738695 - DNA, 25 bp, Homo sapien
tcttccccagttgttctgtgccaga

SEQ ID NO: 738696 - DNA, 25 bp, Homo sapien
gatccactgagatccgcctagttct

SEQ ID NO: 738697 - DNA, 25 bp, Homo sapien
ggcacccagcggaatgtgcttagta

SEQ ID NO: 738698 - DNA, 25 bp, Homo sapien
cccagcggaatgtgcttagtatttg

SEQ ID NO: 738699 - DNA, 25 bp, Homo sapien
ggaatgtgcttagtatttggtcacc

SEQ ID NO: 738700 - DNA, 25 bp, Homo sapien
ttagtatttggtcaccagccgtcat

SEQ ID NO: 738701 - DNA, 25 bp, Homo sapien
ggcttttgagcttgaacgcctgcgt

SEQ ID NO: 738702 - DNA, 25 bp, Homo sapien
tgctaggggttaggcttttgagctt

SEQ ID NO: 738703 - DNA, 25 bp, Homo sapien
aacgcctgcgtgtgaacagatgaaa

SEQ ID NO: 738704 - DNA, 25 bp, Homo sapien
gagcttgaacgcctgcgtgtgaaca

SEQ ID NO: 738705 - DNA, 25 bp, Homo sapien
actgcggcgctgacacagcgtttcc

SEQ ID NO: 738706 - DNA, 25 bp, Homo sapien
tggtgctggcgctgcactgggctga

SEQ ID NO: 738707 - DNA, 25 bp, Homo sapien
catccctgttgcctgtgtgttgtgt

SEQ ID NO: 738708 - DNA, 25 bp, Homo sapien
actgggctgactgcggcgctgacac

SEQ ID NO: 738709 - DNA, 25 bp, Homo sapien
tggaagagcggtagggagtccacgg

SEQ ID NO: 738710 - DNA, 25 bp, Homo sapien
gaatgcttgcatgcattcacacgtg

SEQ ID NO: 738711 - DNA, 25 bp, Homo sapien
tagttcactcctttcgccgtgcgtg

SEQ ID NO: 738712 - DNA, 25 bp, Homo sapien
gggagtccacggagaagatgcagtg

SEQ ID NO: 738713 - DNA, 25 bp, Homo sapien
tcccgagtggactgtccaagcagat

SEQ ID NO: 738714 - DNA, 25 bp, Homo sapien
cctcccgagtggactgtccaagcag

SEQ ID NO: 738715 - DNA, 25 bp, Homo sapien
cccgagtggactgtccaagcagata

SEQ ID NO: 738716 - DNA, 25 bp, Homo sapien
gagtggactgtccaagcagataggc

SEQ ID NO: 738717 - DNA, 25 bp, Homo sapien
taaggaagccttgacatacgatggt

SEQ ID NO: 738718 - DNA, 25 bp, Homo sapien
ggcgatcggtcacttcgtgtggaca

SEQ ID NO: 738719 - DNA, 25 bp, Homo sapien
gaccagatgacagaggcttcaggga

SEQ ID NO: 738720 - DNA, 25 bp, Homo sapien
gatctcagcataaggagtgtacggc

SEQ ID NO: 738721 - DNA, 25 bp, Homo sapien
tcctcactctagctggtataggagg

SEQ ID NO: 738722 - DNA, 25 bp, Homo sapien
ttcttcctcactctagctggtatag

SEQ ID NO: 738723 - DNA, 25 bp, Homo sapien
tcactctagctggtataggaggttc

SEQ ID NO: 738724 - DNA, 25 bp, Homo sapien
catgagaagacagtatttaattatc

SEQ ID NO: 738725 - DNA, 25 bp, Homo sapien
ttgtgactagggtatccgtgtcatc

SEQ ID NO: 738726 - DNA, 25 bp, Homo sapien
catcattgtgactagggtatccgtg

SEQ ID NO: 738727 - DNA, 25 bp, Homo sapien
tcattgtgactagggtatccgtgtc

SEQ ID NO: 738728 - DNA, 25 bp, Homo sapien
tcatcattgtgactagggtatccgt

SEQ ID NO: 738729 - DNA, 25 bp, Homo sapien
agtatcaacacaggtctcctggggg

SEQ ID NO: 738730 - DNA, 25 bp, Homo sapien
cttcataatattcagaatgatttcc

SEQ ID NO: 738731 - DNA, 25 bp, Homo sapien
caaccccccagtatcaacacaggtc

SEQ ID NO: 738732 - DNA, 25 bp, Homo sapien
tgaatttggctgtccaaccccccag

SEQ ID NO: 738733 - DNA, 25 bp, Homo sapien
tgaatgactcccttagggggcttta

SEQ ID NO: 738734 - DNA, 25 bp, Homo sapien
accatagtgaatgactcccttaggg

SEQ ID NO: 738735 - DNA, 25 bp, Homo sapien
tagtgaatgactcccttagggggct

SEQ ID NO: 738736 - DNA, 25 bp, Homo sapien
ggtggaccatagtgaatgactccct

SEQ ID NO: 738737 - DNA, 25 bp, Homo sapien
tcagagctgatcacttgcaagaaag

SEQ ID NO: 738738 - DNA, 25 bp, Homo sapien
cttgcaagaaagtggctaagatgtg

SEQ ID NO: 738739 - DNA, 25 bp, Homo sapien
ggctaagatgtggtttgctactgct

SEQ ID NO: 738740 - DNA, 25 bp, Homo sapien
gaataaattcagagctgatcacttg

SEQ ID NO: 738741 - DNA, 25 bp, Homo sapien
ctttttgtcctaatagcatcaattt

SEQ ID NO: 738742 - DNA, 25 bp, Homo sapien
agtttgggcccatcatgtaggtatt

SEQ ID NO: 738743 - DNA, 25 bp, Homo sapien
caagtgtcaagtcgttccagggtta

SEQ ID NO: 738744 - DNA, 25 bp, Homo sapien
ctattcggcttgtggatatgataac

SEQ ID NO: 738745 - DNA, 25 bp, Homo sapien
catgttcttttaaggccatcagact

SEQ ID NO: 738746 - DNA, 25 bp, Homo sapien
gacagagccccttgggggtgtcttc

SEQ ID NO: 738747 - DNA, 25 bp, Homo sapien
ggtgtcttcctgttctttataaaga

SEQ ID NO: 738748 - DNA, 25 bp, Homo sapien
ttgttactttcattccatgttcttt

SEQ ID NO: 738749 - DNA, 25 bp, Homo sapien
ctctgcagaaccgtctcctaccatc

SEQ ID NO: 738750 - DNA, 25 bp, Homo sapien
tctgcagaaccgtctcctaccatcc

SEQ ID NO: 738751 - DNA, 25 bp, Homo sapien
ctgcagaaccgtctcctaccatccc

SEQ ID NO: 738752 - DNA, 25 bp, Homo sapien
gatgttaccctctcgacatgggacg

SEQ ID NO: 738753 - DNA, 25 bp, Homo sapien
ttagcacccagctgatgctccctgg

SEQ ID NO: 738754 - DNA, 25 bp, Homo sapien
gctccagggactgtagtgaggccca

SEQ ID NO: 738755 - DNA, 25 bp, Homo sapien
tcattctcgccttgtatcccaacag

SEQ ID NO: 738756 - DNA, 25 bp, Homo sapien
gaagctctggtgaccgattcagcat

SEQ ID NO: 738757 - DNA, 25 bp, Homo sapien
ttaggtgaagtaatagtggaagctc

SEQ ID NO: 738758 - DNA, 25 bp, Homo sapien
tctaagccggtcattaggtgaagta

SEQ ID NO: 738759 - DNA, 25 bp, Homo sapien
gttgggcttctaagccggtcattag

SEQ ID NO: 738760 - DNA, 25 bp, Homo sapien
gtaagccctgatcctttgccttgtt

SEQ ID NO: 738761 - DNA, 25 bp, Homo sapien
cattattgtgctccagcatcgtggg

SEQ ID NO: 738762 - DNA, 25 bp, Homo sapien
cccattattgtgctccagcatcgtg

SEQ ID NO: 738763 - DNA, 25 bp, Homo sapien
acctcctggtaagccctgatccttt

SEQ ID NO: 738764 - DNA, 25 bp, Homo sapien
cgccaaggcgaagccgacagctgga

SEQ ID NO: 738765 - DNA, 25 bp, Homo sapien
ccaaggcgaagccgacagctggaag

SEQ ID NO: 738766 - DNA, 25 bp, Homo sapien
caaggcgaagccgacagctggaagg

SEQ ID NO: 738767 - DNA, 25 bp, Homo sapien
accgccaaggcgaagccgacagctg

SEQ ID NO: 738768 - DNA, 25 bp, Homo sapien
gtgtgacactcacactgatagccca

SEQ ID NO: 738769 - DNA, 25 bp, Homo sapien
tgtgacactcacactgatagcccat

SEQ ID NO: 738770 - DNA, 25 bp, Homo sapien
gtgtgtgacactcacactgatagcc

SEQ ID NO: 738771 - DNA, 25 bp, Homo sapien
tgtgtgacactcacactgatagccc

SEQ ID NO: 738772 - DNA, 25 bp, Homo sapien
aaggagcaggctggtgagccccagc

SEQ ID NO: 738773 - DNA, 25 bp, Homo sapien
ggagcaggctggtgagccccagcat

SEQ ID NO: 738774 - DNA, 25 bp, Homo sapien
tgaaggagcaggctggtgagcccca

SEQ ID NO: 738775 - DNA, 25 bp, Homo sapien
cttgaaggagcaggctggtgagccc

SEQ ID NO: 738776 - DNA, 25 bp, Homo sapien
tgtgagtcttcccttaccatctgcg

SEQ ID NO: 738777 - DNA, 25 bp, Homo sapien
atccatgaatagatgtggcctcctg

SEQ ID NO: 738778 - DNA, 25 bp, Homo sapien
gggcaggcacgggactggccgcttc

SEQ ID NO: 738779 - DNA, 25 bp, Homo sapien
cttcccagacatccatgaatagatg

SEQ ID NO: 738780 - DNA, 25 bp, Homo sapien
ttccacaggtcactggctagcctag

SEQ ID NO: 738781 - DNA, 25 bp, Homo sapien
tgatgggtccaataaaacgttttgc

SEQ ID NO: 738782 - DNA, 25 bp, Homo sapien
ctagaattggactctggatcagctc

SEQ ID NO: 738783 - DNA, 25 bp, Homo sapien
tctaaattctcaagagctagaatct

SEQ ID NO: 738784 - DNA, 25 bp, Homo sapien
agacagatcttgctgaatgaattcc

SEQ ID NO: 738785 - DNA, 25 bp, Homo sapien
cagtggtctgcaaggtcatattctg

SEQ ID NO: 738786 - DNA, 25 bp, Homo sapien
agatcttgctgaatgaattccactc

SEQ ID NO: 738787 - DNA, 25 bp, Homo sapien
gcagtggtctgcaaggtcatattct

SEQ ID NO: 738788 - DNA, 25 bp, Homo sapien
tccagggagctgataaagcaggaga

SEQ ID NO: 738789 - DNA, 25 bp, Homo sapien
tctgtgtccatcaggaagtttgtcc

SEQ ID NO: 738790 - DNA, 25 bp, Homo sapien
ttggactccgtcacaatatggtagg

SEQ ID NO: 738791 - DNA, 25 bp, Homo sapien
gcaagccactgatagtctctgctaa

SEQ ID NO: 738792 - DNA, 25 bp, Homo sapien
gatggctcacattgcagcccaagtc

SEQ ID NO: 738793 - DNA, 25 bp, Homo sapien
ctgtagaaaatgattagaacaattg

SEQ ID NO: 738794 - DNA, 25 bp, Homo sapien
tttaaagatggctcacattgcagcc

SEQ ID NO: 738795 - DNA, 25 bp, Homo sapien
tagaaaatgattagaacaattgcat

SEQ ID NO: 738796 - DNA, 25 bp, Homo sapien
catagcaagtcgtaaatggtccctg

SEQ ID NO: 738797 - DNA, 25 bp, Homo sapien
tctgtcccagctgtcgcctttttct

SEQ ID NO: 738798 - DNA, 25 bp, Homo sapien
cccagctgtcgcctttttctgcgaa

SEQ ID NO: 738799 - DNA, 25 bp, Homo sapien
ttatattgttcgttgagtagcagct

SEQ ID NO: 738800 - DNA, 25 bp, Homo sapien
tattgttcgttgagtagcagctttc

SEQ ID NO: 738801 - DNA, 25 bp, Homo sapien
gactgcagcttgatggtcattatgg

SEQ ID NO: 738802 - DNA, 25 bp, Homo sapien
tgaaccaggtctgcaaatgtagcag

SEQ ID NO: 738803 - DNA, 25 bp, Homo sapien
cagcttgatggtcattatgggtaaa

SEQ ID NO: 738804 - DNA, 25 bp, Homo sapien
ttatgggtaaataatgaaccaggtc

SEQ ID NO: 738805 - DNA, 25 bp, Homo sapien
tgtgaagacacaatgttcctcccct

SEQ ID NO: 738806 - DNA, 25 bp, Homo sapien
tcagacagccattactaagaaggaa

SEQ ID NO: 738807 - DNA, 25 bp, Homo sapien
cttaatggagggattttgttctgct

SEQ ID NO: 738808 - DNA, 25 bp, Homo sapien
cttgtatattgtgctacggtttgaa

SEQ ID NO: 738809 - DNA, 25 bp, Homo sapien
cagagccttgggatcccctgagata

SEQ ID NO: 738810 - DNA, 25 bp, Homo sapien
tcctggctgatgcacatctaggaca

SEQ ID NO: 738811 - DNA, 25 bp, Homo sapien
ttcatagaattggagcaagacccag

SEQ ID NO: 738812 - DNA, 25 bp, Homo sapien
gaagagacaagataccaaccctgag

SEQ ID NO: 738813 - DNA, 25 bp, Homo sapien
aagggtgttctatggatcgtaagcc

SEQ ID NO: 738814 - DNA, 25 bp, Homo sapien
cgtaagcctgctagttaaagaatct

SEQ ID NO: 738815 - DNA, 25 bp, Homo sapien
caatagtagctctgaatttatgggc

SEQ ID NO: 738816 - DNA, 25 bp, Homo sapien
caaagaggccataacttctgggaga

SEQ ID NO: 738817 - DNA, 25 bp, Homo sapien
caaataatcgagtagtaatctgaaa

SEQ ID NO: 738818 - DNA, 25 bp, Homo sapien
ctctggacgttaacatttgtgagta

SEQ ID NO: 738819 - DNA, 25 bp, Homo sapien
aaacaggggctctggacgttaacat

SEQ ID NO: 738820 - DNA, 25 bp, Homo sapien
gaccaaataatcgagtagtaatctg

SEQ ID NO: 738821 - DNA, 25 bp, Homo sapien
cacaagcctaactatgagattcatt

SEQ ID NO: 738822 - DNA, 25 bp, Homo sapien
tcattaggcagttcatgttcatgtc

SEQ ID NO: 738823 - DNA, 25 bp, Homo sapien
gaatccagcgtataaaaattctcac

SEQ ID NO: 738824 - DNA, 25 bp, Homo sapien
tgcaagttggtccttttcacaagcc

SEQ ID NO: 738825 - DNA, 25 bp, Homo sapien
ttagtcctgaagaagaggtgcccat

SEQ ID NO: 738826 - DNA, 25 bp, Homo sapien
cattcaaagaagactggtgactcac

SEQ ID NO: 738827 - DNA, 25 bp, Homo sapien
tttggcatgcctaagactgccttgc

SEQ ID NO: 738828 - DNA, 25 bp, Homo sapien
cccaagataacatggttgaggcagc

SEQ ID NO: 738829 - DNA, 25 bp, Homo sapien
ccttggactctagtgttctcttcta

SEQ ID NO: 738830 - DNA, 25 bp, Homo sapien
gctgtgaattcacccttggactcta

SEQ ID NO: 738831 - DNA, 25 bp, Homo sapien
gatcttggttaagctggctgcttcc

SEQ ID NO: 738832 - DNA, 25 bp, Homo sapien
ccctcggggctcttggttgatcttg

SEQ ID NO: 738833 - DNA, 25 bp, Homo sapien
ctgaacaggtagggctaaaatgtgg

SEQ ID NO: 738834 - DNA, 25 bp, Homo sapien
gatggagcttgtaaagggtctgaac

SEQ ID NO: 738835 - DNA, 25 bp, Homo sapien
gaagaaaccgcattcctgtgcagag

SEQ ID NO: 738836 - DNA, 25 bp, Homo sapien
taattgtagggcagtcaaatgagac

SEQ ID NO: 738837 - DNA, 25 bp, Homo sapien
taacataactgaatacacctgaacc

SEQ ID NO: 738838 - DNA, 25 bp, Homo sapien
ggttaaccagtatataatagcagct

SEQ ID NO: 738839 - DNA, 25 bp, Homo sapien
ctaataagcagttttaaggttggcg

SEQ ID NO: 738840 - DNA, 25 bp, Homo sapien
cacctgaacctgcatatgtagtaga

SEQ ID NO: 738841 - DNA, 25 bp, Homo sapien
tatgctgtttaggaatccaacttgg

SEQ ID NO: 738842 - DNA, 25 bp, Homo sapien
tcactgatgaatcctacagttgagt

SEQ ID NO: 738843 - DNA, 25 bp, Homo sapien
tcaaagtgtataccaaagattatgc

SEQ ID NO: 738844 - DNA, 25 bp, Homo sapien
gagttaccagcgttgttgtactaga

SEQ ID NO: 738845 - DNA, 25 bp, Homo sapien
agtactaatatttgctgcaacattg

SEQ ID NO: 738846 - DNA, 25 bp, Homo sapien
cttttcctgaaagtccagaataagg

SEQ ID NO: 738847 - DNA, 25 bp, Homo sapien
gaaagttgggcatagaggaatgata

SEQ ID NO: 738848 - DNA, 25 bp, Homo sapien
aggaagtctatatagagacacaaag

SEQ ID NO: 738849 - DNA, 25 bp, Homo sapien
ggcttcaaagactccagttggattc

SEQ ID NO: 738850 - DNA, 25 bp, Homo sapien
tccctgatgcctgcaaagagtttca

SEQ ID NO: 738851 - DNA, 25 bp, Homo sapien
ggattcattggactgggcaacatgg

SEQ ID NO: 738852 - DNA, 25 bp, Homo sapien
cagtgtgttctaggtcagtggcttc

SEQ ID NO: 738853 - DNA, 25 bp, Homo sapien
cagaactttaacttagggctggcag

SEQ ID NO: 738854 - DNA, 25 bp, Homo sapien
ccagctgtcacttagcttggtgata

SEQ ID NO: 738855 - DNA, 25 bp, Homo sapien
tgctgattagatacaatgctttcat

SEQ ID NO: 738856 - DNA, 25 bp, Homo sapien
ttcagcctcttgttgtatttctgga

SEQ ID NO: 738857 - DNA, 25 bp, Homo sapien
taatacagtctttcatactccgcac

SEQ ID NO: 738858 - DNA, 25 bp, Homo sapien
gatccacggagatctaatacagtct

SEQ ID NO: 738859 - DNA, 25 bp, Homo sapien
aggatgaagatccacggagatctaa

SEQ ID NO: 738860 - DNA, 25 bp, Homo sapien
gtctttcatactccgcacgagggac

SEQ ID NO: 738861 - DNA, 25 bp, Homo sapien
cccagcgacccctggtctttcagcg

SEQ ID NO: 738862 - DNA, 25 bp, Homo sapien
cagcagggcctgatgtttaaccacc

SEQ ID NO: 738863 - DNA, 25 bp, Homo sapien
agcgacccctggtctttcagcgccc

SEQ ID NO: 738864 - DNA, 25 bp, Homo sapien
taaccacctgagtccgaggggatgg

SEQ ID NO: 738865 - DNA, 25 bp, Homo sapien
ctgtccagacggccgaagaagtctt

SEQ ID NO: 738866 - DNA, 25 bp, Homo sapien
tgtccagacggccgaagaagtcttt

SEQ ID NO: 738867 - DNA, 25 bp, Homo sapien
tccagacggccgaagaagtcttttc

SEQ ID NO: 738868 - DNA, 25 bp, Homo sapien
tcggagctgcctccggtctccggta

SEQ ID NO: 738869 - DNA, 25 bp, Homo sapien
ctccggtctccggtactggagccgg

SEQ ID NO: 738870 - DNA, 25 bp, Homo sapien
gcagccggcagctttgcagcgggta

SEQ ID NO: 738871 - DNA, 25 bp, Homo sapien
gagctgcctccggtctccggtactg

SEQ ID NO: 738872 - DNA, 25 bp, Homo sapien
gaggggcgggcgcagcatggcagcc

SEQ ID NO: 738873 - DNA, 25 bp, Homo sapien
cgggcgcagcatggcagcctcctta

SEQ ID NO: 738874 - DNA, 25 bp, Homo sapien
gggagaggggcgggcgcagcatggc

SEQ ID NO: 738875 - DNA, 25 bp, Homo sapien
gcgggcgcagcatggcagcctcctt

SEQ ID NO: 738876 - DNA, 25 bp, Homo sapien
ttggtccttcgcacagctgcggacc

SEQ ID NO: 738877 - DNA, 25 bp, Homo sapien
attggtccttcgcacagctgcggac

SEQ ID NO: 738878 - DNA, 25 bp, Homo sapien
tattggtccttcgcacagctgcgga

SEQ ID NO: 738879 - DNA, 25 bp, Homo sapien
ttattggtccttcgcacagctgcgg

SEQ ID NO: 738880 - DNA, 25 bp, Homo sapien
ctcagtgaccagtcatagcctttct

SEQ ID NO: 738881 - DNA, 25 bp, Homo sapien
ctaactttccttcactaatgattgt

SEQ ID NO: 738882 - DNA, 25 bp, Homo sapien
tctgacatacaacttggagctatga

SEQ ID NO: 738883 - DNA, 25 bp, Homo sapien
gctccaacattagaaatctcgcaga

SEQ ID NO: 738884 - DNA, 25 bp, Homo sapien
gtccttctgccccataccgtcccat

SEQ ID NO: 738885 - DNA, 25 bp, Homo sapien
caagatcctcatctcaggctttcct

SEQ ID NO: 738886 - DNA, 25 bp, Homo sapien
tcttcaccacgcttcttttgtgctt

SEQ ID NO: 738887 - DNA, 25 bp, Homo sapien
tctctggtaaatttgtacatttgga

SEQ ID NO: 738888 - DNA, 25 bp, Homo sapien
aagaaatcctttagctgtgtggtga

SEQ ID NO: 738889 - DNA, 25 bp, Homo sapien
caagccacatgaggaggacagtaag

SEQ ID NO: 738890 - DNA, 25 bp, Homo sapien
aaagctgagaacattggatcctaaa

SEQ ID NO: 738891 - DNA, 25 bp, Homo sapien
gaacattggatcctaaaactgagga

SEQ ID NO: 738892 - DNA, 25 bp, Homo sapien
gctgagaacattggatcctaaaact

SEQ ID NO: 738893 - DNA, 25 bp, Homo sapien
cctcttgattgctgggaaaacccca

SEQ ID NO: 738894 - DNA, 25 bp, Homo sapien
taaaggggctaatgactaaacagtg

SEQ ID NO: 738895 - DNA, 25 bp, Homo sapien
ctggagcttggccaatgctcatgga

SEQ ID NO: 738896 - DNA, 25 bp, Homo sapien
atatctaatcaatggacagtagcca

SEQ ID NO: 738897 - DNA, 25 bp, Homo sapien
gctcatggaatatctaatcaatgga

SEQ ID NO: 738898 - DNA, 25 bp, Homo sapien
taattgtagcatcagtgttagcaga

SEQ ID NO: 738899 - DNA, 25 bp, Homo sapien
ggctccaccagttagctgcatatag

SEQ ID NO: 738900 - DNA, 25 bp, Homo sapien
tttcatactcccttgttatcgggtc

SEQ ID NO: 738901 - DNA, 25 bp, Homo sapien
ccagagggagacatgacagtaattg

SEQ ID NO: 738902 - DNA, 25 bp, Homo sapien
cagctcagaggtccatggacagtac

SEQ ID NO: 738903 - DNA, 25 bp, Homo sapien
ggcagctcagaggtccatggacagt

SEQ ID NO: 738904 - DNA, 25 bp, Homo sapien
aagggcagctcagaggtccatggac

SEQ ID NO: 738905 - DNA, 25 bp, Homo sapien
cagcgatgtggaaagggcagctcag

SEQ ID NO: 738906 - DNA, 25 bp, Homo sapien
ttacgcaggcttccgatcctgatcc

SEQ ID NO: 738907 - DNA, 25 bp, Homo sapien
ccagtggaaagactcccggatcaag

SEQ ID NO: 738908 - DNA, 25 bp, Homo sapien
caagggagaaagttacgcaggcttc

SEQ ID NO: 738909 - DNA, 25 bp, Homo sapien
ccggatcaagggagaaagttacgca

SEQ ID NO: 738910 - DNA, 25 bp, Homo sapien
gggcggccacccgttgccattccaa

SEQ ID NO: 738911 - DNA, 25 bp, Homo sapien
acagctgatccgagtcgcccacacc

SEQ ID NO: 738912 - DNA, 25 bp, Homo sapien
cccacacccccgtcacaatcgcagt

SEQ ID NO: 738913 - DNA, 25 bp, Homo sapien
gcgtggggcggccacccgttgccat

SEQ ID NO: 738914 - DNA, 25 bp, Homo sapien
tgtggatgaatatatggagttaagg

SEQ ID NO: 738915 - DNA, 25 bp, Homo sapien
taaggtgtaatgacattccaggtgt

SEQ ID NO: 738916 - DNA, 25 bp, Homo sapien
gatgacatgggcaaagttggaagtc

SEQ ID NO: 738917 - DNA, 25 bp, Homo sapien
catgggcaaagttggaagtctgcaa

SEQ ID NO: 738918 - DNA, 25 bp, Homo sapien
ccctgtatggctctaggttatttgg

SEQ ID NO: 738919 - DNA, 25 bp, Homo sapien
gaaggcatgaactagtgatattaag

SEQ ID NO: 738920 - DNA, 25 bp, Homo sapien
tgatgaagaaccaatgaagagtttc

SEQ ID NO: 738921 - DNA, 25 bp, Homo sapien
aagtatagtttagcattaccaaagc

SEQ ID NO: 738922 - DNA, 25 bp, Homo sapien
taaaaagacctttagcaccaagatg

SEQ ID NO: 738923 - DNA, 25 bp, Homo sapien
tatgcatcagccacaaggttagatt

SEQ ID NO: 738924 - DNA, 25 bp, Homo sapien
tctgattggcctgattgtagacaac

SEQ ID NO: 738925 - DNA, 25 bp, Homo sapien
tgtagacaacagaatactgaagctg

SEQ ID NO: 738926 - DNA, 25 bp, Homo sapien
ttccacataatgttcaggcataggg

SEQ ID NO: 738927 - DNA, 25 bp, Homo sapien
tggaatgctagtacacaattgactg

SEQ ID NO: 738928 - DNA, 25 bp, Homo sapien
gaccataaaaacgtgtaataatcac

SEQ ID NO: 738929 - DNA, 25 bp, Homo sapien
taatcacgagcagtactccatccaa

SEQ ID NO: 738930 - DNA, 25 bp, Homo sapien
taaaatatcatgtggcctacaccag

SEQ ID NO: 738931 - DNA, 25 bp, Homo sapien
ccctggagatacctgaacaaatcat

SEQ ID NO: 738932 - DNA, 25 bp, Homo sapien
tagggcttttgctaagtaaagacac

SEQ ID NO: 738933 - DNA, 25 bp, Homo sapien
ggagtacaacatctttaatggcaat

SEQ ID NO: 738934 - DNA, 25 bp, Homo sapien
cagtgttcacccatattgtagcata

SEQ ID NO: 738935 - DNA, 25 bp, Homo sapien
tcccttgagggaacctgaatgccct

SEQ ID NO: 738936 - DNA, 25 bp, Homo sapien
gagtccataaacttcaccagaccaa

SEQ ID NO: 738937 - DNA, 25 bp, Homo sapien
gaggcagttttagggaatgttcaac

SEQ ID NO: 738938 - DNA, 25 bp, Homo sapien
aactagattcttccttcctactcaa

SEQ ID NO: 738939 - DNA, 25 bp, Homo sapien
tccttcctcctttcgcaaattatca

SEQ ID NO: 738940 - DNA, 25 bp, Homo sapien
aatacttgccatgtctcattcccca

SEQ ID NO: 738941 - DNA, 25 bp, Homo sapien
ggtttaagcttatattcccagaata

SEQ ID NO: 738942 - DNA, 25 bp, Homo sapien
tcaactggagaagaagctcgaaact

SEQ ID NO: 738943 - DNA, 25 bp, Homo sapien
ccttatgggtaacgtaacagaactg

SEQ ID NO: 738944 - DNA, 25 bp, Homo sapien
tgtggtcaccactaacatgtcagaa

SEQ ID NO: 738945 - DNA, 25 bp, Homo sapien
ggaaaggtgtacttgctccacgaat

SEQ ID NO: 738946 - DNA, 25 bp, Homo sapien
tatcaatgaatcactatctcactgt

SEQ ID NO: 738947 - DNA, 25 bp, Homo sapien
ccagccaaagcattcgatttttgtg

SEQ ID NO: 738948 - DNA, 25 bp, Homo sapien
gtggcaactctcacataaccttaaa

SEQ ID NO: 738949 - DNA, 25 bp, Homo sapien
aattatcaatgaatcactatctcac

SEQ ID NO: 738950 - DNA, 25 bp, Homo sapien
tgtatactgaaccaatttgagaaac

SEQ ID NO: 738951 - DNA, 25 bp, Homo sapien
cttattattataatagagggcacta

SEQ ID NO: 738952 - DNA, 25 bp, Homo sapien
aagaaaaagcaatagctgcaataga

SEQ ID NO: 738953 - DNA, 25 bp, Homo sapien
caatagctgcaatagaagaaatatg

SEQ ID NO: 738954 - DNA, 25 bp, Homo sapien
ccagaacggcaattaactttaacag

SEQ ID NO: 738955 - DNA, 25 bp, Homo sapien
ctcgaagttgtgctgtttctttttc

SEQ ID NO: 738956 - DNA, 25 bp, Homo sapien
aacttgttctcgaagttgtgctgtt

SEQ ID NO: 738957 - DNA, 25 bp, Homo sapien
tccagaacggcaattaactttaaca

SEQ ID NO: 738958 - DNA, 25 bp, Homo sapien
tgtagctgcccagcaggcatgcttg

SEQ ID NO: 738959 - DNA, 25 bp, Homo sapien
ccattgactagtaacaaagaggaac

SEQ ID NO: 738960 - DNA, 25 bp, Homo sapien
tactataggattcacaccatggaac

SEQ ID NO: 738961 - DNA, 25 bp, Homo sapien
ggaactatctctcctggccaacacg

SEQ ID NO: 738962 - DNA, 25 bp, Homo sapien
cgcacctggccaattgtataagttt

SEQ ID NO: 738963 - DNA, 25 bp, Homo sapien
gttaccaggctatatcaagacaaga

SEQ ID NO: 738964 - DNA, 25 bp, Homo sapien
tactcaagagtgtgactaggcgaac

SEQ ID NO: 738965 - DNA, 25 bp, Homo sapien
taggcgaacagtactagaccaccga

SEQ ID NO: 738966 - DNA, 25 bp, Homo sapien
ggttgtctgccaaattatgacctcc

SEQ ID NO: 738967 - DNA, 25 bp, Homo sapien
caataacagctatcttgagagctac

SEQ ID NO: 738968 - DNA, 25 bp, Homo sapien
gaattaggaacgactataaggctcg

SEQ ID NO: 738969 - DNA, 25 bp, Homo sapien
tgatgagcacatggcctaagaatta

SEQ ID NO: 738970 - DNA, 25 bp, Homo sapien
gcatcactgaacctcttcttaaact

SEQ ID NO: 738971 - DNA, 25 bp, Homo sapien
caattgctttatgtgttactgacac

SEQ ID NO: 738972 - DNA, 25 bp, Homo sapien
tggatgtagcatcactgaacctctt

SEQ ID NO: 738973 - DNA, 25 bp, Homo sapien
ctgatgggctttggatgtagcatca

SEQ ID NO: 738974 - DNA, 25 bp, Homo sapien
tctgtcttcaactgacattcaagtt

SEQ ID NO: 738975 - DNA, 25 bp, Homo sapien
ctctgtcttcaactgacattcaagt

SEQ ID NO: 738976 - DNA, 25 bp, Homo sapien
cttcaactgacattcaagttgttct

SEQ ID NO: 738977 - DNA, 25 bp, Homo sapien
tgtcttcaactgacattcaagttgt

SEQ ID NO: 738978 - DNA, 25 bp, Homo sapien
gagtaatcacgctttctttgttccc

SEQ ID NO: 738979 - DNA, 25 bp, Homo sapien
ttacttgaggttgtaagcaggaaag

SEQ ID NO: 738980 - DNA, 25 bp, Homo sapien
ggacctctgacataagcttggtatt

SEQ ID NO: 738981 - DNA, 25 bp, Homo sapien
ttttttaaagtctggacctctgaca

SEQ ID NO: 738982 - DNA, 25 bp, Homo sapien
aggtctgccatcgttctgtctcgta

SEQ ID NO: 738983 - DNA, 25 bp, Homo sapien
caagcgtgcagtatgcaggtctgcc

SEQ ID NO: 738984 - DNA, 25 bp, Homo sapien
tcttgccgagttgcctgaacctgtt

SEQ ID NO: 738985 - DNA, 25 bp, Homo sapien
tctcgtacgttgacagcatcactga

SEQ ID NO: 738986 - DNA, 25 bp, Homo sapien
caacttctcttcttagttcgtgttc

SEQ ID NO: 738987 - DNA, 25 bp, Homo sapien
cgtgttccagtgtatcagtcttgtc

SEQ ID NO: 738988 - DNA, 25 bp, Homo sapien
catctgaagacggagtttcagatct

SEQ ID NO: 738989 - DNA, 25 bp, Homo sapien
tagttcgtgttccagtgtatcagtc

SEQ ID NO: 738990 - DNA, 25 bp, Homo sapien
aagcatcattcactttctgctgatt

SEQ ID NO: 738991 - DNA, 25 bp, Homo sapien
gaaggtgatggctttacatctacag

SEQ ID NO: 738992 - DNA, 25 bp, Homo sapien
agaagtggctgggtctgtgtttact

SEQ ID NO: 738993 - DNA, 25 bp, Homo sapien
gctgattccccgttttctttgtgaa

SEQ ID NO: 738994 - DNA, 25 bp, Homo sapien
aggcagaatataagactgttaaaaa

SEQ ID NO: 738995 - DNA, 25 bp, Homo sapien
aagtattttgccccttatattatct

SEQ ID NO: 738996 - DNA, 25 bp, Homo sapien
cctttgttactatgtcaaaatctgc

SEQ ID NO: 738997 - DNA, 25 bp, Homo sapien
ttggtcatttcacagacttgcccct

SEQ ID NO: 738998 - DNA, 25 bp, Homo sapien
tgtcagcaatttctttggtcatttc

SEQ ID NO: 738999 - DNA, 25 bp, Homo sapien
cagacttgcccctttgttactatgt

SEQ ID NO: 739000 - DNA, 25 bp, Homo sapien
aactgatccaactgtatactctagg

SEQ ID NO: 739001 - DNA, 25 bp, Homo sapien
taatcatgctgaaagtgggtagaaa

SEQ ID NO: 739002 - DNA, 25 bp, Homo sapien
tactctaggtacgtgcaattcattg

SEQ ID NO: 739003 - DNA, 25 bp, Homo sapien
gatgtgttgcaaacaggtaccaaaa

SEQ ID NO: 739004 - DNA, 25 bp, Homo sapien
ttgtcctgtacttcagctagttcaa

SEQ ID NO: 739005 - DNA, 25 bp, Homo sapien
tacatacaaggagtaccaaacttac

SEQ ID NO: 739006 - DNA, 25 bp, Homo sapien
ttacatacaaggagtaccaaactta

SEQ ID NO: 739007 - DNA, 25 bp, Homo sapien
gtttatgccttaagtttacatacaa

SEQ ID NO: 739008 - DNA, 25 bp, Homo sapien
attttcagaagtttatgccttaagt

SEQ ID NO: 739009 - DNA, 25 bp, Homo sapien
tttgggcttgtctgttgcctaagat

SEQ ID NO: 739010 - DNA, 25 bp, Homo sapien
tcatttgggcttgtctgttgcctaa

SEQ ID NO: 739011 - DNA, 25 bp, Homo sapien
ttatcatttgggcttgtctgttgcc

SEQ ID NO: 739012 - DNA, 25 bp, Homo sapien
tgggcttgtctgttgcctaagatta

SEQ ID NO: 739013 - DNA, 25 bp, Homo sapien
tagcttcccatggcttatagatgat

SEQ ID NO: 739014 - DNA, 25 bp, Homo sapien
agcttcccatggcttatagatgatt

SEQ ID NO: 739015 - DNA, 25 bp, Homo sapien
cttcccatggcttatagatgattac

SEQ ID NO: 739016 - DNA, 25 bp, Homo sapien
gcttcccatggcttatagatgatta

SEQ ID NO: 739017 - DNA, 25 bp, Homo sapien
ggtcacctattacagtttaagcatt

SEQ ID NO: 739018 - DNA, 25 bp, Homo sapien
gaattcaatctcagactacactgtg

SEQ ID NO: 739019 - DNA, 25 bp, Homo sapien
tgatggttaatgtcccaagcctact

SEQ ID NO: 739020 - DNA, 25 bp, Homo sapien
ttcattcagcaatcacccactggtc

SEQ ID NO: 739021 - DNA, 25 bp, Homo sapien
caaatgtgaaatcagaccacttatt

SEQ ID NO: 739022 - DNA, 25 bp, Homo sapien
tccaaatgtgaaatcagaccactta

SEQ ID NO: 739023 - DNA, 25 bp, Homo sapien
aatgtgaaatcagaccacttatttc

SEQ ID NO: 739024 - DNA, 25 bp, Homo sapien
ccaaatgtgaaatcagaccacttat

SEQ ID NO: 739025 - DNA, 25 bp, Homo sapien
tctgctggattttctagactccttt

SEQ ID NO: 739026 - DNA, 25 bp, Homo sapien
ctggattttctagactccttttaag

SEQ ID NO: 739027 - DNA, 25 bp, Homo sapien
tgctggattttctagactcctttta

SEQ ID NO: 739028 - DNA, 25 bp, Homo sapien
gctggattttctagactccttttaa

SEQ ID NO: 739029 - DNA, 25 bp, Homo sapien
gttgtgcatttgacaatgtgagaac

SEQ ID NO: 739030 - DNA, 25 bp, Homo sapien
aacattgaggactctgggaattctg

SEQ ID NO: 739031 - DNA, 25 bp, Homo sapien
agaactggttgtgcatttgacaatg

SEQ ID NO: 739032 - DNA, 25 bp, Homo sapien
tgaaacattgaggactctgggaatt

SEQ ID NO: 739033 - DNA, 25 bp, Homo sapien
gtttcctgagatgcataaggattac

SEQ ID NO: 739034 - DNA, 25 bp, Homo sapien
cttgtttcctgagatgcataaggat

SEQ ID NO: 739035 - DNA, 25 bp, Homo sapien
tgtttcctgagatgcataaggatta

SEQ ID NO: 739036 - DNA, 25 bp, Homo sapien
ctcttgtttcctgagatgcataagg

SEQ ID NO: 739037 - DNA, 25 bp, Homo sapien
cgactaaagtttcgagcaggctggc

SEQ ID NO: 739038 - DNA, 25 bp, Homo sapien
agccatcaggccgactaaagtttcg

SEQ ID NO: 739039 - DNA, 25 bp, Homo sapien
tccccaagaggggactctgacaggt

SEQ ID NO: 739040 - DNA, 25 bp, Homo sapien
tctgggtaaaaagcaccatctgctc

SEQ ID NO: 739041 - DNA, 25 bp, Homo sapien
ttatcatcagtattgtgttgctgcc

SEQ ID NO: 739042 - DNA, 25 bp, Homo sapien
tgtaaggaaacaaacctattcatta

SEQ ID NO: 739043 - DNA, 25 bp, Homo sapien
gaaaaccactatatgatacatacac

SEQ ID NO: 739044 - DNA, 25 bp, Homo sapien
aatgacatgctatacaaactaattc

SEQ ID NO: 739045 - DNA, 25 bp, Homo sapien
tgaaaggacttacagcaggttgaaa

SEQ ID NO: 739046 - DNA, 25 bp, Homo sapien
tctacccacagcagctaagtgattt

SEQ ID NO: 739047 - DNA, 25 bp, Homo sapien
tggtttagtccatttgacaggtggc

SEQ ID NO: 739048 - DNA, 25 bp, Homo sapien
tacttaacggtcagcaagtccttac

SEQ ID NO: 739049 - DNA, 25 bp, Homo sapien
tccaatgaacccactgtaagctgaa

SEQ ID NO: 739050 - DNA, 25 bp, Homo sapien
tatgaaagtacctagggcaccacag

SEQ ID NO: 739051 - DNA, 25 bp, Homo sapien
tactcctaggagataccactactgc

SEQ ID NO: 739052 - DNA, 25 bp, Homo sapien
cattttggagtaacagacgcttctg

SEQ ID NO: 739053 - DNA, 25 bp, Homo sapien
tcagaattaagagatgccaaccagc

SEQ ID NO: 739054 - DNA, 25 bp, Homo sapien
tctataaacaaagtggactgagggt

SEQ ID NO: 739055 - DNA, 25 bp, Homo sapien
tattactatgcagaacagacgaatc

SEQ ID NO: 739056 - DNA, 25 bp, Homo sapien
gaggttaaccgctacaggctacagg

SEQ ID NO: 739057 - DNA, 25 bp, Homo sapien
gctttgccagacattcatttctagt

SEQ ID NO: 739058 - DNA, 25 bp, Homo sapien
cagtattagtcagtattcctcctct

SEQ ID NO: 739059 - DNA, 25 bp, Homo sapien
cctcttcttatgagatgttattgct

SEQ ID NO: 739060 - DNA, 25 bp, Homo sapien
accttggagagaccatggtttctta

SEQ ID NO: 739061 - DNA, 25 bp, Homo sapien
tactttagttcaagagtattcacac

SEQ ID NO: 739062 - DNA, 25 bp, Homo sapien
caagagtattcacactttaagaaat

SEQ ID NO: 739063 - DNA, 25 bp, Homo sapien
ggccaaaatcaatgcataagagaaa

SEQ ID NO: 739064 - DNA, 25 bp, Homo sapien
aaatttacatatttgctaaggccaa

SEQ ID NO: 739065 - DNA, 25 bp, Homo sapien
tgatcatacatggtagttcctcaaa

SEQ ID NO: 739066 - DNA, 25 bp, Homo sapien
aatgcaatcatgatcatacatggta

SEQ ID NO: 739067 - DNA, 25 bp, Homo sapien
aataaattagggttagatcacacta

SEQ ID NO: 739068 - DNA, 25 bp, Homo sapien
aattctacttcagggtatatgccca

SEQ ID NO: 739069 - DNA, 25 bp, Homo sapien
tatggtgtgaagtgcaacgtgaaca

SEQ ID NO: 739070 - DNA, 25 bp, Homo sapien
cagatttaggcctcccagcaacaat

SEQ ID NO: 739071 - DNA, 25 bp, Homo sapien
tgagtcccataggatataactgagc

SEQ ID NO: 739072 - DNA, 25 bp, Homo sapien
ggttactctagctcccagatttagg

SEQ ID NO: 739073 - DNA, 25 bp, Homo sapien
catgtcatgaactaacagcatatcc

SEQ ID NO: 739074 - DNA, 25 bp, Homo sapien
ccagagctgctattaatgggtcagt

SEQ ID NO: 739075 - DNA, 25 bp, Homo sapien
ttactgggtaggcatgcttgcccca

SEQ ID NO: 739076 - DNA, 25 bp, Homo sapien
tcagcagccgttagctgctctcatg

SEQ ID NO: 739077 - DNA, 25 bp, Homo sapien
taaactacaagcctcaaaactctgc

SEQ ID NO: 739078 - DNA, 25 bp, Homo sapien
tggccctactttcaatactgtcaga

SEQ ID NO: 739079 - DNA, 25 bp, Homo sapien
tcagaggttgtcaagtgagacttct

SEQ ID NO: 739080 - DNA, 25 bp, Homo sapien
agtccaactggattaacacgtgtta

SEQ ID NO: 739081 - DNA, 25 bp, Homo sapien
tataaattccttaattcaatcaagc

SEQ ID NO: 739082 - DNA, 25 bp, Homo sapien
tctctctgctatcatttaattagac

SEQ ID NO: 739083 - DNA, 25 bp, Homo sapien
taaaagaagattacacttcaggaaa

SEQ ID NO: 739084 - DNA, 25 bp, Homo sapien
ttcaatcaagcacatactgacagta

SEQ ID NO: 739085 - DNA, 25 bp, Homo sapien
aaagcctgtcccatgcccacgtaaa

SEQ ID NO: 739086 - DNA, 25 bp, Homo sapien
tgttgacttggaggatcaggagcag

SEQ ID NO: 739087 - DNA, 25 bp, Homo sapien
aagcctgtcccatgcccacgtaaat

SEQ ID NO: 739088 - DNA, 25 bp, Homo sapien
ttgacttggaggatcaggagcagta

SEQ ID NO: 739089 - DNA, 25 bp, Homo sapien
ccaccagtgcatttggtttaatagc

SEQ ID NO: 739090 - DNA, 25 bp, Homo sapien
tatgcatcagaatcagtcggaggac

SEQ ID NO: 739091 - DNA, 25 bp, Homo sapien
tacgtgaaattagtaccaagaattc

SEQ ID NO: 739092 - DNA, 25 bp, Homo sapien
gcaaagtttttatggcactggttct

SEQ ID NO: 739093 - DNA, 25 bp, Homo sapien
tgcttgctgtagacaattgtgtaac

SEQ ID NO: 739094 - DNA, 25 bp, Homo sapien
cttgctgtagacaattgtgtaaccc

SEQ ID NO: 739095 - DNA, 25 bp, Homo sapien
gctgtagacaattgtgtaacccatt

SEQ ID NO: 739096 - DNA, 25 bp, Homo sapien
agacaattgtgtaacccatttatag

SEQ ID NO: 739097 - DNA, 25 bp, Homo sapien
gaacaacaacttgtccatatatgac

SEQ ID NO: 739098 - DNA, 25 bp, Homo sapien
gacaaggttccatttatctagttag

SEQ ID NO: 739099 - DNA, 25 bp, Homo sapien
gctgatattcatactaaacaaccta

SEQ ID NO: 739100 - DNA, 25 bp, Homo sapien
aagaattacatgtttctaataaatg

SEQ ID NO: 739101 - DNA, 25 bp, Homo sapien
gaaacattaactcacagaggggaca

SEQ ID NO: 739102 - DNA, 25 bp, Homo sapien
ctgatcatagttaggaggaaacatt

SEQ ID NO: 739103 - DNA, 25 bp, Homo sapien
gatcatagttaggaggaaacattaa

SEQ ID NO: 739104 - DNA, 25 bp, Homo sapien
ggaaacattaactcacagaggggac

SEQ ID NO: 739105 - DNA, 25 bp, Homo sapien
ctggtcatagtcaggagggaactgc

SEQ ID NO: 739106 - DNA, 25 bp, Homo sapien
aactgctcgctgcacatcgggcaca

SEQ ID NO: 739107 - DNA, 25 bp, Homo sapien
gcacatcgggcacaccttccagtga

SEQ ID NO: 739108 - DNA, 25 bp, Homo sapien
ggaactgctcgctgcacatcgggca

SEQ ID NO: 739109 - DNA, 25 bp, Homo sapien
tctgatcaaaatgggtctgcacatg

SEQ ID NO: 739110 - DNA, 25 bp, Homo sapien
cattctgatcaaaatgggtctgcac

SEQ ID NO: 739111 - DNA, 25 bp, Homo sapien
gaacattctgatcaaaatgggtctg

SEQ ID NO: 739112 - DNA, 25 bp, Homo sapien
ttctgatcaaaatgggtctgcacat

SEQ ID NO: 739113 - DNA, 25 bp, Homo sapien
tactgctaaactatattaactcata

SEQ ID NO: 739114 - DNA, 25 bp, Homo sapien
ctatattaactcataataaaaagta

SEQ ID NO: 739115 - DNA, 25 bp, Homo sapien
ctgctaaactatattaactcataat

SEQ ID NO: 739116 - DNA, 25 bp, Homo sapien
gctaaactatattaactcataataa

SEQ ID NO: 739117 - DNA, 25 bp, Homo sapien
taaagggtgcatgaaagcatccgct

SEQ ID NO: 739118 - DNA, 25 bp, Homo sapien
ttgataagccaaagactgaccctga

SEQ ID NO: 739119 - DNA, 25 bp, Homo sapien
tctatggtctcctcagtggtctatt

SEQ ID NO: 739120 - DNA, 25 bp, Homo sapien
caaactcaaagtagctcctggtcag

SEQ ID NO: 739121 - DNA, 25 bp, Homo sapien
agtcatgctcaatcaacaaggtcaa

SEQ ID NO: 739122 - DNA, 25 bp, Homo sapien
catacacgtttttcagtgcagtaac

SEQ ID NO: 739123 - DNA, 25 bp, Homo sapien
gtatcctttattcagacagttctgc

SEQ ID NO: 739124 - DNA, 25 bp, Homo sapien
tctagcacactaatacatacacgtt

SEQ ID NO: 739125 - DNA, 25 bp, Homo sapien
tgtgatctcattctacatgcagctc

SEQ ID NO: 739126 - DNA, 25 bp, Homo sapien
caaacacccctgttatgagatcatt

SEQ ID NO: 739127 - DNA, 25 bp, Homo sapien
aaaattagcaaagtatgccttctgt

SEQ ID NO: 739128 - DNA, 25 bp, Homo sapien
gccttctgttaattgctaaaaccaa

SEQ ID NO: 739129 - DNA, 25 bp, Homo sapien
ttttaatcacttactgagaatattt

SEQ ID NO: 739130 - DNA, 25 bp, Homo sapien
ttgtacttttaatcacttactgaga

SEQ ID NO: 739131 - DNA, 25 bp, Homo sapien
tattgtacttttaatcacttactga

SEQ ID NO: 739132 - DNA, 25 bp, Homo sapien
tgtacttttaatcacttactgagaa

SEQ ID NO: 739133 - DNA, 25 bp, Homo sapien
gttctatacagcacagacataactg

SEQ ID NO: 739134 - DNA, 25 bp, Homo sapien
caaaagcggcaaaatcaaaagttgg

SEQ ID NO: 739135 - DNA, 25 bp, Homo sapien
tcaatagctagtttgctcagaacaa

SEQ ID NO: 739136 - DNA, 25 bp, Homo sapien
tagcaactcaaaatgccaccaagtc

SEQ ID NO: 739137 - DNA, 25 bp, Homo sapien
ggctgttcagttgatgcatgtagac

SEQ ID NO: 739138 - DNA, 25 bp, Homo sapien
agtatataacctatctggaagctga

SEQ ID NO: 739139 - DNA, 25 bp, Homo sapien
tctgtcaataacaaattaagcttgg

SEQ ID NO: 739140 - DNA, 25 bp, Homo sapien
tatgaatgcctcatactggtttgcc

SEQ ID NO: 739141 - DNA, 25 bp, Homo sapien
aaaattcctgtcaagaaaagctgct

SEQ ID NO: 739142 - DNA, 25 bp, Homo sapien
ggcaatttaatcaaaattcctgtca

SEQ ID NO: 739143 - DNA, 25 bp, Homo sapien
aaattcctgtcaagaaaagctgctt

SEQ ID NO: 739144 - DNA, 25 bp, Homo sapien
aggcaatttaatcaaaattcctgtc

SEQ ID NO: 739145 - DNA, 25 bp, Homo sapien
catcacatataactgggaagcaggg

SEQ ID NO: 739146 - DNA, 25 bp, Homo sapien
taaacacgagagtttaccagttgcc

SEQ ID NO: 739147 - DNA, 25 bp, Homo sapien
aatgctttgagatagctaactgccc

SEQ ID NO: 739148 - DNA, 25 bp, Homo sapien
taaaagggtgatccagacatgagac

SEQ ID NO: 739149 - DNA, 25 bp, Homo sapien
tgagggcatgttgcatattgttgaa

SEQ ID NO: 739150 - DNA, 25 bp, Homo sapien
tatcaaactggttaccatgccttac

SEQ ID NO: 739151 - DNA, 25 bp, Homo sapien
catgccttacataatggagttagta

SEQ ID NO: 739152 - DNA, 25 bp, Homo sapien
tgtattgcggtggtatcaacctggg

SEQ ID NO: 739153 - DNA, 25 bp, Homo sapien
cacgctaagaatggtcacagaacac

SEQ ID NO: 739154 - DNA, 25 bp, Homo sapien
taacatgctggtcataactgtgcca

SEQ ID NO: 739155 - DNA, 25 bp, Homo sapien
caagtgtcgctgtgggaagagttac

SEQ ID NO: 739156 - DNA, 25 bp, Homo sapien
gattcgtgtccgcaaaccattcaag

SEQ ID NO: 739157 - DNA, 25 bp, Homo sapien
ttttcagagtaattgaggcacatct

SEQ ID NO: 739158 - DNA, 25 bp, Homo sapien
ttcattttcagagtaattgaggcac

SEQ ID NO: 739159 - DNA, 25 bp, Homo sapien
attttcagagtaattgaggcacatc

SEQ ID NO: 739160 - DNA, 25 bp, Homo sapien
tacttaaggtaaggactagtctgac

SEQ ID NO: 739161 - DNA, 25 bp, Homo sapien
taaacatgtacaactgtacggcggg

SEQ ID NO: 739162 - DNA, 25 bp, Homo sapien
cagagatactggcttagtgcagagc

SEQ ID NO: 739163 - DNA, 25 bp, Homo sapien
tagtatccagatgctaagaagtcca

SEQ ID NO: 739164 - DNA, 25 bp, Homo sapien
catgggatattactaagcaggcagg

SEQ ID NO: 739165 - DNA, 25 bp, Homo sapien
ttcaacaaggtggttctcgcctggg

SEQ ID NO: 739166 - DNA, 25 bp, Homo sapien
cacttgggctggatacacacgttgg

SEQ ID NO: 739167 - DNA, 25 bp, Homo sapien
gaaaaggaccctgctaggtgctcaa

SEQ ID NO: 739168 - DNA, 25 bp, Homo sapien
ttcccgcggcctgtaactgaatggc

SEQ ID NO: 739169 - DNA, 25 bp, Homo sapien
tctcttggtgaacgacagatctggc

SEQ ID NO: 739170 - DNA, 25 bp, Homo sapien
aaaacctcagccctcaatggaatgg

SEQ ID NO: 739171 - DNA, 25 bp, Homo sapien
taacatttgcgataagggcaaccca

SEQ ID NO: 739172 - DNA, 25 bp, Homo sapien
tatctagggcaagcgtcacatgttg

SEQ ID NO: 739173 - DNA, 25 bp, Homo sapien
cacatgaaggcctgagtactgacaa

SEQ ID NO: 739174 - DNA, 25 bp, Homo sapien
tggccagtagggaactgcgtgcacc

SEQ ID NO: 739175 - DNA, 25 bp, Homo sapien
cctgggaaattgaccactgggctta

SEQ ID NO: 739176 - DNA, 25 bp, Homo sapien
ccctggtctcttaggtgggaacgca

SEQ ID NO: 739177 - DNA, 25 bp, Homo sapien
gagttaatgttcttgctccgccaac

SEQ ID NO: 739178 - DNA, 25 bp, Homo sapien
gatgagcgctcctgacagtccttgc

SEQ ID NO: 739179 - DNA, 25 bp, Homo sapien
gaatagccgtgtttgcagtcccctg

SEQ ID NO: 739180 - DNA, 25 bp, Homo sapien
gcatctgagcgcctgtgactcgagt

SEQ ID NO: 739181 - DNA, 25 bp, Homo sapien
tttgaaaggagactaacagcggttg

SEQ ID NO: 739182 - DNA, 25 bp, Homo sapien
taagaaaagctgtagtagaacccca

SEQ ID NO: 739183 - DNA, 25 bp, Homo sapien
tccctagcaaaggtgtggagactgc

SEQ ID NO: 739184 - DNA, 25 bp, Homo sapien
gatacccaggtacggaggttgtgcc

SEQ ID NO: 739185 - DNA, 25 bp, Homo sapien
tagccaccggtctctaattcaagag

SEQ ID NO: 739186 - DNA, 25 bp, Homo sapien
gaaggaatagacaacgaagtagccg

SEQ ID NO: 739187 - DNA, 25 bp, Homo sapien
tagctgcactatgagggagataccc

SEQ ID NO: 739188 - DNA, 25 bp, Homo sapien
cacatagggcactgggtctgttcag

SEQ ID NO: 739189 - DNA, 25 bp, Homo sapien
tgaaatgttattgccccgtctgcca

SEQ ID NO: 739190 - DNA, 25 bp, Homo sapien
tgagccacttggtacatgacaggcc

SEQ ID NO: 739191 - DNA, 25 bp, Homo sapien
gctcttgaaacacgctctgggcata

SEQ ID NO: 739192 - DNA, 25 bp, Homo sapien
ggggagcccagtggtcccacacagc

SEQ ID NO: 739193 - DNA, 25 bp, Homo sapien
ttgagaggatgagccttttgttctc

SEQ ID NO: 739194 - DNA, 25 bp, Homo sapien
gcaggatggactgacattgagagga

SEQ ID NO: 739195 - DNA, 25 bp, Homo sapien
gtaaaccgccagaggagttctcact

SEQ ID NO: 739196 - DNA, 25 bp, Homo sapien
gctgttcatgaggacgtttccactg

SEQ ID NO: 739197 - DNA, 25 bp, Homo sapien
taagtgctatccacaccacagctgc

SEQ ID NO: 739198 - DNA, 25 bp, Homo sapien
ctgctgctgttcatgaggacgtttc

SEQ ID NO: 739199 - DNA, 25 bp, Homo sapien
gaggacgtttccactggtctgcagt

SEQ ID NO: 739200 - DNA, 25 bp, Homo sapien
cctgtgactttaaagagtgattgcc

SEQ ID NO: 739201 - DNA, 25 bp, Homo sapien
ggtagattgactatatcattccata

SEQ ID NO: 739202 - DNA, 25 bp, Homo sapien
tattcaggctaaagtaaatcaaaat

SEQ ID NO: 739203 - DNA, 25 bp, Homo sapien
gagcctgagcaagctttcattaagg

SEQ ID NO: 739204 - DNA, 25 bp, Homo sapien
tgggaacacctaaaaacgctatgga

SEQ ID NO: 739205 - DNA, 25 bp, Homo sapien
aaaaacgctatggattaaatctggc

SEQ ID NO: 739206 - DNA, 25 bp, Homo sapien
aagctgtagctcttcggtgtttggt

SEQ ID NO: 739207 - DNA, 25 bp, Homo sapien
gctcttcggtgtttggttgttggaa

SEQ ID NO: 739208 - DNA, 25 bp, Homo sapien
tagggccacatgctctgggccacat

SEQ ID NO: 739209 - DNA, 25 bp, Homo sapien
gtagggccacatgctctgggccaca

SEQ ID NO: 739210 - DNA, 25 bp, Homo sapien
tcatgttctccgagggagcgatacg

SEQ ID NO: 739211 - DNA, 25 bp, Homo sapien
gtatctgccaccatcacgagtgatg

SEQ ID NO: 739212 - DNA, 25 bp, Homo sapien
ccgtgagtggaaacagtatctgcca

SEQ ID NO: 739213 - DNA, 25 bp, Homo sapien
gagctttgtgttggccgtctccagt

SEQ ID NO: 739214 - DNA, 25 bp, Homo sapien
tagtgtgccaagtctgcaagcaggc

SEQ ID NO: 739215 - DNA, 25 bp, Homo sapien
gaatgactgtaaatgttggcggcgc

SEQ ID NO: 739216 - DNA, 25 bp, Homo sapien
gaagtgtgcagttccatccagtcag

SEQ ID NO: 739217 - DNA, 25 bp, Homo sapien
gatagagtgtgtggagacgatccca

SEQ ID NO: 739218 - DNA, 25 bp, Homo sapien
cctgtgctgacgatatgcaaatacg

SEQ ID NO: 739219 - DNA, 25 bp, Homo sapien
gacgatatgcaaatacgtttggcct

SEQ ID NO: 739220 - DNA, 25 bp, Homo sapien
cttccctgtgctgacgatatgcaaa

SEQ ID NO: 739221 - DNA, 25 bp, Homo sapien
gcaaatacgtttggcctaatcctca

SEQ ID NO: 739222 - DNA, 25 bp, Homo sapien
ggcttaagctgcactggcaatgaaa

SEQ ID NO: 739223 - DNA, 25 bp, Homo sapien
gccacaggccacggggcaatgctgc

SEQ ID NO: 739224 - DNA, 25 bp, Homo sapien
gcctgcccactggagccaccctacc

SEQ ID NO: 739225 - DNA, 25 bp, Homo sapien
gccacggggcaatgctgcctgccca

SEQ ID NO: 739226 - DNA, 25 bp, Homo sapien
caggccacggggcaatgctgcctgc

SEQ ID NO: 739227 - DNA, 25 bp, Homo sapien
cacaggtctgctggacacactccct

SEQ ID NO: 739228 - DNA, 25 bp, Homo sapien
acagcacccgatatgctgtgggcat

SEQ ID NO: 739229 - DNA, 25 bp, Homo sapien
tgctggccacagcacccgatatgct

SEQ ID NO: 739230 - DNA, 25 bp, Homo sapien
agatctttcagggtggccgccactt

SEQ ID NO: 739231 - DNA, 25 bp, Homo sapien
acatgtctggtgcagccctttcgta

SEQ ID NO: 739232 - DNA, 25 bp, Homo sapien
atctttacacatgtctggtgcagcc

SEQ ID NO: 739233 - DNA, 25 bp, Homo sapien
cgtatttatacgcaatatcaaaaac

SEQ ID NO: 739234 - DNA, 25 bp, Homo sapien
ggtgcagccctttcgtatttatacg

SEQ ID NO: 739235 - DNA, 25 bp, Homo sapien
gccaagcttgccagaactcagcagg

SEQ ID NO: 739236 - DNA, 25 bp, Homo sapien
atgttagttgtaaaatgaagccaac

SEQ ID NO: 739237 - DNA, 25 bp, Homo sapien
gcaggtagcccacatggtatgcatg

SEQ ID NO: 739238 - DNA, 25 bp, Homo sapien
agccaacatcttgtccacaagtgtg

SEQ ID NO: 739239 - DNA, 25 bp, Homo sapien
cccgtgatgagaaccgaggagtgaa

SEQ ID NO: 739240 - DNA, 25 bp, Homo sapien
gtgtagaccccgtgatgagaaccga

SEQ ID NO: 739241 - DNA, 25 bp, Homo sapien
gatgagaaccgaggagtgaaaacca

SEQ ID NO: 739242 - DNA, 25 bp, Homo sapien
tagaccccgtgatgagaaccgagga

SEQ ID NO: 739243 - DNA, 25 bp, Homo sapien
agagccccagattccaatgtgttca

SEQ ID NO: 739244 - DNA, 25 bp, Homo sapien
gaggaaagcagagccccagattcca

SEQ ID NO: 739245 - DNA, 25 bp, Homo sapien
agcagagccccagattccaatgtgt

SEQ ID NO: 739246 - DNA, 25 bp, Homo sapien
atgcaaagaggaaagcagagcccca

SEQ ID NO: 739247 - DNA, 25 bp, Homo sapien
agcctttccaagaaacttatctcaa

SEQ ID NO: 739248 - DNA, 25 bp, Homo sapien
caggctcactgagaatggtaccggg

SEQ ID NO: 739249 - DNA, 25 bp, Homo sapien
tggtaccgggggcatgctcagggct

SEQ ID NO: 739250 - DNA, 25 bp, Homo sapien
aaaactaaacatgaagaggcctttg

SEQ ID NO: 739251 - DNA, 25 bp, Homo sapien
taattgtgcctgtagtcgttctctg

SEQ ID NO: 739252 - DNA, 25 bp, Homo sapien
tcacagggtgcatgaaggagctaga

SEQ ID NO: 739253 - DNA, 25 bp, Homo sapien
tctgtgaaaccatgcgggctgactg

SEQ ID NO: 739254 - DNA, 25 bp, Homo sapien
tgactgctgagacggcatctgggca

SEQ ID NO: 739255 - DNA, 25 bp, Homo sapien
catttttaatcggacttgagtcaga

SEQ ID NO: 739256 - DNA, 25 bp, Homo sapien
tcattaaggctgaataaagattaac

SEQ ID NO: 739257 - DNA, 25 bp, Homo sapien
tcacagcagtagcaagctgtcaggg

SEQ ID NO: 739258 - DNA, 25 bp, Homo sapien
gagataattagcactcagggttgca

SEQ ID NO: 739259 - DNA, 25 bp, Homo sapien
ccactgccgaccatactctgttcca

SEQ ID NO: 739260 - DNA, 25 bp, Homo sapien
actgccgaccatactctgttccaca

SEQ ID NO: 739261 - DNA, 25 bp, Homo sapien
cacagagaatgttcctctgcagatg

SEQ ID NO: 739262 - DNA, 25 bp, Homo sapien
cagagaatgttcctctgcagatgac

SEQ ID NO: 739263 - DNA, 25 bp, Homo sapien
gaaccaaagatgattcctatgtcag

SEQ ID NO: 739264 - DNA, 25 bp, Homo sapien
tgattcctatgtcaggtccaaatag

SEQ ID NO: 739265 - DNA, 25 bp, Homo sapien
caaagatgattcctatgtcaggtcc

SEQ ID NO: 739266 - DNA, 25 bp, Homo sapien
cctatgtcaggtccaaataggcctt

SEQ ID NO: 739267 - DNA, 25 bp, Homo sapien
aatgaaaccctgtagctgtcgcagc

SEQ ID NO: 739268 - DNA, 25 bp, Homo sapien
tcacagataccgcaataaattccag

SEQ ID NO: 739269 - DNA, 25 bp, Homo sapien
ccattgttggcatctgaggtgaccc

SEQ ID NO: 739270 - DNA, 25 bp, Homo sapien
cacaagatatactgggaaaggcatc

SEQ ID NO: 739271 - DNA, 25 bp, Homo sapien
tttacagttggtagggccggcatac

SEQ ID NO: 739272 - DNA, 25 bp, Homo sapien
ggaattatccctgccttcttggtga

SEQ ID NO: 739273 - DNA, 25 bp, Homo sapien
catgccaagaccagaaatgggatct

SEQ ID NO: 739274 - DNA, 25 bp, Homo sapien
gcagatttaggtgacaacatggccc

SEQ ID NO: 739275 - DNA, 25 bp, Homo sapien
tctgcaccgttgctaaggccataaa

SEQ ID NO: 739276 - DNA, 25 bp, Homo sapien
agcagaaggattcgcagagaagccc

SEQ ID NO: 739277 - DNA, 25 bp, Homo sapien
gttcaacaagcagaaggattcgcag

SEQ ID NO: 739278 - DNA, 25 bp, Homo sapien
ggccataaacgtgatgttcaacaag

SEQ ID NO: 739279 - DNA, 25 bp, Homo sapien
gcattttccttgacagtcaattcac

SEQ ID NO: 739280 - DNA, 25 bp, Homo sapien
attgcactcgtgtcagtcttgtccc

SEQ ID NO: 739281 - DNA, 25 bp, Homo sapien
gcactcgtgtcagtcttgtcccagg

SEQ ID NO: 739282 - DNA, 25 bp, Homo sapien
tcattgcactcgtgtcagtcttgtc

SEQ ID NO: 739283 - DNA, 25 bp, Homo sapien
gtttgggattgtcccaagagttcac

SEQ ID NO: 739284 - DNA, 25 bp, Homo sapien
tcctcatcgcctcttgaatgcttcc

SEQ ID NO: 739285 - DNA, 25 bp, Homo sapien
cttcctgtttgggattgtcccaaga

SEQ ID NO: 739286 - DNA, 25 bp, Homo sapien
ccaagagttcaccgatctccctgcc

SEQ ID NO: 739287 - DNA, 25 bp, Homo sapien
ggaaacaacatctgtcattacatca

SEQ ID NO: 739288 - DNA, 25 bp, Homo sapien
tacatcaaagaaggggttactgcca

SEQ ID NO: 739289 - DNA, 25 bp, Homo sapien
tgtgcagtaaacacttcctgtgcaa

SEQ ID NO: 739290 - DNA, 25 bp, Homo sapien
aagaaggggttactgccaagtgcac

SEQ ID NO: 739291 - DNA, 25 bp, Homo sapien
gatagagttttcgtttagacttgac

SEQ ID NO: 739292 - DNA, 25 bp, Homo sapien
gaaccgtggcaatcctgatgcttga

SEQ ID NO: 739293 - DNA, 25 bp, Homo sapien
tagacttgacaagagcactgcaaaa

SEQ ID NO: 739294 - DNA, 25 bp, Homo sapien
gaccaggcaaataaccctgatagag

SEQ ID NO: 739295 - DNA, 25 bp, Homo sapien
gcttggatctgtcatcaggttcatt

SEQ ID NO: 739296 - DNA, 25 bp, Homo sapien
gggaggtataccagcttctttgtga

SEQ ID NO: 739297 - DNA, 25 bp, Homo sapien
catgagcaggggaggtataccagct

SEQ ID NO: 739298 - DNA, 25 bp, Homo sapien
gatcttttgtgttgcatgctgcttg

SEQ ID NO: 739299 - DNA, 25 bp, Homo sapien
cagaacaactaaagtgatgtggtct

SEQ ID NO: 739300 - DNA, 25 bp, Homo sapien
gataggaagtaacgaaggcaattcc

SEQ ID NO: 739301 - DNA, 25 bp, Homo sapien
tacttggatacagcctgatttgtta

SEQ ID NO: 739302 - DNA, 25 bp, Homo sapien
gacaaaactggcttccgaaatacaa

SEQ ID NO: 739303 - DNA, 25 bp, Homo sapien
tgaccttgtagtcctccctccactg

SEQ ID NO: 739304 - DNA, 25 bp, Homo sapien
tggctttgtcttaaggaccacctgg

SEQ ID NO: 739305 - DNA, 25 bp, Homo sapien
tttgtcttaaggaccacctggacac

SEQ ID NO: 739306 - DNA, 25 bp, Homo sapien
cctggacaccaagaaactccctctt

SEQ ID NO: 739307 - DNA, 25 bp, Homo sapien
ggtgacgaactgtgggcccttgtct

SEQ ID NO: 739308 - DNA, 25 bp, Homo sapien
tgacgaactgtgggcccttgtctcc

SEQ ID NO: 739309 - DNA, 25 bp, Homo sapien
catggtgacgaactgtgggcccttg

SEQ ID NO: 739310 - DNA, 25 bp, Homo sapien
tggtgacgaactgtgggcccttgtc

SEQ ID NO: 739311 - DNA, 25 bp, Homo sapien
gactgtatagttcttcaccttgtca

SEQ ID NO: 739312 - DNA, 25 bp, Homo sapien
tatagttcttcaccttgtcagcaaa

SEQ ID NO: 739313 - DNA, 25 bp, Homo sapien
gagtactgactgtatagttcttcac

SEQ ID NO: 739314 - DNA, 25 bp, Homo sapien
gtactgactgtatagttcttcacct

SEQ ID NO: 739315 - DNA, 25 bp, Homo sapien
aaagcgctataattggaatagccag

SEQ ID NO: 739316 - DNA, 25 bp, Homo sapien
tgtggtttcataaagcgctataatt

SEQ ID NO: 739317 - DNA, 25 bp, Homo sapien
tggaatagccagaccaaaattttcc

SEQ ID NO: 739318 - DNA, 25 bp, Homo sapien
gtagtgctgtatcctgtgtggtttc

SEQ ID NO: 739319 - DNA, 25 bp, Homo sapien
tcttcctggctagaattatccaaac

SEQ ID NO: 739320 - DNA, 25 bp, Homo sapien
ggtaatgacactggcctggtcctgg

SEQ ID NO: 739321 - DNA, 25 bp, Homo sapien
ggtctcttcctggctagaattatcc

SEQ ID NO: 739322 - DNA, 25 bp, Homo sapien
tggtaatgacactggcctggtcctg

SEQ ID NO: 739323 - DNA, 25 bp, Homo sapien
ttgggttgctttcgcctccttgtgg

SEQ ID NO: 739324 - DNA, 25 bp, Homo sapien
gactgagaggagatgcttgggcaca

SEQ ID NO: 739325 - DNA, 25 bp, Homo sapien
tcaatttgcaaggtgctgtagtaat

SEQ ID NO: 739326 - DNA, 25 bp, Homo sapien
gatgcttgggcacacacgtttgtgt

SEQ ID NO: 739327 - DNA, 25 bp, Homo sapien
ccagtggccgtgcagtctccttatt

SEQ ID NO: 739328 - DNA, 25 bp, Homo sapien
gcataatcgatgttccatcccagtg

SEQ ID NO: 739329 - DNA, 25 bp, Homo sapien
tacacactaggctccaaatctgtgg

SEQ ID NO: 739330 - DNA, 25 bp, Homo sapien
tatgtcaactaagtaccaggcactt

SEQ ID NO: 739331 - DNA, 25 bp, Homo sapien
tacgtcgctgcagtcactggcatcc

SEQ ID NO: 739332 - DNA, 25 bp, Homo sapien
ttacgtcgctgcagtcactggcatc

SEQ ID NO: 739333 - DNA, 25 bp, Homo sapien
cttacgtcgctgcagtcactggcat

SEQ ID NO: 739334 - DNA, 25 bp, Homo sapien
tcattctaaccaaccatctaattct

SEQ ID NO: 739335 - DNA, 25 bp, Homo sapien
tccttcctcctcaacgatactaggg

SEQ ID NO: 739336 - DNA, 25 bp, Homo sapien
ctcaacgatactagggacagatttt

SEQ ID NO: 739337 - DNA, 25 bp, Homo sapien
tcctcctcaacgatactagggacag

SEQ ID NO: 739338 - DNA, 25 bp, Homo sapien
ctagcgccagccgtcttttcagctc

SEQ ID NO: 739339 - DNA, 25 bp, Homo sapien
tagcgccagccgtcttttcagctct

SEQ ID NO: 739340 - DNA, 25 bp, Homo sapien
acagctgaatccctccattaggcat

SEQ ID NO: 739341 - DNA, 25 bp, Homo sapien
ttacacttgatggcaacagctgaat

SEQ ID NO: 739342 - DNA, 25 bp, Homo sapien
tacacttgatggcaacagctgaatc

SEQ ID NO: 739343 - DNA, 25 bp, Homo sapien
gcaacagctgaatccctccattagg

SEQ ID NO: 739344 - DNA, 25 bp, Homo sapien
tcagactgctttggagaggatgtgg

SEQ ID NO: 739345 - DNA, 25 bp, Homo sapien
ggatgtcgctccctgtgatgtcaca

SEQ ID NO: 739346 - DNA, 25 bp, Homo sapien
agttggagtatcacggtgggcactt

SEQ ID NO: 739347 - DNA, 25 bp, Homo sapien
cacttggagtatcacggtgggcaca

SEQ ID NO: 739348 - DNA, 25 bp, Homo sapien
tctggatgagcagaagctgtctttg

SEQ ID NO: 739349 - DNA, 25 bp, Homo sapien
tgctagttcttcttggctctggatg

SEQ ID NO: 739350 - DNA, 25 bp, Homo sapien
agttcttcttggctctggatgagca

SEQ ID NO: 739351 - DNA, 25 bp, Homo sapien
agcagaagctgtctttggatgcatt

SEQ ID NO: 739352 - DNA, 25 bp, Homo sapien
aagctaaaggcctctgcacatgatt

SEQ ID NO: 739353 - DNA, 25 bp, Homo sapien
gcacctccaggagaaaaaagcgccc

SEQ ID NO: 739354 - DNA, 25 bp, Homo sapien
agctaaaggcctctgcacatgattg

SEQ ID NO: 739355 - DNA, 25 bp, Homo sapien
agcgccccaaactctaaagctaaag

SEQ ID NO: 739356 - DNA, 25 bp, Homo sapien
tctccagtgagtggaagtctttgtc

SEQ ID NO: 739357 - DNA, 25 bp, Homo sapien
ggaccccatccaatcaaggccattt

SEQ ID NO: 739358 - DNA, 25 bp, Homo sapien
tttaatactgcagagggaccccatc

SEQ ID NO: 739359 - DNA, 25 bp, Homo sapien
gctctgggccgttgaaataaatttg

SEQ ID NO: 739360 - DNA, 25 bp, Homo sapien
ctctgataatgagccgggagcggaa

SEQ ID NO: 739361 - DNA, 25 bp, Homo sapien
tctggttagcctgcattgaaccttt

SEQ ID NO: 739362 - DNA, 25 bp, Homo sapien
tctcatgttggtgcagatagataac

SEQ ID NO: 739363 - DNA, 25 bp, Homo sapien
taacataattgttatcctaaccgga

SEQ ID NO: 739364 - DNA, 25 bp, Homo sapien
tggccttaccccaagtgtatgggtg

SEQ ID NO: 739365 - DNA, 25 bp, Homo sapien
aattaaagcctttatagtctggcgg

SEQ ID NO: 739366 - DNA, 25 bp, Homo sapien
ccagagtcggtataatcaatacgtg

SEQ ID NO: 739367 - DNA, 25 bp, Homo sapien
gtctggcggattaatgtattgcaca

SEQ ID NO: 739368 - DNA, 25 bp, Homo sapien
tcaatacgtgaaaaataggtgctgc

SEQ ID NO: 739369 - DNA, 25 bp, Homo sapien
tactccctgatccatggtgctagct

SEQ ID NO: 739370 - DNA, 25 bp, Homo sapien
gttatgcatctagattactccctga

SEQ ID NO: 739371 - DNA, 25 bp, Homo sapien
ccagaagatctagcttggatgacta

SEQ ID NO: 739372 - DNA, 25 bp, Homo sapien
gaaactaagccatctccgtaaggtg

SEQ ID NO: 739373 - DNA, 25 bp, Homo sapien
gtaattggtggtgccatgaactgca

SEQ ID NO: 739374 - DNA, 25 bp, Homo sapien
tgactgctctatcaacaggtccttc

SEQ ID NO: 739375 - DNA, 25 bp, Homo sapien
tgagcctgcctattcctggagacat

SEQ ID NO: 739376 - DNA, 25 bp, Homo sapien
gacatggcagtgttgaaattaggcc

SEQ ID NO: 739377 - DNA, 25 bp, Homo sapien
tgtccaagtgcgtggacactgtgtt

SEQ ID NO: 739378 - DNA, 25 bp, Homo sapien
ctgtagccccaggtaacttttcaag

SEQ ID NO: 739379 - DNA, 25 bp, Homo sapien
cagcttgtccaagtgcgtggacact

SEQ ID NO: 739380 - DNA, 25 bp, Homo sapien
actgtgttctgtagccccaggtaac

SEQ ID NO: 739381 - DNA, 25 bp, Homo sapien
gggacatgtgcctttcacccagaag

SEQ ID NO: 739382 - DNA, 25 bp, Homo sapien
cagcaggtggatgcacagtccttgg

SEQ ID NO: 739383 - DNA, 25 bp, Homo sapien
ccctttgcagtcactgggagtggaa

SEQ ID NO: 739384 - DNA, 25 bp, Homo sapien
tagtaatggtggcaccgaggcaaag

SEQ ID NO: 739385 - DNA, 25 bp, Homo sapien
cttgcaagggggcttttccacagtc

SEQ ID NO: 739386 - DNA, 25 bp, Homo sapien
catcttctgccctcattcgataatc

SEQ ID NO: 739387 - DNA, 25 bp, Homo sapien
tcaaaatatacccatgacatcttct

SEQ ID NO: 739388 - DNA, 25 bp, Homo sapien
tcagtattgtttgtaatgcctgaaa

SEQ ID NO: 739389 - DNA, 25 bp, Homo sapien
tataacgtggtcataaaaaatcacg

SEQ ID NO: 739390 - DNA, 25 bp, Homo sapien
gattactgagctcagtttgcaaagc

SEQ ID NO: 739391 - DNA, 25 bp, Homo sapien
taacatgatgtcaacacttccattg

SEQ ID NO: 739392 - DNA, 25 bp, Homo sapien
taaatataatgggccttgattactg

SEQ ID NO: 739393 - DNA, 25 bp, Homo sapien
ggcaaccttgattcttgactgacaa

SEQ ID NO: 739394 - DNA, 25 bp, Homo sapien
taggcactataagagctatacaggc

SEQ ID NO: 739395 - DNA, 25 bp, Homo sapien
gggaaacccagtattaagattgcag

SEQ ID NO: 739396 - DNA, 25 bp, Homo sapien
tagtccgatgaggtaggttcaatca

SEQ ID NO: 739397 - DNA, 25 bp, Homo sapien
tcataggtttgggacgtttcaagta

SEQ ID NO: 739398 - DNA, 25 bp, Homo sapien
tgggacgtttcaagtatcctttgcc

SEQ ID NO: 739399 - DNA, 25 bp, Homo sapien
aatcataggtttgggacgtttcaag

SEQ ID NO: 739400 - DNA, 25 bp, Homo sapien
caagtatcctttgccaccagtcaag

SEQ ID NO: 739401 - DNA, 25 bp, Homo sapien
ctttcctagtggtatttgttctaag

SEQ ID NO: 739402 - DNA, 25 bp, Homo sapien
ttcctagtggtatttgttctaagta

SEQ ID NO: 739403 - DNA, 25 bp, Homo sapien
catattctcctgagcttgacctggt

SEQ ID NO: 739404 - DNA, 25 bp, Homo sapien
ttctggggttgagatcctcgtcatt

SEQ ID NO: 739405 - DNA, 25 bp, Homo sapien
ggagaggctcactattttttctggg

SEQ ID NO: 739406 - DNA, 25 bp, Homo sapien
ttttctggggttgagatcctcgtca

SEQ ID NO: 739407 - DNA, 25 bp, Homo sapien
acagcacagaggtcttaggagccat

SEQ ID NO: 739408 - DNA, 25 bp, Homo sapien
cttttaacagcacagaggtcttagg

SEQ ID NO: 739409 - DNA, 25 bp, Homo sapien
cactgcctcttggttcacagagctg

SEQ ID NO: 739410 - DNA, 25 bp, Homo sapien
tggttcacagagctgttggcttcca

SEQ ID NO: 739411 - DNA, 25 bp, Homo sapien
atcaggtttgtgagtgatggtctgc

SEQ ID NO: 739412 - DNA, 25 bp, Homo sapien
gttgaaattcaggagcgtcctctca

SEQ ID NO: 739413 - DNA, 25 bp, Homo sapien
agatcaggtttgtgagtgatggtct

SEQ ID NO: 739414 - DNA, 25 bp, Homo sapien
gagcgtcctctcagggctggagatc

SEQ ID NO: 739415 - DNA, 25 bp, Homo sapien
gagggtaacagctatctcccttaga

SEQ ID NO: 739416 - DNA, 25 bp, Homo sapien
cccttagagagctctctagcttcca

SEQ ID NO: 739417 - DNA, 25 bp, Homo sapien
gctatctcccttagagagctctcta

SEQ ID NO: 739418 - DNA, 25 bp, Homo sapien
ctctagctgagggtaacagctatct

SEQ ID NO: 739419 - DNA, 25 bp, Homo sapien
cctggattgggtggaagttgcccgt

SEQ ID NO: 739420 - DNA, 25 bp, Homo sapien
tccagacatggtaggagcctggatt

SEQ ID NO: 739421 - DNA, 25 bp, Homo sapien
tcacataagctgagctacagagcat

SEQ ID NO: 739422 - DNA, 25 bp, Homo sapien
agctgagctacagagcatgttccag

SEQ ID NO: 739423 - DNA, 25 bp, Homo sapien
cctagttgcttgaaccaatttcagc

SEQ ID NO: 739424 - DNA, 25 bp, Homo sapien
caatttcagctcaagccaggagaca

SEQ ID NO: 739425 - DNA, 25 bp, Homo sapien
tgggtcagcagttactgttaggctg

SEQ ID NO: 739426 - DNA, 25 bp, Homo sapien
tactgttaggctgacctgggtcatg

SEQ ID NO: 739427 - DNA, 25 bp, Homo sapien
tgcagtcaagttctggctcagcccc

SEQ ID NO: 739428 - DNA, 25 bp, Homo sapien
aatgaagatgaaaggacggcactgg

SEQ ID NO: 739429 - DNA, 25 bp, Homo sapien
ttgggcagcagatacttggaacctc

SEQ ID NO: 739430 - DNA, 25 bp, Homo sapien
ctgaaggtaaagtgcaaaggacatg

SEQ ID NO: 739431 - DNA, 25 bp, Homo sapien
gatagacgaggttccatcccacttc

SEQ ID NO: 739432 - DNA, 25 bp, Homo sapien
attgtcaccattcccaatgcaggtc

SEQ ID NO: 739433 - DNA, 25 bp, Homo sapien
gacattgtcaccattcccaatgcag

SEQ ID NO: 739434 - DNA, 25 bp, Homo sapien
atgctaggccacttgatagacgagg

SEQ ID NO: 739435 - DNA, 25 bp, Homo sapien
gttggagatgattattggctatgcc

SEQ ID NO: 739436 - DNA, 25 bp, Homo sapien
aaaacaatgatagaggctaggcaca

SEQ ID NO: 739437 - DNA, 25 bp, Homo sapien
caaatatatgtggagacccaacttg

SEQ ID NO: 739438 - DNA, 25 bp, Homo sapien
gaggatcgtttgaagccaagaattc

SEQ ID NO: 739439 - DNA, 25 bp, Homo sapien
tatgtgctttttagatctgtgttta

SEQ ID NO: 739440 - DNA, 25 bp, Homo sapien
tgtgctttttagatctgtgtttatt

SEQ ID NO: 739441 - DNA, 25 bp, Homo sapien
atgtgctttttagatctgtgtttat

SEQ ID NO: 739442 - DNA, 25 bp, Homo sapien
aatatgtgctttttagatctgtgtt

SEQ ID NO: 739443 - DNA, 25 bp, Homo sapien
ctggctctgttcggagcttgtggct

SEQ ID NO: 739444 - DNA, 25 bp, Homo sapien
ggctggctctgttcggagcttgtgg

SEQ ID NO: 739445 - DNA, 25 bp, Homo sapien
ggctctgttcggagcttgtggctcc

SEQ ID NO: 739446 - DNA, 25 bp, Homo sapien
ctggctggctctgttcggagcttgt

SEQ ID NO: 739447 - DNA, 25 bp, Homo sapien
accttttggagatcagcagtatctt

SEQ ID NO: 739448 - DNA, 25 bp, Homo sapien
tctaatatgtcaaccttttggagat

SEQ ID NO: 739449 - DNA, 25 bp, Homo sapien
gcagtatctttaatcttattcctat

SEQ ID NO: 739450 - DNA, 25 bp, Homo sapien
ttctctaatatgtcaaccttttgga

SEQ ID NO: 739451 - DNA, 25 bp, Homo sapien
tctgtttctctttcgatgcagtgtg

SEQ ID NO: 739452 - DNA, 25 bp, Homo sapien
gctgagaatatgtgcaaagctttgt

SEQ ID NO: 739453 - DNA, 25 bp, Homo sapien
tttctctttcgatgcagtgtgctga

SEQ ID NO: 739454 - DNA, 25 bp, Homo sapien
gcagtgtgctgagaatatgtgcaaa

SEQ ID NO: 739455 - DNA, 25 bp, Homo sapien
aattcttgttggcttgcctagcttg

SEQ ID NO: 739456 - DNA, 25 bp, Homo sapien
taggcatttccaactctttgtttaa

SEQ ID NO: 739457 - DNA, 25 bp, Homo sapien
cctagcttgaccctcctgacaggtg

SEQ ID NO: 739458 - DNA, 25 bp, Homo sapien
tccttagtatggctaggcatttcca

SEQ ID NO: 739459 - DNA, 25 bp, Homo sapien
taaatgactggtggagttttggacc

SEQ ID NO: 739460 - DNA, 25 bp, Homo sapien
tgtcaatagacctagctgaatttcg

SEQ ID NO: 739461 - DNA, 25 bp, Homo sapien
ttcctgtcctgtgtcaatagaccta

SEQ ID NO: 739462 - DNA, 25 bp, Homo sapien
gacctagctgaatttcgcctctgca

SEQ ID NO: 739463 - DNA, 25 bp, Homo sapien
tgtcctgtgtcaatagacctagctg

SEQ ID NO: 739464 - DNA, 25 bp, Homo sapien
gtgttcagtacctttgatgattaac

SEQ ID NO: 739465 - DNA, 25 bp, Homo sapien
tgttcagtacctttgatgattaact

SEQ ID NO: 739466 - DNA, 25 bp, Homo sapien
gttgctgtcttcagtggtccaggat

SEQ ID NO: 739467 - DNA, 25 bp, Homo sapien
tccaggatgtttgtgccagctggag

SEQ ID NO: 739468 - DNA, 25 bp, Homo sapien
tggaaagccccaccaataactactg

SEQ ID NO: 739469 - DNA, 25 bp, Homo sapien
taactactgcctccattacgttggc

SEQ ID NO: 739470 - DNA, 25 bp, Homo sapien
catgctgaagtttctgactatggag

SEQ ID NO: 739471 - DNA, 25 bp, Homo sapien
ggccaccttctgatgagatggtttt

SEQ ID NO: 739472 - DNA, 25 bp, Homo sapien
gataaatatatcgtgaccttcctaa

SEQ ID NO: 739473 - DNA, 25 bp, Homo sapien
ttttggtatgcaaggaatggcctcc

SEQ ID NO: 739474 - DNA, 25 bp, Homo sapien
cggctggtagactgtggagtatgac

SEQ ID NO: 739475 - DNA, 25 bp, Homo sapien
tggtagactgtggagtatgactcat

SEQ ID NO: 739476 - DNA, 25 bp, Homo sapien
ctggtagactgtggagtatgactca

SEQ ID NO: 739477 - DNA, 25 bp, Homo sapien
gctggtagactgtggagtatgactc

SEQ ID NO: 739478 - DNA, 25 bp, Homo sapien
gagagcctctcgaatgctaatttag

SEQ ID NO: 739479 - DNA, 25 bp, Homo sapien
aatctgtagaggcatacttgtacag

SEQ ID NO: 739480 - DNA, 25 bp, Homo sapien
ctaattcatttagcgagagcctctc

SEQ ID NO: 739481 - DNA, 25 bp, Homo sapien
gctaatttagctgcctgattttcca

SEQ ID NO: 739482 - DNA, 25 bp, Homo sapien
tgacatattttgatgccggttgtct

SEQ ID NO: 739483 - DNA, 25 bp, Homo sapien
ttccaccaagagcagtgtcgatggg

SEQ ID NO: 739484 - DNA, 25 bp, Homo sapien
tcttccgcacctgaaagtcttggag

SEQ ID NO: 739485 - DNA, 25 bp, Homo sapien
ttttgatgccggttgtctggttgag

SEQ ID NO: 739486 - DNA, 25 bp, Homo sapien
cacagtacctactggctagttgctt

SEQ ID NO: 739487 - DNA, 25 bp, Homo sapien
gaagcatggactgtgaagctataca

SEQ ID NO: 739488 - DNA, 25 bp, Homo sapien
tattaagggaatctgaaagagactc

SEQ ID NO: 739489 - DNA, 25 bp, Homo sapien
tatgcagtgttagtcccatgcgacg

SEQ ID NO: 739490 - DNA, 25 bp, Homo sapien
tatatgtgccacagacagtgctaaa

SEQ ID NO: 739491 - DNA, 25 bp, Homo sapien
tattccttgagctcccaattcggga

SEQ ID NO: 739492 - DNA, 25 bp, Homo sapien
agtctgaatctgcaggcccacaaaa

SEQ ID NO: 739493 - DNA, 25 bp, Homo sapien
tcattggccctcacagcaagcctgt

SEQ ID NO: 739494 - DNA, 25 bp, Homo sapien
gaggagccctagcagtatacgtagc

SEQ ID NO: 739495 - DNA, 25 bp, Homo sapien
tttgaatatattgccagggcccacc

SEQ ID NO: 739496 - DNA, 25 bp, Homo sapien
gggcccctgacttgtacaacgcatt

SEQ ID NO: 739497 - DNA, 25 bp, Homo sapien
taataatagggaccacagaggcaga

SEQ ID NO: 739498 - DNA, 25 bp, Homo sapien
ccttgaagggacatgatctggatgc

SEQ ID NO: 739499 - DNA, 25 bp, Homo sapien
caattgctgtcaactttggcaggag

SEQ ID NO: 739500 - DNA, 25 bp, Homo sapien
agagcactgatagtcccctgacggc

SEQ ID NO: 739501 - DNA, 25 bp, Homo sapien
tcctgagatagacctccttgaaggg

SEQ ID NO: 739502 - DNA, 25 bp, Homo sapien
cagaggcactttacaccctggcaga

SEQ ID NO: 739503 - DNA, 25 bp, Homo sapien
ggagttgaacacacatgtctgccac

SEQ ID NO: 739504 - DNA, 25 bp, Homo sapien
gattaacatgggttgtatccaccta

SEQ ID NO: 739505 - DNA, 25 bp, Homo sapien
gcatagcgaatccagcctgcttgga

SEQ ID NO: 739506 - DNA, 25 bp, Homo sapien
cccaggatgaagaggctcaaactat

SEQ ID NO: 739507 - DNA, 25 bp, Homo sapien
cacttctgatgaaaagacatgggtg

SEQ ID NO: 739508 - DNA, 25 bp, Homo sapien
gccctatatgcagaaagaagaactg

SEQ ID NO: 739509 - DNA, 25 bp, Homo sapien
ttgcagggctaacacagttgaaaac

SEQ ID NO: 739510 - DNA, 25 bp, Homo sapien
cccatggccgggcatttaaatgcac

SEQ ID NO: 739511 - DNA, 25 bp, Homo sapien
aatgcaccccggctctgcgatttgc

SEQ ID NO: 739512 - DNA, 25 bp, Homo sapien
tgaggtcttgggtgcgcccgcgggc

SEQ ID NO: 739513 - DNA, 25 bp, Homo sapien
tctaatggtgctaggcccgaggtgc

SEQ ID NO: 739514 - DNA, 25 bp, Homo sapien
catctctaagggtggctgttttggc

SEQ ID NO: 739515 - DNA, 25 bp, Homo sapien
ccacactcttgggagttaataactc

SEQ ID NO: 739516 - DNA, 25 bp, Homo sapien
tctggaggacagaactgctacttct

SEQ ID NO: 739517 - DNA, 25 bp, Homo sapien
gggtgcctaacattcatctctaagg

SEQ ID NO: 739518 - DNA, 25 bp, Homo sapien
gccccatctcgagggcactggacat

SEQ ID NO: 739519 - DNA, 25 bp, Homo sapien
cacaggaagtgcacggttttgatta

SEQ ID NO: 739520 - DNA, 25 bp, Homo sapien
tgtatgtggaggacagacagctgta

SEQ ID NO: 739521 - DNA, 25 bp, Homo sapien
gtggattcacaccttccggcagctg

SEQ ID NO: 739522 - DNA, 25 bp, Homo sapien
aaagtagcctccacattggtccaga

SEQ ID NO: 739523 - DNA, 25 bp, Homo sapien
ctgaaaggcaaaagtagcctccaca

SEQ ID NO: 739524 - DNA, 25 bp, Homo sapien
aagtagcctccacattggtccagat

SEQ ID NO: 739525 - DNA, 25 bp, Homo sapien
tgaaaggcaaaagtagcctccacat

SEQ ID NO: 739526 - DNA, 25 bp, Homo sapien
tagttagatgaccacatgccatagc

SEQ ID NO: 739527 - DNA, 25 bp, Homo sapien
cagagagactgagtgacttccccaa

SEQ ID NO: 739528 - DNA, 25 bp, Homo sapien
tcagaagggtccactcaaatggctc

SEQ ID NO: 739529 - DNA, 25 bp, Homo sapien
gcaggtatgctccaaagtgatttca

SEQ ID NO: 739530 - DNA, 25 bp, Homo sapien
tatgggctgatgacagaatccttta

SEQ ID NO: 739531 - DNA, 25 bp, Homo sapien
tgacagaatcctttacagcttccaa

SEQ ID NO: 739532 - DNA, 25 bp, Homo sapien
tctcgacatttagattcagggggct

SEQ ID NO: 739533 - DNA, 25 bp, Homo sapien
cttgattaactcaacaggcaggcct

SEQ ID NO: 739534 - DNA, 25 bp, Homo sapien
gatgtacttttcagaactgtaatac

SEQ ID NO: 739535 - DNA, 25 bp, Homo sapien
tgtacttttcagaactgtaatacat

SEQ ID NO: 739536 - DNA, 25 bp, Homo sapien
tttcatgatgtacttttcagaactg

SEQ ID NO: 739537 - DNA, 25 bp, Homo sapien
atgatgtacttttcagaactgtaat

SEQ ID NO: 739538 - DNA, 25 bp, Homo sapien
gtggcagtagtcttgcctgtgagca

SEQ ID NO: 739539 - DNA, 25 bp, Homo sapien
ctaattggcttttggatgttgaatt

SEQ ID NO: 739540 - DNA, 25 bp, Homo sapien
ggatgttgaattaaccagtcagaag

SEQ ID NO: 739541 - DNA, 25 bp, Homo sapien
gaagtcctgtctgcactggagtggc

SEQ ID NO: 739542 - DNA, 25 bp, Homo sapien
ggaatagtcttttagatcttgactc

SEQ ID NO: 739543 - DNA, 25 bp, Homo sapien
ctgggccttgatgtagtcactgcct

SEQ ID NO: 739544 - DNA, 25 bp, Homo sapien
gactcagaaggggaatagtctttta

SEQ ID NO: 739545 - DNA, 25 bp, Homo sapien
tgtaggtcccaatcctcaatttgtc

SEQ ID NO: 739546 - DNA, 25 bp, Homo sapien
tagtcaagctcaaggatccccaggg

SEQ ID NO: 739547 - DNA, 25 bp, Homo sapien
gggcatttcctatcctagtcaagct

SEQ ID NO: 739548 - DNA, 25 bp, Homo sapien
ctctgtgaagatacgaaaaaccatg

SEQ ID NO: 739549 - DNA, 25 bp, Homo sapien
ttggagcccaaaccataagaagtta

SEQ ID NO: 739550 - DNA, 25 bp, Homo sapien
gttctttttcatcagttttggccat

SEQ ID NO: 739551 - DNA, 25 bp, Homo sapien
ctagttctttttcatcagttttggc

SEQ ID NO: 739552 - DNA, 25 bp, Homo sapien
atagacttctagttctttttcatca

SEQ ID NO: 739553 - DNA, 25 bp, Homo sapien
tagacttctagttctttttcatcag

SEQ ID NO: 739554 - DNA, 25 bp, Homo sapien
gagccttgtaagacttagatgcaac

SEQ ID NO: 739555 - DNA, 25 bp, Homo sapien
ggagccttgtaagacttagatgcaa

SEQ ID NO: 739556 - DNA, 25 bp, Homo sapien
tcaaggagccttgtaagacttagat

SEQ ID NO: 739557 - DNA, 25 bp, Homo sapien
aaggagccttgtaagacttagatgc

SEQ ID NO: 739558 - DNA, 25 bp, Homo sapien
caggaaatgggcttgttgcaccata

SEQ ID NO: 739559 - DNA, 25 bp, Homo sapien
gggcttgttgcaccatatccttcaa

SEQ ID NO: 739560 - DNA, 25 bp, Homo sapien
gaatcaagagctccagccgaatgcc

SEQ ID NO: 739561 - DNA, 25 bp, Homo sapien
tctctccgctttccagtgccaggaa

SEQ ID NO: 739562 - DNA, 25 bp, Homo sapien
tccagaagaggaagttgtagctaac

SEQ ID NO: 739563 - DNA, 25 bp, Homo sapien
tctagaaaatatatgcagacgacca

SEQ ID NO: 739564 - DNA, 25 bp, Homo sapien
tagctaacaggccagaggaatcctc

SEQ ID NO: 739565 - DNA, 25 bp, Homo sapien
gacatagatgacaagtaagacctcc

SEQ ID NO: 739566 - DNA, 25 bp, Homo sapien
tatgtcaggtaggataaaccacagc

SEQ ID NO: 739567 - DNA, 25 bp, Homo sapien
tgtggtatccacaagaaaagtgctg

SEQ ID NO: 739568 - DNA, 25 bp, Homo sapien
cctgggcaatagacttcacggctca

SEQ ID NO: 739569 - DNA, 25 bp, Homo sapien
gtgaagcttatcctcaggcagggca

SEQ ID NO: 739570 - DNA, 25 bp, Homo sapien
taaagcctatgtacaattcatattt

SEQ ID NO: 739571 - DNA, 25 bp, Homo sapien
ttatgtctctgggttttgatgtggt

SEQ ID NO: 739572 - DNA, 25 bp, Homo sapien
tctctgggttttgatgtggttttcc

SEQ ID NO: 739573 - DNA, 25 bp, Homo sapien
tataaatgaataaagcctatgtaca

SEQ ID NO: 739574 - DNA, 25 bp, Homo sapien
gcaatgaaagctatcactgaagggt

SEQ ID NO: 739575 - DNA, 25 bp, Homo sapien
tggcaggacaagcattctgagagag

SEQ ID NO: 739576 - DNA, 25 bp, Homo sapien
gaagccacgggtctgaagttcagtg

SEQ ID NO: 739577 - DNA, 25 bp, Homo sapien
taagcaaggtaagtaacaacactat

SEQ ID NO: 739578 - DNA, 25 bp, Homo sapien
gccctaagaccatgattgtatcaga

SEQ ID NO: 739579 - DNA, 25 bp, Homo sapien
tgtatcagatattaatctaaaaccc

SEQ ID NO: 739580 - DNA, 25 bp, Homo sapien
caaatggattttattgaagctgctg

SEQ ID NO: 739581 - DNA, 25 bp, Homo sapien
ttcttgtggccctaagaccatgatt

SEQ ID NO: 739582 - DNA, 25 bp, Homo sapien
tcataaccgtgtccaaaatctgcct

SEQ ID NO: 739583 - DNA, 25 bp, Homo sapien
tccagaaacagggacgaatgccaga

SEQ ID NO: 739584 - DNA, 25 bp, Homo sapien
tgcctcttgctccactccttggatt

SEQ ID NO: 739585 - DNA, 25 bp, Homo sapien
gaatgccagagcataaatgctttag

SEQ ID NO: 739586 - DNA, 25 bp, Homo sapien
cagtggtgtcaatgttttatgctta

SEQ ID NO: 739587 - DNA, 25 bp, Homo sapien
tggcatggccaatattttttcagtg

SEQ ID NO: 739588 - DNA, 25 bp, Homo sapien
taaaactcattgtatggtatgctag

SEQ ID NO: 739589 - DNA, 25 bp, Homo sapien
gtatggtatgctagaataaatctca

SEQ ID NO: 739590 - DNA, 25 bp, Homo sapien
ccagaaccacttctgtagtgatgaa

SEQ ID NO: 739591 - DNA, 25 bp, Homo sapien
gcagcaaaaccagaaccacttctgt

SEQ ID NO: 739592 - DNA, 25 bp, Homo sapien
ctcagtctgtgatctgctagcagca

SEQ ID NO: 739593 - DNA, 25 bp, Homo sapien
gcaaaaccagaaccacttctgtagt

SEQ ID NO: 739594 - DNA, 25 bp, Homo sapien
cacagccaatgtacgataccaagga

SEQ ID NO: 739595 - DNA, 25 bp, Homo sapien
tatcacatgcaacacgagagaatcg

SEQ ID NO: 739596 - DNA, 25 bp, Homo sapien
taaatttgagtcacttagagcagct

SEQ ID NO: 739597 - DNA, 25 bp, Homo sapien
agagcagctggcgtttcacagccaa

SEQ ID NO: 739598 - DNA, 25 bp, Homo sapien
taggatagttattgccaccccagag

SEQ ID NO: 739599 - DNA, 25 bp, Homo sapien
ttatggagctgacaataaaccgaca

SEQ ID NO: 739600 - DNA, 25 bp, Homo sapien
aaggcccagtgcaattgcattggta

SEQ ID NO: 739601 - DNA, 25 bp, Homo sapien
aattgcattggtaagcctgcacctg

SEQ ID NO: 739602 - DNA, 25 bp, Homo sapien
acagagctaccacacaggaagcaaa

SEQ ID NO: 739603 - DNA, 25 bp, Homo sapien
cacagagctaccacacaggaagcaa

SEQ ID NO: 739604 - DNA, 25 bp, Homo sapien
agagctaccacacaggaagcaaaac

SEQ ID NO: 739605 - DNA, 25 bp, Homo sapien
cagagctaccacacaggaagcaaaa

SEQ ID NO: 739606 - DNA, 25 bp, Homo sapien
tctgatcttggtgcaggcaacctgc

SEQ ID NO: 739607 - DNA, 25 bp, Homo sapien
taggtaatacactccctctgaggac

SEQ ID NO: 739608 - DNA, 25 bp, Homo sapien
gaagagagaccattcccaacactgc

SEQ ID NO: 739609 - DNA, 25 bp, Homo sapien
cacactgtattatcaagaggtctgg

SEQ ID NO: 739610 - DNA, 25 bp, Homo sapien
tcttgtacattgaagaactccaatg

SEQ ID NO: 739611 - DNA, 25 bp, Homo sapien
taagtgacatacatccatgcacacg

SEQ ID NO: 739612 - DNA, 25 bp, Homo sapien
ccacagttaacttctggcacaatac

SEQ ID NO: 739613 - DNA, 25 bp, Homo sapien
gcatatactccgtgttccccaggag

SEQ ID NO: 739614 - DNA, 25 bp, Homo sapien
cccagctgtcgctgtctgccacttt

SEQ ID NO: 739615 - DNA, 25 bp, Homo sapien
tcccccagctgtcgctgtctgccac

SEQ ID NO: 739616 - DNA, 25 bp, Homo sapien
ccccagctgtcgctgtctgccactt

SEQ ID NO: 739617 - DNA, 25 bp, Homo sapien
ccagctgtcgctgtctgccactttc

SEQ ID NO: 739618 - DNA, 25 bp, Homo sapien
taatgataggtatgtataatagaac

SEQ ID NO: 739619 - DNA, 25 bp, Homo sapien
gctcttagtttagcaactgcaaaat

SEQ ID NO: 739620 - DNA, 25 bp, Homo sapien
ttagcaactgcaaaatggtaacata

SEQ ID NO: 739621 - DNA, 25 bp, Homo sapien
ccttcaatttttcccgtgctcttag

SEQ ID NO: 739622 - DNA, 25 bp, Homo sapien
tggactgagcaaagattacaataca

SEQ ID NO: 739623 - DNA, 25 bp, Homo sapien
tacaatacattctatttagagtgca

SEQ ID NO: 739624 - DNA, 25 bp, Homo sapien
tgaagggaccacgttggactgagca

SEQ ID NO: 739625 - DNA, 25 bp, Homo sapien
ggaccacgttggactgagcaaagat

SEQ ID NO: 739626 - DNA, 25 bp, Homo sapien
tggctcctgcggcaagtgcaacaaa

SEQ ID NO: 739627 - DNA, 25 bp, Homo sapien
aagtacactcccgagatggctcctg

SEQ ID NO: 739628 - DNA, 25 bp, Homo sapien
tttacaaacacagatcaccctccag

SEQ ID NO: 739629 - DNA, 25 bp, Homo sapien
aagtggctaaatgcaaaagccccag

SEQ ID NO: 739630 - DNA, 25 bp, Homo sapien
cgcttgaccgcacttctggagggct

SEQ ID NO: 739631 - DNA, 25 bp, Homo sapien
gaaatatacaagtagcccgctccag

SEQ ID NO: 739632 - DNA, 25 bp, Homo sapien
taacgatgccagcaagaaagcagcg

SEQ ID NO: 739633 - DNA, 25 bp, Homo sapien
attcataactggtccccgcgtcagg

SEQ ID NO: 739634 - DNA, 25 bp, Homo sapien
ggaagtttaggttcaacgactcaca

SEQ ID NO: 739635 - DNA, 25 bp, Homo sapien
tatttcaactgccagatacggaggt

SEQ ID NO: 739636 - DNA, 25 bp, Homo sapien
taagagctagaaactaacgcacgca

SEQ ID NO: 739637 - DNA, 25 bp, Homo sapien
ttgcaacaagtcatacacagggtct

SEQ ID NO: 739638 - DNA, 25 bp, Homo sapien
tacaattacttctgcaacccagagg

SEQ ID NO: 739639 - DNA, 25 bp, Homo sapien
aaatttgtggaactgtctagcctcc

SEQ ID NO: 739640 - DNA, 25 bp, Homo sapien
agcaacgtgttgcttcctgcagtca

SEQ ID NO: 739641 - DNA, 25 bp, Homo sapien
tatttgcctcagtatttcagaccag

SEQ ID NO: 739642 - DNA, 25 bp, Homo sapien
tttcagttacagttgctcttggcat

SEQ ID NO: 739643 - DNA, 25 bp, Homo sapien
ctttcagttacagttgctcttggca

SEQ ID NO: 739644 - DNA, 25 bp, Homo sapien
taaagagtgtaaatgtccaagcatg

SEQ ID NO: 739645 - DNA, 25 bp, Homo sapien
caaaatctaggaggctttaacgcca

SEQ ID NO: 739646 - DNA, 25 bp, Homo sapien
gatacatcaatctgtgaaccggcaa

SEQ ID NO: 739647 - DNA, 25 bp, Homo sapien
tgagccagtgccacaagcaaaagaa

SEQ ID NO: 739648 - DNA, 25 bp, Homo sapien
cagaaataaattgactccaccacta

SEQ ID NO: 739649 - DNA, 25 bp, Homo sapien
tcaggtaaatgagatcgtttcagaa

SEQ ID NO: 739650 - DNA, 25 bp, Homo sapien
agaaataaattgactccaccactaa

SEQ ID NO: 739651 - DNA, 25 bp, Homo sapien
ttcagaaataaattgactccaccac

SEQ ID NO: 739652 - DNA, 25 bp, Homo sapien
gctaaatccagttgctccccacttg

SEQ ID NO: 739653 - DNA, 25 bp, Homo sapien
taaatccagttgctccccacttggg

SEQ ID NO: 739654 - DNA, 25 bp, Homo sapien
attgctaaatccagttgctccccac

SEQ ID NO: 739655 - DNA, 25 bp, Homo sapien
aatccagttgctccccacttggggg

SEQ ID NO: 739656 - DNA, 25 bp, Homo sapien
ctgtggtcaaggacaacagagtgga

SEQ ID NO: 739657 - DNA, 25 bp, Homo sapien
gcatcacatgaagggtctgttgttt

SEQ ID NO: 739658 - DNA, 25 bp, Homo sapien
taaagcatcacatgaagggtctgtt

SEQ ID NO: 739659 - DNA, 25 bp, Homo sapien
aggatggtgtaaggtctattcagga

SEQ ID NO: 739660 - DNA, 25 bp, Homo sapien
taaggtctattcaggatgtagacat

SEQ ID NO: 739661 - DNA, 25 bp, Homo sapien
ctggtgtcatattgtgggagctgcc

SEQ ID NO: 739662 - DNA, 25 bp, Homo sapien
gaacacaaggaacatttggtttgta

SEQ ID NO: 739663 - DNA, 25 bp, Homo sapien
aagccacatcatcccaccaagttag

SEQ ID NO: 739664 - DNA, 25 bp, Homo sapien
ccaaatgctccagtttgtgtatagc

SEQ ID NO: 739665 - DNA, 25 bp, Homo sapien
agctccatgtcactaacactaaagg

SEQ ID NO: 739666 - DNA, 25 bp, Homo sapien
tgcattggtgtcttgccagggccaa

SEQ ID NO: 739667 - DNA, 25 bp, Homo sapien
tcactaacactaaaggttcctgggc

SEQ ID NO: 739668 - DNA, 25 bp, Homo sapien
ggagcccagagaaccaagagcctgc

SEQ ID NO: 739669 - DNA, 25 bp, Homo sapien
agaacatatgaagagagtagttaaa

SEQ ID NO: 739670 - DNA, 25 bp, Homo sapien
tcagagaacatatgaagagagtagt

SEQ ID NO: 739671 - DNA, 25 bp, Homo sapien
cagagaacatatgaagagagtagtt

SEQ ID NO: 739672 - DNA, 25 bp, Homo sapien
gagaacatatgaagagagtagttaa

SEQ ID NO: 739673 - DNA, 25 bp, Homo sapien
gccaatctggtgccccaggaagaac

SEQ ID NO: 739674 - DNA, 25 bp, Homo sapien
tttacctacaactgtggcagctttg

SEQ ID NO: 739675 - DNA, 25 bp, Homo sapien
tcacgacataagctggtcattagac

SEQ ID NO: 739676 - DNA, 25 bp, Homo sapien
ctatcacgacataagctggtcatta

SEQ ID NO: 739677 - DNA, 25 bp, Homo sapien
tatcacgacataagctggtcattag

SEQ ID NO: 739678 - DNA, 25 bp, Homo sapien
atcacgacataagctggtcattaga

SEQ ID NO: 739679 - DNA, 25 bp, Homo sapien
agtggcataccaactcaactcagtc

SEQ ID NO: 739680 - DNA, 25 bp, Homo sapien
tagagtaggtcggatcttccaagtg

SEQ ID NO: 739681 - DNA, 25 bp, Homo sapien
cagccctgggtcacattccgttaga

SEQ ID NO: 739682 - DNA, 25 bp, Homo sapien
caatatctgcgttcactgacaacca

SEQ ID NO: 739683 - DNA, 25 bp, Homo sapien
tgcagttcggctcggggcttccaca

SEQ ID NO: 739684 - DNA, 25 bp, Homo sapien
agctatcccagtctgtccatccatc

SEQ ID NO: 739685 - DNA, 25 bp, Homo sapien
gaactgctctgtttgtctgattcct

SEQ ID NO: 739686 - DNA, 25 bp, Homo sapien
cacagctcctgcagttcggctcggg

SEQ ID NO: 739687 - DNA, 25 bp, Homo sapien
caaacaagaagggggtgtgcccagg

SEQ ID NO: 739688 - DNA, 25 bp, Homo sapien
ccaaacaagaagggggtgtgcccag

SEQ ID NO: 739689 - DNA, 25 bp, Homo sapien
tgttctggctgttgccaaacaagaa

SEQ ID NO: 739690 - DNA, 25 bp, Homo sapien
ccttgttctggctgttgccaaacaa

SEQ ID NO: 739691 - DNA, 25 bp, Homo sapien
tgggctcccattgcaaatctctcaa

SEQ ID NO: 739692 - DNA, 25 bp, Homo sapien
tcatgttgggctcccattgcaaatc

SEQ ID NO: 739693 - DNA, 25 bp, Homo sapien
ctcaatagggctggcccaagattct

SEQ ID NO: 739694 - DNA, 25 bp, Homo sapien
aggactgtgaccagctaccgccata

SEQ ID NO: 739695 - DNA, 25 bp, Homo sapien
gtgtatccatgtctgccatctgcct

SEQ ID NO: 739696 - DNA, 25 bp, Homo sapien
ggagcagcaacccattttcaaaaat

SEQ ID NO: 739697 - DNA, 25 bp, Homo sapien
gagcagcaacccattttcaaaaatc

SEQ ID NO: 739698 - DNA, 25 bp, Homo sapien
ttgtgagcaggtgttaggtctgcaa

SEQ ID NO: 739699 - DNA, 25 bp, Homo sapien
ttaggtctgcaatatgtattgccag

SEQ ID NO: 739700 - DNA, 25 bp, Homo sapien
gcactgcagacaaacggcctctcct

SEQ ID NO: 739701 - DNA, 25 bp, Homo sapien
ggcactgcagacaaacggcctctcc

SEQ ID NO: 739702 - DNA, 25 bp, Homo sapien
ctgcagacaaacggcctctcctgct

SEQ ID NO: 739703 - DNA, 25 bp, Homo sapien
gggcactgcagacaaacggcctctc

SEQ ID NO: 739704 - DNA, 25 bp, Homo sapien
ttattgaaggaaacttcaaagtcat

SEQ ID NO: 739705 - DNA, 25 bp, Homo sapien
tttcatgtttgtgcctatgaatcat

SEQ ID NO: 739706 - DNA, 25 bp, Homo sapien
tttattgaaggaaacttcaaagtca

SEQ ID NO: 739707 - DNA, 25 bp, Homo sapien
gctctagaaatgcatcacgtggacc

SEQ ID NO: 739708 - DNA, 25 bp, Homo sapien
tttgaaagctgcctatggatgtgca

SEQ ID NO: 739709 - DNA, 25 bp, Homo sapien
ccaggcgaagggttgtgcaagtctt

SEQ ID NO: 739710 - DNA, 25 bp, Homo sapien
taccatggaaatagactcaaacacc

SEQ ID NO: 739711 - DNA, 25 bp, Homo sapien
ttaggaattacccaatcagtcacat

SEQ ID NO: 739712 - DNA, 25 bp, Homo sapien
ggaattacccaatcagtcacattat

SEQ ID NO: 739713 - DNA, 25 bp, Homo sapien
gaattaggaattacccaatcagtca

SEQ ID NO: 739714 - DNA, 25 bp, Homo sapien
attacccaatcagtcacattatcag

SEQ ID NO: 739715 - DNA, 25 bp, Homo sapien
gactgtgtcaatcccatgcctatgc

SEQ ID NO: 739716 - DNA, 25 bp, Homo sapien
catttggtaacagccctgggacctt

SEQ ID NO: 739717 - DNA, 25 bp, Homo sapien
gggaagcagttgtctttgcagtctg

SEQ ID NO: 739718 - DNA, 25 bp, Homo sapien
gaaaacatcgctcaacgtgcttggg

SEQ ID NO: 739719 - DNA, 25 bp, Homo sapien
aatctcgttggggtcggagtttgat

SEQ ID NO: 739720 - DNA, 25 bp, Homo sapien
tcctgagccttcctgaactcgtgct

SEQ ID NO: 739721 - DNA, 25 bp, Homo sapien
ttcaggaatctcgttggggtcggag

SEQ ID NO: 739722 - DNA, 25 bp, Homo sapien
agctcgctgaagaggcccacctcct

SEQ ID NO: 739723 - DNA, 25 bp, Homo sapien
agtgccacctagtttcctcgtggaa

SEQ ID NO: 739724 - DNA, 25 bp, Homo sapien
ttcaaggccacatcaacacaatctg

SEQ ID NO: 739725 - DNA, 25 bp, Homo sapien
tcgtggaagtttctagcaggacacc

SEQ ID NO: 739726 - DNA, 25 bp, Homo sapien
tctcaaggcggccatccaagcaaac

SEQ ID NO: 739727 - DNA, 25 bp, Homo sapien
ttcacatagacaaggactaaaaggc

SEQ ID NO: 739728 - DNA, 25 bp, Homo sapien
ggagagagtcaagcatgcatgataa

SEQ ID NO: 739729 - DNA, 25 bp, Homo sapien
gccatacaggctaaatacaagccct

SEQ ID NO: 739730 - DNA, 25 bp, Homo sapien
aaacagacagttacaacatgggcca

SEQ ID NO: 739731 - DNA, 25 bp, Homo sapien
taatagttgctatgtaagtgcttgt

SEQ ID NO: 739732 - DNA, 25 bp, Homo sapien
gctttgactatcttgaggaatgaat

SEQ ID NO: 739733 - DNA, 25 bp, Homo sapien
tattactcaaccaaaggaagttgac

SEQ ID NO: 739734 - DNA, 25 bp, Homo sapien
tatagttcagtttaagaagccagct

SEQ ID NO: 739735 - DNA, 25 bp, Homo sapien
tgcaagaatttcctcacacagggct

SEQ ID NO: 739736 - DNA, 25 bp, Homo sapien
ggcagtcaaagcgaaaagagaaaca

SEQ ID NO: 739737 - DNA, 25 bp, Homo sapien
tagtaaaatcaagggcacacacttg

SEQ ID NO: 739738 - DNA, 25 bp, Homo sapien
cacgggcttcacgaaactgttcttg

SEQ ID NO: 739739 - DNA, 25 bp, Homo sapien
actgaaagtctggtctagggaggaa

SEQ ID NO: 739740 - DNA, 25 bp, Homo sapien
gcatcacatggctatgagcaacact

SEQ ID NO: 739741 - DNA, 25 bp, Homo sapien
tgctcgtcacaatgttcgaaaaggt

SEQ ID NO: 739742 - DNA, 25 bp, Homo sapien
tgtcctgagatgctggccctagacc

SEQ ID NO: 739743 - DNA, 25 bp, Homo sapien
caatgccctctcgtgtaaccatggc

SEQ ID NO: 739744 - DNA, 25 bp, Homo sapien
aacacagccgtctttgctgccagag

SEQ ID NO: 739745 - DNA, 25 bp, Homo sapien
gaagaagaagcctcaacagcctgaa

SEQ ID NO: 739746 - DNA, 25 bp, Homo sapien
ggtttagccctcaagacaatgccct

SEQ ID NO: 739747 - DNA, 25 bp, Homo sapien
aaggcaaagtgcctctccttccgca

SEQ ID NO: 739748 - DNA, 25 bp, Homo sapien
cacagagcagcgatgctggctagcg

SEQ ID NO: 739749 - DNA, 25 bp, Homo sapien
ttcttgccccaagtaatgggtggca

SEQ ID NO: 739750 - DNA, 25 bp, Homo sapien
gctagcggctgatgggcacaagata

SEQ ID NO: 739751 - DNA, 25 bp, Homo sapien
ccaagtttaggtttcagaatattct

SEQ ID NO: 739752 - DNA, 25 bp, Homo sapien
caagtttaggtttcagaatattctt

SEQ ID NO: 739753 - DNA, 25 bp, Homo sapien
tctactaggattaagcaaacacggg

SEQ ID NO: 739754 - DNA, 25 bp, Homo sapien
tcatctactaggattaagcaaacac

SEQ ID NO: 739755 - DNA, 25 bp, Homo sapien
gcggtgcctgcggagcttcagggct

SEQ ID NO: 739756 - DNA, 25 bp, Homo sapien
tgcagctgagctgagggcggtgcct

SEQ ID NO: 739757 - DNA, 25 bp, Homo sapien
gagcttcagggctgcactgtggttt

SEQ ID NO: 739758 - DNA, 25 bp, Homo sapien
gctgcactgtggttttggctgtttt

SEQ ID NO: 739759 - DNA, 25 bp, Homo sapien
cttaaggcggagcttcctaattgtt

SEQ ID NO: 739760 - DNA, 25 bp, Homo sapien
ttgttttagtgaggatcatcccaac

SEQ ID NO: 739761 - DNA, 25 bp, Homo sapien
cagggcgggccaaagaagtggccct

SEQ ID NO: 739762 - DNA, 25 bp, Homo sapien
tgaggatcatcccaaccactagaat

SEQ ID NO: 739763 - DNA, 25 bp, Homo sapien
ttgggacaggtaagaagcgatttaa

SEQ ID NO: 739764 - DNA, 25 bp, Homo sapien
cttgggacaggtaagaagcgattta

SEQ ID NO: 739765 - DNA, 25 bp, Homo sapien
tgggacaggtaagaagcgatttaaa

SEQ ID NO: 739766 - DNA, 25 bp, Homo sapien
aatggattcattcggaggagagtgt

SEQ ID NO: 739767 - DNA, 25 bp, Homo sapien
gattcattcggaggagagtgtccat

SEQ ID NO: 739768 - DNA, 25 bp, Homo sapien
ttcattcggaggagagtgtccattc

SEQ ID NO: 739769 - DNA, 25 bp, Homo sapien
ttcggaggagagtgtccattcgatg

SEQ ID NO: 739770 - DNA, 25 bp, Homo sapien
cctttgggagtattaatgcagggcc

SEQ ID NO: 739771 - DNA, 25 bp, Homo sapien
tcgcggaggacagcgtgagcttcct

SEQ ID NO: 739772 - DNA, 25 bp, Homo sapien
ttttctgcctagaacggaagcttca

SEQ ID NO: 739773 - DNA, 25 bp, Homo sapien
tgtctggcacgtcagaaatcctgaa

SEQ ID NO: 739774 - DNA, 25 bp, Homo sapien
ctggactggtcacacagaacagagt

SEQ ID NO: 739775 - DNA, 25 bp, Homo sapien
caaatttgtgcttagaggagatgct

SEQ ID NO: 739776 - DNA, 25 bp, Homo sapien
ccagcagcaagtgagttctattagc

SEQ ID NO: 739777 - DNA, 25 bp, Homo sapien
gaattctgcttcacccgagaaccaa

SEQ ID NO: 739778 - DNA, 25 bp, Homo sapien
aattagtgataaacagagcttggct

SEQ ID NO: 739779 - DNA, 25 bp, Homo sapien
aaagagccttgggacctgttcttgg

SEQ ID NO: 739780 - DNA, 25 bp, Homo sapien
tgttcttggggcagacctccgcgag

SEQ ID NO: 739781 - DNA, 25 bp, Homo sapien
agcttggctcagagtcggagctcca

SEQ ID NO: 739782 - DNA, 25 bp, Homo sapien
tgaattagataccatgagtacagga

SEQ ID NO: 739783 - DNA, 25 bp, Homo sapien
taaaagatggatgaattagatacca

SEQ ID NO: 739784 - DNA, 25 bp, Homo sapien
tgagtacaggatagaggacctccct

SEQ ID NO: 739785 - DNA, 25 bp, Homo sapien
atttcactcttcataaggggtgtag

SEQ ID NO: 739786 - DNA, 25 bp, Homo sapien
gaccactctcgtgcattcttgggtg

SEQ ID NO: 739787 - DNA, 25 bp, Homo sapien
tcaattagcagagctccatagtcag

SEQ ID NO: 739788 - DNA, 25 bp, Homo sapien
tccttcggggctttggctattgcct

SEQ ID NO: 739789 - DNA, 25 bp, Homo sapien
gctattgcctgagtggtcaattagc

SEQ ID NO: 739790 - DNA, 25 bp, Homo sapien
tgttccctttgataagctgcacaca

SEQ ID NO: 739791 - DNA, 25 bp, Homo sapien
ttccaggtcaagcatggctcctctt

SEQ ID NO: 739792 - DNA, 25 bp, Homo sapien
tccaggtcaagcatggctcctctta

SEQ ID NO: 739793 - DNA, 25 bp, Homo sapien
agtgatggtgaaccttgttcccttt

SEQ ID NO: 739794 - DNA, 25 bp, Homo sapien
ggacaggtatggtcaccagagtgtc

SEQ ID NO: 739795 - DNA, 25 bp, Homo sapien
tgcaaagtgcaggtacgcacgacag

SEQ ID NO: 739796 - DNA, 25 bp, Homo sapien
ggtacgcacgacaggaaaggacagc

SEQ ID NO: 739797 - DNA, 25 bp, Homo sapien
acaggtatggtcaccagagtgtcca

SEQ ID NO: 739798 - DNA, 25 bp, Homo sapien
tgtttgctggtttctcagcagacat

SEQ ID NO: 739799 - DNA, 25 bp, Homo sapien
ggtttctcagcagacataggcagac

SEQ ID NO: 739800 - DNA, 25 bp, Homo sapien
gacataggcagacagcgtgttttct

SEQ ID NO: 739801 - DNA, 25 bp, Homo sapien
caaggtgctttttgaacattgtttg

SEQ ID NO: 739802 - DNA, 25 bp, Homo sapien
agacagacctctaaatggctggtat

SEQ ID NO: 739803 - DNA, 25 bp, Homo sapien
tgtaatgatatggacagatgcctag

SEQ ID NO: 739804 - DNA, 25 bp, Homo sapien
tggctaggcaggcaaacataaatgc

SEQ ID NO: 739805 - DNA, 25 bp, Homo sapien
caaaaactgatggaaagctacttgt

SEQ ID NO: 739806 - DNA, 25 bp, Homo sapien
tccagccctggtgatgctctgccat

SEQ ID NO: 739807 - DNA, 25 bp, Homo sapien
cagccctggtgatgctctgccatag

SEQ ID NO: 739808 - DNA, 25 bp, Homo sapien
tggtgatgctctgccataggtagca

SEQ ID NO: 739809 - DNA, 25 bp, Homo sapien
ccctggtgatgctctgccataggta

SEQ ID NO: 739810 - DNA, 25 bp, Homo sapien
tcggcttggcactggtaatcatcaa

SEQ ID NO: 739811 - DNA, 25 bp, Homo sapien
agatgccatataccaatcggcttgg

SEQ ID NO: 739812 - DNA, 25 bp, Homo sapien
tataccaatcggcttggcactggta

SEQ ID NO: 739813 - DNA, 25 bp, Homo sapien
ggcactggtaatcatcaacttcact

SEQ ID NO: 739814 - DNA, 25 bp, Homo sapien
ctggactgaggcgacggcatggctt

SEQ ID NO: 739815 - DNA, 25 bp, Homo sapien
ggcttgctgaatcacaacgttggtg

SEQ ID NO: 739816 - DNA, 25 bp, Homo sapien
ttgggcagccgagcgctgctaagct

SEQ ID NO: 739817 - DNA, 25 bp, Homo sapien
ctgagtgatgacagagctggactga

SEQ ID NO: 739818 - DNA, 25 bp, Homo sapien
tatggttaagtctgtcaaccctccc

SEQ ID NO: 739819 - DNA, 25 bp, Homo sapien
taaaaccccgtgagtggaaggctgc

SEQ ID NO: 739820 - DNA, 25 bp, Homo sapien
gtaatttctcaaggctctgcatggg

SEQ ID NO: 739821 - DNA, 25 bp, Homo sapien
tctgcatgggatttaacgggagcca

SEQ ID NO: 739822 - DNA, 25 bp, Homo sapien
tttgggcagggaatagtggtcttcc

SEQ ID NO: 739823 - DNA, 25 bp, Homo sapien
ttgggcagggaatagtggtcttcct

SEQ ID NO: 739824 - DNA, 25 bp, Homo sapien
cctccaagaaaagctcacaggcaaa

SEQ ID NO: 739825 - DNA, 25 bp, Homo sapien
ccaactgtcccctcaggaaatggaa

SEQ ID NO: 739826 - DNA, 25 bp, Homo sapien
aagccaactgtcccctcaggaaatg

SEQ ID NO: 739827 - DNA, 25 bp, Homo sapien
tcctccaagaaaagctcacaggcaa

SEQ ID NO: 739828 - DNA, 25 bp, Homo sapien
ctagagcttctgccaaacttggctc

SEQ ID NO: 739829 - DNA, 25 bp, Homo sapien
atttctagcatttcaaagatgtttg

SEQ ID NO: 739830 - DNA, 25 bp, Homo sapien
tctgttctctgcaaagttctgtgac

SEQ ID NO: 739831 - DNA, 25 bp, Homo sapien
tcaggaagtcatttctagcatttca

SEQ ID NO: 739832 - DNA, 25 bp, Homo sapien
ctgttctctgcaaagttctgtgacc

SEQ ID NO: 739833 - DNA, 25 bp, Homo sapien
gcctctgcctgtgactgtggtacag

SEQ ID NO: 739834 - DNA, 25 bp, Homo sapien
aggccttggcaaggaaccaaccaag

SEQ ID NO: 739835 - DNA, 25 bp, Homo sapien
tgtggtacaggccttggcaaggaac

SEQ ID NO: 739836 - DNA, 25 bp, Homo sapien
gattctctttaagcacccgcaggcc

SEQ ID NO: 739837 - DNA, 25 bp, Homo sapien
agttctttatagacatggtcttctc

SEQ ID NO: 739838 - DNA, 25 bp, Homo sapien
gtcttctctacgtaagtcatttcag

SEQ ID NO: 739839 - DNA, 25 bp, Homo sapien
tcagaaccaggcaaaggtatccagt

SEQ ID NO: 739840 - DNA, 25 bp, Homo sapien
gtccaccaaatatgaatactttctt

SEQ ID NO: 739841 - DNA, 25 bp, Homo sapien
tcacagccaatgacattacccagga

SEQ ID NO: 739842 - DNA, 25 bp, Homo sapien
ccaggaaacaccatgtacggcgctg

SEQ ID NO: 739843 - DNA, 25 bp, Homo sapien
tcagtgtttgtttcgaagggcaaag

SEQ ID NO: 739844 - DNA, 25 bp, Homo sapien
tgccctgatgccacgattaataaac

SEQ ID NO: 739845 - DNA, 25 bp, Homo sapien
ttagaaaaatgtatctgcaaggcta

SEQ ID NO: 739846 - DNA, 25 bp, Homo sapien
tcaggtctgcatttttagaaaaatg

SEQ ID NO: 739847 - DNA, 25 bp, Homo sapien
ctcaggtctgcatttttagaaaaat

SEQ ID NO: 739848 - DNA, 25 bp, Homo sapien
tttttagaaaaatgtatctgcaagg

SEQ ID NO: 739849 - DNA, 25 bp, Homo sapien
caaccacaggcgagtgtgctcaaca

SEQ ID NO: 739850 - DNA, 25 bp, Homo sapien
caagtacacgacctttgcagctcag

SEQ ID NO: 739851 - DNA, 25 bp, Homo sapien
tgtgccagagtcctgtcaaccacag

SEQ ID NO: 739852 - DNA, 25 bp, Homo sapien
tggtgcatcaaactcaacaaggtag

SEQ ID NO: 739853 - DNA, 25 bp, Homo sapien
ccactctagttataacaggccaata

SEQ ID NO: 739854 - DNA, 25 bp, Homo sapien
agaagacatttgtccagcagaaaca

SEQ ID NO: 739855 - DNA, 25 bp, Homo sapien
tcttccagatccaagctataggcca

SEQ ID NO: 739856 - DNA, 25 bp, Homo sapien
aacatttgccagtgaggaacattcc

SEQ ID NO: 739857 - DNA, 25 bp, Homo sapien
tttggcacatgaccaacatccaggt

SEQ ID NO: 739858 - DNA, 25 bp, Homo sapien
tctgctccccacaagacttggaaat

SEQ ID NO: 739859 - DNA, 25 bp, Homo sapien
aaatgccctcttgattctcagggtt

SEQ ID NO: 739860 - DNA, 25 bp, Homo sapien
tgtgttcagtgctatttcctatgag

SEQ ID NO: 739861 - DNA, 25 bp, Homo sapien
ggcaccagagcgtgaagatctggag

SEQ ID NO: 739862 - DNA, 25 bp, Homo sapien
gcaccagagcgtgaagatctggaga

SEQ ID NO: 739863 - DNA, 25 bp, Homo sapien
atcttttattaggcaccagagcgtg

SEQ ID NO: 739864 - DNA, 25 bp, Homo sapien
atgatcttttattaggcaccagagc

SEQ ID NO: 739865 - DNA, 25 bp, Homo sapien
tcaggtcaattcgtggccgcctcct

SEQ ID NO: 739866 - DNA, 25 bp, Homo sapien
tctggatgtcaatgagagggttaaa

SEQ ID NO: 739867 - DNA, 25 bp, Homo sapien
ccgtagcggctctggatgtcaatga

SEQ ID NO: 739868 - DNA, 25 bp, Homo sapien
gtggccgcctcctctttgaccgtag

SEQ ID NO: 739869 - DNA, 25 bp, Homo sapien
ttaagttgcagtcagaatgcttgct

SEQ ID NO: 739870 - DNA, 25 bp, Homo sapien
aatgcttgcttggtatgacgacatc

SEQ ID NO: 739871 - DNA, 25 bp, Homo sapien
aggttgacttcacagcgcaccacag

SEQ ID NO: 739872 - DNA, 25 bp, Homo sapien
acagaacacttgtgtccggaaggtt

SEQ ID NO: 739873 - DNA, 25 bp, Homo sapien
cagagtgctttatctatttgtaacg

SEQ ID NO: 739874 - DNA, 25 bp, Homo sapien
aacggcttcagactatctggtttag

SEQ ID NO: 739875 - DNA, 25 bp, Homo sapien
tatctatttgtaacggcttcagact

SEQ ID NO: 739876 - DNA, 25 bp, Homo sapien
agactatctggtttaggttgaatac

SEQ ID NO: 739877 - DNA, 25 bp, Homo sapien
tgcttgaagaagtacctggaacagg

SEQ ID NO: 739878 - DNA, 25 bp, Homo sapien
tacaaactagcgactcagggtgaac

SEQ ID NO: 739879 - DNA, 25 bp, Homo sapien
tgtaaataagaaccatcctagtgcc

SEQ ID NO: 739880 - DNA, 25 bp, Homo sapien
tcatctttcagccatcgagtgccca

SEQ ID NO: 739881 - DNA, 25 bp, Homo sapien
gaatggaagtggagtgccagacaca

SEQ ID NO: 739882 - DNA, 25 bp, Homo sapien
caaacccgtgaactattcgtgagac

SEQ ID NO: 739883 - DNA, 25 bp, Homo sapien
gatttgcctctagcacaaagtagtg

SEQ ID NO: 739884 - DNA, 25 bp, Homo sapien
gccctaaacttagctggaagattcc

SEQ ID NO: 739885 - DNA, 25 bp, Homo sapien
gccataccaagtctaaagatttttc

SEQ ID NO: 739886 - DNA, 25 bp, Homo sapien
aatttcactcatgtctgtggctaca

SEQ ID NO: 739887 - DNA, 25 bp, Homo sapien
tcaatgccataccaagtctaaagat

SEQ ID NO: 739888 - DNA, 25 bp, Homo sapien
gtggctacagagctcaatgccatac

SEQ ID NO: 739889 - DNA, 25 bp, Homo sapien
cctgttattcctgttatagtctctg

SEQ ID NO: 739890 - DNA, 25 bp, Homo sapien
tcctgttatagtctctgcacaaagc

SEQ ID NO: 739891 - DNA, 25 bp, Homo sapien
ccagctctaactgttggccttgatg

SEQ ID NO: 739892 - DNA, 25 bp, Homo sapien
aaatcctgttattcctgttatagtc

SEQ ID NO: 739893 - DNA, 25 bp, Homo sapien
tgttatgtgaccagtccacataggg

SEQ ID NO: 739894 - DNA, 25 bp, Homo sapien
agctgggctgaattttagacaagta

SEQ ID NO: 739895 - DNA, 25 bp, Homo sapien
tattcaatatgctcaacgttctaca

SEQ ID NO: 739896 - DNA, 25 bp, Homo sapien
tagacaagtacctaaacgtatctcc

SEQ ID NO: 739897 - DNA, 25 bp, Homo sapien
ctgtgagttggctgtcctgacatat

SEQ ID NO: 739898 - DNA, 25 bp, Homo sapien
tcttccatacacaataattgtctca

SEQ ID NO: 739899 - DNA, 25 bp, Homo sapien
tttcttccatacacaataattgtct

SEQ ID NO: 739900 - DNA, 25 bp, Homo sapien
tctcatgtattgtcctgtgagttgg

SEQ ID NO: 739901 - DNA, 25 bp, Homo sapien
gagaatacaattgcaacagcaaggg

SEQ ID NO: 739902 - DNA, 25 bp, Homo sapien
gggtggtggagaatacaattgcaac

SEQ ID NO: 739903 - DNA, 25 bp, Homo sapien
tccgctgcacaagtagccaggtctg

SEQ ID NO: 739904 - DNA, 25 bp, Homo sapien
tcttgaagtgtaggccaaggggata

SEQ ID NO: 739905 - DNA, 25 bp, Homo sapien
cccaaaactggcgactcaacatggc

SEQ ID NO: 739906 - DNA, 25 bp, Homo sapien
tcccatcaccccttgatttgatcag

SEQ ID NO: 739907 - DNA, 25 bp, Homo sapien
tggcgactcaacatggccttcccat

SEQ ID NO: 739908 - DNA, 25 bp, Homo sapien
tgatcagctcagagtctaagaaagc

SEQ ID NO: 739909 - DNA, 25 bp, Homo sapien
tgagcgggccaagtttaaccaccgc

SEQ ID NO: 739910 - DNA, 25 bp, Homo sapien
tgcactgcacgggtttgagcgggcc

SEQ ID NO: 739911 - DNA, 25 bp, Homo sapien
cctgcactgcacgggtttgagcggg

SEQ ID NO: 739912 - DNA, 25 bp, Homo sapien
cactgcacgggtttgagcgggccaa

SEQ ID NO: 739913 - DNA, 25 bp, Homo sapien
acataaaaaataaccagctcagaaa

SEQ ID NO: 739914 - DNA, 25 bp, Homo sapien
gaaaaatggcccatgtacaacatct

SEQ ID NO: 739915 - DNA, 25 bp, Homo sapien
ggcccatgtacaacatctttgagtt

SEQ ID NO: 739916 - DNA, 25 bp, Homo sapien
tgtacaacatctttgagtttttatg

SEQ ID NO: 739917 - DNA, 25 bp, Homo sapien
tagagaatgattcccatcccaaaga

SEQ ID NO: 739918 - DNA, 25 bp, Homo sapien
tgcttacaagaacacactcatgcca

SEQ ID NO: 739919 - DNA, 25 bp, Homo sapien
gctggcagtttcgagcaactagata

SEQ ID NO: 739920 - DNA, 25 bp, Homo sapien
caggctaagcgtatttcatggaaga

SEQ ID NO: 739921 - DNA, 25 bp, Homo sapien
gctgcccagcgggttctaagagctg

SEQ ID NO: 739922 - DNA, 25 bp, Homo sapien
ggctgcccagcgggttctaagagct

SEQ ID NO: 739923 - DNA, 25 bp, Homo sapien
ggggacaataggagcagatgctttc

SEQ ID NO: 739924 - DNA, 25 bp, Homo sapien
tgcccagcgggttctaagagctgct

SEQ ID NO: 739925 - DNA, 25 bp, Homo sapien
cttccacattctactgtccctctca

SEQ ID NO: 739926 - DNA, 25 bp, Homo sapien
tctcaggcccatacatgactgtggt

SEQ ID NO: 739927 - DNA, 25 bp, Homo sapien
tgaaagagaaaactgctgacataat

SEQ ID NO: 739928 - DNA, 25 bp, Homo sapien
tgtggtttctctatttacaccagaa

SEQ ID NO: 739929 - DNA, 25 bp, Homo sapien
gtatctgcaggataaccctgaaaat

SEQ ID NO: 739930 - DNA, 25 bp, Homo sapien
aatatactccgctggctgttttcat

SEQ ID NO: 739931 - DNA, 25 bp, Homo sapien
aaatatactccgctggctgttttca

SEQ ID NO: 739932 - DNA, 25 bp, Homo sapien
tatctgcaggataaccctgaaaata

SEQ ID NO: 739933 - DNA, 25 bp, Homo sapien
ctttcctggaacccctaagccactg

SEQ ID NO: 739934 - DNA, 25 bp, Homo sapien
cttgcaaagtaaatgcctgcctctt

SEQ ID NO: 739935 - DNA, 25 bp, Homo sapien
gagggcctcagattcctcttgctcc

SEQ ID NO: 739936 - DNA, 25 bp, Homo sapien
ccccacagcagggatggcagaatga

SEQ ID NO: 739937 - DNA, 25 bp, Homo sapien
cttttctccctggagggcctcagat

SEQ ID NO: 739938 - DNA, 25 bp, Homo sapien
ccacagcagggatggcagaatgagc

SEQ ID NO: 739939 - DNA, 25 bp, Homo sapien
gggctttggttcagaaccaggtgac

SEQ ID NO: 739940 - DNA, 25 bp, Homo sapien
ccagccctccggagacttctcgcat

SEQ ID NO: 739941 - DNA, 25 bp, Homo sapien
tctgttgctgaatgccaaccaccag

SEQ ID NO: 739942 - DNA, 25 bp, Homo sapien
cagggtttccatcgcccagggccct

SEQ ID NO: 739943 - DNA, 25 bp, Homo sapien
tgcaggcaggggtcagctggttctg

SEQ ID NO: 739944 - DNA, 25 bp, Homo sapien
ctgcaggcaggggtcagctggttct

SEQ ID NO: 739945 - DNA, 25 bp, Homo sapien
tggccctacagctgccatcagagag

SEQ ID NO: 739946 - DNA, 25 bp, Homo sapien
cagctgccatcagagagctccaaga

SEQ ID NO: 739947 - DNA, 25 bp, Homo sapien
gggatggccctacagctgccatcag

SEQ ID NO: 739948 - DNA, 25 bp, Homo sapien
agagctccaagagggacccggagtt

SEQ ID NO: 739949 - DNA, 25 bp, Homo sapien
ctgagttccaggctcggagagcctt

SEQ ID NO: 739950 - DNA, 25 bp, Homo sapien
gagagccttcgtggtgcacttgccc

SEQ ID NO: 739951 - DNA, 25 bp, Homo sapien
tccaggctcggagagccttcgtggt

SEQ ID NO: 739952 - DNA, 25 bp, Homo sapien
gaagcaaaaacttcaatgtaaccaa

SEQ ID NO: 739953 - DNA, 25 bp, Homo sapien
gcgatgatgtaatgtgctggccctt

SEQ ID NO: 739954 - DNA, 25 bp, Homo sapien
tgagccaaagcttaactagcttgag

SEQ ID NO: 739955 - DNA, 25 bp, Homo sapien
cttgagtgagtcatatccttcccat

SEQ ID NO: 739956 - DNA, 25 bp, Homo sapien
ttgattccaggccaagcgatgatgt

SEQ ID NO: 739957 - DNA, 25 bp, Homo sapien
ctgaggctgaattccctcctgaggt

SEQ ID NO: 739958 - DNA, 25 bp, Homo sapien
aattccctcctgaggtgcagaacat

SEQ ID NO: 739959 - DNA, 25 bp, Homo sapien
ctcatggacatcactgaggctgaat

SEQ ID NO: 739960 - DNA, 25 bp, Homo sapien
tcatggacatcactgaggctgaatt

SEQ ID NO: 739961 - DNA, 25 bp, Homo sapien
aggagaaacaaagacgggcagaaag

SEQ ID NO: 739962 - DNA, 25 bp, Homo sapien
cattcaggtctctgtgctagaacaa

SEQ ID NO: 739963 - DNA, 25 bp, Homo sapien
gaaatgcctcttcgggcaagaagag

SEQ ID NO: 739964 - DNA, 25 bp, Homo sapien
acaaaaactctgatcgaagtgaaaa

SEQ ID NO: 739965 - DNA, 25 bp, Homo sapien
tagacacctttctggtatgtgccgc

SEQ ID NO: 739966 - DNA, 25 bp, Homo sapien
gtaatgccggatggtgtcagaaagc

SEQ ID NO: 739967 - DNA, 25 bp, Homo sapien
tatgtgccgcatgcctcaatatgca

SEQ ID NO: 739968 - DNA, 25 bp, Homo sapien
gatgatcacgtctaaataagcccaa

SEQ ID NO: 739969 - DNA, 25 bp, Homo sapien
tgtggaaggcaaagcccatggacag

SEQ ID NO: 739970 - DNA, 25 bp, Homo sapien
aaggcaaagcccatggacaggccat

SEQ ID NO: 739971 - DNA, 25 bp, Homo sapien
gaaggcaaagcccatggacaggcca

SEQ ID NO: 739972 - DNA, 25 bp, Homo sapien
tggaaggcaaagcccatggacaggc

SEQ ID NO: 739973 - DNA, 25 bp, Homo sapien
gacagggctcattctcagtctacac

SEQ ID NO: 739974 - DNA, 25 bp, Homo sapien
tctgcttcttaatgttgacctggcc

SEQ ID NO: 739975 - DNA, 25 bp, Homo sapien
aagcagcttgagacaccatatgccc

SEQ ID NO: 739976 - DNA, 25 bp, Homo sapien
tttaagtagagttccagattggccc

SEQ ID NO: 739977 - DNA, 25 bp, Homo sapien
gactgtctgccgtgtcagcacatgg

SEQ ID NO: 739978 - DNA, 25 bp, Homo sapien
ggtagccattccagttcacacaatg

SEQ ID NO: 739979 - DNA, 25 bp, Homo sapien
caaaaggctgcaagagggccagctg

SEQ ID NO: 739980 - DNA, 25 bp, Homo sapien
gggtgcagcccaacgtgacttcaat

SEQ ID NO: 739981 - DNA, 25 bp, Homo sapien
tgctaaagagctaagatgacattcc

SEQ ID NO: 739982 - DNA, 25 bp, Homo sapien
tagatgatacctgacaccacctgct

SEQ ID NO: 739983 - DNA, 25 bp, Homo sapien
tacttcatagtagatgatacctgac

SEQ ID NO: 739984 - DNA, 25 bp, Homo sapien
tccctaagtgcctaggttgagtcct

SEQ ID NO: 739985 - DNA, 25 bp, Homo sapien
tttattagtaagcacaatgacatct

SEQ ID NO: 739986 - DNA, 25 bp, Homo sapien
actcattgggactaggtttaaactg

SEQ ID NO: 739987 - DNA, 25 bp, Homo sapien
taggtttaaactggacattttgaga

SEQ ID NO: 739988 - DNA, 25 bp, Homo sapien
gagaggtaggacaggtccccaaata

SEQ ID NO: 739989 - DNA, 25 bp, Homo sapien
tacagctaacagatctgcatcctgc

SEQ ID NO: 739990 - DNA, 25 bp, Homo sapien
tacttaggcggaggagatgtttact

SEQ ID NO: 739991 - DNA, 25 bp, Homo sapien
catatacactgcatctacttaggcg

SEQ ID NO: 739992 - DNA, 25 bp, Homo sapien
ggctttacccataggtcagacttac

SEQ ID NO: 739993 - DNA, 25 bp, Homo sapien
tctgggcctggtatacctgccatag

SEQ ID NO: 739994 - DNA, 25 bp, Homo sapien
tgaccacctctctcgctcattgctc

SEQ ID NO: 739995 - DNA, 25 bp, Homo sapien
gaccacctctctcgctcattgctct

SEQ ID NO: 739996 - DNA, 25 bp, Homo sapien
ctctgggcctggtatacctgccata

SEQ ID NO: 739997 - DNA, 25 bp, Homo sapien
ctgtctgttgtggagatgtagcaga

SEQ ID NO: 739998 - DNA, 25 bp, Homo sapien
tgtctgttgtggagatgtagcagag

SEQ ID NO: 739999 - DNA, 25 bp, Homo sapien
tctgtctgttgtggagatgtagcag

SEQ ID NO: 740000 - DNA, 25 bp, Homo sapien
acggcggaagatcctggcattgtag

SEQ ID NO: 740001 - DNA, 25 bp, Homo sapien
tggcatcaagacggcggaagatcct

SEQ ID NO: 740002 - DNA, 25 bp, Homo sapien
cattgtagggttgggcagggtccca

SEQ ID NO: 740003 - DNA, 25 bp, Homo sapien
atcaagacggcggaagatcctggca

SEQ ID NO: 740004 - DNA, 25 bp, Homo sapien
tgtcaccatggaccatatctcatag

SEQ ID NO: 740005 - DNA, 25 bp, Homo sapien
actctgtatacagcccaaactgtag

SEQ ID NO: 740006 - DNA, 25 bp, Homo sapien
catggaccatatctcatagcaaagc

SEQ ID NO: 740007 - DNA, 25 bp, Homo sapien
aggcccacttgtcaccatggaccat

SEQ ID NO: 740008 - DNA, 25 bp, Homo sapien
gaatgagctgatcagtcatctggca

SEQ ID NO: 740009 - DNA, 25 bp, Homo sapien
tcagtcatctggcagtgtgcagatg

SEQ ID NO: 740010 - DNA, 25 bp, Homo sapien
cttagcctgaatgagctgatcagtc

SEQ ID NO: 740011 - DNA, 25 bp, Homo sapien
gtcatctggcagtgtgcagatgtgt

SEQ ID NO: 740012 - DNA, 25 bp, Homo sapien
gctgagatttggaccttgcatcccc

SEQ ID NO: 740013 - DNA, 25 bp, Homo sapien
tgctgagatttggaccttgcatccc

SEQ ID NO: 740014 - DNA, 25 bp, Homo sapien
tatttgcccaaggtagccagcactg

SEQ ID NO: 740015 - DNA, 25 bp, Homo sapien
tcctcgggtcaagaagctgcaagtc

SEQ ID NO: 740016 - DNA, 25 bp, Homo sapien
gatggagccctctacctagctgaac

SEQ ID NO: 740017 - DNA, 25 bp, Homo sapien
tacagtctctaatgctgccagtcag

SEQ ID NO: 740018 - DNA, 25 bp, Homo sapien
agaatctacctaatatctatctgga

SEQ ID NO: 740019 - DNA, 25 bp, Homo sapien
taaaccacagggagtaacatctcag

SEQ ID NO: 740020 - DNA, 25 bp, Homo sapien
tggcataaaatccagtgaaaatcaa

SEQ ID NO: 740021 - DNA, 25 bp, Homo sapien
tccaaaaggtacagaccctgaagca

SEQ ID NO: 740022 - DNA, 25 bp, Homo sapien
tcatcacaatagtccatgtgtgacc

SEQ ID NO: 740023 - DNA, 25 bp, Homo sapien
gcattcatcacaatagtccatgtgt

SEQ ID NO: 740024 - DNA, 25 bp, Homo sapien
tttagttgaaatctggaatccattc

SEQ ID NO: 740025 - DNA, 25 bp, Homo sapien
agagttttagttgaaatctggaatc

SEQ ID NO: 740026 - DNA, 25 bp, Homo sapien
ccagagagatgttacctggagactg

SEQ ID NO: 740027 - DNA, 25 bp, Homo sapien
catgtgtataagctttccaggcaac

SEQ ID NO: 740028 - DNA, 25 bp, Homo sapien
gcaaataggcaaatcgaagaactgc

SEQ ID NO: 740029 - DNA, 25 bp, Homo sapien
tgcatttttcaggagtgccagagag

SEQ ID NO: 740030 - DNA, 25 bp, Homo sapien
ggaagacccatgcaggcacaaagaa

SEQ ID NO: 740031 - DNA, 25 bp, Homo sapien
caaggcattttgtactaggtgccaa

SEQ ID NO: 740032 - DNA, 25 bp, Homo sapien
tggagctctagaacccgaggaagac

SEQ ID NO: 740033 - DNA, 25 bp, Homo sapien
gattgtatttcaccagttgccgtgg

SEQ ID NO: 740034 - DNA, 25 bp, Homo sapien
tctgtcctagaagaaggcatggctc

SEQ ID NO: 740035 - DNA, 25 bp, Homo sapien
taaagcatttcatgtaaggccacca

SEQ ID NO: 740036 - DNA, 25 bp, Homo sapien
tactgggcacctagcaagtacagga

SEQ ID NO: 740037 - DNA, 25 bp, Homo sapien
gacacggagctgaatcaaactggcc

SEQ ID NO: 740038 - DNA, 25 bp, Homo sapien
tacgcagttctttagctcatctttc

SEQ ID NO: 740039 - DNA, 25 bp, Homo sapien
tttgtctaaggagcatacgcagttc

SEQ ID NO: 740040 - DNA, 25 bp, Homo sapien
tctacaaaacagacttgttggaaca

SEQ ID NO: 740041 - DNA, 25 bp, Homo sapien
gattgctcagtggacggctagagac

SEQ ID NO: 740042 - DNA, 25 bp, Homo sapien
caacctttagtcaagtagaaatcag

SEQ ID NO: 740043 - DNA, 25 bp, Homo sapien
gcacggaggcctgtttttaatggaa

SEQ ID NO: 740044 - DNA, 25 bp, Homo sapien
cattgtaaaacctcctgaactgtgc

SEQ ID NO: 740045 - DNA, 25 bp, Homo sapien
tttgggaacaccacccatgagtgcg

SEQ ID NO: 740046 - DNA, 25 bp, Homo sapien
tctctccatgtccctagagaattca

SEQ ID NO: 740047 - DNA, 25 bp, Homo sapien
ctctccatgtccctagagaattcat

SEQ ID NO: 740048 - DNA, 25 bp, Homo sapien
ttctctccatgtccctagagaattc

SEQ ID NO: 740049 - DNA, 25 bp, Homo sapien
ttctcaaggatgaaggtacctccac

SEQ ID NO: 740050 - DNA, 25 bp, Homo sapien
ggcatgccgtggtaactcaaatcta

SEQ ID NO: 740051 - DNA, 25 bp, Homo sapien
gagctctagtaattcgtcgtccttg

SEQ ID NO: 740052 - DNA, 25 bp, Homo sapien
tcagcactatgctccgatgccaagt

SEQ ID NO: 740053 - DNA, 25 bp, Homo sapien
tggagggccaagacctacaaaccat

SEQ ID NO: 740054 - DNA, 25 bp, Homo sapien
gtctggagggccaagacctacaaac

SEQ ID NO: 740055 - DNA, 25 bp, Homo sapien
aaaatcctcattgcacgctggggcc

SEQ ID NO: 740056 - DNA, 25 bp, Homo sapien
gggccaagacctacaaaccatctta

SEQ ID NO: 740057 - DNA, 25 bp, Homo sapien
gaggactgccttgtaaatcagccac

SEQ ID NO: 740058 - DNA, 25 bp, Homo sapien
tccatcagggcggtgtgccctttcc

SEQ ID NO: 740059 - DNA, 25 bp, Homo sapien
cactgctgcagtcatgaagtcatgg

SEQ ID NO: 740060 - DNA, 25 bp, Homo sapien
cagccacatgcagcactgagacatc

SEQ ID NO: 740061 - DNA, 25 bp, Homo sapien
tgagctctacaacataaagatatgc

SEQ ID NO: 740062 - DNA, 25 bp, Homo sapien
taaatgccaaaggatgatgagcccc

SEQ ID NO: 740063 - DNA, 25 bp, Homo sapien
gatggaacgtggaaggaacacactg

SEQ ID NO: 740064 - DNA, 25 bp, Homo sapien
ttcaggacagtgacgaccccaaggg

SEQ ID NO: 740065 - DNA, 25 bp, Homo sapien
gccaagccgctgagcaggaatttct

SEQ ID NO: 740066 - DNA, 25 bp, Homo sapien
cagtgtatggtagcattgccaaacc

SEQ ID NO: 740067 - DNA, 25 bp, Homo sapien
aaaccacggccaagccgctgagcag

SEQ ID NO: 740068 - DNA, 25 bp, Homo sapien
ctttcaagtgccacagtgtatggta

SEQ ID NO: 740069 - DNA, 25 bp, Homo sapien
cctgccatgatgcatcagaactgta

SEQ ID NO: 740070 - DNA, 25 bp, Homo sapien
cacatgtagatacccaattgagtct

SEQ ID NO: 740071 - DNA, 25 bp, Homo sapien
gttttgctgccacatgtagataccc

SEQ ID NO: 740072 - DNA, 25 bp, Homo sapien
taggctactgtcttaacctgccatg

SEQ ID NO: 740073 - DNA, 25 bp, Homo sapien
ttaaatgtgtggatagccggaggaa

SEQ ID NO: 740074 - DNA, 25 bp, Homo sapien
aatgtgtggatagccggaggaagcg

SEQ ID NO: 740075 - DNA, 25 bp, Homo sapien
gtgtggatagccggaggaagcgcat

SEQ ID NO: 740076 - DNA, 25 bp, Homo sapien
aaatgtgtggatagccggaggaagc

SEQ ID NO: 740077 - DNA, 25 bp, Homo sapien
tttgagagatctgtttaaatccctt

SEQ ID NO: 740078 - DNA, 25 bp, Homo sapien
gacaacaattacaaggcatttgaga

SEQ ID NO: 740079 - DNA, 25 bp, Homo sapien
ctggacaacaattacaaggcatttg

SEQ ID NO: 740080 - DNA, 25 bp, Homo sapien
ttacaaggcatttgagagatctgtt

SEQ ID NO: 740081 - DNA, 25 bp, Homo sapien
tgggtcgacattccagcccgtgggt

SEQ ID NO: 740082 - DNA, 25 bp, Homo sapien
tccatttcaacaaccaagcagccac

SEQ ID NO: 740083 - DNA, 25 bp, Homo sapien
tgctccaatgtttgccatgcactga

SEQ ID NO: 740084 - DNA, 25 bp, Homo sapien
aagggcagtcttcaatctgggtcga

SEQ ID NO: 740085 - DNA, 25 bp, Homo sapien
ttttcttcactagcctgtcttcttt

SEQ ID NO: 740086 - DNA, 25 bp, Homo sapien
ttcttcactagcctgtcttctttcc

SEQ ID NO: 740087 - DNA, 25 bp, Homo sapien
tttccacaagagtctttttcttcac

SEQ ID NO: 740088 - DNA, 25 bp, Homo sapien
ctttttcttcactagcctgtcttct

SEQ ID NO: 740089 - DNA, 25 bp, Homo sapien
gaagttgttgtaggggcctgctcca

SEQ ID NO: 740090 - DNA, 25 bp, Homo sapien
cattagagacaggaatgcggctgtt

SEQ ID NO: 740091 - DNA, 25 bp, Homo sapien
ttttccattagagacaggaatgcgg

SEQ ID NO: 740092 - DNA, 25 bp, Homo sapien
aatgcggctgttggaagaagttgtt

SEQ ID NO: 740093 - DNA, 25 bp, Homo sapien
ccaccggctccccttcctcatggct

SEQ ID NO: 740094 - DNA, 25 bp, Homo sapien
ttcctcatggctcactttttcataa

SEQ ID NO: 740095 - DNA, 25 bp, Homo sapien
gctccccttcctcatggctcacttt

SEQ ID NO: 740096 - DNA, 25 bp, Homo sapien
tggctcactttttcataactctcac

SEQ ID NO: 740097 - DNA, 25 bp, Homo sapien
gatctaggaggttacgagagctgcc

SEQ ID NO: 740098 - DNA, 25 bp, Homo sapien
cagttattcagtgctgggcgcgcct

SEQ ID NO: 740099 - DNA, 25 bp, Homo sapien
agagctgcctatgaccaccaagtag

SEQ ID NO: 740100 - DNA, 25 bp, Homo sapien
gcatcctaaacctgagtgagcctgg

SEQ ID NO: 740101 - DNA, 25 bp, Homo sapien
acattgtaaagcgttggcatgggaa

SEQ ID NO: 740102 - DNA, 25 bp, Homo sapien
tcgacattgtaaagcgttggcatgg

SEQ ID NO: 740103 - DNA, 25 bp, Homo sapien
ccacctcgacattgtaaagcgttgg

SEQ ID NO: 740104 - DNA, 25 bp, Homo sapien
cctcgacattgtaaagcgttggcat

SEQ ID NO: 740105 - DNA, 25 bp, Homo sapien
cagaagctctttgtaagattgcaaa

SEQ ID NO: 740106 - DNA, 25 bp, Homo sapien
cagaaggaagaactctgtcttggca

SEQ ID NO: 740107 - DNA, 25 bp, Homo sapien
tgcaaatgcatccagaaggaagaac

SEQ ID NO: 740108 - DNA, 25 bp, Homo sapien
aagctctttgtaagattgcaaatgc

SEQ ID NO: 740109 - DNA, 25 bp, Homo sapien
gcttcgattccccacaactctggtg

SEQ ID NO: 740110 - DNA, 25 bp, Homo sapien
agcagccgcttcgattccccacaac

SEQ ID NO: 740111 - DNA, 25 bp, Homo sapien
cttcgattccccacaactctggtga

SEQ ID NO: 740112 - DNA, 25 bp, Homo sapien
gccgcttcgattccccacaactctg

SEQ ID NO: 740113 - DNA, 25 bp, Homo sapien
ctgagagccagtgagattaaaagcc

SEQ ID NO: 740114 - DNA, 25 bp, Homo sapien
tagggactagtctggcactcagctg

SEQ ID NO: 740115 - DNA, 25 bp, Homo sapien
agcctgcgctttagcctcggcaaca

SEQ ID NO: 740116 - DNA, 25 bp, Homo sapien
gaaggtatattagaacccatgcctc

SEQ ID NO: 740117 - DNA, 25 bp, Homo sapien
cacttctctggtgttttggagcaag

SEQ ID NO: 740118 - DNA, 25 bp, Homo sapien
cagtagattccattgcctgcgatgc

SEQ ID NO: 740119 - DNA, 25 bp, Homo sapien
gctaagcgtttactttgtgcacggt

SEQ ID NO: 740120 - DNA, 25 bp, Homo sapien
cagctagggtaatggcagcctccct

SEQ ID NO: 740121 - DNA, 25 bp, Homo sapien
catgtgcagagatggtaagccctac

SEQ ID NO: 740122 - DNA, 25 bp, Homo sapien
caaaaggatgctataaccgagaaca

SEQ ID NO: 740123 - DNA, 25 bp, Homo sapien
tctgggactctaggaatgtgtattc

SEQ ID NO: 740124 - DNA, 25 bp, Homo sapien
tacggtgcagcactagtctggtgga

SEQ ID NO: 740125 - DNA, 25 bp, Homo sapien
tgcttgggcgggacagccagtcgct

SEQ ID NO: 740126 - DNA, 25 bp, Homo sapien
catcatgacaacagtccttttgcag

SEQ ID NO: 740127 - DNA, 25 bp, Homo sapien
tcggctcgcttgatggacactgtcc

SEQ ID NO: 740128 - DNA, 25 bp, Homo sapien
tccttgggtatgtgcttggtgacca

SEQ ID NO: 740129 - DNA, 25 bp, Homo sapien
ctagctacacaaatggcaccttttc

SEQ ID NO: 740130 - DNA, 25 bp, Homo sapien
tagctacacaaatggcaccttttca

SEQ ID NO: 740131 - DNA, 25 bp, Homo sapien
taagagtcacaagaacaaatgctct

SEQ ID NO: 740132 - DNA, 25 bp, Homo sapien
tgtaagagtcacaagaacaaatgct

SEQ ID NO: 740133 - DNA, 25 bp, Homo sapien
gtaagagtcacaagaacaaatgctc

SEQ ID NO: 740134 - DNA, 25 bp, Homo sapien
cttgtaagagtcacaagaacaaatg

SEQ ID NO: 740135 - DNA, 25 bp, Homo sapien
ggcagcagggtggtgagtcaatgca

SEQ ID NO: 740136 - DNA, 25 bp, Homo sapien
gttcccatttgacatggcagcaggg

SEQ ID NO: 740137 - DNA, 25 bp, Homo sapien
tgtgtcccatggtgttcatgttccc

SEQ ID NO: 740138 - DNA, 25 bp, Homo sapien
tggtcctgccgggagcccatcatct

SEQ ID NO: 740139 - DNA, 25 bp, Homo sapien
gaatgtgagatagaacacctgggct

SEQ ID NO: 740140 - DNA, 25 bp, Homo sapien
tatgcttgcccttagagactagacc

SEQ ID NO: 740141 - DNA, 25 bp, Homo sapien
aacaagattgctgcaaatgacccca

SEQ ID NO: 740142 - DNA, 25 bp, Homo sapien
tcctaggagataaacagagccccta

SEQ ID NO: 740143 - DNA, 25 bp, Homo sapien
ttcaccatttacacagcaccttacg

SEQ ID NO: 740144 - DNA, 25 bp, Homo sapien
cttacgccctagcatccatgatgga

SEQ ID NO: 740145 - DNA, 25 bp, Homo sapien
catccatgatggagcttctttgtct

SEQ ID NO: 740146 - DNA, 25 bp, Homo sapien
tctgccttgaattgttactctttag

SEQ ID NO: 740147 - DNA, 25 bp, Homo sapien
gatcatctacagaacttggctctct

SEQ ID NO: 740148 - DNA, 25 bp, Homo sapien
tacaggactcgcctctcttcttggc

SEQ ID NO: 740149 - DNA, 25 bp, Homo sapien
cacccactgggatttggcctttctc

SEQ ID NO: 740150 - DNA, 25 bp, Homo sapien
tgggtgacataatgtctgcctggtc

SEQ ID NO: 740151 - DNA, 25 bp, Homo sapien
tcctggacatgcccttcatccactt

SEQ ID NO: 740152 - DNA, 25 bp, Homo sapien
gctcctggacatgcccttcatccac

SEQ ID NO: 740153 - DNA, 25 bp, Homo sapien
cctggacatgcccttcatccactta

SEQ ID NO: 740154 - DNA, 25 bp, Homo sapien
ctggacatgcccttcatccacttac

SEQ ID NO: 740155 - DNA, 25 bp, Homo sapien
ggatgaaagtcattctgcttgagga

SEQ ID NO: 740156 - DNA, 25 bp, Homo sapien
cttgaggatccaaagtgtctaggcc

SEQ ID NO: 740157 - DNA, 25 bp, Homo sapien
ttggcggttccatgcttccgacacc

SEQ ID NO: 740158 - DNA, 25 bp, Homo sapien
taagtgttttttggcggttccatgc

SEQ ID NO: 740159 - DNA, 25 bp, Homo sapien
tgtagaacacctctaagaaccttgc

SEQ ID NO: 740160 - DNA, 25 bp, Homo sapien
tctaatgaatagcttcgagagttgc

SEQ ID NO: 740161 - DNA, 25 bp, Homo sapien
cctgacccattctgtggatggctgt

SEQ ID NO: 740162 - DNA, 25 bp, Homo sapien
cgagagttgcttgtgcctgacccat

SEQ ID NO: 740163 - DNA, 25 bp, Homo sapien
tcagagttgctagtgaaggcgtcat

SEQ ID NO: 740164 - DNA, 25 bp, Homo sapien
catcagagttgctagtgaaggcgtc

SEQ ID NO: 740165 - DNA, 25 bp, Homo sapien
atcagagttgctagtgaaggcgtca

SEQ ID NO: 740166 - DNA, 25 bp, Homo sapien
tcatcagagttgctagtgaaggcgt

SEQ ID NO: 740167 - DNA, 25 bp, Homo sapien
ttttccaatgacatcacccagacct

SEQ ID NO: 740168 - DNA, 25 bp, Homo sapien
cctcttctgtctgcagcgggtggca

SEQ ID NO: 740169 - DNA, 25 bp, Homo sapien
agctgcccggttccgttccagaaat

SEQ ID NO: 740170 - DNA, 25 bp, Homo sapien
ggctgtattgtctgggttggctgca

SEQ ID NO: 740171 - DNA, 25 bp, Homo sapien
ggaaatgcccgtggagcagagggcc

SEQ ID NO: 740172 - DNA, 25 bp, Homo sapien
ttaggtcaacaagtgcctgtcaggg

SEQ ID NO: 740173 - DNA, 25 bp, Homo sapien
cctgtcagggccggaaatgcccgtg

SEQ ID NO: 740174 - DNA, 25 bp, Homo sapien
cagagggcctttgagtcgcggggaa

SEQ ID NO: 740175 - DNA, 25 bp, Homo sapien
gacactacactataaacagcagata

SEQ ID NO: 740176 - DNA, 25 bp, Homo sapien
tcttcccgcggcatacaagttagtg

SEQ ID NO: 740177 - DNA, 25 bp, Homo sapien
tgtagacactatactataaacaggg

SEQ ID NO: 740178 - DNA, 25 bp, Homo sapien
tggaaaccccaagccatctccattt

SEQ ID NO: 740179 - DNA, 25 bp, Homo sapien
ggatcacagtcaataccctgaagga

SEQ ID NO: 740180 - DNA, 25 bp, Homo sapien
tatgccaagtcacgaacacctctgg

SEQ ID NO: 740181 - DNA, 25 bp, Homo sapien
cttcatctaagcagtggtttacaac

SEQ ID NO: 740182 - DNA, 25 bp, Homo sapien
taaagccttggcagctgatatgtgc

SEQ ID NO: 740183 - DNA, 25 bp, Homo sapien
tggtccagcctcaagagagacacct

SEQ ID NO: 740184 - DNA, 25 bp, Homo sapien
caaaggtagcggaatctgcagcatc

SEQ ID NO: 740185 - DNA, 25 bp, Homo sapien
tcttttgacaaaggtccagtgagag

SEQ ID NO: 740186 - DNA, 25 bp, Homo sapien
tccagtgagagggaaagggtcattc

SEQ ID NO: 740187 - DNA, 25 bp, Homo sapien
cagacctgggctcatgtgtccaaaa

SEQ ID NO: 740188 - DNA, 25 bp, Homo sapien
tccatgggtgaccagatgatttcca

SEQ ID NO: 740189 - DNA, 25 bp, Homo sapien
tttgccttgggatgaagcagcacgc

SEQ ID NO: 740190 - DNA, 25 bp, Homo sapien
agcagcacgccacagagatattcaa

SEQ ID NO: 740191 - DNA, 25 bp, Homo sapien
ttaatgtcctcagtagagaagggca

SEQ ID NO: 740192 - DNA, 25 bp, Homo sapien
catccagtaggaaaaggaactctca

SEQ ID NO: 740193 - DNA, 25 bp, Homo sapien
cgatggttgaactacttccagaaag

SEQ ID NO: 740194 - DNA, 25 bp, Homo sapien
catataactatgatgctgcaaggac

SEQ ID NO: 740195 - DNA, 25 bp, Homo sapien
gaccatcatttaaagatatatgtga

SEQ ID NO: 740196 - DNA, 25 bp, Homo sapien
aatgcagaaccctgagaatattgag

SEQ ID NO: 740197 - DNA, 25 bp, Homo sapien
cctgagaatattgagacaactgacc

SEQ ID NO: 740198 - DNA, 25 bp, Homo sapien
agaatattgagacaactgaccatca

SEQ ID NO: 740199 - DNA, 25 bp, Homo sapien
ttatgtgttaacaacaactgtttca

SEQ ID NO: 740200 - DNA, 25 bp, Homo sapien
tatgtgttaacaacaactgtttcag

SEQ ID NO: 740201 - DNA, 25 bp, Homo sapien
tttatgtgttaacaacaactgtttc

SEQ ID NO: 740202 - DNA, 25 bp, Homo sapien
ttagatatccttgtgattctttctg

SEQ ID NO: 740203 - DNA, 25 bp, Homo sapien
agatatccttgtgattctttctgca

SEQ ID NO: 740204 - DNA, 25 bp, Homo sapien
tagatatccttgtgattctttctgc

SEQ ID NO: 740205 - DNA, 25 bp, Homo sapien
gatatccttgtgattctttctgcat

SEQ ID NO: 740206 - DNA, 25 bp, Homo sapien
gaaaaaaaaagacaacacacacaca

SEQ ID NO: 740207 - DNA, 25 bp, Homo sapien
aaaaaaaagacaacacacacacata

SEQ ID NO: 740208 - DNA, 25 bp, Homo sapien
aaaaaaagacaacacacacacatac

SEQ ID NO: 740209 - DNA, 25 bp, Homo sapien
gagaaaaaaaaagacaacacacaca

SEQ ID NO: 740210 - DNA, 25 bp, Homo sapien
gaagtagtgatggtattatgctgga

SEQ ID NO: 740211 - DNA, 25 bp, Homo sapien
caagctgggacaggactagcaggag

SEQ ID NO: 740212 - DNA, 25 bp, Homo sapien
ctggatgacttgttgctgggagcaa

SEQ ID NO: 740213 - DNA, 25 bp, Homo sapien
ctcgctgaccgatgaggaagtagtg

SEQ ID NO: 740214 - DNA, 25 bp, Homo sapien
gttctgtgagtggtgagctggctga

SEQ ID NO: 740215 - DNA, 25 bp, Homo sapien
tctgttctgtgagtggtgagctggc

SEQ ID NO: 740216 - DNA, 25 bp, Homo sapien
ctgttctgtgagtggtgagctggct

SEQ ID NO: 740217 - DNA, 25 bp, Homo sapien
aggtctgttctgtgagtggtgagct

SEQ ID NO: 740218 - DNA, 25 bp, Homo sapien
gactatctgctttgtatcacgggca

SEQ ID NO: 740219 - DNA, 25 bp, Homo sapien
gattttcaacgttataggcaggccg

SEQ ID NO: 740220 - DNA, 25 bp, Homo sapien
gaaaggacgcatggtacgctacagc

SEQ ID NO: 740221 - DNA, 25 bp, Homo sapien
tataaaaccagtcgcaatccaaggg

SEQ ID NO: 740222 - DNA, 25 bp, Homo sapien
gacacatagatggtcctaggaaaga

SEQ ID NO: 740223 - DNA, 25 bp, Homo sapien
cacatagatggtcctaggaaagaat

SEQ ID NO: 740224 - DNA, 25 bp, Homo sapien
tagatggtcctaggaaagaattttg

SEQ ID NO: 740225 - DNA, 25 bp, Homo sapien
gagacacatagatggtcctaggaaa

SEQ ID NO: 740226 - DNA, 25 bp, Homo sapien
gaatgaaatcgatagggccactgtt

SEQ ID NO: 740227 - DNA, 25 bp, Homo sapien
tcatgaacacatggatgggtgaccc

SEQ ID NO: 740228 - DNA, 25 bp, Homo sapien
taaatgatgccgctcagagccttgg

SEQ ID NO: 740229 - DNA, 25 bp, Homo sapien
tgaatgaacacacctaaaggccctg

SEQ ID NO: 740230 - DNA, 25 bp, Homo sapien
cccacacatagctgattggagtagg

SEQ ID NO: 740231 - DNA, 25 bp, Homo sapien
attggagtagggatgcaggcctcat

SEQ ID NO: 740232 - DNA, 25 bp, Homo sapien
cagaagtaggagcatgtaaccctgc

SEQ ID NO: 740233 - DNA, 25 bp, Homo sapien
cctcatccgatatggccaatcagat

SEQ ID NO: 740234 - DNA, 25 bp, Homo sapien
cttggttggtacagtctcctccttg

SEQ ID NO: 740235 - DNA, 25 bp, Homo sapien
tccctgtgctcgtcatctgaagaga

SEQ ID NO: 740236 - DNA, 25 bp, Homo sapien
ttggacactatagaaacctctttgg

SEQ ID NO: 740237 - DNA, 25 bp, Homo sapien
gtgggacatgctcccatgtggccaa

SEQ ID NO: 740238 - DNA, 25 bp, Homo sapien
tatctgataaaatttgttagcacca

SEQ ID NO: 740239 - DNA, 25 bp, Homo sapien
aaagctatcaggcatgaggtcggga

SEQ ID NO: 740240 - DNA, 25 bp, Homo sapien
gcaccatttaacacgcttatctgat

SEQ ID NO: 740241 - DNA, 25 bp, Homo sapien
ctgaatcaaagggatggtggtacca

SEQ ID NO: 740242 - DNA, 25 bp, Homo sapien
aggagcttggctcaatagtttcaat

SEQ ID NO: 740243 - DNA, 25 bp, Homo sapien
gagcttggctcaatagtttcaatca

SEQ ID NO: 740244 - DNA, 25 bp, Homo sapien
ttagcctgattccaggagcttggct

SEQ ID NO: 740245 - DNA, 25 bp, Homo sapien
taaatgttagcctgattccaggagc

SEQ ID NO: 740246 - DNA, 25 bp, Homo sapien
gaacccatgaatcccggactcagct

SEQ ID NO: 740247 - DNA, 25 bp, Homo sapien
gatgaaatcagaacccatgaatccc

SEQ ID NO: 740248 - DNA, 25 bp, Homo sapien
gaaatcagaacccatgaatcccgga

SEQ ID NO: 740249 - DNA, 25 bp, Homo sapien
tcagaacccatgaatcccggactca

SEQ ID NO: 740250 - DNA, 25 bp, Homo sapien
cagtccttggctgacctcggaaaca

SEQ ID NO: 740251 - DNA, 25 bp, Homo sapien
gctgttccgcagatgtaaccggttg

SEQ ID NO: 740252 - DNA, 25 bp, Homo sapien
atttcactcaggagatgggctgcct

SEQ ID NO: 740253 - DNA, 25 bp, Homo sapien
tgtgataaccgtgcagaataaagac

SEQ ID NO: 740254 - DNA, 25 bp, Homo sapien
ctgtcacagcgaggatgaccacagc

SEQ ID NO: 740255 - DNA, 25 bp, Homo sapien
tgtaagtcgggccacatttggcttg

SEQ ID NO: 740256 - DNA, 25 bp, Homo sapien
gccgctgtaagtcgggccacatttg

SEQ ID NO: 740257 - DNA, 25 bp, Homo sapien
agggccgctgtaagtcgggccacat

SEQ ID NO: 740258 - DNA, 25 bp, Homo sapien
gggagggccgctgtaagtcgggcca

SEQ ID NO: 740259 - DNA, 25 bp, Homo sapien
taaatgaagacctagtcctgtgtgg

SEQ ID NO: 740260 - DNA, 25 bp, Homo sapien
gaacgagtacttctgagtgtcgctg

SEQ ID NO: 740261 - DNA, 25 bp, Homo sapien
gatgcatctagggtgattctaatcc

SEQ ID NO: 740262 - DNA, 25 bp, Homo sapien
tgtccagcgtgcacagaaagttcta

SEQ ID NO: 740263 - DNA, 25 bp, Homo sapien
aagccttgactaaagcgaagatctc

SEQ ID NO: 740264 - DNA, 25 bp, Homo sapien
tgctatgaaaaaatcgacttctaaa

SEQ ID NO: 740265 - DNA, 25 bp, Homo sapien
gcgccaaacaatcggaaagccttga

SEQ ID NO: 740266 - DNA, 25 bp, Homo sapien
tcactccacaaaaaggcgccaaaca

SEQ ID NO: 740267 - DNA, 25 bp, Homo sapien
ggctgctccacagtgttgtgcggca

SEQ ID NO: 740268 - DNA, 25 bp, Homo sapien
gccggcagggctgctccacagtgtt

SEQ ID NO: 740269 - DNA, 25 bp, Homo sapien
gctgctccacagtgttgtgcggcat

SEQ ID NO: 740270 - DNA, 25 bp, Homo sapien
cccgccggcagggctgctccacagt

SEQ ID NO: 740271 - DNA, 25 bp, Homo sapien
accccatggaaagggcaaatcacgt

SEQ ID NO: 740272 - DNA, 25 bp, Homo sapien
tcatcccccagtgaaaggtactcag

SEQ ID NO: 740273 - DNA, 25 bp, Homo sapien
cacgtcctcgtggaagtcttccctg

SEQ ID NO: 740274 - DNA, 25 bp, Homo sapien
gaaagggcaaatcacgtcctcgtgg

SEQ ID NO: 740275 - DNA, 25 bp, Homo sapien
ctagatcaaccgaacacagagcctt

SEQ ID NO: 740276 - DNA, 25 bp, Homo sapien
caaccgaacacagagcctttcatac

SEQ ID NO: 740277 - DNA, 25 bp, Homo sapien
tagatcaaccgaacacagagccttt

SEQ ID NO: 740278 - DNA, 25 bp, Homo sapien
gatcaaccgaacacagagcctttca

SEQ ID NO: 740279 - DNA, 25 bp, Homo sapien
tgagctcttgccaaagaaccaaatt

SEQ ID NO: 740280 - DNA, 25 bp, Homo sapien
gtctatgtacactgttccaaaaatg

SEQ ID NO: 740281 - DNA, 25 bp, Homo sapien
ttttcatgtctatgtacactgttcc

SEQ ID NO: 740282 - DNA, 25 bp, Homo sapien
catctctgagctcttgccaaagaac

SEQ ID NO: 740283 - DNA, 25 bp, Homo sapien
tacaaggctcttattagggaaagaa

SEQ ID NO: 740284 - DNA, 25 bp, Homo sapien
gaacataataaatccactaatgtgg

SEQ ID NO: 740285 - DNA, 25 bp, Homo sapien
taaatccactaatgtgggtaatgac

SEQ ID NO: 740286 - DNA, 25 bp, Homo sapien
gatgatgtgctgaattttacaaggc

SEQ ID NO: 740287 - DNA, 25 bp, Homo sapien
tggctcacaaagtgtaaaccccgtg

SEQ ID NO: 740288 - DNA, 25 bp, Homo sapien
aatggattatcttcctctcagcgga

SEQ ID NO: 740289 - DNA, 25 bp, Homo sapien
tgtgttccccaacagaggtccacgg

SEQ ID NO: 740290 - DNA, 25 bp, Homo sapien
tcagcggactccatgggagatattc

SEQ ID NO: 740291 - DNA, 25 bp, Homo sapien
gcagtcctgtccagggaacatgaag

SEQ ID NO: 740292 - DNA, 25 bp, Homo sapien
tactataataatcacaagcactggg

SEQ ID NO: 740293 - DNA, 25 bp, Homo sapien
caagcactgggatacatattggtga

SEQ ID NO: 740294 - DNA, 25 bp, Homo sapien
gactgttagagtatgaccatctttg

SEQ ID NO: 740295 - DNA, 25 bp, Homo sapien
aatgcgctgggtggttgattccctc

SEQ ID NO: 740296 - DNA, 25 bp, Homo sapien
attcgagataagagctaagccagtg

SEQ ID NO: 740297 - DNA, 25 bp, Homo sapien
taagccagtgtcattggcgctagac

SEQ ID NO: 740298 - DNA, 25 bp, Homo sapien
tggcgctagactcaatagctctgaa

SEQ ID NO: 740299 - DNA, 25 bp, Homo sapien
agcaggatgaaggcgaaagaataca

SEQ ID NO: 740300 - DNA, 25 bp, Homo sapien
gaagcaggatgaaggcgaaagaata

SEQ ID NO: 740301 - DNA, 25 bp, Homo sapien
gcaggatgaaggcgaaagaatacat

SEQ ID NO: 740302 - DNA, 25 bp, Homo sapien
aagcaggatgaaggcgaaagaatac

SEQ ID NO: 740303 - DNA, 25 bp, Homo sapien
cttccgtaacaagtggttgaattgt

SEQ ID NO: 740304 - DNA, 25 bp, Homo sapien
gaggctgtggaaaccttccgtaaca

SEQ ID NO: 740305 - DNA, 25 bp, Homo sapien
ctgtggaaaccttccgtaacaagtg

SEQ ID NO: 740306 - DNA, 25 bp, Homo sapien
ccttccgtaacaagtggttgaattg

SEQ ID NO: 740307 - DNA, 25 bp, Homo sapien
tatagctctgtagatgtaagcagcc

SEQ ID NO: 740308 - DNA, 25 bp, Homo sapien
tgaggactcgcatcccgtttatagc

SEQ ID NO: 740309 - DNA, 25 bp, Homo sapien
tccaggaagttggtatgacgccaag

SEQ ID NO: 740310 - DNA, 25 bp, Homo sapien
gatcagtataactagtgaacccaga

SEQ ID NO: 740311 - DNA, 25 bp, Homo sapien
tccttcctcccgcaatacctgtctc

SEQ ID NO: 740312 - DNA, 25 bp, Homo sapien
tcccattgatccatgaagttccaca

SEQ ID NO: 740313 - DNA, 25 bp, Homo sapien
ccacaaggcagtgcacgcagttcct

SEQ ID NO: 740314 - DNA, 25 bp, Homo sapien
gtgccccagtcccattgatccatga

SEQ ID NO: 740315 - DNA, 25 bp, Homo sapien
gctgtgggaatgtccagtctgactc

SEQ ID NO: 740316 - DNA, 25 bp, Homo sapien
ggcccatgtccactatcagaaaatg

SEQ ID NO: 740317 - DNA, 25 bp, Homo sapien
acagaagggtgttgctttcacgcca

SEQ ID NO: 740318 - DNA, 25 bp, Homo sapien
gcttcctgtgcttcgccaaagcggg

SEQ ID NO: 740319 - DNA, 25 bp, Homo sapien
cctccatgccataagtagaatttgc

SEQ ID NO: 740320 - DNA, 25 bp, Homo sapien
tcagcccgtgagttgtgcatgcgtc

SEQ ID NO: 740321 - DNA, 25 bp, Homo sapien
tagaatttgcagaattagctgacat

SEQ ID NO: 740322 - DNA, 25 bp, Homo sapien
tcttgtccaacataaattttaagtg

SEQ ID NO: 740323 - DNA, 25 bp, Homo sapien
gaaccactgacatccatcaggaatg

SEQ ID NO: 740324 - DNA, 25 bp, Homo sapien
gggtttcaggttgccatccagggct

SEQ ID NO: 740325 - DNA, 25 bp, Homo sapien
cagaaggtctgcctagcactgaacc

SEQ ID NO: 740326 - DNA, 25 bp, Homo sapien
gagccagctttcctgctatcagatc

SEQ ID NO: 740327 - DNA, 25 bp, Homo sapien
actggccagagaaacactacacctt

SEQ ID NO: 740328 - DNA, 25 bp, Homo sapien
tctttgctgagactggattctgctc

SEQ ID NO: 740329 - DNA, 25 bp, Homo sapien
gcacttggctgacaggcagtagcct

SEQ ID NO: 740330 - DNA, 25 bp, Homo sapien
ggcagtagcctattgcactggccag

SEQ ID NO: 740331 - DNA, 25 bp, Homo sapien
tcaggagaaggctgcatgcaagact

SEQ ID NO: 740332 - DNA, 25 bp, Homo sapien
tcaaccagggagctatctggcacct

SEQ ID NO: 740333 - DNA, 25 bp, Homo sapien
tatatgtagctgatgacccactggg

SEQ ID NO: 740334 - DNA, 25 bp, Homo sapien
tagggaaccagccatctgaatgagc

SEQ ID NO: 740335 - DNA, 25 bp, Homo sapien
ttggaggctttgacacagctatgcg

SEQ ID NO: 740336 - DNA, 25 bp, Homo sapien
cacagctatgcgaatggcttttgta

SEQ ID NO: 740337 - DNA, 25 bp, Homo sapien
ggtcggaggcttcgcttggaggctt

SEQ ID NO: 740338 - DNA, 25 bp, Homo sapien
cactgcaatgcagaagccaggcttt

SEQ ID NO: 740339 - DNA, 25 bp, Homo sapien
tatcggctggatctagacggcaacg

SEQ ID NO: 740340 - DNA, 25 bp, Homo sapien
tggtgtccgacccatgcgacttcaa

SEQ ID NO: 740341 - DNA, 25 bp, Homo sapien
aggagatgacgccacctgcaggtct

SEQ ID NO: 740342 - DNA, 25 bp, Homo sapien
acgaagcatcgtctgggcacggagc

SEQ ID NO: 740343 - DNA, 25 bp, Homo sapien
caagaccttcgagaagctctcgcgg

SEQ ID NO: 740344 - DNA, 25 bp, Homo sapien
ggctggacctgcagtacaaccagat

SEQ ID NO: 740345 - DNA, 25 bp, Homo sapien
ttcataaccaacatcacggccttcg

SEQ ID NO: 740346 - DNA, 25 bp, Homo sapien
gggaacaacctcttgcaggcgctcg

SEQ ID NO: 740347 - DNA, 25 bp, Homo sapien
tacttttctcacttggcatcccggg

SEQ ID NO: 740348 - DNA, 25 bp, Homo sapien
cgcgcacccggagaaacagttttat

SEQ ID NO: 740349 - DNA, 25 bp, Homo sapien
caagtgacttaacaacgaggaaggc

SEQ ID NO: 740350 - DNA, 25 bp, Homo sapien
gctgcgaagtccgaaagaggccatt

SEQ ID NO: 740351 - DNA, 25 bp, Homo sapien
ggccttctgcaggcaaccttgtgct

SEQ ID NO: 740352 - DNA, 25 bp, Homo sapien
aaacttcctgtagaatgctggcgga

SEQ ID NO: 740353 - DNA, 25 bp, Homo sapien
gctgcccaaacttcccgcagggtgg

SEQ ID NO: 740354 - DNA, 25 bp, Homo sapien
gaatgctggcggactccgtgctgcc

SEQ ID NO: 740355 - DNA, 25 bp, Homo sapien
caagcagcaactgtcagactgggtt

SEQ ID NO: 740356 - DNA, 25 bp, Homo sapien
tatgtatgtgcacacgagcagagcc

SEQ ID NO: 740357 - DNA, 25 bp, Homo sapien
tgagccaggcctgaacatttttggg

SEQ ID NO: 740358 - DNA, 25 bp, Homo sapien
ataatgcttccccaactgagccagg

SEQ ID NO: 740359 - DNA, 25 bp, Homo sapien
ggtgttctctattactgccttatat

SEQ ID NO: 740360 - DNA, 25 bp, Homo sapien
cattgcccttcccactagattgtca

SEQ ID NO: 740361 - DNA, 25 bp, Homo sapien
tccacattgttgcagagtacgtcct

SEQ ID NO: 740362 - DNA, 25 bp, Homo sapien
cattgtcttcaggtgaggatctgta

SEQ ID NO: 740363 - DNA, 25 bp, Homo sapien
ttcagaacttccctctatcacttga

SEQ ID NO: 740364 - DNA, 25 bp, Homo sapien
gaagtcaccactgactaccctgcca

SEQ ID NO: 740365 - DNA, 25 bp, Homo sapien
ggtccctgctcacccacgaagtcac

SEQ ID NO: 740366 - DNA, 25 bp, Homo sapien
atcacttgactatattaattgctaa

SEQ ID NO: 740367 - DNA, 25 bp, Homo sapien
cgtggcaagcctgagaagattccat

SEQ ID NO: 740368 - DNA, 25 bp, Homo sapien
aagacacaggtgcacaaccgtggca

SEQ ID NO: 740369 - DNA, 25 bp, Homo sapien
gctgctgaagacatggcctggaatc

SEQ ID NO: 740370 - DNA, 25 bp, Homo sapien
cacaggttgcttgggaagacacagg

SEQ ID NO: 740371 - DNA, 25 bp, Homo sapien
tcattactgagactgacagaacgtt

SEQ ID NO: 740372 - DNA, 25 bp, Homo sapien
ggcagcatgggtctaaagctgcctc

SEQ ID NO: 740373 - DNA, 25 bp, Homo sapien
gacagaacgtttcttgccaggataa

SEQ ID NO: 740374 - DNA, 25 bp, Homo sapien
tatttaactgtccaagattgttttc

SEQ ID NO: 740375 - DNA, 25 bp, Homo sapien
ttatcgcacatacaaaccatctggg

SEQ ID NO: 740376 - DNA, 25 bp, Homo sapien
catggaaatcccgatgctgctggtc

SEQ ID NO: 740377 - DNA, 25 bp, Homo sapien
gggtggaccaggacattctgcattt

SEQ ID NO: 740378 - DNA, 25 bp, Homo sapien
gcacacctgtttgggagactatgga

SEQ ID NO: 740379 - DNA, 25 bp, Homo sapien
ggtactgataaacccactgcaggca

SEQ ID NO: 740380 - DNA, 25 bp, Homo sapien
tgtgtgtcacggcaacccaattact

SEQ ID NO: 740381 - DNA, 25 bp, Homo sapien
taagaaagccacctagactgcaggc

SEQ ID NO: 740382 - DNA, 25 bp, Homo sapien
tgatcttgctgaaactatccccgga

SEQ ID NO: 740383 - DNA, 25 bp, Homo sapien
ggaactatgtatcattcagtgctca

SEQ ID NO: 740384 - DNA, 25 bp, Homo sapien
tcaagcagagtaggatggaacacag

SEQ ID NO: 740385 - DNA, 25 bp, Homo sapien
tgaggaagctcactatggactgata

SEQ ID NO: 740386 - DNA, 25 bp, Homo sapien
tggactgatatggaaggaactatgt

SEQ ID NO: 740387 - DNA, 25 bp, Homo sapien
agctcttctcgcctatcagtgggta

SEQ ID NO: 740388 - DNA, 25 bp, Homo sapien
caaagtgggtctctgttcaacccca

SEQ ID NO: 740389 - DNA, 25 bp, Homo sapien
tttcctgaggaaagtctggcgttcc

SEQ ID NO: 740390 - DNA, 25 bp, Homo sapien
tattgattgatgtgaagtccccaag

SEQ ID NO: 740391 - DNA, 25 bp, Homo sapien
tatggatcacacatgcactggacgt

SEQ ID NO: 740392 - DNA, 25 bp, Homo sapien
cattgtacccatgtcctagaagtca

SEQ ID NO: 740393 - DNA, 25 bp, Homo sapien
taactatgtactggaaagggcactg

SEQ ID NO: 740394 - DNA, 25 bp, Homo sapien
tacaagggtactatgagatgatcca

SEQ ID NO: 740395 - DNA, 25 bp, Homo sapien
ttgcagtgcagcactctcaactgcg

SEQ ID NO: 740396 - DNA, 25 bp, Homo sapien
agtgcagcactctcaactgcgggga

SEQ ID NO: 740397 - DNA, 25 bp, Homo sapien
gcagtgcagcactctcaactgcggg

SEQ ID NO: 740398 - DNA, 25 bp, Homo sapien
tgcagcactctcaactgcggggagc

SEQ ID NO: 740399 - DNA, 25 bp, Homo sapien
agaagtagtgggctggaggtgggcc

SEQ ID NO: 740400 - DNA, 25 bp, Homo sapien
cccagaagtagtgggctggaggtgg

SEQ ID NO: 740401 - DNA, 25 bp, Homo sapien
gtagtgggctggaggtgggcctcac

SEQ ID NO: 740402 - DNA, 25 bp, Homo sapien
aagtagtgggctggaggtgggcctc

SEQ ID NO: 740403 - DNA, 25 bp, Homo sapien
tatgactcccttccaaattagcctt

SEQ ID NO: 740404 - DNA, 25 bp, Homo sapien
tgtaccagtatgactcccttccaaa

SEQ ID NO: 740405 - DNA, 25 bp, Homo sapien
taatttgcctccttgtaccagtatg

SEQ ID NO: 740406 - DNA, 25 bp, Homo sapien
ctgatttggtagtctcctaatttgc

SEQ ID NO: 740407 - DNA, 25 bp, Homo sapien
ggtgagtagcaccacctttgcaaat

SEQ ID NO: 740408 - DNA, 25 bp, Homo sapien
tttcctggtgagtagcaccaccttt

SEQ ID NO: 740409 - DNA, 25 bp, Homo sapien
taaaccaatcctacatattctgcct

SEQ ID NO: 740410 - DNA, 25 bp, Homo sapien
tattctgcctgccaaacttgcagct

SEQ ID NO: 740411 - DNA, 25 bp, Homo sapien
attctcttgagggtatgcatctttc

SEQ ID NO: 740412 - DNA, 25 bp, Homo sapien
tcttgagggtatgcatctttctata

SEQ ID NO: 740413 - DNA, 25 bp, Homo sapien
caacaagcagattctcttgagggta

SEQ ID NO: 740414 - DNA, 25 bp, Homo sapien
gcagattctcttgagggtatgcatc

SEQ ID NO: 740415 - DNA, 25 bp, Homo sapien
tacctccttcttggcaactctctcc

SEQ ID NO: 740416 - DNA, 25 bp, Homo sapien
cctccttcttggcaactctctccat

SEQ ID NO: 740417 - DNA, 25 bp, Homo sapien
acctccttcttggcaactctctcca

SEQ ID NO: 740418 - DNA, 25 bp, Homo sapien
ttcttggcaatcttggtatgcttga

SEQ ID NO: 740419 - DNA, 25 bp, Homo sapien
tggcaatcttggtatgcttgatctt

SEQ ID NO: 740420 - DNA, 25 bp, Homo sapien
catttgcctttcattcttggcaatc

SEQ ID NO: 740421 - DNA, 25 bp, Homo sapien
tcttggtatgcttgatctttcccca

SEQ ID NO: 740422 - DNA, 25 bp, Homo sapien
gaggttggctagcaaaatatccagc

SEQ ID NO: 740423 - DNA, 25 bp, Homo sapien
tcaacgctgtatgtgagattcaccc

SEQ ID NO: 740424 - DNA, 25 bp, Homo sapien
aacagatttcagcttatgccttggg

SEQ ID NO: 740425 - DNA, 25 bp, Homo sapien
gaacacttttgtactcaccagctgg

SEQ ID NO: 740426 - DNA, 25 bp, Homo sapien
caaggtttagattctggcaccggct

SEQ ID NO: 740427 - DNA, 25 bp, Homo sapien
gaaaaaactaccaagcactgtctgc

SEQ ID NO: 740428 - DNA, 25 bp, Homo sapien
gaaacaacgtgttcctggtgtgcag

SEQ ID NO: 740429 - DNA, 25 bp, Homo sapien
tttatacagcaaccagagtcccaag

SEQ ID NO: 740430 - DNA, 25 bp, Homo sapien
cacctctaatcatgtagtgtcctgg

SEQ ID NO: 740431 - DNA, 25 bp, Homo sapien
gagtttggctaaagctgggacatcc

SEQ ID NO: 740432 - DNA, 25 bp, Homo sapien
ttccacaatacagcaggctggtgtt

SEQ ID NO: 740433 - DNA, 25 bp, Homo sapien
taaggcctgtactcaaaagtcccag

SEQ ID NO: 740434 - DNA, 25 bp, Homo sapien
tgtcctctttcacgggttctttgtc

SEQ ID NO: 740435 - DNA, 25 bp, Homo sapien
cctctgtccacttatggaaatctga

SEQ ID NO: 740436 - DNA, 25 bp, Homo sapien
ccttctacaatgatggatgtcctct

SEQ ID NO: 740437 - DNA, 25 bp, Homo sapien
cagtcgccttctacaatgatggatg

SEQ ID NO: 740438 - DNA, 25 bp, Homo sapien
cagtaatagtatctgagatttgaaa

SEQ ID NO: 740439 - DNA, 25 bp, Homo sapien
ctttgaacagtaatagtatctgaga

SEQ ID NO: 740440 - DNA, 25 bp, Homo sapien
gaacagtaatagtatctgagatttg

SEQ ID NO: 740441 - DNA, 25 bp, Homo sapien
aaacttgcttaaggctttgaacagt

SEQ ID NO: 740442 - DNA, 25 bp, Homo sapien
gaaatgtaggacattttattcttaa

SEQ ID NO: 740443 - DNA, 25 bp, Homo sapien
tatctgagttgatattgtcactgca

SEQ ID NO: 740444 - DNA, 25 bp, Homo sapien
caacccatggccattgctctcaagg

SEQ ID NO: 740445 - DNA, 25 bp, Homo sapien
tctccttgtctgttgacaacccatg

SEQ ID NO: 740446 - DNA, 25 bp, Homo sapien
cactgccctgttatataatccgagc

SEQ ID NO: 740447 - DNA, 25 bp, Homo sapien
cattttaaggattggacactgccct

SEQ ID NO: 740448 - DNA, 25 bp, Homo sapien
tatataatccgagcagcagactttc

SEQ ID NO: 740449 - DNA, 25 bp, Homo sapien
taataagtttttggtattggtgcca

SEQ ID NO: 740450 - DNA, 25 bp, Homo sapien
gagatccgatgaagagcaagtgctt

SEQ ID NO: 740451 - DNA, 25 bp, Homo sapien
tcagagatccgatgaagagcaagtg

SEQ ID NO: 740452 - DNA, 25 bp, Homo sapien
agatccgatgaagagcaagtgcttc

SEQ ID NO: 740453 - DNA, 25 bp, Homo sapien
cagagatccgatgaagagcaagtgc

SEQ ID NO: 740454 - DNA, 25 bp, Homo sapien
tcttgtgaatgcaaaacacatttag

SEQ ID NO: 740455 - DNA, 25 bp, Homo sapien
tcaacccgctgactcttcttgtgaa

SEQ ID NO: 740456 - DNA, 25 bp, Homo sapien
tggtaaaaggaattggccgccagtc

SEQ ID NO: 740457 - DNA, 25 bp, Homo sapien
tttagagatgaaatggtactcctct

SEQ ID NO: 740458 - DNA, 25 bp, Homo sapien
tatagggggctatgcagaattcctg

SEQ ID NO: 740459 - DNA, 25 bp, Homo sapien
gaattcctgtaccaaattggcttgt

SEQ ID NO: 740460 - DNA, 25 bp, Homo sapien
gtaccaaattggcttgttggatgag

SEQ ID NO: 740461 - DNA, 25 bp, Homo sapien
gggctatgcagaattcctgtaccaa

SEQ ID NO: 740462 - DNA, 25 bp, Homo sapien
gctattggagatggatattctgatc

SEQ ID NO: 740463 - DNA, 25 bp, Homo sapien
tcaacctgaacggaattgctattgg

SEQ ID NO: 740464 - DNA, 25 bp, Homo sapien
gaacggaattgctattggagatgga

SEQ ID NO: 740465 - DNA, 25 bp, Homo sapien
ggagatggatattctgatcccgaat

SEQ ID NO: 740466 - DNA, 25 bp, Homo sapien
cagaacaccaactggaattaatttt

SEQ ID NO: 740467 - DNA, 25 bp, Homo sapien
tgtggacgatggtgtggccacacca

SEQ ID NO: 740468 - DNA, 25 bp, Homo sapien
acaccagagaaagtggcgtgggcct

SEQ ID NO: 740469 - DNA, 25 bp, Homo sapien
tggccacaccagagaaagtggcgtg

SEQ ID NO: 740470 - DNA, 25 bp, Homo sapien
gaaaagagaagtggaaggcgttctg

SEQ ID NO: 740471 - DNA, 25 bp, Homo sapien
cagtctagtttgtcccatctgggtt

SEQ ID NO: 740472 - DNA, 25 bp, Homo sapien
tatttattcagtctagtttgtccca

SEQ ID NO: 740473 - DNA, 25 bp, Homo sapien
gtggaaggcgttctggattaatcat

SEQ ID NO: 740474 - DNA, 25 bp, Homo sapien
atttgcgttggctaaaggcccctgg

SEQ ID NO: 740475 - DNA, 25 bp, Homo sapien
ttgttatttgcgttggctaaaggcc

SEQ ID NO: 740476 - DNA, 25 bp, Homo sapien
tgtcgttgttatttgcgttggctaa

SEQ ID NO: 740477 - DNA, 25 bp, Homo sapien
tttgtcgttgttatttgcgttggct

SEQ ID NO: 740478 - DNA, 25 bp, Homo sapien
caaagccgtgaaggactctatcagg

SEQ ID NO: 740479 - DNA, 25 bp, Homo sapien
cctctgtggccatggttagaactct

SEQ ID NO: 740480 - DNA, 25 bp, Homo sapien
ccttctcttgagtcagtcttgcctt

SEQ ID NO: 740481 - DNA, 25 bp, Homo sapien
tccaggtcaatggaacgcatccact

SEQ ID NO: 740482 - DNA, 25 bp, Homo sapien
tatgcagagccttctgatttgccga

SEQ ID NO: 740483 - DNA, 25 bp, Homo sapien
agccttctgatttgccgaagagaaa

SEQ ID NO: 740484 - DNA, 25 bp, Homo sapien
tgcagagccttctgatttgccgaag

SEQ ID NO: 740485 - DNA, 25 bp, Homo sapien
tttatgcagagccttctgatttgcc

SEQ ID NO: 740486 - DNA, 25 bp, Homo sapien
caataatgaagatgagcccagtatg

SEQ ID NO: 740487 - DNA, 25 bp, Homo sapien
tatgctactggttgatcaggtaggg

SEQ ID NO: 740488 - DNA, 25 bp, Homo sapien
cccagtatgtgcaggtaaatgttta

SEQ ID NO: 740489 - DNA, 25 bp, Homo sapien
tcttctgatggtcaggtcgattgga

SEQ ID NO: 740490 - DNA, 25 bp, Homo sapien
tcatccatcacaaggttcatggctg

SEQ ID NO: 740491 - DNA, 25 bp, Homo sapien
tctggaactagtggggtgtcacagc

SEQ ID NO: 740492 - DNA, 25 bp, Homo sapien
ggttgtcccaggatctcatctgcag

SEQ ID NO: 740493 - DNA, 25 bp, Homo sapien
tgttggctgccagaaactgtaaggg

SEQ ID NO: 740494 - DNA, 25 bp, Homo sapien
actccttccatagtcttcctgatct

SEQ ID NO: 740495 - DNA, 25 bp, Homo sapien
gaactcttggggttttgtgccttca

SEQ ID NO: 740496 - DNA, 25 bp, Homo sapien
caggcaacttaaagtagaactcttg

SEQ ID NO: 740497 - DNA, 25 bp, Homo sapien
ggttttgtgccttcacaccctccat

SEQ ID NO: 740498 - DNA, 25 bp, Homo sapien
tttgcaatttcagtacctataaatt

SEQ ID NO: 740499 - DNA, 25 bp, Homo sapien
cagtcatttgcaatttcagtaccta

SEQ ID NO: 740500 - DNA, 25 bp, Homo sapien
tcagtcatttgcaatttcagtacct

SEQ ID NO: 740501 - DNA, 25 bp, Homo sapien
tcatttgcaatttcagtacctataa

SEQ ID NO: 740502 - DNA, 25 bp, Homo sapien
gtgaacctttctgcctgacacccta

SEQ ID NO: 740503 - DNA, 25 bp, Homo sapien
gagagaaaagcaccgtttcatgtgg

SEQ ID NO: 740504 - DNA, 25 bp, Homo sapien
cccataaggtgaacctttctgcctg

SEQ ID NO: 740505 - DNA, 25 bp, Homo sapien
aggtgagcccaacatgaccagttta

SEQ ID NO: 740506 - DNA, 25 bp, Homo sapien
gttttaccccatcaatcttctgcct

SEQ ID NO: 740507 - DNA, 25 bp, Homo sapien
tgccttccctcattgtcccacagtt

SEQ ID NO: 740508 - DNA, 25 bp, Homo sapien
ccacagttgtgcctgtctaaggtca

SEQ ID NO: 740509 - DNA, 25 bp, Homo sapien
ttccctcattgtcccacagttgtgc

SEQ ID NO: 740510 - DNA, 25 bp, Homo sapien
aggttgggacacgacgacgcacttt

SEQ ID NO: 740511 - DNA, 25 bp, Homo sapien
ccagcatgggaagcgctgacttgat

SEQ ID NO: 740512 - DNA, 25 bp, Homo sapien
accccgccgatgctcttcattaatt

SEQ ID NO: 740513 - DNA, 25 bp, Homo sapien
cgcactttttgccctgtgggtctgg

SEQ ID NO: 740514 - DNA, 25 bp, Homo sapien
tagtgcagctggaatgtagaccatc

SEQ ID NO: 740515 - DNA, 25 bp, Homo sapien
ggtacagaacacatcaggtggctct

SEQ ID NO: 740516 - DNA, 25 bp, Homo sapien
tagaccatcagcgaacgtgtgttgc

SEQ ID NO: 740517 - DNA, 25 bp, Homo sapien
ggcacttggtgcgagcttactgcta

SEQ ID NO: 740518 - DNA, 25 bp, Homo sapien
gaacctgacacacgacaaatccgaa

SEQ ID NO: 740519 - DNA, 25 bp, Homo sapien
tgcaggaagacttttgggacaccct

SEQ ID NO: 740520 - DNA, 25 bp, Homo sapien
aatgtatgccatatttcactcaggg

SEQ ID NO: 740521 - DNA, 25 bp, Homo sapien
ttttaagtggttccacgtgggcaca

SEQ ID NO: 740522 - DNA, 25 bp, Homo sapien
agttaacccagcaagaagttctgag

SEQ ID NO: 740523 - DNA, 25 bp, Homo sapien
ggactggctttctggcaccttttct

SEQ ID NO: 740524 - DNA, 25 bp, Homo sapien
cactgcttggtgctcctaggtgtag

SEQ ID NO: 740525 - DNA, 25 bp, Homo sapien
gaatcctttaaatccatagcagtta

SEQ ID NO: 740526 - DNA, 25 bp, Homo sapien
ctgctgagtttggcaggaacatcca

SEQ ID NO: 740527 - DNA, 25 bp, Homo sapien
tgagtttggcaggaacatccaaaat

SEQ ID NO: 740528 - DNA, 25 bp, Homo sapien
gctgagtttggcaggaacatccaaa

SEQ ID NO: 740529 - DNA, 25 bp, Homo sapien
tgctgagtttggcaggaacatccaa

SEQ ID NO: 740530 - DNA, 25 bp, Homo sapien
ttttgaaaaagaatccagtttgagc

SEQ ID NO: 740531 - DNA, 25 bp, Homo sapien
gaaaaagaatccagtttgagctcac

SEQ ID NO: 740532 - DNA, 25 bp, Homo sapien
ttgaaaaagaatccagtttgagctc

SEQ ID NO: 740533 - DNA, 25 bp, Homo sapien
aaaagaatccagtttgagctcacac

SEQ ID NO: 740534 - DNA, 25 bp, Homo sapien
gcaagagcacgtggccgtctctaga

SEQ ID NO: 740535 - DNA, 25 bp, Homo sapien
cgtctctagatctatcggctcaggg

SEQ ID NO: 740536 - DNA, 25 bp, Homo sapien
aaatgtcctcgcctttccaggtgtc

SEQ ID NO: 740537 - DNA, 25 bp, Homo sapien
tgacaggacgctccgatgtggtctg

SEQ ID NO: 740538 - DNA, 25 bp, Homo sapien
gtggaaaaccacgtgacctcttctg

SEQ ID NO: 740539 - DNA, 25 bp, Homo sapien
ggatgctgcaggcatttgggtttca

SEQ ID NO: 740540 - DNA, 25 bp, Homo sapien
ccatgaaggctctgtgatgccagga

SEQ ID NO: 740541 - DNA, 25 bp, Homo sapien
catctgaagcaactttcaaggcaga

SEQ ID NO: 740542 - DNA, 25 bp, Homo sapien
aaacgtcagaagatgtgcagtctca

SEQ ID NO: 740543 - DNA, 25 bp, Homo sapien
aaaaaatgcccagaccaaacgtcag

SEQ ID NO: 740544 - DNA, 25 bp, Homo sapien
tgcagtctcattagtaagcaggaaa

SEQ ID NO: 740545 - DNA, 25 bp, Homo sapien
caaacaaataaaccgacattttatg

SEQ ID NO: 740546 - DNA, 25 bp, Homo sapien
gaaatagttcatacctcttagaagc

SEQ ID NO: 740547 - DNA, 25 bp, Homo sapien
aagctttcagcctatacaggttggg

SEQ ID NO: 740548 - DNA, 25 bp, Homo sapien
gagaccctcacataacactggacct

SEQ ID NO: 740549 - DNA, 25 bp, Homo sapien
tggatagtggtaaacacgcatatgt

SEQ ID NO: 740550 - DNA, 25 bp, Homo sapien
taattaaggcttttgctcccatgag

SEQ ID NO: 740551 - DNA, 25 bp, Homo sapien
tgtgtgtgaactccgcttgtgtctg

SEQ ID NO: 740552 - DNA, 25 bp, Homo sapien
atggaaagacgggattgctggcccc

SEQ ID NO: 740553 - DNA, 25 bp, Homo sapien
gcctccaggcctcgaaaagctttac

SEQ ID NO: 740554 - DNA, 25 bp, Homo sapien
tccacgctcccctgtgcgcggctgg

SEQ ID NO: 740555 - DNA, 25 bp, Homo sapien
ggcggatctcggctcccgccgagcc

SEQ ID NO: 740556 - DNA, 25 bp, Homo sapien
gggcagccgggacgggcggatctcg

SEQ ID NO: 740557 - DNA, 25 bp, Homo sapien
tgtcagggggtaggtgggagcagag

SEQ ID NO: 740558 - DNA, 25 bp, Homo sapien
ctgcacttcctgctccaccagatga

SEQ ID NO: 740559 - DNA, 25 bp, Homo sapien
ttgtggtttccgtcccgctccgcgc

SEQ ID NO: 740560 - DNA, 25 bp, Homo sapien
gccgccgccgctatttatttgtggt

SEQ ID NO: 740561 - DNA, 25 bp, Homo sapien
gggacgcgcagaaagcaccagcctc

SEQ ID NO: 740562 - DNA, 25 bp, Homo sapien
tccgcgcgcccctcgcgtcgctgct

SEQ ID NO: 740563 - DNA, 25 bp, Homo sapien
gaggacaccgacgagccggacaggc

SEQ ID NO: 740564 - DNA, 25 bp, Homo sapien
ggacaccgacgagccggacaggctg

SEQ ID NO: 740565 - DNA, 25 bp, Homo sapien
aggacaccgacgagccggacaggct

SEQ ID NO: 740566 - DNA, 25 bp, Homo sapien
actgctcatgtataggtgctccaaa

SEQ ID NO: 740567 - DNA, 25 bp, Homo sapien
accattgtgcaaaaatgggagaccc

SEQ ID NO: 740568 - DNA, 25 bp, Homo sapien
caaaccaaatgtccagttgcttcca

SEQ ID NO: 740569 - DNA, 25 bp, Homo sapien
tgacaggaatcttgatcttctggca

SEQ ID NO: 740570 - DNA, 25 bp, Homo sapien
tttggctttgtactaagcgtttgaa

SEQ ID NO: 740571 - DNA, 25 bp, Homo sapien
tattatcacctaaacatatattcaa

SEQ ID NO: 740572 - DNA, 25 bp, Homo sapien
taagcgtttgaactctagtgtgaat

SEQ ID NO: 740573 - DNA, 25 bp, Homo sapien
tttcaaaggttatgagtcagatatt

SEQ ID NO: 740574 - DNA, 25 bp, Homo sapien
tttacaaagcttctgtcaattgctt

SEQ ID NO: 740575 - DNA, 25 bp, Homo sapien
agtttacaaagcttctgtcaattgc

SEQ ID NO: 740576 - DNA, 25 bp, Homo sapien
tacaaagcttctgtcaattgctttt

SEQ ID NO: 740577 - DNA, 25 bp, Homo sapien
gagtttacaaagcttctgtcaattg

SEQ ID NO: 740578 - DNA, 25 bp, Homo sapien
ggagctttacatagagtagagaaac

SEQ ID NO: 740579 - DNA, 25 bp, Homo sapien
gagaaactctaagttggcacgatta

SEQ ID NO: 740580 - DNA, 25 bp, Homo sapien
ggcacgattacactccaaggatttg

SEQ ID NO: 740581 - DNA, 25 bp, Homo sapien
tgcaggatgcatattggagctttac

SEQ ID NO: 740582 - DNA, 25 bp, Homo sapien
ggatgactcacactctacttcgagg

SEQ ID NO: 740583 - DNA, 25 bp, Homo sapien
ggagcatcaggcacacagtagagaa

SEQ ID NO: 740584 - DNA, 25 bp, Homo sapien
tctgtacaagcatccatctaagtgg

SEQ ID NO: 740585 - DNA, 25 bp, Homo sapien
tacttcgaggccatagagttgtggc

SEQ ID NO: 740586 - DNA, 25 bp, Homo sapien
ttagcccgtgacattagaaagcagg

SEQ ID NO: 740587 - DNA, 25 bp, Homo sapien
cttttgttagagatggcttagcccg

SEQ ID NO: 740588 - DNA, 25 bp, Homo sapien
aaaagtttgagtgaacagcaggtcc

SEQ ID NO: 740589 - DNA, 25 bp, Homo sapien
gcaaggcacaatatcatccccacgt

SEQ ID NO: 740590 - DNA, 25 bp, Homo sapien
ttgcggtgaaacgtcctaatcctta

SEQ ID NO: 740591 - DNA, 25 bp, Homo sapien
tgcggtgaaacgtcctaatccttac

SEQ ID NO: 740592 - DNA, 25 bp, Homo sapien
ttgtagctgaggttccagatattgg

SEQ ID NO: 740593 - DNA, 25 bp, Homo sapien
aagctttgcagacaagccagatcca

SEQ ID NO: 740594 - DNA, 25 bp, Homo sapien
tgtagctgaggttccagatattgga

SEQ ID NO: 740595 - DNA, 25 bp, Homo sapien
ggttgctccagcactagatgttctg

SEQ ID NO: 740596 - DNA, 25 bp, Homo sapien
tgggtctggttgctccaggatgaat

SEQ ID NO: 740597 - DNA, 25 bp, Homo sapien
tccagcactagatgttctgggtctg

SEQ ID NO: 740598 - DNA, 25 bp, Homo sapien
ctggttgctccaggatgaattgttc

SEQ ID NO: 740599 - DNA, 25 bp, Homo sapien
gtcatttgcttattacattaaggcc

SEQ ID NO: 740600 - DNA, 25 bp, Homo sapien
tatccttaggagcatgtgcacattc

SEQ ID NO: 740601 - DNA, 25 bp, Homo sapien
cagtaaatccaaaggacttcagggc

SEQ ID NO: 740602 - DNA, 25 bp, Homo sapien
tttgctccgagctattaaaggaaga

SEQ ID NO: 740603 - DNA, 25 bp, Homo sapien
taaactattgccttccaacctgctg

SEQ ID NO: 740604 - DNA, 25 bp, Homo sapien
cagtccaaacgcttatcttactagg

SEQ ID NO: 740605 - DNA, 25 bp, Homo sapien
ccttcacgaggcatgactttggctg

SEQ ID NO: 740606 - DNA, 25 bp, Homo sapien
ggacatcacaatccctaatgagact

SEQ ID NO: 740607 - DNA, 25 bp, Homo sapien
tgtatgattccaccactccacatgc

SEQ ID NO: 740608 - DNA, 25 bp, Homo sapien
tgacagatgacagaagcaccaattc

SEQ ID NO: 740609 - DNA, 25 bp, Homo sapien
gactacagttcaaatccagcaagca

SEQ ID NO: 740610 - DNA, 25 bp, Homo sapien
caggtgtgtggtctatctcgggtcc

SEQ ID NO: 740611 - DNA, 25 bp, Homo sapien
caggtgacagcaaaatgactacagt

SEQ ID NO: 740612 - DNA, 25 bp, Homo sapien
gctgctttaagaaatggtaccagac

SEQ ID NO: 740613 - DNA, 25 bp, Homo sapien
tctgaagtctgaaatcgttcaaggt

SEQ ID NO: 740614 - DNA, 25 bp, Homo sapien
gaaaatctgcccttttttagtgtca

SEQ ID NO: 740615 - DNA, 25 bp, Homo sapien
aagaatgagtctgatcgaggaaggt

SEQ ID NO: 740616 - DNA, 25 bp, Homo sapien
tgggcaagtcgcttaactacaaaga

SEQ ID NO: 740617 - DNA, 25 bp, Homo sapien
gatagttttatacagacacagcagc

SEQ ID NO: 740618 - DNA, 25 bp, Homo sapien
gcacctgtgtatagagcccttggga

SEQ ID NO: 740619 - DNA, 25 bp, Homo sapien
ttctgcaagcaaacggctgatgcct

SEQ ID NO: 740620 - DNA, 25 bp, Homo sapien
aactgcctggccagacttgttccca

SEQ ID NO: 740621 - DNA, 25 bp, Homo sapien
tgcctgctctagtactttctctcca

SEQ ID NO: 740622 - DNA, 25 bp, Homo sapien
actttcaactgcctggccagacttg

SEQ ID NO: 740623 - DNA, 25 bp, Homo sapien
catcacctgcaacacagtcagatca

SEQ ID NO: 740624 - DNA, 25 bp, Homo sapien
gacggttaggtgtcaacttgcctgg

SEQ ID NO: 740625 - DNA, 25 bp, Homo sapien
tctttcacattggagcggctattaa

SEQ ID NO: 740626 - DNA, 25 bp, Homo sapien
aaatggcttagagcagaaaggccgc

SEQ ID NO: 740627 - DNA, 25 bp, Homo sapien
gctgcaagatacacgtggatgaata

SEQ ID NO: 740628 - DNA, 25 bp, Homo sapien
tggcaggctcctggtgtaaatggac

SEQ ID NO: 740629 - DNA, 25 bp, Homo sapien
cactgtccattcttgggtgcctgtc

SEQ ID NO: 740630 - DNA, 25 bp, Homo sapien
gacttctgtgctagacagggtgttg

SEQ ID NO: 740631 - DNA, 25 bp, Homo sapien
tcttggtaggacaactgcatgccgt

SEQ ID NO: 740632 - DNA, 25 bp, Homo sapien
tacaccacagtctatattctactag

SEQ ID NO: 740633 - DNA, 25 bp, Homo sapien
tctctgttattttgtgggtctcacg

SEQ ID NO: 740634 - DNA, 25 bp, Homo sapien
tgggattacaataatggcacaggca

SEQ ID NO: 740635 - DNA, 25 bp, Homo sapien
tctgttagatgatgccaaattcctc

SEQ ID NO: 740636 - DNA, 25 bp, Homo sapien
agcctgacatatattagctggtttt

SEQ ID NO: 740637 - DNA, 25 bp, Homo sapien
gtattaagcctgacatatattagct

SEQ ID NO: 740638 - DNA, 25 bp, Homo sapien
gagccactgcgttcgacctagatca

SEQ ID NO: 740639 - DNA, 25 bp, Homo sapien
tgaaacaataagactaccagcgagc

SEQ ID NO: 740640 - DNA, 25 bp, Homo sapien
gcttttctagaagagcatgctggat

SEQ ID NO: 740641 - DNA, 25 bp, Homo sapien
tttaggccacaagtcagaaaaggca

SEQ ID NO: 740642 - DNA, 25 bp, Homo sapien
ggaagtgcattttgtgctggaacct

SEQ ID NO: 740643 - DNA, 25 bp, Homo sapien
tcaaaaacaaatgcgttggtgcggg

SEQ ID NO: 740644 - DNA, 25 bp, Homo sapien
cagatagtttcacctcggcagtggg

SEQ ID NO: 740645 - DNA, 25 bp, Homo sapien
tgagttggcacgatgaagcgtgtcc

SEQ ID NO: 740646 - DNA, 25 bp, Homo sapien
aattctgagtgcctttagtgtccaa

SEQ ID NO: 740647 - DNA, 25 bp, Homo sapien
tgttcacagctaaactgagggatat

SEQ ID NO: 740648 - DNA, 25 bp, Homo sapien
aaaaaagtatgatataatcttgccc

SEQ ID NO: 740649 - DNA, 25 bp, Homo sapien
ccctcaatgggtttataatctgtgt

SEQ ID NO: 740650 - DNA, 25 bp, Homo sapien
aatctcagcaagcattactgtagcc

SEQ ID NO: 740651 - DNA, 25 bp, Homo sapien
tacctgggcatgtcacaagacatcc

SEQ ID NO: 740652 - DNA, 25 bp, Homo sapien
taggatgcccattactcggaggttt

SEQ ID NO: 740653 - DNA, 25 bp, Homo sapien
tactgtagccaccagttacctgggc

SEQ ID NO: 740654 - DNA, 25 bp, Homo sapien
gccctgacaatttctagatactcag

SEQ ID NO: 740655 - DNA, 25 bp, Homo sapien
ttcacgggaaacagacgtatcctcc

SEQ ID NO: 740656 - DNA, 25 bp, Homo sapien
tatcctccgccctgacaatttctag

SEQ ID NO: 740657 - DNA, 25 bp, Homo sapien
ctggctcacatctggttcacgggaa

SEQ ID NO: 740658 - DNA, 25 bp, Homo sapien
ctaacttgcccttgacatgttcttc

SEQ ID NO: 740659 - DNA, 25 bp, Homo sapien
ccaggaattccacttatctctggaa

SEQ ID NO: 740660 - DNA, 25 bp, Homo sapien
taacccaggaattccacttatctct

SEQ ID NO: 740661 - DNA, 25 bp, Homo sapien
acccaggaattccacttatctctgg

SEQ ID NO: 740662 - DNA, 25 bp, Homo sapien
aggaattccacttatctctggaagg

SEQ ID NO: 740663 - DNA, 25 bp, Homo sapien
ctggggaaaaacctgaatgcaggca

SEQ ID NO: 740664 - DNA, 25 bp, Homo sapien
tggggaaaaacctgaatgcaggcat

SEQ ID NO: 740665 - DNA, 25 bp, Homo sapien
ccagtcctccttaaaatgtgaccat

SEQ ID NO: 740666 - DNA, 25 bp, Homo sapien
gtcctccttaaaatgtgaccatttg

SEQ ID NO: 740667 - DNA, 25 bp, Homo sapien
tcccccagtcctccttaaaatgtga

SEQ ID NO: 740668 - DNA, 25 bp, Homo sapien
agggccttgactatttctcccccag

SEQ ID NO: 740669 - DNA, 25 bp, Homo sapien
tcctctatttcaggggaatcctccc

SEQ ID NO: 740670 - DNA, 25 bp, Homo sapien
tacaccagagttcctctatttcagg

SEQ ID NO: 740671 - DNA, 25 bp, Homo sapien
ttacaccagagttcctctatttcag

SEQ ID NO: 740672 - DNA, 25 bp, Homo sapien
tcattacaccagagttcctctattt

SEQ ID NO: 740673 - DNA, 25 bp, Homo sapien
cctctgggaactcaatcaggaagat

SEQ ID NO: 740674 - DNA, 25 bp, Homo sapien
gacacctctgggaactcaatcagga

SEQ ID NO: 740675 - DNA, 25 bp, Homo sapien
tgacacctctgggaactcaatcagg

SEQ ID NO: 740676 - DNA, 25 bp, Homo sapien
cacctctgggaactcaatcaggaag

SEQ ID NO: 740677 - DNA, 25 bp, Homo sapien
gcatcgtgtacaatttctaaaaacg

SEQ ID NO: 740678 - DNA, 25 bp, Homo sapien
tctaaaaacgatgaacgctcgtagt

SEQ ID NO: 740679 - DNA, 25 bp, Homo sapien
tgagagcctgtgactccaaggagct

SEQ ID NO: 740680 - DNA, 25 bp, Homo sapien
gaacgctcgtagtaagttatttcca

SEQ ID NO: 740681 - DNA, 25 bp, Homo sapien
tcactgctgaatcacctagaacggt

SEQ ID NO: 740682 - DNA, 25 bp, Homo sapien
taatttatgcatggtccacccttgc

SEQ ID NO: 740683 - DNA, 25 bp, Homo sapien
tattccccattagcaggcaagattc

SEQ ID NO: 740684 - DNA, 25 bp, Homo sapien
gaacggtacccagcacaaagtgaga

SEQ ID NO: 740685 - DNA, 25 bp, Homo sapien
ggacagactccatactctagaaagc

SEQ ID NO: 740686 - DNA, 25 bp, Homo sapien
taattgcatacagagttccagggac

SEQ ID NO: 740687 - DNA, 25 bp, Homo sapien
taaggaacctgcatgatactgaact

SEQ ID NO: 740688 - DNA, 25 bp, Homo sapien
catggatccataacacataggctag

SEQ ID NO: 740689 - DNA, 25 bp, Homo sapien
gatgtgctctgcgaagtccaaggct

SEQ ID NO: 740690 - DNA, 25 bp, Homo sapien
tgatgtgctctgcgaagtccaaggc

SEQ ID NO: 740691 - DNA, 25 bp, Homo sapien
atgtgctctgcgaagtccaaggctg

SEQ ID NO: 740692 - DNA, 25 bp, Homo sapien
gttgatgtgctctgcgaagtccaag

SEQ ID NO: 740693 - DNA, 25 bp, Homo sapien
ccgggtgtcagtaatgtcttagaaa

SEQ ID NO: 740694 - DNA, 25 bp, Homo sapien
gactccatattgttccactcccgta

SEQ ID NO: 740695 - DNA, 25 bp, Homo sapien
gcacatcttcctgtccgcacatgga

SEQ ID NO: 740696 - DNA, 25 bp, Homo sapien
gaaggcatgctctgttcttgaccac

SEQ ID NO: 740697 - DNA, 25 bp, Homo sapien
tttgtttgctcaacccactgggtga

SEQ ID NO: 740698 - DNA, 25 bp, Homo sapien
tcttgctgctcatggaaaaactccc

SEQ ID NO: 740699 - DNA, 25 bp, Homo sapien
gaagaggtgtgagtcccactgcaaa

SEQ ID NO: 740700 - DNA, 25 bp, Homo sapien
ggagtcagttcctcaacaaaagccg

SEQ ID NO: 740701 - DNA, 25 bp, Homo sapien
aactggcaccatccataacaattgg

SEQ ID NO: 740702 - DNA, 25 bp, Homo sapien
ggctctctgatctagcacagtcatt

SEQ ID NO: 740703 - DNA, 25 bp, Homo sapien
ggtgcggttaatataattgtagtaa

SEQ ID NO: 740704 - DNA, 25 bp, Homo sapien
acagtcatttctcgcaactggcacc

SEQ ID NO: 740705 - DNA, 25 bp, Homo sapien
tataggaggctggtattcttcagca

SEQ ID NO: 740706 - DNA, 25 bp, Homo sapien
gatttccatataggaggctggtatt

SEQ ID NO: 740707 - DNA, 25 bp, Homo sapien
ccatataggaggctggtattcttca

SEQ ID NO: 740708 - DNA, 25 bp, Homo sapien
atgatttccatataggaggctggta

SEQ ID NO: 740709 - DNA, 25 bp, Homo sapien
gggacgaggtgcctcttgctgtaac

SEQ ID NO: 740710 - DNA, 25 bp, Homo sapien
gattctcttgggacgaggtgcctct

SEQ ID NO: 740711 - DNA, 25 bp, Homo sapien
tcttgggacgaggtgcctcttgctg

SEQ ID NO: 740712 - DNA, 25 bp, Homo sapien
aaatgattctcttgggacgaggtgc

SEQ ID NO: 740713 - DNA, 25 bp, Homo sapien
ggtgtattggaaatagctgagcact

SEQ ID NO: 740714 - DNA, 25 bp, Homo sapien
aggtgtattggaaatagctgagcac

SEQ ID NO: 740715 - DNA, 25 bp, Homo sapien
caaggtgtattggaaatagctgagc

SEQ ID NO: 740716 - DNA, 25 bp, Homo sapien
aaggtgtattggaaatagctgagca

SEQ ID NO: 740717 - DNA, 25 bp, Homo sapien
cacttggagaagaatggtacagaca

SEQ ID NO: 740718 - DNA, 25 bp, Homo sapien
ggctcataggcacggcaagaaattt

SEQ ID NO: 740719 - DNA, 25 bp, Homo sapien
tgacagacacaggaggcaaactatg

SEQ ID NO: 740720 - DNA, 25 bp, Homo sapien
gggaggctctttacctgcaatgaaa

SEQ ID NO: 740721 - DNA, 25 bp, Homo sapien
ctgctccccttggctctgaactcca

SEQ ID NO: 740722 - DNA, 25 bp, Homo sapien
tgctccccttggctctgaactccat

SEQ ID NO: 740723 - DNA, 25 bp, Homo sapien
tagtgttttcgacagctctcatgcc

SEQ ID NO: 740724 - DNA, 25 bp, Homo sapien
agaatgtctttgttccatgggccag

SEQ ID NO: 740725 - DNA, 25 bp, Homo sapien
gggctgtgcacccaagagaatgtct

SEQ ID NO: 740726 - DNA, 25 bp, Homo sapien
tataggaggctaacaccagctttgt

SEQ ID NO: 740727 - DNA, 25 bp, Homo sapien
tctaataggtcccaatttccaatcc

SEQ ID NO: 740728 - DNA, 25 bp, Homo sapien
cttgaagtacccaacagaactgaat

SEQ ID NO: 740729 - DNA, 25 bp, Homo sapien
cacataccttttaagcccaaagagc

SEQ ID NO: 740730 - DNA, 25 bp, Homo sapien
aactctctttaaattctccacatac

SEQ ID NO: 740731 - DNA, 25 bp, Homo sapien
tatgagctatcaccgggatcctgag

SEQ ID NO: 740732 - DNA, 25 bp, Homo sapien
tcttcatcattcacctatttccagg

SEQ ID NO: 740733 - DNA, 25 bp, Homo sapien
tgtaatatgcttgcaacagtgcctg

SEQ ID NO: 740734 - DNA, 25 bp, Homo sapien
cagccagtcagttgctatgagctat

SEQ ID NO: 740735 - DNA, 25 bp, Homo sapien
gactgacggctgtcggatcggccat

SEQ ID NO: 740736 - DNA, 25 bp, Homo sapien
ggtgaacctggcctttgtgagtagg

SEQ ID NO: 740737 - DNA, 25 bp, Homo sapien
ctggtgaacctggcctttgtgagta

SEQ ID NO: 740738 - DNA, 25 bp, Homo sapien
gtgagtaggactgacggctgtcgga

SEQ ID NO: 740739 - DNA, 25 bp, Homo sapien
tttttggctgaaccgtagcacaagt

SEQ ID NO: 740740 - DNA, 25 bp, Homo sapien
tacatatgaggacgatttttaaatt

SEQ ID NO: 740741 - DNA, 25 bp, Homo sapien
gctgaaccgtagcacaagtttgcaa

SEQ ID NO: 740742 - DNA, 25 bp, Homo sapien
ccatctttttggctgaaccgtagca

SEQ ID NO: 740743 - DNA, 25 bp, Homo sapien
taggatacgagcttggcagctgttt

SEQ ID NO: 740744 - DNA, 25 bp, Homo sapien
tgttgtaggatacgagcttggcagc

SEQ ID NO: 740745 - DNA, 25 bp, Homo sapien
ttcactgttgtaggatacgagcttg

SEQ ID NO: 740746 - DNA, 25 bp, Homo sapien
cactgttgtaggatacgagcttggc

SEQ ID NO: 740747 - DNA, 25 bp, Homo sapien
tcttccataatattttggtctgttt

SEQ ID NO: 740748 - DNA, 25 bp, Homo sapien
tctcttccataatattttggtctgt

SEQ ID NO: 740749 - DNA, 25 bp, Homo sapien
cataatattttggtctgttttccac

SEQ ID NO: 740750 - DNA, 25 bp, Homo sapien
ttccataatattttggtctgttttc

SEQ ID NO: 740751 - DNA, 25 bp, Homo sapien
ctttcatggtagaactatgggtatt

SEQ ID NO: 740752 - DNA, 25 bp, Homo sapien
attctctttcatggtagaactatgg

SEQ ID NO: 740753 - DNA, 25 bp, Homo sapien
tcatggtagaactatgggtattttc

SEQ ID NO: 740754 - DNA, 25 bp, Homo sapien
gagtgcaatggttcagttgaccttc

SEQ ID NO: 740755 - DNA, 25 bp, Homo sapien
actcaggcgatcaacccgcctcggt

SEQ ID NO: 740756 - DNA, 25 bp, Homo sapien
gagtgggggcgggtctcaccatgtt

SEQ ID NO: 740757 - DNA, 25 bp, Homo sapien
tttcagtagagatgcggggagtggg

SEQ ID NO: 740758 - DNA, 25 bp, Homo sapien
gtatttcagtagagatgcggggagt

SEQ ID NO: 740759 - DNA, 25 bp, Homo sapien
cctaggaactttgcggaggagcctc

SEQ ID NO: 740760 - DNA, 25 bp, Homo sapien
cttctgtccaaggaaagtgaggtca

SEQ ID NO: 740761 - DNA, 25 bp, Homo sapien
aatcgcttcttaaaggtgtacggca

SEQ ID NO: 740762 - DNA, 25 bp, Homo sapien
gatgaatgttctgtgaatccccggt

SEQ ID NO: 740763 - DNA, 25 bp, Homo sapien
gcccatgatcactctgatgtggagg

SEQ ID NO: 740764 - DNA, 25 bp, Homo sapien
cacatgcatgtggaaaatgtggcat

SEQ ID NO: 740765 - DNA, 25 bp, Homo sapien
ttgggtcaggaaccagcccacgttc

SEQ ID NO: 740766 - DNA, 25 bp, Homo sapien
tttaagtaaatacagctgctcctcc

SEQ ID NO: 740767 - DNA, 25 bp, Homo sapien
tcgacagccccacaactgagtgaag

SEQ ID NO: 740768 - DNA, 25 bp, Homo sapien
ttaagtgacttggaaccacccctca

SEQ ID NO: 740769 - DNA, 25 bp, Homo sapien
gaaggatgcccagtccacctggctt

SEQ ID NO: 740770 - DNA, 25 bp, Homo sapien
tttctggaaagaggtagctatcatc

SEQ ID NO: 740771 - DNA, 25 bp, Homo sapien
cctggttgccgctggctttctctaa

SEQ ID NO: 740772 - DNA, 25 bp, Homo sapien
tctctaaggatgtaggcaccctcca

SEQ ID NO: 740773 - DNA, 25 bp, Homo sapien
tgctcccgagagatgatcccatgaa

SEQ ID NO: 740774 - DNA, 25 bp, Homo sapien
tgagagccagcgtgtagcatcctgg

SEQ ID NO: 740775 - DNA, 25 bp, Homo sapien
ttaacgggaaccagctctcctctat

SEQ ID NO: 740776 - DNA, 25 bp, Homo sapien
agctctcctctatacctggcaatta

SEQ ID NO: 740777 - DNA, 25 bp, Homo sapien
ccttgttaacgcatctttaccacct

SEQ ID NO: 740778 - DNA, 25 bp, Homo sapien
aattacctctgcaagggatgccctg

SEQ ID NO: 740779 - DNA, 25 bp, Homo sapien
tcccgtcgtggaagagcctgtagtt

SEQ ID NO: 740780 - DNA, 25 bp, Homo sapien
tctgtcaccagatcatgaatcgact

SEQ ID NO: 740781 - DNA, 25 bp, Homo sapien
tctctgagtagggtggcatatccaa

SEQ ID NO: 740782 - DNA, 25 bp, Homo sapien
catatccaatgtgttcatagatggg

SEQ ID NO: 740783 - DNA, 25 bp, Homo sapien
taacccgcctgttgatgcggcatgg

SEQ ID NO: 740784 - DNA, 25 bp, Homo sapien
tgcggcatggattaaaacgaaaggc

SEQ ID NO: 740785 - DNA, 25 bp, Homo sapien
gcaaatcgcacctatagttaacccg

SEQ ID NO: 740786 - DNA, 25 bp, Homo sapien
cccggcctgagctagaagatttcta

SEQ ID NO: 740787 - DNA, 25 bp, Homo sapien
taagtaagaccaccttcaagagacc

SEQ ID NO: 740788 - DNA, 25 bp, Homo sapien
agtaagaccaccttcaagagacctg

SEQ ID NO: 740789 - DNA, 25 bp, Homo sapien
ctaagtaagaccaccttcaagagac

SEQ ID NO: 740790 - DNA, 25 bp, Homo sapien
taagaccaccttcaagagacctgac

SEQ ID NO: 740791 - DNA, 25 bp, Homo sapien
attgacactggacgacgggaggccc

SEQ ID NO: 740792 - DNA, 25 bp, Homo sapien
ctgccaatgccagtcccgaatccat

SEQ ID NO: 740793 - DNA, 25 bp, Homo sapien
tccatcagcccgaggctcctttgct

SEQ ID NO: 740794 - DNA, 25 bp, Homo sapien
tttgcttcccattgacactggacga

SEQ ID NO: 740795 - DNA, 25 bp, Homo sapien
gtctggaccggaacaaactctgaaa

SEQ ID NO: 740796 - DNA, 25 bp, Homo sapien
tcaatacccaggatctcaagtcggc

SEQ ID NO: 740797 - DNA, 25 bp, Homo sapien
taaggaatggcttttgtctggaccg

SEQ ID NO: 740798 - DNA, 25 bp, Homo sapien
ccttgagctgttctagtgtgcatcc

SEQ ID NO: 740799 - DNA, 25 bp, Homo sapien
tactaacaaaatgagtagccccagc

SEQ ID NO: 740800 - DNA, 25 bp, Homo sapien
ggaccactgactgcctttaagggaa

SEQ ID NO: 740801 - DNA, 25 bp, Homo sapien
caatataggtcagagagaaacggat

SEQ ID NO: 740802 - DNA, 25 bp, Homo sapien
tagtcactgactccatcgcaatgga

SEQ ID NO: 740803 - DNA, 25 bp, Homo sapien
tactgctaacaatcatgactggaga

SEQ ID NO: 740804 - DNA, 25 bp, Homo sapien
gagacggatcactattggctaacca

SEQ ID NO: 740805 - DNA, 25 bp, Homo sapien
taattagatgcaccgaatggtggcc

SEQ ID NO: 740806 - DNA, 25 bp, Homo sapien
taagtacctggaaacggaaatgctg

SEQ ID NO: 740807 - DNA, 25 bp, Homo sapien
gctcagttgatttaagaagctttga

SEQ ID NO: 740808 - DNA, 25 bp, Homo sapien
gaggcacaactgctcagttgattta

SEQ ID NO: 740809 - DNA, 25 bp, Homo sapien
caactgctcagttgatttaagaagc

SEQ ID NO: 740810 - DNA, 25 bp, Homo sapien
agaatgaggcacaactgctcagttg

SEQ ID NO: 740811 - DNA, 25 bp, Homo sapien
aaaccaagggtgttcgctcaaagca

SEQ ID NO: 740812 - DNA, 25 bp, Homo sapien
taaatactgagtacttttagcatca

SEQ ID NO: 740813 - DNA, 25 bp, Homo sapien
caggatggcccaaaaccaagggtgt

SEQ ID NO: 740814 - DNA, 25 bp, Homo sapien
acttttagcatcacttgcctcagga

SEQ ID NO: 740815 - DNA, 25 bp, Homo sapien
taagggcatggatcattttttcccc

SEQ ID NO: 740816 - DNA, 25 bp, Homo sapien
ccatataacgattccaagtgcccat

SEQ ID NO: 740817 - DNA, 25 bp, Homo sapien
tccacatcagcccatatgagggttc

SEQ ID NO: 740818 - DNA, 25 bp, Homo sapien
tatgcattggattcgtagggtatac

SEQ ID NO: 740819 - DNA, 25 bp, Homo sapien
caagggatatttatgactttgcatg

SEQ ID NO: 740820 - DNA, 25 bp, Homo sapien
cacggtttaaaattccaagagtctg

SEQ ID NO: 740821 - DNA, 25 bp, Homo sapien
taatacacagcgcattattttctct

SEQ ID NO: 740822 - DNA, 25 bp, Homo sapien
gctcttgcatccttcaagggatatt

SEQ ID NO: 740823 - DNA, 25 bp, Homo sapien
aaggggcccaggcttaaacaggctg

SEQ ID NO: 740824 - DNA, 25 bp, Homo sapien
caggcttaaacaggctgcaaatttc

SEQ ID NO: 740825 - DNA, 25 bp, Homo sapien
gcctttccaaattccccatctgtac

SEQ ID NO: 740826 - DNA, 25 bp, Homo sapien
gggcccaggcttaaacaggctgcaa

SEQ ID NO: 740827 - DNA, 25 bp, Homo sapien
tcagcatcatcagggtacctgtcac

SEQ ID NO: 740828 - DNA, 25 bp, Homo sapien
ttatgactgcgtgcaagggcagcaa

SEQ ID NO: 740829 - DNA, 25 bp, Homo sapien
tgactgcgtgcaagggcagcaagtc

SEQ ID NO: 740830 - DNA, 25 bp, Homo sapien
ggtcagcatcatcagggtacctgtc

SEQ ID NO: 740831 - DNA, 25 bp, Homo sapien
atcccaaatcattagggaattctgg

SEQ ID NO: 740832 - DNA, 25 bp, Homo sapien
cagagtgagtccaaccttcagtcag

SEQ ID NO: 740833 - DNA, 25 bp, Homo sapien
gctcagactgagtgataaatcccaa

SEQ ID NO: 740834 - DNA, 25 bp, Homo sapien
aacccagtctcatgagcggatgtaa

SEQ ID NO: 740835 - DNA, 25 bp, Homo sapien
tctgtgtgaggccagacttcttcct

SEQ ID NO: 740836 - DNA, 25 bp, Homo sapien
gttgaatacaggagcagatgtgaga

SEQ ID NO: 740837 - DNA, 25 bp, Homo sapien
tatatcccaggttgaatacaggagc

SEQ ID NO: 740838 - DNA, 25 bp, Homo sapien
gaaaaggctataagaacactcctct

SEQ ID NO: 740839 - DNA, 25 bp, Homo sapien
tcaggctctatcgggtggcgggaag

SEQ ID NO: 740840 - DNA, 25 bp, Homo sapien
gaagctcagatcaggcctcaggact

SEQ ID NO: 740841 - DNA, 25 bp, Homo sapien
ttctcaggctctatcgggtggcggg

SEQ ID NO: 740842 - DNA, 25 bp, Homo sapien
agaagctcagatcaggcctcaggac

SEQ ID NO: 740843 - DNA, 25 bp, Homo sapien
ggtatacagagctttatagtattgc

SEQ ID NO: 740844 - DNA, 25 bp, Homo sapien
cagactcatcaccttgcgatatagt

SEQ ID NO: 740845 - DNA, 25 bp, Homo sapien
caccttgcgatatagtaaaggtata

SEQ ID NO: 740846 - DNA, 25 bp, Homo sapien
gagctttatagtattgcccaatcct

SEQ ID NO: 740847 - DNA, 25 bp, Homo sapien
aagaagttacttccaccgctccaat

SEQ ID NO: 740848 - DNA, 25 bp, Homo sapien
ttgaagaggctttccttcaagccag

SEQ ID NO: 740849 - DNA, 25 bp, Homo sapien
tggcggcagggtttcagctcccctg

SEQ ID NO: 740850 - DNA, 25 bp, Homo sapien
tctcagagccgttgtgaggacggaa

SEQ ID NO: 740851 - DNA, 25 bp, Homo sapien
ccagaaggagaggacgcgctgcaga

SEQ ID NO: 740852 - DNA, 25 bp, Homo sapien
agccagaaggagaggacgcgctgca

SEQ ID NO: 740853 - DNA, 25 bp, Homo sapien
agaaggagaggacgcgctgcagagg

SEQ ID NO: 740854 - DNA, 25 bp, Homo sapien
aggagaggacgcgctgcagaggtag

SEQ ID NO: 740855 - DNA, 25 bp, Homo sapien
cctgcggggtcacagaactgagtga

SEQ ID NO: 740856 - DNA, 25 bp, Homo sapien
agcaagtcctgcggggtcacagaac

SEQ ID NO: 740857 - DNA, 25 bp, Homo sapien
tgagtgaggcgcagctcaggactgc

SEQ ID NO: 740858 - DNA, 25 bp, Homo sapien
aagtcctgcggggtcacagaactga

SEQ ID NO: 740859 - DNA, 25 bp, Homo sapien
ttcggttcccatggcagttggtgca

SEQ ID NO: 740860 - DNA, 25 bp, Homo sapien
ggcgtgcccgacccatctgatgggc

SEQ ID NO: 740861 - DNA, 25 bp, Homo sapien
ggccgtgctgacatcatgatcgact

SEQ ID NO: 740862 - DNA, 25 bp, Homo sapien
cacctttactgaggtgcacgagggc

SEQ ID NO: 740863 - DNA, 25 bp, Homo sapien
tacaggatccttcggttcccatggc

SEQ ID NO: 740864 - DNA, 25 bp, Homo sapien
accacctccatgccgagaggagggg

SEQ ID NO: 740865 - DNA, 25 bp, Homo sapien
ccccaagactcaccgagaaggggat

SEQ ID NO: 740866 - DNA, 25 bp, Homo sapien
gaagacggacctcacctacaggatc

SEQ ID NO: 740867 - DNA, 25 bp, Homo sapien
gagcgatgtgacgccactcaccttt

SEQ ID NO: 740868 - DNA, 25 bp, Homo sapien
atgatcgacttcgccaggtactggc

SEQ ID NO: 740869 - DNA, 25 bp, Homo sapien
cagaagaggttcgtgctttctggcg

SEQ ID NO: 740870 - DNA, 25 bp, Homo sapien
tagggcggcaggtgcaagactactt

SEQ ID NO: 740871 - DNA, 25 bp, Homo sapien
cagtcgtttttagccagtagcctca

SEQ ID NO: 740872 - DNA, 25 bp, Homo sapien
tgtgcacagaactttttaccagctc

SEQ ID NO: 740873 - DNA, 25 bp, Homo sapien
tctcttatgtgtggttagggcggca

SEQ ID NO: 740874 - DNA, 25 bp, Homo sapien
tagagcagactcaaaaaaggccacg

SEQ ID NO: 740875 - DNA, 25 bp, Homo sapien
cataaatgttatctgaccacgtggc

SEQ ID NO: 740876 - DNA, 25 bp, Homo sapien
ctgagctttagccaaccaaatgtgg

SEQ ID NO: 740877 - DNA, 25 bp, Homo sapien
tattctggttctagggactgcctga

SEQ ID NO: 740878 - DNA, 25 bp, Homo sapien
gagggcacttaaccgaagttgaagc

SEQ ID NO: 740879 - DNA, 25 bp, Homo sapien
acttaaccgaagttgaagctacctg

SEQ ID NO: 740880 - DNA, 25 bp, Homo sapien
ttaaccgaagttgaagctacctgag

SEQ ID NO: 740881 - DNA, 25 bp, Homo sapien
gggcacttaaccgaagttgaagcta

SEQ ID NO: 740882 - DNA, 25 bp, Homo sapien
gtggttgaacactaggaaaggattc

SEQ ID NO: 740883 - DNA, 25 bp, Homo sapien
gattcttttgatccactcagctgtg

SEQ ID NO: 740884 - DNA, 25 bp, Homo sapien
gctgtgagtcccaaacccctaaatc

SEQ ID NO: 740885 - DNA, 25 bp, Homo sapien
gcagtgtatcaaaggaaccagggaa

SEQ ID NO: 740886 - DNA, 25 bp, Homo sapien
tacggaatttcacagtgaggcacac

SEQ ID NO: 740887 - DNA, 25 bp, Homo sapien
ctacggaatttcacagtgaggcaca

SEQ ID NO: 740888 - DNA, 25 bp, Homo sapien
aacataattatattccaaaaggcca

SEQ ID NO: 740889 - DNA, 25 bp, Homo sapien
acataattatattccaaaaggccag

SEQ ID NO: 740890 - DNA, 25 bp, Homo sapien
ctttttcttctggttgcagcagaca

SEQ ID NO: 740891 - DNA, 25 bp, Homo sapien
tttcttctggttgcagcagacaaat

SEQ ID NO: 740892 - DNA, 25 bp, Homo sapien
taggtcaggtacagatgctcaacaa

SEQ ID NO: 740893 - DNA, 25 bp, Homo sapien
gtatctctggtggatttcaaaaacc

SEQ ID NO: 740894 - DNA, 25 bp, Homo sapien
gatatgcaccagcatatggccttgg

SEQ ID NO: 740895 - DNA, 25 bp, Homo sapien
gcccagccggttttagatatcttaa

SEQ ID NO: 740896 - DNA, 25 bp, Homo sapien
taagcaaagagctatctacccagga

SEQ ID NO: 740897 - DNA, 25 bp, Homo sapien
taatggttctctagctacttctggg

SEQ ID NO: 740898 - DNA, 25 bp, Homo sapien
caaaattatatgttagacacctggg

SEQ ID NO: 740899 - DNA, 25 bp, Homo sapien
gctttggctagagttgcacgctgct

SEQ ID NO: 740900 - DNA, 25 bp, Homo sapien
ttctccagaattgacactaactttc

SEQ ID NO: 740901 - DNA, 25 bp, Homo sapien
aagaaagcgtggaggagaatgacta

SEQ ID NO: 740902 - DNA, 25 bp, Homo sapien
caaacataccagctgggaccaacag

SEQ ID NO: 740903 - DNA, 25 bp, Homo sapien
gaatgactaaccaaacataccagct

SEQ ID NO: 740904 - DNA, 25 bp, Homo sapien
tgagcatgatgttgtgaagttctgg

SEQ ID NO: 740905 - DNA, 25 bp, Homo sapien
gggaatatcaagaagctattaatgt

SEQ ID NO: 740906 - DNA, 25 bp, Homo sapien
tttgagcatgatgttgtgaagttct

SEQ ID NO: 740907 - DNA, 25 bp, Homo sapien
tgaagttctgggaatatcaagaagc

SEQ ID NO: 740908 - DNA, 25 bp, Homo sapien
tcctccacgggtggtgtggcggtca

SEQ ID NO: 740909 - DNA, 25 bp, Homo sapien
cctccacgggtggtgtggcggtcat

SEQ ID NO: 740910 - DNA, 25 bp, Homo sapien
tgtcctccacgggtggtgtggcggt

SEQ ID NO: 740911 - DNA, 25 bp, Homo sapien
gctgtcctccacgggtggtgtggcg

SEQ ID NO: 740912 - DNA, 25 bp, Homo sapien
ggtgcctgccacttgttcaccacag

SEQ ID NO: 740913 - DNA, 25 bp, Homo sapien
aaatgcttagtggtcttgctctgag

SEQ ID NO: 740914 - DNA, 25 bp, Homo sapien
cacggtcctcagacaaggtgtcagg

SEQ ID NO: 740915 - DNA, 25 bp, Homo sapien
gaggagcccatgaaaacaggttccc

SEQ ID NO: 740916 - DNA, 25 bp, Homo sapien
atgaagggcaatatccccaggatct

SEQ ID NO: 740917 - DNA, 25 bp, Homo sapien
tgtgactgtggcctgaatgagttga

SEQ ID NO: 740918 - DNA, 25 bp, Homo sapien
gaagatgaagggcaatatccccagg

SEQ ID NO: 740919 - DNA, 25 bp, Homo sapien
gcctgaatgagttgagaaggattct

SEQ ID NO: 740920 - DNA, 25 bp, Homo sapien
tggtaaaagcacaaaagccgagacc

SEQ ID NO: 740921 - DNA, 25 bp, Homo sapien
ctggtaaaagcacaaaagccgagac

SEQ ID NO: 740922 - DNA, 25 bp, Homo sapien
cttttacccatagccctgagcactt

SEQ ID NO: 740923 - DNA, 25 bp, Homo sapien
cccaaatgacatcttaaacaatctg

SEQ ID NO: 740924 - DNA, 25 bp, Homo sapien
agccatctgatggataagaaaccat

SEQ ID NO: 740925 - DNA, 25 bp, Homo sapien
acatcttaaacaatctgagtccaca

SEQ ID NO: 740926 - DNA, 25 bp, Homo sapien
ggctttgatcctgggctccatctgg

SEQ ID NO: 740927 - DNA, 25 bp, Homo sapien
gtctccatgggctcaaaaccttcac

SEQ ID NO: 740928 - DNA, 25 bp, Homo sapien
gaaaacacggctggcggctttgatc

SEQ ID NO: 740929 - DNA, 25 bp, Homo sapien
tctggcattgcactcaggaaagagc

SEQ ID NO: 740930 - DNA, 25 bp, Homo sapien
ttgagagagtcaatattaacaacaa

SEQ ID NO: 740931 - DNA, 25 bp, Homo sapien
tgagagagtcaatattaacaacaac

SEQ ID NO: 740932 - DNA, 25 bp, Homo sapien
taaaagatactccacctcatagagg

SEQ ID NO: 740933 - DNA, 25 bp, Homo sapien
cctgtatgtgcgctgaaatggacca

SEQ ID NO: 740934 - DNA, 25 bp, Homo sapien
cctgggttggctgatcgtgcaatgc

SEQ ID NO: 740935 - DNA, 25 bp, Homo sapien
ttgtgttgcattaaggatctcgcgc

SEQ ID NO: 740936 - DNA, 25 bp, Homo sapien
cccagatttgtaagtaggtatgcac

SEQ ID NO: 740937 - DNA, 25 bp, Homo sapien
cactcaaactgctgaagataagcaa

SEQ ID NO: 740938 - DNA, 25 bp, Homo sapien
gcctctggtataatgttaggtgaga

SEQ ID NO: 740939 - DNA, 25 bp, Homo sapien
ggctcctgagccatgtatagtataa

SEQ ID NO: 740940 - DNA, 25 bp, Homo sapien
tagaggttcatctaagcaatggctc

SEQ ID NO: 740941 - DNA, 25 bp, Homo sapien
ctagcatcataagcccagaagggac

SEQ ID NO: 740942 - DNA, 25 bp, Homo sapien
gaaggaatcaagtaacgagaaggca

SEQ ID NO: 740943 - DNA, 25 bp, Homo sapien
atttctagagaaggtgatttgccac

SEQ ID NO: 740944 - DNA, 25 bp, Homo sapien
ctttctttccccacataactcagac

SEQ ID NO: 740945 - DNA, 25 bp, Homo sapien
cccacataactcagacccttgttat

SEQ ID NO: 740946 - DNA, 25 bp, Homo sapien
ttatctctccagtccaccttacaca

SEQ ID NO: 740947 - DNA, 25 bp, Homo sapien
ataactcagacccttgttatctctc

SEQ ID NO: 740948 - DNA, 25 bp, Homo sapien
ttggaacagtctgagcaccaaatgg

SEQ ID NO: 740949 - DNA, 25 bp, Homo sapien
ctctgagttctgcaaagttgcagaa

SEQ ID NO: 740950 - DNA, 25 bp, Homo sapien
gaacagtctgagcaccaaatgggat

SEQ ID NO: 740951 - DNA, 25 bp, Homo sapien
tctgagcaccaaatgggatatcaga

SEQ ID NO: 740952 - DNA, 25 bp, Homo sapien
gcttctgaataaggatgggcctgtt

SEQ ID NO: 740953 - DNA, 25 bp, Homo sapien
gaagcggtatccagtcagccactga

SEQ ID NO: 740954 - DNA, 25 bp, Homo sapien
gctatttcttaaggccgacgtgcgc

SEQ ID NO: 740955 - DNA, 25 bp, Homo sapien
cgacgtgcgcctggaacaatagcaa

SEQ ID NO: 740956 - DNA, 25 bp, Homo sapien
caggattttcgaaccgcagcttatg

SEQ ID NO: 740957 - DNA, 25 bp, Homo sapien
cctgtgctgtcaggattttcgaacc

SEQ ID NO: 740958 - DNA, 25 bp, Homo sapien
tatgttaggcggcagatttgaggca

SEQ ID NO: 740959 - DNA, 25 bp, Homo sapien
ttcgaaccgcagcttatgttaggcg

SEQ ID NO: 740960 - DNA, 25 bp, Homo sapien
ctgccctgcttagacttccgaacca

SEQ ID NO: 740961 - DNA, 25 bp, Homo sapien
cagttcttggcgtttcctgccctgc

SEQ ID NO: 740962 - DNA, 25 bp, Homo sapien
gaaggctacggccagcagttcttgg

SEQ ID NO: 740963 - DNA, 25 bp, Homo sapien
gacttccgaaccacagcacactttt

SEQ ID NO: 740964 - DNA, 25 bp, Homo sapien
aacaggcaaagagtttgagaggggg

SEQ ID NO: 740965 - DNA, 25 bp, Homo sapien
caggcaaagagtttgagagggggcc

SEQ ID NO: 740966 - DNA, 25 bp, Homo sapien
gggccaaagaaagccgcctttgaca

SEQ ID NO: 740967 - DNA, 25 bp, Homo sapien
gcaaagagtttgagagggggccaaa

SEQ ID NO: 740968 - DNA, 25 bp, Homo sapien
gtggttgtcgttgtgtgtgagggca

SEQ ID NO: 740969 - DNA, 25 bp, Homo sapien
gcagcccttcgaaccagggaggaga

SEQ ID NO: 740970 - DNA, 25 bp, Homo sapien
tgagggcagcccttcgaaccaggga

SEQ ID NO: 740971 - DNA, 25 bp, Homo sapien
cttaaagttgtgtgtcttctcataa

SEQ ID NO: 740972 - DNA, 25 bp, Homo sapien
gcttctggatggcatctcctgtcat

SEQ ID NO: 740973 - DNA, 25 bp, Homo sapien
tctggatggcatctcctgtcattat

SEQ ID NO: 740974 - DNA, 25 bp, Homo sapien
gcacaaataaaagcttctggatggc

SEQ ID NO: 740975 - DNA, 25 bp, Homo sapien
ccggagcacaaataaaagcttctgg

SEQ ID NO: 740976 - DNA, 25 bp, Homo sapien
gagaaacgctcctgtctggcttgtg

SEQ ID NO: 740977 - DNA, 25 bp, Homo sapien
gtactcctcttgaacagcttctcta

SEQ ID NO: 740978 - DNA, 25 bp, Homo sapien
gatgtctgtttaaaacatggaagag

SEQ ID NO: 740979 - DNA, 25 bp, Homo sapien
tcctgtctggcttgtgtactcctct

SEQ ID NO: 740980 - DNA, 25 bp, Homo sapien
ccagtattggctacaggatggaata

SEQ ID NO: 740981 - DNA, 25 bp, Homo sapien
taaaccagtattggctacaggatgg

SEQ ID NO: 740982 - DNA, 25 bp, Homo sapien
gctacaggatggaatacattcaagg

SEQ ID NO: 740983 - DNA, 25 bp, Homo sapien
gggtataaaccagtattggctacag

SEQ ID NO: 740984 - DNA, 25 bp, Homo sapien
tatactaggtctcacacattacctg

SEQ ID NO: 740985 - DNA, 25 bp, Homo sapien
tttctatcagagcaatgaagcactg

SEQ ID NO: 740986 - DNA, 25 bp, Homo sapien
aatcagcagttatgcctggaccaag

SEQ ID NO: 740987 - DNA, 25 bp, Homo sapien
cacatactctgaatatgaaccagct

SEQ ID NO: 740988 - DNA, 25 bp, Homo sapien
cacttagaggcctaccaagattgaa

SEQ ID NO: 740989 - DNA, 25 bp, Homo sapien
agtaaagtatcctatctaaagttgg

SEQ ID NO: 740990 - DNA, 25 bp, Homo sapien
tgcagtactaaaagagttcctcagt

SEQ ID NO: 740991 - DNA, 25 bp, Homo sapien
tttctaaattcagcaatcatacatt

SEQ ID NO: 740992 - DNA, 25 bp, Homo sapien
caaactgcctattatatagttcctg

SEQ ID NO: 740993 - DNA, 25 bp, Homo sapien
aaactgcctattatatagttcctgc

SEQ ID NO: 740994 - DNA, 25 bp, Homo sapien
ttctagggaatgaccctaagaaatg

SEQ ID NO: 740995 - DNA, 25 bp, Homo sapien
actgcctattatatagttcctgctt

SEQ ID NO: 740996 - DNA, 25 bp, Homo sapien
ccccacatgaaattggcacaatatt

SEQ ID NO: 740997 - DNA, 25 bp, Homo sapien
ccttgggcgatgagcccccacatga

SEQ ID NO: 740998 - DNA, 25 bp, Homo sapien
cagtgtgggcctcggaacgtgtgga

SEQ ID NO: 740999 - DNA, 25 bp, Homo sapien
ctgagcaccggaccccttgggcgat

SEQ ID NO: 741000 - DNA, 25 bp, Homo sapien
tgtgaggtcacaacagtacactttc

SEQ ID NO: 741001 - DNA, 25 bp, Homo sapien
cactgtttgtgtacgttcaatccac

SEQ ID NO: 741002 - DNA, 25 bp, Homo sapien
tgtctaccaccatgggtctctgagt

SEQ ID NO: 741003 - DNA, 25 bp, Homo sapien
cctcttgagatcaggttggcagtca

SEQ ID NO: 741004 - DNA, 25 bp, Homo sapien
gagactctgtaaaggccttccgatt

SEQ ID NO: 741005 - DNA, 25 bp, Homo sapien
gccattttgacatcttcaatgtgtt

SEQ ID NO: 741006 - DNA, 25 bp, Homo sapien
aatgtgttcagtgaacccagagact

SEQ ID NO: 741007 - DNA, 25 bp, Homo sapien
gtcaaatgccattttgacatcttca

SEQ ID NO: 741008 - DNA, 25 bp, Homo sapien
atgggtaagtctctgaaatacagtt

SEQ ID NO: 741009 - DNA, 25 bp, Homo sapien
tatcatatgtgatgacagggatggg

SEQ ID NO: 741010 - DNA, 25 bp, Homo sapien
cagtttaagggctccagtgatgatg

SEQ ID NO: 741011 - DNA, 25 bp, Homo sapien
tagacattggcagatatatcggcct

SEQ ID NO: 741012 - DNA, 25 bp, Homo sapien
tgtgccctcacttgacaagacaggc

SEQ ID NO: 741013 - DNA, 25 bp, Homo sapien
caatgtggacagaactgcctgacac

SEQ ID NO: 741014 - DNA, 25 bp, Homo sapien
tcccagcatacaaggaacaatgtgg

SEQ ID NO: 741015 - DNA, 25 bp, Homo sapien
aataggcctgactgtgttggttccc

SEQ ID NO: 741016 - DNA, 25 bp, Homo sapien
gggtttcatagtgggcaggaggcag

SEQ ID NO: 741017 - DNA, 25 bp, Homo sapien
taccggagggtttcatagtgggcag

SEQ ID NO: 741018 - DNA, 25 bp, Homo sapien
agcatcagcacttcatggacggctt

SEQ ID NO: 741019 - DNA, 25 bp, Homo sapien
gcacttcatggacggcttccagcct

SEQ ID NO: 741020 - DNA, 25 bp, Homo sapien
taaccgctctaggagcagagcaggc

SEQ ID NO: 741021 - DNA, 25 bp, Homo sapien
catagggatgatacactgaaagtgc

SEQ ID NO: 741022 - DNA, 25 bp, Homo sapien
cagtggcgcccctttcatagggatg

SEQ ID NO: 741023 - DNA, 25 bp, Homo sapien
caggctttgtgcacgagacatgagc

SEQ ID NO: 741024 - DNA, 25 bp, Homo sapien
ttttggtaccgcatatcatgcaggg

SEQ ID NO: 741025 - DNA, 25 bp, Homo sapien
tggtaccgcatatcatgcagggtgg

SEQ ID NO: 741026 - DNA, 25 bp, Homo sapien
tcagcttttggtaccgcatatcatg

SEQ ID NO: 741027 - DNA, 25 bp, Homo sapien
gtaccgcatatcatgcagggtggtc

SEQ ID NO: 741028 - DNA, 25 bp, Homo sapien
acagatgaattcagagggcttggcc

SEQ ID NO: 741029 - DNA, 25 bp, Homo sapien
caatgatgctccacgtaaaatagtc

SEQ ID NO: 741030 - DNA, 25 bp, Homo sapien
cagggtaataaccaatgcactgcat

SEQ ID NO: 741031 - DNA, 25 bp, Homo sapien
tctcacgtggaggtggcgcatgtct

SEQ ID NO: 741032 - DNA, 25 bp, Homo sapien
tacaaagtattgttcacttcacaaa

SEQ ID NO: 741033 - DNA, 25 bp, Homo sapien
tccctgtgccaatggagtccatctg

SEQ ID NO: 741034 - DNA, 25 bp, Homo sapien
taatacatgtgatgctttgccttcc

SEQ ID NO: 741035 - DNA, 25 bp, Homo sapien
gggaagaggtcaaacctccctgtgc

SEQ ID NO: 741036 - DNA, 25 bp, Homo sapien
tatttccctgttgatattctgtctg

SEQ ID NO: 741037 - DNA, 25 bp, Homo sapien
cagcctgcgagatgcttttctagtt

SEQ ID NO: 741038 - DNA, 25 bp, Homo sapien
tctgtccagtgctcaaaatggtgta

SEQ ID NO: 741039 - DNA, 25 bp, Homo sapien
ggtctatggtgcagactgagttaaa

SEQ ID NO: 741040 - DNA, 25 bp, Homo sapien
ctggattctgttcctctgctactgc

SEQ ID NO: 741041 - DNA, 25 bp, Homo sapien
cctgataattccatgagaactaact

SEQ ID NO: 741042 - DNA, 25 bp, Homo sapien
cctcttggtgtcaattctcaaaatt

SEQ ID NO: 741043 - DNA, 25 bp, Homo sapien
tgataattccatgagaactaactgt

SEQ ID NO: 741044 - DNA, 25 bp, Homo sapien
cacttgcagaaagggcctcttggtg

SEQ ID NO: 741045 - DNA, 25 bp, Homo sapien
ggcacttgtattttagcactgtgta

SEQ ID NO: 741046 - DNA, 25 bp, Homo sapien
tgtattttagcactgtgtactcctt

SEQ ID NO: 741047 - DNA, 25 bp, Homo sapien
gacatcttccatgtatggcacttgt

SEQ ID NO: 741048 - DNA, 25 bp, Homo sapien
ttgccctctctatccacatgttcaa

SEQ ID NO: 741049 - DNA, 25 bp, Homo sapien
ctagaggagaaatccttatccttga

SEQ ID NO: 741050 - DNA, 25 bp, Homo sapien
caaaggtttatctgaggccaaagct

SEQ ID NO: 741051 - DNA, 25 bp, Homo sapien
tgtctcagaagggatgtcatgagga

SEQ ID NO: 741052 - DNA, 25 bp, Homo sapien
catgttgggtctagaggagaaatcc

SEQ ID NO: 741053 - DNA, 25 bp, Homo sapien
aaagcagtgaaagacagccgggcaa

SEQ ID NO: 741054 - DNA, 25 bp, Homo sapien
tatgcaagcataactcccctgaagg

SEQ ID NO: 741055 - DNA, 25 bp, Homo sapien
ctgggtgtggagcaactgagcatct

SEQ ID NO: 741056 - DNA, 25 bp, Homo sapien
cataaagatattggcacagggcatt

SEQ ID NO: 741057 - DNA, 25 bp, Homo sapien
ccttgagaagaaacggcggagacct

SEQ ID NO: 741058 - DNA, 25 bp, Homo sapien
tatttgccaagtgattcgggaaacc

SEQ ID NO: 741059 - DNA, 25 bp, Homo sapien
cacaggtgcaggtaggaacttcgcg

SEQ ID NO: 741060 - DNA, 25 bp, Homo sapien
ggagaaaagctgtgcagtgccgctc

SEQ ID NO: 741061 - DNA, 25 bp, Homo sapien
tgtacaggtcggaattcccgcagcc

SEQ ID NO: 741062 - DNA, 25 bp, Homo sapien
tggcacctccaattgctgcgcgctg

SEQ ID NO: 741063 - DNA, 25 bp, Homo sapien
tagtagtgtttcattcgccggcgcg

SEQ ID NO: 741064 - DNA, 25 bp, Homo sapien
cgcggacttggagagatcaggcttc

SEQ ID NO: 741065 - DNA, 25 bp, Homo sapien
gaagggctttgtacgaattgcgcaa

SEQ ID NO: 741066 - DNA, 25 bp, Homo sapien
acaatcatcaactttgtgagcacgg

SEQ ID NO: 741067 - DNA, 25 bp, Homo sapien
agcgtccgtggttttcagcctctct

SEQ ID NO: 741068 - DNA, 25 bp, Homo sapien
aaaacggagtcctggagcgtccgtg

SEQ ID NO: 741069 - DNA, 25 bp, Homo sapien
tctgatcgcctacgggaggcggcgg

SEQ ID NO: 741070 - DNA, 25 bp, Homo sapien
cgctcctgggattggcgatcgcgct

SEQ ID NO: 741071 - DNA, 25 bp, Homo sapien
gaggaagtctgatcgcctacgggag

SEQ ID NO: 741072 - DNA, 25 bp, Homo sapien
atgccctgaggacacactcgggcag

SEQ ID NO: 741073 - DNA, 25 bp, Homo sapien
gcgaaaggccgcttctgagcactta

SEQ ID NO: 741074 - DNA, 25 bp, Homo sapien
tgccaccagcaacggcaggattcgc

SEQ ID NO: 741075 - DNA, 25 bp, Homo sapien
gtgcgggtacagcaagcgagactcc

SEQ ID NO: 741076 - DNA, 25 bp, Homo sapien
tgagcacttaggtgcgggtacagca

SEQ ID NO: 741077 - DNA, 25 bp, Homo sapien
tgtacgacgcaactcaactctggag

SEQ ID NO: 741078 - DNA, 25 bp, Homo sapien
cccaggagccttttcgatgagatac

SEQ ID NO: 741079 - DNA, 25 bp, Homo sapien
tagtccatggtcaaacagtcacgaa

SEQ ID NO: 741080 - DNA, 25 bp, Homo sapien
aaatatgcaccgagtctgtacgacg

SEQ ID NO: 741081 - DNA, 25 bp, Homo sapien
tggtctccggccgttcactccaccc

SEQ ID NO: 741082 - DNA, 25 bp, Homo sapien
ccttccccggcttgccacacgtggg

SEQ ID NO: 741083 - DNA, 25 bp, Homo sapien
cggcttgccacacgtgggctgcggg

SEQ ID NO: 741084 - DNA, 25 bp, Homo sapien
gctcccggcacccagatggaagggc

SEQ ID NO: 741085 - DNA, 25 bp, Homo sapien
tgccagcatcgccgctgtcggccat

SEQ ID NO: 741086 - DNA, 25 bp, Homo sapien
gttggtgagcgatttccaccagggg

SEQ ID NO: 741087 - DNA, 25 bp, Homo sapien
tgctgttggtgagcgatttccacca

SEQ ID NO: 741088 - DNA, 25 bp, Homo sapien
ctgttggtgagcgatttccaccagg

SEQ ID NO: 741089 - DNA, 25 bp, Homo sapien
cgcaggtggcgtgggctccccggga

SEQ ID NO: 741090 - DNA, 25 bp, Homo sapien
gcgcaggtggcgtgggctccccggg

SEQ ID NO: 741091 - DNA, 25 bp, Homo sapien
cccccactgcggcttccttgctttt

SEQ ID NO: 741092 - DNA, 25 bp, Homo sapien
tgggcgggaggcggcacccccactg

SEQ ID NO: 741093 - DNA, 25 bp, Homo sapien
tgctgccggatttgtccccgtataa

SEQ ID NO: 741094 - DNA, 25 bp, Homo sapien
agcgtggcgcgcactttcctcttct

SEQ ID NO: 741095 - DNA, 25 bp, Homo sapien
gatcttcaaattgcggcggctgctg

SEQ ID NO: 741096 - DNA, 25 bp, Homo sapien
tgcttgtcctcgtgggggtcaccag

SEQ ID NO: 741097 - DNA, 25 bp, Homo sapien
ggtataagtctacccctaaagtgca

SEQ ID NO: 741098 - DNA, 25 bp, Homo sapien
tccacagagtcctaaataacagcca

SEQ ID NO: 741099 - DNA, 25 bp, Homo sapien
gccagggccccagaatagctttttg

SEQ ID NO: 741100 - DNA, 25 bp, Homo sapien
tttggtggaatgagacaacgcgtaa

SEQ ID NO: 741101 - DNA, 25 bp, Homo sapien
cataaatcccagcaagacacgtcgt

SEQ ID NO: 741102 - DNA, 25 bp, Homo sapien
tgtaattacaaacctcaatggcaga

SEQ ID NO: 741103 - DNA, 25 bp, Homo sapien
caattgtagatttggatgggatcca

SEQ ID NO: 741104 - DNA, 25 bp, Homo sapien
gacacgtcgtcaaattctctcatct

SEQ ID NO: 741105 - DNA, 25 bp, Homo sapien
caggctgctgactaaggggtgatct

SEQ ID NO: 741106 - DNA, 25 bp, Homo sapien
aaatctgtgcctaggttcacaagcc

SEQ ID NO: 741107 - DNA, 25 bp, Homo sapien
tctgtggctacagccttggactttt

SEQ ID NO: 741108 - DNA, 25 bp, Homo sapien
gcttcccatgggtcctaaatctgtg

SEQ ID NO: 741109 - DNA, 25 bp, Homo sapien
agaccctgcattggcgagtggcccg

SEQ ID NO: 741110 - DNA, 25 bp, Homo sapien
ttccaagtgggtgcttgaggtggca

SEQ ID NO: 741111 - DNA, 25 bp, Homo sapien
caagtttcgggtatctgcctgagcc

SEQ ID NO: 741112 - DNA, 25 bp, Homo sapien
gatgtgacagcagaagcattccaag

SEQ ID NO: 741113 - DNA, 25 bp, Homo sapien
cagggatcgctaagcatggctgctg

SEQ ID NO: 741114 - DNA, 25 bp, Homo sapien
tgctgatgtagtaaacatgactgaa

SEQ ID NO: 741115 - DNA, 25 bp, Homo sapien
gcatggctgctgatgtagtaaacat

SEQ ID NO: 741116 - DNA, 25 bp, Homo sapien
ccccagggatcgctaagcatggctg

SEQ ID NO: 741117 - DNA, 25 bp, Homo sapien
taccttcggtggtcttgcagctgaa

SEQ ID NO: 741118 - DNA, 25 bp, Homo sapien
cttcggtggtcttgcagctgaacat

SEQ ID NO: 741119 - DNA, 25 bp, Homo sapien
cagttggttaccttcggtggtcttg

SEQ ID NO: 741120 - DNA, 25 bp, Homo sapien
tggttaccttcggtggtcttgcagc

SEQ ID NO: 741121 - DNA, 25 bp, Homo sapien
taccatcttcataagcacttccagt

SEQ ID NO: 741122 - DNA, 25 bp, Homo sapien
ctcataccatcttcataagcacttc

SEQ ID NO: 741123 - DNA, 25 bp, Homo sapien
ccatcttcataagcacttccagtta

SEQ ID NO: 741124 - DNA, 25 bp, Homo sapien
tcttcataagcacttccagttattt

SEQ ID NO: 741125 - DNA, 25 bp, Homo sapien
ctaggtctgaaggtctgaaggtttg

SEQ ID NO: 741126 - DNA, 25 bp, Homo sapien
aggtctgaaggtttgggaagggcat

SEQ ID NO: 741127 - DNA, 25 bp, Homo sapien
ctgaaggtttgggaagggcatagag

SEQ ID NO: 741128 - DNA, 25 bp, Homo sapien
gaaggtttgggaagggcatagagac

SEQ ID NO: 741129 - DNA, 25 bp, Homo sapien
gccccaggagcggtctcactaggat

SEQ ID NO: 741130 - DNA, 25 bp, Homo sapien
tctcactaggatgtgagctaggatg

SEQ ID NO: 741131 - DNA, 25 bp, Homo sapien
gagcggtctcactaggatgtgagct

SEQ ID NO: 741132 - DNA, 25 bp, Homo sapien
ccaggagcggtctcactaggatgtg

SEQ ID NO: 741133 - DNA, 25 bp, Homo sapien
caacatgacgtgtggtttgtagttt

SEQ ID NO: 741134 - DNA, 25 bp, Homo sapien
tctttcccctgtgttagcatgggtc

SEQ ID NO: 741135 - DNA, 25 bp, Homo sapien
acttctttcccctgtgttagcatgg

SEQ ID NO: 741136 - DNA, 25 bp, Homo sapien
tttcatggacaccaacatgacgtgt

SEQ ID NO: 741137 - DNA, 25 bp, Homo sapien
gcccagtcattttgggatgaataat

SEQ ID NO: 741138 - DNA, 25 bp, Homo sapien
tgtggattccactccaattggctta

SEQ ID NO: 741139 - DNA, 25 bp, Homo sapien
cagtcattttgggatgaataattgg

SEQ ID NO: 741140 - DNA, 25 bp, Homo sapien
tcattttgggatgaataattggcac

SEQ ID NO: 741141 - DNA, 25 bp, Homo sapien
ggtgaccaggtggatgaacccatct

SEQ ID NO: 741142 - DNA, 25 bp, Homo sapien
cagctgctgatgcaccaggtgacca

SEQ ID NO: 741143 - DNA, 25 bp, Homo sapien
acatggacacttagcaatcgttgcc

SEQ ID NO: 741144 - DNA, 25 bp, Homo sapien
ggagggtttaccaaagagttgctca

SEQ ID NO: 741145 - DNA, 25 bp, Homo sapien
catgctttccaaaatgattcatgaa

SEQ ID NO: 741146 - DNA, 25 bp, Homo sapien
aaaatgattcatgaaagcctttcat

SEQ ID NO: 741147 - DNA, 25 bp, Homo sapien
gcatgctttccaaaatgattcatga

SEQ ID NO: 741148 - DNA, 25 bp, Homo sapien
tccaaaatgattcatgaaagccttt

SEQ ID NO: 741149 - DNA, 25 bp, Homo sapien
cttgtgccattgatagcatgtccat

SEQ ID NO: 741150 - DNA, 25 bp, Homo sapien
tttctggcctctttagcagtgcctg

SEQ ID NO: 741151 - DNA, 25 bp, Homo sapien
gcctggattgagcttggttgagcca

SEQ ID NO: 741152 - DNA, 25 bp, Homo sapien
catgtccattggcatcgtttctggc

SEQ ID NO: 741153 - DNA, 25 bp, Homo sapien
cttgatctcagccacgtcaggtttg

SEQ ID NO: 741154 - DNA, 25 bp, Homo sapien
cgtcaggtttgtcaggcatagagga

SEQ ID NO: 741155 - DNA, 25 bp, Homo sapien
tcaatttcaacttactgaatttctt

SEQ ID NO: 741156 - DNA, 25 bp, Homo sapien
tcagccacgtcaggtttgtcaggca

SEQ ID NO: 741157 - DNA, 25 bp, Homo sapien
tggccgatgatctcggactcagtca

SEQ ID NO: 741158 - DNA, 25 bp, Homo sapien
catttgctgtggtgccagtgattcc

SEQ ID NO: 741159 - DNA, 25 bp, Homo sapien
gtgattcccagataccagctacttg

SEQ ID NO: 741160 - DNA, 25 bp, Homo sapien
gatcttggatcttatttgcactagc

SEQ ID NO: 741161 - DNA, 25 bp, Homo sapien
tttagtgcaccttccagtatggcag

SEQ ID NO: 741162 - DNA, 25 bp, Homo sapien
tgcaggtaaggttctggatgcaaat

SEQ ID NO: 741163 - DNA, 25 bp, Homo sapien
gaaattggaaagctttacaacacat

SEQ ID NO: 741164 - DNA, 25 bp, Homo sapien
gatgcaaattaggtcctgacaatga

SEQ ID NO: 741165 - DNA, 25 bp, Homo sapien
gtcataggtgatggacacttccaca

SEQ ID NO: 741166 - DNA, 25 bp, Homo sapien
aaattctgaatatccaatgtaaggt

SEQ ID NO: 741167 - DNA, 25 bp, Homo sapien
agtcataggtgatggacacttccac

SEQ ID NO: 741168 - DNA, 25 bp, Homo sapien
caatgtaaggtatacaagaaaccgt

SEQ ID NO: 741169 - DNA, 25 bp, Homo sapien
agctcctctgtctggccataccaag

SEQ ID NO: 741170 - DNA, 25 bp, Homo sapien
ttttgagctctagccatctctcggt

SEQ ID NO: 741171 - DNA, 25 bp, Homo sapien
gacgtgctcagtggatggtacccaa

SEQ ID NO: 741172 - DNA, 25 bp, Homo sapien
aagggaataactagtgcaagctgac

SEQ ID NO: 741173 - DNA, 25 bp, Homo sapien
taatgaactgtctatctgggatacc

SEQ ID NO: 741174 - DNA, 25 bp, Homo sapien
tgcattgtgctctgtagtggtgact

SEQ ID NO: 741175 - DNA, 25 bp, Homo sapien
gcaaggtccctgcttaaagacagtt

SEQ ID NO: 741176 - DNA, 25 bp, Homo sapien
tatatggtgctaccctggatctgta

SEQ ID NO: 741177 - DNA, 25 bp, Homo sapien
tctagcttgttagagggtgggctct

SEQ ID NO: 741178 - DNA, 25 bp, Homo sapien
gcatgcggttgaagccgttcacacg

SEQ ID NO: 741179 - DNA, 25 bp, Homo sapien
cctcgcagcctgaatgacttgtacc

SEQ ID NO: 741180 - DNA, 25 bp, Homo sapien
tctcatagtccctgttccggtcaat

SEQ ID NO: 741181 - DNA, 25 bp, Homo sapien
tggtgcagcccagcttgaaatggct

SEQ ID NO: 741182 - DNA, 25 bp, Homo sapien
tggcaggttccctccgcctagggtg

SEQ ID NO: 741183 - DNA, 25 bp, Homo sapien
cggtctcagattgcggacctccgca

SEQ ID NO: 741184 - DNA, 25 bp, Homo sapien
acgtccagctgtaagccatttcgcg

SEQ ID NO: 741185 - DNA, 25 bp, Homo sapien
gaaagctgcaaaggcagccccaact

SEQ ID NO: 741186 - DNA, 25 bp, Homo sapien
ctttcctcaccaatgccgagagtgg

SEQ ID NO: 741187 - DNA, 25 bp, Homo sapien
gagctgcaccaggaaattatggatc

SEQ ID NO: 741188 - DNA, 25 bp, Homo sapien
accaatgccgagagtggtcctgctg

SEQ ID NO: 741189 - DNA, 25 bp, Homo sapien
gtcctgctggagaacgcacacgcct

SEQ ID NO: 741190 - DNA, 25 bp, Homo sapien
atactgctcagaagatttacttgtt

SEQ ID NO: 741191 - DNA, 25 bp, Homo sapien
ctcaaccaggcttatccagatcttt

SEQ ID NO: 741192 - DNA, 25 bp, Homo sapien
caatgtaaaattgccacaaagacgg

SEQ ID NO: 741193 - DNA, 25 bp, Homo sapien
ggatattcagtaagcctgtcattca

SEQ ID NO: 741194 - DNA, 25 bp, Homo sapien
tcagtaagcctgtcattcataatca

SEQ ID NO: 741195 - DNA, 25 bp, Homo sapien
tattcagtaagcctgtcattcataa

SEQ ID NO: 741196 - DNA, 25 bp, Homo sapien
aagaggatattcagtaagcctgtca

SEQ ID NO: 741197 - DNA, 25 bp, Homo sapien
gctgcttcccggcccagcccgcgcc

SEQ ID NO: 741198 - DNA, 25 bp, Homo sapien
ggcccagcccgcgccggtctccatc

SEQ ID NO: 741199 - DNA, 25 bp, Homo sapien
gccgggggctgcttcccggcccagc

SEQ ID NO: 741200 - DNA, 25 bp, Homo sapien
tgcttcccggcccagcccgcgccgg

SEQ ID NO: 741201 - DNA, 25 bp, Homo sapien
tggtgatcggctccttaccagctca

SEQ ID NO: 741202 - DNA, 25 bp, Homo sapien
ggtgatcggctccttaccagctcac

SEQ ID NO: 741203 - DNA, 25 bp, Homo sapien
ctggtgatcggctccttaccagctc

SEQ ID NO: 741204 - DNA, 25 bp, Homo sapien
cctggtgatcggctccttaccagct

SEQ ID NO: 741205 - DNA, 25 bp, Homo sapien
caatgggaccgggaccagagccggg

SEQ ID NO: 741206 - DNA, 25 bp, Homo sapien
cagcggagtggccaatgggaccggg

SEQ ID NO: 741207 - DNA, 25 bp, Homo sapien
cttccagtagcagcggagtggccaa

SEQ ID NO: 741208 - DNA, 25 bp, Homo sapien
ggagtggccaatgggaccgggacca

SEQ ID NO: 741209 - DNA, 25 bp, Homo sapien
ggcgcaccagaaccgaaaccagcgg

SEQ ID NO: 741210 - DNA, 25 bp, Homo sapien
ccttcttggctctcggggcacagcg

SEQ ID NO: 741211 - DNA, 25 bp, Homo sapien
acatgagcgccaagcagagcggcct

SEQ ID NO: 741212 - DNA, 25 bp, Homo sapien
tagctcccgcgttcgctcctgcctt

SEQ ID NO: 741213 - DNA, 25 bp, Homo sapien
gagactaggcggtgcggaggcccgg

SEQ ID NO: 741214 - DNA, 25 bp, Homo sapien
ggagactaggcggtgcggaggcccg

SEQ ID NO: 741215 - DNA, 25 bp, Homo sapien
ccggagactaggcggtgcggaggcc

SEQ ID NO: 741216 - DNA, 25 bp, Homo sapien
agactaggcggtgcggaggcccggg

SEQ ID NO: 741217 - DNA, 25 bp, Homo sapien
tctcgcagggggagggaagcgacgg

SEQ ID NO: 741218 - DNA, 25 bp, Homo sapien
cccctgtgaaattaatctcgcaggg

SEQ ID NO: 741219 - DNA, 25 bp, Homo sapien
aatcccctgtgaaattaatctcgca

SEQ ID NO: 741220 - DNA, 25 bp, Homo sapien
tcccattcttcgtcctcccctcgcg

SEQ ID NO: 741221 - DNA, 25 bp, Homo sapien
gtattcccatggatgtgcgatacca

SEQ ID NO: 741222 - DNA, 25 bp, Homo sapien
tcagtattcccatggatgtgcgata

SEQ ID NO: 741223 - DNA, 25 bp, Homo sapien
gatgtgcgataccaggaggctatga

SEQ ID NO: 741224 - DNA, 25 bp, Homo sapien
attcagtattcccatggatgtgcga

SEQ ID NO: 741225 - DNA, 25 bp, Homo sapien
aatgacagcatttttggaagaaaca

SEQ ID NO: 741226 - DNA, 25 bp, Homo sapien
tgacagcatttttggaagaaacatg

SEQ ID NO: 741227 - DNA, 25 bp, Homo sapien
gacagcatttttggaagaaacatgc

SEQ ID NO: 741228 - DNA, 25 bp, Homo sapien
aaatgacagcatttttggaagaaac

SEQ ID NO: 741229 - DNA, 25 bp, Homo sapien
tatatattgaagctaccccaaaaaa

SEQ ID NO: 741230 - DNA, 25 bp, Homo sapien
aatttatacattagctattacaaat

SEQ ID NO: 741231 - DNA, 25 bp, Homo sapien
tttatatattgaagctaccccaaaa

SEQ ID NO: 741232 - DNA, 25 bp, Homo sapien
atattgaagctaccccaaaaaacat

SEQ ID NO: 741233 - DNA, 25 bp, Homo sapien
tctcaacaagagtctcaagggacag

SEQ ID NO: 741234 - DNA, 25 bp, Homo sapien
tcctggaacgctgttggatgactcc

SEQ ID NO: 741235 - DNA, 25 bp, Homo sapien
caagggacagcaccatatttgaatt

SEQ ID NO: 741236 - DNA, 25 bp, Homo sapien
ccaagagttgaatgttgttacagac

SEQ ID NO: 741237 - DNA, 25 bp, Homo sapien
gcagaaggatggtaggccagatata

SEQ ID NO: 741238 - DNA, 25 bp, Homo sapien
cagcagaaggatggtaggccagata

SEQ ID NO: 741239 - DNA, 25 bp, Homo sapien
agaaggatggtaggccagatatatc

SEQ ID NO: 741240 - DNA, 25 bp, Homo sapien
cagaaggatggtaggccagatatat

SEQ ID NO: 741241 - DNA, 25 bp, Homo sapien
taaagggaacgtccatgtagtcacc

SEQ ID NO: 741242 - DNA, 25 bp, Homo sapien
cttgcaagcctccaagataagaatc

SEQ ID NO: 741243 - DNA, 25 bp, Homo sapien
tatactcagtcttcacttgcaagcc

SEQ ID NO: 741244 - DNA, 25 bp, Homo sapien
caacatacaaatggaagaatgcagt

SEQ ID NO: 741245 - DNA, 25 bp, Homo sapien
aataagacctcctagttgagtccca

SEQ ID NO: 741246 - DNA, 25 bp, Homo sapien
tccatggttgaaaaagcagcacagt

SEQ ID NO: 741247 - DNA, 25 bp, Homo sapien
tgtaataagacctcctagttgagtc

SEQ ID NO: 741248 - DNA, 25 bp, Homo sapien
gtactgtaataagacctcctagttg

SEQ ID NO: 741249 - DNA, 25 bp, Homo sapien
ggcagtgtcttaaccgtgtccctgc

SEQ ID NO: 741250 - DNA, 25 bp, Homo sapien
gcctgaggcctctttcattattgtt

SEQ ID NO: 741251 - DNA, 25 bp, Homo sapien
tcattattgttaaggggagtgcaat

SEQ ID NO: 741252 - DNA, 25 bp, Homo sapien
accgtgtccctgctgtcaggcctga

SEQ ID NO: 741253 - DNA, 25 bp, Homo sapien
gtggtgtccacatcacacgagtgac

SEQ ID NO: 741254 - DNA, 25 bp, Homo sapien
tggataggaaaaactttcacggaga

SEQ ID NO: 741255 - DNA, 25 bp, Homo sapien
actttcacggagaggtggtgtccac

SEQ ID NO: 741256 - DNA, 25 bp, Homo sapien
ctgaagtacaagaaatggataggaa

SEQ ID NO: 741257 - DNA, 25 bp, Homo sapien
gccagggaagcataaaagcaacatt

SEQ ID NO: 741258 - DNA, 25 bp, Homo sapien
caacattggaaagacagagtgcaat

SEQ ID NO: 741259 - DNA, 25 bp, Homo sapien
agtataaactgagcaaattgccagg

SEQ ID NO: 741260 - DNA, 25 bp, Homo sapien
taaactgagcaaattgccagggaag

SEQ ID NO: 741261 - DNA, 25 bp, Homo sapien
aatgtatcccacaacatacatggga

SEQ ID NO: 741262 - DNA, 25 bp, Homo sapien
tgggagcacaggtgtatattaaagt

SEQ ID NO: 741263 - DNA, 25 bp, Homo sapien
gaagtcaaatttgggagcacaggtg

SEQ ID NO: 741264 - DNA, 25 bp, Homo sapien
tttttccatgaagtcaaatttggga

SEQ ID NO: 741265 - DNA, 25 bp, Homo sapien
aattctgtataccttaagattctgg

SEQ ID NO: 741266 - DNA, 25 bp, Homo sapien
actacaggcatgcaccaacatgcct

SEQ ID NO: 741267 - DNA, 25 bp, Homo sapien
ctgtctcagcctcctactcaggctg

SEQ ID NO: 741268 - DNA, 25 bp, Homo sapien
gtctcagcctcctactcaggctggg

SEQ ID NO: 741269 - DNA, 25 bp, Homo sapien
caacatgcctggctaatttttgtat

SEQ ID NO: 741270 - DNA, 25 bp, Homo sapien
tgtaacaagcttgtacatgtgcccc

SEQ ID NO: 741271 - DNA, 25 bp, Homo sapien
gagatcatatttccctcagaaggaa

SEQ ID NO: 741272 - DNA, 25 bp, Homo sapien
aggaaacaatcagcatggagtatgg

SEQ ID NO: 741273 - DNA, 25 bp, Homo sapien
gactgatatgatacattttgctggc

SEQ ID NO: 741274 - DNA, 25 bp, Homo sapien
cacaatgggatgaagtgtagacagc

SEQ ID NO: 741275 - DNA, 25 bp, Homo sapien
acaatgggatgaagtgtagacagct

SEQ ID NO: 741276 - DNA, 25 bp, Homo sapien
caatgggatgaagtgtagacagctt

SEQ ID NO: 741277 - DNA, 25 bp, Homo sapien
tcttgatgaaatactcatcggccgc

SEQ ID NO: 741278 - DNA, 25 bp, Homo sapien
gatgaaatactcatcggccgccaac

SEQ ID NO: 741279 - DNA, 25 bp, Homo sapien
gtcttgatgaaatactcatcggccg

SEQ ID NO: 741280 - DNA, 25 bp, Homo sapien
ttgatgaaatactcatcggccgcca

SEQ ID NO: 741281 - DNA, 25 bp, Homo sapien
taattcacatgtaactccaacaatt

SEQ ID NO: 741282 - DNA, 25 bp, Homo sapien
ataataattcacatgtaactccaac

SEQ ID NO: 741283 - DNA, 25 bp, Homo sapien
aataattcacatgtaactccaacaa

SEQ ID NO: 741284 - DNA, 25 bp, Homo sapien
aattcacatgtaactccaacaattt

SEQ ID NO: 741285 - DNA, 25 bp, Homo sapien
catcttcgagcaggatgctacgtaa

SEQ ID NO: 741286 - DNA, 25 bp, Homo sapien
gaaatactggcatcttcgagcctgg

SEQ ID NO: 741287 - DNA, 25 bp, Homo sapien
ttcgagcctggcatcttcgagcagg

SEQ ID NO: 741288 - DNA, 25 bp, Homo sapien
gcatcttcgagcctggcatcttcga

SEQ ID NO: 741289 - DNA, 25 bp, Homo sapien
taagtgtctgttattaaagcttgtg

SEQ ID NO: 741290 - DNA, 25 bp, Homo sapien
gctgacattcaatgaacagaaaagt

SEQ ID NO: 741291 - DNA, 25 bp, Homo sapien
gcttaataaggctgacattcaatga

SEQ ID NO: 741292 - DNA, 25 bp, Homo sapien
tgacaagcttaataaggctgacatt

SEQ ID NO: 741293 - DNA, 25 bp, Homo sapien
tatttggtccccaggaatgccagct

SEQ ID NO: 741294 - DNA, 25 bp, Homo sapien
acctttgccgctgggtccacttggg

SEQ ID NO: 741295 - DNA, 25 bp, Homo sapien
agcaacacatactcctgcaattggg

SEQ ID NO: 741296 - DNA, 25 bp, Homo sapien
ggactttgcattcctctgccctaag

SEQ ID NO: 741297 - DNA, 25 bp, Homo sapien
gaggcagagttcctcctttgggcca

SEQ ID NO: 741298 - DNA, 25 bp, Homo sapien
cttcaaggttgttctcgtatttgca

SEQ ID NO: 741299 - DNA, 25 bp, Homo sapien
ccgtgtggcccgcaatattgcctct

SEQ ID NO: 741300 - DNA, 25 bp, Homo sapien
ataagtgtgccgtgtggcccgcaat

SEQ ID NO: 741301 - DNA, 25 bp, Homo sapien
gcaatggcctgttgtgtaaacttag

SEQ ID NO: 741302 - DNA, 25 bp, Homo sapien
tcaggcaatggcctgttgtgtaaac

SEQ ID NO: 741303 - DNA, 25 bp, Homo sapien
tccattccattccagatataagtag

SEQ ID NO: 741304 - DNA, 25 bp, Homo sapien
cagatataagtagggaataaagaac

SEQ ID NO: 741305 - DNA, 25 bp, Homo sapien
agaatgatgacttcctgtctgcaca

SEQ ID NO: 741306 - DNA, 25 bp, Homo sapien
gtggcagaatgatgacttcctgtct

SEQ ID NO: 741307 - DNA, 25 bp, Homo sapien
ctcttctctgtagtagaccctcctt

SEQ ID NO: 741308 - DNA, 25 bp, Homo sapien
tctctgtagtagaccctccttgatc

SEQ ID NO: 741309 - DNA, 25 bp, Homo sapien
atgttcttctaggatggggatgtgg

SEQ ID NO: 741310 - DNA, 25 bp, Homo sapien
tggggatgtggttgtggcattaggc

SEQ ID NO: 741311 - DNA, 25 bp, Homo sapien
gatggggatgtggttgtggcattag

SEQ ID NO: 741312 - DNA, 25 bp, Homo sapien
ttcttctaggatggggatgtggttg

SEQ ID NO: 741313 - DNA, 25 bp, Homo sapien
tgcagggttaggaggagagtggggg

SEQ ID NO: 741314 - DNA, 25 bp, Homo sapien
tggccttgctcgctgccaggcgtgg

SEQ ID NO: 741315 - DNA, 25 bp, Homo sapien
ggccttgctcgctgccaggcgtggg

SEQ ID NO: 741316 - DNA, 25 bp, Homo sapien
gtggccttgctcgctgccaggcgtg

SEQ ID NO: 741317 - DNA, 25 bp, Homo sapien
ctgaggtggccttgctcgctgccag

SEQ ID NO: 741318 - DNA, 25 bp, Homo sapien
gattcagattttcgaaaggttccat

SEQ ID NO: 741319 - DNA, 25 bp, Homo sapien
accctgaacttttaaggagtctgtg

SEQ ID NO: 741320 - DNA, 25 bp, Homo sapien
gtgattgtgtgcacagaggccttcc

SEQ ID NO: 741321 - DNA, 25 bp, Homo sapien
tgtggatacttttaagtctagggtc

SEQ ID NO: 741322 - DNA, 25 bp, Homo sapien
tgctctaggcaagtttcaaggctct

SEQ ID NO: 741323 - DNA, 25 bp, Homo sapien
cagtttgaggtcagaacatgttcac

SEQ ID NO: 741324 - DNA, 25 bp, Homo sapien
tttaccaaggacttcaaatagtgct

SEQ ID NO: 741325 - DNA, 25 bp, Homo sapien
ggctccagaggccagtgtaaccaca

SEQ ID NO: 741326 - DNA, 25 bp, Homo sapien
aaccagtggtgtaaacaagagtagg

SEQ ID NO: 741327 - DNA, 25 bp, Homo sapien
aaaccagtggtgtaaacaagagtag

SEQ ID NO: 741328 - DNA, 25 bp, Homo sapien
agtggtgtaaacaagagtagggcat

SEQ ID NO: 741329 - DNA, 25 bp, Homo sapien
ccagtggtgtaaacaagagtagggc

SEQ ID NO: 741330 - DNA, 25 bp, Homo sapien
ggctggactggactcgagctccggc

SEQ ID NO: 741331 - DNA, 25 bp, Homo sapien
ggctccgtcccgcagcgcccgtgct

SEQ ID NO: 741332 - DNA, 25 bp, Homo sapien
gagctccggccgacgtctccgccgc

SEQ ID NO: 741333 - DNA, 25 bp, Homo sapien
ctggactggactcgagctccggccg

SEQ ID NO: 741334 - DNA, 25 bp, Homo sapien
tgtctcctgcttatgaatggtccca

SEQ ID NO: 741335 - DNA, 25 bp, Homo sapien
tcacggtgttgatgtctcctgctta

SEQ ID NO: 741336 - DNA, 25 bp, Homo sapien
aatggtcccaagagagtggcttctg

SEQ ID NO: 741337 - DNA, 25 bp, Homo sapien
actggcatgtgtcacggtgttgatg

SEQ ID NO: 741338 - DNA, 25 bp, Homo sapien
cagggcctgtggtcatgcagcaggg

SEQ ID NO: 741339 - DNA, 25 bp, Homo sapien
caccagggcctgtggtcatgcagca

SEQ ID NO: 741340 - DNA, 25 bp, Homo sapien
accagggcctgtggtcatgcagcag

SEQ ID NO: 741341 - DNA, 25 bp, Homo sapien
tcaccagggcctgtggtcatgcagc

SEQ ID NO: 741342 - DNA, 25 bp, Homo sapien
tgccaacactagctcatttttcact

SEQ ID NO: 741343 - DNA, 25 bp, Homo sapien
tgctgccaacactagctcatttttc

SEQ ID NO: 741344 - DNA, 25 bp, Homo sapien
accaaggaaacctgctgccaacact

SEQ ID NO: 741345 - DNA, 25 bp, Homo sapien
aacctgctgccaacactagctcatt

SEQ ID NO: 741346 - DNA, 25 bp, Homo sapien
ttatgtgagagtgcataggcaagcc

SEQ ID NO: 741347 - DNA, 25 bp, Homo sapien
ccttacagcctttatgtgagagtgc

SEQ ID NO: 741348 - DNA, 25 bp, Homo sapien
tttccaccccagatacccagtgatg

SEQ ID NO: 741349 - DNA, 25 bp, Homo sapien
agagtgcataggcaagcctgtgcac

SEQ ID NO: 741350 - DNA, 25 bp, Homo sapien
ccagtctcagcaccctcctgagggc

SEQ ID NO: 741351 - DNA, 25 bp, Homo sapien
tctcctggcacagaagcagaaggtg

SEQ ID NO: 741352 - DNA, 25 bp, Homo sapien
tccagtctcagcaccctcctgaggg

SEQ ID NO: 741353 - DNA, 25 bp, Homo sapien
gcagtctctcctggcacagaagcag

SEQ ID NO: 741354 - DNA, 25 bp, Homo sapien
tccaggtccactgcttgacaattgc

SEQ ID NO: 741355 - DNA, 25 bp, Homo sapien
cattgaacgtcataaagtccaccga

SEQ ID NO: 741356 - DNA, 25 bp, Homo sapien
gtgccaacagcaggaaagaacgaca

SEQ ID NO: 741357 - DNA, 25 bp, Homo sapien
ggcactgtcagtcacggaaattttg

SEQ ID NO: 741358 - DNA, 25 bp, Homo sapien
tgaaggtgttgaaagatccagtgat

SEQ ID NO: 741359 - DNA, 25 bp, Homo sapien
tctcatgaaggtgttgaaagatcca

SEQ ID NO: 741360 - DNA, 25 bp, Homo sapien
ctgtctcatgaaggtgttgaaagat

SEQ ID NO: 741361 - DNA, 25 bp, Homo sapien
aggtgttgaaagatccagtgatatt

SEQ ID NO: 741362 - DNA, 25 bp, Homo sapien
tcttttatcatatgagaaagtttag

SEQ ID NO: 741363 - DNA, 25 bp, Homo sapien
catatgagaaagtttagacatccgg

SEQ ID NO: 741364 - DNA, 25 bp, Homo sapien
gagaaagtttagacatccggaaaca

SEQ ID NO: 741365 - DNA, 25 bp, Homo sapien
agacatccggaaacaaccaagtctg

SEQ ID NO: 741366 - DNA, 25 bp, Homo sapien
tgcttcacttcagctgtagcttcag

SEQ ID NO: 741367 - DNA, 25 bp, Homo sapien
ctgcttcacttcagctgtagcttca

SEQ ID NO: 741368 - DNA, 25 bp, Homo sapien
ttcacttcagctgtagcttcagctg

SEQ ID NO: 741369 - DNA, 25 bp, Homo sapien
cttcagctgtagcttcagctgacat

SEQ ID NO: 741370 - DNA, 25 bp, Homo sapien
atcctccttgctattgggtcctggg

SEQ ID NO: 741371 - DNA, 25 bp, Homo sapien
ccttgctattgggtcctgggtggct

SEQ ID NO: 741372 - DNA, 25 bp, Homo sapien
ctccttgctattgggtcctgggtgg

SEQ ID NO: 741373 - DNA, 25 bp, Homo sapien
tcctccttgctattgggtcctgggt

SEQ ID NO: 741374 - DNA, 25 bp, Homo sapien
ttgaatgatcatcctgcttggtgcc

SEQ ID NO: 741375 - DNA, 25 bp, Homo sapien
tctcaggttttgaatgatcatcctg

SEQ ID NO: 741376 - DNA, 25 bp, Homo sapien
atccttgactgattccccacttgac

SEQ ID NO: 741377 - DNA, 25 bp, Homo sapien
ggagttgctcctgtgccctgtcatc

SEQ ID NO: 741378 - DNA, 25 bp, Homo sapien
cactgcggtcgttgatctgcgtgac

SEQ ID NO: 741379 - DNA, 25 bp, Homo sapien
ctggatatcagccaacagcgcactc

SEQ ID NO: 741380 - DNA, 25 bp, Homo sapien
ggatctgcccttcgcaagctggagg

SEQ ID NO: 741381 - DNA, 25 bp, Homo sapien
gcaggcgagttccttgctggatatc

SEQ ID NO: 741382 - DNA, 25 bp, Homo sapien
tcgcgcctcgtgtgtttgcagaacc

SEQ ID NO: 741383 - DNA, 25 bp, Homo sapien
tacaggaaagccaccagcaaacaga

SEQ ID NO: 741384 - DNA, 25 bp, Homo sapien
agcaaacagatctcccagggtggga

SEQ ID NO: 741385 - DNA, 25 bp, Homo sapien
gcctgctggtcgcaatacaggaaag

SEQ ID NO: 741386 - DNA, 25 bp, Homo sapien
agcgccatgcgcctcggaggtattg

SEQ ID NO: 741387 - DNA, 25 bp, Homo sapien
ctcggaggtattgcctagcctggga

SEQ ID NO: 741388 - DNA, 25 bp, Homo sapien
agaggcaggcgggataagcgggccg

SEQ ID NO: 741389 - DNA, 25 bp, Homo sapien
taagcgggccgctgatggttttgtt

SEQ ID NO: 741390 - DNA, 25 bp, Homo sapien
gcacaggggacggggggtgcaacca

SEQ ID NO: 741391 - DNA, 25 bp, Homo sapien
ggtggggacacaagcggagttttga

SEQ ID NO: 741392 - DNA, 25 bp, Homo sapien
gggacacaagcggagttttgatggg

SEQ ID NO: 741393 - DNA, 25 bp, Homo sapien
tggcgcacaggggacggggggtgca

SEQ ID NO: 741394 - DNA, 25 bp, Homo sapien
gaggctcctgcgcatcttgcgcagg

SEQ ID NO: 741395 - DNA, 25 bp, Homo sapien
agggagccagctgaggcttcactgc

SEQ ID NO: 741396 - DNA, 25 bp, Homo sapien
agggctggcgggctccgctttgagc

SEQ ID NO: 741397 - DNA, 25 bp, Homo sapien
ttgagccccggatacccacaaggtg

SEQ ID NO: 741398 - DNA, 25 bp, Homo sapien
ggagtttcactgctgctattaactc

SEQ ID NO: 741399 - DNA, 25 bp, Homo sapien
gtagcgggggtggagtttcactgct

SEQ ID NO: 741400 - DNA, 25 bp, Homo sapien
ggtagcgggggtggagtttcactgc

SEQ ID NO: 741401 - DNA, 25 bp, Homo sapien
aaggcctgcgcaccggccttctgcg

SEQ ID NO: 741402 - DNA, 25 bp, Homo sapien
gcaaggcctgcgcaccggccttctg

SEQ ID NO: 741403 - DNA, 25 bp, Homo sapien
gggcgggcaaggcctgcgcaccggc

SEQ ID NO: 741404 - DNA, 25 bp, Homo sapien
cgggcaaggcctgcgcaccggcctt

SEQ ID NO: 741405 - DNA, 25 bp, Homo sapien
tgtatggttcatctggcaacccaaa

SEQ ID NO: 741406 - DNA, 25 bp, Homo sapien
ccccatgttgggctaaagtagaaat

SEQ ID NO: 741407 - DNA, 25 bp, Homo sapien
tgggctcactactctggagcagatg

SEQ ID NO: 741408 - DNA, 25 bp, Homo sapien
gaagggcagatatgaatccccatcc

SEQ ID NO: 741409 - DNA, 25 bp, Homo sapien
tcctgttgggataagtagcatagcc

SEQ ID NO: 741410 - DNA, 25 bp, Homo sapien
ggagtcaacctgcttggcactgaat

SEQ ID NO: 741411 - DNA, 25 bp, Homo sapien
tggtgtactcagaaacacggatggg

SEQ ID NO: 741412 - DNA, 25 bp, Homo sapien
tgatacagcgagtaaaagggcaacc

SEQ ID NO: 741413 - DNA, 25 bp, Homo sapien
tggtaggtgatctcgcagggggtgc

SEQ ID NO: 741414 - DNA, 25 bp, Homo sapien
gctggaggtggatttagctttcccc

SEQ ID NO: 741415 - DNA, 25 bp, Homo sapien
aggtgatctcgcagggggtgctgga

SEQ ID NO: 741416 - DNA, 25 bp, Homo sapien
ggtaggtgatctcgcagggggtgct

SEQ ID NO: 741417 - DNA, 25 bp, Homo sapien
gcttccatttcgcagttgacctcca

SEQ ID NO: 741418 - DNA, 25 bp, Homo sapien
catttcgcagttgacctccaggctg

SEQ ID NO: 741419 - DNA, 25 bp, Homo sapien
caggctgctgcgtcggggtccaggc

SEQ ID NO: 741420 - DNA, 25 bp, Homo sapien
gcaggcttccatttcgcagttgacc

SEQ ID NO: 741421 - DNA, 25 bp, Homo sapien
tcaaccaataacaccgtaaggaagc

SEQ ID NO: 741422 - DNA, 25 bp, Homo sapien
caaccaataacaccgtaaggaagct

SEQ ID NO: 741423 - DNA, 25 bp, Homo sapien
atggtttatattcatccggaggggg

SEQ ID NO: 741424 - DNA, 25 bp, Homo sapien
gtcttccacagaatggaacgtgaat

SEQ ID NO: 741425 - DNA, 25 bp, Homo sapien
ggaacgtgaatttagactcgaagtc

SEQ ID NO: 741426 - DNA, 25 bp, Homo sapien
atcttgctggggtaaatcttctggc

SEQ ID NO: 741427 - DNA, 25 bp, Homo sapien
caggcccactttcccccgaccagag

SEQ ID NO: 741428 - DNA, 25 bp, Homo sapien
gcaggcccactttcccccgaccaga

SEQ ID NO: 741429 - DNA, 25 bp, Homo sapien
tttcccccgaccagagcacagggca

SEQ ID NO: 741430 - DNA, 25 bp, Homo sapien
ccactttcccccgaccagagcacag

SEQ ID NO: 741431 - DNA, 25 bp, Homo sapien
acagagagtagaagggtattgccag

SEQ ID NO: 741432 - DNA, 25 bp, Homo sapien
ggtacctagagcagtgaaattaata

SEQ ID NO: 741433 - DNA, 25 bp, Homo sapien
cctagagcagtgaaattaatagaga

SEQ ID NO: 741434 - DNA, 25 bp, Homo sapien
tacctagagcagtgaaattaataga

SEQ ID NO: 741435 - DNA, 25 bp, Homo sapien
tccagagagaacagggggtggggaa

SEQ ID NO: 741436 - DNA, 25 bp, Homo sapien
atgtcatcagagctctgcccgactg

SEQ ID NO: 741437 - DNA, 25 bp, Homo sapien
tgcttccgcttggagccagggacca

SEQ ID NO: 741438 - DNA, 25 bp, Homo sapien
ttctgcctttgatgtcatcagagct

SEQ ID NO: 741439 - DNA, 25 bp, Homo sapien
tctgcccgactgcttccgcttggag

SEQ ID NO: 741440 - DNA, 25 bp, Homo sapien
aagctgtttaggagaaagcataccc

SEQ ID NO: 741441 - DNA, 25 bp, Homo sapien
cctggttttacattcagagacatga

SEQ ID NO: 741442 - DNA, 25 bp, Homo sapien
ttcctggttttacattcagagacat

SEQ ID NO: 741443 - DNA, 25 bp, Homo sapien
ggagaaagcatacccttaccatttc

SEQ ID NO: 741444 - DNA, 25 bp, Homo sapien
ttcattctggcttgaaaaaaggtcc

SEQ ID NO: 741445 - DNA, 25 bp, Homo sapien
taattcggttcaagatgccctgggt

SEQ ID NO: 741446 - DNA, 25 bp, Homo sapien
ggtttaactgcaagtgactctgtag

SEQ ID NO: 741447 - DNA, 25 bp, Homo sapien
caggccatcataaccaaggaagaat

SEQ ID NO: 741448 - DNA, 25 bp, Homo sapien
tgaacctgtgatcgtctaagaatcg

SEQ ID NO: 741449 - DNA, 25 bp, Homo sapien
caataagaggaggtgcaacaatggc

SEQ ID NO: 741450 - DNA, 25 bp, Homo sapien
tcaagcctttaatgaatcccagagt

SEQ ID NO: 741451 - DNA, 25 bp, Homo sapien
cagaagcagcaataaccaatcagag

SEQ ID NO: 741452 - DNA, 25 bp, Homo sapien
attcaggccatagcccataggaatt

SEQ ID NO: 741453 - DNA, 25 bp, Homo sapien
gaaagggatgaacaagctccctcat

SEQ ID NO: 741454 - DNA, 25 bp, Homo sapien
gctctgccctcatggtttatcacct

SEQ ID NO: 741455 - DNA, 25 bp, Homo sapien
tcttgtgagggctcgctgtctgcta

SEQ ID NO: 741456 - DNA, 25 bp, Homo sapien
cacccattattaggagtaggatatt

SEQ ID NO: 741457 - DNA, 25 bp, Homo sapien
tggcctaacaaatggactctcctgg

SEQ ID NO: 741458 - DNA, 25 bp, Homo sapien
taagacacttaatttgtggcctaac

SEQ ID NO: 741459 - DNA, 25 bp, Homo sapien
tgatgttagtagagccacccctgct

SEQ ID NO: 741460 - DNA, 25 bp, Homo sapien
tataccaattaaccatccccaactc

SEQ ID NO: 741461 - DNA, 25 bp, Homo sapien
tatctttgggttacagacaatccag

SEQ ID NO: 741462 - DNA, 25 bp, Homo sapien
tacaggtatgcaatgagtgatcatc

SEQ ID NO: 741463 - DNA, 25 bp, Homo sapien
cactcccccgctagtttgtaaccat

SEQ ID NO: 741464 - DNA, 25 bp, Homo sapien
ccattgggcatgttcactgtagatt

SEQ ID NO: 741465 - DNA, 25 bp, Homo sapien
ttgaatagaagcgatgaaagcaggc

SEQ ID NO: 741466 - DNA, 25 bp, Homo sapien
tcattatgcaagtctttcacctgct

SEQ ID NO: 741467 - DNA, 25 bp, Homo sapien
tgcccaactttgctctggatagact

SEQ ID NO: 741468 - DNA, 25 bp, Homo sapien
acacatgcacatgaatactcaatca

SEQ ID NO: 741469 - DNA, 25 bp, Homo sapien
gtgccaaggttgtaacaaggttcag

SEQ ID NO: 741470 - DNA, 25 bp, Homo sapien
gcacatgaatactcaatcatcacgc

SEQ ID NO: 741471 - DNA, 25 bp, Homo sapien
atgcacatgaatactcaatcatcac

SEQ ID NO: 741472 - DNA, 25 bp, Homo sapien
gtggggtctgacatgttgttctgca

SEQ ID NO: 741473 - DNA, 25 bp, Homo sapien
aattccaagcctgtatgccaactga

SEQ ID NO: 741474 - DNA, 25 bp, Homo sapien
tactgctttaaagcccgtgcaaatc

SEQ ID NO: 741475 - DNA, 25 bp, Homo sapien
tggaaccccaggaccttcgcttcat

SEQ ID NO: 741476 - DNA, 25 bp, Homo sapien
cactggctacttggaggattattca

SEQ ID NO: 741477 - DNA, 25 bp, Homo sapien
caaaatggaagcgagacatggcacc

SEQ ID NO: 741478 - DNA, 25 bp, Homo sapien
tctgagctgcatcattgataaggca

SEQ ID NO: 741479 - DNA, 25 bp, Homo sapien
acttgggcacgagggacactgtaaa

SEQ ID NO: 741480 - DNA, 25 bp, Homo sapien
tgacgggtggctccaaggatcctaa

SEQ ID NO: 741481 - DNA, 25 bp, Homo sapien
tggaagtccacactcgaagcaaggg

SEQ ID NO: 741482 - DNA, 25 bp, Homo sapien
tcccagccataggagacacgaatgt

SEQ ID NO: 741483 - DNA, 25 bp, Homo sapien
tttacagcgcccaagggactcagtg

SEQ ID NO: 741484 - DNA, 25 bp, Homo sapien
aagcttatgcttcccgtagccgtgg

SEQ ID NO: 741485 - DNA, 25 bp, Homo sapien
tgtcatcccacattggtacaggtgt

SEQ ID NO: 741486 - DNA, 25 bp, Homo sapien
gattgactccaaacatcccgaaatg

SEQ ID NO: 741487 - DNA, 25 bp, Homo sapien
tgcacatgccgttgcagcacaagct

SEQ ID NO: 741488 - DNA, 25 bp, Homo sapien
tagtgcacagtgtctctacaggtgt

SEQ ID NO: 741489 - DNA, 25 bp, Homo sapien
cttatgtgtggtggactgcagagct

SEQ ID NO: 741490 - DNA, 25 bp, Homo sapien
gaatcactgcatggatgtcccagga

SEQ ID NO: 741491 - DNA, 25 bp, Homo sapien
catgctggtggccttctgaatcact

SEQ ID NO: 741492 - DNA, 25 bp, Homo sapien
aggtgtgcccaacagctcactgaga

SEQ ID NO: 741493 - DNA, 25 bp, Homo sapien
ggaggtgtgcccaacagctcactga

SEQ ID NO: 741494 - DNA, 25 bp, Homo sapien
tcactgagaacgggccaggatgaca

SEQ ID NO: 741495 - DNA, 25 bp, Homo sapien
ctgagaacgggccaggatgacaatg

SEQ ID NO: 741496 - DNA, 25 bp, Homo sapien
ccatggaaaaagtcgtgtggactcc

SEQ ID NO: 741497 - DNA, 25 bp, Homo sapien
tctggacacatgcaaaaaccatgga

SEQ ID NO: 741498 - DNA, 25 bp, Homo sapien
tatgaggtttctagggcaacctctg

SEQ ID NO: 741499 - DNA, 25 bp, Homo sapien
tcaacactctcaagtatgaggtttc

SEQ ID NO: 741500 - DNA, 25 bp, Homo sapien
tctcatctacttggtagactcctgt

SEQ ID NO: 741501 - DNA, 25 bp, Homo sapien
cctcctctcatctacttggtagact

SEQ ID NO: 741502 - DNA, 25 bp, Homo sapien
tacttggtagactcctgtttatcct

SEQ ID NO: 741503 - DNA, 25 bp, Homo sapien
catctacttggtagactcctgttta

SEQ ID NO: 741504 - DNA, 25 bp, Homo sapien
tgaccttgtagggttctgttaaata

SEQ ID NO: 741505 - DNA, 25 bp, Homo sapien
gctgaccttgtagggttctgttaaa

SEQ ID NO: 741506 - DNA, 25 bp, Homo sapien
aagctgaccttgtagggttctgtta

SEQ ID NO: 741507 - DNA, 25 bp, Homo sapien
tgttaaataacgtggcttttctgga

SEQ ID NO: 741508 - DNA, 25 bp, Homo sapien
tatttggcgacctcactcgcgaggg

SEQ ID NO: 741509 - DNA, 25 bp, Homo sapien
aggccggcttggtcggcctctgcct

SEQ ID NO: 741510 - DNA, 25 bp, Homo sapien
ccgcgcgtgggacttgacacaactt

SEQ ID NO: 741511 - DNA, 25 bp, Homo sapien
tcttgaggcgtcgagtatttggcga

SEQ ID NO: 741512 - DNA, 25 bp, Homo sapien
gcgccgcgaacatggctgcccggag

SEQ ID NO: 741513 - DNA, 25 bp, Homo sapien
tggctgcccggagacgcccgccgcc

SEQ ID NO: 741514 - DNA, 25 bp, Homo sapien
gctgcccggagacgcccgccgcctt

SEQ ID NO: 741515 - DNA, 25 bp, Homo sapien
gggcgggcgccgcgaacatggctgc

SEQ ID NO: 741516 - DNA, 25 bp, Homo sapien
cgcagggcgtttgcagcgctgcttt

SEQ ID NO: 741517 - DNA, 25 bp, Homo sapien
tcctgcgtttcatctcctcccgctg

SEQ ID NO: 741518 - DNA, 25 bp, Homo sapien
caggtgagccgcgtctgggagcgca

SEQ ID NO: 741519 - DNA, 25 bp, Homo sapien
ccttttcctggcagccaacctgctg

SEQ ID NO: 741520 - DNA, 25 bp, Homo sapien
gaaaagcgagacatatactgaaaga

SEQ ID NO: 741521 - DNA, 25 bp, Homo sapien
aaaccacgaggagatttcagtacac

SEQ ID NO: 741522 - DNA, 25 bp, Homo sapien
taaatatacacctgccgtatgactc

SEQ ID NO: 741523 - DNA, 25 bp, Homo sapien
gtataggaaaagttgctcaccatta

SEQ ID NO: 741524 - DNA, 25 bp, Homo sapien
gaagcaatacaactcaactattgaa

SEQ ID NO: 741525 - DNA, 25 bp, Homo sapien
gcaatacaactcaactattgaaata

SEQ ID NO: 741526 - DNA, 25 bp, Homo sapien
aagcaatacaactcaactattgaaa

SEQ ID NO: 741527 - DNA, 25 bp, Homo sapien
agcaatacaactcaactattgaaat

SEQ ID NO: 741528 - DNA, 25 bp, Homo sapien
gctccttgctttaggctgactgcag

SEQ ID NO: 741529 - DNA, 25 bp, Homo sapien
agagggaggccgtagcaaacattgc

SEQ ID NO: 741530 - DNA, 25 bp, Homo sapien
ggtttggagcctatttgaagataaa

SEQ ID NO: 741531 - DNA, 25 bp, Homo sapien
gaggccgtagcaaacattgctgtca

SEQ ID NO: 741532 - DNA, 25 bp, Homo sapien
cactatcggatgcagggagaaacaa

SEQ ID NO: 741533 - DNA, 25 bp, Homo sapien
tcttgcccattttaccttaaattga

SEQ ID NO: 741534 - DNA, 25 bp, Homo sapien
gatgcagagcacttggacataagaa

SEQ ID NO: 741535 - DNA, 25 bp, Homo sapien
aaaattgtgctactacattccagct

SEQ ID NO: 741536 - DNA, 25 bp, Homo sapien
gactcttctagtaataacgtagctt

SEQ ID NO: 741537 - DNA, 25 bp, Homo sapien
tcttctagtaataacgtagcttaaa

SEQ ID NO: 741538 - DNA, 25 bp, Homo sapien
tggactcttctagtaataacgtagc

SEQ ID NO: 741539 - DNA, 25 bp, Homo sapien
tttggactcttctagtaataacgta

SEQ ID NO: 741540 - DNA, 25 bp, Homo sapien
tgaacaacgcgaggttccagatgtg

SEQ ID NO: 741541 - DNA, 25 bp, Homo sapien
cataaaacaagctggtggatctcac

SEQ ID NO: 741542 - DNA, 25 bp, Homo sapien
aaaagattgactgttatgcccaggg

SEQ ID NO: 741543 - DNA, 25 bp, Homo sapien
ggtcagcactaacctgcagaaccag

SEQ ID NO: 741544 - DNA, 25 bp, Homo sapien
ggctagcggaatatccttcctggtt

SEQ ID NO: 741545 - DNA, 25 bp, Homo sapien
tcctggttctttaatgggtagtcta

SEQ ID NO: 741546 - DNA, 25 bp, Homo sapien
gcagacctacagcagctactattga

SEQ ID NO: 741547 - DNA, 25 bp, Homo sapien
caatatttacttcttaaggctagcg

SEQ ID NO: 741548 - DNA, 25 bp, Homo sapien
tgagcatttccttgatgttaagcca

SEQ ID NO: 741549 - DNA, 25 bp, Homo sapien
tattgaatggtcacaagtcaggtcc

SEQ ID NO: 741550 - DNA, 25 bp, Homo sapien
cgcaaagatggctagaagcaggttc

SEQ ID NO: 741551 - DNA, 25 bp, Homo sapien
tcttgtcctctaacagtatacacca

SEQ ID NO: 741552 - DNA, 25 bp, Homo sapien
taaagcggaagtctgcaagtcgaaa

SEQ ID NO: 741553 - DNA, 25 bp, Homo sapien
tattagcagccataacatgacgtgg

SEQ ID NO: 741554 - DNA, 25 bp, Homo sapien
tccaacggcgagagtaaacgagtct

SEQ ID NO: 741555 - DNA, 25 bp, Homo sapien
ggaacgcgctttgtgaaccctcaag

SEQ ID NO: 741556 - DNA, 25 bp, Homo sapien
gaagccggcacgctgttcacaagga

SEQ ID NO: 741557 - DNA, 25 bp, Homo sapien
ccaaagtgcggcgaacgagctgccg

SEQ ID NO: 741558 - DNA, 25 bp, Homo sapien
gcggcctcggcgcttgaagcccagc

SEQ ID NO: 741559 - DNA, 25 bp, Homo sapien
acgcgctcgcgcatgcccagggcgc

SEQ ID NO: 741560 - DNA, 25 bp, Homo sapien
aggccccaagaggcgaggagcacca

SEQ ID NO: 741561 - DNA, 25 bp, Homo sapien
ggcgcccgcggccactcggcccacg

SEQ ID NO: 741562 - DNA, 25 bp, Homo sapien
agttggtccacttgtacagcacccc

SEQ ID NO: 741563 - DNA, 25 bp, Homo sapien
gatagttggtccacttgtacagcac

SEQ ID NO: 741564 - DNA, 25 bp, Homo sapien
cgctcagatagttggtccacttgta

SEQ ID NO: 741565 - DNA, 25 bp, Homo sapien
tcagatagttggtccacttgtacag

SEQ ID NO: 741566 - DNA, 25 bp, Homo sapien
aaacaacggagtgaggaaaccatgg

SEQ ID NO: 741567 - DNA, 25 bp, Homo sapien
tcagactcataacatccaggtatgt

SEQ ID NO: 741568 - DNA, 25 bp, Homo sapien
aggacactacttaattcctctgggc

SEQ ID NO: 741569 - DNA, 25 bp, Homo sapien
gaaaccatggtttaagttcagactc

SEQ ID NO: 741570 - DNA, 25 bp, Homo sapien
aggagaatcataataggacaatatt

SEQ ID NO: 741571 - DNA, 25 bp, Homo sapien
agaatcataataggacaatattccc

SEQ ID NO: 741572 - DNA, 25 bp, Homo sapien
ggagaatcataataggacaatattc

SEQ ID NO: 741573 - DNA, 25 bp, Homo sapien
gagaatcataataggacaatattcc

SEQ ID NO: 741574 - DNA, 25 bp, Homo sapien
tgtatgctccctttgcaacctttcc

SEQ ID NO: 741575 - DNA, 25 bp, Homo sapien
ttgtatgctccctttgcaacctttc

SEQ ID NO: 741576 - DNA, 25 bp, Homo sapien
tcaggtagaaatactgttccccagg

SEQ ID NO: 741577 - DNA, 25 bp, Homo sapien
agccacacttctggccttcaggtag

SEQ ID NO: 741578 - DNA, 25 bp, Homo sapien
tccccagggattatcaggtccatgc

SEQ ID NO: 741579 - DNA, 25 bp, Homo sapien
tgtcagtcaggcaagccttggctga

SEQ ID NO: 741580 - DNA, 25 bp, Homo sapien
ggaggtcacagtagagtcttagttc

SEQ ID NO: 741581 - DNA, 25 bp, Homo sapien
gaacaaggaggtcacagtagagtct

SEQ ID NO: 741582 - DNA, 25 bp, Homo sapien
gctgaacaaggaggtcacagtagag

SEQ ID NO: 741583 - DNA, 25 bp, Homo sapien
cacagtagagtcttagttctgacat

SEQ ID NO: 741584 - DNA, 25 bp, Homo sapien
tggtcacttcttttgttttatctac

SEQ ID NO: 741585 - DNA, 25 bp, Homo sapien
cagttgtggtcacttcttttgtttt

SEQ ID NO: 741586 - DNA, 25 bp, Homo sapien
ttgtggtcacttcttttgttttatc

SEQ ID NO: 741587 - DNA, 25 bp, Homo sapien
tgtggtcacttcttttgttttatct

SEQ ID NO: 741588 - DNA, 25 bp, Homo sapien
gaaacaaccagagtggaagactcct

SEQ ID NO: 741589 - DNA, 25 bp, Homo sapien
caaccagagtggaagactcctttac

SEQ ID NO: 741590 - DNA, 25 bp, Homo sapien
tacgaaacaaccagagtggaagact

SEQ ID NO: 741591 - DNA, 25 bp, Homo sapien
ctacgaaacaaccagagtggaagac

SEQ ID NO: 741592 - DNA, 25 bp, Homo sapien
aggtcttcagaaaagtattacaggt

SEQ ID NO: 741593 - DNA, 25 bp, Homo sapien
gcattcttccaaggtcttcagaaaa

SEQ ID NO: 741594 - DNA, 25 bp, Homo sapien
gtattacaggttgatttcagcaaag

SEQ ID NO: 741595 - DNA, 25 bp, Homo sapien
tcagcaaagttcccacatcaattcc

SEQ ID NO: 741596 - DNA, 25 bp, Homo sapien
cttgctggacttgagcatggccagc

SEQ ID NO: 741597 - DNA, 25 bp, Homo sapien
tcttgatgccttgttgcagccaaac

SEQ ID NO: 741598 - DNA, 25 bp, Homo sapien
tgccttgttgcagccaaactgagct

SEQ ID NO: 741599 - DNA, 25 bp, Homo sapien
gaaacttttcttgatgccttgttgc

SEQ ID NO: 741600 - DNA, 25 bp, Homo sapien
cagccaaactgagctggacttttac

SEQ ID NO: 741601 - DNA, 25 bp, Homo sapien
gaattatgaattggtataataggat

SEQ ID NO: 741602 - DNA, 25 bp, Homo sapien
atgaattggtataataggatgtttc

SEQ ID NO: 741603 - DNA, 25 bp, Homo sapien
ctttccaatgaattatgaattggta

SEQ ID NO: 741604 - DNA, 25 bp, Homo sapien
ccaatgaattatgaattggtataat

SEQ ID NO: 741605 - DNA, 25 bp, Homo sapien
aacatcttccctattagtgctaagt

SEQ ID NO: 741606 - DNA, 25 bp, Homo sapien
tgctaagtaaaaggtctgctctggg

SEQ ID NO: 741607 - DNA, 25 bp, Homo sapien
tcaaatcctgagaaaaaccattaca

SEQ ID NO: 741608 - DNA, 25 bp, Homo sapien
tgattcaggctcactcaaaagagga

SEQ ID NO: 741609 - DNA, 25 bp, Homo sapien
cacctcgccaagcttggtcataaat

SEQ ID NO: 741610 - DNA, 25 bp, Homo sapien
tttcaacatccactgaaagaattgt

SEQ ID NO: 741611 - DNA, 25 bp, Homo sapien
acctcgccaagcttggtcataaatt

SEQ ID NO: 741612 - DNA, 25 bp, Homo sapien
cctttcaacatccactgaaagaatt

SEQ ID NO: 741613 - DNA, 25 bp, Homo sapien
tctgtattttcctcacttgatatgc

SEQ ID NO: 741614 - DNA, 25 bp, Homo sapien
tattttcctcacttgatatgctgca

SEQ ID NO: 741615 - DNA, 25 bp, Homo sapien
ttcctcacttgatatgctgcagtct

SEQ ID NO: 741616 - DNA, 25 bp, Homo sapien
cacttgatatgctgcagtctatctc

SEQ ID NO: 741617 - DNA, 25 bp, Homo sapien
gcaacttgagtctgatccagactga

SEQ ID NO: 741618 - DNA, 25 bp, Homo sapien
gagagcaacttgagtctgatccaga

SEQ ID NO: 741619 - DNA, 25 bp, Homo sapien
cttgtgttcatggtactaaagaaag

SEQ ID NO: 741620 - DNA, 25 bp, Homo sapien
tgtgttcatggtactaaagaaagtt

SEQ ID NO: 741621 - DNA, 25 bp, Homo sapien
cttctgtgggaatgccactgtcttc

SEQ ID NO: 741622 - DNA, 25 bp, Homo sapien
ttctgtgggaatgccactgtcttcc

SEQ ID NO: 741623 - DNA, 25 bp, Homo sapien
tactatgttaatatgcctactagaa

SEQ ID NO: 741624 - DNA, 25 bp, Homo sapien
gtgccatcacgttggccaagacggt

SEQ ID NO: 741625 - DNA, 25 bp, Homo sapien
ctatgttaatatgcctactagaaaa

SEQ ID NO: 741626 - DNA, 25 bp, Homo sapien
gttaatatgcctactagaaaactta

SEQ ID NO: 741627 - DNA, 25 bp, Homo sapien
tcttaacaggagcaaacactgtagg

SEQ ID NO: 741628 - DNA, 25 bp, Homo sapien
atcttaacaggagcaaacactgtag

SEQ ID NO: 741629 - DNA, 25 bp, Homo sapien
gatccatcttaacaggagcaaacac

SEQ ID NO: 741630 - DNA, 25 bp, Homo sapien
aagatccatcttaacaggagcaaac

SEQ ID NO: 741631 - DNA, 25 bp, Homo sapien
tgttggttatatacttctgatttac

SEQ ID NO: 741632 - DNA, 25 bp, Homo sapien
ttctttgttggttatatacttctga

SEQ ID NO: 741633 - DNA, 25 bp, Homo sapien
acatccgcctccacttcgtgcagca

SEQ ID NO: 741634 - DNA, 25 bp, Homo sapien
ggctacatccgcctccacttcgtgc

SEQ ID NO: 741635 - DNA, 25 bp, Homo sapien
aagagggcttcagtcgctgagttcc

SEQ ID NO: 741636 - DNA, 25 bp, Homo sapien
acaagagggcttcagtcgctgagtt

SEQ ID NO: 741637 - DNA, 25 bp, Homo sapien
gagggcttcagtcgctgagttccta

SEQ ID NO: 741638 - DNA, 25 bp, Homo sapien
gggcttcagtcgctgagttcctaac

SEQ ID NO: 741639 - DNA, 25 bp, Homo sapien
tcacttctgtcaaaaatcccttcaa

SEQ ID NO: 741640 - DNA, 25 bp, Homo sapien
tgtctggatatccttctccccattt

SEQ ID NO: 741641 - DNA, 25 bp, Homo sapien
ggctgtctggatatccttctcccca

SEQ ID NO: 741642 - DNA, 25 bp, Homo sapien
ttagggctgtctggatatccttctc

SEQ ID NO: 741643 - DNA, 25 bp, Homo sapien
ttacgcagagcttgttgtgtctgtg

SEQ ID NO: 741644 - DNA, 25 bp, Homo sapien
tacgcagagcttgttgtgtctgtgt

SEQ ID NO: 741645 - DNA, 25 bp, Homo sapien
caggtgaacctcaaaggcctaagtc

SEQ ID NO: 741646 - DNA, 25 bp, Homo sapien
accaccgatggagattttgagaccc

SEQ ID NO: 741647 - DNA, 25 bp, Homo sapien
gggtggaaccggatagtctgcattt

SEQ ID NO: 741648 - DNA, 25 bp, Homo sapien
tggaacagcttgagaaccaccgatg

SEQ ID NO: 741649 - DNA, 25 bp, Homo sapien
tcaaccatttgagcagccatctggg

SEQ ID NO: 741650 - DNA, 25 bp, Homo sapien
ctggcaagagggtgtacaggtccat

SEQ ID NO: 741651 - DNA, 25 bp, Homo sapien
tcagatggcatacaagaccttagtg

SEQ ID NO: 741652 - DNA, 25 bp, Homo sapien
gattccctgtaagaagacatggcat

SEQ ID NO: 741653 - DNA, 25 bp, Homo sapien
cattttatgcaaaggatgcgttcct

SEQ ID NO: 741654 - DNA, 25 bp, Homo sapien
gaccctatgaccctggatatacagt

SEQ ID NO: 741655 - DNA, 25 bp, Homo sapien
gtgaccgtgagccagtcccttagct

SEQ ID NO: 741656 - DNA, 25 bp, Homo sapien
gaggcacagatctacatcaccatgg

SEQ ID NO: 741657 - DNA, 25 bp, Homo sapien
gttgccgcaatgttttaccatatgc

SEQ ID NO: 741658 - DNA, 25 bp, Homo sapien
atggtgttgccgcaatgttttacca

SEQ ID NO: 741659 - DNA, 25 bp, Homo sapien
ggtgttgccgcaatgttttaccata

SEQ ID NO: 741660 - DNA, 25 bp, Homo sapien
agccatggtgttgccgcaatgtttt

SEQ ID NO: 741661 - DNA, 25 bp, Homo sapien
ccagcccgtggacctcatataaagt

SEQ ID NO: 741662 - DNA, 25 bp, Homo sapien
cccgtggacctcatataaagtgtcc

SEQ ID NO: 741663 - DNA, 25 bp, Homo sapien
agcccgtggacctcatataaagtgt

SEQ ID NO: 741664 - DNA, 25 bp, Homo sapien
cgtggacctcatataaagtgtccag

SEQ ID NO: 741665 - DNA, 25 bp, Homo sapien
aacactttagcacttattccctgaa

SEQ ID NO: 741666 - DNA, 25 bp, Homo sapien
ggttggagagggttgaggctgttgc

SEQ ID NO: 741667 - DNA, 25 bp, Homo sapien
ttccctgaagttaggaggtgctgcc

SEQ ID NO: 741668 - DNA, 25 bp, Homo sapien
gctggaaattaagtagggcaacaaa

SEQ ID NO: 741669 - DNA, 25 bp, Homo sapien
cagcttatcatttggtttccagtag

SEQ ID NO: 741670 - DNA, 25 bp, Homo sapien
ggtttccagtaggcctgctgaactg

SEQ ID NO: 741671 - DNA, 25 bp, Homo sapien
gcagcttatcatttggtttccagta

SEQ ID NO: 741672 - DNA, 25 bp, Homo sapien
agcagcttatcatttggtttccagt

SEQ ID NO: 741673 - DNA, 25 bp, Homo sapien
catggtcatgtgaatgccctgaaca

SEQ ID NO: 741674 - DNA, 25 bp, Homo sapien
cctgggaatctgctgtttgaacaag

SEQ ID NO: 741675 - DNA, 25 bp, Homo sapien
cagagcaacggtttcatgcctgtca

SEQ ID NO: 741676 - DNA, 25 bp, Homo sapien
gggcacaccattaatcttctcagag

SEQ ID NO: 741677 - DNA, 25 bp, Homo sapien
tgtcgctcatcggttggtcccaaga

SEQ ID NO: 741678 - DNA, 25 bp, Homo sapien
gcagattcagagtcatggtccccga

SEQ ID NO: 741679 - DNA, 25 bp, Homo sapien
taatcagtgattcagagacgcacca

SEQ ID NO: 741680 - DNA, 25 bp, Homo sapien
caactgcggattacaaagggacata

SEQ ID NO: 741681 - DNA, 25 bp, Homo sapien
ttccataaacgagactttttattga

SEQ ID NO: 741682 - DNA, 25 bp, Homo sapien
ttgacatattcaattaggcagaaaa

SEQ ID NO: 741683 - DNA, 25 bp, Homo sapien
ctcccatctgagcacactcctccac

SEQ ID NO: 741684 - DNA, 25 bp, Homo sapien
cctctacccactggaagttgggaca

SEQ ID NO: 741685 - DNA, 25 bp, Homo sapien
tctggagtaatagcaagtggcatgc

SEQ ID NO: 741686 - DNA, 25 bp, Homo sapien
tttgctggaccctcatgaccacaag

SEQ ID NO: 741687 - DNA, 25 bp, Homo sapien
cagcagtccaagcaccccaaagggt

SEQ ID NO: 741688 - DNA, 25 bp, Homo sapien
caaatcatcccaaacgtgatctgtg

SEQ ID NO: 741689 - DNA, 25 bp, Homo sapien
aattctccatcaacccgaaccacac

SEQ ID NO: 741690 - DNA, 25 bp, Homo sapien
cctcagtgctgatgtcagaccatca

SEQ ID NO: 741691 - DNA, 25 bp, Homo sapien
gaccatcatcgttcatcaattctcc

SEQ ID NO: 741692 - DNA, 25 bp, Homo sapien
aagcacattggtggtgacgcccaac

SEQ ID NO: 741693 - DNA, 25 bp, Homo sapien
tggaattctacgacggacaaggaag

SEQ ID NO: 741694 - DNA, 25 bp, Homo sapien
tcaggtttggaaggccatgacaggt

SEQ ID NO: 741695 - DNA, 25 bp, Homo sapien
cagagatcaagcatagctgtgcaca

SEQ ID NO: 741696 - DNA, 25 bp, Homo sapien
tactcagaacttcggaaatactccc

SEQ ID NO: 741697 - DNA, 25 bp, Homo sapien
cattagatttgacgacttggttggc

SEQ ID NO: 741698 - DNA, 25 bp, Homo sapien
tcaaatggtttccttaagaaggcac

SEQ ID NO: 741699 - DNA, 25 bp, Homo sapien
tctgcctgaatggtgaggaattctt

SEQ ID NO: 741700 - DNA, 25 bp, Homo sapien
tgtctctacagagatagagagatag

SEQ ID NO: 741701 - DNA, 25 bp, Homo sapien
aaataatcgtaatccactttaggtg

SEQ ID NO: 741702 - DNA, 25 bp, Homo sapien
tgatttgtctctacagagatagaga

SEQ ID NO: 741703 - DNA, 25 bp, Homo sapien
ataatcgtaatccactttaggtgaa

SEQ ID NO: 741704 - DNA, 25 bp, Homo sapien
tccaagtccaacgtggtttccatgc

SEQ ID NO: 741705 - DNA, 25 bp, Homo sapien
tgaaaggcagaccagagtccaatct

SEQ ID NO: 741706 - DNA, 25 bp, Homo sapien
gagctgagtacccatgcatgcggca

SEQ ID NO: 741707 - DNA, 25 bp, Homo sapien
gcaatgtgtcatctcagctaatcct

SEQ ID NO: 741708 - DNA, 25 bp, Homo sapien
agagcttctgcgcagcaaagaaact

SEQ ID NO: 741709 - DNA, 25 bp, Homo sapien
tctgcgcagcaaagaaactaccatc

SEQ ID NO: 741710 - DNA, 25 bp, Homo sapien
agcttctgcgcagcaaagaaactac

SEQ ID NO: 741711 - DNA, 25 bp, Homo sapien
cttctgcgcagcaaagaaactacca

SEQ ID NO: 741712 - DNA, 25 bp, Homo sapien
tgcagccaaaagagtgccaaggaac

SEQ ID NO: 741713 - DNA, 25 bp, Homo sapien
tctacaaaagtcgatgaggctgagc

SEQ ID NO: 741714 - DNA, 25 bp, Homo sapien
attctccctggatgtagtgctctac

SEQ ID NO: 741715 - DNA, 25 bp, Homo sapien
gagagtgaagaattatcctgctgcc

SEQ ID NO: 741716 - DNA, 25 bp, Homo sapien
atcctacatttagctattagcttaa

SEQ ID NO: 741717 - DNA, 25 bp, Homo sapien
acattgatccatcttgcaaacatcc

SEQ ID NO: 741718 - DNA, 25 bp, Homo sapien
atttgtatacatcatttgcaagtag

SEQ ID NO: 741719 - DNA, 25 bp, Homo sapien
agctattagcttaaatagtctttgc

SEQ ID NO: 741720 - DNA, 25 bp, Homo sapien
ctgggtgccctctggtaatctctga

SEQ ID NO: 741721 - DNA, 25 bp, Homo sapien
ctgatttgcttcctgtctgtatgaa

SEQ ID NO: 741722 - DNA, 25 bp, Homo sapien
ctggtaatctctgatttgcttcctg

SEQ ID NO: 741723 - DNA, 25 bp, Homo sapien
gggtgccctctggtaatctctgatt

SEQ ID NO: 741724 - DNA, 25 bp, Homo sapien
gaagtgcagagggccaatcaaatct

SEQ ID NO: 741725 - DNA, 25 bp, Homo sapien
ttgttattcgaaacagaaattctgt

SEQ ID NO: 741726 - DNA, 25 bp, Homo sapien
tacaattcaaagtgcacaattcatg

SEQ ID NO: 741727 - DNA, 25 bp, Homo sapien
tgtaaacattatacgataattcccc

SEQ ID NO: 741728 - DNA, 25 bp, Homo sapien
gagacctcattctatctgatggcag

SEQ ID NO: 741729 - DNA, 25 bp, Homo sapien
cctgggccaccatcagacatttgtg

SEQ ID NO: 741730 - DNA, 25 bp, Homo sapien
catcctgtctcatgctgggtcatca

SEQ ID NO: 741731 - DNA, 25 bp, Homo sapien
gagagaggcgtcacccagatgtgat

SEQ ID NO: 741732 - DNA, 25 bp, Homo sapien
taaaatgtgtcttggcagaaacctc

SEQ ID NO: 741733 - DNA, 25 bp, Homo sapien
cctcaacatgaagcagggtggaagc

SEQ ID NO: 741734 - DNA, 25 bp, Homo sapien
tagaagctctcgaatctgatgcagc

SEQ ID NO: 741735 - DNA, 25 bp, Homo sapien
aacactgtgatggtaagacttctgc

SEQ ID NO: 741736 - DNA, 25 bp, Homo sapien
ggtaaggccctggttgtacaactga

SEQ ID NO: 741737 - DNA, 25 bp, Homo sapien
tcaaaaaggacactccaggtaaggc

SEQ ID NO: 741738 - DNA, 25 bp, Homo sapien
gcattggctccataagtaacgtcaa

SEQ ID NO: 741739 - DNA, 25 bp, Homo sapien
taaggctgggatcctataagccaga

SEQ ID NO: 741740 - DNA, 25 bp, Homo sapien
tgctgaaacttactaggacccagtg

SEQ ID NO: 741741 - DNA, 25 bp, Homo sapien
tcagcaaaatctcagcggtggtgct

SEQ ID NO: 741742 - DNA, 25 bp, Homo sapien
gagtgctgtactaaagcctgcccca

SEQ ID NO: 741743 - DNA, 25 bp, Homo sapien
gctgatggaaagagcacagctccga

SEQ ID NO: 741744 - DNA, 25 bp, Homo sapien
ctgggactgtttacatgcggtgcgg

SEQ ID NO: 741745 - DNA, 25 bp, Homo sapien
gggactgtttacatgcggtgcggag

SEQ ID NO: 741746 - DNA, 25 bp, Homo sapien
tgcggtgcggagtggggcgggcggc

SEQ ID NO: 741747 - DNA, 25 bp, Homo sapien
gactgtttacatgcggtgcggagtg

SEQ ID NO: 741748 - DNA, 25 bp, Homo sapien
ttgtccggacacagcacatagaagg

SEQ ID NO: 741749 - DNA, 25 bp, Homo sapien
ctcgaagggcgtgttggagcaccat

SEQ ID NO: 741750 - DNA, 25 bp, Homo sapien
ggtcggcgtagaaatccatcctgcg

SEQ ID NO: 741751 - DNA, 25 bp, Homo sapien
gagcaccatttctccgcaacgtcgg

SEQ ID NO: 741752 - DNA, 25 bp, Homo sapien
cgcgtccacactcccgccggctccg

SEQ ID NO: 741753 - DNA, 25 bp, Homo sapien
tccggcggtccctcctccaggcact

SEQ ID NO: 741754 - DNA, 25 bp, Homo sapien
ccggctccggcggtccctcctccag

SEQ ID NO: 741755 - DNA, 25 bp, Homo sapien
gccgcgtccacactcccgccggctc

SEQ ID NO: 741756 - DNA, 25 bp, Homo sapien
gcgcgggagctcgggcgcagggacg

SEQ ID NO: 741757 - DNA, 25 bp, Homo sapien
cgggagctcgggcgcagggacgcac

SEQ ID NO: 741758 - DNA, 25 bp, Homo sapien
gcgggagctcgggcgcagggacgca

SEQ ID NO: 741759 - DNA, 25 bp, Homo sapien
cgcgcgggagctcgggcgcagggac

SEQ ID NO: 741760 - DNA, 25 bp, Homo sapien
gaaaggcggtcttgcagtctcccta

SEQ ID NO: 741761 - DNA, 25 bp, Homo sapien
ctccttcgcgaacttcccgtaggtg

SEQ ID NO: 741762 - DNA, 25 bp, Homo sapien
ccgtaggtggtcagggcgctcggcg

SEQ ID NO: 741763 - DNA, 25 bp, Homo sapien
agtctccctaactccttcgcgaact

SEQ ID NO: 741764 - DNA, 25 bp, Homo sapien
tgggtatggcctgggcggtcccagc

SEQ ID NO: 741765 - DNA, 25 bp, Homo sapien
tcatttctttgggtatggcctgggc

SEQ ID NO: 741766 - DNA, 25 bp, Homo sapien
ctgggcggtcccagcaggaaggctg

SEQ ID NO: 741767 - DNA, 25 bp, Homo sapien
ggcttctccccagtgaaatccagaa

SEQ ID NO: 741768 - DNA, 25 bp, Homo sapien
gacagattcaagaggtccggctagg

SEQ ID NO: 741769 - DNA, 25 bp, Homo sapien
cttctgaacgatggttggatacaca

SEQ ID NO: 741770 - DNA, 25 bp, Homo sapien
ttaaaatctgggtggcctcaagaga

SEQ ID NO: 741771 - DNA, 25 bp, Homo sapien
gaaaactcccgaggttggcatcttg

SEQ ID NO: 741772 - DNA, 25 bp, Homo sapien
agtttggaaagggtcggcatggatg

SEQ ID NO: 741773 - DNA, 25 bp, Homo sapien
aaagggtcggcatggatgggatggc

SEQ ID NO: 741774 - DNA, 25 bp, Homo sapien
ccaggccctgatcatggggcccaca

SEQ ID NO: 741775 - DNA, 25 bp, Homo sapien
tcaccccaggccctgatcatggggc

SEQ ID NO: 741776 - DNA, 25 bp, Homo sapien
tgcgcaatgtttaaccggagcctcg

SEQ ID NO: 741777 - DNA, 25 bp, Homo sapien
taggactagcccgatctgtgtgtca

SEQ ID NO: 741778 - DNA, 25 bp, Homo sapien
cagagccagaatgtcaacggaggag

SEQ ID NO: 741779 - DNA, 25 bp, Homo sapien
cggagcctcgtgtattcatttgtaa

SEQ ID NO: 741780 - DNA, 25 bp, Homo sapien
gggatcaattgattctcctgactta

SEQ ID NO: 741781 - DNA, 25 bp, Homo sapien
tcccgggatcaattgattctcctga

SEQ ID NO: 741782 - DNA, 25 bp, Homo sapien
cccgggatcaattgattctcctgac

SEQ ID NO: 741783 - DNA, 25 bp, Homo sapien
cctcccgggatcaattgattctcct

SEQ ID NO: 741784 - DNA, 25 bp, Homo sapien
aggctaagggcggttttcagacatg

SEQ ID NO: 741785 - DNA, 25 bp, Homo sapien
accttgtgcaggctaagggcggttt

SEQ ID NO: 741786 - DNA, 25 bp, Homo sapien
gatttccactgttcaccttgtgcag

SEQ ID NO: 741787 - DNA, 25 bp, Homo sapien
tcctcaccaatgatttccactgttc

SEQ ID NO: 741788 - DNA, 25 bp, Homo sapien
agtaaagagggcagtgggtggccat

SEQ ID NO: 741789 - DNA, 25 bp, Homo sapien
ctacacagtaaagagggcagtgggt

SEQ ID NO: 741790 - DNA, 25 bp, Homo sapien
acacagtaaagagggcagtgggtgg

SEQ ID NO: 741791 - DNA, 25 bp, Homo sapien
acagtaaagagggcagtgggtggcc

SEQ ID NO: 741792 - DNA, 25 bp, Homo sapien
tgctctgttcatcatcagatctgct

SEQ ID NO: 741793 - DNA, 25 bp, Homo sapien
gctctgttcatcatcagatctgctc

SEQ ID NO: 741794 - DNA, 25 bp, Homo sapien
ctgctctgttcatcatcagatctgc

SEQ ID NO: 741795 - DNA, 25 bp, Homo sapien
ggcagtcctcgctctcactccacac

SEQ ID NO: 741796 - DNA, 25 bp, Homo sapien
ctgcaagaaaggcaggcagtcctcg

SEQ ID NO: 741797 - DNA, 25 bp, Homo sapien
agtcctcgctctcactccacacgtg

SEQ ID NO: 741798 - DNA, 25 bp, Homo sapien
gcaagaaaggcaggcagtcctcgct

SEQ ID NO: 741799 - DNA, 25 bp, Homo sapien
cgtggagcgtcttcttgccgcagga

SEQ ID NO: 741800 - DNA, 25 bp, Homo sapien
tttttccaggacttcgtggagcgtc

SEQ ID NO: 741801 - DNA, 25 bp, Homo sapien
caggaggagatgtaatcctgtgcta

SEQ ID NO: 741802 - DNA, 25 bp, Homo sapien
tcttcttgccgcaggaggagatgta

SEQ ID NO: 741803 - DNA, 25 bp, Homo sapien
cagccacactggccgctcctgctcc

SEQ ID NO: 741804 - DNA, 25 bp, Homo sapien
tctctaattccttcagccacactgg

SEQ ID NO: 741805 - DNA, 25 bp, Homo sapien
cttcagccacactggccgctcctgc

SEQ ID NO: 741806 - DNA, 25 bp, Homo sapien
ctctctaattccttcagccacactg

SEQ ID NO: 741807 - DNA, 25 bp, Homo sapien
tgaccagactccatgagtagaggca

SEQ ID NO: 741808 - DNA, 25 bp, Homo sapien
tgtgggatttaagccgcagctctcc

SEQ ID NO: 741809 - DNA, 25 bp, Homo sapien
gactccatgagtagaggcaagaatt

SEQ ID NO: 741810 - DNA, 25 bp, Homo sapien
agcttctgacaggtggattctttct

SEQ ID NO: 741811 - DNA, 25 bp, Homo sapien
gctcctcataatgaccttgtgttgg

SEQ ID NO: 741812 - DNA, 25 bp, Homo sapien
aacctgggtgatctgacagcagact

SEQ ID NO: 741813 - DNA, 25 bp, Homo sapien
taatgctgttcctattagctggagg

SEQ ID NO: 741814 - DNA, 25 bp, Homo sapien
gcactgtcttaagcagaattacaca

SEQ ID NO: 741815 - DNA, 25 bp, Homo sapien
tgaaaccagcacatctactgacagg

SEQ ID NO: 741816 - DNA, 25 bp, Homo sapien
ctggaagttttctgactgctctttc

SEQ ID NO: 741817 - DNA, 25 bp, Homo sapien
atctactgacaggtccccaggctgg

SEQ ID NO: 741818 - DNA, 25 bp, Homo sapien
gaagttttctgactgctctttcaag

SEQ ID NO: 741819 - DNA, 25 bp, Homo sapien
tcttcaaacgcatcgtcatctgcat

SEQ ID NO: 741820 - DNA, 25 bp, Homo sapien
tctgggggtggtccgcctctggctc

SEQ ID NO: 741821 - DNA, 25 bp, Homo sapien
ctgtactcttcaaacgcatcgtcat

SEQ ID NO: 741822 - DNA, 25 bp, Homo sapien
tccacgtcagcactgtactcttcaa

SEQ ID NO: 741823 - DNA, 25 bp, Homo sapien
ctaggttactgtggggctcactctc

SEQ ID NO: 741824 - DNA, 25 bp, Homo sapien
cactctccttctcaggggagccccc

SEQ ID NO: 741825 - DNA, 25 bp, Homo sapien
gctcactctccttctcaggggagcc

SEQ ID NO: 741826 - DNA, 25 bp, Homo sapien
ctccttctcaggggagcccccagat

SEQ ID NO: 741827 - DNA, 25 bp, Homo sapien
tttcgaagtgctaatgcaaaatgct

SEQ ID NO: 741828 - DNA, 25 bp, Homo sapien
tcgaagtgctaatgcaaaatgctaa

SEQ ID NO: 741829 - DNA, 25 bp, Homo sapien
aagtgctaatgcaaaatgctaaccc

SEQ ID NO: 741830 - DNA, 25 bp, Homo sapien
ctatttcgaagtgctaatgcaaaat

SEQ ID NO: 741831 - DNA, 25 bp, Homo sapien
gaaccagtcgctacatacccaggta

SEQ ID NO: 741832 - DNA, 25 bp, Homo sapien
taaggtcacctgtgaggactcaaaa

SEQ ID NO: 741833 - DNA, 25 bp, Homo sapien
tagaaaccccactgaagcgggagtg

SEQ ID NO: 741834 - DNA, 25 bp, Homo sapien
gagttctctacattcgagtcagcga

SEQ ID NO: 741835 - DNA, 25 bp, Homo sapien
agtttaagcggcacttgaattctgg

SEQ ID NO: 741836 - DNA, 25 bp, Homo sapien
aatacattatatctttcaccccatc

SEQ ID NO: 741837 - DNA, 25 bp, Homo sapien
tacgtgggacggcttataaacagct

SEQ ID NO: 741838 - DNA, 25 bp, Homo sapien
caagcggccatctcattagaaagag

SEQ ID NO: 741839 - DNA, 25 bp, Homo sapien
aaaccagggatgcagaagggtccag

SEQ ID NO: 741840 - DNA, 25 bp, Homo sapien
caacctaacaggcacatgtgtgact

SEQ ID NO: 741841 - DNA, 25 bp, Homo sapien
caattaagtccctcgaaacatgtga

SEQ ID NO: 741842 - DNA, 25 bp, Homo sapien
tctagtgttgtaaaggaggcattcc

SEQ ID NO: 741843 - DNA, 25 bp, Homo sapien
ctggaagatatacaagactcccata

SEQ ID NO: 741844 - DNA, 25 bp, Homo sapien
agatatacaagactcccataagttc

SEQ ID NO: 741845 - DNA, 25 bp, Homo sapien
tggaagatatacaagactcccataa

SEQ ID NO: 741846 - DNA, 25 bp, Homo sapien
aagatatacaagactcccataagtt

SEQ ID NO: 741847 - DNA, 25 bp, Homo sapien
gaaacctgggcgacacctgtgtaat

SEQ ID NO: 741848 - DNA, 25 bp, Homo sapien
tggccgacttgaactagaacccagg

SEQ ID NO: 741849 - DNA, 25 bp, Homo sapien
ggcagtatatgctcaccccaatgga

SEQ ID NO: 741850 - DNA, 25 bp, Homo sapien
gagtacgctgttttaccacgagcag

SEQ ID NO: 741851 - DNA, 25 bp, Homo sapien
gccccatgagatcgagccctcaggg

SEQ ID NO: 741852 - DNA, 25 bp, Homo sapien
tgccccatgagatcgagccctcagg

SEQ ID NO: 741853 - DNA, 25 bp, Homo sapien
cccatgagatcgagccctcaggggc

SEQ ID NO: 741854 - DNA, 25 bp, Homo sapien
tctgccccatgagatcgagccctca

SEQ ID NO: 741855 - DNA, 25 bp, Homo sapien
caggacacaaggaggatccctacat

SEQ ID NO: 741856 - DNA, 25 bp, Homo sapien
tccacaggcagagcatgtacagctg

SEQ ID NO: 741857 - DNA, 25 bp, Homo sapien
ccccagtgagacagccgtgaaaatg

SEQ ID NO: 741858 - DNA, 25 bp, Homo sapien
tgctcgatatggtgatcaggctgcg

SEQ ID NO: 741859 - DNA, 25 bp, Homo sapien
tgcctggagcccctctcagatctgc

SEQ ID NO: 741860 - DNA, 25 bp, Homo sapien
ggtgcctggagcccctctcagatct

SEQ ID NO: 741861 - DNA, 25 bp, Homo sapien
ctgccgggtgcctggagcccctctc

SEQ ID NO: 741862 - DNA, 25 bp, Homo sapien
cgggtgcctggagcccctctcagat

SEQ ID NO: 741863 - DNA, 25 bp, Homo sapien
gagctgacatttgtactgcgcacta

SEQ ID NO: 741864 - DNA, 25 bp, Homo sapien
gatcacggatagtgaagatctgccc

SEQ ID NO: 741865 - DNA, 25 bp, Homo sapien
tctccgaagactgggtgatcagcaa

SEQ ID NO: 741866 - DNA, 25 bp, Homo sapien
gctcaaattaagactggatcacgga

SEQ ID NO: 741867 - DNA, 25 bp, Homo sapien
tgtttgaagcatctaacgaagggca

SEQ ID NO: 741868 - DNA, 25 bp, Homo sapien
tacatggtcggatgaggtcctcact

SEQ ID NO: 741869 - DNA, 25 bp, Homo sapien
ttggcaacccaattcacagttttgt

SEQ ID NO: 741870 - DNA, 25 bp, Homo sapien
taggatttacactgtttgaagcatc

SEQ ID NO: 741871 - DNA, 25 bp, Homo sapien
cacgcagggacataagcatttgggc

SEQ ID NO: 741872 - DNA, 25 bp, Homo sapien
caacttcactatggaaacgaggctc

SEQ ID NO: 741873 - DNA, 25 bp, Homo sapien
caaagggccaagtctgctaaacaga

SEQ ID NO: 741874 - DNA, 25 bp, Homo sapien
cactcaggtacacggacagcaagtc

SEQ ID NO: 741875 - DNA, 25 bp, Homo sapien
ggatgaagacctcggcgagaggcat

SEQ ID NO: 741876 - DNA, 25 bp, Homo sapien
agggatgaagacctcggcgagaggc

SEQ ID NO: 741877 - DNA, 25 bp, Homo sapien
gggatgaagacctcggcgagaggca

SEQ ID NO: 741878 - DNA, 25 bp, Homo sapien
gagggatgaagacctcggcgagagg

SEQ ID NO: 741879 - DNA, 25 bp, Homo sapien
gtttgtgactgaagaccatggtgat

SEQ ID NO: 741880 - DNA, 25 bp, Homo sapien
tccatgaagtaggaacggaggctct

SEQ ID NO: 741881 - DNA, 25 bp, Homo sapien
aagtaggaacggaggctctgccctg

SEQ ID NO: 741882 - DNA, 25 bp, Homo sapien
ctgggtgctgctgcttgggtctcct

SEQ ID NO: 741883 - DNA, 25 bp, Homo sapien
tcctcctgtgcgctggcagagagag

SEQ ID NO: 741884 - DNA, 25 bp, Homo sapien
aggaacgtccttctgtgggtcttgc

SEQ ID NO: 741885 - DNA, 25 bp, Homo sapien
agagaggatggtggcgcggccaaca

SEQ ID NO: 741886 - DNA, 25 bp, Homo sapien
gaacgtccttctgtgggtcttgctt

SEQ ID NO: 741887 - DNA, 25 bp, Homo sapien
ttcatctccccatgacccatgcatt

SEQ ID NO: 741888 - DNA, 25 bp, Homo sapien
agagtaacactgcctttcatctccc

SEQ ID NO: 741889 - DNA, 25 bp, Homo sapien
caaaggtttctagaaggccaggact

SEQ ID NO: 741890 - DNA, 25 bp, Homo sapien
tgatctgagagtgaagcagccttcc

SEQ ID NO: 741891 - DNA, 25 bp, Homo sapien
ttcccactagaatagtctagggctg

SEQ ID NO: 741892 - DNA, 25 bp, Homo sapien
cacagcacatgttcttgccttccca

SEQ ID NO: 741893 - DNA, 25 bp, Homo sapien
cactagaatagtctagggctgtgtc

SEQ ID NO: 741894 - DNA, 25 bp, Homo sapien
gccttcccactagaatagtctaggg

SEQ ID NO: 741895 - DNA, 25 bp, Homo sapien
ttgtgtgcgacagaacaatgccttc

SEQ ID NO: 741896 - DNA, 25 bp, Homo sapien
agggacttggccgacttctcagcag

SEQ ID NO: 741897 - DNA, 25 bp, Homo sapien
tcatctgacatcatgccagggccgc

SEQ ID NO: 741898 - DNA, 25 bp, Homo sapien
ccagggccgctctaccattgtgtgc

SEQ ID NO: 741899 - DNA, 25 bp, Homo sapien
ctaagccaactgaagcaagacggtc

SEQ ID NO: 741900 - DNA, 25 bp, Homo sapien
tttccttactaagccaactgaagca

SEQ ID NO: 741901 - DNA, 25 bp, Homo sapien
tacattcccctaacgactcaggcag

SEQ ID NO: 741902 - DNA, 25 bp, Homo sapien
tgtggttacattcccctaacgactc

SEQ ID NO: 741903 - DNA, 25 bp, Homo sapien
aatagtgtgtgccaacgcctccgtg

SEQ ID NO: 741904 - DNA, 25 bp, Homo sapien
gaattaactagctcagagccccaca

SEQ ID NO: 741905 - DNA, 25 bp, Homo sapien
tacagtgtacactcaaccaccaggc

SEQ ID NO: 741906 - DNA, 25 bp, Homo sapien
tgtgaccgagccaatttacgttccc

SEQ ID NO: 741907 - DNA, 25 bp, Homo sapien
gccacgcactgaactaagcccttag

SEQ ID NO: 741908 - DNA, 25 bp, Homo sapien
taaaaatgcgattctgactggctca

SEQ ID NO: 741909 - DNA, 25 bp, Homo sapien
gctgtgctgcctaacatggtagtca

SEQ ID NO: 741910 - DNA, 25 bp, Homo sapien
atcaagactcccagcaacaacaggt

SEQ ID NO: 741911 - DNA, 25 bp, Homo sapien
agtttctggtatggcttgcctctgg

SEQ ID NO: 741912 - DNA, 25 bp, Homo sapien
tagtttctggtatggcttgcctctg

SEQ ID NO: 741913 - DNA, 25 bp, Homo sapien
attttagtttctggtatggcttgcc

SEQ ID NO: 741914 - DNA, 25 bp, Homo sapien
tttagtttctggtatggcttgcctc

SEQ ID NO: 741915 - DNA, 25 bp, Homo sapien
gctgtttcagatggcgggtgccttc

SEQ ID NO: 741916 - DNA, 25 bp, Homo sapien
cttcctcattagctccaccaaaagt

SEQ ID NO: 741917 - DNA, 25 bp, Homo sapien
cagcagttggctcacatgtgcccaa

SEQ ID NO: 741918 - DNA, 25 bp, Homo sapien
acagcagttggctcacatgtgccca

SEQ ID NO: 741919 - DNA, 25 bp, Homo sapien
gacagcagttggctcacatgtgccc

SEQ ID NO: 741920 - DNA, 25 bp, Homo sapien
ctttccaccatgtgtcctttccgca

SEQ ID NO: 741921 - DNA, 25 bp, Homo sapien
ctgtctttccaccatgtgtcctttc

SEQ ID NO: 741922 - DNA, 25 bp, Homo sapien
tgtcctttccgcatcagtcaacttg

SEQ ID NO: 741923 - DNA, 25 bp, Homo sapien
gtctttccaccatgtgtcctttccg

SEQ ID NO: 741924 - DNA, 25 bp, Homo sapien
gaaacacgtctgcaacacactgtca

SEQ ID NO: 741925 - DNA, 25 bp, Homo sapien
atgccacatgtgaccaggcagaggc

SEQ ID NO: 741926 - DNA, 25 bp, Homo sapien
ctgccatgccacatgtgaccaggca

SEQ ID NO: 741927 - DNA, 25 bp, Homo sapien
tgtagcagtaggaaacacgtctgca

SEQ ID NO: 741928 - DNA, 25 bp, Homo sapien
tatggtatgagagactggtccacac

SEQ ID NO: 741929 - DNA, 25 bp, Homo sapien
ttcactggccaggactaattgcatg

SEQ ID NO: 741930 - DNA, 25 bp, Homo sapien
tctctgggccaataagcaagtgtcc

SEQ ID NO: 741931 - DNA, 25 bp, Homo sapien
ggaaatgttgtctagctatgcccac

SEQ ID NO: 741932 - DNA, 25 bp, Homo sapien
tccattttgtgcaacccctgacgct

SEQ ID NO: 741933 - DNA, 25 bp, Homo sapien
gaaaagctgatcattccccatggcg

SEQ ID NO: 741934 - DNA, 25 bp, Homo sapien
catggcgcaagggagcacagaaatt

SEQ ID NO: 741935 - DNA, 25 bp, Homo sapien
cgctccctagatgggtcctgaacaa

SEQ ID NO: 741936 - DNA, 25 bp, Homo sapien
gttctcggcagcaccagccactgga

SEQ ID NO: 741937 - DNA, 25 bp, Homo sapien
agagaaggcttcttccccatggttg

SEQ ID NO: 741938 - DNA, 25 bp, Homo sapien
ggagagaaggcttcttccccatggt

SEQ ID NO: 741939 - DNA, 25 bp, Homo sapien
cccatggttggtgagcctctttgct

SEQ ID NO: 741940 - DNA, 25 bp, Homo sapien
ttttgaccctgtattattgttgcca

SEQ ID NO: 741941 - DNA, 25 bp, Homo sapien
catatacataagctcatgcatgtgc

SEQ ID NO: 741942 - DNA, 25 bp, Homo sapien
tactgtcacaagtggtacaagtacc

SEQ ID NO: 741943 - DNA, 25 bp, Homo sapien
taagcacacaaaattgaagacgttg

SEQ ID NO: 741944 - DNA, 25 bp, Homo sapien
ttggaggatgtaggagccgactgag

SEQ ID NO: 741945 - DNA, 25 bp, Homo sapien
tcatgatgtgtcctgaaatgatgtc

SEQ ID NO: 741946 - DNA, 25 bp, Homo sapien
ctgagtggaggtctgcggcatgctg

SEQ ID NO: 741947 - DNA, 25 bp, Homo sapien
ggtagtcaagtgtattcctcatgat

SEQ ID NO: 741948 - DNA, 25 bp, Homo sapien
caggtttgagtttatgcaggtgaag

SEQ ID NO: 741949 - DNA, 25 bp, Homo sapien
tcctctgcaggtttgagtttatgca

SEQ ID NO: 741950 - DNA, 25 bp, Homo sapien
tctgggcttaggaggaaatttcctc

SEQ ID NO: 741951 - DNA, 25 bp, Homo sapien
tctgcaggtttgagtttatgcaggt

SEQ ID NO: 741952 - DNA, 25 bp, Homo sapien
tgtgcaggacataagcaatcactgc

SEQ ID NO: 741953 - DNA, 25 bp, Homo sapien
caggacataagcaatcactgctgca

SEQ ID NO: 741954 - DNA, 25 bp, Homo sapien
tgcaggacataagcaatcactgctg

SEQ ID NO: 741955 - DNA, 25 bp, Homo sapien
gacataagcaatcactgctgcagga

SEQ ID NO: 741956 - DNA, 25 bp, Homo sapien
atatgcttatactcgataaaaacag

SEQ ID NO: 741957 - DNA, 25 bp, Homo sapien
ttcggaagatatgcttatactcgat

SEQ ID NO: 741958 - DNA, 25 bp, Homo sapien
gatatgcttatactcgataaaaaca

SEQ ID NO: 741959 - DNA, 25 bp, Homo sapien
agcattcggaagatatgcttatact

SEQ ID NO: 741960 - DNA, 25 bp, Homo sapien
ctacacgttgcctctagccatggcc

SEQ ID NO: 741961 - DNA, 25 bp, Homo sapien
tacacgttgcctctagccatggccc

SEQ ID NO: 741962 - DNA, 25 bp, Homo sapien
acacgttgcctctagccatggccct

SEQ ID NO: 741963 - DNA, 25 bp, Homo sapien
acgttgcctctagccatggccctaa

SEQ ID NO: 741964 - DNA, 25 bp, Homo sapien
cttggcctaaagatatgcaggtcac

SEQ ID NO: 741965 - DNA, 25 bp, Homo sapien
gcctaaagatatgcaggtcaccaat

SEQ ID NO: 741966 - DNA, 25 bp, Homo sapien
gatatgcaggtcaccaatctgatcc

SEQ ID NO: 741967 - DNA, 25 bp, Homo sapien
tgcaggtcaccaatctgatcctcat

SEQ ID NO: 741968 - DNA, 25 bp, Homo sapien
cccatcagctcgagcctcagtaaga

SEQ ID NO: 741969 - DNA, 25 bp, Homo sapien
tgcctgccccaacatactggagaga

SEQ ID NO: 741970 - DNA, 25 bp, Homo sapien
tcagtaagacttgttatcagcagaa

SEQ ID NO: 741971 - DNA, 25 bp, Homo sapien
catactggagagataggatataccc

SEQ ID NO: 741972 - DNA, 25 bp, Homo sapien
gagttggaagaactcgggataatcc

SEQ ID NO: 741973 - DNA, 25 bp, Homo sapien
gaagaactcgggataatccaggttg

SEQ ID NO: 741974 - DNA, 25 bp, Homo sapien
actcgggataatccaggttgaccct

SEQ ID NO: 741975 - DNA, 25 bp, Homo sapien
ggaggaagcgcagagttggaagaac

SEQ ID NO: 741976 - DNA, 25 bp, Homo sapien
cagggggcgtgaatggctgtgtcct

SEQ ID NO: 741977 - DNA, 25 bp, Homo sapien
gggggcgtgaatggctgtgtcctct

SEQ ID NO: 741978 - DNA, 25 bp, Homo sapien
tgcccagagccgtttggtttcggtg

SEQ ID NO: 741979 - DNA, 25 bp, Homo sapien
ctctgcccagagccgtttggtttcg

SEQ ID NO: 741980 - DNA, 25 bp, Homo sapien
cagaaggcggcccctcctcccgcac

SEQ ID NO: 741981 - DNA, 25 bp, Homo sapien
ccagaaggcggcccctcctcccgca

SEQ ID NO: 741982 - DNA, 25 bp, Homo sapien
cctcgccaaggtactgcggtgtggt

SEQ ID NO: 741983 - DNA, 25 bp, Homo sapien
cccagctgttattaacggagaaaga

SEQ ID NO: 741984 - DNA, 25 bp, Homo sapien
tggactcggtgatggacaggtctct

SEQ ID NO: 741985 - DNA, 25 bp, Homo sapien
taggtgctgccactcgtggactcgg

SEQ ID NO: 741986 - DNA, 25 bp, Homo sapien
ctccggctcccacggcggctggcgg

SEQ ID NO: 741987 - DNA, 25 bp, Homo sapien
ctcggcgcccccgatctcggcaccg

SEQ ID NO: 741988 - DNA, 25 bp, Homo sapien
taccgctctctgctgccgcgctcgg

SEQ ID NO: 741989 - DNA, 25 bp, Homo sapien
gggccgctaccgctctctgctgccg

SEQ ID NO: 741990 - DNA, 25 bp, Homo sapien
cacgacgggccgctaccgctctctg

SEQ ID NO: 741991 - DNA, 25 bp, Homo sapien
gagacgaggagacgcggagaggaag

SEQ ID NO: 741992 - DNA, 25 bp, Homo sapien
gaggggcagtcggcgcccggcgcgc

SEQ ID NO: 741993 - DNA, 25 bp, Homo sapien
tgctactggaaggtagatccgagcc

SEQ ID NO: 741994 - DNA, 25 bp, Homo sapien
gaggcgctgggctggtgcgcgctgg

SEQ ID NO: 741995 - DNA, 25 bp, Homo sapien
cggcgccgccggaggcgctgggctg

SEQ ID NO: 741996 - DNA, 25 bp, Homo sapien
ccgcggcgccgccggaggcgctggg

SEQ ID NO: 741997 - DNA, 25 bp, Homo sapien
gccggaggcgctgggctggtgcgcg

SEQ ID NO: 741998 - DNA, 25 bp, Homo sapien
cgccgcgcgggcccccgacgccacg

SEQ ID NO: 741999 - DNA, 25 bp, Homo sapien
gcgcgggcccccgacgccacgctcc

SEQ ID NO: 742000 - DNA, 25 bp, Homo sapien
ccgcgcgggcccccgacgccacgct

SEQ ID NO: 742001 - DNA, 25 bp, Homo sapien
cgacgccacgctccccacggccccg

SEQ ID NO: 742002 - DNA, 25 bp, Homo sapien
tgagctggtaaggagccgatcacca

SEQ ID NO: 742003 - DNA, 25 bp, Homo sapien
agctggtaaggagccgatcaccagg

SEQ ID NO: 742004 - DNA, 25 bp, Homo sapien
gagaggtgagctggtaaggagccga

SEQ ID NO: 742005 - DNA, 25 bp, Homo sapien
aggtgagctggtaaggagccgatca

SEQ ID NO: 742006 - DNA, 25 bp, Homo sapien
tttgaccactcatattatgctctta

SEQ ID NO: 742007 - DNA, 25 bp, Homo sapien
ctcttatgaacaacagctacttgac

SEQ ID NO: 742008 - DNA, 25 bp, Homo sapien
tctgttcactttaacactcctcagt

SEQ ID NO: 742009 - DNA, 25 bp, Homo sapien
atttgaccactcatattatgctctt

SEQ ID NO: 742010 - DNA, 25 bp, Homo sapien
acttctcacatgtataatgcccact

SEQ ID NO: 742011 - DNA, 25 bp, Homo sapien
ctaacttctcacatgtataatgccc

SEQ ID NO: 742012 - DNA, 25 bp, Homo sapien
tctcacatgtataatgcccactagc

SEQ ID NO: 742013 - DNA, 25 bp, Homo sapien
ttctcacatgtataatgcccactag

SEQ ID NO: 742014 - DNA, 25 bp, Homo sapien
tctagcccatcaatcaactttctgt

SEQ ID NO: 742015 - DNA, 25 bp, Homo sapien
ctagcccatcaatcaactttctgtc

SEQ ID NO: 742016 - DNA, 25 bp, Homo sapien
cttctagcccatcaatcaactttct

SEQ ID NO: 742017 - DNA, 25 bp, Homo sapien
ttctagcccatcaatcaactttctg

SEQ ID NO: 742018 - DNA, 25 bp, Homo sapien
gggtgacagaatgagactgtctcca

SEQ ID NO: 742019 - DNA, 25 bp, Homo sapien
tgacagaatgagactgtctccaaaa

SEQ ID NO: 742020 - DNA, 25 bp, Homo sapien
tgggtgacagaatgagactgtctcc

SEQ ID NO: 742021 - DNA, 25 bp, Homo sapien
gtgacagaatgagactgtctccaaa

SEQ ID NO: 742022 - DNA, 25 bp, Homo sapien
agttctcctgcctcagcatcccaag

SEQ ID NO: 742023 - DNA, 25 bp, Homo sapien
gtggtgcaatcttgactcaccacaa

SEQ ID NO: 742024 - DNA, 25 bp, Homo sapien
cctccgcttcccaggttcaagcagt

SEQ ID NO: 742025 - DNA, 25 bp, Homo sapien
tgttaaacacattacaagatgcaaa

SEQ ID NO: 742026 - DNA, 25 bp, Homo sapien
atacaaattttgagcatacagggca

SEQ ID NO: 742027 - DNA, 25 bp, Homo sapien
gatgcaaatccatttcatctgagga

SEQ ID NO: 742028 - DNA, 25 bp, Homo sapien
tataggttattcgtggctttgttaa

SEQ ID NO: 742029 - DNA, 25 bp, Homo sapien
caatcctagtaagcaatctgtctgt

SEQ ID NO: 742030 - DNA, 25 bp, Homo sapien
tcaggctttctagattgatcaggac

SEQ ID NO: 742031 - DNA, 25 bp, Homo sapien
cctcccaaaaggcagggctaatata

SEQ ID NO: 742032 - DNA, 25 bp, Homo sapien
actttgtatgtcagctgtgtaggcc

SEQ ID NO: 742033 - DNA, 25 bp, Homo sapien
caagcagtcagcagtacctaagtga

SEQ ID NO: 742034 - DNA, 25 bp, Homo sapien
cctaagtgaatctaacagagcaggg

SEQ ID NO: 742035 - DNA, 25 bp, Homo sapien
gacaggctactgaccaacaggctca

SEQ ID NO: 742036 - DNA, 25 bp, Homo sapien
caaaaattcttcgtgtgacaggcta

SEQ ID NO: 742037 - DNA, 25 bp, Homo sapien
aaacagggtaaattctatgagggca

SEQ ID NO: 742038 - DNA, 25 bp, Homo sapien
taatcagtatgcatgggtcacaaac

SEQ ID NO: 742039 - DNA, 25 bp, Homo sapien
cttttacgagtagaatgccatggga

SEQ ID NO: 742040 - DNA, 25 bp, Homo sapien
gatttagcttatcccagcatgcagc

SEQ ID NO: 742041 - DNA, 25 bp, Homo sapien
tacgtgattattcgcaagaagggag

SEQ ID NO: 742042 - DNA, 25 bp, Homo sapien
tatgttctgaacactagctacgtga

SEQ ID NO: 742043 - DNA, 25 bp, Homo sapien
tgataaaacctgcttgacctgtctc

SEQ ID NO: 742044 - DNA, 25 bp, Homo sapien
caaatgcctagtgagatacctggaa

SEQ ID NO: 742045 - DNA, 25 bp, Homo sapien
aaaatagagtatgtaagccagattt

SEQ ID NO: 742046 - DNA, 25 bp, Homo sapien
actgctccagagtatatgttcttcg

SEQ ID NO: 742047 - DNA, 25 bp, Homo sapien
aagcaggaacatgcaatatgaattt

SEQ ID NO: 742048 - DNA, 25 bp, Homo sapien
gaagaacatggacaaactgctccag

SEQ ID NO: 742049 - DNA, 25 bp, Homo sapien
tatgatatatgcatagacaaggcag

SEQ ID NO: 742050 - DNA, 25 bp, Homo sapien
cctgctgcaattcttcaaggcatat

SEQ ID NO: 742051 - DNA, 25 bp, Homo sapien
tctccctgctgcaattcttcaaggc

SEQ ID NO: 742052 - DNA, 25 bp, Homo sapien
caaggcagtcgtgctatagtatctc

SEQ ID NO: 742053 - DNA, 25 bp, Homo sapien
tctaataccaacttggtgaacttac

SEQ ID NO: 742054 - DNA, 25 bp, Homo sapien
gaacaatcttttactctaataccaa

SEQ ID NO: 742055 - DNA, 25 bp, Homo sapien
atcttttactctaataccaacttgg

SEQ ID NO: 742056 - DNA, 25 bp, Homo sapien
tactctaataccaacttggtgaact

SEQ ID NO: 742057 - DNA, 25 bp, Homo sapien
tagtagccttttggatacaaacaga

SEQ ID NO: 742058 - DNA, 25 bp, Homo sapien
tattcaagaagctatggacaacagc

SEQ ID NO: 742059 - DNA, 25 bp, Homo sapien
cctgtatcactctaaaagcaagaag

SEQ ID NO: 742060 - DNA, 25 bp, Homo sapien
gacaacagctgggtcatagcaaatg

SEQ ID NO: 742061 - DNA, 25 bp, Homo sapien
gaggatcactctaggtacttgccaa

SEQ ID NO: 742062 - DNA, 25 bp, Homo sapien
taatagtagtcagtgtacagcatcc

SEQ ID NO: 742063 - DNA, 25 bp, Homo sapien
tcctgttctgaaccaactggtggtc

SEQ ID NO: 742064 - DNA, 25 bp, Homo sapien
tactgtaacatgaaccttgtgagga

SEQ ID NO: 742065 - DNA, 25 bp, Homo sapien
taaatctgtacaggacaagtcccac

SEQ ID NO: 742066 - DNA, 25 bp, Homo sapien
gttcttggcccttcactcattggtt

SEQ ID NO: 742067 - DNA, 25 bp, Homo sapien
gagtctttctatccacaatatggta

SEQ ID NO: 742068 - DNA, 25 bp, Homo sapien
ggtagatgtccagattaatttcaga

SEQ ID NO: 742069 - DNA, 25 bp, Homo sapien
tatactgtaatttcgtctctggcaa

SEQ ID NO: 742070 - DNA, 25 bp, Homo sapien
tccagaggcaggtatttagtcaacc

SEQ ID NO: 742071 - DNA, 25 bp, Homo sapien
caaatgcaagataaggactcaactg

SEQ ID NO: 742072 - DNA, 25 bp, Homo sapien
gcatctattatgtatgtgccagcac

SEQ ID NO: 742073 - DNA, 25 bp, Homo sapien
tagtagcactgtcttagagcaaaag

SEQ ID NO: 742074 - DNA, 25 bp, Homo sapien
ctagggcatatatgtagaggtggaa

SEQ ID NO: 742075 - DNA, 25 bp, Homo sapien
gtgttgatttaactggcagaaactc

SEQ ID NO: 742076 - DNA, 25 bp, Homo sapien
gagataaggagtttgcgcccaaata

SEQ ID NO: 742077 - DNA, 25 bp, Homo sapien
tccaacagagtagacaagagccaca

SEQ ID NO: 742078 - DNA, 25 bp, Homo sapien
tcgtcattgtggatctgcactgtcc

SEQ ID NO: 742079 - DNA, 25 bp, Homo sapien
attagggtgcatatgatcatcgtca

SEQ ID NO: 742080 - DNA, 25 bp, Homo sapien
aacatggctcacgactactctaggg

SEQ ID NO: 742081 - DNA, 25 bp, Homo sapien
ttacttcaaaccattcatctatgca

SEQ ID NO: 742082 - DNA, 25 bp, Homo sapien
tgaagggtgctcagggcaagatcta

SEQ ID NO: 742083 - DNA, 25 bp, Homo sapien
ggcaagatctatttacttcaaacca

SEQ ID NO: 742084 - DNA, 25 bp, Homo sapien
gtgctcagggcaagatctatttact

SEQ ID NO: 742085 - DNA, 25 bp, Homo sapien
gatttctggctgagtatgcctgcgt

SEQ ID NO: 742086 - DNA, 25 bp, Homo sapien
cataactagttgtgcagctctggag

SEQ ID NO: 742087 - DNA, 25 bp, Homo sapien
gctggcagcacttgaaattggtaat

SEQ ID NO: 742088 - DNA, 25 bp, Homo sapien
tagaagtctattttccactcgtggg

SEQ ID NO: 742089 - DNA, 25 bp, Homo sapien
tagagaagattaagagtagcagcgt

SEQ ID NO: 742090 - DNA, 25 bp, Homo sapien
tgagcaggagggtatgaaagcttac

SEQ ID NO: 742091 - DNA, 25 bp, Homo sapien
cagctgtcacaatggaggttttgga

SEQ ID NO: 742092 - DNA, 25 bp, Homo sapien
ggacattcactattgtagccctgac

SEQ ID NO: 742093 - DNA, 25 bp, Homo sapien
gagcttctattgtagcaaatgcagc

SEQ ID NO: 742094 - DNA, 25 bp, Homo sapien
caaatgcagcacagaaccttatgac

SEQ ID NO: 742095 - DNA, 25 bp, Homo sapien
acaagtgaactattaaattggcgca

SEQ ID NO: 742096 - DNA, 25 bp, Homo sapien
gcacttgacactgacaaaacactga

SEQ ID NO: 742097 - DNA, 25 bp, Homo sapien
taatccgtcttgtaaccagatctga

SEQ ID NO: 742098 - DNA, 25 bp, Homo sapien
caacttggtaacctaggctttcaat

SEQ ID NO: 742099 - DNA, 25 bp, Homo sapien
ttatggacaaacagtggcactaaag

SEQ ID NO: 742100 - DNA, 25 bp, Homo sapien
tttctcctaaacattctggcaaggg

SEQ ID NO: 742101 - DNA, 25 bp, Homo sapien
gacaggtacctcactgtacaggtca

SEQ ID NO: 742102 - DNA, 25 bp, Homo sapien
gtcatttccagtgccaagactaggg

SEQ ID NO: 742103 - DNA, 25 bp, Homo sapien
tatcaatgcacagtacggatgccaa

SEQ ID NO: 742104 - DNA, 25 bp, Homo sapien
cctgtacaagaacaagggacactga

SEQ ID NO: 742105 - DNA, 25 bp, Homo sapien
cattgtcaacttctagatagaaggg

SEQ ID NO: 742106 - DNA, 25 bp, Homo sapien
tagaagggagaatatgacaaatttc

SEQ ID NO: 742107 - DNA, 25 bp, Homo sapien
attgcaattcattgtcaacttctag

SEQ ID NO: 742108 - DNA, 25 bp, Homo sapien
gacaaatttccttgaaagcactctt

SEQ ID NO: 742109 - DNA, 25 bp, Homo sapien
ccattactaatacaagcattattac

SEQ ID NO: 742110 - DNA, 25 bp, Homo sapien
aatatttacatataggttttacatc

SEQ ID NO: 742111 - DNA, 25 bp, Homo sapien
tcaattttgtgggaatggatataca

SEQ ID NO: 742112 - DNA, 25 bp, Homo sapien
tccccaaaacttaacagctgtccaa

SEQ ID NO: 742113 - DNA, 25 bp, Homo sapien
ccccatccaatttatattgcagttg

SEQ ID NO: 742114 - DNA, 25 bp, Homo sapien
tgcagttgaccctggagttcttcaa

SEQ ID NO: 742115 - DNA, 25 bp, Homo sapien
aatttatattgcagttgaccctgga

SEQ ID NO: 742116 - DNA, 25 bp, Homo sapien
tatattgcagttgaccctggagttc

SEQ ID NO: 742117 - DNA, 25 bp, Homo sapien
cagctgcaaatgcacctggagttca

SEQ ID NO: 742118 - DNA, 25 bp, Homo sapien
tgtagctcctcctgtaataggcaca

SEQ ID NO: 742119 - DNA, 25 bp, Homo sapien
catttagttcattcccgtgcacctg

SEQ ID NO: 742120 - DNA, 25 bp, Homo sapien
cacaggagtcctattcctgcagcag

SEQ ID NO: 742121 - DNA, 25 bp, Homo sapien
gaaccaccaaggaactgggtgtcac

SEQ ID NO: 742122 - DNA, 25 bp, Homo sapien
tagaaccaccaaggaactgggtgtc

SEQ ID NO: 742123 - DNA, 25 bp, Homo sapien
cacatcactgatgctgatatttttg

SEQ ID NO: 742124 - DNA, 25 bp, Homo sapien
actgggtgtcacatcactgatgctg

SEQ ID NO: 742125 - DNA, 25 bp, Homo sapien
tgatctgcctatccagtctaccaat

SEQ ID NO: 742126 - DNA, 25 bp, Homo sapien
caccaatgagtccaccttgttgggt

SEQ ID NO: 742127 - DNA, 25 bp, Homo sapien
gagtccaccttgttgggtaggatct

SEQ ID NO: 742128 - DNA, 25 bp, Homo sapien
tcttgatctgcctatccagtctacc

SEQ ID NO: 742129 - DNA, 25 bp, Homo sapien
agtccctatgatgagccagagccca

SEQ ID NO: 742130 - DNA, 25 bp, Homo sapien
gacatgaataaaggtacacagtccc

SEQ ID NO: 742131 - DNA, 25 bp, Homo sapien
ctttgaagagctcgggatgcttagc

SEQ ID NO: 742132 - DNA, 25 bp, Homo sapien
gtctcttccaagcagcattcccttg

SEQ ID NO: 742133 - DNA, 25 bp, Homo sapien
gagataggactttggactacctcaa

SEQ ID NO: 742134 - DNA, 25 bp, Homo sapien
gatatcaatcgtattagcagccgtg

SEQ ID NO: 742135 - DNA, 25 bp, Homo sapien
catggactcgctactcagggcatac

SEQ ID NO: 742136 - DNA, 25 bp, Homo sapien
taaaccgtgatactcttggtggcct

SEQ ID NO: 742137 - DNA, 25 bp, Homo sapien
ttatacactagcagatcatccctcc

SEQ ID NO: 742138 - DNA, 25 bp, Homo sapien
acacaatgaaatgttactaaataca

SEQ ID NO: 742139 - DNA, 25 bp, Homo sapien
ttgattatacactagcagatcatcc

SEQ ID NO: 742140 - DNA, 25 bp, Homo sapien
aaagttattgattatacactagcag

SEQ ID NO: 742141 - DNA, 25 bp, Homo sapien
tctttaagagtgtctcgctttcctc

SEQ ID NO: 742142 - DNA, 25 bp, Homo sapien
tcttggtccatacaatctacagagt

SEQ ID NO: 742143 - DNA, 25 bp, Homo sapien
tatgtgctaagctttttgccttggg

SEQ ID NO: 742144 - DNA, 25 bp, Homo sapien
cagttcgtagagatcagctgtctca

SEQ ID NO: 742145 - DNA, 25 bp, Homo sapien
tatcaagggactgggttagttacca

SEQ ID NO: 742146 - DNA, 25 bp, Homo sapien
ggatatcccaaggtttctgctgctc

SEQ ID NO: 742147 - DNA, 25 bp, Homo sapien
cacaggccttgcgtggtaggaattc

SEQ ID NO: 742148 - DNA, 25 bp, Homo sapien
tgtatcagtacgaagaggtagggcc

SEQ ID NO: 742149 - DNA, 25 bp, Homo sapien
tgggaacccagtattaagagacttg

SEQ ID NO: 742150 - DNA, 25 bp, Homo sapien
caggaaggtctggtacaaggtataa

SEQ ID NO: 742151 - DNA, 25 bp, Homo sapien
gaaatctgtgtctggctggctctac

SEQ ID NO: 742152 - DNA, 25 bp, Homo sapien
cagatcaatgactgcctagggctgt

SEQ ID NO: 742153 - DNA, 25 bp, Homo sapien
acatgggttacaacatgagggaacc

SEQ ID NO: 742154 - DNA, 25 bp, Homo sapien
cagttgtcaggaagttaaacacaga

SEQ ID NO: 742155 - DNA, 25 bp, Homo sapien
gaaatcgacacaaaaggccatctgt

SEQ ID NO: 742156 - DNA, 25 bp, Homo sapien
actggaaccctgataatgacattgc

SEQ ID NO: 742157 - DNA, 25 bp, Homo sapien
tcatcaagactgtatggtactagca

SEQ ID NO: 742158 - DNA, 25 bp, Homo sapien
caacagaggcaagacgacagttcat

SEQ ID NO: 742159 - DNA, 25 bp, Homo sapien
taatctcaaggtcaaacaccatgga

SEQ ID NO: 742160 - DNA, 25 bp, Homo sapien
cacagcagatgtatcagagacctaa

SEQ ID NO: 742161 - DNA, 25 bp, Homo sapien
gagttctcagttggtcagtcaaggg

SEQ ID NO: 742162 - DNA, 25 bp, Homo sapien
taatgatgttctcttgagggcgcag

SEQ ID NO: 742163 - DNA, 25 bp, Homo sapien
ggaagccgcttgagacctcactagt

SEQ ID NO: 742164 - DNA, 25 bp, Homo sapien
ggcgcaggttgaaagacagcacgta

SEQ ID NO: 742165 - DNA, 25 bp, Homo sapien
ttgcagtacagtggcatcatctccg

SEQ ID NO: 742166 - DNA, 25 bp, Homo sapien
ggttgcagtacagtggcatcatctc

SEQ ID NO: 742167 - DNA, 25 bp, Homo sapien
caggttgcagtacagtggcatcatc

SEQ ID NO: 742168 - DNA, 25 bp, Homo sapien
cagtacagtggcatcatctccgctc

SEQ ID NO: 742169 - DNA, 25 bp, Homo sapien
taaggaagggcactcagataaggcg

SEQ ID NO: 742170 - DNA, 25 bp, Homo sapien
caggcagtgctttagaacccatgga

SEQ ID NO: 742171 - DNA, 25 bp, Homo sapien
gatatctgagccaacgcaacaaagg

SEQ ID NO: 742172 - DNA, 25 bp, Homo sapien
tacatgcacactccggatggctgag

SEQ ID NO: 742173 - DNA, 25 bp, Homo sapien
agaaacagcagacaagtgtttgtgg

SEQ ID NO: 742174 - DNA, 25 bp, Homo sapien
gaaacagcagacaagtgtttgtggt

SEQ ID NO: 742175 - DNA, 25 bp, Homo sapien
cttggctcagccaggccacagaaac

SEQ ID NO: 742176 - DNA, 25 bp, Homo sapien
gttttcttggctcagccaggccaca

SEQ ID NO: 742177 - DNA, 25 bp, Homo sapien
tccgattcctgttggtagggtctcc

SEQ ID NO: 742178 - DNA, 25 bp, Homo sapien
cactgtcttgcgtgggctctgtgct

SEQ ID NO: 742179 - DNA, 25 bp, Homo sapien
tagggtctcctgcaagcacactgtc

SEQ ID NO: 742180 - DNA, 25 bp, Homo sapien
ttagctccttgttatccgattcctg

SEQ ID NO: 742181 - DNA, 25 bp, Homo sapien
taaaaggctatgtactgcatgatgc

SEQ ID NO: 742182 - DNA, 25 bp, Homo sapien
tgaaatggccaaatgatagtgacgg

SEQ ID NO: 742183 - DNA, 25 bp, Homo sapien
catgtgacaagctgaaggactctca

SEQ ID NO: 742184 - DNA, 25 bp, Homo sapien
gaagaaactactgatgcatgtgaca

SEQ ID NO: 742185 - DNA, 25 bp, Homo sapien
ctgggtcatgtaaaacaaaccttca

SEQ ID NO: 742186 - DNA, 25 bp, Homo sapien
tagataccaagatggaccacatcct

SEQ ID NO: 742187 - DNA, 25 bp, Homo sapien
ctgttcataatgaatctaactagaa

SEQ ID NO: 742188 - DNA, 25 bp, Homo sapien
aagatggaccacatcctatcctggg

SEQ ID NO: 742189 - DNA, 25 bp, Homo sapien
ttgctagaagtaccgcaaagacagc

SEQ ID NO: 742190 - DNA, 25 bp, Homo sapien
gataatgctaaaccatccaagagaa

SEQ ID NO: 742191 - DNA, 25 bp, Homo sapien
taaacagccagatcttgctagaagt

SEQ ID NO: 742192 - DNA, 25 bp, Homo sapien
agtaccgcaaagacagcgccaaggg

SEQ ID NO: 742193 - DNA, 25 bp, Homo sapien
aatgactgttatcattgtaagccac

SEQ ID NO: 742194 - DNA, 25 bp, Homo sapien
ccaattgtagcccaaattgcagatt

SEQ ID NO: 742195 - DNA, 25 bp, Homo sapien
gactgttatcattgtaagccactaa

SEQ ID NO: 742196 - DNA, 25 bp, Homo sapien
ccactaagttaggagtgctttgtta

SEQ ID NO: 742197 - DNA, 25 bp, Homo sapien
cccagccattgcagtgaggaagtca

SEQ ID NO: 742198 - DNA, 25 bp, Homo sapien
gacactccttccaacaggtggtaga

SEQ ID NO: 742199 - DNA, 25 bp, Homo sapien
tcttgggataactgctcttggaacc

SEQ ID NO: 742200 - DNA, 25 bp, Homo sapien
ttcatgtcctccttgaccaacaggg

SEQ ID NO: 742201 - DNA, 25 bp, Homo sapien
gactgaaccatcctctctactttca

SEQ ID NO: 742202 - DNA, 25 bp, Homo sapien
tagcagggacttaagtgtcggcagg

SEQ ID NO: 742203 - DNA, 25 bp, Homo sapien
gtcggcaggctttggtattcacagg

SEQ ID NO: 742204 - DNA, 25 bp, Homo sapien
gggtcctcagaccaatccctcacag

SEQ ID NO: 742205 - DNA, 25 bp, Homo sapien
gcctatattggtcacagcttctctg

SEQ ID NO: 742206 - DNA, 25 bp, Homo sapien
catcagtgcctatattggtcacagc

SEQ ID NO: 742207 - DNA, 25 bp, Homo sapien
cagtgcctatattggtcacagcttc

SEQ ID NO: 742208 - DNA, 25 bp, Homo sapien
ctggaacatcagtgcctatattggt

SEQ ID NO: 742209 - DNA, 25 bp, Homo sapien
ccgttctcccttgaaatcaaggaca

SEQ ID NO: 742210 - DNA, 25 bp, Homo sapien
ggcgtaccgttctcccttgaaatca

SEQ ID NO: 742211 - DNA, 25 bp, Homo sapien
tcagggcctatcataggcgtaccgt

SEQ ID NO: 742212 - DNA, 25 bp, Homo sapien
tatcataggcgtaccgttctccctt

SEQ ID NO: 742213 - DNA, 25 bp, Homo sapien
ctcttccacttgaatcctctagtcc

SEQ ID NO: 742214 - DNA, 25 bp, Homo sapien
aagactcttccacttgaatcctcta

SEQ ID NO: 742215 - DNA, 25 bp, Homo sapien
tcttccacttgaatcctctagtcca

SEQ ID NO: 742216 - DNA, 25 bp, Homo sapien
atgaagactcttccacttgaatcct

SEQ ID NO: 742217 - DNA, 25 bp, Homo sapien
tgaacattgctcctgattcccctgc

SEQ ID NO: 742218 - DNA, 25 bp, Homo sapien
gggatgccctatccctcatgggctg

SEQ ID NO: 742219 - DNA, 25 bp, Homo sapien
aaagcctgcactgctagatgcacac

SEQ ID NO: 742220 - DNA, 25 bp, Homo sapien
tgtggcaccaaataggaaaatactc

SEQ ID NO: 742221 - DNA, 25 bp, Homo sapien
tctatgggcatcaaataaagcctgc

SEQ ID NO: 742222 - DNA, 25 bp, Homo sapien
gagttcttatgagtccaagcctggc

SEQ ID NO: 742223 - DNA, 25 bp, Homo sapien
tacagttaagcaactacaaggcggc

SEQ ID NO: 742224 - DNA, 25 bp, Homo sapien
gggagtaccacagacctcagactcg

SEQ ID NO: 742225 - DNA, 25 bp, Homo sapien
taccttcctcggctgttcactgctg

SEQ ID NO: 742226 - DNA, 25 bp, Homo sapien
gcttggtaagcactcattgactcct

SEQ ID NO: 742227 - DNA, 25 bp, Homo sapien
ggtgatactactagatcacttgtcc

SEQ ID NO: 742228 - DNA, 25 bp, Homo sapien
tactgaaaacactcttacgggttga

SEQ ID NO: 742229 - DNA, 25 bp, Homo sapien
caccagtttgatccttcacaggcct

SEQ ID NO: 742230 - DNA, 25 bp, Homo sapien
tgcagaaggtctggtcggcaaactc

SEQ ID NO: 742231 - DNA, 25 bp, Homo sapien
tgcagtgtgggatttgactcctcca

SEQ ID NO: 742232 - DNA, 25 bp, Homo sapien
tctagaaggctgagtaccatgggct

SEQ ID NO: 742233 - DNA, 25 bp, Homo sapien
taagtacccgctacaattctgcaga

SEQ ID NO: 742234 - DNA, 25 bp, Homo sapien
ccagctggcagatgcgttacagagc

SEQ ID NO: 742235 - DNA, 25 bp, Homo sapien
gatcacagctaaggggactgcccag

SEQ ID NO: 742236 - DNA, 25 bp, Homo sapien
gcaacactggcataacagagatttg

SEQ ID NO: 742237 - DNA, 25 bp, Homo sapien
cttctttcaggcttatccagaatca

SEQ ID NO: 742238 - DNA, 25 bp, Homo sapien
catagggccctcgtcttcctggtaa

SEQ ID NO: 742239 - DNA, 25 bp, Homo sapien
gagaggcctggcttcctagcgatag

SEQ ID NO: 742240 - DNA, 25 bp, Homo sapien
gaagcggagacactacagcctcttg

SEQ ID NO: 742241 - DNA, 25 bp, Homo sapien
gaatcactgctacccagaacaatgg

SEQ ID NO: 742242 - DNA, 25 bp, Homo sapien
tcctttgggtatccctggagctgtc

SEQ ID NO: 742243 - DNA, 25 bp, Homo sapien
tttgcctggaagagaggaccagacc

SEQ ID NO: 742244 - DNA, 25 bp, Homo sapien
ctggtgtttctggtaataagtgccc

SEQ ID NO: 742245 - DNA, 25 bp, Homo sapien
tggtctgcaccactggcctgggaaa

SEQ ID NO: 742246 - DNA, 25 bp, Homo sapien
tgtgtgagctacaagttattctatt

SEQ ID NO: 742247 - DNA, 25 bp, Homo sapien
cacccagccctaagtactcttttga

SEQ ID NO: 742248 - DNA, 25 bp, Homo sapien
tctcactcagtgtagtatctgtgac

SEQ ID NO: 742249 - DNA, 25 bp, Homo sapien
gacactcattcatgatggattcttg

SEQ ID NO: 742250 - DNA, 25 bp, Homo sapien
caggaccacgtgtcgcgttttaaca

SEQ ID NO: 742251 - DNA, 25 bp, Homo sapien
tcacctctgggcgaacttgggcctg

SEQ ID NO: 742252 - DNA, 25 bp, Homo sapien
caggcgctgggtaggcacttttacg

SEQ ID NO: 742253 - DNA, 25 bp, Homo sapien
cacttttacgaggagggacctggca

SEQ ID NO: 742254 - DNA, 25 bp, Homo sapien
gatagatttgtagctcacttgatga

SEQ ID NO: 742255 - DNA, 25 bp, Homo sapien
gcttaatgagagtaatctgcagaca

SEQ ID NO: 742256 - DNA, 25 bp, Homo sapien
tggtgaattgctctgctctgtctga

SEQ ID NO: 742257 - DNA, 25 bp, Homo sapien
gaaagatggtatactgtttttagag

SEQ ID NO: 742258 - DNA, 25 bp, Homo sapien
tgctgacagagaggatccacctccg

SEQ ID NO: 742259 - DNA, 25 bp, Homo sapien
gagtcttctctgacccgtgtctggg

SEQ ID NO: 742260 - DNA, 25 bp, Homo sapien
ttcttgatgagggtactaggacgcg

SEQ ID NO: 742261 - DNA, 25 bp, Homo sapien
gggatatggccaactcgggctgcaa

SEQ ID NO: 742262 - DNA, 25 bp, Homo sapien
cagtgggcaacttcaggctggttcc

SEQ ID NO: 742263 - DNA, 25 bp, Homo sapien
tgccggaaccagcagaaagggtgaa

SEQ ID NO: 742264 - DNA, 25 bp, Homo sapien
tggcagcgtcgggatttaagcccag

SEQ ID NO: 742265 - DNA, 25 bp, Homo sapien
tagaaggacctcgttcgtcttgaga

SEQ ID NO: 742266 - DNA, 25 bp, Homo sapien
caaagagggaggcaccatgacattc

SEQ ID NO: 742267 - DNA, 25 bp, Homo sapien
tgtggccttctcctaaaacagactg

SEQ ID NO: 742268 - DNA, 25 bp, Homo sapien
ggtaaatgacatagagatcgctgaa

SEQ ID NO: 742269 - DNA, 25 bp, Homo sapien
taacagtagtgaatcttgggatcgg

SEQ ID NO: 742270 - DNA, 25 bp, Homo sapien
cacctttcataccttaggcccctga

SEQ ID NO: 742271 - DNA, 25 bp, Homo sapien
ctttcataccttaggcccctgagta

SEQ ID NO: 742272 - DNA, 25 bp, Homo sapien
aatcctcacacctttcataccttag

SEQ ID NO: 742273 - DNA, 25 bp, Homo sapien
tttcataccttaggcccctgagtag

SEQ ID NO: 742274 - DNA, 25 bp, Homo sapien
tgactttgggctggtgactcctggg

SEQ ID NO: 742275 - DNA, 25 bp, Homo sapien
cttcaccagttgtccctgggtgact

SEQ ID NO: 742276 - DNA, 25 bp, Homo sapien
ttcaccagttgtccctgggtgactt

SEQ ID NO: 742277 - DNA, 25 bp, Homo sapien
tgggtgactttgggctggtgactcc

SEQ ID NO: 742278 - DNA, 25 bp, Homo sapien
tttaagctgattctttaaagatgag

SEQ ID NO: 742279 - DNA, 25 bp, Homo sapien
gctgattctttaaagatgagtagaa

SEQ ID NO: 742280 - DNA, 25 bp, Homo sapien
acagggatatagagatgttgaagtt

SEQ ID NO: 742281 - DNA, 25 bp, Homo sapien
ggatatagagatgttgaagtttacc

SEQ ID NO: 742282 - DNA, 25 bp, Homo sapien
ctgctacataccagctgagttactt

SEQ ID NO: 742283 - DNA, 25 bp, Homo sapien
gctgagttactttggtcaagctctt

SEQ ID NO: 742284 - DNA, 25 bp, Homo sapien
gctacataccagctgagttactttg

SEQ ID NO: 742285 - DNA, 25 bp, Homo sapien
ctgagttactttggtcaagctcttg

SEQ ID NO: 742286 - DNA, 25 bp, Homo sapien
tttggaagagatgcgaaagcaggca

SEQ ID NO: 742287 - DNA, 25 bp, Homo sapien
aagcaaagcctatttattgagagcc

SEQ ID NO: 742288 - DNA, 25 bp, Homo sapien
gagcctgctctaacaagggagtcac

SEQ ID NO: 742289 - DNA, 25 bp, Homo sapien
gaaaggggcatcttgaccagacccc

SEQ ID NO: 742290 - DNA, 25 bp, Homo sapien
tggtcactgcattgtacagcaacgt

SEQ ID NO: 742291 - DNA, 25 bp, Homo sapien
caggaagcagaatggtcgttgccaa

SEQ ID NO: 742292 - DNA, 25 bp, Homo sapien
tactcaaatttaccgagacaggaag

SEQ ID NO: 742293 - DNA, 25 bp, Homo sapien
gcaacgtgaatgtgctgaacgctac

SEQ ID NO: 742294 - DNA, 25 bp, Homo sapien
tcaaccggtaagcatccaacagcag

SEQ ID NO: 742295 - DNA, 25 bp, Homo sapien
tcctagggaagcagaccacggagtt

SEQ ID NO: 742296 - DNA, 25 bp, Homo sapien
tgatgacttcacttgccctatgcaa

SEQ ID NO: 742297 - DNA, 25 bp, Homo sapien
cagcaggtctactgtacaaataggt

SEQ ID NO: 742298 - DNA, 25 bp, Homo sapien
tttcctggaacattatagcaatgaa

SEQ ID NO: 742299 - DNA, 25 bp, Homo sapien
tcctggaacattatagcaatgaatt

SEQ ID NO: 742300 - DNA, 25 bp, Homo sapien
caatttcctggaacattatagcaat

SEQ ID NO: 742301 - DNA, 25 bp, Homo sapien
ctggaacattatagcaatgaatttg

SEQ ID NO: 742302 - DNA, 25 bp, Homo sapien
aaaaacagggacactggaccctgca

SEQ ID NO: 742303 - DNA, 25 bp, Homo sapien
gaaaaacagggacactggaccctgc

SEQ ID NO: 742304 - DNA, 25 bp, Homo sapien
ctgaggtggaagctggccagacact

SEQ ID NO: 742305 - DNA, 25 bp, Homo sapien
gtgctctgctggcatttgggctgca

SEQ ID NO: 742306 - DNA, 25 bp, Homo sapien
aagtccagctcttgtccagatgttg

SEQ ID NO: 742307 - DNA, 25 bp, Homo sapien
taggctcgtgaacagctttcaagtc

SEQ ID NO: 742308 - DNA, 25 bp, Homo sapien
ccagcaccactagcgctgagacact

SEQ ID NO: 742309 - DNA, 25 bp, Homo sapien
ttgacatagcgctgccacctggtgg

SEQ ID NO: 742310 - DNA, 25 bp, Homo sapien
aataatggtgtaggacatcatgtcc

SEQ ID NO: 742311 - DNA, 25 bp, Homo sapien
gcagtgcctgttgacatagcgctgc

SEQ ID NO: 742312 - DNA, 25 bp, Homo sapien
ggagaatctggagaggatttaatta

SEQ ID NO: 742313 - DNA, 25 bp, Homo sapien
gacaaaccatgtcaccgcctaaaac

SEQ ID NO: 742314 - DNA, 25 bp, Homo sapien
taaaaccaactcaatagtctaagga

SEQ ID NO: 742315 - DNA, 25 bp, Homo sapien
ttggcaaaaggattagcaattgaat

SEQ ID NO: 742316 - DNA, 25 bp, Homo sapien
gaggtttcctttatagttccacatg

SEQ ID NO: 742317 - DNA, 25 bp, Homo sapien
ggaagtttacatcttgctccctggg

SEQ ID NO: 742318 - DNA, 25 bp, Homo sapien
gcacttccatcctacagggaccaga

SEQ ID NO: 742319 - DNA, 25 bp, Homo sapien
cagtttttgcccgaatgatgaagga

SEQ ID NO: 742320 - DNA, 25 bp, Homo sapien
ccaggtgtctaggtgagacgccaca

SEQ ID NO: 742321 - DNA, 25 bp, Homo sapien
ggacagctctgaccccgagaagatt

SEQ ID NO: 742322 - DNA, 25 bp, Homo sapien
gatgcacattctaaccagagtcaag

SEQ ID NO: 742323 - DNA, 25 bp, Homo sapien
tttccacggcagagtttgggcgtca

SEQ ID NO: 742324 - DNA, 25 bp, Homo sapien
taggagacactagcttgtccggccg

SEQ ID NO: 742325 - DNA, 25 bp, Homo sapien
aaatatgaaaccactgttccaataa

SEQ ID NO: 742326 - DNA, 25 bp, Homo sapien
caattctgaagccattctaattcta

SEQ ID NO: 742327 - DNA, 25 bp, Homo sapien
caatagtgtatgttgacaattctga

SEQ ID NO: 742328 - DNA, 25 bp, Homo sapien
ggcatctagcagagataaatatgaa

SEQ ID NO: 742329 - DNA, 25 bp, Homo sapien
attatgataatgcagcagggccacc

SEQ ID NO: 742330 - DNA, 25 bp, Homo sapien
cactttcggtagagctaggaataac

SEQ ID NO: 742331 - DNA, 25 bp, Homo sapien
ggattagtaagggatgccacccaaa

SEQ ID NO: 742332 - DNA, 25 bp, Homo sapien
taggaatgagagttagcagccttgc

SEQ ID NO: 742333 - DNA, 25 bp, Homo sapien
tctcaggtctagtactaaggcctcc

SEQ ID NO: 742334 - DNA, 25 bp, Homo sapien
tcttgcagaccactacaggaaacac

SEQ ID NO: 742335 - DNA, 25 bp, Homo sapien
tcaggcctagtcagcatatggtgct

SEQ ID NO: 742336 - DNA, 25 bp, Homo sapien
tgctgtcctaagaagggtcaggcct

SEQ ID NO: 742337 - DNA, 25 bp, Homo sapien
ttttttccataaatccgcttatgat

SEQ ID NO: 742338 - DNA, 25 bp, Homo sapien
tccataaatccgcttatgatttact

SEQ ID NO: 742339 - DNA, 25 bp, Homo sapien
attatagacaacttgattatctaaa

SEQ ID NO: 742340 - DNA, 25 bp, Homo sapien
cataaatccgcttatgatttactcc

SEQ ID NO: 742341 - DNA, 25 bp, Homo sapien
tgtccatgtataaagaaagactctg

SEQ ID NO: 742342 - DNA, 25 bp, Homo sapien
tgtataaagaaagactctgctgctg

SEQ ID NO: 742343 - DNA, 25 bp, Homo sapien
tgcaaaggaatgtggatgtgatagt

SEQ ID NO: 742344 - DNA, 25 bp, Homo sapien
gaggagcctggattgtgtccatgta

SEQ ID NO: 742345 - DNA, 25 bp, Homo sapien
tctaaccttatgaaagaccctgatc

SEQ ID NO: 742346 - DNA, 25 bp, Homo sapien
tgttatatcttactggcaaatggca

SEQ ID NO: 742347 - DNA, 25 bp, Homo sapien
tgatccagaacttgccagctaaact

SEQ ID NO: 742348 - DNA, 25 bp, Homo sapien
tgccaatagtcagtgaggacctgtg

SEQ ID NO: 742349 - DNA, 25 bp, Homo sapien
ggttgcgagcgaacagatttgcaca

SEQ ID NO: 742350 - DNA, 25 bp, Homo sapien
gagcatgatgaaatcgccgcgtaaa

SEQ ID NO: 742351 - DNA, 25 bp, Homo sapien
gacacagctctgagcgagacctgca

SEQ ID NO: 742352 - DNA, 25 bp, Homo sapien
cgcagattcgacacaaaacccggaa

SEQ ID NO: 742353 - DNA, 25 bp, Homo sapien
ggcggcggcgggcaaggagatcggg

SEQ ID NO: 742354 - DNA, 25 bp, Homo sapien
aggagcgagggtcgggctaagagcc

SEQ ID NO: 742355 - DNA, 25 bp, Homo sapien
ggcgcgagcacctctaagcagcact

SEQ ID NO: 742356 - DNA, 25 bp, Homo sapien
gagcacctctaagcagcactggacg

SEQ ID NO: 742357 - DNA, 25 bp, Homo sapien
gctggcgcactgctagcctcagagg

SEQ ID NO: 742358 - DNA, 25 bp, Homo sapien
ctgctggcgcactgctagcctcaga

SEQ ID NO: 742359 - DNA, 25 bp, Homo sapien
tgctggcgcactgctagcctcagag

SEQ ID NO: 742360 - DNA, 25 bp, Homo sapien
tcttgcgggctttgagctcagccac

SEQ ID NO: 742361 - DNA, 25 bp, Homo sapien
tttgcttccagaaccctcttgcggg

SEQ ID NO: 742362 - DNA, 25 bp, Homo sapien
actgctttgtctacgtctacttggg

SEQ ID NO: 742363 - DNA, 25 bp, Homo sapien
tctttgagttttcgcacaagatctc

SEQ ID NO: 742364 - DNA, 25 bp, Homo sapien
aacctcctcttcagggtatcttcca

SEQ ID NO: 742365 - DNA, 25 bp, Homo sapien
tttttgctcggtctacaatatcatc

SEQ ID NO: 742366 - DNA, 25 bp, Homo sapien
caatatcatctttgggctgtaacgc

SEQ ID NO: 742367 - DNA, 25 bp, Homo sapien
agcttgatcatagaaaaacctcctc

SEQ ID NO: 742368 - DNA, 25 bp, Homo sapien
cctcttggataaagtgctgcctcca

SEQ ID NO: 742369 - DNA, 25 bp, Homo sapien
tattgttcttcaaagcacagccaac

SEQ ID NO: 742370 - DNA, 25 bp, Homo sapien
ccaggatctgttcctcttggataaa

SEQ ID NO: 742371 - DNA, 25 bp, Homo sapien
tgcctccaggtctgaataatattgt

SEQ ID NO: 742372 - DNA, 25 bp, Homo sapien
aaatttgtctacatggccagaggtc

SEQ ID NO: 742373 - DNA, 25 bp, Homo sapien
gcaaatttgtctacatggccagagg

SEQ ID NO: 742374 - DNA, 25 bp, Homo sapien
cttttaatagatggtcagcacgaaa

SEQ ID NO: 742375 - DNA, 25 bp, Homo sapien
tagatggtcagcacgaaaacattct

SEQ ID NO: 742376 - DNA, 25 bp, Homo sapien
gatttcttttcgacagaacacttct

SEQ ID NO: 742377 - DNA, 25 bp, Homo sapien
tcttttcgacagaacacttcttatc

SEQ ID NO: 742378 - DNA, 25 bp, Homo sapien
tctgatttcttttcgacagaacact

SEQ ID NO: 742379 - DNA, 25 bp, Homo sapien
tttctgatttcttttcgacagaaca

SEQ ID NO: 742380 - DNA, 25 bp, Homo sapien
catttatctagaaaggagggcatac

SEQ ID NO: 742381 - DNA, 25 bp, Homo sapien
gatagtagactaaatataccttgtt

SEQ ID NO: 742382 - DNA, 25 bp, Homo sapien
tgcaaccatttatctagaaaggagg

SEQ ID NO: 742383 - DNA, 25 bp, Homo sapien
gaaaggagggcatacaaatatctat

SEQ ID NO: 742384 - DNA, 25 bp, Homo sapien
ccaatgaaagtcttgaacattaagt

SEQ ID NO: 742385 - DNA, 25 bp, Homo sapien
cctccaggcccaatgaaagtcttga

SEQ ID NO: 742386 - DNA, 25 bp, Homo sapien
acactggaggggatagatcatttcc

SEQ ID NO: 742387 - DNA, 25 bp, Homo sapien
caaaaagatccgcaagttcttgctg

SEQ ID NO: 742388 - DNA, 25 bp, Homo sapien
aaattcaagaaaatcccctgtgcag

SEQ ID NO: 742389 - DNA, 25 bp, Homo sapien
tcagtccagatcgaggggagatctc

SEQ ID NO: 742390 - DNA, 25 bp, Homo sapien
tccaaaagtcgtttgaaattcaaga

SEQ ID NO: 742391 - DNA, 25 bp, Homo sapien
ggcaactttccttggttgaactcca

SEQ ID NO: 742392 - DNA, 25 bp, Homo sapien
tgtcctcacatagcttataattggg

SEQ ID NO: 742393 - DNA, 25 bp, Homo sapien
ttcaacaactaggaaacatcttctg

SEQ ID NO: 742394 - DNA, 25 bp, Homo sapien
aatagtgtctcttatttggtcctgc

SEQ ID NO: 742395 - DNA, 25 bp, Homo sapien
tggtcctgctgcacctatgttttag

SEQ ID NO: 742396 - DNA, 25 bp, Homo sapien
tccatactatagtggtctttttcac

SEQ ID NO: 742397 - DNA, 25 bp, Homo sapien
taaacatgatctaacttctctgaag

SEQ ID NO: 742398 - DNA, 25 bp, Homo sapien
taaaataaacatgatctaacttctc

SEQ ID NO: 742399 - DNA, 25 bp, Homo sapien
tgaattaaatttgtctgggtagttg

SEQ ID NO: 742400 - DNA, 25 bp, Homo sapien
tctcactgggatctacaaagtgctc

SEQ ID NO: 742401 - DNA, 25 bp, Homo sapien
atctcccaggcgcattttccgagcg

SEQ ID NO: 742402 - DNA, 25 bp, Homo sapien
tccgagcggactgtccgctgacctg

SEQ ID NO: 742403 - DNA, 25 bp, Homo sapien
acaaataaaggtgaaggtctgccac

SEQ ID NO: 742404 - DNA, 25 bp, Homo sapien
cggaagcggagtttatctggagata

SEQ ID NO: 742405 - DNA, 25 bp, Homo sapien
tccaaccttcgtgaggtagaggtag

SEQ ID NO: 742406 - DNA, 25 bp, Homo sapien
cagtcacaggcataatgggccatct

SEQ ID NO: 742407 - DNA, 25 bp, Homo sapien
gatgcggccaatgaaatagcctaat

SEQ ID NO: 742408 - DNA, 25 bp, Homo sapien
catttgaggaaggtagttcttaagc

SEQ ID NO: 742409 - DNA, 25 bp, Homo sapien
gagatcagaatcaactagtatattc

SEQ ID NO: 742410 - DNA, 25 bp, Homo sapien
gaggaaggtagttcttaagccagag

SEQ ID NO: 742411 - DNA, 25 bp, Homo sapien
aaagctactacatagctcattgagc

SEQ ID NO: 742412 - DNA, 25 bp, Homo sapien
tcctatatgcaaatgcctttcgtcc

SEQ ID NO: 742413 - DNA, 25 bp, Homo sapien
gccaccaatatagacagcatctcct

SEQ ID NO: 742414 - DNA, 25 bp, Homo sapien
tcagccttgttttagatgccacatt

SEQ ID NO: 742415 - DNA, 25 bp, Homo sapien
tcgtccctccgcttcaatactgatg

SEQ ID NO: 742416 - DNA, 25 bp, Homo sapien
ctggactaaagtctctttctatgta

SEQ ID NO: 742417 - DNA, 25 bp, Homo sapien
tatactggaaccagtgacccctgga

SEQ ID NO: 742418 - DNA, 25 bp, Homo sapien
ggaagcctctctaacacccaataag

SEQ ID NO: 742419 - DNA, 25 bp, Homo sapien
tgaaccaagggtatactggaaccag

SEQ ID NO: 742420 - DNA, 25 bp, Homo sapien
ctttggtggctcgtgcatgacagga

SEQ ID NO: 742421 - DNA, 25 bp, Homo sapien
caggagaggtcataacaggaacgat

SEQ ID NO: 742422 - DNA, 25 bp, Homo sapien
ggactttggtggctcgtgcatgaca

SEQ ID NO: 742423 - DNA, 25 bp, Homo sapien
cgatcagcacatccaacaatctcaa

SEQ ID NO: 742424 - DNA, 25 bp, Homo sapien
gttctttcagaggtttctcagctac

SEQ ID NO: 742425 - DNA, 25 bp, Homo sapien
ggttctttcagaggtttctcagcta

SEQ ID NO: 742426 - DNA, 25 bp, Homo sapien
gggttctttcagaggtttctcagct

SEQ ID NO: 742427 - DNA, 25 bp, Homo sapien
gtgaatcctgagtttttggagtgac

SEQ ID NO: 742428 - DNA, 25 bp, Homo sapien
cattagcaagatgttcacatgtgaa

SEQ ID NO: 742429 - DNA, 25 bp, Homo sapien
agtgtctaaaacatctccatttatc

SEQ ID NO: 742430 - DNA, 25 bp, Homo sapien
aagacttggacttattcattagcaa

SEQ ID NO: 742431 - DNA, 25 bp, Homo sapien
caattgctcccttactgggttcaaa

SEQ ID NO: 742432 - DNA, 25 bp, Homo sapien
ccagttttgcatccttcttatatgc

SEQ ID NO: 742433 - DNA, 25 bp, Homo sapien
accaattgctcccttactgggttca

SEQ ID NO: 742434 - DNA, 25 bp, Homo sapien
atgccttaccaattgctcccttact

SEQ ID NO: 742435 - DNA, 25 bp, Homo sapien
tagcactcatcacaaatggcaagat

SEQ ID NO: 742436 - DNA, 25 bp, Homo sapien
gtagcactcatcacaaatggcaaga

SEQ ID NO: 742437 - DNA, 25 bp, Homo sapien
tccatttctgtaatgtagcactcat

SEQ ID NO: 742438 - DNA, 25 bp, Homo sapien
catttctgtaatgtagcactcatca

SEQ ID NO: 742439 - DNA, 25 bp, Homo sapien
gcctgaagaagtgcctttaacaatt

SEQ ID NO: 742440 - DNA, 25 bp, Homo sapien
tttccaggtgattgctctagagttc

SEQ ID NO: 742441 - DNA, 25 bp, Homo sapien
tcccaccctttgtgctactgatagc

SEQ ID NO: 742442 - DNA, 25 bp, Homo sapien
tataatgtatacacctcacaagagt

SEQ ID NO: 742443 - DNA, 25 bp, Homo sapien
ttctggaatctcttcacattgatca

SEQ ID NO: 742444 - DNA, 25 bp, Homo sapien
tttctggaatctcttcacattgatc

SEQ ID NO: 742445 - DNA, 25 bp, Homo sapien
ggcagtagcttctcaaacacccatt

SEQ ID NO: 742446 - DNA, 25 bp, Homo sapien
caaattactcattgcctaattcaca

SEQ ID NO: 742447 - DNA, 25 bp, Homo sapien
ccactggcagtagcttctcaaacac

SEQ ID NO: 742448 - DNA, 25 bp, Homo sapien
cattactactccgtttccaggaatt

SEQ ID NO: 742449 - DNA, 25 bp, Homo sapien
caataacattctctcaaataccaca

SEQ ID NO: 742450 - DNA, 25 bp, Homo sapien
aattcaataacattctctcaaatac

SEQ ID NO: 742451 - DNA, 25 bp, Homo sapien
gagatagaaattcaataacattctc

SEQ ID NO: 742452 - DNA, 25 bp, Homo sapien
aaaagagatagaaattcaataacat

SEQ ID NO: 742453 - DNA, 25 bp, Homo sapien
catggaatgtatgttcaaataccgt

SEQ ID NO: 742454 - DNA, 25 bp, Homo sapien
gttcatctccttctcgtacatggaa

SEQ ID NO: 742455 - DNA, 25 bp, Homo sapien
caaataccgtatacatgatcctacc

SEQ ID NO: 742456 - DNA, 25 bp, Homo sapien
caggccgaaggaaggttcaattaca

SEQ ID NO: 742457 - DNA, 25 bp, Homo sapien
gaatgctaggaaaggctatacccca

SEQ ID NO: 742458 - DNA, 25 bp, Homo sapien
aaatgtcctagaaagaaccacacgg

SEQ ID NO: 742459 - DNA, 25 bp, Homo sapien
tttcatgcagtttgagagggttccc

SEQ ID NO: 742460 - DNA, 25 bp, Homo sapien
cgtacactcaagctttagaatggcc

SEQ ID NO: 742461 - DNA, 25 bp, Homo sapien
caaatggattgaggaactaggtgct

SEQ ID NO: 742462 - DNA, 25 bp, Homo sapien
aatatggctgctcacatcacagaag

SEQ ID NO: 742463 - DNA, 25 bp, Homo sapien
gaatatcccactctaagtaaggcct

SEQ ID NO: 742464 - DNA, 25 bp, Homo sapien
caaagcttgaagcagacttgacatc

SEQ ID NO: 742465 - DNA, 25 bp, Homo sapien
ggtttcagctccgaatttaggccaa

SEQ ID NO: 742466 - DNA, 25 bp, Homo sapien
caagtggcagtgacccaaaccaaag

SEQ ID NO: 742467 - DNA, 25 bp, Homo sapien
tcagcaagtgttcaagcataacgtc

SEQ ID NO: 742468 - DNA, 25 bp, Homo sapien
aaagactttctgtggagactaccta

SEQ ID NO: 742469 - DNA, 25 bp, Homo sapien
gaggacggaacatttgaatggagca

SEQ ID NO: 742470 - DNA, 25 bp, Homo sapien
gaacatttgaatggagcaactacag

SEQ ID NO: 742471 - DNA, 25 bp, Homo sapien
aatggagcaactacagcagggaaac

SEQ ID NO: 742472 - DNA, 25 bp, Homo sapien
ctcagtgggaggacggaacatttga

SEQ ID NO: 742473 - DNA, 25 bp, Homo sapien
gctcaggagacttataaatgggacc

SEQ ID NO: 742474 - DNA, 25 bp, Homo sapien
ggttccctcgatgaacttggcacca

SEQ ID NO: 742475 - DNA, 25 bp, Homo sapien
tggctctaagcaggtcaatggactc

SEQ ID NO: 742476 - DNA, 25 bp, Homo sapien
tatggttgctacactccactcaggt

SEQ ID NO: 742477 - DNA, 25 bp, Homo sapien
tcttatctgccgcattgagtcacgg

SEQ ID NO: 742478 - DNA, 25 bp, Homo sapien
gattgacccagaggaatcgtctact

SEQ ID NO: 742479 - DNA, 25 bp, Homo sapien
tggcatagcgccttccgattgaccc

SEQ ID NO: 742480 - DNA, 25 bp, Homo sapien
gagtcacggtccctcagagttgcag

SEQ ID NO: 742481 - DNA, 25 bp, Homo sapien
tcaggaaaccttacacagagccaaa

SEQ ID NO: 742482 - DNA, 25 bp, Homo sapien
gaattacataagactggcaaactgg

SEQ ID NO: 742483 - DNA, 25 bp, Homo sapien
cagtcaagtaactcgtgtgagggaa

SEQ ID NO: 742484 - DNA, 25 bp, Homo sapien
aactattagaacaaacaggactcag

SEQ ID NO: 742485 - DNA, 25 bp, Homo sapien
ttgccattggctaggtcttggacta

SEQ ID NO: 742486 - DNA, 25 bp, Homo sapien
gccattggctaggtcttggactatg

SEQ ID NO: 742487 - DNA, 25 bp, Homo sapien
gatgttgccattggctaggtcttgg

SEQ ID NO: 742488 - DNA, 25 bp, Homo sapien
cattggctaggtcttggactatgct

SEQ ID NO: 742489 - DNA, 25 bp, Homo sapien
cattcctcgattgtctcttttttac

SEQ ID NO: 742490 - DNA, 25 bp, Homo sapien
tcattcctcgattgtctctttttta

SEQ ID NO: 742491 - DNA, 25 bp, Homo sapien
tattagcgcaagtggtcaaaagttg

SEQ ID NO: 742492 - DNA, 25 bp, Homo sapien
ttttattagcgcaagtggtcaaaag

SEQ ID NO: 742493 - DNA, 25 bp, Homo sapien
gcgcaagtggtcaaaagttgtcaaa

SEQ ID NO: 742494 - DNA, 25 bp, Homo sapien
ttttttttattagcgcaagtggtca

SEQ ID NO: 742495 - DNA, 25 bp, Homo sapien
gctgcaggccttttgcagagtacag

SEQ ID NO: 742496 - DNA, 25 bp, Homo sapien
gaggactccgagtgtactacagagg

SEQ ID NO: 742497 - DNA, 25 bp, Homo sapien
gggcaccactctattaagtttggaa

SEQ ID NO: 742498 - DNA, 25 bp, Homo sapien
gccttcgtgcccaaccattcagtgg

SEQ ID NO: 742499 - DNA, 25 bp, Homo sapien
gtaaagggctcgaaggcagggccac

SEQ ID NO: 742500 - DNA, 25 bp, Homo sapien
cgtcaggtcgtaaagggctcgaagg

SEQ ID NO: 742501 - DNA, 25 bp, Homo sapien
gtcgtaaagggctcgaaggcagggc

SEQ ID NO: 742502 - DNA, 25 bp, Homo sapien
tcaggtcgtaaagggctcgaaggca

SEQ ID NO: 742503 - DNA, 25 bp, Homo sapien
gaggccagtcccagacagagggcat

SEQ ID NO: 742504 - DNA, 25 bp, Homo sapien
gcccagaggccagtcccagacagag

SEQ ID NO: 742505 - DNA, 25 bp, Homo sapien
gagcccagaggccagtcccagacag

SEQ ID NO: 742506 - DNA, 25 bp, Homo sapien
cagagcccagaggccagtcccagac

SEQ ID NO: 742507 - DNA, 25 bp, Homo sapien
gtgtgccagatatggaagtaacaga

SEQ ID NO: 742508 - DNA, 25 bp, Homo sapien
cagggtgtgccagatatggaagtaa

SEQ ID NO: 742509 - DNA, 25 bp, Homo sapien
aacaccagggtgtgccagatatgga

SEQ ID NO: 742510 - DNA, 25 bp, Homo sapien
caagtttcctgtttcaagaaactca

SEQ ID NO: 742511 - DNA, 25 bp, Homo sapien
tggtaaatgacacacggcggcagga

SEQ ID NO: 742512 - DNA, 25 bp, Homo sapien
agctggtaaatgacacacggcggca

SEQ ID NO: 742513 - DNA, 25 bp, Homo sapien
gcaggagtggcgagtggtggaacat

SEQ ID NO: 742514 - DNA, 25 bp, Homo sapien
gctggggtacaagctggtaaatgac

SEQ ID NO: 742515 - DNA, 25 bp, Homo sapien
ttagaaagtcttactgcatacccag

SEQ ID NO: 742516 - DNA, 25 bp, Homo sapien
caaggagccgcaaatggtttggccc

SEQ ID NO: 742517 - DNA, 25 bp, Homo sapien
gatggccgcatccattagcatcatc

SEQ ID NO: 742518 - DNA, 25 bp, Homo sapien
gctcttgtagaacaaggagccgcaa

SEQ ID NO: 742519 - DNA, 25 bp, Homo sapien
ttccaggcttggcttccgtccctgt

SEQ ID NO: 742520 - DNA, 25 bp, Homo sapien
caggcttggcttccgtccctgtgtc

SEQ ID NO: 742521 - DNA, 25 bp, Homo sapien
cagttgaccaccagggcagcttcca

SEQ ID NO: 742522 - DNA, 25 bp, Homo sapien
tcagttgaccaccagggcagcttcc

SEQ ID NO: 742523 - DNA, 25 bp, Homo sapien
tgtatgtaccagcttccttaaaggg

SEQ ID NO: 742524 - DNA, 25 bp, Homo sapien
cagggcttggttcgcttcagaggca

SEQ ID NO: 742525 - DNA, 25 bp, Homo sapien
tctgggagactcagcgagagtgcca

SEQ ID NO: 742526 - DNA, 25 bp, Homo sapien
gcaagagctcagtgtcaagacccag

SEQ ID NO: 742527 - DNA, 25 bp, Homo sapien
gagtgtgtgcccatccgtctacgtt

SEQ ID NO: 742528 - DNA, 25 bp, Homo sapien
gactacagagtcctgcaagagaaga

SEQ ID NO: 742529 - DNA, 25 bp, Homo sapien
cactctgggcatggaaaccaggcct

SEQ ID NO: 742530 - DNA, 25 bp, Homo sapien
gaatatagggtctcatgtcccagcc

SEQ ID NO: 742531 - DNA, 25 bp, Homo sapien
cacagccactcagcatgtaagcagc

SEQ ID NO: 742532 - DNA, 25 bp, Homo sapien
cagctggagagcacttaaacctcgg

SEQ ID NO: 742533 - DNA, 25 bp, Homo sapien
taaacctcggcctttctgacgccaa

SEQ ID NO: 742534 - DNA, 25 bp, Homo sapien
tcctgagacgatgagacctggagca

SEQ ID NO: 742535 - DNA, 25 bp, Homo sapien
ctggctgtgggaagttcagccagca

SEQ ID NO: 742536 - DNA, 25 bp, Homo sapien
cctcgagtgaagactcacaggtgct

SEQ ID NO: 742537 - DNA, 25 bp, Homo sapien
tgtgggaagttcagccagcatgctg

SEQ ID NO: 742538 - DNA, 25 bp, Homo sapien
cccaagagagaagcctcgagtgaag

SEQ ID NO: 742539 - DNA, 25 bp, Homo sapien
catgactgaagagtgggaaggcacc

SEQ ID NO: 742540 - DNA, 25 bp, Homo sapien
ccctggtgatcctgttgcgttctta

SEQ ID NO: 742541 - DNA, 25 bp, Homo sapien
aagcaggaacccgtgagacctggcc

SEQ ID NO: 742542 - DNA, 25 bp, Homo sapien
caaaacaccatgtcgaagcaggaac

SEQ ID NO: 742543 - DNA, 25 bp, Homo sapien
gtagtaagtagccaagtagtccctg

SEQ ID NO: 742544 - DNA, 25 bp, Homo sapien
acttcagcatctcggcctcgggtga

SEQ ID NO: 742545 - DNA, 25 bp, Homo sapien
gcaggaagtgcttctggtactcatc

SEQ ID NO: 742546 - DNA, 25 bp, Homo sapien
gagacattccaagttaaacttcagc

SEQ ID NO: 742547 - DNA, 25 bp, Homo sapien
tggctgtgcaaggtcaggactgaac

SEQ ID NO: 742548 - DNA, 25 bp, Homo sapien
gggcacaggcgatcccgtcccactg

SEQ ID NO: 742549 - DNA, 25 bp, Homo sapien
cacagacacatctaggctgcacact

SEQ ID NO: 742550 - DNA, 25 bp, Homo sapien
cccgtcccactgcaaccctgctgtt

SEQ ID NO: 742551 - DNA, 25 bp, Homo sapien
taaagtcggagagagtgatgtcttg

SEQ ID NO: 742552 - DNA, 25 bp, Homo sapien
atgtcaatcagcgtgtccccttgga

SEQ ID NO: 742553 - DNA, 25 bp, Homo sapien
ttccagctcacaggcgaatttcacc

SEQ ID NO: 742554 - DNA, 25 bp, Homo sapien
cagctcctcccggttgcggtcggta

SEQ ID NO: 742555 - DNA, 25 bp, Homo sapien
cttgagcacccgcttcaccgctgcc

SEQ ID NO: 742556 - DNA, 25 bp, Homo sapien
acttgagcacccgcttcaccgctgc

SEQ ID NO: 742557 - DNA, 25 bp, Homo sapien
gagcacccgcttcaccgctgcccgc

SEQ ID NO: 742558 - DNA, 25 bp, Homo sapien
ttgagcacccgcttcaccgctgccc

SEQ ID NO: 742559 - DNA, 25 bp, Homo sapien
tgagcacacagtcggcgagaggcaa

SEQ ID NO: 742560 - DNA, 25 bp, Homo sapien
cacacagtcggcgagaggcaacaca

SEQ ID NO: 742561 - DNA, 25 bp, Homo sapien
cagtcggcgagaggcaacacagccg

SEQ ID NO: 742562 - DNA, 25 bp, Homo sapien
ggtgagcacacagtcggcgagaggc

SEQ ID NO: 742563 - DNA, 25 bp, Homo sapien
gagccgaagcgtgacagtggtcacc

SEQ ID NO: 742564 - DNA, 25 bp, Homo sapien
accaggtggccacccggcttgagca

SEQ ID NO: 742565 - DNA, 25 bp, Homo sapien
cagcgcggtaggcatcaaggctaca

SEQ ID NO: 742566 - DNA, 25 bp, Homo sapien
cagtgaggcaaggttgcacagggca

SEQ ID NO: 742567 - DNA, 25 bp, Homo sapien
ggcagcattggtgacagagtagctc

SEQ ID NO: 742568 - DNA, 25 bp, Homo sapien
caggcttcttgcgagccacaatgaa

SEQ ID NO: 742569 - DNA, 25 bp, Homo sapien
caatgaagcagaccccattgttggc

SEQ ID NO: 742570 - DNA, 25 bp, Homo sapien
gggccacgcaggaaaattcacgctt

SEQ ID NO: 742571 - DNA, 25 bp, Homo sapien
tctaaaaccacgtccctgggtgctc

SEQ ID NO: 742572 - DNA, 25 bp, Homo sapien
ggtatgttccagctgactccaatca

SEQ ID NO: 742573 - DNA, 25 bp, Homo sapien
tagtctagaggcagtggtatgttcc

SEQ ID NO: 742574 - DNA, 25 bp, Homo sapien
tctagcatacagatggccaaggcct

SEQ ID NO: 742575 - DNA, 25 bp, Homo sapien
gcatacatgcttgtccccataacca

SEQ ID NO: 742576 - DNA, 25 bp, Homo sapien
aaagcatacatgcttgtccccataa

SEQ ID NO: 742577 - DNA, 25 bp, Homo sapien
ataaaagcatacatgcttgtcccca

SEQ ID NO: 742578 - DNA, 25 bp, Homo sapien
agcatacatgcttgtccccataacc

SEQ ID NO: 742579 - DNA, 25 bp, Homo sapien
gatggcaggatgtcgtgaattgaca

SEQ ID NO: 742580 - DNA, 25 bp, Homo sapien
gagtcgtgttattaattaactccat

SEQ ID NO: 742581 - DNA, 25 bp, Homo sapien
tgtcgtgaattgacaagagtcgtgt

SEQ ID NO: 742582 - DNA, 25 bp, Homo sapien
accagtgatggcaggatgtcgtgaa

SEQ ID NO: 742583 - DNA, 25 bp, Homo sapien
ttgacggtgggggcaaggaagccca

SEQ ID NO: 742584 - DNA, 25 bp, Homo sapien
tccggcgcagtatggccgcgttgcc

SEQ ID NO: 742585 - DNA, 25 bp, Homo sapien
caccaggcaactgggtctgtccggc

SEQ ID NO: 742586 - DNA, 25 bp, Homo sapien
ggccgcgttgccgtggcgacggcgg

SEQ ID NO: 742587 - DNA, 25 bp, Homo sapien
ggcgtcggcgcggcaagaactcctc

SEQ ID NO: 742588 - DNA, 25 bp, Homo sapien
aactccctgaccaaggaggcggcca

SEQ ID NO: 742589 - DNA, 25 bp, Homo sapien
ggaactccctgaccaaggaggcggc

SEQ ID NO: 742590 - DNA, 25 bp, Homo sapien
gaactccctgaccaaggaggcggcc

SEQ ID NO: 742591 - DNA, 25 bp, Homo sapien
actagggggaccagcgaagaccctg

SEQ ID NO: 742592 - DNA, 25 bp, Homo sapien
cagagaaactagggggaccagcgaa

SEQ ID NO: 742593 - DNA, 25 bp, Homo sapien
gcgaagaccctgaagggagcaccca

SEQ ID NO: 742594 - DNA, 25 bp, Homo sapien
gggaccagcgaagaccctgaaggga

SEQ ID NO: 742595 - DNA, 25 bp, Homo sapien
gatgcaaaacctttcgaagatcatt

SEQ ID NO: 742596 - DNA, 25 bp, Homo sapien
ttgtttatgctgaggtcagagcgtg

SEQ ID NO: 742597 - DNA, 25 bp, Homo sapien
tggtccatggtcacacatgtcttct

SEQ ID NO: 742598 - DNA, 25 bp, Homo sapien
cagagcgtgggcgttcctggtccat

SEQ ID NO: 742599 - DNA, 25 bp, Homo sapien
gacaccagcgatgatagagacaact

SEQ ID NO: 742600 - DNA, 25 bp, Homo sapien
gacttaagcccctgaattgcctgac

SEQ ID NO: 742601 - DNA, 25 bp, Homo sapien
ttcatcagacaaaacccgggacagt

SEQ ID NO: 742602 - DNA, 25 bp, Homo sapien
tgattttgcagactagccaggcacc

SEQ ID NO: 742603 - DNA, 25 bp, Homo sapien
tgttagccgtatttccaaagtgatc

SEQ ID NO: 742604 - DNA, 25 bp, Homo sapien
aagtatctggtgatgagttcaaggc

SEQ ID NO: 742605 - DNA, 25 bp, Homo sapien
tatatttaccagtgtagtctctgag

SEQ ID NO: 742606 - DNA, 25 bp, Homo sapien
gtatcttgagtgaaattgttagccg

SEQ ID NO: 742607 - DNA, 25 bp, Homo sapien
aagtcaacacaggagtttcacccgg

SEQ ID NO: 742608 - DNA, 25 bp, Homo sapien
tggcgatgggcccagacatcatgcc

SEQ ID NO: 742609 - DNA, 25 bp, Homo sapien
atccaaggaaggctccgagtgaagc

SEQ ID NO: 742610 - DNA, 25 bp, Homo sapien
tgcctcgcacaatcagaccagactt

SEQ ID NO: 742611 - DNA, 25 bp, Homo sapien
taaacccaggcgtgccttaagccca

SEQ ID NO: 742612 - DNA, 25 bp, Homo sapien
tgtcattgacagtagagccagggag

SEQ ID NO: 742613 - DNA, 25 bp, Homo sapien
aagatgctctctgaacctggatagg

SEQ ID NO: 742614 - DNA, 25 bp, Homo sapien
taggtattcttacccagcagaggaa

SEQ ID NO: 742615 - DNA, 25 bp, Homo sapien
ggcatctccactggacacgcttgat

SEQ ID NO: 742616 - DNA, 25 bp, Homo sapien
gtcatgctaagacaggaccctggcg

SEQ ID NO: 742617 - DNA, 25 bp, Homo sapien
tctggttcaccggtcctcagagtag

SEQ ID NO: 742618 - DNA, 25 bp, Homo sapien
agtgaagcaggtccaagccatctcc

SEQ ID NO: 742619 - DNA, 25 bp, Homo sapien
cacctaccaactgtgtcacctgtgg

SEQ ID NO: 742620 - DNA, 25 bp, Homo sapien
cagtctgcatcaccacctaccaact

SEQ ID NO: 742621 - DNA, 25 bp, Homo sapien
taccaactgtgtcacctgtggcaag

SEQ ID NO: 742622 - DNA, 25 bp, Homo sapien
aagccgtcgctccagtctgcatcac

SEQ ID NO: 742623 - DNA, 25 bp, Homo sapien
taccaccaggcaagtagagcttcaa

SEQ ID NO: 742624 - DNA, 25 bp, Homo sapien
ccagaatgtcctgttgggtgcagac

SEQ ID NO: 742625 - DNA, 25 bp, Homo sapien
caagggcatcctgtccgtgtctgtg

SEQ ID NO: 742626 - DNA, 25 bp, Homo sapien
ggagctgttgctcgaagccagaatg

SEQ ID NO: 742627 - DNA, 25 bp, Homo sapien
tgccctgccgtttgaacgctctttc

SEQ ID NO: 742628 - DNA, 25 bp, Homo sapien
gacaggtgcgggctggctgccctgc

SEQ ID NO: 742629 - DNA, 25 bp, Homo sapien
ggctgccctgccgtttgaacgctct

SEQ ID NO: 742630 - DNA, 25 bp, Homo sapien
gccgtttgaacgctctttccagcct

SEQ ID NO: 742631 - DNA, 25 bp, Homo sapien
gtccaacccgcagcccacatgcagc

SEQ ID NO: 742632 - DNA, 25 bp, Homo sapien
gggaccatctgctaaagcaagcttg

SEQ ID NO: 742633 - DNA, 25 bp, Homo sapien
ttgtccaacccgcagcccacatgca

SEQ ID NO: 742634 - DNA, 25 bp, Homo sapien
caacccgcagcccacatgcagccca

SEQ ID NO: 742635 - DNA, 25 bp, Homo sapien
cataacctaggtatcagcatctgac

SEQ ID NO: 742636 - DNA, 25 bp, Homo sapien
tgattcatcactgtatctctggctt

SEQ ID NO: 742637 - DNA, 25 bp, Homo sapien
aatagaaataatgcccaaagggagc

SEQ ID NO: 742638 - DNA, 25 bp, Homo sapien
gcatctgacaaagctgttgcaagaa

SEQ ID NO: 742639 - DNA, 25 bp, Homo sapien
cacaaatgataaattcccagtgaga

SEQ ID NO: 742640 - DNA, 25 bp, Homo sapien
cccagtgagactagttaagagagaa

SEQ ID NO: 742641 - DNA, 25 bp, Homo sapien
gaaggctgagaatcagtaaactaga

SEQ ID NO: 742642 - DNA, 25 bp, Homo sapien
cattacttacagagaaatttgcagc

SEQ ID NO: 742643 - DNA, 25 bp, Homo sapien
tgagatatgctgagtgttctggatc

SEQ ID NO: 742644 - DNA, 25 bp, Homo sapien
gattcagccaacgtcactggcttca

SEQ ID NO: 742645 - DNA, 25 bp, Homo sapien
tgttctggatcaaccaggtgggtcc

SEQ ID NO: 742646 - DNA, 25 bp, Homo sapien
agccaacgtcactggcttcaaaggt

SEQ ID NO: 742647 - DNA, 25 bp, Homo sapien
catctaaggtgatatccagggacag

SEQ ID NO: 742648 - DNA, 25 bp, Homo sapien
ctaaggtgatatccagggacaggct

SEQ ID NO: 742649 - DNA, 25 bp, Homo sapien
gcatccaatgcatctaaggtgatat

SEQ ID NO: 742650 - DNA, 25 bp, Homo sapien
caatgcatctaaggtgatatccagg

SEQ ID NO: 742651 - DNA, 25 bp, Homo sapien
ctgtaaaagatccctgcttggccca

SEQ ID NO: 742652 - DNA, 25 bp, Homo sapien
taaaagatccctgcttggcccatct

SEQ ID NO: 742653 - DNA, 25 bp, Homo sapien
tgtaaaagatccctgcttggcccat

SEQ ID NO: 742654 - DNA, 25 bp, Homo sapien
aagatccctgcttggcccatctcac

SEQ ID NO: 742655 - DNA, 25 bp, Homo sapien
acttccactcctttgtgagggccac

SEQ ID NO: 742656 - DNA, 25 bp, Homo sapien
tgtgagggccacaatttagcaccca

SEQ ID NO: 742657 - DNA, 25 bp, Homo sapien
tagcgtcccttaactgctccctgaa

SEQ ID NO: 742658 - DNA, 25 bp, Homo sapien
ttagcacccaattacacagggcatc

SEQ ID NO: 742659 - DNA, 25 bp, Homo sapien
tccccagaacaggttaagaaggtga

SEQ ID NO: 742660 - DNA, 25 bp, Homo sapien
aagcaggccactatccacacaggat

SEQ ID NO: 742661 - DNA, 25 bp, Homo sapien
ctgaaccagtgcaagagcccaagca

SEQ ID NO: 742662 - DNA, 25 bp, Homo sapien
aggacagctgtatccaccacagaag

SEQ ID NO: 742663 - DNA, 25 bp, Homo sapien
aatgagaccccagggataccagcaa

SEQ ID NO: 742664 - DNA, 25 bp, Homo sapien
tgcaggccgtagaaaaacacgctgg

SEQ ID NO: 742665 - DNA, 25 bp, Homo sapien
gagctgcttcagtctttaggaatga

SEQ ID NO: 742666 - DNA, 25 bp, Homo sapien
aaatgtctgcaaatgcagcaaaacc

SEQ ID NO: 742667 - DNA, 25 bp, Homo sapien
cttgtggaatgagtagagaaaacaa

SEQ ID NO: 742668 - DNA, 25 bp, Homo sapien
gtggaatgagtagagaaaacaaagt

SEQ ID NO: 742669 - DNA, 25 bp, Homo sapien
tgtggaatgagtagagaaaacaaag

SEQ ID NO: 742670 - DNA, 25 bp, Homo sapien
ttcttgtggaatgagtagagaaaac

SEQ ID NO: 742671 - DNA, 25 bp, Homo sapien
ttctaacagagtccgcgtgagaggg

SEQ ID NO: 742672 - DNA, 25 bp, Homo sapien
cttttaagggcgcacaattctaaca

SEQ ID NO: 742673 - DNA, 25 bp, Homo sapien
ccaaagtgccggtataggtatgcca

SEQ ID NO: 742674 - DNA, 25 bp, Homo sapien
tgaccgtccattaatcaccttgctt

SEQ ID NO: 742675 - DNA, 25 bp, Homo sapien
aaacctgactagaattgctggcctg

SEQ ID NO: 742676 - DNA, 25 bp, Homo sapien
gctggcctgacatttcctgtgagaa

SEQ ID NO: 742677 - DNA, 25 bp, Homo sapien
caaagatagggatcgcccagtgagg

SEQ ID NO: 742678 - DNA, 25 bp, Homo sapien
gcccaggctgttcggctgcagagaa

SEQ ID NO: 742679 - DNA, 25 bp, Homo sapien
cccagaagtcggagaacagtctggg

SEQ ID NO: 742680 - DNA, 25 bp, Homo sapien
ttgagcccagaagtcggagaacagt

SEQ ID NO: 742681 - DNA, 25 bp, Homo sapien
gcccagaagtcggagaacagtctgg

SEQ ID NO: 742682 - DNA, 25 bp, Homo sapien
gagcccagaagtcggagaacagtct

SEQ ID NO: 742683 - DNA, 25 bp, Homo sapien
cctctaaagcccaagtggaacatca

SEQ ID NO: 742684 - DNA, 25 bp, Homo sapien
ctctaaagcccaagtggaacatcag

SEQ ID NO: 742685 - DNA, 25 bp, Homo sapien
ccttgtcagacggcagcaactgatt

SEQ ID NO: 742686 - DNA, 25 bp, Homo sapien
tgtcagacggcagcaactgattttt

SEQ ID NO: 742687 - DNA, 25 bp, Homo sapien
caccttgtcagacggcagcaactga

SEQ ID NO: 742688 - DNA, 25 bp, Homo sapien
ttgtcagacggcagcaactgatttt

SEQ ID NO: 742689 - DNA, 25 bp, Homo sapien
gctactgagaggtcaattggttttg

SEQ ID NO: 742690 - DNA, 25 bp, Homo sapien
ggatgacctcttcccttatcaactc

SEQ ID NO: 742691 - DNA, 25 bp, Homo sapien
tctgcaacttgagcactgatgggac

SEQ ID NO: 742692 - DNA, 25 bp, Homo sapien
atgggactggcgacaggatgacctc

SEQ ID NO: 742693 - DNA, 25 bp, Homo sapien
cgagagctgcaaggactagactgca

SEQ ID NO: 742694 - DNA, 25 bp, Homo sapien
tcttggagagggaacgagagctgca

SEQ ID NO: 742695 - DNA, 25 bp, Homo sapien
ttctacatcacacccaaatttccat

SEQ ID NO: 742696 - DNA, 25 bp, Homo sapien
gttttcctgactctcggttcacatt

SEQ ID NO: 742697 - DNA, 25 bp, Homo sapien
tgtgttactaaaggaaaaactctga

SEQ ID NO: 742698 - DNA, 25 bp, Homo sapien
tttaatgaggctgtgttactaaagg

SEQ ID NO: 742699 - DNA, 25 bp, Homo sapien
tgaggctgtgttactaaaggaaaaa

SEQ ID NO: 742700 - DNA, 25 bp, Homo sapien
tatgccgtattttaatgaggctgtg

SEQ ID NO: 742701 - DNA, 25 bp, Homo sapien
gcaagtgctccttaaatccatgttc

SEQ ID NO: 742702 - DNA, 25 bp, Homo sapien
agcaagtgctccttaaatccatgtt

SEQ ID NO: 742703 - DNA, 25 bp, Homo sapien
cagagggtcttattccccagctctt

SEQ ID NO: 742704 - DNA, 25 bp, Homo sapien
tgaacaacacaaacagacctcatcc

SEQ ID NO: 742705 - DNA, 25 bp, Homo sapien
ctgaacaacacaaacagacctcatc

SEQ ID NO: 742706 - DNA, 25 bp, Homo sapien
cacaaacagacctcatccaggttta

SEQ ID NO: 742707 - DNA, 25 bp, Homo sapien
acaacacaaacagacctcatccagg

SEQ ID NO: 742708 - DNA, 25 bp, Homo sapien
ctgggacacattggcaaaggctagt

SEQ ID NO: 742709 - DNA, 25 bp, Homo sapien
ctgactcctgggacacattggcaaa

SEQ ID NO: 742710 - DNA, 25 bp, Homo sapien
actcctgggacacattggcaaaggc

SEQ ID NO: 742711 - DNA, 25 bp, Homo sapien
tcacggggcttagcacaggatctga

SEQ ID NO: 742712 - DNA, 25 bp, Homo sapien
gagcacagtcggctttgctatctcc

SEQ ID NO: 742713 - DNA, 25 bp, Homo sapien
caacctcatggagcatttctggaga

SEQ ID NO: 742714 - DNA, 25 bp, Homo sapien
tcttggcaccaacgatggtatggga

SEQ ID NO: 742715 - DNA, 25 bp, Homo sapien
taattctcccctgtatcatttgtgc

SEQ ID NO: 742716 - DNA, 25 bp, Homo sapien
tgtatcatttgtgcctgcacagaga

SEQ ID NO: 742717 - DNA, 25 bp, Homo sapien
tgactcggtacaagctggtaaccgg

SEQ ID NO: 742718 - DNA, 25 bp, Homo sapien
agctctgagggtgactcggtacaag

SEQ ID NO: 742719 - DNA, 25 bp, Homo sapien
tctgagggtgactcggtacaagctg

SEQ ID NO: 742720 - DNA, 25 bp, Homo sapien
agggtgactcggtacaagctggtaa

SEQ ID NO: 742721 - DNA, 25 bp, Homo sapien
cagacaagagccacgaaggatcgac

SEQ ID NO: 742722 - DNA, 25 bp, Homo sapien
tggctctcctagtgaacagtgtcgt

SEQ ID NO: 742723 - DNA, 25 bp, Homo sapien
tgagggcagccagcggttcttactt

SEQ ID NO: 742724 - DNA, 25 bp, Homo sapien
gatgccaagcatgaaaagccacctt

SEQ ID NO: 742725 - DNA, 25 bp, Homo sapien
gaccagtgcaggagagtgggaggag

SEQ ID NO: 742726 - DNA, 25 bp, Homo sapien
ctgcgacctgaggcaggaccagtgc

SEQ ID NO: 742727 - DNA, 25 bp, Homo sapien
agtgcaggagagtgggaggagactg

SEQ ID NO: 742728 - DNA, 25 bp, Homo sapien
tgcgacctgaggcaggaccagtgca

SEQ ID NO: 742729 - DNA, 25 bp, Homo sapien
ctgatggcaggtcatcgtggtgttc

SEQ ID NO: 742730 - DNA, 25 bp, Homo sapien
gggcaacatctgaggtgggggcctc

SEQ ID NO: 742731 - DNA, 25 bp, Homo sapien
cagctgatggcaggtcatcgtggtg

SEQ ID NO: 742732 - DNA, 25 bp, Homo sapien
tgggcaacatctgaggtgggggcct

SEQ ID NO: 742733 - DNA, 25 bp, Homo sapien
ccctgcccgccacacaatgtctgcg

SEQ ID NO: 742734 - DNA, 25 bp, Homo sapien
agggccaggacgaggcagcgggtcc

SEQ ID NO: 742735 - DNA, 25 bp, Homo sapien
tctgcgagggccaggacgaggcagc

SEQ ID NO: 742736 - DNA, 25 bp, Homo sapien
cgccacacaatgtctgcgagggcca

SEQ ID NO: 742737 - DNA, 25 bp, Homo sapien
ttccagactgcggaatgctgacttg

SEQ ID NO: 742738 - DNA, 25 bp, Homo sapien
tgtgtagcccaagacgtccaggaat

SEQ ID NO: 742739 - DNA, 25 bp, Homo sapien
ccgtgctcctttagtggctgtgtag

SEQ ID NO: 742740 - DNA, 25 bp, Homo sapien
tgacaaatgtgtttccagactgcgg

SEQ ID NO: 742741 - DNA, 25 bp, Homo sapien
gctttgtatttccctgttggactga

SEQ ID NO: 742742 - DNA, 25 bp, Homo sapien
actgaactgctgtgttctcgaagcc

SEQ ID NO: 742743 - DNA, 25 bp, Homo sapien
gactgaactgctgtgttctcgaagc

SEQ ID NO: 742744 - DNA, 25 bp, Homo sapien
ctgctttgtatttccctgttggact

SEQ ID NO: 742745 - DNA, 25 bp, Homo sapien
gccgtaaagccagctctagcaggag

SEQ ID NO: 742746 - DNA, 25 bp, Homo sapien
ccagtcagccttttggccgtaaagc

SEQ ID NO: 742747 - DNA, 25 bp, Homo sapien
tacttatatgaaaggagacagtccc

SEQ ID NO: 742748 - DNA, 25 bp, Homo sapien
tcgatgggacaggaagccagtcagc

SEQ ID NO: 742749 - DNA, 25 bp, Homo sapien
tccatgctattaaagttcctcccca

SEQ ID NO: 742750 - DNA, 25 bp, Homo sapien
tatgacttagatctggctttatggc

SEQ ID NO: 742751 - DNA, 25 bp, Homo sapien
tatggctggtgttccatgctattaa

SEQ ID NO: 742752 - DNA, 25 bp, Homo sapien
cattatttccccgattgtgtatgac

SEQ ID NO: 742753 - DNA, 25 bp, Homo sapien
taccgctggagtcgtcagggttcag

SEQ ID NO: 742754 - DNA, 25 bp, Homo sapien
ctgtatgtgagtgaaaggctggccg

SEQ ID NO: 742755 - DNA, 25 bp, Homo sapien
gttcaggtggccctacggcagctct

SEQ ID NO: 742756 - DNA, 25 bp, Homo sapien
cccatgggcgagtcactgatatcag

SEQ ID NO: 742757 - DNA, 25 bp, Homo sapien
gttgaagaaaagtcaccaggtcctc

SEQ ID NO: 742758 - DNA, 25 bp, Homo sapien
ctgatgaatgctttgttgaagaaaa

SEQ ID NO: 742759 - DNA, 25 bp, Homo sapien
agcaggtcaaactgtgaagcgtaag

SEQ ID NO: 742760 - DNA, 25 bp, Homo sapien
cctcatagcaggtcaaactgtgaag

SEQ ID NO: 742761 - DNA, 25 bp, Homo sapien
ccattgcctacccaagggacatctg

SEQ ID NO: 742762 - DNA, 25 bp, Homo sapien
tagggtaggccccattgcctaccca

SEQ ID NO: 742763 - DNA, 25 bp, Homo sapien
tgttcctagggtaggccccattgcc

SEQ ID NO: 742764 - DNA, 25 bp, Homo sapien
taggccccattgcctacccaaggga

SEQ ID NO: 742765 - DNA, 25 bp, Homo sapien
actccggatcaacagcaggtctcct

SEQ ID NO: 742766 - DNA, 25 bp, Homo sapien
gctgcactctcacaacactccggat

SEQ ID NO: 742767 - DNA, 25 bp, Homo sapien
cacacggatgccatcaggctctgct

SEQ ID NO: 742768 - DNA, 25 bp, Homo sapien
ggtgatcccattcctggccaccctg

SEQ ID NO: 742769 - DNA, 25 bp, Homo sapien
tctgaacagaaacctaagggacagt

SEQ ID NO: 742770 - DNA, 25 bp, Homo sapien
cacgtgcaaaggtccacaggcaaga

SEQ ID NO: 742771 - DNA, 25 bp, Homo sapien
tgaacgtcgctccaaaaggagaagc

SEQ ID NO: 742772 - DNA, 25 bp, Homo sapien
ctatttccttggcttatggtgcaca

SEQ ID NO: 742773 - DNA, 25 bp, Homo sapien
tgggatcggccatgtcacttctgct

SEQ ID NO: 742774 - DNA, 25 bp, Homo sapien
caagtcagtgtgaaggcctcactca

SEQ ID NO: 742775 - DNA, 25 bp, Homo sapien
atctgtccagtaagcccagtgggcc

SEQ ID NO: 742776 - DNA, 25 bp, Homo sapien
tgccctctagcatatgtggaactga

SEQ ID NO: 742777 - DNA, 25 bp, Homo sapien
cattatggtgcaagcatctaatggg

SEQ ID NO: 742778 - DNA, 25 bp, Homo sapien
gcatctaatgggcattatcaccccg

SEQ ID NO: 742779 - DNA, 25 bp, Homo sapien
tgggcattatcaccccgaacactct

SEQ ID NO: 742780 - DNA, 25 bp, Homo sapien
ttatcaccccgaacactctaacagt

SEQ ID NO: 742781 - DNA, 25 bp, Homo sapien
gggacattgcaacaacctgaatgac

SEQ ID NO: 742782 - DNA, 25 bp, Homo sapien
cgaaggctgacctcctaaaggatgg

SEQ ID NO: 742783 - DNA, 25 bp, Homo sapien
aatgacagcagagcgagggtgatgc

SEQ ID NO: 742784 - DNA, 25 bp, Homo sapien
aaaaatgagctccatcccatttgca

SEQ ID NO: 742785 - DNA, 25 bp, Homo sapien
gatgcagccataggggcccacttca

SEQ ID NO: 742786 - DNA, 25 bp, Homo sapien
gcaggatgcagccataggggcccac

SEQ ID NO: 742787 - DNA, 25 bp, Homo sapien
ctgtagacctggacaggatggcaga

SEQ ID NO: 742788 - DNA, 25 bp, Homo sapien
ctctgtagacctggacaggatggca

SEQ ID NO: 742789 - DNA, 25 bp, Homo sapien
cagcctggcgcacgaggccacagag

SEQ ID NO: 742790 - DNA, 25 bp, Homo sapien
gcagcctggcgcacgaggccacaga

SEQ ID NO: 742791 - DNA, 25 bp, Homo sapien
caggcagcctggcgcacgaggccac

SEQ ID NO: 742792 - DNA, 25 bp, Homo sapien
aggcagcctggcgcacgaggccaca

SEQ ID NO: 742793 - DNA, 25 bp, Homo sapien
gcaatgagacctgcctacacactgt

SEQ ID NO: 742794 - DNA, 25 bp, Homo sapien
tgcctggcccgaacaccatagcagg

SEQ ID NO: 742795 - DNA, 25 bp, Homo sapien
cagggctctatttgggccctctggg

SEQ ID NO: 742796 - DNA, 25 bp, Homo sapien
tacacactgtcgtcttaggagaggg

SEQ ID NO: 742797 - DNA, 25 bp, Homo sapien
tcgactcttcttggggcctctgaca

SEQ ID NO: 742798 - DNA, 25 bp, Homo sapien
ggcagcactcggctaggtttacatc

SEQ ID NO: 742799 - DNA, 25 bp, Homo sapien
ctcaaaggtctgtttctcgactctt

SEQ ID NO: 742800 - DNA, 25 bp, Homo sapien
aggcaggcagtggtcggcagcactc

SEQ ID NO: 742801 - DNA, 25 bp, Homo sapien
gctgcccaggtctggttcagagctg

SEQ ID NO: 742802 - DNA, 25 bp, Homo sapien
ttctcagggcctcaatgacctggcc

SEQ ID NO: 742803 - DNA, 25 bp, Homo sapien
tctggttcagagctgtcctgacccc

SEQ ID NO: 742804 - DNA, 25 bp, Homo sapien
catccttggggcttgtgagagctcc

SEQ ID NO: 742805 - DNA, 25 bp, Homo sapien
ctcagtggctgtgacttgccatctc

SEQ ID NO: 742806 - DNA, 25 bp, Homo sapien
gttggcttgctttagcccagcccat

SEQ ID NO: 742807 - DNA, 25 bp, Homo sapien
acagttggcttgctttagcccagcc

SEQ ID NO: 742808 - DNA, 25 bp, Homo sapien
gctgtgacttgccatctcagcagct

SEQ ID NO: 742809 - DNA, 25 bp, Homo sapien
caggctagagggtcaaaattgtttc

SEQ ID NO: 742810 - DNA, 25 bp, Homo sapien
gctgttgcaataagggactagacca

SEQ ID NO: 742811 - DNA, 25 bp, Homo sapien
tggaaggctccgcaggacggaaaaa

SEQ ID NO: 742812 - DNA, 25 bp, Homo sapien
ttgcaaactgcagagtgccccacag

SEQ ID NO: 742813 - DNA, 25 bp, Homo sapien
tctggcagcgaagggtcagaaccct

SEQ ID NO: 742814 - DNA, 25 bp, Homo sapien
gggatgcttggatgacccagcctcc

SEQ ID NO: 742815 - DNA, 25 bp, Homo sapien
gcagcattctggcagcgaagggtca

SEQ ID NO: 742816 - DNA, 25 bp, Homo sapien
ctccagggatgcttggatgacccag

SEQ ID NO: 742817 - DNA, 25 bp, Homo sapien
cgtgttcacccagcgggctcgagag

SEQ ID NO: 742818 - DNA, 25 bp, Homo sapien
gttcacccagcgggctcgagagcct

SEQ ID NO: 742819 - DNA, 25 bp, Homo sapien
tcacccagcgggctcgagagcctgc

SEQ ID NO: 742820 - DNA, 25 bp, Homo sapien
acccagcgggctcgagagcctgcgt

SEQ ID NO: 742821 - DNA, 25 bp, Homo sapien
tggctggtggggacatcaaagtcct

SEQ ID NO: 742822 - DNA, 25 bp, Homo sapien
ctgtgtacagtagccatgtgctcca

SEQ ID NO: 742823 - DNA, 25 bp, Homo sapien
tagccatgtgctccaatcaggtggc

SEQ ID NO: 742824 - DNA, 25 bp, Homo sapien
catgtgctccaatcaggtggctggt

SEQ ID NO: 742825 - DNA, 25 bp, Homo sapien
tctgggtctccatgacatgacagtg

SEQ ID NO: 742826 - DNA, 25 bp, Homo sapien
tgggctccgggctgtgtagcacttt

SEQ ID NO: 742827 - DNA, 25 bp, Homo sapien
gtagcactttggtctgagttcagcc

SEQ ID NO: 742828 - DNA, 25 bp, Homo sapien
catcagtgcacataaagctgtccag

SEQ ID NO: 742829 - DNA, 25 bp, Homo sapien
ctttgcccctgtgaggtccattgag

SEQ ID NO: 742830 - DNA, 25 bp, Homo sapien
gactgatgacaagcaactgtgctca

SEQ ID NO: 742831 - DNA, 25 bp, Homo sapien
acaagcaactgtgctcagggtcttc

SEQ ID NO: 742832 - DNA, 25 bp, Homo sapien
tttgcccctgtgaggtccattgagg

SEQ ID NO: 742833 - DNA, 25 bp, Homo sapien
cacagtggagcacgtaggaatggcc

SEQ ID NO: 742834 - DNA, 25 bp, Homo sapien
gattcaagatgaagggtggcctcta

SEQ ID NO: 742835 - DNA, 25 bp, Homo sapien
tcatggtactatctgcctgggcaca

SEQ ID NO: 742836 - DNA, 25 bp, Homo sapien
cagaacggcccttgaccagtgtaaa

SEQ ID NO: 742837 - DNA, 25 bp, Homo sapien
tcccagtcaggagcagattgacaag

SEQ ID NO: 742838 - DNA, 25 bp, Homo sapien
ttcccagtcaggagcagattgacaa

SEQ ID NO: 742839 - DNA, 25 bp, Homo sapien
gagataagaagccaatatcactgcg

SEQ ID NO: 742840 - DNA, 25 bp, Homo sapien
gcacatgttgtaatgctcaaagaga

SEQ ID NO: 742841 - DNA, 25 bp, Homo sapien
ctggcacatgttgtaatgctcaaag

SEQ ID NO: 742842 - DNA, 25 bp, Homo sapien
actgcgtgcagcaatgcctctgaga

SEQ ID NO: 742843 - DNA, 25 bp, Homo sapien
gtggtgaacgtgagcatctgggtac

SEQ ID NO: 742844 - DNA, 25 bp, Homo sapien
ctgggggcccagccctttctgagcc

SEQ ID NO: 742845 - DNA, 25 bp, Homo sapien
ggcccagccctttctgagcccctgg

SEQ ID NO: 742846 - DNA, 25 bp, Homo sapien
gggcccagccctttctgagcccctg

SEQ ID NO: 742847 - DNA, 25 bp, Homo sapien
tgggggcccagccctttctgagccc

SEQ ID NO: 742848 - DNA, 25 bp, Homo sapien
ctgggccaggtgtgggactgaggga

SEQ ID NO: 742849 - DNA, 25 bp, Homo sapien
gccaggtgtgggactgagggagcca

SEQ ID NO: 742850 - DNA, 25 bp, Homo sapien
ttgtcctgggccaggtgtgggactg

SEQ ID NO: 742851 - DNA, 25 bp, Homo sapien
tgtcctgggccaggtgtgggactga

SEQ ID NO: 742852 - DNA, 25 bp, Homo sapien
gtggatgggcttgagaaacaacttc

SEQ ID NO: 742853 - DNA, 25 bp, Homo sapien
caacttcagggggaggcacatgtcc

SEQ ID NO: 742854 - DNA, 25 bp, Homo sapien
cgtgctcctggttgagtaaatgggt

SEQ ID NO: 742855 - DNA, 25 bp, Homo sapien
tcctgatggagaggacgtgctcctg

SEQ ID NO: 742856 - DNA, 25 bp, Homo sapien
tctcagtcctccagtcacgcaggag

SEQ ID NO: 742857 - DNA, 25 bp, Homo sapien
tagtacaagtcaaagagcctctcag

SEQ ID NO: 742858 - DNA, 25 bp, Homo sapien
aggatgctgaagtggctctcactgc

SEQ ID NO: 742859 - DNA, 25 bp, Homo sapien
tggccaggccatcgtagtagtacaa

SEQ ID NO: 742860 - DNA, 25 bp, Homo sapien
attggctctctgatcccccagtctg

SEQ ID NO: 742861 - DNA, 25 bp, Homo sapien
tgctggcattggctctctgatcccc

SEQ ID NO: 742862 - DNA, 25 bp, Homo sapien
ggcattggctctctgatcccccagt

SEQ ID NO: 742863 - DNA, 25 bp, Homo sapien
tggctctctgatcccccagtctgga

SEQ ID NO: 742864 - DNA, 25 bp, Homo sapien
tgggacaaggtcgttgtctgtgtcc

SEQ ID NO: 742865 - DNA, 25 bp, Homo sapien
gacaaggtcgttgtctgtgtcctca

SEQ ID NO: 742866 - DNA, 25 bp, Homo sapien
aaggtcgttgtctgtgtcctcagag

SEQ ID NO: 742867 - DNA, 25 bp, Homo sapien
gatgcagagctcgaggggtgggaca

SEQ ID NO: 742868 - DNA, 25 bp, Homo sapien
caaagttctcgcagacatggaacac

SEQ ID NO: 742869 - DNA, 25 bp, Homo sapien
agcttttctaggaacaactgccaag

SEQ ID NO: 742870 - DNA, 25 bp, Homo sapien
gacccaccatgatgggggattgatg

SEQ ID NO: 742871 - DNA, 25 bp, Homo sapien
aacaactgccaaggtggacccacca

SEQ ID NO: 742872 - DNA, 25 bp, Homo sapien
atccagggacgcctcttgtatgctt

SEQ ID NO: 742873 - DNA, 25 bp, Homo sapien
agcaggcctgagttcaaagctcctg

SEQ ID NO: 742874 - DNA, 25 bp, Homo sapien
gacagcaggcctgagttcaaagctc

SEQ ID NO: 742875 - DNA, 25 bp, Homo sapien
cagggacgcctcttgtatgctttaa

SEQ ID NO: 742876 - DNA, 25 bp, Homo sapien
caacgttgatggacccagtgttttt

SEQ ID NO: 742877 - DNA, 25 bp, Homo sapien
ttttcaacgttgatggacccagtgt

SEQ ID NO: 742878 - DNA, 25 bp, Homo sapien
taactgcttttcaacgttgatggac

SEQ ID NO: 742879 - DNA, 25 bp, Homo sapien
gccttaactgcttttcaacgttgat

SEQ ID NO: 742880 - DNA, 25 bp, Homo sapien
tcgctccgtaaaaacaccatggtcc

SEQ ID NO: 742881 - DNA, 25 bp, Homo sapien
aattgtcccgttgagaccactcgct

SEQ ID NO: 742882 - DNA, 25 bp, Homo sapien
ccctggtgctcaagtcaacttaaaa

SEQ ID NO: 742883 - DNA, 25 bp, Homo sapien
cagagaaaggcacttcatggtggaa

SEQ ID NO: 742884 - DNA, 25 bp, Homo sapien
tctggcttatacaactgagcaggtt

SEQ ID NO: 742885 - DNA, 25 bp, Homo sapien
tataggtccaaccagcaggaaaatg

SEQ ID NO: 742886 - DNA, 25 bp, Homo sapien
ctggctaatataggtccaaccagca

SEQ ID NO: 742887 - DNA, 25 bp, Homo sapien
ccactgctctggcttatacaactga

SEQ ID NO: 742888 - DNA, 25 bp, Homo sapien
gacaaactggcttggcttggtgaag

SEQ ID NO: 742889 - DNA, 25 bp, Homo sapien
ctgtgtgtcaagcagatccagagga

SEQ ID NO: 742890 - DNA, 25 bp, Homo sapien
gacactggtgccgtatttggagaca

SEQ ID NO: 742891 - DNA, 25 bp, Homo sapien
gaagtcagacttctcctcggcagtg

SEQ ID NO: 742892 - DNA, 25 bp, Homo sapien
tcaatcgttttgaagtgaaaatgcc

SEQ ID NO: 742893 - DNA, 25 bp, Homo sapien
ctccccttcatcaatcgttttgaag

SEQ ID NO: 742894 - DNA, 25 bp, Homo sapien
tgaaaatgccagcatcatcacttac

SEQ ID NO: 742895 - DNA, 25 bp, Homo sapien
ccccttcatcaatcgttttgaagtg

SEQ ID NO: 742896 - DNA, 25 bp, Homo sapien
cactcggcataaaaggttgaaacag

SEQ ID NO: 742897 - DNA, 25 bp, Homo sapien
tggaaaacacgctcagccaggaatg

SEQ ID NO: 742898 - DNA, 25 bp, Homo sapien
aggatagatcgtgcataccatcggg

SEQ ID NO: 742899 - DNA, 25 bp, Homo sapien
ggcagcaaggttcatattcactccg

SEQ ID NO: 742900 - DNA, 25 bp, Homo sapien
tgacattggaactgcgatgagaagg

SEQ ID NO: 742901 - DNA, 25 bp, Homo sapien
ggttctcccaaagtaacacagttgc

SEQ ID NO: 742902 - DNA, 25 bp, Homo sapien
tacatctacatccagaaagtcgagg

SEQ ID NO: 742903 - DNA, 25 bp, Homo sapien
tccagaaagtcgaggattcctgaca

SEQ ID NO: 742904 - DNA, 25 bp, Homo sapien
ggggtctgagccgttccagttcact

SEQ ID NO: 742905 - DNA, 25 bp, Homo sapien
ggtctgagccgttccagttcactga

SEQ ID NO: 742906 - DNA, 25 bp, Homo sapien
gtctgagccgttccagttcactgat

SEQ ID NO: 742907 - DNA, 25 bp, Homo sapien
ccagttcactgatgcccccttccac

SEQ ID NO: 742908 - DNA, 25 bp, Homo sapien
tttatagaaagccagctaccagaag

SEQ ID NO: 742909 - DNA, 25 bp, Homo sapien
tcagctgtcatcctcggtgatgagg

SEQ ID NO: 742910 - DNA, 25 bp, Homo sapien
ctaccagaagtaatgagtccccagg

SEQ ID NO: 742911 - DNA, 25 bp, Homo sapien
tccttccagtactcagcagtcacag

SEQ ID NO: 742912 - DNA, 25 bp, Homo sapien
taccagccatgatcagcacagacag

SEQ ID NO: 742913 - DNA, 25 bp, Homo sapien
gacagtgcacatcacgctctttgca

SEQ ID NO: 742914 - DNA, 25 bp, Homo sapien
catgatcagcacagacagtgcacat

SEQ ID NO: 742915 - DNA, 25 bp, Homo sapien
cattctccataccagccatgatcag

SEQ ID NO: 742916 - DNA, 25 bp, Homo sapien
atctacttggccaggtccagcttac

SEQ ID NO: 742917 - DNA, 25 bp, Homo sapien
tccccagtccctctgtttatccctg

SEQ ID NO: 742918 - DNA, 25 bp, Homo sapien
catgctcccctacaggtaccaagga

SEQ ID NO: 742919 - DNA, 25 bp, Homo sapien
ggaatgtgagggctccacaggctct

SEQ ID NO: 742920 - DNA, 25 bp, Homo sapien
cagcaggccaccgcacttctgcatg

SEQ ID NO: 742921 - DNA, 25 bp, Homo sapien
tcatcagcaggccaccgcacttctg

SEQ ID NO: 742922 - DNA, 25 bp, Homo sapien
tcagcaggccaccgcacttctgcat

SEQ ID NO: 742923 - DNA, 25 bp, Homo sapien
ttcatcagcaggccaccgcacttct

SEQ ID NO: 742924 - DNA, 25 bp, Homo sapien
atgaagaaagtattgggctggcagt

SEQ ID NO: 742925 - DNA, 25 bp, Homo sapien
cagtcgaagaggtcggggctagtga

SEQ ID NO: 742926 - DNA, 25 bp, Homo sapien
aaagtattgggctggcagtcgaaga

SEQ ID NO: 742927 - DNA, 25 bp, Homo sapien
gaggtcggggctagtgaggatgtcc

SEQ ID NO: 742928 - DNA, 25 bp, Homo sapien
cagggagagtgctgtgaatgatcct

SEQ ID NO: 742929 - DNA, 25 bp, Homo sapien
ctaacagggagagtgctgtgaatga

SEQ ID NO: 742930 - DNA, 25 bp, Homo sapien
gggagagtgctgtgaatgatcctcc

SEQ ID NO: 742931 - DNA, 25 bp, Homo sapien
aacagggagagtgctgtgaatgatc

SEQ ID NO: 742932 - DNA, 25 bp, Homo sapien
ctgctcctcttccacggctggtgtt

SEQ ID NO: 742933 - DNA, 25 bp, Homo sapien
cctcttccacggctggtgttctgga

SEQ ID NO: 742934 - DNA, 25 bp, Homo sapien
ccctttgggctcagacatggagacc

SEQ ID NO: 742935 - DNA, 25 bp, Homo sapien
tgggtcctgcccccaacgctgtgtt

SEQ ID NO: 742936 - DNA, 25 bp, Homo sapien
agaagcaggcagacggaaccgctgc

SEQ ID NO: 742937 - DNA, 25 bp, Homo sapien
gccaccagtgctgacggagaagcag

SEQ ID NO: 742938 - DNA, 25 bp, Homo sapien
caccagtgctgacggagaagcaggc

SEQ ID NO: 742939 - DNA, 25 bp, Homo sapien
cagccaccagtgctgacggagaagc

SEQ ID NO: 742940 - DNA, 25 bp, Homo sapien
tggagggtcccgatcctggggcaca

SEQ ID NO: 742941 - DNA, 25 bp, Homo sapien
ctggggcacaagctcgctatcttcc

SEQ ID NO: 742942 - DNA, 25 bp, Homo sapien
atcctggggcacaagctcgctatct

SEQ ID NO: 742943 - DNA, 25 bp, Homo sapien
tcctggggcacaagctcgctatctt

SEQ ID NO: 742944 - DNA, 25 bp, Homo sapien
cccgtctcccggtgggagagccttg

SEQ ID NO: 742945 - DNA, 25 bp, Homo sapien
gcttcatccggaggagagtggacgg

SEQ ID NO: 742946 - DNA, 25 bp, Homo sapien
agtggacggagcctcggatgttggc

SEQ ID NO: 742947 - DNA, 25 bp, Homo sapien
gctgaggctatcactggccagaagc

SEQ ID NO: 742948 - DNA, 25 bp, Homo sapien
cttgaagttttggagggcaaactgt

SEQ ID NO: 742949 - DNA, 25 bp, Homo sapien
tggagggcaaactgtttctcctgca

SEQ ID NO: 742950 - DNA, 25 bp, Homo sapien
aactgtttctcctgcagacctggct

SEQ ID NO: 742951 - DNA, 25 bp, Homo sapien
actgtttctcctgcagacctggctc

SEQ ID NO: 742952 - DNA, 25 bp, Homo sapien
tctcgacagcgatttgaaccaatga

SEQ ID NO: 742953 - DNA, 25 bp, Homo sapien
tctcaaggcagtcacactggcgggt

SEQ ID NO: 742954 - DNA, 25 bp, Homo sapien
caggcccgagctaggcagagctgtt

SEQ ID NO: 742955 - DNA, 25 bp, Homo sapien
gaaccaatgatttgagggcaggctg

SEQ ID NO: 742956 - DNA, 25 bp, Homo sapien
cgctgccgggtgctcaattccctct

SEQ ID NO: 742957 - DNA, 25 bp, Homo sapien
gctgccgggtgctcaattccctctg

SEQ ID NO: 742958 - DNA, 25 bp, Homo sapien
ctgccgggtgctcaattccctctga

SEQ ID NO: 742959 - DNA, 25 bp, Homo sapien
tggcctgagaccgctgccgggtgct

SEQ ID NO: 742960 - DNA, 25 bp, Homo sapien
cccagggcagaaccgatgctgatga

SEQ ID NO: 742961 - DNA, 25 bp, Homo sapien
gccaagcgagttcccagtcagggag

SEQ ID NO: 742962 - DNA, 25 bp, Homo sapien
gacaccttcacgttgtcctggaccg

SEQ ID NO: 742963 - DNA, 25 bp, Homo sapien
gagcttcttcttgaactcgctggcc

SEQ ID NO: 742964 - DNA, 25 bp, Homo sapien
catactagagggtgaagccttcgcc

SEQ ID NO: 742965 - DNA, 25 bp, Homo sapien
tgaagccttcgccagcaggtgcaga

SEQ ID NO: 742966 - DNA, 25 bp, Homo sapien
tcggatgcgcatactagagggtgaa

SEQ ID NO: 742967 - DNA, 25 bp, Homo sapien
gcctctgcctcggatgcgcatacta

SEQ ID NO: 742968 - DNA, 25 bp, Homo sapien
gtcacggcgcctccggtcggtagta

SEQ ID NO: 742969 - DNA, 25 bp, Homo sapien
gtagccagcacgcatagcaccagct

SEQ ID NO: 742970 - DNA, 25 bp, Homo sapien
ggtcccgatgatctcgatgcccagg

SEQ ID NO: 742971 - DNA, 25 bp, Homo sapien
cacgcatagcaccagctggagggtc

SEQ ID NO: 742972 - DNA, 25 bp, Homo sapien
agccaaaggaccgagcagggttaat

SEQ ID NO: 742973 - DNA, 25 bp, Homo sapien
tgaagttgtgtgtgatcaccgcgga

SEQ ID NO: 742974 - DNA, 25 bp, Homo sapien
ttgtgtgtgatcaccgcggagccaa

SEQ ID NO: 742975 - DNA, 25 bp, Homo sapien
cagggttaatcccacagccagtgta

SEQ ID NO: 742976 - DNA, 25 bp, Homo sapien
ggtccacaccttcacgcggtctgtg

SEQ ID NO: 742977 - DNA, 25 bp, Homo sapien
agtcgtagatgagtacagccagggc

SEQ ID NO: 742978 - DNA, 25 bp, Homo sapien
gccaggatgaagtcgtagatgagta

SEQ ID NO: 742979 - DNA, 25 bp, Homo sapien
tggagttgatgtcgtcggcatccag

SEQ ID NO: 742980 - DNA, 25 bp, Homo sapien
tccaagcaccattgggagcaaggtg

SEQ ID NO: 742981 - DNA, 25 bp, Homo sapien
tatagggacgattccaaggtcaggc

SEQ ID NO: 742982 - DNA, 25 bp, Homo sapien
aaagcaattacggtagaatcccagg

SEQ ID NO: 742983 - DNA, 25 bp, Homo sapien
tagaccacgtcttctggacccatgc

SEQ ID NO: 742984 - DNA, 25 bp, Homo sapien
tagggaagcctctccatagggaaca

SEQ ID NO: 742985 - DNA, 25 bp, Homo sapien
tgtgtctacactgacaagagggagt

SEQ ID NO: 742986 - DNA, 25 bp, Homo sapien
cattgtctagctgaaaccgtgggcc

SEQ ID NO: 742987 - DNA, 25 bp, Homo sapien
catgggctgacctgcatcagggtct

SEQ ID NO: 742988 - DNA, 25 bp, Homo sapien
gaaattccaactccaaagagacata

SEQ ID NO: 742989 - DNA, 25 bp, Homo sapien
aattccaactccaaagagacatata

SEQ ID NO: 742990 - DNA, 25 bp, Homo sapien
tccaactccaaagagacatatatgc

SEQ ID NO: 742991 - DNA, 25 bp, Homo sapien
ttccaactccaaagagacatatatg

SEQ ID NO: 742992 - DNA, 25 bp, Homo sapien
tccagggaacttcacgaacagttta

SEQ ID NO: 742993 - DNA, 25 bp, Homo sapien
cagttccagggaacttcacgaacag

SEQ ID NO: 742994 - DNA, 25 bp, Homo sapien
gggaacttcacgaacagtttagcag

SEQ ID NO: 742995 - DNA, 25 bp, Homo sapien
acttcacgaacagtttagcagagga

SEQ ID NO: 742996 - DNA, 25 bp, Homo sapien
ggatggcggtgctcagagcaaggac

SEQ ID NO: 742997 - DNA, 25 bp, Homo sapien
ggcgatcgtgcctgtgcttaggacc

SEQ ID NO: 742998 - DNA, 25 bp, Homo sapien
tgagctggcgatcgtgcctgtgctt

SEQ ID NO: 742999 - DNA, 25 bp, Homo sapien
caaggacaggtgagctggcgatcgt

SEQ ID NO: 743000 - DNA, 25 bp, Homo sapien
tggctggggtgtagtccctctcctg

SEQ ID NO: 743001 - DNA, 25 bp, Homo sapien
cttccttcaggcgcaggcagcagtc

SEQ ID NO: 743002 - DNA, 25 bp, Homo sapien
gcccaaatctcccttgctgggggac

SEQ ID NO: 743003 - DNA, 25 bp, Homo sapien
ggacctggaagcgactcctttggct

SEQ ID NO: 743004 - DNA, 25 bp, Homo sapien
ccggtctcaggatggcgccaggcat

SEQ ID NO: 743005 - DNA, 25 bp, Homo sapien
tgatgacgcgcaactgccgcctctt

SEQ ID NO: 743006 - DNA, 25 bp, Homo sapien
gcttggagctggtggatgggccttg

SEQ ID NO: 743007 - DNA, 25 bp, Homo sapien
gacggcgacaagcagctcccggtct

SEQ ID NO: 743008 - DNA, 25 bp, Homo sapien
aggctttatctttaacgtcatctca

SEQ ID NO: 743009 - DNA, 25 bp, Homo sapien
cccgcctcggccttagaggctttat

SEQ ID NO: 743010 - DNA, 25 bp, Homo sapien
ggaattatccacttgtaaactgcta

SEQ ID NO: 743011 - DNA, 25 bp, Homo sapien
tccacccaagcttcatcataatttg

SEQ ID NO: 743012 - DNA, 25 bp, Homo sapien
cccctgacacagccgtttccaccgc

SEQ ID NO: 743013 - DNA, 25 bp, Homo sapien
gtaagccttggctatcttccttccc

SEQ ID NO: 743014 - DNA, 25 bp, Homo sapien
tcagtaagccttggctatcttcctt

SEQ ID NO: 743015 - DNA, 25 bp, Homo sapien
tcccctgacacagccgtttccaccg

SEQ ID NO: 743016 - DNA, 25 bp, Homo sapien
ggctcaacacgcagaagacgtgggc

SEQ ID NO: 743017 - DNA, 25 bp, Homo sapien
gtcggtaacgggctcaacacgcaga

SEQ ID NO: 743018 - DNA, 25 bp, Homo sapien
aacgggctcaacacgcagaagacgt

SEQ ID NO: 743019 - DNA, 25 bp, Homo sapien
tcaacacgcagaagacgtgggcccc

SEQ ID NO: 743020 - DNA, 25 bp, Homo sapien
gctgcttgtagacaggcactctcat

SEQ ID NO: 743021 - DNA, 25 bp, Homo sapien
cagggctgtcccaataatccgaggg

SEQ ID NO: 743022 - DNA, 25 bp, Homo sapien
tgcagggctgtcccaataatccgag

SEQ ID NO: 743023 - DNA, 25 bp, Homo sapien
tgtcccaataatccgaggggtgagg

SEQ ID NO: 743024 - DNA, 25 bp, Homo sapien
agcagagactcagcccaggtgcagg

SEQ ID NO: 743025 - DNA, 25 bp, Homo sapien
ccactcgccagagcctgccgttggc

SEQ ID NO: 743026 - DNA, 25 bp, Homo sapien
gagcctgccgttggccagcacagca

SEQ ID NO: 743027 - DNA, 25 bp, Homo sapien
actcgccagagcctgccgttggcca

SEQ ID NO: 743028 - DNA, 25 bp, Homo sapien
gcagcccatcccaggtcgcagggca

SEQ ID NO: 743029 - DNA, 25 bp, Homo sapien
ccagcatcctaagggcagtagggag

SEQ ID NO: 743030 - DNA, 25 bp, Homo sapien
ctgccagcatcctaagggcagtagg

SEQ ID NO: 743031 - DNA, 25 bp, Homo sapien
tgccagcatcctaagggcagtaggg

SEQ ID NO: 743032 - DNA, 25 bp, Homo sapien
gccagcatcctaagggcagtaggga

SEQ ID NO: 743033 - DNA, 25 bp, Homo sapien
ggcccaggtctagcctgcccaggga

SEQ ID NO: 743034 - DNA, 25 bp, Homo sapien
aagtgaccctggcagggtttgcatg

SEQ ID NO: 743035 - DNA, 25 bp, Homo sapien
gagcaacagagagggtggctccaga

SEQ ID NO: 743036 - DNA, 25 bp, Homo sapien
gtttgcatggacagctcctctgagc

SEQ ID NO: 743037 - DNA, 25 bp, Homo sapien
ggaggcaagcaagactctctagcca

SEQ ID NO: 743038 - DNA, 25 bp, Homo sapien
aggcaagcaagactctctagccaca

SEQ ID NO: 743039 - DNA, 25 bp, Homo sapien
gggaggcaagcaagactctctagcc

SEQ ID NO: 743040 - DNA, 25 bp, Homo sapien
tgggaggcaagcaagactctctagc

SEQ ID NO: 743041 - DNA, 25 bp, Homo sapien
cagccagtgatagtacaatcccgtt

SEQ ID NO: 743042 - DNA, 25 bp, Homo sapien
cagggcaggccacagggtaaggtgg

SEQ ID NO: 743043 - DNA, 25 bp, Homo sapien
tgatagtacaatcccgtttcacagc

SEQ ID NO: 743044 - DNA, 25 bp, Homo sapien
cagaccagccagtgatagtacaatc

SEQ ID NO: 743045 - DNA, 25 bp, Homo sapien
aaataaaggagatagccagggacac

SEQ ID NO: 743046 - DNA, 25 bp, Homo sapien
caaataaaggagatagccagggaca

SEQ ID NO: 743047 - DNA, 25 bp, Homo sapien
tcttcactgtggagaagtaagattc

SEQ ID NO: 743048 - DNA, 25 bp, Homo sapien
tgatggccacgaagagggctacaat

SEQ ID NO: 743049 - DNA, 25 bp, Homo sapien
tggcccacggtgtagataatcttca

SEQ ID NO: 743050 - DNA, 25 bp, Homo sapien
caatagagatgctatggcccacggt

SEQ ID NO: 743051 - DNA, 25 bp, Homo sapien
gaaatgaggaacaagaagcaagcag

SEQ ID NO: 743052 - DNA, 25 bp, Homo sapien
aatgaggaacaagaagcaagcaggg

SEQ ID NO: 743053 - DNA, 25 bp, Homo sapien
atgaggaacaagaagcaagcaggga

SEQ ID NO: 743054 - DNA, 25 bp, Homo sapien
gagaaatgaggaacaagaagcaagc

SEQ ID NO: 743055 - DNA, 25 bp, Homo sapien
tgtggacgtagttccgggggcagtg

SEQ ID NO: 743056 - DNA, 25 bp, Homo sapien
aacacagctcccgccttgaggataa

SEQ ID NO: 743057 - DNA, 25 bp, Homo sapien
acagctcccgccttgaggataaaag

SEQ ID NO: 743058 - DNA, 25 bp, Homo sapien
aggaacacagctcccgccttgagga

SEQ ID NO: 743059 - DNA, 25 bp, Homo sapien
agtggtcagtgtcgtcgctgtggaa

SEQ ID NO: 743060 - DNA, 25 bp, Homo sapien
tcagtgtcgtcgctgtggaaaaggg

SEQ ID NO: 743061 - DNA, 25 bp, Homo sapien
gcagtggtcagtgtcgtcgctgtgg

SEQ ID NO: 743062 - DNA, 25 bp, Homo sapien
tggtcagtgtcgtcgctgtggaaaa

SEQ ID NO: 743063 - DNA, 25 bp, Homo sapien
ctgcccagccccttcacccatggcc

SEQ ID NO: 743064 - DNA, 25 bp, Homo sapien
tgcccagccccttcacccatggcca

SEQ ID NO: 743065 - DNA, 25 bp, Homo sapien
gcccagccccttcacccatggccat

SEQ ID NO: 743066 - DNA, 25 bp, Homo sapien
tgttagtttgctccctgatttcgct

SEQ ID NO: 743067 - DNA, 25 bp, Homo sapien
cagtatataacacgtgtaacagaca

SEQ ID NO: 743068 - DNA, 25 bp, Homo sapien
cacttgcagaggatctagcaggtgc

SEQ ID NO: 743069 - DNA, 25 bp, Homo sapien
tatacttgaattctcagctgaaagg

SEQ ID NO: 743070 - DNA, 25 bp, Homo sapien
caggtagacggcttctgccaacagc

SEQ ID NO: 743071 - DNA, 25 bp, Homo sapien
caacagccagctgaagttggtcatg

SEQ ID NO: 743072 - DNA, 25 bp, Homo sapien
tcatggtggcgaaatgggaggcggc

SEQ ID NO: 743073 - DNA, 25 bp, Homo sapien
ggcagttcaggtagacggcttctgc

SEQ ID NO: 743074 - DNA, 25 bp, Homo sapien
tcacccacgtgccagtgaagagcac

SEQ ID NO: 743075 - DNA, 25 bp, Homo sapien
cacgtgccagtgaagagcacgggca

SEQ ID NO: 743076 - DNA, 25 bp, Homo sapien
cacccacgtgccagtgaagagcacg

SEQ ID NO: 743077 - DNA, 25 bp, Homo sapien
cccacgtgccagtgaagagcacggg

SEQ ID NO: 743078 - DNA, 25 bp, Homo sapien
cgatgtcctcgaaggccagtttgca

SEQ ID NO: 743079 - DNA, 25 bp, Homo sapien
gcgatgtcctcgaaggccagtttgc

SEQ ID NO: 743080 - DNA, 25 bp, Homo sapien
atgtcctcgaaggccagtttgcagc

SEQ ID NO: 743081 - DNA, 25 bp, Homo sapien
gatgtcctcgaaggccagtttgcag

SEQ ID NO: 743082 - DNA, 25 bp, Homo sapien
tgatccaccagtagggggaggtgtc

SEQ ID NO: 743083 - DNA, 25 bp, Homo sapien
caccagtagggggaggtgtcgtcca

SEQ ID NO: 743084 - DNA, 25 bp, Homo sapien
cccgaccgagaggacaatgggccct

SEQ ID NO: 743085 - DNA, 25 bp, Homo sapien
cgaccgagaggacaatgggcccttt

SEQ ID NO: 743086 - DNA, 25 bp, Homo sapien
tttaccaaagccatgcaaagcagtc

SEQ ID NO: 743087 - DNA, 25 bp, Homo sapien
tctctagcacaaagcagatgtccct

SEQ ID NO: 743088 - DNA, 25 bp, Homo sapien
aatccttgagacgtgagaatgtgca

SEQ ID NO: 743089 - DNA, 25 bp, Homo sapien
cctgcatgctgatggagaccaccac

SEQ ID NO: 743090 - DNA, 25 bp, Homo sapien
caatactgagactgggtatggaggc

SEQ ID NO: 743091 - DNA, 25 bp, Homo sapien
agactgggtatggaggctgccctga

SEQ ID NO: 743092 - DNA, 25 bp, Homo sapien
gatgcggataatattgagaaaaagc

SEQ ID NO: 743093 - DNA, 25 bp, Homo sapien
tcctcaccaggatgcggataatatt

SEQ ID NO: 743094 - DNA, 25 bp, Homo sapien
cctttcccagtatccccagacacaa

SEQ ID NO: 743095 - DNA, 25 bp, Homo sapien
tattctgtctctgggaacataggga

SEQ ID NO: 743096 - DNA, 25 bp, Homo sapien
caggctcccatagaaattgatccca

SEQ ID NO: 743097 - DNA, 25 bp, Homo sapien
tccaatattgtgatcccctagaagg

SEQ ID NO: 743098 - DNA, 25 bp, Homo sapien
cgttctatttggcatgggagctggc

SEQ ID NO: 743099 - DNA, 25 bp, Homo sapien
ggccagcattgtctggcaggaagtt

SEQ ID NO: 743100 - DNA, 25 bp, Homo sapien
gaaaagtgtcgacttggagagacgc

SEQ ID NO: 743101 - DNA, 25 bp, Homo sapien
tagtgaattccaaagagtgggatca

SEQ ID NO: 743102 - DNA, 25 bp, Homo sapien
cccaggccagcattgtctggcagga

SEQ ID NO: 743103 - DNA, 25 bp, Homo sapien
gaagcagtagaggatggcaacaatg

SEQ ID NO: 743104 - DNA, 25 bp, Homo sapien
cagggacaaggaagaggacgttagg

SEQ ID NO: 743105 - DNA, 25 bp, Homo sapien
tccagggacaaggaagaggacgtta

SEQ ID NO: 743106 - DNA, 25 bp, Homo sapien
ccagggacaaggaagaggacgttag

SEQ ID NO: 743107 - DNA, 25 bp, Homo sapien
ctccagggacaaggaagaggacgtt

SEQ ID NO: 743108 - DNA, 25 bp, Homo sapien
ctttgccgccgagcgggaaggcgtg

SEQ ID NO: 743109 - DNA, 25 bp, Homo sapien
gtggtccacttagcacgggtcctcc

SEQ ID NO: 743110 - DNA, 25 bp, Homo sapien
cagggtcatggccatgccacttccg

SEQ ID NO: 743111 - DNA, 25 bp, Homo sapien
atggccatgccacttccgtgagatc

SEQ ID NO: 743112 - DNA, 25 bp, Homo sapien
tggtagctgcccaaattcaagtgtg

SEQ ID NO: 743113 - DNA, 25 bp, Homo sapien
tctaaataaagaacgcaggtgcgct

SEQ ID NO: 743114 - DNA, 25 bp, Homo sapien
catacagggacctcaaaagagagtc

SEQ ID NO: 743115 - DNA, 25 bp, Homo sapien
tgaactgaggaatgatgaacgcaac

SEQ ID NO: 743116 - DNA, 25 bp, Homo sapien
aatctgcatcgtaggcccagtctgc

SEQ ID NO: 743117 - DNA, 25 bp, Homo sapien
catcgtaggcccagtctgcgaatcc

SEQ ID NO: 743118 - DNA, 25 bp, Homo sapien
caggaatctgcatcgtaggcccagt

SEQ ID NO: 743119 - DNA, 25 bp, Homo sapien
cccaggaatctgcatcgtaggccca

SEQ ID NO: 743120 - DNA, 25 bp, Homo sapien
gagtcctgagagaggaagagcttgc

SEQ ID NO: 743121 - DNA, 25 bp, Homo sapien
agttgtggaagctggagtcctgaga

SEQ ID NO: 743122 - DNA, 25 bp, Homo sapien
tcagttgtggaagctggagtcctga

SEQ ID NO: 743123 - DNA, 25 bp, Homo sapien
tgtggaagctggagtcctgagagag

SEQ ID NO: 743124 - DNA, 25 bp, Homo sapien
ggttcaggctcatccttgcagatct

SEQ ID NO: 743125 - DNA, 25 bp, Homo sapien
acagaggagcccgaacataacagga

SEQ ID NO: 743126 - DNA, 25 bp, Homo sapien
ggctcatccttgcagatcttcccaa

SEQ ID NO: 743127 - DNA, 25 bp, Homo sapien
gaacataacaggagggaagtccgag

SEQ ID NO: 743128 - DNA, 25 bp, Homo sapien
cccagagggcgggtggtatattcga

SEQ ID NO: 743129 - DNA, 25 bp, Homo sapien
ggtatattcgaaggcctaagaacca

SEQ ID NO: 743130 - DNA, 25 bp, Homo sapien
gcgggtggtatattcgaaggcctaa

SEQ ID NO: 743131 - DNA, 25 bp, Homo sapien
ggtggtatattcgaaggcctaagaa

SEQ ID NO: 743132 - DNA, 25 bp, Homo sapien
cattttagtagtaagcaccatggag

SEQ ID NO: 743133 - DNA, 25 bp, Homo sapien
ctggagttgcgtgagcaatgaaaga

SEQ ID NO: 743134 - DNA, 25 bp, Homo sapien
taggcactgctgaacaaacggaaca

SEQ ID NO: 743135 - DNA, 25 bp, Homo sapien
gggagtgacaagtgcaaacgccctg

SEQ ID NO: 743136 - DNA, 25 bp, Homo sapien
ctttcaccagggctgctgcagccat

SEQ ID NO: 743137 - DNA, 25 bp, Homo sapien
tgcaggagccgtagaggagaataac

SEQ ID NO: 743138 - DNA, 25 bp, Homo sapien
gcagctcccaagcagtgagtgttcc

SEQ ID NO: 743139 - DNA, 25 bp, Homo sapien
catcccctggtcagaggattcagca

SEQ ID NO: 743140 - DNA, 25 bp, Homo sapien
caggccagggtcttggaaaccacct

SEQ ID NO: 743141 - DNA, 25 bp, Homo sapien
tgtgactggagccatctgggcgttt

SEQ ID NO: 743142 - DNA, 25 bp, Homo sapien
tgggcgtttccagcagtcacgtgct

SEQ ID NO: 743143 - DNA, 25 bp, Homo sapien
cccggacatgcagggatcctgtgac

SEQ ID NO: 743144 - DNA, 25 bp, Homo sapien
tgctggccattctggcccggacatg

SEQ ID NO: 743145 - DNA, 25 bp, Homo sapien
gggtcccaattagagctgcgatggg

SEQ ID NO: 743146 - DNA, 25 bp, Homo sapien
gtcccaattagagctgcgatgggaa

SEQ ID NO: 743147 - DNA, 25 bp, Homo sapien
tggggtcccaattagagctgcgatg

SEQ ID NO: 743148 - DNA, 25 bp, Homo sapien
ctctggggtcccaattagagctgcg

SEQ ID NO: 743149 - DNA, 25 bp, Homo sapien
tccatctgatctggcgctattcagg

SEQ ID NO: 743150 - DNA, 25 bp, Homo sapien
tctgatctggcgctattcaggatgg

SEQ ID NO: 743151 - DNA, 25 bp, Homo sapien
gtccatctgatctggcgctattcag

SEQ ID NO: 743152 - DNA, 25 bp, Homo sapien
catctgatctggcgctattcaggat

SEQ ID NO: 743153 - DNA, 25 bp, Homo sapien
agcaaggatttctcccataatacag

SEQ ID NO: 743154 - DNA, 25 bp, Homo sapien
tctcccataatacagtttaaagggc

SEQ ID NO: 743155 - DNA, 25 bp, Homo sapien
aaggatttctcccataatacagttt

SEQ ID NO: 743156 - DNA, 25 bp, Homo sapien
gcaagcaaggatttctcccataata

SEQ ID NO: 743157 - DNA, 25 bp, Homo sapien
ccatggcaggctgtctgagccaggc

SEQ ID NO: 743158 - DNA, 25 bp, Homo sapien
tgagccaggctcattctcctctttt

SEQ ID NO: 743159 - DNA, 25 bp, Homo sapien
atccatggcaggctgtctgagccag

SEQ ID NO: 743160 - DNA, 25 bp, Homo sapien
ggcaggctgtctgagccaggctcat

SEQ ID NO: 743161 - DNA, 25 bp, Homo sapien
aaataagtgcctgtccaccagtggg

SEQ ID NO: 743162 - DNA, 25 bp, Homo sapien
gacaggcacatggtccaaataagtg

SEQ ID NO: 743163 - DNA, 25 bp, Homo sapien
cacatggtccaaataagtgcctgtc

SEQ ID NO: 743164 - DNA, 25 bp, Homo sapien
taggcagacaggcacatggtccaaa

SEQ ID NO: 743165 - DNA, 25 bp, Homo sapien
cctccgtgctgcaggcaaacatagg

SEQ ID NO: 743166 - DNA, 25 bp, Homo sapien
ctccgtgctgcaggcaaacataggc

SEQ ID NO: 743167 - DNA, 25 bp, Homo sapien
aatggcatcgctcttgttagtcccc

SEQ ID NO: 743168 - DNA, 25 bp, Homo sapien
tgtttctgggaacaccgtcaccaag

SEQ ID NO: 743169 - DNA, 25 bp, Homo sapien
tgagaagggacgaatacaggagcca

SEQ ID NO: 743170 - DNA, 25 bp, Homo sapien
acaggagccatagatttcaagggtc

SEQ ID NO: 743171 - DNA, 25 bp, Homo sapien
gaatgagactctgggtcacaccgtt

SEQ ID NO: 743172 - DNA, 25 bp, Homo sapien
cacaccgtttgttgctttgtaggga

SEQ ID NO: 743173 - DNA, 25 bp, Homo sapien
caggaagaatgttcccgtggaatcg

SEQ ID NO: 743174 - DNA, 25 bp, Homo sapien
gattttggagatggctctaggctag

SEQ ID NO: 743175 - DNA, 25 bp, Homo sapien
cattttggacaagcggtgaagataa

SEQ ID NO: 743176 - DNA, 25 bp, Homo sapien
ttttggacaagcggtgaagataaaa

SEQ ID NO: 743177 - DNA, 25 bp, Homo sapien
attttggacaagcggtgaagataaa

SEQ ID NO: 743178 - DNA, 25 bp, Homo sapien
ctgatgtctcatagaggagccagga

SEQ ID NO: 743179 - DNA, 25 bp, Homo sapien
tcaaactgtattccaagagctctag

SEQ ID NO: 743180 - DNA, 25 bp, Homo sapien
gaagcaggccctagaaggtcaagtg

SEQ ID NO: 743181 - DNA, 25 bp, Homo sapien
ggtcaagtgcactcctttcccctga

SEQ ID NO: 743182 - DNA, 25 bp, Homo sapien
tgacacaacacactggtagtctgat

SEQ ID NO: 743183 - DNA, 25 bp, Homo sapien
cacaacacactggtagtctgattgg

SEQ ID NO: 743184 - DNA, 25 bp, Homo sapien
ccccattgacacaacacactggtag

SEQ ID NO: 743185 - DNA, 25 bp, Homo sapien
cacactggtagtctgattggttcat

SEQ ID NO: 743186 - DNA, 25 bp, Homo sapien
cagcttggctccgtcctgcgggaga

SEQ ID NO: 743187 - DNA, 25 bp, Homo sapien
aaaggacgcgcagcctgcaagtccg

SEQ ID NO: 743188 - DNA, 25 bp, Homo sapien
ggtctccgcgcctgtgtggccggct

SEQ ID NO: 743189 - DNA, 25 bp, Homo sapien
gggtccgtgtgtccctgcgcggcgg

SEQ ID NO: 743190 - DNA, 25 bp, Homo sapien
tctccgtcggtggaggtcgcggctg

SEQ ID NO: 743191 - DNA, 25 bp, Homo sapien
tcgcccgctctccgtcggtggaggt

SEQ ID NO: 743192 - DNA, 25 bp, Homo sapien
ggctggcggagaccgccaagccaga

SEQ ID NO: 743193 - DNA, 25 bp, Homo sapien
tcatttcagatctgggaggcttgcc

SEQ ID NO: 743194 - DNA, 25 bp, Homo sapien
tcgaagactttccacatctccgtgc

SEQ ID NO: 743195 - DNA, 25 bp, Homo sapien
gaagactttccacatctccgtgcag

SEQ ID NO: 743196 - DNA, 25 bp, Homo sapien
tgggctcgaagactttccacatctc

SEQ ID NO: 743197 - DNA, 25 bp, Homo sapien
ggctcgaagactttccacatctccg

SEQ ID NO: 743198 - DNA, 25 bp, Homo sapien
ctcataagcccagccaccgaacctg

SEQ ID NO: 743199 - DNA, 25 bp, Homo sapien
ctggagtgaaactgactacagcagc

SEQ ID NO: 743200 - DNA, 25 bp, Homo sapien
gaattcagggggatcccaatagcac

SEQ ID NO: 743201 - DNA, 25 bp, Homo sapien
gggggatcccaatagcacaccattc

SEQ ID NO: 743202 - DNA, 25 bp, Homo sapien
aggtcagccccaatgtgtctctggg

SEQ ID NO: 743203 - DNA, 25 bp, Homo sapien
agcaccactggcctcccactgacag

SEQ ID NO: 743204 - DNA, 25 bp, Homo sapien
gcaggtcagccccaatgtgtctctg

SEQ ID NO: 743205 - DNA, 25 bp, Homo sapien
cggcaggtcagccccaatgtgtctc

SEQ ID NO: 743206 - DNA, 25 bp, Homo sapien
gggaaacgtgcacgacaccagccat

SEQ ID NO: 743207 - DNA, 25 bp, Homo sapien
ccagggaaacgtgcacgacaccagc

SEQ ID NO: 743208 - DNA, 25 bp, Homo sapien
agggaaacgtgcacgacaccagcca

SEQ ID NO: 743209 - DNA, 25 bp, Homo sapien
agccagggaaacgtgcacgacacca

SEQ ID NO: 743210 - DNA, 25 bp, Homo sapien
ggaatcattgaagcccatcagctca

SEQ ID NO: 743211 - DNA, 25 bp, Homo sapien
gctcattggccctctggatcttctc

SEQ ID NO: 743212 - DNA, 25 bp, Homo sapien
tggagaggaatcattgaagcccatc

SEQ ID NO: 743213 - DNA, 25 bp, Homo sapien
ccatcagctcattggccctctggat

SEQ ID NO: 743214 - DNA, 25 bp, Homo sapien
ctggggacgtggcatgctccctgcc

SEQ ID NO: 743215 - DNA, 25 bp, Homo sapien
acaggcaatagctgtgtccctgctg

SEQ ID NO: 743216 - DNA, 25 bp, Homo sapien
ctaacaagctcttgacagccactgc

SEQ ID NO: 743217 - DNA, 25 bp, Homo sapien
tgctaacaagctcttgacagccact

SEQ ID NO: 743218 - DNA, 25 bp, Homo sapien
tgcctgctaacaagctcttgacagc

SEQ ID NO: 743219 - DNA, 25 bp, Homo sapien
gggcttccaacacgtgatgttgtcc

SEQ ID NO: 743220 - DNA, 25 bp, Homo sapien
tctgggttgaagattcggaagagct

SEQ ID NO: 743221 - DNA, 25 bp, Homo sapien
aggaccatctcacccacatgggcgg

SEQ ID NO: 743222 - DNA, 25 bp, Homo sapien
acatgggcgggcttccaacacgtga

SEQ ID NO: 743223 - DNA, 25 bp, Homo sapien
gtccacaagtcaccgacagcactgt

SEQ ID NO: 743224 - DNA, 25 bp, Homo sapien
cgcctccaagcccacgtccacaagt

SEQ ID NO: 743225 - DNA, 25 bp, Homo sapien
gtggcactgctccccgtgtgtggca

SEQ ID NO: 743226 - DNA, 25 bp, Homo sapien
ctcccatcttgagcccgtgtaactg

SEQ ID NO: 743227 - DNA, 25 bp, Homo sapien
ctgagagatctaaggagttactgtc

SEQ ID NO: 743228 - DNA, 25 bp, Homo sapien
agagatctaaggagttactgtcacc

SEQ ID NO: 743229 - DNA, 25 bp, Homo sapien
tgagagatctaaggagttactgtca

SEQ ID NO: 743230 - DNA, 25 bp, Homo sapien
gagagatctaaggagttactgtcac

SEQ ID NO: 743231 - DNA, 25 bp, Homo sapien
gagggaagggttccgaccagccatc

SEQ ID NO: 743232 - DNA, 25 bp, Homo sapien
agccatcctccgtgcagttccggct

SEQ ID NO: 743233 - DNA, 25 bp, Homo sapien
ggtccccagtctcagattcatattc

SEQ ID NO: 743234 - DNA, 25 bp, Homo sapien
cagttccggctcaccactcccatgt

SEQ ID NO: 743235 - DNA, 25 bp, Homo sapien
ggtgacgagggatgtgctgtagcca

SEQ ID NO: 743236 - DNA, 25 bp, Homo sapien
gaccatggcagtggtgagggtgacg

SEQ ID NO: 743237 - DNA, 25 bp, Homo sapien
tgctgtagccaaccgtgtagagggc

SEQ ID NO: 743238 - DNA, 25 bp, Homo sapien
tgagggtgacgagggatgtgctgta

SEQ ID NO: 743239 - DNA, 25 bp, Homo sapien
tgaagttgcgtgtgcagtgcagctt

SEQ ID NO: 743240 - DNA, 25 bp, Homo sapien
aggttcatgtggatgaagttgcgtg

SEQ ID NO: 743241 - DNA, 25 bp, Homo sapien
atgaagttgcgtgtgcagtgcagct

SEQ ID NO: 743242 - DNA, 25 bp, Homo sapien
ggttcatgtggatgaagttgcgtgt

SEQ ID NO: 743243 - DNA, 25 bp, Homo sapien
tctttgatgaagacggagatcgccc

SEQ ID NO: 743244 - DNA, 25 bp, Homo sapien
tgtcctgctccgcatacagaatcca

SEQ ID NO: 743245 - DNA, 25 bp, Homo sapien
tcgccctcagcatgaacgacacaaa

SEQ ID NO: 743246 - DNA, 25 bp, Homo sapien
tgctccgcatacagaatccagtctt

SEQ ID NO: 743247 - DNA, 25 bp, Homo sapien
gtgcgggaccttcccggcagagcct

SEQ ID NO: 743248 - DNA, 25 bp, Homo sapien
ggtaatgtgcgtcctggggaaccaa

SEQ ID NO: 743249 - DNA, 25 bp, Homo sapien
ccggcagagcctaatgggtctgctt

SEQ ID NO: 743250 - DNA, 25 bp, Homo sapien
acacacttgatctgcagggtgtcag

SEQ ID NO: 743251 - DNA, 25 bp, Homo sapien
gccaaatgcaacacccaggccaaga

SEQ ID NO: 743252 - DNA, 25 bp, Homo sapien
gaagtgatgtcgtacattggctcat

SEQ ID NO: 743253 - DNA, 25 bp, Homo sapien
attcgtgagttttcacataaaccgg

SEQ ID NO: 743254 - DNA, 25 bp, Homo sapien
ggctcatcagctactagtaacttaa

SEQ ID NO: 743255 - DNA, 25 bp, Homo sapien
gggtgaggggcgtgagcccaacagg

SEQ ID NO: 743256 - DNA, 25 bp, Homo sapien
gggcgtgagcccaacaggaacagga

SEQ ID NO: 743257 - DNA, 25 bp, Homo sapien
acaggaacaggagcaagggagaatc

SEQ ID NO: 743258 - DNA, 25 bp, Homo sapien
gagcccaacaggaacaggagcaagg

SEQ ID NO: 743259 - DNA, 25 bp, Homo sapien
tagtggaagaaaaccatgacggcct

SEQ ID NO: 743260 - DNA, 25 bp, Homo sapien
tacaggccctcgatgaacagccaga

SEQ ID NO: 743261 - DNA, 25 bp, Homo sapien
cagcagagtgaagaggtacaggccc

SEQ ID NO: 743262 - DNA, 25 bp, Homo sapien
tttcagggaagaaggtctccaccag

SEQ ID NO: 743263 - DNA, 25 bp, Homo sapien
ctgaccacgggacctgaacctgtcc

SEQ ID NO: 743264 - DNA, 25 bp, Homo sapien
gggacctgaacctgtccaagccaca

SEQ ID NO: 743265 - DNA, 25 bp, Homo sapien
accacgggacctgaacctgtccaag

SEQ ID NO: 743266 - DNA, 25 bp, Homo sapien
acgggacctgaacctgtccaagcca

SEQ ID NO: 743267 - DNA, 25 bp, Homo sapien
tagagtctcagcgtagcccacactg

SEQ ID NO: 743268 - DNA, 25 bp, Homo sapien
aaagtagagtctcagcgtagcccac

SEQ ID NO: 743269 - DNA, 25 bp, Homo sapien
catcaaagtagagtctcagcgtagc

SEQ ID NO: 743270 - DNA, 25 bp, Homo sapien
tcaaagtagagtctcagcgtagccc

SEQ ID NO: 743271 - DNA, 25 bp, Homo sapien
agggcctttgatcacccaccacaga

SEQ ID NO: 743272 - DNA, 25 bp, Homo sapien
gatagagccaaccacagggcctttg

SEQ ID NO: 743273 - DNA, 25 bp, Homo sapien
catgatagagccaaccacagggcct

SEQ ID NO: 743274 - DNA, 25 bp, Homo sapien
gagccaaccacagggcctttgatca

SEQ ID NO: 743275 - DNA, 25 bp, Homo sapien
ctgcacaaggatgacgataatgcca

SEQ ID NO: 743276 - DNA, 25 bp, Homo sapien
gacgataatgccaataaaaagcaca

SEQ ID NO: 743277 - DNA, 25 bp, Homo sapien
gctggactcattgcctcccatgtct

SEQ ID NO: 743278 - DNA, 25 bp, Homo sapien
aagtagatgctggactcattgcctc

SEQ ID NO: 743279 - DNA, 25 bp, Homo sapien
agctggtcatgctcccattcacagc

SEQ ID NO: 743280 - DNA, 25 bp, Homo sapien
gccctgggggttcttgctgcccaaa

SEQ ID NO: 743281 - DNA, 25 bp, Homo sapien
tgggggttcttgctgcccaaagcag

SEQ ID NO: 743282 - DNA, 25 bp, Homo sapien
gggttcttgctgcccaaagcagaat

SEQ ID NO: 743283 - DNA, 25 bp, Homo sapien
gttcttgctgcccaaagcagaatgt

SEQ ID NO: 743284 - DNA, 25 bp, Homo sapien
ggaagcctaattttgcacacttgtt

SEQ ID NO: 743285 - DNA, 25 bp, Homo sapien
tgaggacagggatgacggtgctgtc

SEQ ID NO: 743286 - DNA, 25 bp, Homo sapien
cttccaggaagcctaattttgcaca

SEQ ID NO: 743287 - DNA, 25 bp, Homo sapien
cacacttgtttaatgctatcttttc

SEQ ID NO: 743288 - DNA, 25 bp, Homo sapien
agtgaatgctggtctgagggcacag

SEQ ID NO: 743289 - DNA, 25 bp, Homo sapien
agggagtgaatgctggtctgagggc

SEQ ID NO: 743290 - DNA, 25 bp, Homo sapien
gaaagggagtgaatgctggtctgag

SEQ ID NO: 743291 - DNA, 25 bp, Homo sapien
aggaaagggagtgaatgctggtctg

SEQ ID NO: 743292 - DNA, 25 bp, Homo sapien
tgggtgtgacaagattagcacttct

SEQ ID NO: 743293 - DNA, 25 bp, Homo sapien
ctgggtgtgacaagattagcacttc

SEQ ID NO: 743294 - DNA, 25 bp, Homo sapien
gctgtggcttgcagtagcatttctg

SEQ ID NO: 743295 - DNA, 25 bp, Homo sapien
agagtaatggtggacagttctgaca

SEQ ID NO: 743296 - DNA, 25 bp, Homo sapien
tgctgagcccgctgtggcttgcagt

SEQ ID NO: 743297 - DNA, 25 bp, Homo sapien
tgacatcttgcaagagtgctgctga

SEQ ID NO: 743298 - DNA, 25 bp, Homo sapien
ggaccctgggcatcggcaatctcca

SEQ ID NO: 743299 - DNA, 25 bp, Homo sapien
tgggcatcggcaatctccaactggg

SEQ ID NO: 743300 - DNA, 25 bp, Homo sapien
tgggaaactgagtcaaaggtggaag

SEQ ID NO: 743301 - DNA, 25 bp, Homo sapien
aggaggaacctcctgctgggaaact

SEQ ID NO: 743302 - DNA, 25 bp, Homo sapien
caaatactgtgtagtggattccgaa

SEQ ID NO: 743303 - DNA, 25 bp, Homo sapien
cagctcaaacacgagtctttccctt

SEQ ID NO: 743304 - DNA, 25 bp, Homo sapien
agaaggcaaatactgtgtagtggat

SEQ ID NO: 743305 - DNA, 25 bp, Homo sapien
tggattccgaatagtgggatgagca

SEQ ID NO: 743306 - DNA, 25 bp, Homo sapien
aaaacagtagagaacagccaccaca

SEQ ID NO: 743307 - DNA, 25 bp, Homo sapien
aaacagtagagaacagccaccacaa

SEQ ID NO: 743308 - DNA, 25 bp, Homo sapien
ctcaccattcagaaaacagtagaga

SEQ ID NO: 743309 - DNA, 25 bp, Homo sapien
cagtagagaacagccaccacaaagc

SEQ ID NO: 743310 - DNA, 25 bp, Homo sapien
ccagacatgcggatttgggagctgc

SEQ ID NO: 743311 - DNA, 25 bp, Homo sapien
tcgccattttcgcttgatctccgct

SEQ ID NO: 743312 - DNA, 25 bp, Homo sapien
gccagagacgggtgtcggtgcttga

SEQ ID NO: 743313 - DNA, 25 bp, Homo sapien
agtaacggttcaccttccagcttcg

SEQ ID NO: 743314 - DNA, 25 bp, Homo sapien
gaaaaatcacttacgtgcagggcct

SEQ ID NO: 743315 - DNA, 25 bp, Homo sapien
gagaattcggcctcccatgggtgag

SEQ ID NO: 743316 - DNA, 25 bp, Homo sapien
cattacccagattaggaggccgagg

SEQ ID NO: 743317 - DNA, 25 bp, Homo sapien
taggaacccggcacctctatgagga

SEQ ID NO: 743318 - DNA, 25 bp, Homo sapien
tcaggaactgcatccatgagggaga

SEQ ID NO: 743319 - DNA, 25 bp, Homo sapien
cattttagggcaactgacagtcaga

SEQ ID NO: 743320 - DNA, 25 bp, Homo sapien
tgcaaagtccccattcagctgaaag

SEQ ID NO: 743321 - DNA, 25 bp, Homo sapien
ctagaatacaatacactgcaggtgg

SEQ ID NO: 743322 - DNA, 25 bp, Homo sapien
tcagtttgtattaaagaggactccc

SEQ ID NO: 743323 - DNA, 25 bp, Homo sapien
tgtggtgctggacccaaggttcact

SEQ ID NO: 743324 - DNA, 25 bp, Homo sapien
catggtacttactgcccaagccaaa

SEQ ID NO: 743325 - DNA, 25 bp, Homo sapien
gactgccaagtaggtacagtcttgg

SEQ ID NO: 743326 - DNA, 25 bp, Homo sapien
aaagtctgcatgacctatatggttg

SEQ ID NO: 743327 - DNA, 25 bp, Homo sapien
gaaacacagtgaggcatcccttagt

SEQ ID NO: 743328 - DNA, 25 bp, Homo sapien
gggtagaaacagataacatcatgtg

SEQ ID NO: 743329 - DNA, 25 bp, Homo sapien
gtaaaagttgcactgttttgctcag

SEQ ID NO: 743330 - DNA, 25 bp, Homo sapien
atacgtgctgcctccaatgggttcc

SEQ ID NO: 743331 - DNA, 25 bp, Homo sapien
cagagcagccgagaatacgtgctgc

SEQ ID NO: 743332 - DNA, 25 bp, Homo sapien
caatgggttcctgttccgcgtggac

SEQ ID NO: 743333 - DNA, 25 bp, Homo sapien
cctgttccgcgtggacagctgttct

SEQ ID NO: 743334 - DNA, 25 bp, Homo sapien
taactcatccagtacagactggtcc

SEQ ID NO: 743335 - DNA, 25 bp, Homo sapien
gtacagactggtccctgtgagtcat

SEQ ID NO: 743336 - DNA, 25 bp, Homo sapien
aaacagctctttaactcatccagta

SEQ ID NO: 743337 - DNA, 25 bp, Homo sapien
ggatgcagcttcaggaaacagctct

SEQ ID NO: 743338 - DNA, 25 bp, Homo sapien
gatagggggatgctgtgccacgtac

SEQ ID NO: 743339 - DNA, 25 bp, Homo sapien
agcaccgggtgatagggggatgctg

SEQ ID NO: 743340 - DNA, 25 bp, Homo sapien
accgggtgatagggggatgctgtgc

SEQ ID NO: 743341 - DNA, 25 bp, Homo sapien
tgatagggggatgctgtgccacgta

SEQ ID NO: 743342 - DNA, 25 bp, Homo sapien
cagcataggtgccttccacaaaaag

SEQ ID NO: 743343 - DNA, 25 bp, Homo sapien
cattacttgaggtggagccccatgt

SEQ ID NO: 743344 - DNA, 25 bp, Homo sapien
gaggtggagccccatgtgtgctcca

SEQ ID NO: 743345 - DNA, 25 bp, Homo sapien
agtaccattacttgaggtggagccc

SEQ ID NO: 743346 - DNA, 25 bp, Homo sapien
caggtgatcagacaaggtctaccaa

SEQ ID NO: 743347 - DNA, 25 bp, Homo sapien
gatcagacaaggtctaccaacttca

SEQ ID NO: 743348 - DNA, 25 bp, Homo sapien
cagacaaggtctaccaacttcaagg

SEQ ID NO: 743349 - DNA, 25 bp, Homo sapien
caaggtctaccaacttcaaggtcaa

SEQ ID NO: 743350 - DNA, 25 bp, Homo sapien
tgctggcatgcaatacttgatgatg

SEQ ID NO: 743351 - DNA, 25 bp, Homo sapien
ctgctggcatgcaatacttgatgat

SEQ ID NO: 743352 - DNA, 25 bp, Homo sapien
tctgctggcatgcaatacttgatga

SEQ ID NO: 743353 - DNA, 25 bp, Homo sapien
tttctgctggcatgcaatacttgat

SEQ ID NO: 743354 - DNA, 25 bp, Homo sapien
ggtgaaattgatgcactgcccagaa

SEQ ID NO: 743355 - DNA, 25 bp, Homo sapien
taggtgaaattgatgcactgcccag

SEQ ID NO: 743356 - DNA, 25 bp, Homo sapien
aattgatgcactgcccagaataggc

SEQ ID NO: 743357 - DNA, 25 bp, Homo sapien
tctttaggtgaaattgatgcactgc

SEQ ID NO: 743358 - DNA, 25 bp, Homo sapien
tctttaattggataaccaactccca

SEQ ID NO: 743359 - DNA, 25 bp, Homo sapien
ttccacaccagaggtcatgtagcct

SEQ ID NO: 743360 - DNA, 25 bp, Homo sapien
taattggataaccaactcccagaaa

SEQ ID NO: 743361 - DNA, 25 bp, Homo sapien
gctgagtcgattatctgatttggag

SEQ ID NO: 743362 - DNA, 25 bp, Homo sapien
ccatgggctgtcaccagaagcaggg

SEQ ID NO: 743363 - DNA, 25 bp, Homo sapien
tgtcaccagaagcaggggtactggg

SEQ ID NO: 743364 - DNA, 25 bp, Homo sapien
ctgccatgggctgtcaccagaagca

SEQ ID NO: 743365 - DNA, 25 bp, Homo sapien
tcaccagaagcaggggtactgggag

SEQ ID NO: 743366 - DNA, 25 bp, Homo sapien
caaggcgaaacccagagaacatgtg

SEQ ID NO: 743367 - DNA, 25 bp, Homo sapien
aggcgaaacccagagaacatgtgtg

SEQ ID NO: 743368 - DNA, 25 bp, Homo sapien
tgcaaggcgaaacccagagaacatg

SEQ ID NO: 743369 - DNA, 25 bp, Homo sapien
ctgcaaggcgaaacccagagaacat

SEQ ID NO: 743370 - DNA, 25 bp, Homo sapien
agtgtggtgattccaagcctcctct

SEQ ID NO: 743371 - DNA, 25 bp, Homo sapien
aagtgtggtgattccaagcctcctc

SEQ ID NO: 743372 - DNA, 25 bp, Homo sapien
ggagcgtcacaccttactgccttta

SEQ ID NO: 743373 - DNA, 25 bp, Homo sapien
atacatttgcgcttttttccctcca

SEQ ID NO: 743374 - DNA, 25 bp, Homo sapien
cagattcccgtgtgctggtatccat

SEQ ID NO: 743375 - DNA, 25 bp, Homo sapien
ctgctgtcagagtgagccgtccaga

SEQ ID NO: 743376 - DNA, 25 bp, Homo sapien
cagaaacagactgcaaggctggtca

SEQ ID NO: 743377 - DNA, 25 bp, Homo sapien
tgccaagaaggaggtatgggcccct

SEQ ID NO: 743378 - DNA, 25 bp, Homo sapien
aggtcacctacatagccggcactgg

SEQ ID NO: 743379 - DNA, 25 bp, Homo sapien
caagtcagtgggcacacgtttccct

SEQ ID NO: 743380 - DNA, 25 bp, Homo sapien
aagtccaccaaatctgggcttaaga

SEQ ID NO: 743381 - DNA, 25 bp, Homo sapien
gtccaccaaatctgggcttaagatt

SEQ ID NO: 743382 - DNA, 25 bp, Homo sapien
tccaccaaatctgggcttaagattt

SEQ ID NO: 743383 - DNA, 25 bp, Homo sapien
agtccaccaaatctgggcttaagat

SEQ ID NO: 743384 - DNA, 25 bp, Homo sapien
gtccatctgttccatgtactagtga

SEQ ID NO: 743385 - DNA, 25 bp, Homo sapien
ggcagtggacgtaggagtggatccc

SEQ ID NO: 743386 - DNA, 25 bp, Homo sapien
catgtactagtgagccggcagtgga

SEQ ID NO: 743387 - DNA, 25 bp, Homo sapien
tagagttttccatgtagtccatctg

SEQ ID NO: 743388 - DNA, 25 bp, Homo sapien
taggctgtgggctaccagcatagta

SEQ ID NO: 743389 - DNA, 25 bp, Homo sapien
ccagcatagtagtctccataaataa

SEQ ID NO: 743390 - DNA, 25 bp, Homo sapien
aaacacctgagcaagacttaggctg

SEQ ID NO: 743391 - DNA, 25 bp, Homo sapien
catccagagactgcaactcttcaga

SEQ ID NO: 743392 - DNA, 25 bp, Homo sapien
cagcagtcaatggccctgtgttgtc

SEQ ID NO: 743393 - DNA, 25 bp, Homo sapien
aataggacaatgtcagtggctcttc

SEQ ID NO: 743394 - DNA, 25 bp, Homo sapien
gagatgatctgacacttcccacatg

SEQ ID NO: 743395 - DNA, 25 bp, Homo sapien
ttcccacatgcccagaaataggaca

SEQ ID NO: 743396 - DNA, 25 bp, Homo sapien
cctaatatacagcatagggatgata

SEQ ID NO: 743397 - DNA, 25 bp, Homo sapien
gagtagatcttattctcaacacaca

SEQ ID NO: 743398 - DNA, 25 bp, Homo sapien
tacagcatagggatgatagttaata

SEQ ID NO: 743399 - DNA, 25 bp, Homo sapien
ctatatgaggtgatgaatacgttaa

SEQ ID NO: 743400 - DNA, 25 bp, Homo sapien
ctataattgtgacatgttagttgga

SEQ ID NO: 743401 - DNA, 25 bp, Homo sapien
ctagttctgaaattcgtgcctcttt

SEQ ID NO: 743402 - DNA, 25 bp, Homo sapien
atgttagttggaatttttgcaatgc

SEQ ID NO: 743403 - DNA, 25 bp, Homo sapien
ttgcaatgcacactagttctgaaat

SEQ ID NO: 743404 - DNA, 25 bp, Homo sapien
gaatccatggtgcattttctcaccc

SEQ ID NO: 743405 - DNA, 25 bp, Homo sapien
gttttgaagttggaatccatggtgc

SEQ ID NO: 743406 - DNA, 25 bp, Homo sapien
tcttggccttgaggttccctgaaaa

SEQ ID NO: 743407 - DNA, 25 bp, Homo sapien
catcctctttatacaggttgctgct

SEQ ID NO: 743408 - DNA, 25 bp, Homo sapien
gccattatgatgtttcacagctcca

SEQ ID NO: 743409 - DNA, 25 bp, Homo sapien
cgtacatctttctccatatgactaa

SEQ ID NO: 743410 - DNA, 25 bp, Homo sapien
aattggactgtccttcacgtacatc

SEQ ID NO: 743411 - DNA, 25 bp, Homo sapien
cactatttgtatttgagccattatg

SEQ ID NO: 743412 - DNA, 25 bp, Homo sapien
ccaatgttttcatattatcttctcg

SEQ ID NO: 743413 - DNA, 25 bp, Homo sapien
ttcatattatcttctcgcctttctc

SEQ ID NO: 743414 - DNA, 25 bp, Homo sapien
ttttcatattatcttctcgcctttc

SEQ ID NO: 743415 - DNA, 25 bp, Homo sapien
aatgttttcatattatcttctcgcc

SEQ ID NO: 743416 - DNA, 25 bp, Homo sapien
ctctcactcagattcaagcgagtct

SEQ ID NO: 743417 - DNA, 25 bp, Homo sapien
accatgatctctcactcagattcaa

SEQ ID NO: 743418 - DNA, 25 bp, Homo sapien
tctctcactcagattcaagcgagtc

SEQ ID NO: 743419 - DNA, 25 bp, Homo sapien
tttcaccatgatctctcactcagat

SEQ ID NO: 743420 - DNA, 25 bp, Homo sapien
ctttgcacccattatgttctggttc

SEQ ID NO: 743421 - DNA, 25 bp, Homo sapien
aaaacagtttgtccagcaaacaatt

SEQ ID NO: 743422 - DNA, 25 bp, Homo sapien
tcaattttcacattacctactgaca

SEQ ID NO: 743423 - DNA, 25 bp, Homo sapien
gcaacacttgcggattctggaaaag

SEQ ID NO: 743424 - DNA, 25 bp, Homo sapien
aagctcgtgccagcaacacttgcgg

SEQ ID NO: 743425 - DNA, 25 bp, Homo sapien
tactgacaatgaagctcgtgccagc

SEQ ID NO: 743426 - DNA, 25 bp, Homo sapien
gaagaaacgaatgtagcagataaac

SEQ ID NO: 743427 - DNA, 25 bp, Homo sapien
aaagcagtgtaagaactcggtgaag

SEQ ID NO: 743428 - DNA, 25 bp, Homo sapien
acgaatgtagcagataaacaggcca

SEQ ID NO: 743429 - DNA, 25 bp, Homo sapien
tctgtggaggattgtaaattaattg

SEQ ID NO: 743430 - DNA, 25 bp, Homo sapien
gtgtgatgggtgtggatgataccat

SEQ ID NO: 743431 - DNA, 25 bp, Homo sapien
ctgtgtgatgggtgtggatgatacc

SEQ ID NO: 743432 - DNA, 25 bp, Homo sapien
tgtgtgatgggtgtggatgatacca

SEQ ID NO: 743433 - DNA, 25 bp, Homo sapien
ccagactgccgctgtgtgagcaggc

SEQ ID NO: 743434 - DNA, 25 bp, Homo sapien
agcccaagctgatgtttctcgaatg

SEQ ID NO: 743435 - DNA, 25 bp, Homo sapien
ttcgtgaatgtgtggacaagtggct

SEQ ID NO: 743436 - DNA, 25 bp, Homo sapien
tggctacagccatatgtttagtggt

SEQ ID NO: 743437 - DNA, 25 bp, Homo sapien
ttaacaccatctttacagggatctc

SEQ ID NO: 743438 - DNA, 25 bp, Homo sapien
aacaccatctttacagggatctcat

SEQ ID NO: 743439 - DNA, 25 bp, Homo sapien
taacaccatctttacagggatctca

SEQ ID NO: 743440 - DNA, 25 bp, Homo sapien
acaccatctttacagggatctcatt

SEQ ID NO: 743441 - DNA, 25 bp, Homo sapien
tgcgcagaccgatgagggcagcaga

SEQ ID NO: 743442 - DNA, 25 bp, Homo sapien
ggagaggttgctggcggcgttgcgt

SEQ ID NO: 743443 - DNA, 25 bp, Homo sapien
ggactttgtgggcaccgccagagcc

SEQ ID NO: 743444 - DNA, 25 bp, Homo sapien
caggtcttgggtaggcctggccaac

SEQ ID NO: 743445 - DNA, 25 bp, Homo sapien
tgggtagctgatgtcataattcggg

SEQ ID NO: 743446 - DNA, 25 bp, Homo sapien
tctaaatgcattcaattggtaacta

SEQ ID NO: 743447 - DNA, 25 bp, Homo sapien
taactattcctcttcaagtatttgc

SEQ ID NO: 743448 - DNA, 25 bp, Homo sapien
tcggggacaattatctcaatcatca

SEQ ID NO: 743449 - DNA, 25 bp, Homo sapien
tggaaccataagccatccagcttta

SEQ ID NO: 743450 - DNA, 25 bp, Homo sapien
acaagccatccctgtgttcgttcac

SEQ ID NO: 743451 - DNA, 25 bp, Homo sapien
gataagtggcattaaaggacaagcc

SEQ ID NO: 743452 - DNA, 25 bp, Homo sapien
agacttctgataagtggcattaaag

SEQ ID NO: 743453 - DNA, 25 bp, Homo sapien
gtctggggatgggtccttcttggta

SEQ ID NO: 743454 - DNA, 25 bp, Homo sapien
tggggatgggtccttcttggtagtc

SEQ ID NO: 743455 - DNA, 25 bp, Homo sapien
actgggtctggggatgggtccttct

SEQ ID NO: 743456 - DNA, 25 bp, Homo sapien
tgggtctggggatgggtccttcttg

SEQ ID NO: 743457 - DNA, 25 bp, Homo sapien
atttctcaagtggaaacttgagcac

SEQ ID NO: 743458 - DNA, 25 bp, Homo sapien
tcaagtggaaacttgagcaccatct

SEQ ID NO: 743459 - DNA, 25 bp, Homo sapien
tctcaagtggaaacttgagcaccat

SEQ ID NO: 743460 - DNA, 25 bp, Homo sapien
caagtggaaacttgagcaccatctt

SEQ ID NO: 743461 - DNA, 25 bp, Homo sapien
gagctggttggagactgatgcatca

SEQ ID NO: 743462 - DNA, 25 bp, Homo sapien
tgatgcatcaacagcatctaagttc

SEQ ID NO: 743463 - DNA, 25 bp, Homo sapien
ttagtggtagctgggcgggtagagc

SEQ ID NO: 743464 - DNA, 25 bp, Homo sapien
tagctgggcgggtagagctggttgg

SEQ ID NO: 743465 - DNA, 25 bp, Homo sapien
ccttgcatgacacgcatctctgcaa

SEQ ID NO: 743466 - DNA, 25 bp, Homo sapien
gacacgcatctctgcaagcaacaca

SEQ ID NO: 743467 - DNA, 25 bp, Homo sapien
ttgcatgacacgcatctctgcaagc

SEQ ID NO: 743468 - DNA, 25 bp, Homo sapien
catgacacgcatctctgcaagcaac

SEQ ID NO: 743469 - DNA, 25 bp, Homo sapien
tgaaaagataacgaaggggagccaa

SEQ ID NO: 743470 - DNA, 25 bp, Homo sapien
gcacacggaaacgttgtgtctttgc

SEQ ID NO: 743471 - DNA, 25 bp, Homo sapien
tctttgctaaatataaacctttgta

SEQ ID NO: 743472 - DNA, 25 bp, Homo sapien
tgtagcgacagtatctcaataattt

SEQ ID NO: 743473 - DNA, 25 bp, Homo sapien
tgagttgagcccaagcagaagcatt

SEQ ID NO: 743474 - DNA, 25 bp, Homo sapien
gataagaactgagttgagcccaagc

SEQ ID NO: 743475 - DNA, 25 bp, Homo sapien
gaactgagttgagcccaagcagaag

SEQ ID NO: 743476 - DNA, 25 bp, Homo sapien
ctgtgataagaactgagttgagccc

SEQ ID NO: 743477 - DNA, 25 bp, Homo sapien
gaaggtacgtcccatctgctcttga

SEQ ID NO: 743478 - DNA, 25 bp, Homo sapien
gacaatcctgcgttttgaaggtacg

SEQ ID NO: 743479 - DNA, 25 bp, Homo sapien
tagggtttttagagctgccagccag

SEQ ID NO: 743480 - DNA, 25 bp, Homo sapien
cactgatctctcatcgactgtaggg

SEQ ID NO: 743481 - DNA, 25 bp, Homo sapien
ctgctggactctctctctccctcat

SEQ ID NO: 743482 - DNA, 25 bp, Homo sapien
tggaccgctattccctcttcgtggg

SEQ ID NO: 743483 - DNA, 25 bp, Homo sapien
gaaagtcccgcagccactgttggtg

SEQ ID NO: 743484 - DNA, 25 bp, Homo sapien
aaacgtatctgttagcaggcctgca

SEQ ID NO: 743485 - DNA, 25 bp, Homo sapien
tagcagtgtagcatcaactctcctg

SEQ ID NO: 743486 - DNA, 25 bp, Homo sapien
cagtatcatgctctagaagttgctt

SEQ ID NO: 743487 - DNA, 25 bp, Homo sapien
cacagtatcatgctctagaagttgc

SEQ ID NO: 743488 - DNA, 25 bp, Homo sapien
aggcacagtatcatgctctagaagt

SEQ ID NO: 743489 - DNA, 25 bp, Homo sapien
ttttttgtagtctctatcatgtcag

SEQ ID NO: 743490 - DNA, 25 bp, Homo sapien
agccactcatccagcggagcccacg

SEQ ID NO: 743491 - DNA, 25 bp, Homo sapien
ggagcccacgcgcttttggtgcact

SEQ ID NO: 743492 - DNA, 25 bp, Homo sapien
tttggtgcacttcaggatctctctc

SEQ ID NO: 743493 - DNA, 25 bp, Homo sapien
cacgcgcttttggtgcacttcagga

SEQ ID NO: 743494 - DNA, 25 bp, Homo sapien
gaatgttttcaaataggcctgagag

SEQ ID NO: 743495 - DNA, 25 bp, Homo sapien
aggaatgttttcaaataggcctgag

SEQ ID NO: 743496 - DNA, 25 bp, Homo sapien
ggaatgttttcaaataggcctgaga

SEQ ID NO: 743497 - DNA, 25 bp, Homo sapien
atgttttcaaataggcctgagagtc

SEQ ID NO: 743498 - DNA, 25 bp, Homo sapien
acaaccagctaaaaggatgctaccc

SEQ ID NO: 743499 - DNA, 25 bp, Homo sapien
gtcaaagcacaaccagctaaaagga

SEQ ID NO: 743500 - DNA, 25 bp, Homo sapien
agaacagatcagttagtcaaagcac

SEQ ID NO: 743501 - DNA, 25 bp, Homo sapien
aaagaacagatcagttagtcaaagc

SEQ ID NO: 743502 - DNA, 25 bp, Homo sapien
ctgctgaatactttcttgcttggaa

SEQ ID NO: 743503 - DNA, 25 bp, Homo sapien
cactgctgaatactttcttgcttgg

SEQ ID NO: 743504 - DNA, 25 bp, Homo sapien
actgctgaatactttcttgcttgga

SEQ ID NO: 743505 - DNA, 25 bp, Homo sapien
agtgcggtcaatgacttgttgaaag

SEQ ID NO: 743506 - DNA, 25 bp, Homo sapien
agcataactgcttctcttgtcttac

SEQ ID NO: 743507 - DNA, 25 bp, Homo sapien
cagcttcccaaagcataactgcttc

SEQ ID NO: 743508 - DNA, 25 bp, Homo sapien
aaagcataactgcttctcttgtctt

SEQ ID NO: 743509 - DNA, 25 bp, Homo sapien
cccaaagcataactgcttctcttgt

SEQ ID NO: 743510 - DNA, 25 bp, Homo sapien
gaacccagtgagtttatgctatact

SEQ ID NO: 743511 - DNA, 25 bp, Homo sapien
gaagcacctatcatttttgtcgcag

SEQ ID NO: 743512 - DNA, 25 bp, Homo sapien
tgagggctgatcatttctagaagcc

SEQ ID NO: 743513 - DNA, 25 bp, Homo sapien
ggttcggcccttaacctgctgctgg

SEQ ID NO: 743514 - DNA, 25 bp, Homo sapien
tctccctgtcacccttgccatgacc

SEQ ID NO: 743515 - DNA, 25 bp, Homo sapien
ctggtactgttctagcatccaccat

SEQ ID NO: 743516 - DNA, 25 bp, Homo sapien
gttctagcatccaccattctcaatg

SEQ ID NO: 743517 - DNA, 25 bp, Homo sapien
atcatggctgaagccagcatgcagt

SEQ ID NO: 743518 - DNA, 25 bp, Homo sapien
ccatgaggctcttttctgtaagtca

SEQ ID NO: 743519 - DNA, 25 bp, Homo sapien
gaagagttaatctgcccacagaggt

SEQ ID NO: 743520 - DNA, 25 bp, Homo sapien
tgagactcagacatgtttgcttgtg

SEQ ID NO: 743521 - DNA, 25 bp, Homo sapien
tgtagttggtgaccatgaagaagag

SEQ ID NO: 743522 - DNA, 25 bp, Homo sapien
gagccacatgggtagaacccaaaat

SEQ ID NO: 743523 - DNA, 25 bp, Homo sapien
tactgagctccttttgtcgactaac

SEQ ID NO: 743524 - DNA, 25 bp, Homo sapien
ttgtcagtgaaatggatgatatccc

SEQ ID NO: 743525 - DNA, 25 bp, Homo sapien
ttacagatgattccgtctcagtggg

SEQ ID NO: 743526 - DNA, 25 bp, Homo sapien
gtcatttgaaccatcccttgttcat

SEQ ID NO: 743527 - DNA, 25 bp, Homo sapien
tcatttgaaccatcccttgttcata

SEQ ID NO: 743528 - DNA, 25 bp, Homo sapien
ttgcagaagacagcttgcagtggag

SEQ ID NO: 743529 - DNA, 25 bp, Homo sapien
gcagaagacagcttgcagtggagga

SEQ ID NO: 743530 - DNA, 25 bp, Homo sapien
ctttgcagaagacagcttgcagtgg

SEQ ID NO: 743531 - DNA, 25 bp, Homo sapien
cagaagacagcttgcagtggaggag

SEQ ID NO: 743532 - DNA, 25 bp, Homo sapien
tctggataggatgggagtttctgaa

SEQ ID NO: 743533 - DNA, 25 bp, Homo sapien
aatagcaagagttgaaactggtccc

SEQ ID NO: 743534 - DNA, 25 bp, Homo sapien
tgtggtacacttgcagtagaatagc

SEQ ID NO: 743535 - DNA, 25 bp, Homo sapien
tagcaagagttgaaactggtccctc

SEQ ID NO: 743536 - DNA, 25 bp, Homo sapien
gatctatctcccaaaattccagcca

SEQ ID NO: 743537 - DNA, 25 bp, Homo sapien
cacggatgttgattcctctggctgc

SEQ ID NO: 743538 - DNA, 25 bp, Homo sapien
tgctgagccacaaccaaggaatctg

SEQ ID NO: 743539 - DNA, 25 bp, Homo sapien
aatgtccattcgctgcttttgagct

SEQ ID NO: 743540 - DNA, 25 bp, Homo sapien
ccaggatttccagctgtcggaaacg

SEQ ID NO: 743541 - DNA, 25 bp, Homo sapien
tgaggttctttgcacactctctcct

SEQ ID NO: 743542 - DNA, 25 bp, Homo sapien
gaggttctttgcacactctctcctc

SEQ ID NO: 743543 - DNA, 25 bp, Homo sapien
tcagctctgtttggcaggatgctga

SEQ ID NO: 743544 - DNA, 25 bp, Homo sapien
tctcttcagctctgtttggcaggat

SEQ ID NO: 743545 - DNA, 25 bp, Homo sapien
gatacctctgggttacaatcccgcc

SEQ ID NO: 743546 - DNA, 25 bp, Homo sapien
gataaggtagcaaatcatcacaggc

SEQ ID NO: 743547 - DNA, 25 bp, Homo sapien
caaggccactgcttgctcagaagac

SEQ ID NO: 743548 - DNA, 25 bp, Homo sapien
tcttcgatgctctttggcggcactc

SEQ ID NO: 743549 - DNA, 25 bp, Homo sapien
ccatttcaaatgagtctggtccttt

SEQ ID NO: 743550 - DNA, 25 bp, Homo sapien
catttcaaatgagtctggtcctttg

SEQ ID NO: 743551 - DNA, 25 bp, Homo sapien
gctggtacgttggtgcagcactgac

SEQ ID NO: 743552 - DNA, 25 bp, Homo sapien
tgaaatgagggctggaaaacaaggg

SEQ ID NO: 743553 - DNA, 25 bp, Homo sapien
taaaagatgaagtggtgaaatgagg

SEQ ID NO: 743554 - DNA, 25 bp, Homo sapien
cccttaggaggctggtacgttggtg

SEQ ID NO: 743555 - DNA, 25 bp, Homo sapien
tcatgtcaagaggattaccagtctc

SEQ ID NO: 743556 - DNA, 25 bp, Homo sapien
agttcctgaagtcatgtcaagagga

SEQ ID NO: 743557 - DNA, 25 bp, Homo sapien
ggattaccagtctcttcttcaaagc

SEQ ID NO: 743558 - DNA, 25 bp, Homo sapien
gaagtcatgtcaagaggattaccag

SEQ ID NO: 743559 - DNA, 25 bp, Homo sapien
gaattcaagtgttactgtactgcat

SEQ ID NO: 743560 - DNA, 25 bp, Homo sapien
ttattgaattcaagtgttactgtac

SEQ ID NO: 743561 - DNA, 25 bp, Homo sapien
ctttgcatttacatgttgttagata

SEQ ID NO: 743562 - DNA, 25 bp, Homo sapien
cccaagtactgggtttgtcattttg

SEQ ID NO: 743563 - DNA, 25 bp, Homo sapien
gcatgactattaacgaatctatgaa

SEQ ID NO: 743564 - DNA, 25 bp, Homo sapien
attctcgactttatgaagtgtggct

SEQ ID NO: 743565 - DNA, 25 bp, Homo sapien
ttgacagagctcctatggctaagca

SEQ ID NO: 743566 - DNA, 25 bp, Homo sapien
gtggctacccccaagacatgggcag

SEQ ID NO: 743567 - DNA, 25 bp, Homo sapien
cactcgttgggacaagatgaatcac

SEQ ID NO: 743568 - DNA, 25 bp, Homo sapien
tgaggttccatgtcataatgtgcca

SEQ ID NO: 743569 - DNA, 25 bp, Homo sapien
gccagatggaggtggttacatctct

SEQ ID NO: 743570 - DNA, 25 bp, Homo sapien
caaatgtgttaatagtgaggttcca

SEQ ID NO: 743571 - DNA, 25 bp, Homo sapien
cttgaattgttttatactagcactt

SEQ ID NO: 743572 - DNA, 25 bp, Homo sapien
attgttttatactagcacttgggca

SEQ ID NO: 743573 - DNA, 25 bp, Homo sapien
tttatactagcacttgggcagtaat

SEQ ID NO: 743574 - DNA, 25 bp, Homo sapien
gcacttgggcagtaattaaagggac

SEQ ID NO: 743575 - DNA, 25 bp, Homo sapien
tcctatcacaatgatgggcaccaag

SEQ ID NO: 743576 - DNA, 25 bp, Homo sapien
tagtcatagtccttgctcctatcac

SEQ ID NO: 743577 - DNA, 25 bp, Homo sapien
atgggcaccaagagggctttaaggt

SEQ ID NO: 743578 - DNA, 25 bp, Homo sapien
ctttgatctgggtgacttagtcata

SEQ ID NO: 743579 - DNA, 25 bp, Homo sapien
acaatgcctgagagccttaacggtc

SEQ ID NO: 743580 - DNA, 25 bp, Homo sapien
ctgagagccttaacggtccatgtgt

SEQ ID NO: 743581 - DNA, 25 bp, Homo sapien
tgcctgagagccttaacggtccatg

SEQ ID NO: 743582 - DNA, 25 bp, Homo sapien
caatgcctgagagccttaacggtcc

SEQ ID NO: 743583 - DNA, 25 bp, Homo sapien
tgaaggacagttccactcacaagag

SEQ ID NO: 743584 - DNA, 25 bp, Homo sapien
gaaggacagttccactcacaagagc

SEQ ID NO: 743585 - DNA, 25 bp, Homo sapien
ttgaaggacagttccactcacaaga

SEQ ID NO: 743586 - DNA, 25 bp, Homo sapien
actgctgacgaagagttcaagggag

SEQ ID NO: 743587 - DNA, 25 bp, Homo sapien
gggatttgcctttgcttgaacaact

SEQ ID NO: 743588 - DNA, 25 bp, Homo sapien
gcttgaacaactgctgacgaagagt

SEQ ID NO: 743589 - DNA, 25 bp, Homo sapien
tgcttagatctctgctggacctcac

SEQ ID NO: 743590 - DNA, 25 bp, Homo sapien
tgctcatgttttagatcactgctct

SEQ ID NO: 743591 - DNA, 25 bp, Homo sapien
tatgactacaagtttgtgctcatgt

SEQ ID NO: 743592 - DNA, 25 bp, Homo sapien
gatcactgctcttgccaccagaaga

SEQ ID NO: 743593 - DNA, 25 bp, Homo sapien
gctagcttcagctggactatttcta

SEQ ID NO: 743594 - DNA, 25 bp, Homo sapien
gtcagactggcagctatttgctctg

SEQ ID NO: 743595 - DNA, 25 bp, Homo sapien
gaacccgctgctgtcagactggcag

SEQ ID NO: 743596 - DNA, 25 bp, Homo sapien
caggaacccgctgctgtcagactgg

SEQ ID NO: 743597 - DNA, 25 bp, Homo sapien
tgctgtcagactggcagctatttgc

SEQ ID NO: 743598 - DNA, 25 bp, Homo sapien
gacatgctcgccctacttttggaat

SEQ ID NO: 743599 - DNA, 25 bp, Homo sapien
cacaggccatgtctgggatatacag

SEQ ID NO: 743600 - DNA, 25 bp, Homo sapien
tcctgggatgatactaagctgtggc

SEQ ID NO: 743601 - DNA, 25 bp, Homo sapien
ggcccatccgactctagctgacagt

SEQ ID NO: 743602 - DNA, 25 bp, Homo sapien
tggagctgccagtatttagaggaag

SEQ ID NO: 743603 - DNA, 25 bp, Homo sapien
ccattgggcagatactagagaagcc

SEQ ID NO: 743604 - DNA, 25 bp, Homo sapien
gttgcggtaacaggatcacacacag

SEQ ID NO: 743605 - DNA, 25 bp, Homo sapien
caggcagtgcctacagactgagggt

SEQ ID NO: 743606 - DNA, 25 bp, Homo sapien
cctgaagggctttcaaagtcgtcat

SEQ ID NO: 743607 - DNA, 25 bp, Homo sapien
tcctgaagggctttcaaagtcgtca

SEQ ID NO: 743608 - DNA, 25 bp, Homo sapien
tgtcctgaagggctttcaaagtcgt

SEQ ID NO: 743609 - DNA, 25 bp, Homo sapien
gaagggctttcaaagtcgtcatgaa

SEQ ID NO: 743610 - DNA, 25 bp, Homo sapien
gcaaggaagtctgaatattatccct

SEQ ID NO: 743611 - DNA, 25 bp, Homo sapien
aggtgtttatcacgggtgcatctgc

SEQ ID NO: 743612 - DNA, 25 bp, Homo sapien
tttatcacgggtgcatctgcctttc

SEQ ID NO: 743613 - DNA, 25 bp, Homo sapien
ctgaggtgtttatcacgggtgcatc

SEQ ID NO: 743614 - DNA, 25 bp, Homo sapien
ccaaatctctccacacagctggggc

SEQ ID NO: 743615 - DNA, 25 bp, Homo sapien
gctggggctactcatgcccaaagcc

SEQ ID NO: 743616 - DNA, 25 bp, Homo sapien
acacagctggggctactcatgccca

SEQ ID NO: 743617 - DNA, 25 bp, Homo sapien
acagctggggctactcatgcccaaa

SEQ ID NO: 743618 - DNA, 25 bp, Homo sapien
ttggcatatcgtcttcatggcttcc

SEQ ID NO: 743619 - DNA, 25 bp, Homo sapien
ggcctgctgtcccataaggtgctgt

SEQ ID NO: 743620 - DNA, 25 bp, Homo sapien
ccataaggtgctgttcaatttcttc

SEQ ID NO: 743621 - DNA, 25 bp, Homo sapien
aaactttggcatatcgtcttcatgg

SEQ ID NO: 743622 - DNA, 25 bp, Homo sapien
gcctcagggcctcacgtaacgtttg

SEQ ID NO: 743623 - DNA, 25 bp, Homo sapien
tcagggcctcacgtaacgtttgcag

SEQ ID NO: 743624 - DNA, 25 bp, Homo sapien
tgatttgctgagcccggtctcctaa

SEQ ID NO: 743625 - DNA, 25 bp, Homo sapien
gcccggtctcctaactgaaattcca

SEQ ID NO: 743626 - DNA, 25 bp, Homo sapien
tcaaactccacaccccatcacccat

SEQ ID NO: 743627 - DNA, 25 bp, Homo sapien
caaactccacaccccatcacccata

SEQ ID NO: 743628 - DNA, 25 bp, Homo sapien
aaactccacaccccatcacccatac

SEQ ID NO: 743629 - DNA, 25 bp, Homo sapien
ttggacctaactttgcccaagctga

SEQ ID NO: 743630 - DNA, 25 bp, Homo sapien
ggctctgctgtgagaacctccagct

SEQ ID NO: 743631 - DNA, 25 bp, Homo sapien
ccatgcctgggtggattttagaaca

SEQ ID NO: 743632 - DNA, 25 bp, Homo sapien
ccatcatcgggaggaaacacagtcc

SEQ ID NO: 743633 - DNA, 25 bp, Homo sapien
tctagcagggcagagaccgtatact

SEQ ID NO: 743634 - DNA, 25 bp, Homo sapien
tagtcactgttgcatactctgtgcc

SEQ ID NO: 743635 - DNA, 25 bp, Homo sapien
gctgtctccagcactagaatagtag

SEQ ID NO: 743636 - DNA, 25 bp, Homo sapien
tcaagttaggagctgcatcaggcaa

SEQ ID NO: 743637 - DNA, 25 bp, Homo sapien
ccaggtgagggacatcctagagcca

SEQ ID NO: 743638 - DNA, 25 bp, Homo sapien
tcttcattccgtaggcgttacaggg

SEQ ID NO: 743639 - DNA, 25 bp, Homo sapien
actagggtaaagagagcaagtgccc

SEQ ID NO: 743640 - DNA, 25 bp, Homo sapien
gccctaggacttactggtgagatac

SEQ ID NO: 743641 - DNA, 25 bp, Homo sapien
gcttatctctaccccgttcaacaaa

SEQ ID NO: 743642 - DNA, 25 bp, Homo sapien
ccgttcaacaaatccgattcccttg

SEQ ID NO: 743643 - DNA, 25 bp, Homo sapien
cgattcccttgcaaccaggaacttc

SEQ ID NO: 743644 - DNA, 25 bp, Homo sapien
aacaaatccgattcccttgcaacca

SEQ ID NO: 743645 - DNA, 25 bp, Homo sapien
gaggcaatgtctgggtgcccttgaa

SEQ ID NO: 743646 - DNA, 25 bp, Homo sapien
caatgtctgggtgcccttgaacaat

SEQ ID NO: 743647 - DNA, 25 bp, Homo sapien
cagcaggaccatattcccttccagg

SEQ ID NO: 743648 - DNA, 25 bp, Homo sapien
gtctgggtgcccttgaacaatatca

SEQ ID NO: 743649 - DNA, 25 bp, Homo sapien
ctccatcatgtaattgaatcagggc

SEQ ID NO: 743650 - DNA, 25 bp, Homo sapien
tctccttgaaaatggccatggatca

SEQ ID NO: 743651 - DNA, 25 bp, Homo sapien
ctccttgaaaatggccatggatcag

SEQ ID NO: 743652 - DNA, 25 bp, Homo sapien
cccctccatcatgtaattgaatcag

SEQ ID NO: 743653 - DNA, 25 bp, Homo sapien
ttctgacattcagacttggccgaga

SEQ ID NO: 743654 - DNA, 25 bp, Homo sapien
gacttggccgagagtctgagacttt

SEQ ID NO: 743655 - DNA, 25 bp, Homo sapien
gtgaagtgtacttccatccgtcttg

SEQ ID NO: 743656 - DNA, 25 bp, Homo sapien
tacttccatccgtcttgccaagcag

SEQ ID NO: 743657 - DNA, 25 bp, Homo sapien
caaaagtacagtatagagtcgtgct

SEQ ID NO: 743658 - DNA, 25 bp, Homo sapien
gaggactaacatctccatcgctgct

SEQ ID NO: 743659 - DNA, 25 bp, Homo sapien
ggccacagctaatttcgactctcaa

SEQ ID NO: 743660 - DNA, 25 bp, Homo sapien
caaagtactatcatgaggaggaaga

SEQ ID NO: 743661 - DNA, 25 bp, Homo sapien
agggagggcgtgtgtgctcaccgag

SEQ ID NO: 743662 - DNA, 25 bp, Homo sapien
cagatgcagggaagcgaaggcgaga

SEQ ID NO: 743663 - DNA, 25 bp, Homo sapien
tgtgtgctcaccgaggctgggcctg

SEQ ID NO: 743664 - DNA, 25 bp, Homo sapien
ccagctcctcttatctagggaccag

SEQ ID NO: 743665 - DNA, 25 bp, Homo sapien
tattagttatagctgtcgcccagga

SEQ ID NO: 743666 - DNA, 25 bp, Homo sapien
catgagaacaaatctgtccccgtcc

SEQ ID NO: 743667 - DNA, 25 bp, Homo sapien
tcatgtcctactatagcaagagtgg

SEQ ID NO: 743668 - DNA, 25 bp, Homo sapien
tagaaaatcttcattagagcctggc

SEQ ID NO: 743669 - DNA, 25 bp, Homo sapien
agggtgggtggatgtatttcttctc

SEQ ID NO: 743670 - DNA, 25 bp, Homo sapien
gggtgggtggatgtatttcttctcc

SEQ ID NO: 743671 - DNA, 25 bp, Homo sapien
gtgggtggatgtatttcttctccag

SEQ ID NO: 743672 - DNA, 25 bp, Homo sapien
ggtgggtggatgtatttcttctcca

SEQ ID NO: 743673 - DNA, 25 bp, Homo sapien
tggctgcaacgagggtctagcttgt

SEQ ID NO: 743674 - DNA, 25 bp, Homo sapien
tgcaacgagggtctagcttgtccag

SEQ ID NO: 743675 - DNA, 25 bp, Homo sapien
aacgagggtctagcttgtccagtct

SEQ ID NO: 743676 - DNA, 25 bp, Homo sapien
tagcttgtccagtctgtcttctgag

SEQ ID NO: 743677 - DNA, 25 bp, Homo sapien
cctcggtcctcagtgaatttctcac

SEQ ID NO: 743678 - DNA, 25 bp, Homo sapien
ctcgatcttagaaaggttccctcgg

SEQ ID NO: 743679 - DNA, 25 bp, Homo sapien
taaatctccctcgatcttagaaagg

SEQ ID NO: 743680 - DNA, 25 bp, Homo sapien
aggttccctcggtcctcagtgaatt

SEQ ID NO: 743681 - DNA, 25 bp, Homo sapien
ctttttgagatcacagtccttaatg

SEQ ID NO: 743682 - DNA, 25 bp, Homo sapien
gtgcagcgccggtgtatctttcctc

SEQ ID NO: 743683 - DNA, 25 bp, Homo sapien
tcaacattcagggtggcctgtacat

SEQ ID NO: 743684 - DNA, 25 bp, Homo sapien
ttaatgaactggtctgaaagatcat

SEQ ID NO: 743685 - DNA, 25 bp, Homo sapien
aagaacagggatcattttgcccttt

SEQ ID NO: 743686 - DNA, 25 bp, Homo sapien
gtctctcttgaacatcgtatctttt

SEQ ID NO: 743687 - DNA, 25 bp, Homo sapien
tctctcttgaacatcgtatctttta

SEQ ID NO: 743688 - DNA, 25 bp, Homo sapien
ggacctccagatggtaaggttcttg

SEQ ID NO: 743689 - DNA, 25 bp, Homo sapien
ctccagatggtaaggttcttgacct

SEQ ID NO: 743690 - DNA, 25 bp, Homo sapien
cccagagcacttcaggacaacgcag

SEQ ID NO: 743691 - DNA, 25 bp, Homo sapien
cacttcaggacaacgcagcttgctg

SEQ ID NO: 743692 - DNA, 25 bp, Homo sapien
agtttgctctagtatgtgatgctgc

SEQ ID NO: 743693 - DNA, 25 bp, Homo sapien
tcttcgccagtagtagatttcatct

SEQ ID NO: 743694 - DNA, 25 bp, Homo sapien
aactcagagatcttgcaggttcttc

SEQ ID NO: 743695 - DNA, 25 bp, Homo sapien
tgcacataaaagttaggcttacact

SEQ ID NO: 743696 - DNA, 25 bp, Homo sapien
cgtcatcttccacgattgctttggg

SEQ ID NO: 743697 - DNA, 25 bp, Homo sapien
tcttccacgattgctttgggtctct

SEQ ID NO: 743698 - DNA, 25 bp, Homo sapien
tctctcgtccctgagcaatgtcaca

SEQ ID NO: 743699 - DNA, 25 bp, Homo sapien
gctttgggtctctcgtccctgagca

SEQ ID NO: 743700 - DNA, 25 bp, Homo sapien
gaatcttcaagtcagacgatgacaa

SEQ ID NO: 743701 - DNA, 25 bp, Homo sapien
gagacaaagaggtgactggcaattt

SEQ ID NO: 743702 - DNA, 25 bp, Homo sapien
attttttctctaggtcaccacaggg

SEQ ID NO: 743703 - DNA, 25 bp, Homo sapien
tacaagtggtctcaggggaactatc

SEQ ID NO: 743704 - DNA, 25 bp, Homo sapien
tctctaactggcaacagggaacccc

SEQ ID NO: 743705 - DNA, 25 bp, Homo sapien
aagatgcagaaaccgaaccccagtg

SEQ ID NO: 743706 - DNA, 25 bp, Homo sapien
ctgttccgtgaattgatccagaaga

SEQ ID NO: 743707 - DNA, 25 bp, Homo sapien
gcaaaaaccaagaaggagcccatgt

SEQ ID NO: 743708 - DNA, 25 bp, Homo sapien
caagggtcttaggaacatcaccaga

SEQ ID NO: 743709 - DNA, 25 bp, Homo sapien
gttggaaccagcatacatacagagc

SEQ ID NO: 743710 - DNA, 25 bp, Homo sapien
tatcatcagccaaggcatggtgggc

SEQ ID NO: 743711 - DNA, 25 bp, Homo sapien
caaagcaatcggtgagttagagtcc

SEQ ID NO: 743712 - DNA, 25 bp, Homo sapien
tcaaaggcaattgcatgtccaggaa

SEQ ID NO: 743713 - DNA, 25 bp, Homo sapien
cttggaggagtctcatcttgctgga

SEQ ID NO: 743714 - DNA, 25 bp, Homo sapien
cctgctactgaaggtgaggatacac

SEQ ID NO: 743715 - DNA, 25 bp, Homo sapien
gagtatattctcagttcatgcgtct

SEQ ID NO: 743716 - DNA, 25 bp, Homo sapien
gcatggcttgtgatcaggtttctcc

SEQ ID NO: 743717 - DNA, 25 bp, Homo sapien
tctagaggacgagcagatcttcact

SEQ ID NO: 743718 - DNA, 25 bp, Homo sapien
gatcatctacagcatggtaaaccct

SEQ ID NO: 743719 - DNA, 25 bp, Homo sapien
ggaccttacacaacagtgaggagac

SEQ ID NO: 743720 - DNA, 25 bp, Homo sapien
ttttagggagatgggctgcatattg

SEQ ID NO: 743721 - DNA, 25 bp, Homo sapien
gacatttgtgttcggctccatagcg

SEQ ID NO: 743722 - DNA, 25 bp, Homo sapien
agacaatgggtctaggaagcagacc

SEQ ID NO: 743723 - DNA, 25 bp, Homo sapien
tatcagagtaagtaaccttgtgttc

SEQ ID NO: 743724 - DNA, 25 bp, Homo sapien
cagaatagaagcagcatccactggc

SEQ ID NO: 743725 - DNA, 25 bp, Homo sapien
gcagaatagaagcagcatccactgg

SEQ ID NO: 743726 - DNA, 25 bp, Homo sapien
atctttgtgcaggccacagagaccc

SEQ ID NO: 743727 - DNA, 25 bp, Homo sapien
tgtgcaggccacagagacccctgtg

SEQ ID NO: 743728 - DNA, 25 bp, Homo sapien
caggatcatctttgtgcaggccaca

SEQ ID NO: 743729 - DNA, 25 bp, Homo sapien
tcccgatggccatcaggatcatctt

SEQ ID NO: 743730 - DNA, 25 bp, Homo sapien
aacaggtgagtcacctactaggtac

SEQ ID NO: 743731 - DNA, 25 bp, Homo sapien
gaaacaggtgagtcacctactaggt

SEQ ID NO: 743732 - DNA, 25 bp, Homo sapien
gagaaacaggtgagtcacctactag

SEQ ID NO: 743733 - DNA, 25 bp, Homo sapien
caggtgagtcacctactaggtactt

SEQ ID NO: 743734 - DNA, 25 bp, Homo sapien
gtcaacattctcagtgtgaatcagg

SEQ ID NO: 743735 - DNA, 25 bp, Homo sapien
gaatcaggtaggttgtagccctgcc

SEQ ID NO: 743736 - DNA, 25 bp, Homo sapien
attccttactggactaagcttacaa

SEQ ID NO: 743737 - DNA, 25 bp, Homo sapien
caatttgggcctggtgtgcagtcaa

SEQ ID NO: 743738 - DNA, 25 bp, Homo sapien
catcccactttatcagggtcagaac

SEQ ID NO: 743739 - DNA, 25 bp, Homo sapien
ggttgatacaccctcctcatcagta

SEQ ID NO: 743740 - DNA, 25 bp, Homo sapien
tgggaagcaatccatctgggttgat

SEQ ID NO: 743741 - DNA, 25 bp, Homo sapien
caaccagcgggaatatctgagtggg

SEQ ID NO: 743742 - DNA, 25 bp, Homo sapien
ggcttttgcaggttgccaacctctg

SEQ ID NO: 743743 - DNA, 25 bp, Homo sapien
cttttgcaggttgccaacctctggg

SEQ ID NO: 743744 - DNA, 25 bp, Homo sapien
gagccaagagactcttttgctagaa

SEQ ID NO: 743745 - DNA, 25 bp, Homo sapien
ttcggacgaggagccaagagactct

SEQ ID NO: 743746 - DNA, 25 bp, Homo sapien
tgcccacatttccagggagtacctg

SEQ ID NO: 743747 - DNA, 25 bp, Homo sapien
tacctgctggtacaagacctggaac

SEQ ID NO: 743748 - DNA, 25 bp, Homo sapien
gcttggctgttctcatgggcgttca

SEQ ID NO: 743749 - DNA, 25 bp, Homo sapien
gagtgcgtctttgcatgtgcttggc

SEQ ID NO: 743750 - DNA, 25 bp, Homo sapien
cactgagcatcgtctaaagctgatg

SEQ ID NO: 743751 - DNA, 25 bp, Homo sapien
ggtgtacactgagcatcgtctaaag

SEQ ID NO: 743752 - DNA, 25 bp, Homo sapien
gcatcgtctaaagctgatgccagca

SEQ ID NO: 743753 - DNA, 25 bp, Homo sapien
agggaggtgtacactgagcatcgtc

SEQ ID NO: 743754 - DNA, 25 bp, Homo sapien
ctaaaagttactgctgacgtcaatc

SEQ ID NO: 743755 - DNA, 25 bp, Homo sapien
gttttagtgaacaggaaatcttcca

SEQ ID NO: 743756 - DNA, 25 bp, Homo sapien
ttttagtgaacaggaaatcttccag

SEQ ID NO: 743757 - DNA, 25 bp, Homo sapien
gctgacgtcaatcactgacgtttta

SEQ ID NO: 743758 - DNA, 25 bp, Homo sapien
tgagtgttcaccaaactggttccct

SEQ ID NO: 743759 - DNA, 25 bp, Homo sapien
gagggcaacactgactgagtgttca

SEQ ID NO: 743760 - DNA, 25 bp, Homo sapien
tttcctgcactgagagtgtgcttct

SEQ ID NO: 743761 - DNA, 25 bp, Homo sapien
cttctacgtgaccataaggaggacc

SEQ ID NO: 743762 - DNA, 25 bp, Homo sapien
agtaggcaatttgtctgaacctttc

SEQ ID NO: 743763 - DNA, 25 bp, Homo sapien
tttaaaagtaggcaatttgtctgaa

SEQ ID NO: 743764 - DNA, 25 bp, Homo sapien
aaagtaggcaatttgtctgaacctt

SEQ ID NO: 743765 - DNA, 25 bp, Homo sapien
taaaagtaggcaatttgtctgaacc

SEQ ID NO: 743766 - DNA, 25 bp, Homo sapien
gcttttgaaatagaacagacactcc

SEQ ID NO: 743767 - DNA, 25 bp, Homo sapien
catccctctgttaggatttcttgtc

SEQ ID NO: 743768 - DNA, 25 bp, Homo sapien
agacactccagcatccctctgttag

SEQ ID NO: 743769 - DNA, 25 bp, Homo sapien
cttttgaaatagaacagacactcca

SEQ ID NO: 743770 - DNA, 25 bp, Homo sapien
taggattcatatacacactctgcac

SEQ ID NO: 743771 - DNA, 25 bp, Homo sapien
gagcctggccagtaataggtgcata

SEQ ID NO: 743772 - DNA, 25 bp, Homo sapien
tcaggatgaactctccaggacagcc

SEQ ID NO: 743773 - DNA, 25 bp, Homo sapien
aaggagctgtttgttcccggatggc

SEQ ID NO: 743774 - DNA, 25 bp, Homo sapien
gccagtcatcaagcctcctttgcgt

SEQ ID NO: 743775 - DNA, 25 bp, Homo sapien
atggccgccagtcatcaagcctcct

SEQ ID NO: 743776 - DNA, 25 bp, Homo sapien
gaggctaaccgttgtctgtcttcct

SEQ ID NO: 743777 - DNA, 25 bp, Homo sapien
aatatttaggttgtggcatgtcgtg

SEQ ID NO: 743778 - DNA, 25 bp, Homo sapien
agcagatccaccgtgtgtcctgctc

SEQ ID NO: 743779 - DNA, 25 bp, Homo sapien
tccagcagatccaccgtgtgtcctg

SEQ ID NO: 743780 - DNA, 25 bp, Homo sapien
cagcagatccaccgtgtgtcctgct

SEQ ID NO: 743781 - DNA, 25 bp, Homo sapien
ccagcagatccaccgtgtgtcctgc

SEQ ID NO: 743782 - DNA, 25 bp, Homo sapien
tcaggcattggacagatgggtccct

SEQ ID NO: 743783 - DNA, 25 bp, Homo sapien
aggcattggacagatgggtccctga

SEQ ID NO: 743784 - DNA, 25 bp, Homo sapien
caggcattggacagatgggtccctg

SEQ ID NO: 743785 - DNA, 25 bp, Homo sapien
ggcattggacagatgggtccctgac

SEQ ID NO: 743786 - DNA, 25 bp, Homo sapien
gtgggaaattcagtaatactttggc

SEQ ID NO: 743787 - DNA, 25 bp, Homo sapien
tgggaaattcagtaatactttggct

SEQ ID NO: 743788 - DNA, 25 bp, Homo sapien
agtgggaaattcagtaatactttgg

SEQ ID NO: 743789 - DNA, 25 bp, Homo sapien
aagtgcccagtcgttgaaaggagga

SEQ ID NO: 743790 - DNA, 25 bp, Homo sapien
gtaccctcagaaggccataccagga

SEQ ID NO: 743791 - DNA, 25 bp, Homo sapien
tccgatagtttaggtatagccagac

SEQ ID NO: 743792 - DNA, 25 bp, Homo sapien
gccagacaattaatgagggtaccct

SEQ ID NO: 743793 - DNA, 25 bp, Homo sapien
cctggtgtatcgtttcgcatggtat

SEQ ID NO: 743794 - DNA, 25 bp, Homo sapien
cgcatggtattattgctctgatgaa

SEQ ID NO: 743795 - DNA, 25 bp, Homo sapien
aaggcgactgtgatgtttctccaaa

SEQ ID NO: 743796 - DNA, 25 bp, Homo sapien
cagggcctcctggtgtatcgtttcg

SEQ ID NO: 743797 - DNA, 25 bp, Homo sapien
ctttcctgatgagggcactggccat

SEQ ID NO: 743798 - DNA, 25 bp, Homo sapien
cttgagtctgtaggctctttcctga

SEQ ID NO: 743799 - DNA, 25 bp, Homo sapien
gtaggctctttcctgatgagggcac

SEQ ID NO: 743800 - DNA, 25 bp, Homo sapien
gagtctgtaggctctttcctgatga

SEQ ID NO: 743801 - DNA, 25 bp, Homo sapien
caggtaacccattctgcttgcagta

SEQ ID NO: 743802 - DNA, 25 bp, Homo sapien
catgcaattcgtatgggaaagtttt

SEQ ID NO: 743803 - DNA, 25 bp, Homo sapien
aaagcaccttgttccatgcaattcg

SEQ ID NO: 743804 - DNA, 25 bp, Homo sapien
gcttgcagtatcattttagcacgta

SEQ ID NO: 743805 - DNA, 25 bp, Homo sapien
catgagtgctggcttctgaacctgc

SEQ ID NO: 743806 - DNA, 25 bp, Homo sapien
tgaatgctggctgttgcaggccaga

SEQ ID NO: 743807 - DNA, 25 bp, Homo sapien
gaggcagtgccaactggagactcat

SEQ ID NO: 743808 - DNA, 25 bp, Homo sapien
tcagccacgtattcttcatgagtgc

SEQ ID NO: 743809 - DNA, 25 bp, Homo sapien
tgactgtactgttgagtgggaaccc

SEQ ID NO: 743810 - DNA, 25 bp, Homo sapien
actgaaatttttaccactggctgga

SEQ ID NO: 743811 - DNA, 25 bp, Homo sapien
gacatcttcttttggatatctgtgg

SEQ ID NO: 743812 - DNA, 25 bp, Homo sapien
tgtttccactggtagcattgataac

SEQ ID NO: 743813 - DNA, 25 bp, Homo sapien
ctgtaatacagaattctgtttgttt

SEQ ID NO: 743814 - DNA, 25 bp, Homo sapien
tgtaatacagaattctgtttgtttt

SEQ ID NO: 743815 - DNA, 25 bp, Homo sapien
caccgcaaagatgatgattccagtc

SEQ ID NO: 743816 - DNA, 25 bp, Homo sapien
agccatgctgacattcatcaccgca

SEQ ID NO: 743817 - DNA, 25 bp, Homo sapien
tgcactggctactgatgatacagcc

SEQ ID NO: 743818 - DNA, 25 bp, Homo sapien
gttgtcatttttgcactggctactg

SEQ ID NO: 743819 - DNA, 25 bp, Homo sapien
tggtttgaggtcttagaactctggg

SEQ ID NO: 743820 - DNA, 25 bp, Homo sapien
cttccacaaagacccatatctggag

SEQ ID NO: 743821 - DNA, 25 bp, Homo sapien
tctggagaaggtgtacaactttcaa

SEQ ID NO: 743822 - DNA, 25 bp, Homo sapien
tcttagaactctgggggatattccc

SEQ ID NO: 743823 - DNA, 25 bp, Homo sapien
cacattgttttaagtccgtctccca

SEQ ID NO: 743824 - DNA, 25 bp, Homo sapien
tttgggagcagcatggtaccataaa

SEQ ID NO: 743825 - DNA, 25 bp, Homo sapien
agtccgtctcccatttttctaaatg

SEQ ID NO: 743826 - DNA, 25 bp, Homo sapien
ataaggccacattgttttaagtccg

SEQ ID NO: 743827 - DNA, 25 bp, Homo sapien
tcaatgaagctggtagtgaaagata

SEQ ID NO: 743828 - DNA, 25 bp, Homo sapien
gcctgtacagatgtggaggtatgcc

SEQ ID NO: 743829 - DNA, 25 bp, Homo sapien
caatgaagctggtagtgaaagatag

SEQ ID NO: 743830 - DNA, 25 bp, Homo sapien
tacagatgtggaggtatgccctgct

SEQ ID NO: 743831 - DNA, 25 bp, Homo sapien
gataagtaggaggaactagacgaaa

SEQ ID NO: 743832 - DNA, 25 bp, Homo sapien
gatgagaaaacatcattgtcgcata

SEQ ID NO: 743833 - DNA, 25 bp, Homo sapien
gaactagacgaaatggagatattgg

SEQ ID NO: 743834 - DNA, 25 bp, Homo sapien
tcattgtcgcataagtggtccttct

SEQ ID NO: 743835 - DNA, 25 bp, Homo sapien
tgccaaccctagcccttgtctgaat

SEQ ID NO: 743836 - DNA, 25 bp, Homo sapien
tatgggtaggacgttgagcccacag

SEQ ID NO: 743837 - DNA, 25 bp, Homo sapien
agaagattggttgatctccaggtca

SEQ ID NO: 743838 - DNA, 25 bp, Homo sapien
atgcccagaagattggttgatctcc

SEQ ID NO: 743839 - DNA, 25 bp, Homo sapien
tgctactgctagcattgtcttcctt

SEQ ID NO: 743840 - DNA, 25 bp, Homo sapien
gctactgctagcattgtcttccttt

SEQ ID NO: 743841 - DNA, 25 bp, Homo sapien
acagacggcattccctcctatgttc

SEQ ID NO: 743842 - DNA, 25 bp, Homo sapien
gggtaataagtcttgtgagctccac

SEQ ID NO: 743843 - DNA, 25 bp, Homo sapien
tacagacggcattccctcctatgtt

SEQ ID NO: 743844 - DNA, 25 bp, Homo sapien
ttacagacggcattccctcctatgt

SEQ ID NO: 743845 - DNA, 25 bp, Homo sapien
cttgtgctttgggtgaacagcttag

SEQ ID NO: 743846 - DNA, 25 bp, Homo sapien
tgggtgaacagcttaggtagctagc

SEQ ID NO: 743847 - DNA, 25 bp, Homo sapien
gcttaggtagctagctgcttggtgt

SEQ ID NO: 743848 - DNA, 25 bp, Homo sapien
tgaacagcttaggtagctagctgct

SEQ ID NO: 743849 - DNA, 25 bp, Homo sapien
cagtgttggtgaacaggtccctcca

SEQ ID NO: 743850 - DNA, 25 bp, Homo sapien
gtgaagacagtgttggtgaacaggt

SEQ ID NO: 743851 - DNA, 25 bp, Homo sapien
gacagtgttggtgaacaggtccctc

SEQ ID NO: 743852 - DNA, 25 bp, Homo sapien
ctagggtgaagacagtgttggtgaa

SEQ ID NO: 743853 - DNA, 25 bp, Homo sapien
tctagtacaacttctgagggtctcg

SEQ ID NO: 743854 - DNA, 25 bp, Homo sapien
gaacacaggagcagacacactcttt

SEQ ID NO: 743855 - DNA, 25 bp, Homo sapien
gagggtctcgcaccattggagtttg

SEQ ID NO: 743856 - DNA, 25 bp, Homo sapien
ggttccctttctagactgtccacag

SEQ ID NO: 743857 - DNA, 25 bp, Homo sapien
tctctttgactggaaagtgtgggcc

SEQ ID NO: 743858 - DNA, 25 bp, Homo sapien
ggccataagcatgttcattgcagac

SEQ ID NO: 743859 - DNA, 25 bp, Homo sapien
gtcctgatggtctgacatataccaa

SEQ ID NO: 743860 - DNA, 25 bp, Homo sapien
taactgttgcaagtagcactaaagg

SEQ ID NO: 743861 - DNA, 25 bp, Homo sapien
ggccagagcactttaaggctacaca

SEQ ID NO: 743862 - DNA, 25 bp, Homo sapien
aggccagagcactttaaggctacac

SEQ ID NO: 743863 - DNA, 25 bp, Homo sapien
tgtagcaagccctcacccatttgtg

SEQ ID NO: 743864 - DNA, 25 bp, Homo sapien
tggtcacaggctaggtagacgtgtc

SEQ ID NO: 743865 - DNA, 25 bp, Homo sapien
tggttctcgtattgttcctgcttac

SEQ ID NO: 743866 - DNA, 25 bp, Homo sapien
tgcttgtagcttgtcttggttctcg

SEQ ID NO: 743867 - DNA, 25 bp, Homo sapien
tgcttcctcgggctgcctggtgctg

SEQ ID NO: 743868 - DNA, 25 bp, Homo sapien
tggctgtgcttctgcttagtctttc

SEQ ID NO: 743869 - DNA, 25 bp, Homo sapien
gctggctgtgcttctgcttagtctt

SEQ ID NO: 743870 - DNA, 25 bp, Homo sapien
tctgcttagtctttcctggtgcctc

SEQ ID NO: 743871 - DNA, 25 bp, Homo sapien
cacaggccccttggtgtaacatcag

SEQ ID NO: 743872 - DNA, 25 bp, Homo sapien
tgacaacactgcctgtctagggaac

SEQ ID NO: 743873 - DNA, 25 bp, Homo sapien
tagggaacctcgactggatggctgc

SEQ ID NO: 743874 - DNA, 25 bp, Homo sapien
tgcagttgagaacgattcctgggtc

SEQ ID NO: 743875 - DNA, 25 bp, Homo sapien
tcccaaactgagagggacccattaa

SEQ ID NO: 743876 - DNA, 25 bp, Homo sapien
aacctattggttttggcttgtcact

SEQ ID NO: 743877 - DNA, 25 bp, Homo sapien
tttggcttgtcactcagattttccc

SEQ ID NO: 743878 - DNA, 25 bp, Homo sapien
tgagagggacccattaacttctgtt

SEQ ID NO: 743879 - DNA, 25 bp, Homo sapien
ctgacccagcagggcagagggtgaa

SEQ ID NO: 743880 - DNA, 25 bp, Homo sapien
agagggtgaagccacagtgggacgg

SEQ ID NO: 743881 - DNA, 25 bp, Homo sapien
gtgaagccacagtgggacgggcagg

SEQ ID NO: 743882 - DNA, 25 bp, Homo sapien
gggtgaagccacagtgggacgggca

SEQ ID NO: 743883 - DNA, 25 bp, Homo sapien
aacagcagggggttgttgccaccac

SEQ ID NO: 743884 - DNA, 25 bp, Homo sapien
ttaacttagggctattgatgaaggt

SEQ ID NO: 743885 - DNA, 25 bp, Homo sapien
tgctctttactgtaggcgtctgggc

SEQ ID NO: 743886 - DNA, 25 bp, Homo sapien
tgtaaggcccccagagactggcaac

SEQ ID NO: 743887 - DNA, 25 bp, Homo sapien
gagctctgaatttgaccattgccca

SEQ ID NO: 743888 - DNA, 25 bp, Homo sapien
tttaataggcttttgagggctagcc

SEQ ID NO: 743889 - DNA, 25 bp, Homo sapien
ttgtatagcacgagagcctcagaga

SEQ ID NO: 743890 - DNA, 25 bp, Homo sapien
tcagagggcctaacctcgttttaca

SEQ ID NO: 743891 - DNA, 25 bp, Homo sapien
caccaggtactggtgcctccttcat

SEQ ID NO: 743892 - DNA, 25 bp, Homo sapien
ggaaacaccaggtactggtgcctcc

SEQ ID NO: 743893 - DNA, 25 bp, Homo sapien
aaacaccaggtactggtgcctcctt

SEQ ID NO: 743894 - DNA, 25 bp, Homo sapien
acaccaggtactggtgcctccttca

SEQ ID NO: 743895 - DNA, 25 bp, Homo sapien
tgtgaaggttcctgattcacagttt

SEQ ID NO: 743896 - DNA, 25 bp, Homo sapien
acttgtgaaggttcctgattcacag

SEQ ID NO: 743897 - DNA, 25 bp, Homo sapien
tgaaggttcctgattcacagttttt

SEQ ID NO: 743898 - DNA, 25 bp, Homo sapien
gggaacttgtgaaggttcctgattc

SEQ ID NO: 743899 - DNA, 25 bp, Homo sapien
tgtagagtgccttttactctatggc

SEQ ID NO: 743900 - DNA, 25 bp, Homo sapien
cttgagttcatctgtctcttgccta

SEQ ID NO: 743901 - DNA, 25 bp, Homo sapien
tcttgcctaaaggtgtttttatatc

SEQ ID NO: 743902 - DNA, 25 bp, Homo sapien
tttatatccatgtagagtgcctttt

SEQ ID NO: 743903 - DNA, 25 bp, Homo sapien
agaaacagataatgaggggtgtggc

SEQ ID NO: 743904 - DNA, 25 bp, Homo sapien
tgaagcagaaacagataatgagggg

SEQ ID NO: 743905 - DNA, 25 bp, Homo sapien
cagaaacagataatgaggggtgtgg

SEQ ID NO: 743906 - DNA, 25 bp, Homo sapien
gtgaagcagaaacagataatgaggg

SEQ ID NO: 743907 - DNA, 25 bp, Homo sapien
tgagctggtgagagggttctgcgat

SEQ ID NO: 743908 - DNA, 25 bp, Homo sapien
gagggttctgcgatgtttgtgagta

SEQ ID NO: 743909 - DNA, 25 bp, Homo sapien
ctgccccatgatgaaagctccgatt

SEQ ID NO: 743910 - DNA, 25 bp, Homo sapien
gaaagctccgatttccactcctctg

SEQ ID NO: 743911 - DNA, 25 bp, Homo sapien
ccaagaaaggaacaatagacttatt

SEQ ID NO: 743912 - DNA, 25 bp, Homo sapien
ttttcagtcagaactaatggaacca

SEQ ID NO: 743913 - DNA, 25 bp, Homo sapien
tcagaactaatggaaccaagaaagg

SEQ ID NO: 743914 - DNA, 25 bp, Homo sapien
ctaatggaaccaagaaaggaacaat

SEQ ID NO: 743915 - DNA, 25 bp, Homo sapien
agagactggacctcgagttcctttg

SEQ ID NO: 743916 - DNA, 25 bp, Homo sapien
acttgtactcgagtgtagttcatca

SEQ ID NO: 743917 - DNA, 25 bp, Homo sapien
cagtagtagggaccaaggtggacct

SEQ ID NO: 743918 - DNA, 25 bp, Homo sapien
tagttcatcagagactggacctcga

SEQ ID NO: 743919 - DNA, 25 bp, Homo sapien
agaagagagaccacttgagagcctg

SEQ ID NO: 743920 - DNA, 25 bp, Homo sapien
ggatcccggcatgggctctccatgg

SEQ ID NO: 743921 - DNA, 25 bp, Homo sapien
aagagagaccacttgagagcctgag

SEQ ID NO: 743922 - DNA, 25 bp, Homo sapien
agcctgagggatcccggcatgggct

SEQ ID NO: 743923 - DNA, 25 bp, Homo sapien
catctgtccaggtcattacagttcc

SEQ ID NO: 743924 - DNA, 25 bp, Homo sapien
aaggaacagacgctgccagcacgtg

SEQ ID NO: 743925 - DNA, 25 bp, Homo sapien
ggcctgaaaaggcacagctaggtag

SEQ ID NO: 743926 - DNA, 25 bp, Homo sapien
cctcttccttatgatcaaagagaga

SEQ ID NO: 743927 - DNA, 25 bp, Homo sapien
cagctaggtaggtgctctgctcctc

SEQ ID NO: 743928 - DNA, 25 bp, Homo sapien
ctgtcaggtagaggggcctcattag

SEQ ID NO: 743929 - DNA, 25 bp, Homo sapien
agctgtcaggtagaggggcctcatt

SEQ ID NO: 743930 - DNA, 25 bp, Homo sapien
ctgatagcagcttgtgtaaccagct

SEQ ID NO: 743931 - DNA, 25 bp, Homo sapien
ttctgatagcagcttgtgtaaccag

SEQ ID NO: 743932 - DNA, 25 bp, Homo sapien
gagatcgacagtgaatgtcttctgt

SEQ ID NO: 743933 - DNA, 25 bp, Homo sapien
ctcagcagaatggaccgaggtatgt

SEQ ID NO: 743934 - DNA, 25 bp, Homo sapien
tgttcttgatgttctgagatcgaca

SEQ ID NO: 743935 - DNA, 25 bp, Homo sapien
gaatggaccgaggtatgttcttgat

SEQ ID NO: 743936 - DNA, 25 bp, Homo sapien
tctgacaacgtctggacacagtctc

SEQ ID NO: 743937 - DNA, 25 bp, Homo sapien
ccctctgacaacgtctggacacagt

SEQ ID NO: 743938 - DNA, 25 bp, Homo sapien
gtggccccctctgacaacgtctgga

SEQ ID NO: 743939 - DNA, 25 bp, Homo sapien
tgtggccccctctgacaacgtctgg

SEQ ID NO: 743940 - DNA, 25 bp, Homo sapien
atctttgtccgaggcacaaatctgt

SEQ ID NO: 743941 - DNA, 25 bp, Homo sapien
caaatctgtgcagcacaaatcagct

SEQ ID NO: 743942 - DNA, 25 bp, Homo sapien
actgtgccaaggaataggatctcca

SEQ ID NO: 743943 - DNA, 25 bp, Homo sapien
taaggggaatccatccaccagattg

SEQ ID NO: 743944 - DNA, 25 bp, Homo sapien
ctgaggaggcaaatctctaaatcct

SEQ ID NO: 743945 - DNA, 25 bp, Homo sapien
cttcccaaacctggtggctttcaat

SEQ ID NO: 743946 - DNA, 25 bp, Homo sapien
ggaggcaaatctctaaatccttccc

SEQ ID NO: 743947 - DNA, 25 bp, Homo sapien
ttcccaaacctggtggctttcaatg

SEQ ID NO: 743948 - DNA, 25 bp, Homo sapien
caaatggctttgcagttcactgcat

SEQ ID NO: 743949 - DNA, 25 bp, Homo sapien
acacgtagactctcatttgaccctc

SEQ ID NO: 743950 - DNA, 25 bp, Homo sapien
tactcccacacgtagactctcattt

SEQ ID NO: 743951 - DNA, 25 bp, Homo sapien
agttcactgcatactcccacacgta

SEQ ID NO: 743952 - DNA, 25 bp, Homo sapien
tttttcagtgcatatgcgattttca

SEQ ID NO: 743953 - DNA, 25 bp, Homo sapien
cctccgaagtccaatgggaagccca

SEQ ID NO: 743954 - DNA, 25 bp, Homo sapien
tgcatggcctccgaagtccaatggg

SEQ ID NO: 743955 - DNA, 25 bp, Homo sapien
tgagtgcatggcctccgaagtccaa

SEQ ID NO: 743956 - DNA, 25 bp, Homo sapien
tggactggaactgtaataaacaggc

SEQ ID NO: 743957 - DNA, 25 bp, Homo sapien
ttctcagcatgttgcgtgctttatc

SEQ ID NO: 743958 - DNA, 25 bp, Homo sapien
gactgctgctgtaattaaaaattga

SEQ ID NO: 743959 - DNA, 25 bp, Homo sapien
ttatctccgatcgtgactgctgctg

SEQ ID NO: 743960 - DNA, 25 bp, Homo sapien
tcctgtgcctgctccagaggtgcct

SEQ ID NO: 743961 - DNA, 25 bp, Homo sapien
ccagaggtgcctccatggatatggc

SEQ ID NO: 743962 - DNA, 25 bp, Homo sapien
gttctggccacagcgctcactcact

SEQ ID NO: 743963 - DNA, 25 bp, Homo sapien
atatggctgggccttgtctcctgga

SEQ ID NO: 743964 - DNA, 25 bp, Homo sapien
gcctagcccactgcagaagggccaa

SEQ ID NO: 743965 - DNA, 25 bp, Homo sapien
gaagggccaagtgaagcttggctgc

SEQ ID NO: 743966 - DNA, 25 bp, Homo sapien
ccaagtgaagcttggctgcgtggag

SEQ ID NO: 743967 - DNA, 25 bp, Homo sapien
cacatgccatggggctgagacctga

SEQ ID NO: 743968 - DNA, 25 bp, Homo sapien
gagcaagaggatttctgtggttatc

SEQ ID NO: 743969 - DNA, 25 bp, Homo sapien
agagcaagaggatttctgtggttat

SEQ ID NO: 743970 - DNA, 25 bp, Homo sapien
atagctaaagactctggaaaccaaa

SEQ ID NO: 743971 - DNA, 25 bp, Homo sapien
cacacactcttttatacaacttgga

SEQ ID NO: 743972 - DNA, 25 bp, Homo sapien
taaacataacagcagtgctagaata

SEQ ID NO: 743973 - DNA, 25 bp, Homo sapien
tagaataaatagctaaagactctgg

SEQ ID NO: 743974 - DNA, 25 bp, Homo sapien
tatggagtcgccaaccaaggagatt

SEQ ID NO: 743975 - DNA, 25 bp, Homo sapien
gccaaccaaggagattgaagaattt

SEQ ID NO: 743976 - DNA, 25 bp, Homo sapien
aagaatttgagagcaactctctgaa

SEQ ID NO: 743977 - DNA, 25 bp, Homo sapien
ctgcagctatggagtcgccaaccaa

SEQ ID NO: 743978 - DNA, 25 bp, Homo sapien
cgccgagaaagtgccgggcaaacgc

SEQ ID NO: 743979 - DNA, 25 bp, Homo sapien
cgcgccgagaaagtgccgggcaaac

SEQ ID NO: 743980 - DNA, 25 bp, Homo sapien
aaagtgccgggcaaacgcgcgccgc

SEQ ID NO: 743981 - DNA, 25 bp, Homo sapien
ggagcgcgccgagaaagtgccgggc

SEQ ID NO: 743982 - DNA, 25 bp, Homo sapien
gggccatggtttgccgcgatcggag

SEQ ID NO: 743983 - DNA, 25 bp, Homo sapien
gatcggagtccgctctaagtcggag

SEQ ID NO: 743984 - DNA, 25 bp, Homo sapien
atggtttgccgcgatcggagtccgc

SEQ ID NO: 743985 - DNA, 25 bp, Homo sapien
gccgcgatcggagtccgctctaagt

SEQ ID NO: 743986 - DNA, 25 bp, Homo sapien
ttgcgcgcggagccgagctcttgtt

SEQ ID NO: 743987 - DNA, 25 bp, Homo sapien
cacgcagctccgcaggtcggtggtg

SEQ ID NO: 743988 - DNA, 25 bp, Homo sapien
cgcaggtcggtggtggccgcggctg

SEQ ID NO: 743989 - DNA, 25 bp, Homo sapien
tgagggttccggaagcccacgcagc

SEQ ID NO: 743990 - DNA, 25 bp, Homo sapien
ctaccttctctgctagaatgcatgg

SEQ ID NO: 743991 - DNA, 25 bp, Homo sapien
agcatcctcatcactctcacctcta

SEQ ID NO: 743992 - DNA, 25 bp, Homo sapien
caagcatcctcatcactctcacctc

SEQ ID NO: 743993 - DNA, 25 bp, Homo sapien
gctagaatgcatggggccagccaag

SEQ ID NO: 743994 - DNA, 25 bp, Homo sapien
gagtaggtaagtcgtttttcatcaa

SEQ ID NO: 743995 - DNA, 25 bp, Homo sapien
gtgagtaggtaagtcgtttttcatc

SEQ ID NO: 743996 - DNA, 25 bp, Homo sapien
taggtaagtcgtttttcatcaaaca

SEQ ID NO: 743997 - DNA, 25 bp, Homo sapien
taagtcgtttttcatcaaacaggtc

SEQ ID NO: 743998 - DNA, 25 bp, Homo sapien
ttgtaagcggaggagcttgtttgca

SEQ ID NO: 743999 - DNA, 25 bp, Homo sapien
actcttccttgtttgtaagcggagg

SEQ ID NO: 744000 - DNA, 25 bp, Homo sapien
ttgcaccatagttgttgcatgctcc

SEQ ID NO: 744001 - DNA, 25 bp, Homo sapien
gcagccctggttatcatttgcacca

SEQ ID NO: 744002 - DNA, 25 bp, Homo sapien
cttcgactagtggtttcctctctgc

SEQ ID NO: 744003 - DNA, 25 bp, Homo sapien
cctatcacgagaactgcgggttcct

SEQ ID NO: 744004 - DNA, 25 bp, Homo sapien
gcacttgtagccttcgactagtggt

SEQ ID NO: 744005 - DNA, 25 bp, Homo sapien
gaatgattgaagcagttcctatcac

SEQ ID NO: 744006 - DNA, 25 bp, Homo sapien
tctattcctgggtcagtgacgcatt

SEQ ID NO: 744007 - DNA, 25 bp, Homo sapien
ggtgatccagagggttgttccttcc

SEQ ID NO: 744008 - DNA, 25 bp, Homo sapien
ccctgagattgagaggtgatccaga

SEQ ID NO: 744009 - DNA, 25 bp, Homo sapien
cccttttgggtattatccctgagat

SEQ ID NO: 744010 - DNA, 25 bp, Homo sapien
cattcctgctggagaaggaggagcc

SEQ ID NO: 744011 - DNA, 25 bp, Homo sapien
tcctgctggagaaggaggagccctt

SEQ ID NO: 744012 - DNA, 25 bp, Homo sapien
acattcctgctggagaaggaggagc

SEQ ID NO: 744013 - DNA, 25 bp, Homo sapien
tgctggagaaggaggagccctttac

SEQ ID NO: 744014 - DNA, 25 bp, Homo sapien
gaatggaccgctggactcttcctta

SEQ ID NO: 744015 - DNA, 25 bp, Homo sapien
ggcactctcttagccactctctgag

SEQ ID NO: 744016 - DNA, 25 bp, Homo sapien
agatgagggcggtccttgcacaaac

SEQ ID NO: 744017 - DNA, 25 bp, Homo sapien
aataatgatagagcttgggactcag

SEQ ID NO: 744018 - DNA, 25 bp, Homo sapien
tgcccctcatcggaaatgccactga

SEQ ID NO: 744019 - DNA, 25 bp, Homo sapien
tgccactgatgggatgtctggttgc

SEQ ID NO: 744020 - DNA, 25 bp, Homo sapien
tgattgttgtctgacttcacactgt

SEQ ID NO: 744021 - DNA, 25 bp, Homo sapien
ggatgtctggttgctttcccaagat

SEQ ID NO: 744022 - DNA, 25 bp, Homo sapien
tctgacgtgggctttaagaaacatt

SEQ ID NO: 744023 - DNA, 25 bp, Homo sapien
cccggctttggttgaagtgcactgc

SEQ ID NO: 744024 - DNA, 25 bp, Homo sapien
cattttccaaaacgcactagttctt

SEQ ID NO: 744025 - DNA, 25 bp, Homo sapien
tgtctgacttcaccctctgacgtgg

SEQ ID NO: 744026 - DNA, 25 bp, Homo sapien
aaagtcatcctttgtgcctttgtct

SEQ ID NO: 744027 - DNA, 25 bp, Homo sapien
aattagcatatttaagtcactcact

SEQ ID NO: 744028 - DNA, 25 bp, Homo sapien
catgctgacagtctctgttttcaaa

SEQ ID NO: 744029 - DNA, 25 bp, Homo sapien
caaattagcatatttaagtcactca

SEQ ID NO: 744030 - DNA, 25 bp, Homo sapien
tttcaaattagcatatttaagtcac

SEQ ID NO: 744031 - DNA, 25 bp, Homo sapien
ctgaatgccgagcttccatttttct

SEQ ID NO: 744032 - DNA, 25 bp, Homo sapien
tgaatgccgagcttccatttttctt

SEQ ID NO: 744033 - DNA, 25 bp, Homo sapien
gaatgccgagcttccatttttcttc

SEQ ID NO: 744034 - DNA, 25 bp, Homo sapien
ctcttcagaatctgtctgtatagtt

SEQ ID NO: 744035 - DNA, 25 bp, Homo sapien
tctcttcagaatctgtctgtatagt

SEQ ID NO: 744036 - DNA, 25 bp, Homo sapien
tcttgcctctgatgacagttctctt

SEQ ID NO: 744037 - DNA, 25 bp, Homo sapien
acatattattatccgattgggtaag

SEQ ID NO: 744038 - DNA, 25 bp, Homo sapien
tgtacatattattatccgattgggt

SEQ ID NO: 744039 - DNA, 25 bp, Homo sapien
taatgtacatattattatccgattg

SEQ ID NO: 744040 - DNA, 25 bp, Homo sapien
tacatattattatccgattgggtaa

SEQ ID NO: 744041 - DNA, 25 bp, Homo sapien
ctgccttgacgggtgctgcctctgt

SEQ ID NO: 744042 - DNA, 25 bp, Homo sapien
tagtagacttatgagctatcaaacc

SEQ ID NO: 744043 - DNA, 25 bp, Homo sapien
tgtaggtcaccgtttctttcatgac

SEQ ID NO: 744044 - DNA, 25 bp, Homo sapien
cactgattcttaactcaggctgcat

SEQ ID NO: 744045 - DNA, 25 bp, Homo sapien
ctgctcctgctgacccatgacccat

SEQ ID NO: 744046 - DNA, 25 bp, Homo sapien
cctgctcctgctgacccatgaccca

SEQ ID NO: 744047 - DNA, 25 bp, Homo sapien
ccaggcagttgcttgtgagagaaag

SEQ ID NO: 744048 - DNA, 25 bp, Homo sapien
gagtccaggcagttgcttgtgagag

SEQ ID NO: 744049 - DNA, 25 bp, Homo sapien
gtccaggcagttgcttgtgagagaa

SEQ ID NO: 744050 - DNA, 25 bp, Homo sapien
tggagtccaggcagttgcttgtgag

SEQ ID NO: 744051 - DNA, 25 bp, Homo sapien
cactttggtgtagagcttccggttt

SEQ ID NO: 744052 - DNA, 25 bp, Homo sapien
tctactggccactgagttcactttg

SEQ ID NO: 744053 - DNA, 25 bp, Homo sapien
tttttgggcggatatccctccagag

SEQ ID NO: 744054 - DNA, 25 bp, Homo sapien
agaggacactcaggtctcacccttg

SEQ ID NO: 744055 - DNA, 25 bp, Homo sapien
caatagagtatttgatgtgtgaagg

SEQ ID NO: 744056 - DNA, 25 bp, Homo sapien
gatgtgtgaaggtagcaccaataag

SEQ ID NO: 744057 - DNA, 25 bp, Homo sapien
ttgatgtgtgaaggtagcaccaata

SEQ ID NO: 744058 - DNA, 25 bp, Homo sapien
tcaatagagtatttgatgtgtgaag

SEQ ID NO: 744059 - DNA, 25 bp, Homo sapien
gtcagtttctgacttgattactttc

SEQ ID NO: 744060 - DNA, 25 bp, Homo sapien
tccatgcagaattaaatcgttgaac

SEQ ID NO: 744061 - DNA, 25 bp, Homo sapien
tcagatcccatttaatggattgtgt

SEQ ID NO: 744062 - DNA, 25 bp, Homo sapien
tactttcaggaaatgtgcagtctgg

SEQ ID NO: 744063 - DNA, 25 bp, Homo sapien
tttaatattgatgcccatgaatgtc

SEQ ID NO: 744064 - DNA, 25 bp, Homo sapien
catgaatgtcatttggtctgttagt

SEQ ID NO: 744065 - DNA, 25 bp, Homo sapien
ggtgctctttaatagagagctcatg

SEQ ID NO: 744066 - DNA, 25 bp, Homo sapien
accgaactccattaccatcatctgt

SEQ ID NO: 744067 - DNA, 25 bp, Homo sapien
gagaatggcatctatcacaaggcca

SEQ ID NO: 744068 - DNA, 25 bp, Homo sapien
gacttgagtgcgctgtgtgaatgca

SEQ ID NO: 744069 - DNA, 25 bp, Homo sapien
cagcagatggtttgagaatggcatc

SEQ ID NO: 744070 - DNA, 25 bp, Homo sapien
cttgacttgagtgcgctgtgtgaat

SEQ ID NO: 744071 - DNA, 25 bp, Homo sapien
gtttggtgacactttgaagcttaga

SEQ ID NO: 744072 - DNA, 25 bp, Homo sapien
gtctccaggtcttgatccctatgag

SEQ ID NO: 744073 - DNA, 25 bp, Homo sapien
ggtttctgtaccagtgtgatcagca

SEQ ID NO: 744074 - DNA, 25 bp, Homo sapien
caaattatcccgcaagttaatgcac

SEQ ID NO: 744075 - DNA, 25 bp, Homo sapien
aactcggtgtttcggcagcagtgag

SEQ ID NO: 744076 - DNA, 25 bp, Homo sapien
tgactggtaactcggtgtttcggca

SEQ ID NO: 744077 - DNA, 25 bp, Homo sapien
ccatgactggtaactcggtgtttcg

SEQ ID NO: 744078 - DNA, 25 bp, Homo sapien
ggtaactcggtgtttcggcagcagt

SEQ ID NO: 744079 - DNA, 25 bp, Homo sapien
aagctgccttggaatgctgcctttg

SEQ ID NO: 744080 - DNA, 25 bp, Homo sapien
gcaggtggtagtctaatgtcctcat

SEQ ID NO: 744081 - DNA, 25 bp, Homo sapien
ccaagctgccttggaatgctgcctt

SEQ ID NO: 744082 - DNA, 25 bp, Homo sapien
gcagcaggtggtagtctaatgtcct

SEQ ID NO: 744083 - DNA, 25 bp, Homo sapien
ggtgtgctcttcagggcccaaagca

SEQ ID NO: 744084 - DNA, 25 bp, Homo sapien
tatagagaagttgctctgaaatgtg

SEQ ID NO: 744085 - DNA, 25 bp, Homo sapien
ctctttttctaggtgtgctcttcag

SEQ ID NO: 744086 - DNA, 25 bp, Homo sapien
tcatatagagaagttgctctgaaat

SEQ ID NO: 744087 - DNA, 25 bp, Homo sapien
ctagagggtcttaaggcttctaact

SEQ ID NO: 744088 - DNA, 25 bp, Homo sapien
taacttgggcatacttgggcttcat

SEQ ID NO: 744089 - DNA, 25 bp, Homo sapien
ggtcttaaggcttctaacttgggca

SEQ ID NO: 744090 - DNA, 25 bp, Homo sapien
ggcttctaacttgggcatacttggg

SEQ ID NO: 744091 - DNA, 25 bp, Homo sapien
gatgttcctgatatcttgacttttc

SEQ ID NO: 744092 - DNA, 25 bp, Homo sapien
atgttcctgatatcttgacttttct

SEQ ID NO: 744093 - DNA, 25 bp, Homo sapien
gctggtcactggaaggactcttcca

SEQ ID NO: 744094 - DNA, 25 bp, Homo sapien
gatcccactatcaccacctccgact

SEQ ID NO: 744095 - DNA, 25 bp, Homo sapien
tgactgctggtcactggaaggactc

SEQ ID NO: 744096 - DNA, 25 bp, Homo sapien
aaggactcttccagatcccactatc

SEQ ID NO: 744097 - DNA, 25 bp, Homo sapien
aaaggccagctttcatgtgtgattt

SEQ ID NO: 744098 - DNA, 25 bp, Homo sapien
tggctgcatggcctttaggtacact

SEQ ID NO: 744099 - DNA, 25 bp, Homo sapien
gagttttaagaaccagtctgggctc

SEQ ID NO: 744100 - DNA, 25 bp, Homo sapien
tggcctttaggtacactgagtttta

SEQ ID NO: 744101 - DNA, 25 bp, Homo sapien
caactgtttagtgggcagctgggca

SEQ ID NO: 744102 - DNA, 25 bp, Homo sapien
gctctggtggctcatgacaccctct

SEQ ID NO: 744103 - DNA, 25 bp, Homo sapien
tggtggctcatgacaccctctgagc

SEQ ID NO: 744104 - DNA, 25 bp, Homo sapien
caggctctggtggctcatgacaccc

SEQ ID NO: 744105 - DNA, 25 bp, Homo sapien
gggccataaactgctcaataagctg

SEQ ID NO: 744106 - DNA, 25 bp, Homo sapien
aaaacatagggccataaactgctca

SEQ ID NO: 744107 - DNA, 25 bp, Homo sapien
gctcaataagctgtgattggcttgt

SEQ ID NO: 744108 - DNA, 25 bp, Homo sapien
gattggcttgtcttaggtcttctct

SEQ ID NO: 744109 - DNA, 25 bp, Homo sapien
gattcaggtctaggtctgcctggac

SEQ ID NO: 744110 - DNA, 25 bp, Homo sapien
tcaaacgtgcaggtcaaagtagggt

SEQ ID NO: 744111 - DNA, 25 bp, Homo sapien
caaatgtgggagtgtatccagctgg

SEQ ID NO: 744112 - DNA, 25 bp, Homo sapien
gagaggacatgacgggcctagtcct

SEQ ID NO: 744113 - DNA, 25 bp, Homo sapien
cctttgtcagcaatcataaggagtt

SEQ ID NO: 744114 - DNA, 25 bp, Homo sapien
catggccaacctttgtcagcaatca

SEQ ID NO: 744115 - DNA, 25 bp, Homo sapien
gggaatagcaggtgacaccctgggc

SEQ ID NO: 744116 - DNA, 25 bp, Homo sapien
gtcagcaatcataaggagtttggac

SEQ ID NO: 744117 - DNA, 25 bp, Homo sapien
tattctctggaaggcgcgtaaggct

SEQ ID NO: 744118 - DNA, 25 bp, Homo sapien
ctggggattcattcattgtgagaca

SEQ ID NO: 744119 - DNA, 25 bp, Homo sapien
cattcattgtgagacatttgcttga

SEQ ID NO: 744120 - DNA, 25 bp, Homo sapien
cagctgtattctctggaaggcgcgt

SEQ ID NO: 744121 - DNA, 25 bp, Homo sapien
agaaggaacttgctgcttctggcgg

SEQ ID NO: 744122 - DNA, 25 bp, Homo sapien
aggctggtagagatgttggcagaag

SEQ ID NO: 744123 - DNA, 25 bp, Homo sapien
agctggctgccattaggcccttgca

SEQ ID NO: 744124 - DNA, 25 bp, Homo sapien
tggctgccattaggcccttgcactt

SEQ ID NO: 744125 - DNA, 25 bp, Homo sapien
cagacccacagcagggtgggggaac

SEQ ID NO: 744126 - DNA, 25 bp, Homo sapien
tcagacccacagcagggtgggggaa

SEQ ID NO: 744127 - DNA, 25 bp, Homo sapien
caattgaagtgattgtgatcttgag

SEQ ID NO: 744128 - DNA, 25 bp, Homo sapien
ttgagtggctgcctgccgcctaaga

SEQ ID NO: 744129 - DNA, 25 bp, Homo sapien
ctaggtttggacaattgaagtgatt

SEQ ID NO: 744130 - DNA, 25 bp, Homo sapien
tgccgcctaagagatagccaccact

SEQ ID NO: 744131 - DNA, 25 bp, Homo sapien
tagatggatagacagcatgtaacct

SEQ ID NO: 744132 - DNA, 25 bp, Homo sapien
tatccaatttgcctgagcaggtaga

SEQ ID NO: 744133 - DNA, 25 bp, Homo sapien
gacacattgtcaggagtaatgagga

SEQ ID NO: 744134 - DNA, 25 bp, Homo sapien
gaggatatttggttctgctcccaga

SEQ ID NO: 744135 - DNA, 25 bp, Homo sapien
ccaagcgcagtaaagcatttgtctt

SEQ ID NO: 744136 - DNA, 25 bp, Homo sapien
cccaagcgcagtaaagcatttgtct

SEQ ID NO: 744137 - DNA, 25 bp, Homo sapien
tggccccaagcgcagtaaagcattt

SEQ ID NO: 744138 - DNA, 25 bp, Homo sapien
aagcgcagtaaagcatttgtcttgt

SEQ ID NO: 744139 - DNA, 25 bp, Homo sapien
agcctcgtagcagccctctagagac

SEQ ID NO: 744140 - DNA, 25 bp, Homo sapien
tgggacgaagaatttctgggcacca

SEQ ID NO: 744141 - DNA, 25 bp, Homo sapien
tggttgggcccggtcctcagagtct

SEQ ID NO: 744142 - DNA, 25 bp, Homo sapien
ttgggaacagcccagtgtttaggtg

SEQ ID NO: 744143 - DNA, 25 bp, Homo sapien
tccctgattgctccattggaagtga

SEQ ID NO: 744144 - DNA, 25 bp, Homo sapien
tccttctgtgaacatgcgtaatacc

SEQ ID NO: 744145 - DNA, 25 bp, Homo sapien
tgtgaacatgcgtaataccaagtgt

SEQ ID NO: 744146 - DNA, 25 bp, Homo sapien
tccattggaagtgatgtcttccttc

SEQ ID NO: 744147 - DNA, 25 bp, Homo sapien
agcaatcctccattctccacttttg

SEQ ID NO: 744148 - DNA, 25 bp, Homo sapien
ctccattctccacttttgtaatgag

SEQ ID NO: 744149 - DNA, 25 bp, Homo sapien
gacactcaagtcatgctttgagatc

SEQ ID NO: 744150 - DNA, 25 bp, Homo sapien
atgagaatgacactcaagtcatgct

SEQ ID NO: 744151 - DNA, 25 bp, Homo sapien
catcctcttgtgtagctatttgaaa

SEQ ID NO: 744152 - DNA, 25 bp, Homo sapien
ggggtataatgtcatatttcaatgc

SEQ ID NO: 744153 - DNA, 25 bp, Homo sapien
agcatcctcttgtgtagctatttga

SEQ ID NO: 744154 - DNA, 25 bp, Homo sapien
ctgttgaccgacctttccccatcct

SEQ ID NO: 744155 - DNA, 25 bp, Homo sapien
cagtttgcaattccacacgtgaggt

SEQ ID NO: 744156 - DNA, 25 bp, Homo sapien
gcaattccacacgtgaggtttgagg

SEQ ID NO: 744157 - DNA, 25 bp, Homo sapien
gtttgcaattccacacgtgaggttt

SEQ ID NO: 744158 - DNA, 25 bp, Homo sapien
tgcaattccacacgtgaggtttgag

SEQ ID NO: 744159 - DNA, 25 bp, Homo sapien
tcctctggtcgcagtcagtctgagc

SEQ ID NO: 744160 - DNA, 25 bp, Homo sapien
gactgcaccaaaacttgaccctggt

SEQ ID NO: 744161 - DNA, 25 bp, Homo sapien
caaggtagtatttactgactgcacc

SEQ ID NO: 744162 - DNA, 25 bp, Homo sapien
taataaatgtcctcgggatgcttct

SEQ ID NO: 744163 - DNA, 25 bp, Homo sapien
ttggggtaattggtgccagctgctt

SEQ ID NO: 744164 - DNA, 25 bp, Homo sapien
ctgtctcagccaagccgggtgcttc

SEQ ID NO: 744165 - DNA, 25 bp, Homo sapien
ccagggatctggagtgcctgtctca

SEQ ID NO: 744166 - DNA, 25 bp, Homo sapien
cactggagtgtgttgggaccttggc

SEQ ID NO: 744167 - DNA, 25 bp, Homo sapien
cctccaccagccacttatgtagcat

SEQ ID NO: 744168 - DNA, 25 bp, Homo sapien
tctgccaaccctccaccagccactt

SEQ ID NO: 744169 - DNA, 25 bp, Homo sapien
aaccctccaccagccacttatgtag

SEQ ID NO: 744170 - DNA, 25 bp, Homo sapien
tgccaaccctccaccagccacttat

SEQ ID NO: 744171 - DNA, 25 bp, Homo sapien
aggatgccctgtacaactgtgctgg

SEQ ID NO: 744172 - DNA, 25 bp, Homo sapien
gaatgacggtcctgagctgggcttc

SEQ ID NO: 744173 - DNA, 25 bp, Homo sapien
tgagcatcagtggtgtgatccccag

SEQ ID NO: 744174 - DNA, 25 bp, Homo sapien
tataggctgatgcactttccggagc

SEQ ID NO: 744175 - DNA, 25 bp, Homo sapien
acccggcgtcgcgcggaagctggtt

SEQ ID NO: 744176 - DNA, 25 bp, Homo sapien
tccgacccggcgtcgcgcggaagct

SEQ ID NO: 744177 - DNA, 25 bp, Homo sapien
cggcgtcgcgcggaagctggttttc

SEQ ID NO: 744178 - DNA, 25 bp, Homo sapien
ctccgacccggcgtcgcgcggaagc

SEQ ID NO: 744179 - DNA, 25 bp, Homo sapien
tctccggtggcggtcagagttcctt

SEQ ID NO: 744180 - DNA, 25 bp, Homo sapien
gcttcaaaaaatgccggagcgccac

SEQ ID NO: 744181 - DNA, 25 bp, Homo sapien
gtgagaactttccacccctctcgga

SEQ ID NO: 744182 - DNA, 25 bp, Homo sapien
ggagcgccactttcagcatcgatgg

SEQ ID NO: 744183 - DNA, 25 bp, Homo sapien
cgtggcgattttcccgacttccttg

SEQ ID NO: 744184 - DNA, 25 bp, Homo sapien
catcatagagcctccggtgactttg

SEQ ID NO: 744185 - DNA, 25 bp, Homo sapien
acagtggagaagaaacactatcggg

SEQ ID NO: 744186 - DNA, 25 bp, Homo sapien
ttggagtaaacttcggcaacatctc

SEQ ID NO: 744187 - DNA, 25 bp, Homo sapien
tcctcaataattgcttgctgatcgg

SEQ ID NO: 744188 - DNA, 25 bp, Homo sapien
gtctcttttcccgtgggcatctgca

SEQ ID NO: 744189 - DNA, 25 bp, Homo sapien
ttgctgatcggtgggaaaaattttc

SEQ ID NO: 744190 - DNA, 25 bp, Homo sapien
aattttcccagtgtaagccttgcct

SEQ ID NO: 744191 - DNA, 25 bp, Homo sapien
cacaatagcttgagcacagaaccct

SEQ ID NO: 744192 - DNA, 25 bp, Homo sapien
tcacaatagcttgagcacagaaccc

SEQ ID NO: 744193 - DNA, 25 bp, Homo sapien
atgcctctggctttgttcttttggt

SEQ ID NO: 744194 - DNA, 25 bp, Homo sapien
ctctggctttgttcttttggtttag

SEQ ID NO: 744195 - DNA, 25 bp, Homo sapien
tgcctctggctttgttcttttggtt

SEQ ID NO: 744196 - DNA, 25 bp, Homo sapien
cagcaaatagctggatctactctgt

SEQ ID NO: 744197 - DNA, 25 bp, Homo sapien
ggctgcctgtctattctttctggtt

SEQ ID NO: 744198 - DNA, 25 bp, Homo sapien
tcagcgttcttggtgctctcggtaa

SEQ ID NO: 744199 - DNA, 25 bp, Homo sapien
ctctcggtaattctgttgccaagga

SEQ ID NO: 744200 - DNA, 25 bp, Homo sapien
tcctgtctttctttagtgtattttc

SEQ ID NO: 744201 - DNA, 25 bp, Homo sapien
cctgtctttctttagtgtattttct

SEQ ID NO: 744202 - DNA, 25 bp, Homo sapien
tgttcttgctcaccttcctgtcttt

SEQ ID NO: 744203 - DNA, 25 bp, Homo sapien
tgggctgttcttgctcaccttcctg

SEQ ID NO: 744204 - DNA, 25 bp, Homo sapien
ttttcccctctctgaccctgtctct

SEQ ID NO: 744205 - DNA, 25 bp, Homo sapien
ggcaggaagagcccgtgttttccca

SEQ ID NO: 744206 - DNA, 25 bp, Homo sapien
tgggcaggaagagcccgtgttttcc

SEQ ID NO: 744207 - DNA, 25 bp, Homo sapien
caagaaggcttgtgcagttttcaga

SEQ ID NO: 744208 - DNA, 25 bp, Homo sapien
gttttcagaaaactccccgctcgca

SEQ ID NO: 744209 - DNA, 25 bp, Homo sapien
ggtgaaaagacaccacgctgcccaa

SEQ ID NO: 744210 - DNA, 25 bp, Homo sapien
tactgcccttctgtgcgtggcgggc

SEQ ID NO: 744211 - DNA, 25 bp, Homo sapien
gaagagtcaacagcacccaagggca

SEQ ID NO: 744212 - DNA, 25 bp, Homo sapien
atcactgggggagtgtagcagagcc

SEQ ID NO: 744213 - DNA, 25 bp, Homo sapien
acccaagggcacagatgccatcact

SEQ ID NO: 744214 - DNA, 25 bp, Homo sapien
gagggagaagagtcaacagcaccca

SEQ ID NO: 744215 - DNA, 25 bp, Homo sapien
ttctccggtgatggcttgcccacgg

SEQ ID NO: 744216 - DNA, 25 bp, Homo sapien
ccagctggttctccggtgatggctt

SEQ ID NO: 744217 - DNA, 25 bp, Homo sapien
tggttctccggtgatggcttgccca

SEQ ID NO: 744218 - DNA, 25 bp, Homo sapien
atggctccagtcccttctcgtgctg

SEQ ID NO: 744219 - DNA, 25 bp, Homo sapien
tcagggtttagctcgtccattaagt

SEQ ID NO: 744220 - DNA, 25 bp, Homo sapien
ccagcaattttagatccagcccagg

SEQ ID NO: 744221 - DNA, 25 bp, Homo sapien
gcactgcgagctcaccagcaatttt

SEQ ID NO: 744222 - DNA, 25 bp, Homo sapien
tttggagagtctgtgcttagcactg

SEQ ID NO: 744223 - DNA, 25 bp, Homo sapien
tgatctgagatgcagttggcccaga

SEQ ID NO: 744224 - DNA, 25 bp, Homo sapien
tggaaaactctcctcacttagcaga

SEQ ID NO: 744225 - DNA, 25 bp, Homo sapien
tgaagtccagagtgaagcgaatcat

SEQ ID NO: 744226 - DNA, 25 bp, Homo sapien
ccagagtgtaggtcaaggtcttgcc

SEQ ID NO: 744227 - DNA, 25 bp, Homo sapien
ggatgtttggagtgtgcactgcccc

SEQ ID NO: 744228 - DNA, 25 bp, Homo sapien
gcagggctgcgtgttttctatttaa

SEQ ID NO: 744229 - DNA, 25 bp, Homo sapien
gaggcttagcctgcttctggactga

SEQ ID NO: 744230 - DNA, 25 bp, Homo sapien
tccccttattaactgccagggcagc

SEQ ID NO: 744231 - DNA, 25 bp, Homo sapien
atgttaacttgccagtctccacaga

SEQ ID NO: 744232 - DNA, 25 bp, Homo sapien
tctgttgcattgaaagtgcatgtta

SEQ ID NO: 744233 - DNA, 25 bp, Homo sapien
cattgaaagtgcatgttaacttgcc

SEQ ID NO: 744234 - DNA, 25 bp, Homo sapien
tgttgcattgaaagtgcatgttaac

SEQ ID NO: 744235 - DNA, 25 bp, Homo sapien
gaggatgctttctcaccgtgacatc

SEQ ID NO: 744236 - DNA, 25 bp, Homo sapien
gcagcttctcttccggaatggatag

SEQ ID NO: 744237 - DNA, 25 bp, Homo sapien
ggtcatgtgtacttgggtcttcccc

SEQ ID NO: 744238 - DNA, 25 bp, Homo sapien
gatgatccaccataaaggtcatgtg

SEQ ID NO: 744239 - DNA, 25 bp, Homo sapien
atgtcagcacctgtcagcttgtaaa

SEQ ID NO: 744240 - DNA, 25 bp, Homo sapien
tgttttaaccatacagacttgaccc

SEQ ID NO: 744241 - DNA, 25 bp, Homo sapien
tcactttttccaaaggatgtgtgca

SEQ ID NO: 744242 - DNA, 25 bp, Homo sapien
ggcaatttctcctcatactgagatg

SEQ ID NO: 744243 - DNA, 25 bp, Homo sapien
gatgatacccgttcctctgcactca

SEQ ID NO: 744244 - DNA, 25 bp, Homo sapien
gcattgttgttctccttagtctgtg

SEQ ID NO: 744245 - DNA, 25 bp, Homo sapien
ccttagtctgtgctatgtgtcggct

SEQ ID NO: 744246 - DNA, 25 bp, Homo sapien
tgtggcggtactctgggcctctgta

SEQ ID NO: 744247 - DNA, 25 bp, Homo sapien
ggtgtttatggctagctcccatatg

SEQ ID NO: 744248 - DNA, 25 bp, Homo sapien
cactggtggtgtctaagctgtcatg

SEQ ID NO: 744249 - DNA, 25 bp, Homo sapien
aagctgtcatggtggagcacaagca

SEQ ID NO: 744250 - DNA, 25 bp, Homo sapien
atctccgcactggtggtgtctaagc

SEQ ID NO: 744251 - DNA, 25 bp, Homo sapien
caagcaccaagagcgcaagaggcat

SEQ ID NO: 744252 - DNA, 25 bp, Homo sapien
cagcggacaggatgagttaggatta

SEQ ID NO: 744253 - DNA, 25 bp, Homo sapien
actgaggttcagagtagtgccagga

SEQ ID NO: 744254 - DNA, 25 bp, Homo sapien
acacagcggacaggatgagttagga

SEQ ID NO: 744255 - DNA, 25 bp, Homo sapien
agtagtgccaggacttgctctggtc

SEQ ID NO: 744256 - DNA, 25 bp, Homo sapien
cattaacggatcatccgtgtaggtg

SEQ ID NO: 744257 - DNA, 25 bp, Homo sapien
gatttgtaatccagttctccttcca

SEQ ID NO: 744258 - DNA, 25 bp, Homo sapien
ggatcatccgtgtaggtgaatctga

SEQ ID NO: 744259 - DNA, 25 bp, Homo sapien
tccgtgtaggtgaatctgatttgta

SEQ ID NO: 744260 - DNA, 25 bp, Homo sapien
ctttcctggcggttactggattcat

SEQ ID NO: 744261 - DNA, 25 bp, Homo sapien
ttcttttgattctctttcctggcgg

SEQ ID NO: 744262 - DNA, 25 bp, Homo sapien
ttttgattctctttcctggcggtta

SEQ ID NO: 744263 - DNA, 25 bp, Homo sapien
attctctttcctggcggttactgga

SEQ ID NO: 744264 - DNA, 25 bp, Homo sapien
caaggcagaaaagtctcgggctcac

SEQ ID NO: 744265 - DNA, 25 bp, Homo sapien
ctgggttgaataggaggctatttca

SEQ ID NO: 744266 - DNA, 25 bp, Homo sapien
taggaggctatttcagaaggcttat

SEQ ID NO: 744267 - DNA, 25 bp, Homo sapien
aataggaggctatttcagaaggctt

SEQ ID NO: 744268 - DNA, 25 bp, Homo sapien
tgaataggaggctatttcagaaggc

SEQ ID NO: 744269 - DNA, 25 bp, Homo sapien
caggatttcccgtttctcgtcctcg

SEQ ID NO: 744270 - DNA, 25 bp, Homo sapien
ccgtttctcgtcctcgtgtccataa

SEQ ID NO: 744271 - DNA, 25 bp, Homo sapien
gctatctcccgcaggatttcccgtt

SEQ ID NO: 744272 - DNA, 25 bp, Homo sapien
gggaaaagagaaagcgctatctccc

SEQ ID NO: 744273 - DNA, 25 bp, Homo sapien
cacagagctgctgcctggagacttt

SEQ ID NO: 744274 - DNA, 25 bp, Homo sapien
gcttaaggatctcacagagctgctg

SEQ ID NO: 744275 - DNA, 25 bp, Homo sapien
cttgcttaaggatctcacagagctg

SEQ ID NO: 744276 - DNA, 25 bp, Homo sapien
tcacagagctgctgcctggagactt

SEQ ID NO: 744277 - DNA, 25 bp, Homo sapien
ccgcggcgagacatcgagaagagct

SEQ ID NO: 744278 - DNA, 25 bp, Homo sapien
gtgaggcgagtatgtcccagccctg

SEQ ID NO: 744279 - DNA, 25 bp, Homo sapien
cgtagcctgtgaggcacagcccgcg

SEQ ID NO: 744280 - DNA, 25 bp, Homo sapien
tccccggtgctgaagcgtgaggcga

SEQ ID NO: 744281 - DNA, 25 bp, Homo sapien
cccgctgagatgggctcggtctcct

SEQ ID NO: 744282 - DNA, 25 bp, Homo sapien
ttgctgtcggagacccattcgcgct

SEQ ID NO: 744283 - DNA, 25 bp, Homo sapien
gcgcggtcccgcaaagccgtagtgc

SEQ ID NO: 744284 - DNA, 25 bp, Homo sapien
ccgtagtgcagtcgggctcgttgcc

SEQ ID NO: 744285 - DNA, 25 bp, Homo sapien
taagccttcggcaggcgagggccgt

SEQ ID NO: 744286 - DNA, 25 bp, Homo sapien
ggtgggcgcgcagccttcgctgcag

SEQ ID NO: 744287 - DNA, 25 bp, Homo sapien
ttcggcaggcgagggccgtggattc

SEQ ID NO: 744288 - DNA, 25 bp, Homo sapien
cggcaccaggagggagtaagccttc

SEQ ID NO: 744289 - DNA, 25 bp, Homo sapien
ctctggaaggaactctggcaggttc

SEQ ID NO: 744290 - DNA, 25 bp, Homo sapien
aggttcttggtggacgaggccagag

SEQ ID NO: 744291 - DNA, 25 bp, Homo sapien
gttcttggtggacgaggccagaggc

SEQ ID NO: 744292 - DNA, 25 bp, Homo sapien
ctggaaggaactctggcaggttctt

SEQ ID NO: 744293 - DNA, 25 bp, Homo sapien
ttaaaacttcaggatccgaagacat

SEQ ID NO: 744294 - DNA, 25 bp, Homo sapien
gatccgaagacataaatcccaattg

SEQ ID NO: 744295 - DNA, 25 bp, Homo sapien
cgaagacataaatcccaattggtga

SEQ ID NO: 744296 - DNA, 25 bp, Homo sapien
caattggtgactttcaggttctggt

SEQ ID NO: 744297 - DNA, 25 bp, Homo sapien
tgcctagagctttccatgccaacag

SEQ ID NO: 744298 - DNA, 25 bp, Homo sapien
ggctgactcttttgctatagcaagc

SEQ ID NO: 744299 - DNA, 25 bp, Homo sapien
gttagcctgcctagagctttccatg

SEQ ID NO: 744300 - DNA, 25 bp, Homo sapien
tgctggtggctgactcttttgctat

SEQ ID NO: 744301 - DNA, 25 bp, Homo sapien
tgaagatattgtacgtttgattcca

SEQ ID NO: 744302 - DNA, 25 bp, Homo sapien
cttgaagatattgtacgtttgattc

SEQ ID NO: 744303 - DNA, 25 bp, Homo sapien
aagatattgtacgtttgattccagg

SEQ ID NO: 744304 - DNA, 25 bp, Homo sapien
agatattgtacgtttgattccaggc

SEQ ID NO: 744305 - DNA, 25 bp, Homo sapien
tccctccctccatcttccaggaact

SEQ ID NO: 744306 - DNA, 25 bp, Homo sapien
tccatcttccaggaactgtctctac

SEQ ID NO: 744307 - DNA, 25 bp, Homo sapien
tccctccatcttccaggaactgtct

SEQ ID NO: 744308 - DNA, 25 bp, Homo sapien
ctgtctccatgctccctccctccat

SEQ ID NO: 744309 - DNA, 25 bp, Homo sapien
gggaggcaccatgttccccttcttc

SEQ ID NO: 744310 - DNA, 25 bp, Homo sapien
cacatacacagaggggaggcaccat

SEQ ID NO: 744311 - DNA, 25 bp, Homo sapien
acagaggggaggcaccatgttcccc

SEQ ID NO: 744312 - DNA, 25 bp, Homo sapien
tcacatacacagaggggaggcacca

SEQ ID NO: 744313 - DNA, 25 bp, Homo sapien
cttttgcaatttgtaaaaagtccat

SEQ ID NO: 744314 - DNA, 25 bp, Homo sapien
ccgggaactggctttgacgccaggg

SEQ ID NO: 744315 - DNA, 25 bp, Homo sapien
caggacgagactgggccgggaactg

SEQ ID NO: 744316 - DNA, 25 bp, Homo sapien
gctgcaggacgagactgggccggga

SEQ ID NO: 744317 - DNA, 25 bp, Homo sapien
gggccgggaactggctttgacgcca

SEQ ID NO: 744318 - DNA, 25 bp, Homo sapien
cattgaccaggttacggtgccagaa

SEQ ID NO: 744319 - DNA, 25 bp, Homo sapien
atctgaggacattgaccaggttacg

SEQ ID NO: 744320 - DNA, 25 bp, Homo sapien
gaggacattgaccaggttacggtgc

SEQ ID NO: 744321 - DNA, 25 bp, Homo sapien
ttgaccaggttacggtgccagaagg

SEQ ID NO: 744322 - DNA, 25 bp, Homo sapien
agaattccctttcagctccagcttt

SEQ ID NO: 744323 - DNA, 25 bp, Homo sapien
ctcagaattccctttcagctccagc

SEQ ID NO: 744324 - DNA, 25 bp, Homo sapien
tccctttcagctccagctttaccca

SEQ ID NO: 744325 - DNA, 25 bp, Homo sapien
ccctttcagctccagctttacccac

SEQ ID NO: 744326 - DNA, 25 bp, Homo sapien
cagacacgttaaagccttggtacag

SEQ ID NO: 744327 - DNA, 25 bp, Homo sapien
ggcccttaatcccatcagtttcgta

SEQ ID NO: 744328 - DNA, 25 bp, Homo sapien
ggtacaggcccttaatcccatcagt

SEQ ID NO: 744329 - DNA, 25 bp, Homo sapien
ccttaatcccatcagtttcgtagat

SEQ ID NO: 744330 - DNA, 25 bp, Homo sapien
catcatgcggcatcgaacggtgtca

SEQ ID NO: 744331 - DNA, 25 bp, Homo sapien
catgcggcatcgaacggtgtcaaat

SEQ ID NO: 744332 - DNA, 25 bp, Homo sapien
gcatcatcatgcggcatcgaacggt

SEQ ID NO: 744333 - DNA, 25 bp, Homo sapien
atcatcatgcggcatcgaacggtgt

SEQ ID NO: 744334 - DNA, 25 bp, Homo sapien
tacaacatgactgttcacagtgggg

SEQ ID NO: 744335 - DNA, 25 bp, Homo sapien
acaacatgactgttcacagtggggg

SEQ ID NO: 744336 - DNA, 25 bp, Homo sapien
aaaaatataattgagtcccatcacc

SEQ ID NO: 744337 - DNA, 25 bp, Homo sapien
tatttatcaggtgtgaatgaaataa

SEQ ID NO: 744338 - DNA, 25 bp, Homo sapien
atcaccatcctcatggaaatggctt

SEQ ID NO: 744339 - DNA, 25 bp, Homo sapien
tttgttatttatcaggtgtgaatga

SEQ ID NO: 744340 - DNA, 25 bp, Homo sapien
cttgtgtccaaactcttgcactttc

SEQ ID NO: 744341 - DNA, 25 bp, Homo sapien
aaccacttgtgtccaaactcttgca

SEQ ID NO: 744342 - DNA, 25 bp, Homo sapien
agaggctgaaaccacttgtgtccaa

SEQ ID NO: 744343 - DNA, 25 bp, Homo sapien
gtccaaactcttgcactttctccat

SEQ ID NO: 744344 - DNA, 25 bp, Homo sapien
cacctatgtgactggatgatgatgg

SEQ ID NO: 744345 - DNA, 25 bp, Homo sapien
tggatgatgatggttgggttaccct

SEQ ID NO: 744346 - DNA, 25 bp, Homo sapien
tgtgcctctccacctatgtgactgg

SEQ ID NO: 744347 - DNA, 25 bp, Homo sapien
tctccacctatgtgactggatgatg

SEQ ID NO: 744348 - DNA, 25 bp, Homo sapien
ctgtgccagcaggagggtaagaaag

SEQ ID NO: 744349 - DNA, 25 bp, Homo sapien
gtgccagcaggagggtaagaaaggg

SEQ ID NO: 744350 - DNA, 25 bp, Homo sapien
tgtgccagcaggagggtaagaaagg

SEQ ID NO: 744351 - DNA, 25 bp, Homo sapien
tcattggtattagccagctccacag

SEQ ID NO: 744352 - DNA, 25 bp, Homo sapien
aaacttgaatcaggcaagtggcagc

SEQ ID NO: 744353 - DNA, 25 bp, Homo sapien
acagtcagcatctcatgagggtaat

SEQ ID NO: 744354 - DNA, 25 bp, Homo sapien
tgttgattgcagctggaagtgtgac

SEQ ID NO: 744355 - DNA, 25 bp, Homo sapien
ctgacgaccccaccgtgtgcggaaa

SEQ ID NO: 744356 - DNA, 25 bp, Homo sapien
aagggcagcgggtctgacgacccca

SEQ ID NO: 744357 - DNA, 25 bp, Homo sapien
aaagccgcggacttcgggtgtcagc

SEQ ID NO: 744358 - DNA, 25 bp, Homo sapien
tgtcagcgagcacagcacatgaggg

SEQ ID NO: 744359 - DNA, 25 bp, Homo sapien
cggccgccgcgggcccgcacgacga

SEQ ID NO: 744360 - DNA, 25 bp, Homo sapien
ggcggccgccgcgggcccgcacgac

SEQ ID NO: 744361 - DNA, 25 bp, Homo sapien
gcggccgccgcgggcccgcacgacg

SEQ ID NO: 744362 - DNA, 25 bp, Homo sapien
gggcggccgccgcgggcccgcacga

SEQ ID NO: 744363 - DNA, 25 bp, Homo sapien
ggcagcccttcttgtggtgaaatcc

SEQ ID NO: 744364 - DNA, 25 bp, Homo sapien
cccttcttgtggtgaaatccgacca

SEQ ID NO: 744365 - DNA, 25 bp, Homo sapien
aatccgaccaccacgatgtgcagta

SEQ ID NO: 744366 - DNA, 25 bp, Homo sapien
accaccacgatgtgcagtacgggcc

SEQ ID NO: 744367 - DNA, 25 bp, Homo sapien
gagactttcttgtgaccagtccact

SEQ ID NO: 744368 - DNA, 25 bp, Homo sapien
agttctagctcttttatacttctgc

SEQ ID NO: 744369 - DNA, 25 bp, Homo sapien
gctggttgctttactcactggtgga

SEQ ID NO: 744370 - DNA, 25 bp, Homo sapien
ctcactggtggaactagtgttaaga

SEQ ID NO: 744371 - DNA, 25 bp, Homo sapien
tagattagggcccttctgcagtctt

SEQ ID NO: 744372 - DNA, 25 bp, Homo sapien
taagtaggtaagtaggctcttctcc

SEQ ID NO: 744373 - DNA, 25 bp, Homo sapien
tctgttgtccatccctagtagatta

SEQ ID NO: 744374 - DNA, 25 bp, Homo sapien
taaaaatatcctagggagaacctga

SEQ ID NO: 744375 - DNA, 25 bp, Homo sapien
gctgtacaggctaccctctcattag

SEQ ID NO: 744376 - DNA, 25 bp, Homo sapien
caatggctccagttagtcatggtca

SEQ ID NO: 744377 - DNA, 25 bp, Homo sapien
tgtgaatcatcccatcaaccagctt

SEQ ID NO: 744378 - DNA, 25 bp, Homo sapien
tgaacagccatcttagttatcggat

SEQ ID NO: 744379 - DNA, 25 bp, Homo sapien
taaagtggtcttaaggcaactggat

SEQ ID NO: 744380 - DNA, 25 bp, Homo sapien
ccaaagtagcataacagaacagtga

SEQ ID NO: 744381 - DNA, 25 bp, Homo sapien
caactggatgcccaaatgagtaagt

SEQ ID NO: 744382 - DNA, 25 bp, Homo sapien
tagaactgctctgcccatgtatgga

SEQ ID NO: 744383 - DNA, 25 bp, Homo sapien
ggggagatggtttccctcatactgg

SEQ ID NO: 744384 - DNA, 25 bp, Homo sapien
agttcagaagtgccaggactgtaga

SEQ ID NO: 744385 - DNA, 25 bp, Homo sapien
cagttcagaagtgccaggactgtag

SEQ ID NO: 744386 - DNA, 25 bp, Homo sapien
tcccaacgagacctgatggctcatg

SEQ ID NO: 744387 - DNA, 25 bp, Homo sapien
acgagacctgatggctcatgaatct

SEQ ID NO: 744388 - DNA, 25 bp, Homo sapien
ccaacgagacctgatggctcatgaa

SEQ ID NO: 744389 - DNA, 25 bp, Homo sapien
ctcccaacgagacctgatggctcat

SEQ ID NO: 744390 - DNA, 25 bp, Homo sapien
catactggggcagttcagaagtgcc

SEQ ID NO: 744391 - DNA, 25 bp, Homo sapien
gacctgacggctcacaaatcttacc

SEQ ID NO: 744392 - DNA, 25 bp, Homo sapien
gcagttcagaagtgccaggactgtg

SEQ ID NO: 744393 - DNA, 25 bp, Homo sapien
ggggagatggtttccctcatactgg

SEQ ID NO: 744394 - DNA, 25 bp, Homo sapien
catactggggcagttcagaagtgcc

SEQ ID NO: 744395 - DNA, 25 bp, Homo sapien
gcagttcagaagtgccaggactgtg

SEQ ID NO: 744396 - DNA, 25 bp, Homo sapien
cagacctgacggctcacaaatctta

SEQ ID NO: 744397 - DNA, 25 bp, Homo sapien
gacctgacggctcacaaatcttacc

SEQ ID NO: 744398 - DNA, 25 bp, Homo sapien
gacacatccttagaaggtcctgagg

SEQ ID NO: 744399 - DNA, 25 bp, Homo sapien
cagagtctctttcatcggttgccaa

SEQ ID NO: 744400 - DNA, 25 bp, Homo sapien
tggtttcgaccataaagacagctaa

SEQ ID NO: 744401 - DNA, 25 bp, Homo sapien
taaggagaaactacgaccagctgca

SEQ ID NO: 744402 - DNA, 25 bp, Homo sapien
ccacttagcccctagtaatccaggg

SEQ ID NO: 744403 - DNA, 25 bp, Homo sapien
gtgtgctggttattggcaggactcc

SEQ ID NO: 744404 - DNA, 25 bp, Homo sapien
gagaagcaaaatgccctttagggag

SEQ ID NO: 744405 - DNA, 25 bp, Homo sapien
gcaggactccatagcgtgttatcca

SEQ ID NO: 744406 - DNA, 25 bp, Homo sapien
ccctgtcaaccattttatagtctgt

SEQ ID NO: 744407 - DNA, 25 bp, Homo sapien
gcaaatagtcgtcatttaaagttat

SEQ ID NO: 744408 - DNA, 25 bp, Homo sapien
atcaaaaattacacagcacggctgg

SEQ ID NO: 744409 - DNA, 25 bp, Homo sapien
actgcaaatagtcgtcatttaaagt

SEQ ID NO: 744410 - DNA, 25 bp, Homo sapien
aacttcttgcactaagagtaacaca

SEQ ID NO: 744411 - DNA, 25 bp, Homo sapien
tcttgttttaaccaattattgagtg

SEQ ID NO: 744412 - DNA, 25 bp, Homo sapien
tcttctatagattattaagcttgag

SEQ ID NO: 744413 - DNA, 25 bp, Homo sapien
ctagatcattcacgacatgcttgga

SEQ ID NO: 744414 - DNA, 25 bp, Homo sapien
cacttcctctatgacttctgctatg

SEQ ID NO: 744415 - DNA, 25 bp, Homo sapien
cataatactcaatgtcaggggaggg

SEQ ID NO: 744416 - DNA, 25 bp, Homo sapien
cttcctctatgacttctgctatgat

SEQ ID NO: 744417 - DNA, 25 bp, Homo sapien
tcctctatgacttctgctatgattg

SEQ ID NO: 744418 - DNA, 25 bp, Homo sapien
ttacacaaatttccgcagctggctt

SEQ ID NO: 744419 - DNA, 25 bp, Homo sapien
tcttgtctatcgcatagtaatgctg

SEQ ID NO: 744420 - DNA, 25 bp, Homo sapien
catccctaggttgcacacagcaagg

SEQ ID NO: 744421 - DNA, 25 bp, Homo sapien
cagggtgccacatccctaggttgca

SEQ ID NO: 744422 - DNA, 25 bp, Homo sapien
gctgctgattcatacctgaggctgg

SEQ ID NO: 744423 - DNA, 25 bp, Homo sapien
caaatttgattaggcttctgtattc

SEQ ID NO: 744424 - DNA, 25 bp, Homo sapien
tatcacacccctgcgccctccaaat

SEQ ID NO: 744425 - DNA, 25 bp, Homo sapien
aaaccatatcacacccctgcgccct

SEQ ID NO: 744426 - DNA, 25 bp, Homo sapien
taaatcttaaatgagaggcatccca

SEQ ID NO: 744427 - DNA, 25 bp, Homo sapien
gcatcccattcatggactgctaatg

SEQ ID NO: 744428 - DNA, 25 bp, Homo sapien
gctcagctcatcagagtgcctttcc

SEQ ID NO: 744429 - DNA, 25 bp, Homo sapien
tatcgggcacacaactaacacaatg

SEQ ID NO: 744430 - DNA, 25 bp, Homo sapien
cttggtcatgtagcacaaatgtgta

SEQ ID NO: 744431 - DNA, 25 bp, Homo sapien
ggtcatgtagcacaaatgtgtataa

SEQ ID NO: 744432 - DNA, 25 bp, Homo sapien
tggtcatgtagcacaaatgtgtata

SEQ ID NO: 744433 - DNA, 25 bp, Homo sapien
ttggtcatgtagcacaaatgtgtat

SEQ ID NO: 744434 - DNA, 25 bp, Homo sapien
gacaaataatttccagtaataccag

SEQ ID NO: 744435 - DNA, 25 bp, Homo sapien
gaaatctgggactcttatattaccc

SEQ ID NO: 744436 - DNA, 25 bp, Homo sapien
ctttatgtaaagctagacagcatca

SEQ ID NO: 744437 - DNA, 25 bp, Homo sapien
ccagatttgttttggagagctactt

SEQ ID NO: 744438 - DNA, 25 bp, Homo sapien
aggttgatagaattatgtttgttta

SEQ ID NO: 744439 - DNA, 25 bp, Homo sapien
tattttaggttgatagaattatgtt

SEQ ID NO: 744440 - DNA, 25 bp, Homo sapien
ggttgatagaattatgtttgtttaa

SEQ ID NO: 744441 - DNA, 25 bp, Homo sapien
attattttaggttgatagaattatg

SEQ ID NO: 744442 - DNA, 25 bp, Homo sapien
tacatttccataaggcggagggagc

SEQ ID NO: 744443 - DNA, 25 bp, Homo sapien
tcgaactttagcaggagggacctct

SEQ ID NO: 744444 - DNA, 25 bp, Homo sapien
gacagaggctgatcaccggaaagac

SEQ ID NO: 744445 - DNA, 25 bp, Homo sapien
tagttaacaggttgccattggccag

SEQ ID NO: 744446 - DNA, 25 bp, Homo sapien
acctaaggtaatccgcctgccctgg

SEQ ID NO: 744447 - DNA, 25 bp, Homo sapien
ctgacctaaggtaatccgcctgccc

SEQ ID NO: 744448 - DNA, 25 bp, Homo sapien
ggcatgaggcactgtgcccggccaa

SEQ ID NO: 744449 - DNA, 25 bp, Homo sapien
tctgtctcccatgctcaagcaattc

SEQ ID NO: 744450 - DNA, 25 bp, Homo sapien
aatcaggggcgggtaagagaattca

SEQ ID NO: 744451 - DNA, 25 bp, Homo sapien
ctggaatcaggggcgggtaagagaa

SEQ ID NO: 744452 - DNA, 25 bp, Homo sapien
gaatcaggggcgggtaagagaattc

SEQ ID NO: 744453 - DNA, 25 bp, Homo sapien
tcaggggcgggtaagagaattcaac

SEQ ID NO: 744454 - DNA, 25 bp, Homo sapien
tgcgccatctggtaaggcaaggaag

SEQ ID NO: 744455 - DNA, 25 bp, Homo sapien
ttcctggtagttgtgtgcgccatct

SEQ ID NO: 744456 - DNA, 25 bp, Homo sapien
tgtgtgcgccatctggtaaggcaag

SEQ ID NO: 744457 - DNA, 25 bp, Homo sapien
ggcaaggaagggcaaatacttccat

SEQ ID NO: 744458 - DNA, 25 bp, Homo sapien
tggcttcaatttgtcgatagcaaga

SEQ ID NO: 744459 - DNA, 25 bp, Homo sapien
tcaatttgtcgatagcaagagatac

SEQ ID NO: 744460 - DNA, 25 bp, Homo sapien
aatttgtcgatagcaagagatacca

SEQ ID NO: 744461 - DNA, 25 bp, Homo sapien
gcttcaatttgtcgatagcaagaga

SEQ ID NO: 744462 - DNA, 25 bp, Homo sapien
tttaaaggctatgcagagcacgagg

SEQ ID NO: 744463 - DNA, 25 bp, Homo sapien
ttgagaaggacagcaatcactggga

SEQ ID NO: 744464 - DNA, 25 bp, Homo sapien
gatttccaagaacggacagcagctc

SEQ ID NO: 744465 - DNA, 25 bp, Homo sapien
tactagtgcttacatgacatacggg

SEQ ID NO: 744466 - DNA, 25 bp, Homo sapien
tggacaatcccgaatctcaaggaat

SEQ ID NO: 744467 - DNA, 25 bp, Homo sapien
gccagaatctgtgggaggcactggg

SEQ ID NO: 744468 - DNA, 25 bp, Homo sapien
actgggaatataatagtgaatggac

SEQ ID NO: 744469 - DNA, 25 bp, Homo sapien
tattatgaacaaagagcaatttatc

SEQ ID NO: 744470 - DNA, 25 bp, Homo sapien
ggtgatatctgcttgccttactttc

SEQ ID NO: 744471 - DNA, 25 bp, Homo sapien
cagcttgcttagaacacagacactt

SEQ ID NO: 744472 - DNA, 25 bp, Homo sapien
cttttctgaacagtctctctggtga

SEQ ID NO: 744473 - DNA, 25 bp, Homo sapien
tctctctggtgatatctgcttgcct

SEQ ID NO: 744474 - DNA, 25 bp, Homo sapien
ccaagtcttgggtagaggtgcaaat

SEQ ID NO: 744475 - DNA, 25 bp, Homo sapien
tgtgtcaacttactttccaatagct

SEQ ID NO: 744476 - DNA, 25 bp, Homo sapien
aatagtgccttatccttaaagaaag

SEQ ID NO: 744477 - DNA, 25 bp, Homo sapien
taaagaaagatctgccatgaaggtt

SEQ ID NO: 744478 - DNA, 25 bp, Homo sapien
aatatgcatgtgtaatgagttgaag

SEQ ID NO: 744479 - DNA, 25 bp, Homo sapien
tatgcatgtgtaatgagttgaagtt

SEQ ID NO: 744480 - DNA, 25 bp, Homo sapien
catgtgtaatgagttgaagttttgc

SEQ ID NO: 744481 - DNA, 25 bp, Homo sapien
caaaatatgcatgtgtaatgagttg

SEQ ID NO: 744482 - DNA, 25 bp, Homo sapien
catctatagaggggtataaagttac

SEQ ID NO: 744483 - DNA, 25 bp, Homo sapien
cacatctatagaggggtataaagtt

SEQ ID NO: 744484 - DNA, 25 bp, Homo sapien
aacacatctatagaggggtataaag

SEQ ID NO: 744485 - DNA, 25 bp, Homo sapien
aaacacatctatagaggggtataaa

SEQ ID NO: 744486 - DNA, 25 bp, Homo sapien
gttatagttatttgtagtcattatt

SEQ ID NO: 744487 - DNA, 25 bp, Homo sapien
ttagttatagttatttgtagtcatt

SEQ ID NO: 744488 - DNA, 25 bp, Homo sapien
tagttatagttatttgtagtcatta

SEQ ID NO: 744489 - DNA, 25 bp, Homo sapien
tatagttatttgtagtcattatttc

SEQ ID NO: 744490 - DNA, 25 bp, Homo sapien
tacttgggatccttctaatgaagca

SEQ ID NO: 744491 - DNA, 25 bp, Homo sapien
ggaactattcatatgttcataaagc

SEQ ID NO: 744492 - DNA, 25 bp, Homo sapien
ccttctaatgaagcacctcccaagg

SEQ ID NO: 744493 - DNA, 25 bp, Homo sapien
gcacctcccaaggaactattcatat

SEQ ID NO: 744494 - DNA, 25 bp, Homo sapien
aaaatgaaggacaagatctcgaggt

SEQ ID NO: 744495 - DNA, 25 bp, Homo sapien
atgaaggacaagatctcgaggtgac

SEQ ID NO: 744496 - DNA, 25 bp, Homo sapien
aggacaagatctcgaggtgacagac

SEQ ID NO: 744497 - DNA, 25 bp, Homo sapien
gaaggacaagatctcgaggtgacag

SEQ ID NO: 744498 - DNA, 25 bp, Homo sapien
tcaagaagaattagcttaaatagga

SEQ ID NO: 744499 - DNA, 25 bp, Homo sapien
gaattagcttaaataggattaagac

SEQ ID NO: 744500 - DNA, 25 bp, Homo sapien
gaagaattagcttaaataggattaa

SEQ ID NO: 744501 - DNA, 25 bp, Homo sapien
caagaagaattagcttaaataggat

SEQ ID NO: 744502 - DNA, 25 bp, Homo sapien
ttcctttcatcccttaggatcgtac

SEQ ID NO: 744503 - DNA, 25 bp, Homo sapien
ctttcctttcatcccttaggatcgt

SEQ ID NO: 744504 - DNA, 25 bp, Homo sapien
tctttcctttcatcccttaggatcg

SEQ ID NO: 744505 - DNA, 25 bp, Homo sapien
catctttcctttcatcccttaggat

SEQ ID NO: 744506 - DNA, 25 bp, Homo sapien
ctagcactgtgcactgtagagcaaa

SEQ ID NO: 744507 - DNA, 25 bp, Homo sapien
taggccctggaacaagctagcactg

SEQ ID NO: 744508 - DNA, 25 bp, Homo sapien
caaataacccaattactgtcggcag

SEQ ID NO: 744509 - DNA, 25 bp, Homo sapien
tatggagccactgagtcaaatcctg

SEQ ID NO: 744510 - DNA, 25 bp, Homo sapien
gtcatcagtgcacccaccaatttat

SEQ ID NO: 744511 - DNA, 25 bp, Homo sapien
tggaaaaagggataacacagtcatc

SEQ ID NO: 744512 - DNA, 25 bp, Homo sapien
aaagggataacacagtcatcagtgc

SEQ ID NO: 744513 - DNA, 25 bp, Homo sapien
gataacacagtcatcagtgcaccca

SEQ ID NO: 744514 - DNA, 25 bp, Homo sapien
tatactgagaacagtcactgagacc

SEQ ID NO: 744515 - DNA, 25 bp, Homo sapien
tcttccaaacccgaaatgagccctg

SEQ ID NO: 744516 - DNA, 25 bp, Homo sapien
tgagccctggtatcaggactacctg

SEQ ID NO: 744517 - DNA, 25 bp, Homo sapien
gattggtatcattgggttcctgccc

SEQ ID NO: 744518 - DNA, 25 bp, Homo sapien
aaatgtgttgaataccaaaagttca

SEQ ID NO: 744519 - DNA, 25 bp, Homo sapien
atgtgttgaataccaaaagttcaaa

SEQ ID NO: 744520 - DNA, 25 bp, Homo sapien
tgtgttgaataccaaaagttcaaaa

SEQ ID NO: 744521 - DNA, 25 bp, Homo sapien
aatgtgttgaataccaaaagttcaa

SEQ ID NO: 744522 - DNA, 25 bp, Homo sapien
taagctgaaggtttatggcagccct

SEQ ID NO: 744523 - DNA, 25 bp, Homo sapien
tgttttgagtgacacgaaccacgcc

SEQ ID NO: 744524 - DNA, 25 bp, Homo sapien
gcagccctgcaaacatcaagtctgt

SEQ ID NO: 744525 - DNA, 25 bp, Homo sapien
tggtaattctcacatctcacacgtt

SEQ ID NO: 744526 - DNA, 25 bp, Homo sapien
ggtttctagatcctggtttcaagca

SEQ ID NO: 744527 - DNA, 25 bp, Homo sapien
caggtgtgagatgctatgtccagtc

SEQ ID NO: 744528 - DNA, 25 bp, Homo sapien
tgactgcttcatcttaatgcattac

SEQ ID NO: 744529 - DNA, 25 bp, Homo sapien
tttgacccagtgaagttgactgctt

SEQ ID NO: 744530 - DNA, 25 bp, Homo sapien
ttaaccccagcatagtaactactca

SEQ ID NO: 744531 - DNA, 25 bp, Homo sapien
aaccccagcatagtaactactcaca

SEQ ID NO: 744532 - DNA, 25 bp, Homo sapien
taaccccagcatagtaactactcac

SEQ ID NO: 744533 - DNA, 25 bp, Homo sapien
caaagtcagggctccgaaaggtata

SEQ ID NO: 744534 - DNA, 25 bp, Homo sapien
gcaggtcggtgaaatagcaaagtca

SEQ ID NO: 744535 - DNA, 25 bp, Homo sapien
ttaccagtagtctgagaaacccgag

SEQ ID NO: 744536 - DNA, 25 bp, Homo sapien
ggaagtcataacacagctcagaaag

SEQ ID NO: 744537 - DNA, 25 bp, Homo sapien
tattgtatacggcacacaaatctaa

SEQ ID NO: 744538 - DNA, 25 bp, Homo sapien
atactgatattgtatacggcacaca

SEQ ID NO: 744539 - DNA, 25 bp, Homo sapien
ttgtatacggcacacaaatctaata

SEQ ID NO: 744540 - DNA, 25 bp, Homo sapien
tgatattgtatacggcacacaaatc

SEQ ID NO: 744541 - DNA, 25 bp, Homo sapien
tgcaatgccatgtaaggcaaacaca

SEQ ID NO: 744542 - DNA, 25 bp, Homo sapien
tgtcgaaaaaggatgttagtagctc

SEQ ID NO: 744543 - DNA, 25 bp, Homo sapien
acatcggagagaagatgatgctgct

SEQ ID NO: 744544 - DNA, 25 bp, Homo sapien
cactgaggtgtttctgttgtcgaaa

SEQ ID NO: 744545 - DNA, 25 bp, Homo sapien
gcccgtgccatctaggaagacgtca

SEQ ID NO: 744546 - DNA, 25 bp, Homo sapien
gattctcagtcacgtgcctcactag

SEQ ID NO: 744547 - DNA, 25 bp, Homo sapien
ggtagtctgcgaaccttaggtctgc

SEQ ID NO: 744548 - DNA, 25 bp, Homo sapien
catgaatgtagaccgcaaactgggc

SEQ ID NO: 744549 - DNA, 25 bp, Homo sapien
gatttatttctgcaagtgctggatg

SEQ ID NO: 744550 - DNA, 25 bp, Homo sapien
tgtaacaaaagttgtcccatagtcc

SEQ ID NO: 744551 - DNA, 25 bp, Homo sapien
cccatagtccgataatatcttttca

SEQ ID NO: 744552 - DNA, 25 bp, Homo sapien
cacaccctgtagttgtgagtattct

SEQ ID NO: 744553 - DNA, 25 bp, Homo sapien
gaatcattgtgtactgagcatcacc

SEQ ID NO: 744554 - DNA, 25 bp, Homo sapien
tgagcccagcttcagatattaactt

SEQ ID NO: 744555 - DNA, 25 bp, Homo sapien
tactcatgcagtaaaccagtggtat

SEQ ID NO: 744556 - DNA, 25 bp, Homo sapien
tctctgaatcacatcgagagccagg

SEQ ID NO: 744557 - DNA, 25 bp, Homo sapien
tgtgagaaccttaacttcatgtctg

SEQ ID NO: 744558 - DNA, 25 bp, Homo sapien
ctgagtattggccttgaaatggatg

SEQ ID NO: 744559 - DNA, 25 bp, Homo sapien
tcatgtctgatactgagtattggcc

SEQ ID NO: 744560 - DNA, 25 bp, Homo sapien
gatactgagtattggccttgaaatg

SEQ ID NO: 744561 - DNA, 25 bp, Homo sapien
gccacgttcactattctgaacagaa

SEQ ID NO: 744562 - DNA, 25 bp, Homo sapien
gcttttcctgtttgtacaacattcc

SEQ ID NO: 744563 - DNA, 25 bp, Homo sapien
aacattccggctagttgtgaccatg

SEQ ID NO: 744564 - DNA, 25 bp, Homo sapien
tgtgaccatgacgtttccaattttt

SEQ ID NO: 744565 - DNA, 25 bp, Homo sapien
ctaccttagaggatagcagttccta

SEQ ID NO: 744566 - DNA, 25 bp, Homo sapien
tctggtgcagcttgaatcttggtag

SEQ ID NO: 744567 - DNA, 25 bp, Homo sapien
tcttggtagcaaaacagtgacttca

SEQ ID NO: 744568 - DNA, 25 bp, Homo sapien
ctctattagataatggagtttgacc

SEQ ID NO: 744569 - DNA, 25 bp, Homo sapien
taaacagttcgacatatggtcccct

SEQ ID NO: 744570 - DNA, 25 bp, Homo sapien
ggcatcccgaaacattcacttagag

SEQ ID NO: 744571 - DNA, 25 bp, Homo sapien
gatctgtggctagtaacagcctggg

SEQ ID NO: 744572 - DNA, 25 bp, Homo sapien
tgatttcatcatttcggcatcccga

SEQ ID NO: 744573 - DNA, 25 bp, Homo sapien
gagctcctagatccttgaagtgtga

SEQ ID NO: 744574 - DNA, 25 bp, Homo sapien
tgtaagactgcaacatgactgcggt

SEQ ID NO: 744575 - DNA, 25 bp, Homo sapien
gctgagcatggcaaacacacgaggt

SEQ ID NO: 744576 - DNA, 25 bp, Homo sapien
ggtccagctgtgtacaaatcatcag

SEQ ID NO: 744577 - DNA, 25 bp, Homo sapien
taaaataccaggcaacgcttagcag

SEQ ID NO: 744578 - DNA, 25 bp, Homo sapien
tggttaaaggtcagaacgctggccc

SEQ ID NO: 744579 - DNA, 25 bp, Homo sapien
ttcaggaaccagtgaccaagtggcc

SEQ ID NO: 744580 - DNA, 25 bp, Homo sapien
tgtgcctggcgccatctgaaaaagg

SEQ ID NO: 744581 - DNA, 25 bp, Homo sapien
tgctgaaaagttttagagaactttc

SEQ ID NO: 744582 - DNA, 25 bp, Homo sapien
tagagaactttcctttctttagagc

SEQ ID NO: 744583 - DNA, 25 bp, Homo sapien
ctgtctttactttttgctgaaaagt

SEQ ID NO: 744584 - DNA, 25 bp, Homo sapien
ctgagtgctgcttcctttagtccgt

SEQ ID NO: 744585 - DNA, 25 bp, Homo sapien
atgctgctccggtgactgagtgctg

SEQ ID NO: 744586 - DNA, 25 bp, Homo sapien
tgatctgatctgtccctaagtgggc

SEQ ID NO: 744587 - DNA, 25 bp, Homo sapien
gcatggggatgctgctccggtgact

SEQ ID NO: 744588 - DNA, 25 bp, Homo sapien
tctcaagtcttcttctgttaccact

SEQ ID NO: 744589 - DNA, 25 bp, Homo sapien
aagtcttcttctgttaccactataa

SEQ ID NO: 744590 - DNA, 25 bp, Homo sapien
cttcttctgttaccactataacttc

SEQ ID NO: 744591 - DNA, 25 bp, Homo sapien
tcatttccactttctcaagtcttct

SEQ ID NO: 744592 - DNA, 25 bp, Homo sapien
tgactgcttgagaaggaacaaattg

SEQ ID NO: 744593 - DNA, 25 bp, Homo sapien
cacagtgactgcttgagaaggaaca

SEQ ID NO: 744594 - DNA, 25 bp, Homo sapien
cagtgactgcttgagaaggaacaaa

SEQ ID NO: 744595 - DNA, 25 bp, Homo sapien
gtgactgcttgagaaggaacaaatt

SEQ ID NO: 744596 - DNA, 25 bp, Homo sapien
cattgtagaaggagtcaatcaagca

SEQ ID NO: 744597 - DNA, 25 bp, Homo sapien
gcaatttcgaaatacgcagtacatt

SEQ ID NO: 744598 - DNA, 25 bp, Homo sapien
tattaactgtagtcgccaagcggag

SEQ ID NO: 744599 - DNA, 25 bp, Homo sapien
tatgagaatgactcttagattccac

SEQ ID NO: 744600 - DNA, 25 bp, Homo sapien
caccctttttcctaatgtatgtcat

SEQ ID NO: 744601 - DNA, 25 bp, Homo sapien
gaccgtggatccctttccttgcacg

SEQ ID NO: 744602 - DNA, 25 bp, Homo sapien
gatccctttccttgcacgtctttct

SEQ ID NO: 744603 - DNA, 25 bp, Homo sapien
atcctcatgaccgtggatccctttc

SEQ ID NO: 744604 - DNA, 25 bp, Homo sapien
taagtagtcagcagaaaatcccttt

SEQ ID NO: 744605 - DNA, 25 bp, Homo sapien
ataaggaactggctagtcagaggac

SEQ ID NO: 744606 - DNA, 25 bp, Homo sapien
gatcttctcccccacttttgaatat

SEQ ID NO: 744607 - DNA, 25 bp, Homo sapien
aactggctagtcagaggacaatact

SEQ ID NO: 744608 - DNA, 25 bp, Homo sapien
gataggtggaagtttactctttcta

SEQ ID NO: 744609 - DNA, 25 bp, Homo sapien
gtcatttttcaggatcctattttgc

SEQ ID NO: 744610 - DNA, 25 bp, Homo sapien
ctaagaaggatctagactttccgtt

SEQ ID NO: 744611 - DNA, 25 bp, Homo sapien
gaaggatctagactttccgttctct

SEQ ID NO: 744612 - DNA, 25 bp, Homo sapien
gtggctatagcttgtttcactctgc

SEQ ID NO: 744613 - DNA, 25 bp, Homo sapien
tgtgttacccaactcttggacccca

SEQ ID NO: 744614 - DNA, 25 bp, Homo sapien
cccttctgtgttacccaactcttgg

SEQ ID NO: 744615 - DNA, 25 bp, Homo sapien
tgctttgtgctttagctggcccctt

SEQ ID NO: 744616 - DNA, 25 bp, Homo sapien
tggataggtggaaataaaccatgag

SEQ ID NO: 744617 - DNA, 25 bp, Homo sapien
gataggtggaaataaaccatgagga

SEQ ID NO: 744618 - DNA, 25 bp, Homo sapien
aggtggaaataaaccatgaggataa

SEQ ID NO: 744619 - DNA, 25 bp, Homo sapien
taggtggaaataaaccatgaggata

SEQ ID NO: 744620 - DNA, 25 bp, Homo sapien
tctgttaaggtcttaacctgtcttc

SEQ ID NO: 744621 - DNA, 25 bp, Homo sapien
tctcctgtttgttcaatctctctcc

SEQ ID NO: 744622 - DNA, 25 bp, Homo sapien
tcctctggtgccttaaaagggtctc

SEQ ID NO: 744623 - DNA, 25 bp, Homo sapien
cctgacatcacaccttttgcttcag

SEQ ID NO: 744624 - DNA, 25 bp, Homo sapien
ctccggctcccacggcgactggcgg

SEQ ID NO: 744625 - DNA, 25 bp, Homo sapien
cctctccggcggccgctgttaccgc

SEQ ID NO: 744626 - DNA, 25 bp, Homo sapien
ggcggccgctgttaccgccgccatc

SEQ ID NO: 744627 - DNA, 25 bp, Homo sapien
ctccggcggccgctgttaccgccgc

SEQ ID NO: 744628 - DNA, 25 bp, Homo sapien
ccggcggccgctgttaccgccgcca

SEQ ID NO: 744629 - DNA, 25 bp, Homo sapien
gctttctgccgtcgcgcttggcgcc

SEQ ID NO: 744630 - DNA, 25 bp, Homo sapien
ttctgccgtcgcgcttggcgccccg

SEQ ID NO: 744631 - DNA, 25 bp, Homo sapien
gccgctttctgccgtcgcgcttggc

SEQ ID NO: 744632 - DNA, 25 bp, Homo sapien
tctgccgtcgcgcttggcgccccgg

SEQ ID NO: 744633 - DNA, 25 bp, Homo sapien
ccgctggtttcggtgcgccatgacg

SEQ ID NO: 744634 - DNA, 25 bp, Homo sapien
gccgctggtttcggtgcgccatgac

SEQ ID NO: 744635 - DNA, 25 bp, Homo sapien
cgctggtttcggtgcgccatgacgg

SEQ ID NO: 744636 - DNA, 25 bp, Homo sapien
tgctactggaaggtagatccgagcc

SEQ ID NO: 744637 - DNA, 25 bp, Homo sapien
cccaggaaacagctgcgcggggctg

SEQ ID NO: 744638 - DNA, 25 bp, Homo sapien
ccaggaaacagctgcgcggggctgc

SEQ ID NO: 744639 - DNA, 25 bp, Homo sapien
cccccaggaaacagctgcgcggggc

SEQ ID NO: 744640 - DNA, 25 bp, Homo sapien
ccccaggaaacagctgcgcggggct

SEQ ID NO: 744641 - DNA, 25 bp, Homo sapien
tgagctggtaaggagccgatcacca

SEQ ID NO: 744642 - DNA, 25 bp, Homo sapien
agctggtaaggagccgatcaccagg

SEQ ID NO: 744643 - DNA, 25 bp, Homo sapien
aggtgagctggtaaggagccgatca

SEQ ID NO: 744644 - DNA, 25 bp, Homo sapien
gagaggtgagctggtaaggagccga

SEQ ID NO: 744645 - DNA, 25 bp, Homo sapien
aaatagccggcggccacggcccacg

SEQ ID NO: 744646 - DNA, 25 bp, Homo sapien
gcgggcgcgtggagaggggtccgta

SEQ ID NO: 744647 - DNA, 25 bp, Homo sapien
aatagccggcggccacggcccacgt

SEQ ID NO: 744648 - DNA, 25 bp, Homo sapien
gagcgcgggcgcgtggagaggggtc

SEQ ID NO: 744649 - DNA, 25 bp, Homo sapien
cacaagggctatttcgtgggtttgc

SEQ ID NO: 744650 - DNA, 25 bp, Homo sapien
tatctctactgagtacccgctgagg

SEQ ID NO: 744651 - DNA, 25 bp, Homo sapien
caccgcaggtgttacgtgccgggtt

SEQ ID NO: 744652 - DNA, 25 bp, Homo sapien
aacaaaaccacgtgtctacgcggca

SEQ ID NO: 744653 - DNA, 25 bp, Homo sapien
ctggtcaccaggcaaagcaatcaaa

SEQ ID NO: 744654 - DNA, 25 bp, Homo sapien
tactggtcaccaggcaaagcaatca

SEQ ID NO: 744655 - DNA, 25 bp, Homo sapien
tggtcaccaggcaaagcaatcaaat

SEQ ID NO: 744656 - DNA, 25 bp, Homo sapien
ttactggtcaccaggcaaagcaatc

SEQ ID NO: 744657 - DNA, 25 bp, Homo sapien
tgtccttcgtcaatctatattcatc

SEQ ID NO: 744658 - DNA, 25 bp, Homo sapien
catgtttccagccacttaaaggata

SEQ ID NO: 744659 - DNA, 25 bp, Homo sapien
tatattcatcccttagtaatcttat

SEQ ID NO: 744660 - DNA, 25 bp, Homo sapien
tcctgcaatttgatttctcagtttt

SEQ ID NO: 744661 - DNA, 25 bp, Homo sapien
gaattgttaacatgttaatacacag

SEQ ID NO: 744662 - DNA, 25 bp, Homo sapien
cacagttcctttattccagcacttt

SEQ ID NO: 744663 - DNA, 25 bp, Homo sapien
tgtgatagtttaacaaaacccattg

SEQ ID NO: 744664 - DNA, 25 bp, Homo sapien
tcaaaatgtcataagaagtgcagtt

SEQ ID NO: 744665 - DNA, 25 bp, Homo sapien
ccacagtaataagggagttctccct

SEQ ID NO: 744666 - DNA, 25 bp, Homo sapien
tgggacctcactcgtctctctcttg

SEQ ID NO: 744667 - DNA, 25 bp, Homo sapien
tctctagtgttgcagctgggatcta

SEQ ID NO: 744668 - DNA, 25 bp, Homo sapien
tcctcatgaatgacgtggttcccac

SEQ ID NO: 744669 - DNA, 25 bp, Homo sapien
gagcatatccctcatcccgaagttt

SEQ ID NO: 744670 - DNA, 25 bp, Homo sapien
agtttgattagttttggcccacctg

SEQ ID NO: 744671 - DNA, 25 bp, Homo sapien
ttccagtagatataccctaaatgtt

SEQ ID NO: 744672 - DNA, 25 bp, Homo sapien
ataattgacatatgatagctggtca

SEQ ID NO: 744673 - DNA, 25 bp, Homo sapien
agcttttttgcagaatcctttggat

SEQ ID NO: 744674 - DNA, 25 bp, Homo sapien
ctgcatcttgatgaagtcagtggtt

SEQ ID NO: 744675 - DNA, 25 bp, Homo sapien
gaagtcagtggttctagtagctttt

SEQ ID NO: 744676 - DNA, 25 bp, Homo sapien
ttttctatgtacatgatgatatagt

SEQ ID NO: 744677 - DNA, 25 bp, Homo sapien
aatatagttgattttgaatattaac

SEQ ID NO: 744678 - DNA, 25 bp, Homo sapien
gtatagaaatatagttgattttgaa

SEQ ID NO: 744679 - DNA, 25 bp, Homo sapien
tagttgattttgaatattaactttg

SEQ ID NO: 744680 - DNA, 25 bp, Homo sapien
ttgattttgaatattaactttgtac

SEQ ID NO: 744681 - DNA, 25 bp, Homo sapien
cgatgaccacgtgaagggacagtga

SEQ ID NO: 744682 - DNA, 25 bp, Homo sapien
gatacctcgtaggtgggcacgatga

SEQ ID NO: 744683 - DNA, 25 bp, Homo sapien
tttagtcacacagccggaaatctat

SEQ ID NO: 744684 - DNA, 25 bp, Homo sapien
tcatgggagccaaaaaggttctaaa

SEQ ID NO: 744685 - DNA, 25 bp, Homo sapien
tagcgaggcgtaattaggaagtctt

SEQ ID NO: 744686 - DNA, 25 bp, Homo sapien
gaggcatgaaggcatccctgtttat

SEQ ID NO: 744687 - DNA, 25 bp, Homo sapien
cttagcacagaggattagatggagc

SEQ ID NO: 744688 - DNA, 25 bp, Homo sapien
taagctagaagcactggattccttg

SEQ ID NO: 744689 - DNA, 25 bp, Homo sapien
tacatttagaagacaccacaaccgt

SEQ ID NO: 744690 - DNA, 25 bp, Homo sapien
ggatagcgaataccaaaattgtgca

SEQ ID NO: 744691 - DNA, 25 bp, Homo sapien
ttcagacatcagctaaaacagacgt

SEQ ID NO: 744692 - DNA, 25 bp, Homo sapien
tctttggctacagttgggaggtccc

SEQ ID NO: 744693 - DNA, 25 bp, Homo sapien
cactgagttaaggaatttcaggtgt

SEQ ID NO: 744694 - DNA, 25 bp, Homo sapien
aacatacgagttagtaagcaaatta

SEQ ID NO: 744695 - DNA, 25 bp, Homo sapien
aggtgtgtgccatactgcattataa

SEQ ID NO: 744696 - DNA, 25 bp, Homo sapien
caacgcacccggcaacaattaagtt

SEQ ID NO: 744697 - DNA, 25 bp, Homo sapien
taagtctgggcgcttgcaaagagct

SEQ ID NO: 744698 - DNA, 25 bp, Homo sapien
gctgcaatgctagggaatattcctg

SEQ ID NO: 744699 - DNA, 25 bp, Homo sapien
taacacccgccaattggaagtcagg

SEQ ID NO: 744700 - DNA, 25 bp, Homo sapien
caagcaattccccaacgaaacaggg

SEQ ID NO: 744701 - DNA, 25 bp, Homo sapien
tagaatactggcatcgttacaccat

SEQ ID NO: 744702 - DNA, 25 bp, Homo sapien
cccagggcagttagtagtataggaa

SEQ ID NO: 744703 - DNA, 25 bp, Homo sapien
gaagtatttaagataagcccagggc

SEQ ID NO: 744704 - DNA, 25 bp, Homo sapien
gagtgctggcgtctaatggtctttg

SEQ ID NO: 744705 - DNA, 25 bp, Homo sapien
cacgcggaggatccgaaatctgaaa

SEQ ID NO: 744706 - DNA, 25 bp, Homo sapien
cgtccataatttcctggcgcagctt

SEQ ID NO: 744707 - DNA, 25 bp, Homo sapien
gtccataatttcctggcgcagcttc

SEQ ID NO: 744708 - DNA, 25 bp, Homo sapien
gcgccccaaggtgctccacgcggag

SEQ ID NO: 744709 - DNA, 25 bp, Homo sapien
gctccgccagggattataagaaaac

SEQ ID NO: 744710 - DNA, 25 bp, Homo sapien
ccagaggtggaaaagtcggccctat

SEQ ID NO: 744711 - DNA, 25 bp, Homo sapien
gaaaacaagtagtaagctcaaagcc

SEQ ID NO: 744712 - DNA, 25 bp, Homo sapien
cgctacaatcttcccgccctggagc

SEQ ID NO: 744713 - DNA, 25 bp, Homo sapien
aaggtggagagtgcacgtgtgggct

SEQ ID NO: 744714 - DNA, 25 bp, Homo sapien
aggcgggggtcctgcgagtgctggg

SEQ ID NO: 744715 - DNA, 25 bp, Homo sapien
gggtcctgcgagtgctggggagcac

SEQ ID NO: 744716 - DNA, 25 bp, Homo sapien
gggactacgcgcaccgggggctgaa

SEQ ID NO: 744717 - DNA, 25 bp, Homo sapien
ggaatttacacataacaccaatagt

SEQ ID NO: 744718 - DNA, 25 bp, Homo sapien
tcaagtaagcgtgaaaaacgtgact

SEQ ID NO: 744719 - DNA, 25 bp, Homo sapien
gtggtgccaaggtcctccagctatt

SEQ ID NO: 744720 - DNA, 25 bp, Homo sapien
ctcatacagtgtctggaatttacac

SEQ ID NO: 744721 - DNA, 25 bp, Homo sapien
gtaatcttcctatatgagtcccctg

SEQ ID NO: 744722 - DNA, 25 bp, Homo sapien
aagatttagagcagcacatggcaca

SEQ ID NO: 744723 - DNA, 25 bp, Homo sapien
gcactataggatggccagtctagaa

SEQ ID NO: 744724 - DNA, 25 bp, Homo sapien
gagtcccctgtgtaaaagatttaga

SEQ ID NO: 744725 - DNA, 25 bp, Homo sapien
agccaagtcgtttctgcaaactttg

SEQ ID NO: 744726 - DNA, 25 bp, Homo sapien
aaaatgttggcatcagtgttcctgc

SEQ ID NO: 744727 - DNA, 25 bp, Homo sapien
tgtggaggagccaagtcgtttctgc

SEQ ID NO: 744728 - DNA, 25 bp, Homo sapien
aaatgttggcatcagtgttcctgct

SEQ ID NO: 744729 - DNA, 25 bp, Homo sapien
atgggcccaaagtcccaagctttgg

SEQ ID NO: 744730 - DNA, 25 bp, Homo sapien
tcccaagctttggtgatgagttctt

SEQ ID NO: 744731 - DNA, 25 bp, Homo sapien
catgggcccaaagtcccaagctttg

SEQ ID NO: 744732 - DNA, 25 bp, Homo sapien
ccaagctttggtgatgagttctttg

SEQ ID NO: 744733 - DNA, 25 bp, Homo sapien
cccagcataggtgggtttaatcacc

SEQ ID NO: 744734 - DNA, 25 bp, Homo sapien
tgtccccagtgtaagtagggcatca

SEQ ID NO: 744735 - DNA, 25 bp, Homo sapien
tgttgcctggaacgaagcctcaatc

SEQ ID NO: 744736 - DNA, 25 bp, Homo sapien
tcaatcggcattggctatagttagc

SEQ ID NO: 744737 - DNA, 25 bp, Homo sapien
ggagctgtccatagggtcagaagtt

SEQ ID NO: 744738 - DNA, 25 bp, Homo sapien
ctgtccatagggtcagaagtttctt

SEQ ID NO: 744739 - DNA, 25 bp, Homo sapien
gtccatagggtcagaagtttcttct

SEQ ID NO: 744740 - DNA, 25 bp, Homo sapien
gagctgtccatagggtcagaagttt

SEQ ID NO: 744741 - DNA, 25 bp, Homo sapien
caaaggggaccgtatgactggcatt

SEQ ID NO: 744742 - DNA, 25 bp, Homo sapien
gcccaaaggggaccgtatgactggc

SEQ ID NO: 744743 - DNA, 25 bp, Homo sapien
aggcccaaaggggaccgtatgactg

SEQ ID NO: 744744 - DNA, 25 bp, Homo sapien
aaggggaccgtatgactggcattca

SEQ ID NO: 744745 - DNA, 25 bp, Homo sapien
ctgagaatgacccttcatggactct

SEQ ID NO: 744746 - DNA, 25 bp, Homo sapien
ctgctgagaatgacccttcatggac

SEQ ID NO: 744747 - DNA, 25 bp, Homo sapien
tgctgagaatgacccttcatggact

SEQ ID NO: 744748 - DNA, 25 bp, Homo sapien
tctgctgagaatgacccttcatgga

SEQ ID NO: 744749 - DNA, 25 bp, Homo sapien
ttctgggctccaaatagcctcaagc

SEQ ID NO: 744750 - DNA, 25 bp, Homo sapien
gtcgctgaaagggtctacatcccca

SEQ ID NO: 744751 - DNA, 25 bp, Homo sapien
ctgtcgctgaaagggtctacatccc

SEQ ID NO: 744752 - DNA, 25 bp, Homo sapien
agctgtcgctgaaagggtctacatc

SEQ ID NO: 744753 - DNA, 25 bp, Homo sapien
tcgctgaaagggtctacatccccac

SEQ ID NO: 744754 - DNA, 25 bp, Homo sapien
tttttgcctccgcttggttatgcag

SEQ ID NO: 744755 - DNA, 25 bp, Homo sapien
tttcattgtctaatccatgcttccc

SEQ ID NO: 744756 - DNA, 25 bp, Homo sapien
caggacactttctccccatggtttc

SEQ ID NO: 744757 - DNA, 25 bp, Homo sapien
gaactgtttcattgtctaatccatg

SEQ ID NO: 744758 - DNA, 25 bp, Homo sapien
tgtccttgatgactgcaccgtagag

SEQ ID NO: 744759 - DNA, 25 bp, Homo sapien
tctagagcccttgccctaatgttgg

SEQ ID NO: 744760 - DNA, 25 bp, Homo sapien
cttgtcagagacgtaagtgcccttg

SEQ ID NO: 744761 - DNA, 25 bp, Homo sapien
tgtgagggtcatttactgccagcag

SEQ ID NO: 744762 - DNA, 25 bp, Homo sapien
ccttagcagcagatagtaattattc

SEQ ID NO: 744763 - DNA, 25 bp, Homo sapien
aaccttagcagcagatagtaattat

SEQ ID NO: 744764 - DNA, 25 bp, Homo sapien
accttagcagcagatagtaattatt

SEQ ID NO: 744765 - DNA, 25 bp, Homo sapien
tgaagctaatcccacaatcatatca

SEQ ID NO: 744766 - DNA, 25 bp, Homo sapien
tcctgtattatttgaagctaatccc

SEQ ID NO: 744767 - DNA, 25 bp, Homo sapien
tttcaatatgtgtctccaaaagata

SEQ ID NO: 744768 - DNA, 25 bp, Homo sapien
tattatttgaagctaatcccacaat

SEQ ID NO: 744769 - DNA, 25 bp, Homo sapien
gatgttaataagttgccaatatgag

SEQ ID NO: 744770 - DNA, 25 bp, Homo sapien
tgctgcacaggtatataataaagta

SEQ ID NO: 744771 - DNA, 25 bp, Homo sapien
taaagtatcaaaatccttataactg

SEQ ID NO: 744772 - DNA, 25 bp, Homo sapien
tccttataactgaagaattttgatg

SEQ ID NO: 744773 - DNA, 25 bp, Homo sapien
acaaacactacaagaacaactggaa

SEQ ID NO: 744774 - DNA, 25 bp, Homo sapien
tgtgtctgttgtttagctaagacac

SEQ ID NO: 744775 - DNA, 25 bp, Homo sapien
tgttgtttagctaagacaccccaca

SEQ ID NO: 744776 - DNA, 25 bp, Homo sapien
tttagctaagacaccccacatatca

SEQ ID NO: 744777 - DNA, 25 bp, Homo sapien
gctaagacaccccacatatcactaa

SEQ ID NO: 744778 - DNA, 25 bp, Homo sapien
ttagacaatccttgtcctcccaaaa

SEQ ID NO: 744779 - DNA, 25 bp, Homo sapien
tagacaatccttgtcctcccaaaat

SEQ ID NO: 744780 - DNA, 25 bp, Homo sapien
attagacaatccttgtcctcccaaa

SEQ ID NO: 744781 - DNA, 25 bp, Homo sapien
agacaatccttgtcctcccaaaatc

SEQ ID NO: 744782 - DNA, 25 bp, Homo sapien
ctctccatgatcaaactggtgtttt

SEQ ID NO: 744783 - DNA, 25 bp, Homo sapien
tggaactgccctcaaaaccagactg

SEQ ID NO: 744784 - DNA, 25 bp, Homo sapien
gatgctaccatcagaccaagaaaag

SEQ ID NO: 744785 - DNA, 25 bp, Homo sapien
ccactaggagatgggagcagtaacc

SEQ ID NO: 744786 - DNA, 25 bp, Homo sapien
gaatactaagctggcaatatgcaga

SEQ ID NO: 744787 - DNA, 25 bp, Homo sapien
tatgctaacaattgcaatgcatggt

SEQ ID NO: 744788 - DNA, 25 bp, Homo sapien
cacatgtgtggtgtcaagaagagtt

SEQ ID NO: 744789 - DNA, 25 bp, Homo sapien
aaataccaagggctgtatatgctaa

SEQ ID NO: 744790 - DNA, 25 bp, Homo sapien
tgtgtggtgtcaagaagagttttag

SEQ ID NO: 744791 - DNA, 25 bp, Homo sapien
ttatcacagtggctatactccaaca

SEQ ID NO: 744792 - DNA, 25 bp, Homo sapien
ggctatactccaacataacatgtta

SEQ ID NO: 744793 - DNA, 25 bp, Homo sapien
ctaaaattatcacagtggctatact

SEQ ID NO: 744794 - DNA, 25 bp, Homo sapien
cacagtggctatactccaacataac

SEQ ID NO: 744795 - DNA, 25 bp, Homo sapien
acacaaatgtgcaccaaatgagaaa

SEQ ID NO: 744796 - DNA, 25 bp, Homo sapien
tagtataaagtagtatgcatctgtc

SEQ ID NO: 744797 - DNA, 25 bp, Homo sapien
aagaatacatcggtaattgttagta

SEQ ID NO: 744798 - DNA, 25 bp, Homo sapien
gcatctgtcatgcaaaacttcttcc

SEQ ID NO: 744799 - DNA, 25 bp, Homo sapien
tcatgcaaaacttcttcccagagaa

SEQ ID NO: 744800 - DNA, 25 bp, Homo sapien
acagcaccaggatgtactttgcaaa

SEQ ID NO: 744801 - DNA, 25 bp, Homo sapien
tgctgctaatatagcaaaaacaaca

SEQ ID NO: 744802 - DNA, 25 bp, Homo sapien
atgtactttgcaaaagagccatcca

SEQ ID NO: 744803 - DNA, 25 bp, Homo sapien
ctgctaatatagcaaaaacaacagc

SEQ ID NO: 744804 - DNA, 25 bp, Homo sapien
tattccactgggtttgcagatttgc

SEQ ID NO: 744805 - DNA, 25 bp, Homo sapien
gtactatatttgatccattctataa

SEQ ID NO: 744806 - DNA, 25 bp, Homo sapien
gattcacaatgggctgaagcacaga

SEQ ID NO: 744807 - DNA, 25 bp, Homo sapien
tgattcacaatgggctgaagcacag

SEQ ID NO: 744808 - DNA, 25 bp, Homo sapien
ttgccatcctgggcgtggcacctgc

SEQ ID NO: 744809 - DNA, 25 bp, Homo sapien
ttcttacacaccatgacttttctag

SEQ ID NO: 744810 - DNA, 25 bp, Homo sapien
tcagctgctttctgactatacattg

SEQ ID NO: 744811 - DNA, 25 bp, Homo sapien
cttttctagaatgtaatagttcact

SEQ ID NO: 744812 - DNA, 25 bp, Homo sapien
agttctcgcttcacttcttcagctg

SEQ ID NO: 744813 - DNA, 25 bp, Homo sapien
tctcctatctgaactccccatttgc

SEQ ID NO: 744814 - DNA, 25 bp, Homo sapien
ctctcctatctgaactccccatttg

SEQ ID NO: 744815 - DNA, 25 bp, Homo sapien
gaaatgttttgccagcgagtgttcc

SEQ ID NO: 744816 - DNA, 25 bp, Homo sapien
aaatgttttgccagcgagtgttccc

SEQ ID NO: 744817 - DNA, 25 bp, Homo sapien
aatgttttgccagcgagtgttccca

SEQ ID NO: 744818 - DNA, 25 bp, Homo sapien
atgttttgccagcgagtgttcccat

SEQ ID NO: 744819 - DNA, 25 bp, Homo sapien
ccagagcatctgtgaaggtcctata

SEQ ID NO: 744820 - DNA, 25 bp, Homo sapien
cctccactgtgagggttacccagag

SEQ ID NO: 744821 - DNA, 25 bp, Homo sapien
aggtcctataggcttctgaggcgat

SEQ ID NO: 744822 - DNA, 25 bp, Homo sapien
atctgtgaaggtcctataggcttct

SEQ ID NO: 744823 - DNA, 25 bp, Homo sapien
tgaggtttggaatccttcaccaaga

SEQ ID NO: 744824 - DNA, 25 bp, Homo sapien
tacatcccaaatttcaggcatactg

SEQ ID NO: 744825 - DNA, 25 bp, Homo sapien
aggtttggaatccttcaccaagagg

SEQ ID NO: 744826 - DNA, 25 bp, Homo sapien
aatacagtggtgaagtgaggtttgg

SEQ ID NO: 744827 - DNA, 25 bp, Homo sapien
agatgtagttctccgtaggcagcag

SEQ ID NO: 744828 - DNA, 25 bp, Homo sapien
gatatgaacaacacatgacttagca

SEQ ID NO: 744829 - DNA, 25 bp, Homo sapien
aagtttttgggatatgaacaacaca

SEQ ID NO: 744830 - DNA, 25 bp, Homo sapien
ttttgggatatgaacaacacatgac

SEQ ID NO: 744831 - DNA, 25 bp, Homo sapien
cagacagatagttccgcaaagcaaa

SEQ ID NO: 744832 - DNA, 25 bp, Homo sapien
aaaacagacagatagttccgcaaag

SEQ ID NO: 744833 - DNA, 25 bp, Homo sapien
cagatagttccgcaaagcaaacact

SEQ ID NO: 744834 - DNA, 25 bp, Homo sapien
agttccgcaaagcaaacactccatg

SEQ ID NO: 744835 - DNA, 25 bp, Homo sapien
ctctccctgctcatgtcgactccca

SEQ ID NO: 744836 - DNA, 25 bp, Homo sapien
aagtgtcactgcccattttcctgga

SEQ ID NO: 744837 - DNA, 25 bp, Homo sapien
tgctcatgtcgactcccatcctcag

SEQ ID NO: 744838 - DNA, 25 bp, Homo sapien
ccatcctcagcctcaagtgtcactg

SEQ ID NO: 744839 - DNA, 25 bp, Homo sapien
taaaccctgctacaagaggatcctt

SEQ ID NO: 744840 - DNA, 25 bp, Homo sapien
gggttacattcataaaccctgctac

SEQ ID NO: 744841 - DNA, 25 bp, Homo sapien
gaatttctacttattacatgtgaac

SEQ ID NO: 744842 - DNA, 25 bp, Homo sapien
tgtaatggttcccagcaaatgaagc

SEQ ID NO: 744843 - DNA, 25 bp, Homo sapien
ttgccatcaaaggtgtggatgctcc

SEQ ID NO: 744844 - DNA, 25 bp, Homo sapien
tgtggccacggctgcatagcaggga

SEQ ID NO: 744845 - DNA, 25 bp, Homo sapien
gtggccacggctgcatagcagggac

SEQ ID NO: 744846 - DNA, 25 bp, Homo sapien
taatgctgttttgtcacacctatgg

SEQ ID NO: 744847 - DNA, 25 bp, Homo sapien
tcagtggccgggaacatcaggcaag

SEQ ID NO: 744848 - DNA, 25 bp, Homo sapien
tggagtattgagagcatcagtggcc

SEQ ID NO: 744849 - DNA, 25 bp, Homo sapien
tagaaccactcctatcactgacagg

SEQ ID NO: 744850 - DNA, 25 bp, Homo sapien
cttgaatgccatgctaaggacttgg

SEQ ID NO: 744851 - DNA, 25 bp, Homo sapien
gagacttactgaatggttgtgacca

SEQ ID NO: 744852 - DNA, 25 bp, Homo sapien
aaagagctaaggatctgtgggacct

SEQ ID NO: 744853 - DNA, 25 bp, Homo sapien
tattcaaggtgacctaactgcttca

SEQ ID NO: 744854 - DNA, 25 bp, Homo sapien
gatgagccaagtgctgataggacaa

SEQ ID NO: 744855 - DNA, 25 bp, Homo sapien
cacccaaaatcatgtcggattgtaa

SEQ ID NO: 744856 - DNA, 25 bp, Homo sapien
agagttatgtagctgcacaccaggg

SEQ ID NO: 744857 - DNA, 25 bp, Homo sapien
accacagaaactggaacatgagcat

SEQ ID NO: 744858 - DNA, 25 bp, Homo sapien
ccatgcctcattagtactggtttta

SEQ ID NO: 744859 - DNA, 25 bp, Homo sapien
gcttgcagtaagaattgccagccac

SEQ ID NO: 744860 - DNA, 25 bp, Homo sapien
caggtgtggacttaagttgctaggc

SEQ ID NO: 744861 - DNA, 25 bp, Homo sapien
gccagccactcattgtgcgggtctg

SEQ ID NO: 744862 - DNA, 25 bp, Homo sapien
caagatttagagtgggttaaccagg

SEQ ID NO: 744863 - DNA, 25 bp, Homo sapien
tacaagttatgtagcccaccagctg

SEQ ID NO: 744864 - DNA, 25 bp, Homo sapien
gctgatttgcataaggttgggaccg

SEQ ID NO: 744865 - DNA, 25 bp, Homo sapien
aggtctgccacccaatgataagtca

SEQ ID NO: 744866 - DNA, 25 bp, Homo sapien
caaggtctgtataagtccatgccca

SEQ ID NO: 744867 - DNA, 25 bp, Homo sapien
atgacactggttgaatgccaacacc

SEQ ID NO: 744868 - DNA, 25 bp, Homo sapien
cactgaatgagtatgcatgacactg

SEQ ID NO: 744869 - DNA, 25 bp, Homo sapien
aaatttggagagcactgttcgtgat

SEQ ID NO: 744870 - DNA, 25 bp, Homo sapien
agagggagaacctttagatcaaagg

SEQ ID NO: 744871 - DNA, 25 bp, Homo sapien
tggaactcctgccatcaaatgatcc

SEQ ID NO: 744872 - DNA, 25 bp, Homo sapien
ccggtctggaactcctgccatcaaa

SEQ ID NO: 744873 - DNA, 25 bp, Homo sapien
cactcccagccaaattaaagtaatt

SEQ ID NO: 744874 - DNA, 25 bp, Homo sapien
ccaccactcccagccaaattaaagt

SEQ ID NO: 744875 - DNA, 25 bp, Homo sapien
ggatgttgccacaaaatctacctcg

SEQ ID NO: 744876 - DNA, 25 bp, Homo sapien
aattgttgagggcactgaattccct

SEQ ID NO: 744877 - DNA, 25 bp, Homo sapien
tcatgtccactcaagacgagaggca

SEQ ID NO: 744878 - DNA, 25 bp, Homo sapien
cacaggatccgctgaacataggatg

SEQ ID NO: 744879 - DNA, 25 bp, Homo sapien
gatccactgttagtagtagggctga

SEQ ID NO: 744880 - DNA, 25 bp, Homo sapien
tctgaatccgagtatgtaaagtgca

SEQ ID NO: 744881 - DNA, 25 bp, Homo sapien
tagggctgagcaccagatacctttg

SEQ ID NO: 744882 - DNA, 25 bp, Homo sapien
tctgtagtaagagtaaaagcccttg

SEQ ID NO: 744883 - DNA, 25 bp, Homo sapien
tgtagcagttgacaatctaaaaaac

SEQ ID NO: 744884 - DNA, 25 bp, Homo sapien
aactgtttctagcacccatctcttg

SEQ ID NO: 744885 - DNA, 25 bp, Homo sapien
gaaaggcttgttttatgactggtgc

SEQ ID NO: 744886 - DNA, 25 bp, Homo sapien
cagacattctcaactgtcgtggttg

SEQ ID NO: 744887 - DNA, 25 bp, Homo sapien
tgagcgtaattaacctgatggagcc

SEQ ID NO: 744888 - DNA, 25 bp, Homo sapien
tcttaagtcactgcgcagaggtgag

SEQ ID NO: 744889 - DNA, 25 bp, Homo sapien
tgaatttacttagggtgctgagcgt

SEQ ID NO: 744890 - DNA, 25 bp, Homo sapien
tattgtatcgcaggtggcattgcct

SEQ ID NO: 744891 - DNA, 25 bp, Homo sapien
caagaggttgttttctgtcagtaac

SEQ ID NO: 744892 - DNA, 25 bp, Homo sapien
tagtgcttattgaagcccttttagg

SEQ ID NO: 744893 - DNA, 25 bp, Homo sapien
tcagtaactcgggagtgctgtggcc

SEQ ID NO: 744894 - DNA, 25 bp, Homo sapien
tctgttgagcatgctctgtagtcca

SEQ ID NO: 744895 - DNA, 25 bp, Homo sapien
cctcaaaaggtagaggagcgtccat

SEQ ID NO: 744896 - DNA, 25 bp, Homo sapien
tgcctcaaaaggtagaggagcgtcc

SEQ ID NO: 744897 - DNA, 25 bp, Homo sapien
gcctcaaaaggtagaggagcgtcca

SEQ ID NO: 744898 - DNA, 25 bp, Homo sapien
cccgcgtacatctgaactaaccaag

SEQ ID NO: 744899 - DNA, 25 bp, Homo sapien
gaggtctagacgaacagagctcctg

SEQ ID NO: 744900 - DNA, 25 bp, Homo sapien
tctgaactaaccaagagaggtctag

SEQ ID NO: 744901 - DNA, 25 bp, Homo sapien
gagctcctgttatggtctatatcga

SEQ ID NO: 744902 - DNA, 25 bp, Homo sapien
aaagactcgcgacgtgttcgcgaca

SEQ ID NO: 744903 - DNA, 25 bp, Homo sapien
aagctgtttcccttaaagactcgcg

SEQ ID NO: 744904 - DNA, 25 bp, Homo sapien
gctgtttcccttaaagactcgcgac

SEQ ID NO: 744905 - DNA, 25 bp, Homo sapien
tcccttaaagactcgcgacgtgttc

SEQ ID NO: 744906 - DNA, 25 bp, Homo sapien
cacacctccggaccgagggacgcgg

SEQ ID NO: 744907 - DNA, 25 bp, Homo sapien
tccggaccgagggacgcgggtgagc

SEQ ID NO: 744908 - DNA, 25 bp, Homo sapien
caggcgacagtagcgccgggcaggc

SEQ ID NO: 744909 - DNA, 25 bp, Homo sapien
ggacgcgggtgagcaggcgacagta

SEQ ID NO: 744910 - DNA, 25 bp, Homo sapien
tcgctttgcgaagcaacgctgaagg

SEQ ID NO: 744911 - DNA, 25 bp, Homo sapien
aactgcgggcccttttgggtgctgc

SEQ ID NO: 744912 - DNA, 25 bp, Homo sapien
acggaaggcttcagacgctggagct

SEQ ID NO: 744913 - DNA, 25 bp, Homo sapien
gctgctgctacaaacgcttcgcttt

SEQ ID NO: 744914 - DNA, 25 bp, Homo sapien
tcaccatcatctaatcctcagggaa

SEQ ID NO: 744915 - DNA, 25 bp, Homo sapien
cctttctattgtgatcttgccccag

SEQ ID NO: 744916 - DNA, 25 bp, Homo sapien
tatcccatgtcactcacgtcttcaa

SEQ ID NO: 744917 - DNA, 25 bp, Homo sapien
catctaatcctcagggaacttcctc

SEQ ID NO: 744918 - DNA, 25 bp, Homo sapien
actcctgtgactagattgtgttacc

SEQ ID NO: 744919 - DNA, 25 bp, Homo sapien
tgtgttaccagtacaaggaaaggga

SEQ ID NO: 744920 - DNA, 25 bp, Homo sapien
cacctgggtgttcctaaccaaatca

SEQ ID NO: 744921 - DNA, 25 bp, Homo sapien
gctgttaaccaaagaggaggtcaga

SEQ ID NO: 744922 - DNA, 25 bp, Homo sapien
ccggaaagatattccagcaccacac

SEQ ID NO: 744923 - DNA, 25 bp, Homo sapien
gaaagatattccagcaccacacttc

SEQ ID NO: 744924 - DNA, 25 bp, Homo sapien
tcaccggaaagatattccagcacca

SEQ ID NO: 744925 - DNA, 25 bp, Homo sapien
ggcctcaccggaaagatattccagc

SEQ ID NO: 744926 - DNA, 25 bp, Homo sapien
aactaaaggactttggttgccactg

SEQ ID NO: 744927 - DNA, 25 bp, Homo sapien
ccagatataccaggcaatgaatacg

SEQ ID NO: 744928 - DNA, 25 bp, Homo sapien
ccaggcaatgaatacgccagagaat

SEQ ID NO: 744929 - DNA, 25 bp, Homo sapien
ttctggctcatgcaccaactaaagg

SEQ ID NO: 744930 - DNA, 25 bp, Homo sapien
ataagctattgtagcataatatgcc

SEQ ID NO: 744931 - DNA, 25 bp, Homo sapien
aaatttggagctcaccagtcattgc

SEQ ID NO: 744932 - DNA, 25 bp, Homo sapien
gggccttcagggtataataagctat

SEQ ID NO: 744933 - DNA, 25 bp, Homo sapien
gcatgcatgcgactgtaaaacatga

SEQ ID NO: 744934 - DNA, 25 bp, Homo sapien
gaaaaacctcctcctgggcttatca

SEQ ID NO: 744935 - DNA, 25 bp, Homo sapien
aaaacctcctcctgggcttatcaag

SEQ ID NO: 744936 - DNA, 25 bp, Homo sapien
ggaacggatttctgtatacctcaaa

SEQ ID NO: 744937 - DNA, 25 bp, Homo sapien
ggcacagaagatgcgaaaacagaga

SEQ ID NO: 744938 - DNA, 25 bp, Homo sapien
aagacacttatgtgaccaggcatgg

SEQ ID NO: 744939 - DNA, 25 bp, Homo sapien
caacgaagacacttatgcaatggtg

SEQ ID NO: 744940 - DNA, 25 bp, Homo sapien
cagcacagggcaggcaacaagacaa

SEQ ID NO: 744941 - DNA, 25 bp, Homo sapien
tttacagcacagggcaggcaacaag

SEQ ID NO: 744942 - DNA, 25 bp, Homo sapien
tacagcacagggcaggcaacaagac

SEQ ID NO: 744943 - DNA, 25 bp, Homo sapien
caggcaacaagacaaccagctggaa

SEQ ID NO: 744944 - DNA, 25 bp, Homo sapien
gatagcggatctcatcatgtctgtc

SEQ ID NO: 744945 - DNA, 25 bp, Homo sapien
gtgatagcggatctcatcatgtctg

SEQ ID NO: 744946 - DNA, 25 bp, Homo sapien
tgatagcggatctcatcatgtctgt

SEQ ID NO: 744947 - DNA, 25 bp, Homo sapien
aaaacaacgcccttgacatctctta

SEQ ID NO: 744948 - DNA, 25 bp, Homo sapien
agattgtcttctgccacatatcaaa

SEQ ID NO: 744949 - DNA, 25 bp, Homo sapien
gatgcagattgtcttctgccacata

SEQ ID NO: 744950 - DNA, 25 bp, Homo sapien
atatcaaaaaacaacgcccttgaca

SEQ ID NO: 744951 - DNA, 25 bp, Homo sapien
tggccgtggatccaattttcccttg

SEQ ID NO: 744952 - DNA, 25 bp, Homo sapien
gtcggcctgggcgttcggctgcgtt

SEQ ID NO: 744953 - DNA, 25 bp, Homo sapien
tgcgtttgcaaacgtggaccgggtc

SEQ ID NO: 744954 - DNA, 25 bp, Homo sapien
ctgggcgttcggctgcgtttgcaaa

SEQ ID NO: 744955 - DNA, 25 bp, Homo sapien
tcggctgcgtttgcaaacgtggacc

SEQ ID NO: 744956 - DNA, 25 bp, Homo sapien
acggtgcgcgggcactcgtcgggca

SEQ ID NO: 744957 - DNA, 25 bp, Homo sapien
tagcgcacgaagtcgccgctgcgca

SEQ ID NO: 744958 - DNA, 25 bp, Homo sapien
tcgatctgcagctccgcgtcggagc

SEQ ID NO: 744959 - DNA, 25 bp, Homo sapien
gaacgtccccacgtagtggtagcgc

SEQ ID NO: 744960 - DNA, 25 bp, Homo sapien
gaggatctgggcagcggaagaaggg

SEQ ID NO: 744961 - DNA, 25 bp, Homo sapien
atctgggcagcggaagaagggagga

SEQ ID NO: 744962 - DNA, 25 bp, Homo sapien
tctggggtccgggaggatctgggca

SEQ ID NO: 744963 - DNA, 25 bp, Homo sapien
ggcagcggaagaagggaggagcgcg

SEQ ID NO: 744964 - DNA, 25 bp, Homo sapien
gtccagttgtgcaacgtggcctcca

SEQ ID NO: 744965 - DNA, 25 bp, Homo sapien
acatccactcttgggggtccagttg

SEQ ID NO: 744966 - DNA, 25 bp, Homo sapien
tacactgattttgcgtgtgtccatg

SEQ ID NO: 744967 - DNA, 25 bp, Homo sapien
agagaggcaggcacgaacatccact

SEQ ID NO: 744968 - DNA, 25 bp, Homo sapien
ttagtttagggccacaatccatggt

SEQ ID NO: 744969 - DNA, 25 bp, Homo sapien
tagtttagggccacaatccatggtg

SEQ ID NO: 744970 - DNA, 25 bp, Homo sapien
cctttagtttagggccacaatccat

SEQ ID NO: 744971 - DNA, 25 bp, Homo sapien
gtttagggccacaatccatggtgac

SEQ ID NO: 744972 - DNA, 25 bp, Homo sapien
cggtgcctggccttggaatcttgaa

SEQ ID NO: 744973 - DNA, 25 bp, Homo sapien
gaaggactctaaagagccaaaacaa

SEQ ID NO: 744974 - DNA, 25 bp, Homo sapien
aaactggaggcttcacacttcctga

SEQ ID NO: 744975 - DNA, 25 bp, Homo sapien
gaatcttgaaggactctaaagagcc

SEQ ID NO: 744976 - DNA, 25 bp, Homo sapien
cattgaaagtggagtctctgtcata

SEQ ID NO: 744977 - DNA, 25 bp, Homo sapien
cccacaaacacattgaaagtggagt

SEQ ID NO: 744978 - DNA, 25 bp, Homo sapien
ccttttcccacaaacacattgaaag

SEQ ID NO: 744979 - DNA, 25 bp, Homo sapien
acaaacacattgaaagtggagtctc

SEQ ID NO: 744980 - DNA, 25 bp, Homo sapien
caagctttgggggaatcttcacgaa

SEQ ID NO: 744981 - DNA, 25 bp, Homo sapien
acatcccaacaagagcctggtccat

SEQ ID NO: 744982 - DNA, 25 bp, Homo sapien
gtctctcgtttacgcacatcccaac

SEQ ID NO: 744983 - DNA, 25 bp, Homo sapien
tccgtaggcaagctttgggggaatc

SEQ ID NO: 744984 - DNA, 25 bp, Homo sapien
cagaattccaaatatccatcagaag

SEQ ID NO: 744985 - DNA, 25 bp, Homo sapien
gtacctcacaaaatcagacacctgg

SEQ ID NO: 744986 - DNA, 25 bp, Homo sapien
cgtcccgttgtagtggtacctcaca

SEQ ID NO: 744987 - DNA, 25 bp, Homo sapien
gaatcaaacagagttccgtccagga

SEQ ID NO: 744988 - DNA, 25 bp, Homo sapien
cccagcagccctttatccattccag

SEQ ID NO: 744989 - DNA, 25 bp, Homo sapien
gtgatgatgcgcttctcacccacac

SEQ ID NO: 744990 - DNA, 25 bp, Homo sapien
gaggaatggtgatgatgcgcttctc

SEQ ID NO: 744991 - DNA, 25 bp, Homo sapien
aatggtgatgatgcgcttctcaccc

SEQ ID NO: 744992 - DNA, 25 bp, Homo sapien
aatctgctgaaagccggctgctgag

SEQ ID NO: 744993 - DNA, 25 bp, Homo sapien
gaaatctgctgaaagccggctgctg

SEQ ID NO: 744994 - DNA, 25 bp, Homo sapien
atgaaatctgctgaaagccggctgc

SEQ ID NO: 744995 - DNA, 25 bp, Homo sapien
gctgaaagccggctgctgagtcagc

SEQ ID NO: 744996 - DNA, 25 bp, Homo sapien
tcatgcaaaggagtaggcccagaca

SEQ ID NO: 744997 - DNA, 25 bp, Homo sapien
tgcaaaggagtaggcccagacaagc

SEQ ID NO: 744998 - DNA, 25 bp, Homo sapien
tatatcatgcaaaggagtaggccca

SEQ ID NO: 744999 - DNA, 25 bp, Homo sapien
tgttatatcatgcaaaggagtaggc

SEQ ID NO: 745000 - DNA, 25 bp, Homo sapien
ccagagatgcctgaccgggaatgtc

SEQ ID NO: 745001 - DNA, 25 bp, Homo sapien
tggaggtccaataatgcaacatcaa

SEQ ID NO: 745002 - DNA, 25 bp, Homo sapien
ccagaagcgtgccattgtaatgata

SEQ ID NO: 745003 - DNA, 25 bp, Homo sapien
atcaaagagggtgccatccagaagc

SEQ ID NO: 745004 - DNA, 25 bp, Homo sapien
cacagcggggattgctgcccactgg

SEQ ID NO: 745005 - DNA, 25 bp, Homo sapien
agatagcagacaccgaaggctgtgg

SEQ ID NO: 745006 - DNA, 25 bp, Homo sapien
gggagatagcagacaccgaaggctg

SEQ ID NO: 745007 - DNA, 25 bp, Homo sapien
cagaggggagatagcagacaccgaa

SEQ ID NO: 745008 - DNA, 25 bp, Homo sapien
tgggctcccgacaaagggacaccaa

SEQ ID NO: 745009 - DNA, 25 bp, Homo sapien
caccaagtagtgagagagatggcag

SEQ ID NO: 745010 - DNA, 25 bp, Homo sapien
ctatgtggtgggctcccgacaaagg

SEQ ID NO: 745011 - DNA, 25 bp, Homo sapien
caaagggacaccaagtagtgagaga

SEQ ID NO: 745012 - DNA, 25 bp, Homo sapien
ggggatcaccagcaatgtgcagcca

SEQ ID NO: 745013 - DNA, 25 bp, Homo sapien
ccctggggatcaccagcaatgtgca

SEQ ID NO: 745014 - DNA, 25 bp, Homo sapien
gaccctggggatcaccagcaatgtg

SEQ ID NO: 745015 - DNA, 25 bp, Homo sapien
caggaccctggggatcaccagcaat

SEQ ID NO: 745016 - DNA, 25 bp, Homo sapien
actcccagacgaggctgtgagtccc

SEQ ID NO: 745017 - DNA, 25 bp, Homo sapien
tgtccacataaactcccagacgagg

SEQ ID NO: 745018 - DNA, 25 bp, Homo sapien
ggaagcaggagattgtccacataaa

SEQ ID NO: 745019 - DNA, 25 bp, Homo sapien
actgagaacagcaccccacgctgag

SEQ ID NO: 745020 - DNA, 25 bp, Homo sapien
tggggcacgaagaaagaatcacaac

SEQ ID NO: 745021 - DNA, 25 bp, Homo sapien
tcatggggcacgaagaaagaatcac

SEQ ID NO: 745022 - DNA, 25 bp, Homo sapien
cacaaagtcatggggcacgaagaaa

SEQ ID NO: 745023 - DNA, 25 bp, Homo sapien
aaagtcatggggcacgaagaaagaa

SEQ ID NO: 745024 - DNA, 25 bp, Homo sapien
aatgtacgtgtcaaacgtgcggttc

SEQ ID NO: 745025 - DNA, 25 bp, Homo sapien
ccaatgcaaacaccaagtagacctt

SEQ ID NO: 745026 - DNA, 25 bp, Homo sapien
catcccaggaatcacgtagccctgc

SEQ ID NO: 745027 - DNA, 25 bp, Homo sapien
gccctgcccaatgtacgtgtcaaac

SEQ ID NO: 745028 - DNA, 25 bp, Homo sapien
ttttggctctcaagaagttctgtgc

SEQ ID NO: 745029 - DNA, 25 bp, Homo sapien
aaaagaagccctgtttcaagcaatg

SEQ ID NO: 745030 - DNA, 25 bp, Homo sapien
gaaataacaggacaactctagaaac

SEQ ID NO: 745031 - DNA, 25 bp, Homo sapien
agagttccaggccatagtacacgat

SEQ ID NO: 745032 - DNA, 25 bp, Homo sapien
tcagggatcagcacgagctcctatg

SEQ ID NO: 745033 - DNA, 25 bp, Homo sapien
tcctcccacagcaacgtgattcagg

SEQ ID NO: 745034 - DNA, 25 bp, Homo sapien
agaaaatttacgagccttcggctgc

SEQ ID NO: 745035 - DNA, 25 bp, Homo sapien
tagaggctgagagcacacggtcagc

SEQ ID NO: 745036 - DNA, 25 bp, Homo sapien
aaatgccctaatttcagggctgacc

SEQ ID NO: 745037 - DNA, 25 bp, Homo sapien
aacccatccaaatgccctaatttca

SEQ ID NO: 745038 - DNA, 25 bp, Homo sapien
cagaatccattctccactttgaggc

SEQ ID NO: 745039 - DNA, 25 bp, Homo sapien
ggcagaatccattctccactttgag

SEQ ID NO: 745040 - DNA, 25 bp, Homo sapien
aaaccatcgatgaagtgatgcttac

SEQ ID NO: 745041 - DNA, 25 bp, Homo sapien
ggtgctcaaaaggtaatctggaagt

SEQ ID NO: 745042 - DNA, 25 bp, Homo sapien
cctctctttcctaaaagggtgctca

SEQ ID NO: 745043 - DNA, 25 bp, Homo sapien
taatctggaagttgagtaacagcaa

SEQ ID NO: 745044 - DNA, 25 bp, Homo sapien
ttaaaagcggccaatagcccaccca

SEQ ID NO: 745045 - DNA, 25 bp, Homo sapien
aagcggccaatagcccacccaagaa

SEQ ID NO: 745046 - DNA, 25 bp, Homo sapien
aaaagcggccaatagcccacccaag

SEQ ID NO: 745047 - DNA, 25 bp, Homo sapien
aatagcccacccaagaaactctgca

SEQ ID NO: 745048 - DNA, 25 bp, Homo sapien
ttcgaacctctatccctctatcttg

SEQ ID NO: 745049 - DNA, 25 bp, Homo sapien
aaggcttcgaacctctatccctcta

SEQ ID NO: 745050 - DNA, 25 bp, Homo sapien
gcagcaccaaggcttcgaacctcta

SEQ ID NO: 745051 - DNA, 25 bp, Homo sapien
agcaccaaggcttcgaacctctatc

SEQ ID NO: 745052 - DNA, 25 bp, Homo sapien
tctgaggcacacacattattgaggg

SEQ ID NO: 745053 - DNA, 25 bp, Homo sapien
gaaacactctctgtgtgcgtaggaa

SEQ ID NO: 745054 - DNA, 25 bp, Homo sapien
caaccagtgtagaggtcgattcaca

SEQ ID NO: 745055 - DNA, 25 bp, Homo sapien
taacgtgagtcagtctcccaggtgc

SEQ ID NO: 745056 - DNA, 25 bp, Homo sapien
cagggtacggagagtgaccgctaat

SEQ ID NO: 745057 - DNA, 25 bp, Homo sapien
gacaagaaatagactacctgttgcc

SEQ ID NO: 745058 - DNA, 25 bp, Homo sapien
gcctaagtgttcatcaccagacgaa

SEQ ID NO: 745059 - DNA, 25 bp, Homo sapien
tctgcagaggcagatctatggttcc

SEQ ID NO: 745060 - DNA, 25 bp, Homo sapien
aggaaccaggaagtacagcctgcca

SEQ ID NO: 745061 - DNA, 25 bp, Homo sapien
aaccaggaagtacagcctgccattg

SEQ ID NO: 745062 - DNA, 25 bp, Homo sapien
ccaggaagtacagcctgccattggc

SEQ ID NO: 745063 - DNA, 25 bp, Homo sapien
aggaagtacagcctgccattggcca

SEQ ID NO: 745064 - DNA, 25 bp, Homo sapien
gaagcgtgtgctttaatagcagaac

SEQ ID NO: 745065 - DNA, 25 bp, Homo sapien
taataatttgagaagcgtgtgcttt

SEQ ID NO: 745066 - DNA, 25 bp, Homo sapien
ttgagaagcgtgtgctttaatagca

SEQ ID NO: 745067 - DNA, 25 bp, Homo sapien
gtgctttaatagcagaacacaggtg

SEQ ID NO: 745068 - DNA, 25 bp, Homo sapien
ccactgtactctagcctgggcaaca

SEQ ID NO: 745069 - DNA, 25 bp, Homo sapien
ctgggcaacagagtgagactccgtc

SEQ ID NO: 745070 - DNA, 25 bp, Homo sapien
caaggctacagtgagttaggattgc

SEQ ID NO: 745071 - DNA, 25 bp, Homo sapien
aaggctacagtgagttaggattgca

SEQ ID NO: 745072 - DNA, 25 bp, Homo sapien
ggtcccatccagaagtgaggcattg

SEQ ID NO: 745073 - DNA, 25 bp, Homo sapien
cattgtagtgatatttgaggtaatc

SEQ ID NO: 745074 - DNA, 25 bp, Homo sapien
tgtggaagtcgatcacatggatgtc

SEQ ID NO: 745075 - DNA, 25 bp, Homo sapien
gaggtaatctcccttcttactcagc

SEQ ID NO: 745076 - DNA, 25 bp, Homo sapien
tgaggcggaatgatcactgtccgtt

SEQ ID NO: 745077 - DNA, 25 bp, Homo sapien
tcgccaacgcacatctctctgagac

SEQ ID NO: 745078 - DNA, 25 bp, Homo sapien
ccatagcccaggtgaggcggaatga

SEQ ID NO: 745079 - DNA, 25 bp, Homo sapien
gatcactgtccgtttctcgccaacg

SEQ ID NO: 745080 - DNA, 25 bp, Homo sapien
caaacactaatacggcactgccggg

SEQ ID NO: 745081 - DNA, 25 bp, Homo sapien
aatgtcaaacactaatacggcactg

SEQ ID NO: 745082 - DNA, 25 bp, Homo sapien
ggttgggtgacacctcaccattcca

SEQ ID NO: 745083 - DNA, 25 bp, Homo sapien
ccattccatatgaacatgtacccct

SEQ ID NO: 745084 - DNA, 25 bp, Homo sapien
ccccacggccttaccaggctccctg

SEQ ID NO: 745085 - DNA, 25 bp, Homo sapien
ccctgagctcttcggtcccaccttc

SEQ ID NO: 745086 - DNA, 25 bp, Homo sapien
ccacggccttaccaggctccctgag

SEQ ID NO: 745087 - DNA, 25 bp, Homo sapien
tccctgagctcttcggtcccacctt

SEQ ID NO: 745088 - DNA, 25 bp, Homo sapien
ggaggtagaaggaacaccatgaagt

SEQ ID NO: 745089 - DNA, 25 bp, Homo sapien
aaggaacaccatgaagtgtggtgtc

SEQ ID NO: 745090 - DNA, 25 bp, Homo sapien
gaaggaacaccatgaagtgtggtgt

SEQ ID NO: 745091 - DNA, 25 bp, Homo sapien
cagggaggtagaaggaacaccatga

SEQ ID NO: 745092 - DNA, 25 bp, Homo sapien
cattacggcctacgagagaaagaga

SEQ ID NO: 745093 - DNA, 25 bp, Homo sapien
gggtactccaacatgaagcgatcag

SEQ ID NO: 745094 - DNA, 25 bp, Homo sapien
ggacccgataagaccactgagcgag

SEQ ID NO: 745095 - DNA, 25 bp, Homo sapien
cactgactgcgacgggaaaggcttt

SEQ ID NO: 745096 - DNA, 25 bp, Homo sapien
tacccagcagccgtcagagctattc

SEQ ID NO: 745097 - DNA, 25 bp, Homo sapien
tattattcaggtagccaatacccag

SEQ ID NO: 745098 - DNA, 25 bp, Homo sapien
tagtggaaacagacaattagacatg

SEQ ID NO: 745099 - DNA, 25 bp, Homo sapien
tgtgctaaatgactccaagagccct

SEQ ID NO: 745100 - DNA, 25 bp, Homo sapien
caggaaagaccatgagttcagccgc

SEQ ID NO: 745101 - DNA, 25 bp, Homo sapien
gaaagaccatgagttcagccgccat

SEQ ID NO: 745102 - DNA, 25 bp, Homo sapien
accatgagttcagccgccatgaacg

SEQ ID NO: 745103 - DNA, 25 bp, Homo sapien
agttcagccgccatgaacgccaggc

SEQ ID NO: 745104 - DNA, 25 bp, Homo sapien
ccggtcctggttggtgaacatattc

SEQ ID NO: 745105 - DNA, 25 bp, Homo sapien
gagcgagtttccctttgccagatgc

SEQ ID NO: 745106 - DNA, 25 bp, Homo sapien
aaagccaggagcgagtttccctttg

SEQ ID NO: 745107 - DNA, 25 bp, Homo sapien
cctgggcgtgaatgtactctgagaa

SEQ ID NO: 745108 - DNA, 25 bp, Homo sapien
tggcttggtgtcacgtactccctgg

SEQ ID NO: 745109 - DNA, 25 bp, Homo sapien
gtttactatcactggcgatcagccc

SEQ ID NO: 745110 - DNA, 25 bp, Homo sapien
tctttatatagataccctggacacc

SEQ ID NO: 745111 - DNA, 25 bp, Homo sapien
gaaggctcacaaatcatggttggca

SEQ ID NO: 745112 - DNA, 25 bp, Homo sapien
gggccatcatcagaatttgcacagg

SEQ ID NO: 745113 - DNA, 25 bp, Homo sapien
tacctcagggctacatcagtacaaa

SEQ ID NO: 745114 - DNA, 25 bp, Homo sapien
cggcaggtggactgtcattgctgtc

SEQ ID NO: 745115 - DNA, 25 bp, Homo sapien
tccatggaatgagtgcacagcattt

SEQ ID NO: 745116 - DNA, 25 bp, Homo sapien
tgggcagcagaaaaatgtcaccttg

SEQ ID NO: 745117 - DNA, 25 bp, Homo sapien
ttcaacattttatatcagaaaagat

SEQ ID NO: 745118 - DNA, 25 bp, Homo sapien
atcattcaacattttatatcagaaa

SEQ ID NO: 745119 - DNA, 25 bp, Homo sapien
cattcaacattttatatcagaaaag

SEQ ID NO: 745120 - DNA, 25 bp, Homo sapien
aatatcattcaacattttatatcag

SEQ ID NO: 745121 - DNA, 25 bp, Homo sapien
cactagatgctggatagcagtctcc

SEQ ID NO: 745122 - DNA, 25 bp, Homo sapien
gatgcatgctataggtactgggaaa

SEQ ID NO: 745123 - DNA, 25 bp, Homo sapien
gacgttactaaatgttccgtggaca

SEQ ID NO: 745124 - DNA, 25 bp, Homo sapien
ttgcccaagagatctaacaacgaga

SEQ ID NO: 745125 - DNA, 25 bp, Homo sapien
gagaagagtagccatatcacctgca

SEQ ID NO: 745126 - DNA, 25 bp, Homo sapien
caagttggtcgaaaatctctagtga

SEQ ID NO: 745127 - DNA, 25 bp, Homo sapien
gtctcctaagtttcaagagctggcc

SEQ ID NO: 745128 - DNA, 25 bp, Homo sapien
taaaacagacagaataccctattgg

SEQ ID NO: 745129 - DNA, 25 bp, Homo sapien
catcaaggttagttgcattgcaggt

SEQ ID NO: 745130 - DNA, 25 bp, Homo sapien
cacatggtaaatattggttaggcga

SEQ ID NO: 745131 - DNA, 25 bp, Homo sapien
gcaggtcatcctacttaaatatggc

SEQ ID NO: 745132 - DNA, 25 bp, Homo sapien
gcatttagcaagagtgtgtggcaca

SEQ ID NO: 745133 - DNA, 25 bp, Homo sapien
cttcgaagtggtcttggtgtgattc

SEQ ID NO: 745134 - DNA, 25 bp, Homo sapien
cgttatcaaaaacttgaagctgtga

SEQ ID NO: 745135 - DNA, 25 bp, Homo sapien
cctgaggtaagacatcttgggtaca

SEQ ID NO: 745136 - DNA, 25 bp, Homo sapien
gcagaaaccagccttcttcgaagtg

SEQ ID NO: 745137 - DNA, 25 bp, Homo sapien
ctcatatagatgaacatacatattt

SEQ ID NO: 745138 - DNA, 25 bp, Homo sapien
ttagtcttggttaaaatatgaattg

SEQ ID NO: 745139 - DNA, 25 bp, Homo sapien
actcatatagatgaacatacatatt

SEQ ID NO: 745140 - DNA, 25 bp, Homo sapien
tgaacacgtcttctacacttgatgt

SEQ ID NO: 745141 - DNA, 25 bp, Homo sapien
ctatttttgaacacgtcttctacac

SEQ ID NO: 745142 - DNA, 25 bp, Homo sapien
tttttgaacacgtcttctacacttg

SEQ ID NO: 745143 - DNA, 25 bp, Homo sapien
ttgaacacgtcttctacacttgatg

SEQ ID NO: 745144 - DNA, 25 bp, Homo sapien
gaagagagttcgtagatcaagggca

SEQ ID NO: 745145 - DNA, 25 bp, Homo sapien
tttcctgtaagacagagtcaagtag

SEQ ID NO: 745146 - DNA, 25 bp, Homo sapien
tctgctatagtagagaccttaatct

SEQ ID NO: 745147 - DNA, 25 bp, Homo sapien
tttctgcgagtatcacaattaaagc

SEQ ID NO: 745148 - DNA, 25 bp, Homo sapien
gtgctatattagtacttctcagaca

SEQ ID NO: 745149 - DNA, 25 bp, Homo sapien
tgcaccttgtgctatattagtactt

SEQ ID NO: 745150 - DNA, 25 bp, Homo sapien
ttgctggtgtagctcgtccggttac

SEQ ID NO: 745151 - DNA, 25 bp, Homo sapien
aggcttttggaaccgccctcagttg

SEQ ID NO: 745152 - DNA, 25 bp, Homo sapien
ccagctaacttactttgggacacgt

SEQ ID NO: 745153 - DNA, 25 bp, Homo sapien
gggacacgttctcggtctatactga

SEQ ID NO: 745154 - DNA, 25 bp, Homo sapien
tatttcctctagtcctccggctgaa

SEQ ID NO: 745155 - DNA, 25 bp, Homo sapien
tactttggcgacaaaatgacacagt

SEQ ID NO: 745156 - DNA, 25 bp, Homo sapien
gaagacgcaaaagcgaaaaccctga

SEQ ID NO: 745157 - DNA, 25 bp, Homo sapien
tgggtgaggatacagggtcaaacca

SEQ ID NO: 745158 - DNA, 25 bp, Homo sapien
caaacatggccaaccctcttagatt

SEQ ID NO: 745159 - DNA, 25 bp, Homo sapien
cagtatggaagaaaacaccccaatg

SEQ ID NO: 745160 - DNA, 25 bp, Homo sapien
tgcaaggttgcaggtcatgcaggta

SEQ ID NO: 745161 - DNA, 25 bp, Homo sapien
cctggaaagtggcagtttggccctg

SEQ ID NO: 745162 - DNA, 25 bp, Homo sapien
ctgtttaggagttgcagtgctggac

SEQ ID NO: 745163 - DNA, 25 bp, Homo sapien
ggcaaggcaaattcctcagtggttg

SEQ ID NO: 745164 - DNA, 25 bp, Homo sapien
tcttccaagtcaaatgagggttctg

SEQ ID NO: 745165 - DNA, 25 bp, Homo sapien
gactcaggtcccatagacatcaggc

SEQ ID NO: 745166 - DNA, 25 bp, Homo sapien
tacctcagatgaagataggagcagc

SEQ ID NO: 745167 - DNA, 25 bp, Homo sapien
cttgcagtgaagatgtgaccccagg

SEQ ID NO: 745168 - DNA, 25 bp, Homo sapien
taagcaactgttgtaagttaaagct

SEQ ID NO: 745169 - DNA, 25 bp, Homo sapien
aagcaactgttgtaagttaaagcta

SEQ ID NO: 745170 - DNA, 25 bp, Homo sapien
aaagctaaaactcactgttctttga

SEQ ID NO: 745171 - DNA, 25 bp, Homo sapien
taaaactcactgttctttgatcaat

SEQ ID NO: 745172 - DNA, 25 bp, Homo sapien
caataaacgacatgaaaaggacgta

SEQ ID NO: 745173 - DNA, 25 bp, Homo sapien
atgacatcatacgagacaataaacg

SEQ ID NO: 745174 - DNA, 25 bp, Homo sapien
catacgagacaataaacgacatgaa

SEQ ID NO: 745175 - DNA, 25 bp, Homo sapien
cgagacaataaacgacatgaaaagg

SEQ ID NO: 745176 - DNA, 25 bp, Homo sapien
ttgcaaacgctatggtcaccgaacg

SEQ ID NO: 745177 - DNA, 25 bp, Homo sapien
ggtaagtaaagtccaagagtgtcaa

SEQ ID NO: 745178 - DNA, 25 bp, Homo sapien
caccgaacgggtgacaaagaatgcc

SEQ ID NO: 745179 - DNA, 25 bp, Homo sapien
tcaccagtgaacttgaatggtcaca

SEQ ID NO: 745180 - DNA, 25 bp, Homo sapien
tgtgactgtaaaacatgacagggcc

SEQ ID NO: 745181 - DNA, 25 bp, Homo sapien
agatgatgttggcaccggaagccca

SEQ ID NO: 745182 - DNA, 25 bp, Homo sapien
gacagggccttcagggtataataaa

SEQ ID NO: 745183 - DNA, 25 bp, Homo sapien
tgtacatcagagatatagcatgtgt

SEQ ID NO: 745184 - DNA, 25 bp, Homo sapien
gcggcgacacgacgcgcagcagctg

SEQ ID NO: 745185 - DNA, 25 bp, Homo sapien
aagcggcggcgacacgacgcgcagc

SEQ ID NO: 745186 - DNA, 25 bp, Homo sapien
tgcagcagctcaagcacctggagtc

SEQ ID NO: 745187 - DNA, 25 bp, Homo sapien
ctgcagcagctcaagcacctggagt

SEQ ID NO: 745188 - DNA, 25 bp, Homo sapien
gactggcctcaagaatgaatctctg

SEQ ID NO: 745189 - DNA, 25 bp, Homo sapien
gagactgtatcatcgaggagagcca

SEQ ID NO: 745190 - DNA, 25 bp, Homo sapien
gaagggtgatcaatacaagcaggag

SEQ ID NO: 745191 - DNA, 25 bp, Homo sapien
ggtttaaaacctgtccagtagcaca

SEQ ID NO: 745192 - DNA, 25 bp, Homo sapien
attcaccttggagaagaaggcgagg

SEQ ID NO: 745193 - DNA, 25 bp, Homo sapien
cttggagaagaaggcgaggcggaag

SEQ ID NO: 745194 - DNA, 25 bp, Homo sapien
ttcaccttggagaagaaggcgaggc

SEQ ID NO: 745195 - DNA, 25 bp, Homo sapien
caccttggagaagaaggcgaggcgg

SEQ ID NO: 745196 - DNA, 25 bp, Homo sapien
tagcgagcgccagcgtgtgcgccct

SEQ ID NO: 745197 - DNA, 25 bp, Homo sapien
ggcgagggtggtcgcggtagcgagc

SEQ ID NO: 745198 - DNA, 25 bp, Homo sapien
cgaccgtggcgagggtggtcgcggt

SEQ ID NO: 745199 - DNA, 25 bp, Homo sapien
gtcgcggtagcgagcgccagcgtgt

SEQ ID NO: 745200 - DNA, 25 bp, Homo sapien
ggcgtcactggcttgtccatggtgc

SEQ ID NO: 745201 - DNA, 25 bp, Homo sapien
gccctctcccctcggtgcgtgtggg

SEQ ID NO: 745202 - DNA, 25 bp, Homo sapien
ttctgagagtcccaatcgcggtgtt

SEQ ID NO: 745203 - DNA, 25 bp, Homo sapien
gctctgggatcctgcgcttctgaga

SEQ ID NO: 745204 - DNA, 25 bp, Homo sapien
ttatgaacgcctgacaaggtcccag

SEQ ID NO: 745205 - DNA, 25 bp, Homo sapien
tgtcatagcacttacaacggacgcc

SEQ ID NO: 745206 - DNA, 25 bp, Homo sapien
gaaacggcatctatcccttggaaga

SEQ ID NO: 745207 - DNA, 25 bp, Homo sapien
tgggatgtagcagaaacccgacggc

SEQ ID NO: 745208 - DNA, 25 bp, Homo sapien
ccacatttaccattaggccaggtgt

SEQ ID NO: 745209 - DNA, 25 bp, Homo sapien
ttagccataaattgagacacaaata

SEQ ID NO: 745210 - DNA, 25 bp, Homo sapien
cttcatgcttttggttatgcttcaa

SEQ ID NO: 745211 - DNA, 25 bp, Homo sapien
ttggccacatttaccattaggccag

SEQ ID NO: 745212 - DNA, 25 bp, Homo sapien
taataatctacttcacactatgaac

SEQ ID NO: 745213 - DNA, 25 bp, Homo sapien
taatctacttcacactatgaactaa

SEQ ID NO: 745214 - DNA, 25 bp, Homo sapien
aataatctacttcacactatgaact

SEQ ID NO: 745215 - DNA, 25 bp, Homo sapien
aatctacttcacactatgaactaat

SEQ ID NO: 745216 - DNA, 25 bp, Homo sapien
gaatagtagaccaccaatcacgggc

SEQ ID NO: 745217 - DNA, 25 bp, Homo sapien
tattgtcaacattagccagacacaa

SEQ ID NO: 745218 - DNA, 25 bp, Homo sapien
gaccaccaatcacgggctttaaata

SEQ ID NO: 745219 - DNA, 25 bp, Homo sapien
tctttatctcccagaatagtagacc

SEQ ID NO: 745220 - DNA, 25 bp, Homo sapien
accgtgcccagtcttatttgatctc

SEQ ID NO: 745221 - DNA, 25 bp, Homo sapien
gagattacagcagtcggccaccgtg

SEQ ID NO: 745222 - DNA, 25 bp, Homo sapien
agatgtatggttgtaagttgcttac

SEQ ID NO: 745223 - DNA, 25 bp, Homo sapien
catccaagatgtatggttgtaagtt

SEQ ID NO: 745224 - DNA, 25 bp, Homo sapien
gggctaaagatccttaggtatccca

SEQ ID NO: 745225 - DNA, 25 bp, Homo sapien
gatctcgtagatccacttctagaag

SEQ ID NO: 745226 - DNA, 25 bp, Homo sapien
tcctacttccacttgaagtactgga

SEQ ID NO: 745227 - DNA, 25 bp, Homo sapien
tagaagcaaatcttcggcttgagct

SEQ ID NO: 745228 - DNA, 25 bp, Homo sapien
agacagagtagacacaaagttttct

SEQ ID NO: 745229 - DNA, 25 bp, Homo sapien
tcaaaagggcccctccactcttgga

SEQ ID NO: 745230 - DNA, 25 bp, Homo sapien
tgcagcaacactttgggaccttgaa

SEQ ID NO: 745231 - DNA, 25 bp, Homo sapien
agaaagcttttcacagtctgctgac

SEQ ID NO: 745232 - DNA, 25 bp, Homo sapien
tgctgactgaggacaatcaacccct

SEQ ID NO: 745233 - DNA, 25 bp, Homo sapien
tgatggaggatgaaggctttctgga

SEQ ID NO: 745234 - DNA, 25 bp, Homo sapien
ttgatggaggatgaaggctttctgg

SEQ ID NO: 745235 - DNA, 25 bp, Homo sapien
atggaggatgaaggctttctggatt

SEQ ID NO: 745236 - DNA, 25 bp, Homo sapien
cttgatggaggatgaaggctttctg

SEQ ID NO: 745237 - DNA, 25 bp, Homo sapien
caccaccaaatgatccataggtcat

SEQ ID NO: 745238 - DNA, 25 bp, Homo sapien
cataggtcatattgcaggctgttct

SEQ ID NO: 745239 - DNA, 25 bp, Homo sapien
tctctgaagattatgttcatacatc

SEQ ID NO: 745240 - DNA, 25 bp, Homo sapien
atttcatctgacattggttcccatg

SEQ ID NO: 745241 - DNA, 25 bp, Homo sapien
cttccaagatcagacgatatcaggc

SEQ ID NO: 745242 - DNA, 25 bp, Homo sapien
attcagggtggtatggccatagact

SEQ ID NO: 745243 - DNA, 25 bp, Homo sapien
tccaagatcagacgatatcaggcac

SEQ ID NO: 745244 - DNA, 25 bp, Homo sapien
caagatcagacgatatcaggcacat

SEQ ID NO: 745245 - DNA, 25 bp, Homo sapien
gatttcatgcgtaataactaggtag

SEQ ID NO: 745246 - DNA, 25 bp, Homo sapien
ttgacattcttgatgcacacgagag

SEQ ID NO: 745247 - DNA, 25 bp, Homo sapien
tccctcgtggaaccctaagaattga

SEQ ID NO: 745248 - DNA, 25 bp, Homo sapien
catattatgcgagagatttcatgcg

SEQ ID NO: 745249 - DNA, 25 bp, Homo sapien
tctaaggtagtaccacagggaggtc

SEQ ID NO: 745250 - DNA, 25 bp, Homo sapien
tcctgtcagttctaaggtagtacca

SEQ ID NO: 745251 - DNA, 25 bp, Homo sapien
cagttctaaggtagtaccacaggga

SEQ ID NO: 745252 - DNA, 25 bp, Homo sapien
gctggcctctcctgtcagttctaag

SEQ ID NO: 745253 - DNA, 25 bp, Homo sapien
taaataatttgagacatgcccccga

SEQ ID NO: 745254 - DNA, 25 bp, Homo sapien
ttaaatatctatgcataccaagcct

SEQ ID NO: 745255 - DNA, 25 bp, Homo sapien
gtgaacaagactacttttataacaa

SEQ ID NO: 745256 - DNA, 25 bp, Homo sapien
taccaagcctaaaatcatgacaaat

SEQ ID NO: 745257 - DNA, 25 bp, Homo sapien
ttcacagtgctcaatttttctactg

SEQ ID NO: 745258 - DNA, 25 bp, Homo sapien
tttgatgaatgcgcagatgacctcc

SEQ ID NO: 745259 - DNA, 25 bp, Homo sapien
acatatttgatgaatgcgcagatga

SEQ ID NO: 745260 - DNA, 25 bp, Homo sapien
catatttgatgaatgcgcagatgac

SEQ ID NO: 745261 - DNA, 25 bp, Homo sapien
tatttgatgaatgcgcagatgacct

SEQ ID NO: 745262 - DNA, 25 bp, Homo sapien
aaatgatataactttagagcaagaa

SEQ ID NO: 745263 - DNA, 25 bp, Homo sapien
aaatgtataatagtaccaaagaact

SEQ ID NO: 745264 - DNA, 25 bp, Homo sapien
ctaaatcagaaagattggtattgct

SEQ ID NO: 745265 - DNA, 25 bp, Homo sapien
catctgactatgataactaaatcag

SEQ ID NO: 745266 - DNA, 25 bp, Homo sapien
aattatcagctgagtttcaacatga

SEQ ID NO: 745267 - DNA, 25 bp, Homo sapien
tgataagaccccagagaatactccc

SEQ ID NO: 745268 - DNA, 25 bp, Homo sapien
aactactcaaggtaatagccaatca

SEQ ID NO: 745269 - DNA, 25 bp, Homo sapien
caataatatcagtcccataaagcgt

SEQ ID NO: 745270 - DNA, 25 bp, Homo sapien
tgaatatcagtgacaatcttaaata

SEQ ID NO: 745271 - DNA, 25 bp, Homo sapien
aatatcagtgacaatcttaaatagc

SEQ ID NO: 745272 - DNA, 25 bp, Homo sapien
tatcagtgacaatcttaaatagcat

SEQ ID NO: 745273 - DNA, 25 bp, Homo sapien
gaatatcagtgacaatcttaaatag

SEQ ID NO: 745274 - DNA, 25 bp, Homo sapien
ctgtaggcaagaggaccaggcagaa

SEQ ID NO: 745275 - DNA, 25 bp, Homo sapien
gaaagccagggagaaatcttccaaa

SEQ ID NO: 745276 - DNA, 25 bp, Homo sapien
tcccatccatagactggatgcaaat

SEQ ID NO: 745277 - DNA, 25 bp, Homo sapien
ccaaaagcatagctctcctgctcaa

SEQ ID NO: 745278 - DNA, 25 bp, Homo sapien
ttataactttccacttgttggcagg

SEQ ID NO: 745279 - DNA, 25 bp, Homo sapien
agacagtaaggaaggaatctgtacg

SEQ ID NO: 745280 - DNA, 25 bp, Homo sapien
cacttgttggcaggaagagacagta

SEQ ID NO: 745281 - DNA, 25 bp, Homo sapien
cagtaaggaaggaatctgtacggga

SEQ ID NO: 745282 - DNA, 25 bp, Homo sapien
tgttgcaaaagcaagtacctggtac

SEQ ID NO: 745283 - DNA, 25 bp, Homo sapien
tctgttgcaaaagcaagtacctggt

SEQ ID NO: 745284 - DNA, 25 bp, Homo sapien
ctgttgcaaaagcaagtacctggta

SEQ ID NO: 745285 - DNA, 25 bp, Homo sapien
atctgttgcaaaagcaagtacctgg

SEQ ID NO: 745286 - DNA, 25 bp, Homo sapien
caatacatatgtcaagggcttgctc

SEQ ID NO: 745287 - DNA, 25 bp, Homo sapien
gaatttgtccattatccttaaggca

SEQ ID NO: 745288 - DNA, 25 bp, Homo sapien
aaacaacttgggctccaatcaagct

SEQ ID NO: 745289 - DNA, 25 bp, Homo sapien
gaacaaaaacagaggatgccgactg

SEQ ID NO: 745290 - DNA, 25 bp, Homo sapien
atgcagcatgttattatgatttcca

SEQ ID NO: 745291 - DNA, 25 bp, Homo sapien
actcttactgctacaggaatgtggg

SEQ ID NO: 745292 - DNA, 25 bp, Homo sapien
cccactcttactgctacaggaatgt

SEQ ID NO: 745293 - DNA, 25 bp, Homo sapien
gcatgttattatgatttccaatcaa

SEQ ID NO: 745294 - DNA, 25 bp, Homo sapien
cttgcaaaggtgagaagcccaccag

SEQ ID NO: 745295 - DNA, 25 bp, Homo sapien
gggacatcagcttagatctgcctgg

SEQ ID NO: 745296 - DNA, 25 bp, Homo sapien
cagcgctcacgtggcaaggaagtat

SEQ ID NO: 745297 - DNA, 25 bp, Homo sapien
tgttgatcaggacaaaagcagggct

SEQ ID NO: 745298 - DNA, 25 bp, Homo sapien
ggtttacagacactaatcccagagc

SEQ ID NO: 745299 - DNA, 25 bp, Homo sapien
ggcctctgcagggtaaacatactct

SEQ ID NO: 745300 - DNA, 25 bp, Homo sapien
cccttagacattcgctgtctttgtg

SEQ ID NO: 745301 - DNA, 25 bp, Homo sapien
caactacatcatagaacagatcttc

SEQ ID NO: 745302 - DNA, 25 bp, Homo sapien
tactgaggtaccaatagtaagagga

SEQ ID NO: 745303 - DNA, 25 bp, Homo sapien
tatatgcatgcatgtaacgatgacc

SEQ ID NO: 745304 - DNA, 25 bp, Homo sapien
gaaagtagtgtaccaaatgacaggc

SEQ ID NO: 745305 - DNA, 25 bp, Homo sapien
tgacaggccatacctcaataatggt

SEQ ID NO: 745306 - DNA, 25 bp, Homo sapien
taaagtaacagtataggcatactta

SEQ ID NO: 745307 - DNA, 25 bp, Homo sapien
taacagtataggcatacttatcagc

SEQ ID NO: 745308 - DNA, 25 bp, Homo sapien
agtataggcatacttatcagcatag

SEQ ID NO: 745309 - DNA, 25 bp, Homo sapien
aagtaacagtataggcatacttatc

SEQ ID NO: 745310 - DNA, 25 bp, Homo sapien
cacttcctagacagggtggcggcca

SEQ ID NO: 745311 - DNA, 25 bp, Homo sapien
acttcctagacagggtggcggccag

SEQ ID NO: 745312 - DNA, 25 bp, Homo sapien
ccaggcagaggctgtaatcttagca

SEQ ID NO: 745313 - DNA, 25 bp, Homo sapien
cggccaggcagaggctgtaatctta

SEQ ID NO: 745314 - DNA, 25 bp, Homo sapien
agtctatcccttaattctggcctta

SEQ ID NO: 745315 - DNA, 25 bp, Homo sapien
ggcagtctatcccttaattctggcc

SEQ ID NO: 745316 - DNA, 25 bp, Homo sapien
cctttgggcagtctatcccttaatt

SEQ ID NO: 745317 - DNA, 25 bp, Homo sapien
atcccttaattctggccttattttg

SEQ ID NO: 745318 - DNA, 25 bp, Homo sapien
agtggaagatcgaggcaacaaatgc

SEQ ID NO: 745319 - DNA, 25 bp, Homo sapien
taaagtggaagatcgaggcaacaaa

SEQ ID NO: 745320 - DNA, 25 bp, Homo sapien
ttctaaagtggaagatcgaggcaac

SEQ ID NO: 745321 - DNA, 25 bp, Homo sapien
gaagatcgaggcaacaaatgcttcc

SEQ ID NO: 745322 - DNA, 25 bp, Homo sapien
gcactgagctttgaatgtataaatg

SEQ ID NO: 745323 - DNA, 25 bp, Homo sapien
taatagctctaatctagcactgagc

SEQ ID NO: 745324 - DNA, 25 bp, Homo sapien
gttcaaatggaacccttgaagtcaa

SEQ ID NO: 745325 - DNA, 25 bp, Homo sapien
gccaagaaggcaagtattcagatat

SEQ ID NO: 745326 - DNA, 25 bp, Homo sapien
agagaatatgaacagcagttacctg

SEQ ID NO: 745327 - DNA, 25 bp, Homo sapien
catttgtcaaaagtgcatagttaag

SEQ ID NO: 745328 - DNA, 25 bp, Homo sapien
aacttgagagacgtgtggatgagac

SEQ ID NO: 745329 - DNA, 25 bp, Homo sapien
gcacacaaggaaactttctaggtga

SEQ ID NO: 745330 - DNA, 25 bp, Homo sapien
ccatctagtggccatggaaatccca

SEQ ID NO: 745331 - DNA, 25 bp, Homo sapien
catctagtggccatggaaatcccaa

SEQ ID NO: 745332 - DNA, 25 bp, Homo sapien
ttggcatttccgtaataagcatgtg

SEQ ID NO: 745333 - DNA, 25 bp, Homo sapien
aacactttggaggtacaatggacca

SEQ ID NO: 745334 - DNA, 25 bp, Homo sapien
taagcatgtgaacaacactttggag

SEQ ID NO: 745335 - DNA, 25 bp, Homo sapien
tacaatggaccaagagatggagcgg

SEQ ID NO: 745336 - DNA, 25 bp, Homo sapien
gtgaccatcatcactcagagtgact

SEQ ID NO: 745337 - DNA, 25 bp, Homo sapien
ctcagagtgactatcactcccttta

SEQ ID NO: 745338 - DNA, 25 bp, Homo sapien
tcactcagagtgactatcactccct

SEQ ID NO: 745339 - DNA, 25 bp, Homo sapien
catcatcactcagagtgactatcac

SEQ ID NO: 745340 - DNA, 25 bp, Homo sapien
aacgtttggagcttggaacagagaa

SEQ ID NO: 745341 - DNA, 25 bp, Homo sapien
cgagattgaacgtttggagcttgga

SEQ ID NO: 745342 - DNA, 25 bp, Homo sapien
gttctcgagattgaacgtttggagc

SEQ ID NO: 745343 - DNA, 25 bp, Homo sapien
gattgaacgtttggagcttggaaca

SEQ ID NO: 745344 - DNA, 25 bp, Homo sapien
ttctttcatttctacatcaagttca

SEQ ID NO: 745345 - DNA, 25 bp, Homo sapien
tttcatttctacatcaagttcatca

SEQ ID NO: 745346 - DNA, 25 bp, Homo sapien
agttctttcatttctacatcaagtt

SEQ ID NO: 745347 - DNA, 25 bp, Homo sapien
gtgatttgttaacatctttgatgat

SEQ ID NO: 745348 - DNA, 25 bp, Homo sapien
taagtcatgtaattccccagccagt

SEQ ID NO: 745349 - DNA, 25 bp, Homo sapien
gatgtgagccattgactgaccagca

SEQ ID NO: 745350 - DNA, 25 bp, Homo sapien
gaattgctgagatcaccctgtgacc

SEQ ID NO: 745351 - DNA, 25 bp, Homo sapien
ggaaacattccccacactctgagga

SEQ ID NO: 745352 - DNA, 25 bp, Homo sapien
gacagaaacgttcaagtcatcttct

SEQ ID NO: 745353 - DNA, 25 bp, Homo sapien
cacgacagaaacgttcaagtcatct

SEQ ID NO: 745354 - DNA, 25 bp, Homo sapien
aaccacgacagaaacgttcaagtca

SEQ ID NO: 745355 - DNA, 25 bp, Homo sapien
ccacgacagaaacgttcaagtcatc

SEQ ID NO: 745356 - DNA, 25 bp, Homo sapien
cttcaccgtgacagaagggacaagg

SEQ ID NO: 745357 - DNA, 25 bp, Homo sapien
caccgtgacagaagggacaaggtca

SEQ ID NO: 745358 - DNA, 25 bp, Homo sapien
cgtgacagaagggacaaggtcagtt

SEQ ID NO: 745359 - DNA, 25 bp, Homo sapien
cagaagggacaaggtcagttcccac

SEQ ID NO: 745360 - DNA, 25 bp, Homo sapien
tcttcattcacttggaacggatgga

SEQ ID NO: 745361 - DNA, 25 bp, Homo sapien
gatggtcacgcatcatgcacacata

SEQ ID NO: 745362 - DNA, 25 bp, Homo sapien
aacttgcatggttgtatatcttggc

SEQ ID NO: 745363 - DNA, 25 bp, Homo sapien
tagttgcctggaatagatggtcacg

SEQ ID NO: 745364 - DNA, 25 bp, Homo sapien
aatggtggttgcacgtagactgata

SEQ ID NO: 745365 - DNA, 25 bp, Homo sapien
ggtgaactgatcacaagtcaattct

SEQ ID NO: 745366 - DNA, 25 bp, Homo sapien
tcataaattcaaaggtgaactgatc

SEQ ID NO: 745367 - DNA, 25 bp, Homo sapien
cacgtagactgataatttggctttt

SEQ ID NO: 745368 - DNA, 25 bp, Homo sapien
taagaagcttgcctaagaccgggca

SEQ ID NO: 745369 - DNA, 25 bp, Homo sapien
cagcatgaacagagaaaacggtaca

SEQ ID NO: 745370 - DNA, 25 bp, Homo sapien
gaaactggcattctacaccactgct

SEQ ID NO: 745371 - DNA, 25 bp, Homo sapien
tagccacttaacagattgtgcgtgc

SEQ ID NO: 745372 - DNA, 25 bp, Homo sapien
tcagataaacagaaaagcttactgt

SEQ ID NO: 745373 - DNA, 25 bp, Homo sapien
aaagcttactgttctagtcaaatct

SEQ ID NO: 745374 - DNA, 25 bp, Homo sapien
agcttactgttctagtcaaatctgg

SEQ ID NO: 745375 - DNA, 25 bp, Homo sapien
tttcagataaacagaaaagcttact

SEQ ID NO: 745376 - DNA, 25 bp, Homo sapien
tcaggcttaaaacagcctgagggct

SEQ ID NO: 745377 - DNA, 25 bp, Homo sapien
tgagggctgaaagaccgtactgctg

SEQ ID NO: 745378 - DNA, 25 bp, Homo sapien
gggctgaaagaccgtactgctggtc

SEQ ID NO: 745379 - DNA, 25 bp, Homo sapien
agggctgaaagaccgtactgctggt

SEQ ID NO: 745380 - DNA, 25 bp, Homo sapien
aatttacattggataactcgcggaa

SEQ ID NO: 745381 - DNA, 25 bp, Homo sapien
ttacattggataactcgcggaatgc

SEQ ID NO: 745382 - DNA, 25 bp, Homo sapien
atttacattggataactcgcggaat

SEQ ID NO: 745383 - DNA, 25 bp, Homo sapien
tttacattggataactcgcggaatg

SEQ ID NO: 745384 - DNA, 25 bp, Homo sapien
gactggagatttgttggtatcaata

SEQ ID NO: 745385 - DNA, 25 bp, Homo sapien
aagactgactggagatttgttggta

SEQ ID NO: 745386 - DNA, 25 bp, Homo sapien
gactgactggagatttgttggtatc

SEQ ID NO: 745387 - DNA, 25 bp, Homo sapien
gaagagactaagaagactgactgga

SEQ ID NO: 745388 - DNA, 25 bp, Homo sapien
acccatgcttcaggacttggctcca

SEQ ID NO: 745389 - DNA, 25 bp, Homo sapien
gcactggtgccattaccacccaaag

SEQ ID NO: 745390 - DNA, 25 bp, Homo sapien
caccaacacagcagtgggggttcct

SEQ ID NO: 745391 - DNA, 25 bp, Homo sapien
cacatacccatgcttcaggacttgg

SEQ ID NO: 745392 - DNA, 25 bp, Homo sapien
gccatagaggacaaggtcccatcct

SEQ ID NO: 745393 - DNA, 25 bp, Homo sapien
ccatagaggacaaggtcccatcctg

SEQ ID NO: 745394 - DNA, 25 bp, Homo sapien
tgccatagaggacaaggtcccatcc

SEQ ID NO: 745395 - DNA, 25 bp, Homo sapien
ctgccatagaggacaaggtcccatc

SEQ ID NO: 745396 - DNA, 25 bp, Homo sapien
gaaaacccattacattcacctgatc

SEQ ID NO: 745397 - DNA, 25 bp, Homo sapien
caagaacagtaattcgagcacctcc

SEQ ID NO: 745398 - DNA, 25 bp, Homo sapien
tcacctgatcatcatctgactgact

SEQ ID NO: 745399 - DNA, 25 bp, Homo sapien
aagttttggaagcaagaacagtaat

SEQ ID NO: 745400 - DNA, 25 bp, Homo sapien
gattctcctgcttcaacctcccaag

SEQ ID NO: 745401 - DNA, 25 bp, Homo sapien
taggtgggattataggcaggtatca

SEQ ID NO: 745402 - DNA, 25 bp, Homo sapien
acctccgtctggcaggttcaagcga

SEQ ID NO: 745403 - DNA, 25 bp, Homo sapien
gattataggcaggtatcaccatgcc

SEQ ID NO: 745404 - DNA, 25 bp, Homo sapien
gtacagcaaaccctcattacacaag

SEQ ID NO: 745405 - DNA, 25 bp, Homo sapien
taattttcaggtactacacttagta

SEQ ID NO: 745406 - DNA, 25 bp, Homo sapien
taaaaaggtgtgatattttcagtaa

SEQ ID NO: 745407 - DNA, 25 bp, Homo sapien
aagctggtggccaatattcctagca

SEQ ID NO: 745408 - DNA, 25 bp, Homo sapien
agctctccgaaaggcccatctcaat

SEQ ID NO: 745409 - DNA, 25 bp, Homo sapien
aacaggggcctatgagctctccgaa

SEQ ID NO: 745410 - DNA, 25 bp, Homo sapien
caggggcctatgagctctccgaaag

SEQ ID NO: 745411 - DNA, 25 bp, Homo sapien
ctcaacaggggcctatgagctctcc

SEQ ID NO: 745412 - DNA, 25 bp, Homo sapien
ccaaaagcattagagagcttccacc

SEQ ID NO: 745413 - DNA, 25 bp, Homo sapien
ctgccaaaagcattagagagcttcc

SEQ ID NO: 745414 - DNA, 25 bp, Homo sapien
gaacacgatcctttacaactcccag

SEQ ID NO: 745415 - DNA, 25 bp, Homo sapien
gcttccaccaggttcgtaaggttga

SEQ ID NO: 745416 - DNA, 25 bp, Homo sapien
gcccttcttgtgaattcctatggag

SEQ ID NO: 745417 - DNA, 25 bp, Homo sapien
tgcagctccttgtgagctttgtgca

SEQ ID NO: 745418 - DNA, 25 bp, Homo sapien
agcccttcttgtgaattcctatgga

SEQ ID NO: 745419 - DNA, 25 bp, Homo sapien
agctccttgtgagctttgtgcagct

SEQ ID NO: 745420 - DNA, 25 bp, Homo sapien
tcaaacaggctagtcatcagctcct

SEQ ID NO: 745421 - DNA, 25 bp, Homo sapien
catgcctccgcattcagctgctttt

SEQ ID NO: 745422 - DNA, 25 bp, Homo sapien
cactgcctgctgtatgctggcttcc

SEQ ID NO: 745423 - DNA, 25 bp, Homo sapien
tgcagcatgtctatctttccccatg

SEQ ID NO: 745424 - DNA, 25 bp, Homo sapien
ttgcagcaaggaacaggtcttgtcc

SEQ ID NO: 745425 - DNA, 25 bp, Homo sapien
ccttgcagggcccacccttagtggg

SEQ ID NO: 745426 - DNA, 25 bp, Homo sapien
cactgctggtgctcttaggttggca

SEQ ID NO: 745427 - DNA, 25 bp, Homo sapien
cttgtccaaggtgagggcatgtctc

SEQ ID NO: 745428 - DNA, 25 bp, Homo sapien
ggcaggggtccatatcctcccacta

SEQ ID NO: 745429 - DNA, 25 bp, Homo sapien
gagccacaggcttgatagtgagtgt

SEQ ID NO: 745430 - DNA, 25 bp, Homo sapien
cacctgtggcaagagattctgcact

SEQ ID NO: 745431 - DNA, 25 bp, Homo sapien
gtggtgtcccccatagaggcctaca

SEQ ID NO: 745432 - DNA, 25 bp, Homo sapien
ttggcactgccacaattgaccacag

SEQ ID NO: 745433 - DNA, 25 bp, Homo sapien
gtggtagtggctcgcaaagtcacaa

SEQ ID NO: 745434 - DNA, 25 bp, Homo sapien
tatgggccaaattgctcaagacaca

SEQ ID NO: 745435 - DNA, 25 bp, Homo sapien
aaatcctgtcgcaccaggccttgtg

SEQ ID NO: 745436 - DNA, 25 bp, Homo sapien
gacctccccgcaagaagatacacta

SEQ ID NO: 745437 - DNA, 25 bp, Homo sapien
cattagggctgaccttgccacaggg

SEQ ID NO: 745438 - DNA, 25 bp, Homo sapien
ggagacttggaaagagagcctgata

SEQ ID NO: 745439 - DNA, 25 bp, Homo sapien
catttacgtaactcagtgcaagaca

SEQ ID NO: 745440 - DNA, 25 bp, Homo sapien
tatagatcccgaaaaagaacatgca

SEQ ID NO: 745441 - DNA, 25 bp, Homo sapien
tcttgaaggcgaagaataagctcat

SEQ ID NO: 745442 - DNA, 25 bp, Homo sapien
cattggttatgagccaaagatcttc

SEQ ID NO: 745443 - DNA, 25 bp, Homo sapien
tgttcactctgaatgcgatatcgtt

SEQ ID NO: 745444 - DNA, 25 bp, Homo sapien
aggttccatctaacaaggtgtccag

SEQ ID NO: 745445 - DNA, 25 bp, Homo sapien
tctttgaatcttgctagtagccggc

SEQ ID NO: 745446 - DNA, 25 bp, Homo sapien
gaatggcccgaaattgtacagctct

SEQ ID NO: 745447 - DNA, 25 bp, Homo sapien
tacagctctctcagataagagttct

SEQ ID NO: 745448 - DNA, 25 bp, Homo sapien
atcttggatattctggtacatgact

SEQ ID NO: 745449 - DNA, 25 bp, Homo sapien
tatcttggatattctggtacatgac

SEQ ID NO: 745450 - DNA, 25 bp, Homo sapien
ttatcttggatattctggtacatga

SEQ ID NO: 745451 - DNA, 25 bp, Homo sapien
tttaaatgcccttccaccattgtgt

SEQ ID NO: 745452 - DNA, 25 bp, Homo sapien
aaaagccatggttttgatcgtcttg

SEQ ID NO: 745453 - DNA, 25 bp, Homo sapien
tcaaccttgaggctaagcagaaaaa

SEQ ID NO: 745454 - DNA, 25 bp, Homo sapien
cattaatctaaaaggaatgggactt

SEQ ID NO: 745455 - DNA, 25 bp, Homo sapien
cttattgaacaatcaacacctcacc

SEQ ID NO: 745456 - DNA, 25 bp, Homo sapien
tattgaacaatcaacacctcaccct

SEQ ID NO: 745457 - DNA, 25 bp, Homo sapien
gaaacttattgaacaatcaacacct

SEQ ID NO: 745458 - DNA, 25 bp, Homo sapien
ctcatgaaacttattgaacaatcaa

SEQ ID NO: 745459 - DNA, 25 bp, Homo sapien
tcaagaagatgaagctggcttattc

SEQ ID NO: 745460 - DNA, 25 bp, Homo sapien
agaagatgaagctggcttattccta

SEQ ID NO: 745461 - DNA, 25 bp, Homo sapien
tgaagctggcttattcctatgctgt

SEQ ID NO: 745462 - DNA, 25 bp, Homo sapien
aagctggcttattcctatgctgttc

SEQ ID NO: 745463 - DNA, 25 bp, Homo sapien
caaatatacagtggtctgcatcaga

SEQ ID NO: 745464 - DNA, 25 bp, Homo sapien
caggagtgcacatagaacattgttc

SEQ ID NO: 745465 - DNA, 25 bp, Homo sapien
caagtgttatctggaggtaccaacc

SEQ ID NO: 745466 - DNA, 25 bp, Homo sapien
taaactatgattttctgggtggtgc

SEQ ID NO: 745467 - DNA, 25 bp, Homo sapien
ctcctaaatcagcaaagtgttccga

SEQ ID NO: 745468 - DNA, 25 bp, Homo sapien
ttgacctagtcaccccaagttctct

SEQ ID NO: 745469 - DNA, 25 bp, Homo sapien
gttctgatagaagggtcattgacct

SEQ ID NO: 745470 - DNA, 25 bp, Homo sapien
tgttccgatccctggcactcatgat

SEQ ID NO: 745471 - DNA, 25 bp, Homo sapien
tagtatctttaacatggctacagct

SEQ ID NO: 745472 - DNA, 25 bp, Homo sapien
tttaacatggctacagcttccaatt

SEQ ID NO: 745473 - DNA, 25 bp, Homo sapien
gtagtatctttaacatggctacagc

SEQ ID NO: 745474 - DNA, 25 bp, Homo sapien
tatctttaacatggctacagcttcc

SEQ ID NO: 745475 - DNA, 25 bp, Homo sapien
gtgttccaaagtgtgcttccacaga

SEQ ID NO: 745476 - DNA, 25 bp, Homo sapien
caaagctagcctaacaccaatgtca

SEQ ID NO: 745477 - DNA, 25 bp, Homo sapien
gaaaactgctacacatatgccaatg

SEQ ID NO: 745478 - DNA, 25 bp, Homo sapien
gcactcagtgtctaagtttgggaaa

SEQ ID NO: 745479 - DNA, 25 bp, Homo sapien
tatccactcgattattgctttcatg

SEQ ID NO: 745480 - DNA, 25 bp, Homo sapien
tgaagtgttcggaaaatgcacagat

SEQ ID NO: 745481 - DNA, 25 bp, Homo sapien
gcctatgttgatgattcttttactc

SEQ ID NO: 745482 - DNA, 25 bp, Homo sapien
gacaaatatatctacctgtataacc

SEQ ID NO: 745483 - DNA, 25 bp, Homo sapien
cataaaatcaacttcagtgacctgg

SEQ ID NO: 745484 - DNA, 25 bp, Homo sapien
acttcagtgacctggtggcagttca

SEQ ID NO: 745485 - DNA, 25 bp, Homo sapien
cctggcttcccataaaatcaacttc

SEQ ID NO: 745486 - DNA, 25 bp, Homo sapien
tgctctaccagctgtgcggaaccct

SEQ ID NO: 745487 - DNA, 25 bp, Homo sapien
ctctgtccaactgacatatcagttg

SEQ ID NO: 745488 - DNA, 25 bp, Homo sapien
taaaatggagaccccaaaggacatc

SEQ ID NO: 745489 - DNA, 25 bp, Homo sapien
tgacatatcagttgatgccaaagta

SEQ ID NO: 745490 - DNA, 25 bp, Homo sapien
tttcaagcacaatgtgttgatggcc

SEQ ID NO: 745491 - DNA, 25 bp, Homo sapien
tgtggaaggagtctgctatccccaa

SEQ ID NO: 745492 - DNA, 25 bp, Homo sapien
tatatcaatcggacagaagcatcgt

SEQ ID NO: 745493 - DNA, 25 bp, Homo sapien
acagctgttatggaagaatgacttc

SEQ ID NO: 745494 - DNA, 25 bp, Homo sapien
tcagtgagacagcagtccaagccac

SEQ ID NO: 745495 - DNA, 25 bp, Homo sapien
tttaacacaaatatcaggcaccagc

SEQ ID NO: 745496 - DNA, 25 bp, Homo sapien
cacaaatatcaggcaccagcccaca

SEQ ID NO: 745497 - DNA, 25 bp, Homo sapien
aacacaaatatcaggcaccagccca

SEQ ID NO: 745498 - DNA, 25 bp, Homo sapien
caaatatcaggcaccagcccacagg

SEQ ID NO: 745499 - DNA, 25 bp, Homo sapien
ggttttcctccactgcatctgctag

SEQ ID NO: 745500 - DNA, 25 bp, Homo sapien
gcttctgccacagcgcgatcagcag

SEQ ID NO: 745501 - DNA, 25 bp, Homo sapien
gaatgactggaacagattgccttgg

SEQ ID NO: 745502 - DNA, 25 bp, Homo sapien
cagcagaatcaccaaatgggtggca

SEQ ID NO: 745503 - DNA, 25 bp, Homo sapien
gagtgtcttcttgtagcggcagaaa

SEQ ID NO: 745504 - DNA, 25 bp, Homo sapien
ttccagaatagcaacctggtcagca

SEQ ID NO: 745505 - DNA, 25 bp, Homo sapien
tcttgtagcggcagaaatgccgctt

SEQ ID NO: 745506 - DNA, 25 bp, Homo sapien
aaatgccgcttccagaatagcaacc

SEQ ID NO: 745507 - DNA, 25 bp, Homo sapien
tcctaaagccgaaacttcaataatg

SEQ ID NO: 745508 - DNA, 25 bp, Homo sapien
acctgatagccatgtgatatcttcc

SEQ ID NO: 745509 - DNA, 25 bp, Homo sapien
cttagaaaacctgatagccatgtga

SEQ ID NO: 745510 - DNA, 25 bp, Homo sapien
acttcaataatgctggctgttccca

SEQ ID NO: 745511 - DNA, 25 bp, Homo sapien
ttagctaatctgaaggttactgctg

SEQ ID NO: 745512 - DNA, 25 bp, Homo sapien
tctagactgtcaaatgactgtttcc

SEQ ID NO: 745513 - DNA, 25 bp, Homo sapien
gctgtcatctagactgtcaaatgac

SEQ ID NO: 745514 - DNA, 25 bp, Homo sapien
gctaatctgaaggttactgctgtca

SEQ ID NO: 745515 - DNA, 25 bp, Homo sapien
tgaagtgacacttaaatttaagaag

SEQ ID NO: 745516 - DNA, 25 bp, Homo sapien
ctttgaagtgacacttaaatttaag

SEQ ID NO: 745517 - DNA, 25 bp, Homo sapien
tgacacttaaatttaagaaggttga

SEQ ID NO: 745518 - DNA, 25 bp, Homo sapien
ttgaagtgacacttaaatttaagaa

SEQ ID NO: 745519 - DNA, 25 bp, Homo sapien
tacccgacaaatactgactgctctg

SEQ ID NO: 745520 - DNA, 25 bp, Homo sapien
aagttactaagactgggccagatgt

SEQ ID NO: 745521 - DNA, 25 bp, Homo sapien
gccagatgtgatagttcacgccttg

SEQ ID NO: 745522 - DNA, 25 bp, Homo sapien
tccactgcatctattctttgaggtc

SEQ ID NO: 745523 - DNA, 25 bp, Homo sapien
ccaaaccatctaaattacattcaga

SEQ ID NO: 745524 - DNA, 25 bp, Homo sapien
tccaagttatttcaggtttgcatat

SEQ ID NO: 745525 - DNA, 25 bp, Homo sapien
ttttcacaactcagtgggataccca

SEQ ID NO: 745526 - DNA, 25 bp, Homo sapien
aacattctggtaagagagtcctttc

SEQ ID NO: 745527 - DNA, 25 bp, Homo sapien
aaaatccttcttcgctctggcttga

SEQ ID NO: 745528 - DNA, 25 bp, Homo sapien
gcaaaaaggctacttcggatgccaa

SEQ ID NO: 745529 - DNA, 25 bp, Homo sapien
gaagaagctgtgtacccatggttca

SEQ ID NO: 745530 - DNA, 25 bp, Homo sapien
tcacaagagaatgggaagccagaat

SEQ ID NO: 745531 - DNA, 25 bp, Homo sapien
tacagtacccaaagctagcaaaggc

SEQ ID NO: 745532 - DNA, 25 bp, Homo sapien
gattcgtccacaaagcaatgccata

SEQ ID NO: 745533 - DNA, 25 bp, Homo sapien
tagagtgtcctcgtgaaacatgcac

SEQ ID NO: 745534 - DNA, 25 bp, Homo sapien
gaaatgatagtgaagataacccagg

SEQ ID NO: 745535 - DNA, 25 bp, Homo sapien
actgtctctcccttaggcctctgca

SEQ ID NO: 745536 - DNA, 25 bp, Homo sapien
tgcacccacactgtctctcccttag

SEQ ID NO: 745537 - DNA, 25 bp, Homo sapien
cacactgtctctcccttaggcctct

SEQ ID NO: 745538 - DNA, 25 bp, Homo sapien
gcctctgcacatggccgtcgctcat

SEQ ID NO: 745539 - DNA, 25 bp, Homo sapien
ctaggctggtttggaattctggctc

SEQ ID NO: 745540 - DNA, 25 bp, Homo sapien
agtgggcacttgatgtattatacag

SEQ ID NO: 745541 - DNA, 25 bp, Homo sapien
ctggaatattccagactaggctggt

SEQ ID NO: 745542 - DNA, 25 bp, Homo sapien
caagtgttgggaacctgtgaagagt

SEQ ID NO: 745543 - DNA, 25 bp, Homo sapien
tcttcaacaggtgggaaatggcggc

SEQ ID NO: 745544 - DNA, 25 bp, Homo sapien
gagacggccacctttggataatcta

SEQ ID NO: 745545 - DNA, 25 bp, Homo sapien
gataatctatcgcagagcaaggtga

SEQ ID NO: 745546 - DNA, 25 bp, Homo sapien
gggctgctgcatcggtacttaggca

SEQ ID NO: 745547 - DNA, 25 bp, Homo sapien
gaagtacaattgtgattagggagca

SEQ ID NO: 745548 - DNA, 25 bp, Homo sapien
cacaggcacattcctctaatttagg

SEQ ID NO: 745549 - DNA, 25 bp, Homo sapien
gattagggagcatggacagagctct

SEQ ID NO: 745550 - DNA, 25 bp, Homo sapien
tcttggctatcatcactttaatatg

SEQ ID NO: 745551 - DNA, 25 bp, Homo sapien
tgatgtaatgctccttgctgctgcc

SEQ ID NO: 745552 - DNA, 25 bp, Homo sapien
gctccttgctgctgccacagagagg

SEQ ID NO: 745553 - DNA, 25 bp, Homo sapien
tgctccttgctgctgccacagagag

SEQ ID NO: 745554 - DNA, 25 bp, Homo sapien
tcattgatgtaatgctccttgctgc

SEQ ID NO: 745555 - DNA, 25 bp, Homo sapien
cactgtggttcttgctgtaggagga

SEQ ID NO: 745556 - DNA, 25 bp, Homo sapien
actgtggttcttgctgtaggaggaa

SEQ ID NO: 745557 - DNA, 25 bp, Homo sapien
gaggatgttgtcaccatggccttcg

SEQ ID NO: 745558 - DNA, 25 bp, Homo sapien
ggaggatgttgtcaccatggccttc

SEQ ID NO: 745559 - DNA, 25 bp, Homo sapien
gggaggatgttgtcaccatggcctt

SEQ ID NO: 745560 - DNA, 25 bp, Homo sapien
cagggaggatgttgtcaccatggcc

SEQ ID NO: 745561 - DNA, 25 bp, Homo sapien
ataaattcatcaggatgtacacaga

SEQ ID NO: 745562 - DNA, 25 bp, Homo sapien
tgtacataccaatatcagaagcagt

SEQ ID NO: 745563 - DNA, 25 bp, Homo sapien
catcaggatgtacacagatttagct

SEQ ID NO: 745564 - DNA, 25 bp, Homo sapien
ttgtgtacataccaatatcagaagc

SEQ ID NO: 745565 - DNA, 25 bp, Homo sapien
aagaggccacagtacaattggtaca

SEQ ID NO: 745566 - DNA, 25 bp, Homo sapien
taagaggccacagtacaattggtac

SEQ ID NO: 745567 - DNA, 25 bp, Homo sapien
gaggccacagtacaattggtacaat

SEQ ID NO: 745568 - DNA, 25 bp, Homo sapien
tttaagaggccacagtacaattggt

SEQ ID NO: 745569 - DNA, 25 bp, Homo sapien
gctgaccttggaaatcctcccttcg

SEQ ID NO: 745570 - DNA, 25 bp, Homo sapien
tggaaatcctcccttcgcttggctt

SEQ ID NO: 745571 - DNA, 25 bp, Homo sapien
ccttggaaatcctcccttcgcttgg

SEQ ID NO: 745572 - DNA, 25 bp, Homo sapien
tctgctgaccttggaaatcctccct

SEQ ID NO: 745573 - DNA, 25 bp, Homo sapien
cttgagttgaatttagtgccaggtc

SEQ ID NO: 745574 - DNA, 25 bp, Homo sapien
gcccaccaaggactccagcaaattg

SEQ ID NO: 745575 - DNA, 25 bp, Homo sapien
gttctgtgatgttctcagatgccca

SEQ ID NO: 745576 - DNA, 25 bp, Homo sapien
gcaaattgacacctctaaagtcatt

SEQ ID NO: 745577 - DNA, 25 bp, Homo sapien
gaacagtggagttcaagttatcaca

SEQ ID NO: 745578 - DNA, 25 bp, Homo sapien
ttatcacagtagtggaccaagctgc

SEQ ID NO: 745579 - DNA, 25 bp, Homo sapien
taggacccgaggcagatcatcagtt

SEQ ID NO: 745580 - DNA, 25 bp, Homo sapien
aagctgcacctagctgtaggacccg

SEQ ID NO: 745581 - DNA, 25 bp, Homo sapien
gaatataattaagggaatctggcat

SEQ ID NO: 745582 - DNA, 25 bp, Homo sapien
gctaggtggaatataattaagggaa

SEQ ID NO: 745583 - DNA, 25 bp, Homo sapien
ggtggaatataattaagggaatctg

SEQ ID NO: 745584 - DNA, 25 bp, Homo sapien
cactgctaggtggaatataattaag

SEQ ID NO: 745585 - DNA, 25 bp, Homo sapien
ggtaacaagacatcatccagagatg

SEQ ID NO: 745586 - DNA, 25 bp, Homo sapien
agcccacagcccaaggtaacaagac

SEQ ID NO: 745587 - DNA, 25 bp, Homo sapien
agaaggactgggcaccagaagcccc

SEQ ID NO: 745588 - DNA, 25 bp, Homo sapien
gcccaaggtaacaagacatcatcca

SEQ ID NO: 745589 - DNA, 25 bp, Homo sapien
gtctgactctgggattgtagtacaa

SEQ ID NO: 745590 - DNA, 25 bp, Homo sapien
ctgactctgggattgtagtacaacc

SEQ ID NO: 745591 - DNA, 25 bp, Homo sapien
gactctgggattgtagtacaaccac

SEQ ID NO: 745592 - DNA, 25 bp, Homo sapien
aggtctgactctgggattgtagtac

SEQ ID NO: 745593 - DNA, 25 bp, Homo sapien
gggtgtctctgcagtgagatgtctg

SEQ ID NO: 745594 - DNA, 25 bp, Homo sapien
tgagatgtctgtggttggtaaacag

SEQ ID NO: 745595 - DNA, 25 bp, Homo sapien
ggtaaacagttctgtagagtcttgt

SEQ ID NO: 745596 - DNA, 25 bp, Homo sapien
ttggtaaacagttctgtagagtctt

SEQ ID NO: 745597 - DNA, 25 bp, Homo sapien
taacgcttgtgaaggccatccagtc

SEQ ID NO: 745598 - DNA, 25 bp, Homo sapien
gctctctggtatgacaaaaactgac

SEQ ID NO: 745599 - DNA, 25 bp, Homo sapien
gcagctttgcggaatgctctctggt

SEQ ID NO: 745600 - DNA, 25 bp, Homo sapien
acacaaaggatcaaattcagctgca

SEQ ID NO: 745601 - DNA, 25 bp, Homo sapien
attccgagactccttggaggggtga

SEQ ID NO: 745602 - DNA, 25 bp, Homo sapien
tattccgagactccttggaggggtg

SEQ ID NO: 745603 - DNA, 25 bp, Homo sapien
tctcctagtgaagtaaaaagtccca

SEQ ID NO: 745604 - DNA, 25 bp, Homo sapien
gtttcagctgacttccccatggtgt

SEQ ID NO: 745605 - DNA, 25 bp, Homo sapien
aagctttgggaagcacctgcgccag

SEQ ID NO: 745606 - DNA, 25 bp, Homo sapien
ggttcacacaggttcggccttgaga

SEQ ID NO: 745607 - DNA, 25 bp, Homo sapien
aatgtagagcaatcactcataaatc

SEQ ID NO: 745608 - DNA, 25 bp, Homo sapien
gaagaaataatgtagagcaatcact

SEQ ID NO: 745609 - DNA, 25 bp, Homo sapien
aatcacattcaagtcttaccagaga

SEQ ID NO: 745610 - DNA, 25 bp, Homo sapien
cagagagtagcaaagtcttcaattc

SEQ ID NO: 745611 - DNA, 25 bp, Homo sapien
tgtaataaagtgtgaatcctttaat

SEQ ID NO: 745612 - DNA, 25 bp, Homo sapien
cttccacgtttagcttaatagaaca

SEQ ID NO: 745613 - DNA, 25 bp, Homo sapien
actgtaattcgaacttgaaattagc

SEQ ID NO: 745614 - DNA, 25 bp, Homo sapien
gttaatgtactagcttccttgaaaa

SEQ ID NO: 745615 - DNA, 25 bp, Homo sapien
gacatgaacaggcaagcattcaaca

SEQ ID NO: 745616 - DNA, 25 bp, Homo sapien
acatgaacaggcaagcattcaacaa

SEQ ID NO: 745617 - DNA, 25 bp, Homo sapien
gagaataagcagactttggattgtc

SEQ ID NO: 745618 - DNA, 25 bp, Homo sapien
gaagaagagtaaatcgcatgaacat

SEQ ID NO: 745619 - DNA, 25 bp, Homo sapien
caatgaggattttgatgataaactg

SEQ ID NO: 745620 - DNA, 25 bp, Homo sapien
tctaataatctagctaatgaagaag

SEQ ID NO: 745621 - DNA, 25 bp, Homo sapien
aatgacttgtctttgggctctctga

SEQ ID NO: 745622 - DNA, 25 bp, Homo sapien
ggagcactcttgaagttttcagttc

SEQ ID NO: 745623 - DNA, 25 bp, Homo sapien
tatgtcccacaattcttataggctg

SEQ ID NO: 745624 - DNA, 25 bp, Homo sapien
tcaaactgcgtaatctcaaatgact

SEQ ID NO: 745625 - DNA, 25 bp, Homo sapien
cttttgtgtacccactacaggtcta

SEQ ID NO: 745626 - DNA, 25 bp, Homo sapien
gggtcttgatatattgcccggcctg

SEQ ID NO: 745627 - DNA, 25 bp, Homo sapien
tctattttaagctgaaaagaacttc

SEQ ID NO: 745628 - DNA, 25 bp, Homo sapien
ttcatagtggtaagctttctttctc

SEQ ID NO: 745629 - DNA, 25 bp, Homo sapien
aggttaactagggagcccctcatgc

SEQ ID NO: 745630 - DNA, 25 bp, Homo sapien
ccaggttaactagggagcccctcat

SEQ ID NO: 745631 - DNA, 25 bp, Homo sapien
taactagggagcccctcatgctcat

SEQ ID NO: 745632 - DNA, 25 bp, Homo sapien
gttaactagggagcccctcatgctc

SEQ ID NO: 745633 - DNA, 25 bp, Homo sapien
cttatgagagcacctaccccgttct

SEQ ID NO: 745634 - DNA, 25 bp, Homo sapien
gaaaacccacttatgagagcaccta

SEQ ID NO: 745635 - DNA, 25 bp, Homo sapien
ctaaagaaaacccacttatgagagc

SEQ ID NO: 745636 - DNA, 25 bp, Homo sapien
taccccgttctccttatgccatatt

SEQ ID NO: 745637 - DNA, 25 bp, Homo sapien
ggcgagcgccaagtaacaccgagga

SEQ ID NO: 745638 - DNA, 25 bp, Homo sapien
aaagggtttatgattgtccaggcag

SEQ ID NO: 745639 - DNA, 25 bp, Homo sapien
tttatgattgtccaggcagggcgag

SEQ ID NO: 745640 - DNA, 25 bp, Homo sapien
tgagcaaaagggtttatgattgtcc

SEQ ID NO: 745641 - DNA, 25 bp, Homo sapien
acaaagcctttccattcacaccatg

SEQ ID NO: 745642 - DNA, 25 bp, Homo sapien
cattgaagagtgaacatttctcagg

SEQ ID NO: 745643 - DNA, 25 bp, Homo sapien
acagaagataatggcaaacaaagcc

SEQ ID NO: 745644 - DNA, 25 bp, Homo sapien
catagggtcggtggaacattgaaga

SEQ ID NO: 745645 - DNA, 25 bp, Homo sapien
gggcaaggtgggtgcgcgccaaggc

SEQ ID NO: 745646 - DNA, 25 bp, Homo sapien
gacagaggcccgggcaaggtgggtg

SEQ ID NO: 745647 - DNA, 25 bp, Homo sapien
cccgggcaaggtgggtgcgcgccaa

SEQ ID NO: 745648 - DNA, 25 bp, Homo sapien
agaggcccgggcaaggtgggtgcgc

SEQ ID NO: 745649 - DNA, 25 bp, Homo sapien
gaggacaatgcttcgggcacacaag

SEQ ID NO: 745650 - DNA, 25 bp, Homo sapien
tgggtcacaccaagctttagaaagg

SEQ ID NO: 745651 - DNA, 25 bp, Homo sapien
tagaaagggttagagtgccgaccac

SEQ ID NO: 745652 - DNA, 25 bp, Homo sapien
gttaatcctagtttgggccgcctga

SEQ ID NO: 745653 - DNA, 25 bp, Homo sapien
cctcctcccttttggcagagtgctt

SEQ ID NO: 745654 - DNA, 25 bp, Homo sapien
ctcctcccttttggcagagtgcttt

SEQ ID NO: 745655 - DNA, 25 bp, Homo sapien
tgtctgattgaccccgcttagcttt

SEQ ID NO: 745656 - DNA, 25 bp, Homo sapien
ggtattcttagggtccaggcctcga

SEQ ID NO: 745657 - DNA, 25 bp, Homo sapien
tgattgaccccgcttagcttttggg

SEQ ID NO: 745658 - DNA, 25 bp, Homo sapien
tagggtccaggcctcgatcctctgt

SEQ ID NO: 745659 - DNA, 25 bp, Homo sapien
gaaaaatgccttacactcgcctata

SEQ ID NO: 745660 - DNA, 25 bp, Homo sapien
tagctcacagactggaagagccgca

SEQ ID NO: 745661 - DNA, 25 bp, Homo sapien
ttgaaagggcactgagtagctcaca

SEQ ID NO: 745662 - DNA, 25 bp, Homo sapien
gactaagaaatccacctcaaggagg

SEQ ID NO: 745663 - DNA, 25 bp, Homo sapien
atcctcaagtgacccttgattgggt

SEQ ID NO: 745664 - DNA, 25 bp, Homo sapien
tcctcaagtgacccttgattgggtc

SEQ ID NO: 745665 - DNA, 25 bp, Homo sapien
gcagtcaaattggtactcagagaaa

SEQ ID NO: 745666 - DNA, 25 bp, Homo sapien
taacttgcacacaggaggaaatcaa

SEQ ID NO: 745667 - DNA, 25 bp, Homo sapien
tatggaaggtttgcaagcttgtgtc

SEQ ID NO: 745668 - DNA, 25 bp, Homo sapien
cacaaatcaacagatcaggttgggc

SEQ ID NO: 745669 - DNA, 25 bp, Homo sapien
gcttgaggcctcatttcgtggctct

SEQ ID NO: 745670 - DNA, 25 bp, Homo sapien
gaaaatagcagtatggatcctggaa

SEQ ID NO: 745671 - DNA, 25 bp, Homo sapien
cagtgagtccggagtagacaacata

SEQ ID NO: 745672 - DNA, 25 bp, Homo sapien
attattgttattccgggcttgaggc

SEQ ID NO: 745673 - DNA, 25 bp, Homo sapien
ttcctctgtagagatcaaagggctt

SEQ ID NO: 745674 - DNA, 25 bp, Homo sapien
tggcgcctttcctctgtagagatca

SEQ ID NO: 745675 - DNA, 25 bp, Homo sapien
cccataaagccactcttctgtatga

SEQ ID NO: 745676 - DNA, 25 bp, Homo sapien
tttctgcatttatatggcgcctttc

SEQ ID NO: 745677 - DNA, 25 bp, Homo sapien
aggtaggaccagagtccatccacag

SEQ ID NO: 745678 - DNA, 25 bp, Homo sapien
caaggtaggaccagagtccatccac

SEQ ID NO: 745679 - DNA, 25 bp, Homo sapien
gggccaaggtaggaccagagtccat

SEQ ID NO: 745680 - DNA, 25 bp, Homo sapien
gtccatccacagatccaggcaccat

SEQ ID NO: 745681 - DNA, 25 bp, Homo sapien
gaccaggaggcattgaatcaacaaa

SEQ ID NO: 745682 - DNA, 25 bp, Homo sapien
gcccaagcagagtatctgagtcggg

SEQ ID NO: 745683 - DNA, 25 bp, Homo sapien
ctcagtgccaagctgagagccagca

SEQ ID NO: 745684 - DNA, 25 bp, Homo sapien
gagcattcctcagtgccaagctgag

SEQ ID NO: 745685 - DNA, 25 bp, Homo sapien
agcaaacatctggtggctgtttgca

SEQ ID NO: 745686 - DNA, 25 bp, Homo sapien
ctgaggtctaagtgtgggcctctga

SEQ ID NO: 745687 - DNA, 25 bp, Homo sapien
ttctgaggtctaagtgtgggcctct

SEQ ID NO: 745688 - DNA, 25 bp, Homo sapien
atcttctgaggtctaagtgtgggcc

SEQ ID NO: 745689 - DNA, 25 bp, Homo sapien
ttttgctgatgaggcctttgaactc

SEQ ID NO: 745690 - DNA, 25 bp, Homo sapien
ggctgttccctctcagttcccggat

SEQ ID NO: 745691 - DNA, 25 bp, Homo sapien
ttacagagtcaacatgtagcggggt

SEQ ID NO: 745692 - DNA, 25 bp, Homo sapien
acagagtcaacatgtagcggggtga

SEQ ID NO: 745693 - DNA, 25 bp, Homo sapien
gagtgaggagataggactgaactct

SEQ ID NO: 745694 - DNA, 25 bp, Homo sapien
gccaataatggcattataataaagc

SEQ ID NO: 745695 - DNA, 25 bp, Homo sapien
gagataggactgaactctgacccat

SEQ ID NO: 745696 - DNA, 25 bp, Homo sapien
ccatgggttctgtatcccagagccc

SEQ ID NO: 745697 - DNA, 25 bp, Homo sapien
cagtcctaactctcagtcgtaagaa

SEQ ID NO: 745698 - DNA, 25 bp, Homo sapien
ggctgctggctcgagtttaggatct

SEQ ID NO: 745699 - DNA, 25 bp, Homo sapien
gctcgagtttaggatctgccgtttg

SEQ ID NO: 745700 - DNA, 25 bp, Homo sapien
agtcgtaagaagttagtgcactggg

SEQ ID NO: 745701 - DNA, 25 bp, Homo sapien
gcacagaagacgatgccttgtgtgt

SEQ ID NO: 745702 - DNA, 25 bp, Homo sapien
ccttgtgtgtagatttgctcgtagc

SEQ ID NO: 745703 - DNA, 25 bp, Homo sapien
cgtagctttgatttgcccaattctg

SEQ ID NO: 745704 - DNA, 25 bp, Homo sapien
gatttgctcgtagctttgatttgcc

SEQ ID NO: 745705 - DNA, 25 bp, Homo sapien
gttgttaaatcatcccagaagtcac

SEQ ID NO: 745706 - DNA, 25 bp, Homo sapien
ggtcatgttaccttgagcaaaccag

SEQ ID NO: 745707 - DNA, 25 bp, Homo sapien
caaaaatgcttgtaaggtgcgttaa

SEQ ID NO: 745708 - DNA, 25 bp, Homo sapien
gcaacaattggaggcagaaaatacc

SEQ ID NO: 745709 - DNA, 25 bp, Homo sapien
tgatgtctgtgtatcctggtatgac

SEQ ID NO: 745710 - DNA, 25 bp, Homo sapien
caacaatgtctactgggatgagcaa

SEQ ID NO: 745711 - DNA, 25 bp, Homo sapien
caaataatgataaaccgtctaggca

SEQ ID NO: 745712 - DNA, 25 bp, Homo sapien
gaaacaaaggacctgcactacgtaa

SEQ ID NO: 745713 - DNA, 25 bp, Homo sapien
ccaggaactggtcactattgaatag

SEQ ID NO: 745714 - DNA, 25 bp, Homo sapien
cagcttggaaggaaatccttaattt

SEQ ID NO: 745715 - DNA, 25 bp, Homo sapien
cccaaagtggattgagcactcatca

SEQ ID NO: 745716 - DNA, 25 bp, Homo sapien
taataatatatctaacccatagcac

SEQ ID NO: 745717 - DNA, 25 bp, Homo sapien
tcagagcagcggtcacacgcttttg

SEQ ID NO: 745718 - DNA, 25 bp, Homo sapien
cgcttttgtgacatggaaatttagc

SEQ ID NO: 745719 - DNA, 25 bp, Homo sapien
tcacacgcttttgtgacatggaaat

SEQ ID NO: 745720 - DNA, 25 bp, Homo sapien
tctggagcgcttcagagcagcggtc

SEQ ID NO: 745721 - DNA, 25 bp, Homo sapien
cctggcgtaatctttctcaatagaa

SEQ ID NO: 745722 - DNA, 25 bp, Homo sapien
gggacctggcgtaatctttctcaat

SEQ ID NO: 745723 - DNA, 25 bp, Homo sapien
tctttctcaatagaaagcttgtctt

SEQ ID NO: 745724 - DNA, 25 bp, Homo sapien
cgagtgggacctggcgtaatctttc

SEQ ID NO: 745725 - DNA, 25 bp, Homo sapien
tcttgatcatatatgaaggtcccag

SEQ ID NO: 745726 - DNA, 25 bp, Homo sapien
atatgaaggtcccagacagtgccat

SEQ ID NO: 745727 - DNA, 25 bp, Homo sapien
tcatatatgaaggtcccagacagtg

SEQ ID NO: 745728 - DNA, 25 bp, Homo sapien
tgatcatatatgaaggtcccagaca

SEQ ID NO: 745729 - DNA, 25 bp, Homo sapien
tgttaatcaccatagcttgccctct

SEQ ID NO: 745730 - DNA, 25 bp, Homo sapien
aaaatgggccggtgcaaacttagcg

SEQ ID NO: 745731 - DNA, 25 bp, Homo sapien
caggctctgcacattccgctgtgaa

SEQ ID NO: 745732 - DNA, 25 bp, Homo sapien
caaagcttgtatgagcagctgcaga

SEQ ID NO: 745733 - DNA, 25 bp, Homo sapien
ctttgggcctctttaatacatccca

SEQ ID NO: 745734 - DNA, 25 bp, Homo sapien
ggcctctttaatacatcccactctc

SEQ ID NO: 745735 - DNA, 25 bp, Homo sapien
gggcctctttaatacatcccactct

SEQ ID NO: 745736 - DNA, 25 bp, Homo sapien
ttgggcctctttaatacatcccact

SEQ ID NO: 745737 - DNA, 25 bp, Homo sapien
tcccacactgcaaacatgcaaggtt

SEQ ID NO: 745738 - DNA, 25 bp, Homo sapien
ctcccacagcgacaccagttgaaaa

SEQ ID NO: 745739 - DNA, 25 bp, Homo sapien
catgagttggtacattgagctgaca

SEQ ID NO: 745740 - DNA, 25 bp, Homo sapien
tgcaaggtttcgctcctggatggat

SEQ ID NO: 745741 - DNA, 25 bp, Homo sapien
tgctaatgtattctcagaagctgtc

SEQ ID NO: 745742 - DNA, 25 bp, Homo sapien
gctaatgtattctcagaagctgtcc

SEQ ID NO: 745743 - DNA, 25 bp, Homo sapien
ctaatgtattctcagaagctgtccc

SEQ ID NO: 745744 - DNA, 25 bp, Homo sapien
ctgctaatgtattctcagaagctgt

SEQ ID NO: 745745 - DNA, 25 bp, Homo sapien
agcacaacatgacaccacctctatt

SEQ ID NO: 745746 - DNA, 25 bp, Homo sapien
cttgataggactggacctgtcaagt

SEQ ID NO: 745747 - DNA, 25 bp, Homo sapien
gacctgtcaagtaggatctcagtgg

SEQ ID NO: 745748 - DNA, 25 bp, Homo sapien
gactggacctgtcaagtaggatctc

SEQ ID NO: 745749 - DNA, 25 bp, Homo sapien
ctgtcaagtaggatctcagtgggtc

SEQ ID NO: 745750 - DNA, 25 bp, Homo sapien
ggcagctggagagcggggcctggtt

SEQ ID NO: 745751 - DNA, 25 bp, Homo sapien
tggctcccagcaccggggatctata

SEQ ID NO: 745752 - DNA, 25 bp, Homo sapien
gcaccggggatctatagcggcttct

SEQ ID NO: 745753 - DNA, 25 bp, Homo sapien
tatagcggcttctgacagccgctgg

SEQ ID NO: 745754 - DNA, 25 bp, Homo sapien
gcggaatgagggggacgtgccggct

SEQ ID NO: 745755 - DNA, 25 bp, Homo sapien
ggaatgagggggacgtgccggctga

SEQ ID NO: 745756 - DNA, 25 bp, Homo sapien
ctggcggaatgagggggacgtgccg

SEQ ID NO: 745757 - DNA, 25 bp, Homo sapien
gggctggcggaatgagggggacgtg

SEQ ID NO: 745758 - DNA, 25 bp, Homo sapien
cacacccttagtcatggggattgag

SEQ ID NO: 745759 - DNA, 25 bp, Homo sapien
atcctcttccacacccttagtcatg

SEQ ID NO: 745760 - DNA, 25 bp, Homo sapien
acagccaggggattcttgtctctgg

SEQ ID NO: 745761 - DNA, 25 bp, Homo sapien
tcttccacacccttagtcatgggga

SEQ ID NO: 745762 - DNA, 25 bp, Homo sapien
ttccctgaggacaggtggcggcagc

SEQ ID NO: 745763 - DNA, 25 bp, Homo sapien
cttccctgaggacaggtggcggcag

SEQ ID NO: 745764 - DNA, 25 bp, Homo sapien
ccctgaggacaggtggcggcagccg

SEQ ID NO: 745765 - DNA, 25 bp, Homo sapien
ctgaggacaggtggcggcagccgct

SEQ ID NO: 745766 - DNA, 25 bp, Homo sapien
caggcccctaagaaaggctatctgg

SEQ ID NO: 745767 - DNA, 25 bp, Homo sapien
tggtgaaattccagccaagattttc

SEQ ID NO: 745768 - DNA, 25 bp, Homo sapien
tctgttttattcctgatggtgaaat

SEQ ID NO: 745769 - DNA, 25 bp, Homo sapien
acacaggcccctaagaaaggctatc

SEQ ID NO: 745770 - DNA, 25 bp, Homo sapien
tctggatggatcaccaacaagattc

SEQ ID NO: 745771 - DNA, 25 bp, Homo sapien
tggatggatcaccaacaagattcct

SEQ ID NO: 745772 - DNA, 25 bp, Homo sapien
agaacacacaacatctggatggatc

SEQ ID NO: 745773 - DNA, 25 bp, Homo sapien
cacaacatctggatggatcaccaac

SEQ ID NO: 745774 - DNA, 25 bp, Homo sapien
cagccacaggaaacttccgaaatgt

SEQ ID NO: 745775 - DNA, 25 bp, Homo sapien
aaagacaggtcacagcggtgctcca

SEQ ID NO: 745776 - DNA, 25 bp, Homo sapien
ctccctgtggcaacaggagcaagaa

SEQ ID NO: 745777 - DNA, 25 bp, Homo sapien
caggagctgtttgccctaagatgga

SEQ ID NO: 745778 - DNA, 25 bp, Homo sapien
aggcattccagacaactccccctgc

SEQ ID NO: 745779 - DNA, 25 bp, Homo sapien
cctggggcaaggtgcatgggaaact

SEQ ID NO: 745780 - DNA, 25 bp, Homo sapien
gaaactgagtctgcaccacccatgg

SEQ ID NO: 745781 - DNA, 25 bp, Homo sapien
aactgagtctgcaccacccatgggg

SEQ ID NO: 745782 - DNA, 25 bp, Homo sapien
ccatctctatggaaggaacccctac

SEQ ID NO: 745783 - DNA, 25 bp, Homo sapien
tcttcaccatctctatggaaggaac

SEQ ID NO: 745784 - DNA, 25 bp, Homo sapien
accatctctatggaaggaaccccta

SEQ ID NO: 745785 - DNA, 25 bp, Homo sapien
tcaccatctctatggaaggaacccc

SEQ ID NO: 745786 - DNA, 25 bp, Homo sapien
acgcagatctaactggatcccagag

SEQ ID NO: 745787 - DNA, 25 bp, Homo sapien
ccagggtatcatgtcacctttcaaa

SEQ ID NO: 745788 - DNA, 25 bp, Homo sapien
aattgaggaccctagaatcttccag

SEQ ID NO: 745789 - DNA, 25 bp, Homo sapien
gaaaaggcaaggacgaactgacaac

SEQ ID NO: 745790 - DNA, 25 bp, Homo sapien
gggccttacaaccttcaagaagcta

SEQ ID NO: 745791 - DNA, 25 bp, Homo sapien
ggaaaatattgattagccatctatg

SEQ ID NO: 745792 - DNA, 25 bp, Homo sapien
gtttatttgcaaggccccaggagaa

SEQ ID NO: 745793 - DNA, 25 bp, Homo sapien
cacctcattttagacaggagaccga

SEQ ID NO: 745794 - DNA, 25 bp, Homo sapien
agcctatatccaagggagccataga

SEQ ID NO: 745795 - DNA, 25 bp, Homo sapien
gggagccatagacacgtgcttttgc

SEQ ID NO: 745796 - DNA, 25 bp, Homo sapien
gcttttgctgatgagccacaattta

SEQ ID NO: 745797 - DNA, 25 bp, Homo sapien
ttgtgcggccgctccaggaccctaa

SEQ ID NO: 745798 - DNA, 25 bp, Homo sapien
cctctttgcgtgagcaaaaagcgtg

SEQ ID NO: 745799 - DNA, 25 bp, Homo sapien
aaaaagcgtgcatcccatttgctct

SEQ ID NO: 745800 - DNA, 25 bp, Homo sapien
cccctagtcctctttgcgtgagcaa

SEQ ID NO: 745801 - DNA, 25 bp, Homo sapien
tcaatttccaaagctacacccctag

SEQ ID NO: 745802 - DNA, 25 bp, Homo sapien
tagatgagctaatactgatacaata

SEQ ID NO: 745803 - DNA, 25 bp, Homo sapien
taatatcttgcgttagcatggtacg

SEQ ID NO: 745804 - DNA, 25 bp, Homo sapien
tacgtttgttataatagatgagcta

SEQ ID NO: 745805 - DNA, 25 bp, Homo sapien
tacggtgcactctttgtcttgtcca

SEQ ID NO: 745806 - DNA, 25 bp, Homo sapien
aatcccacctctactgccccaccag

SEQ ID NO: 745807 - DNA, 25 bp, Homo sapien
cacctctactgccccaccaggccat

SEQ ID NO: 745808 - DNA, 25 bp, Homo sapien
cccacctctactgccccaccaggcc

SEQ ID NO: 745809 - DNA, 25 bp, Homo sapien
atcccacctctactgccccaccagg

SEQ ID NO: 745810 - DNA, 25 bp, Homo sapien
ctctgagaaaggagcacacccttcc

SEQ ID NO: 745811 - DNA, 25 bp, Homo sapien
aggacgcccattcgcaggctagcct

SEQ ID NO: 745812 - DNA, 25 bp, Homo sapien
cactgccaaaccagagagctctggt

SEQ ID NO: 745813 - DNA, 25 bp, Homo sapien
ttccctgaggacgcccattcgcagg

SEQ ID NO: 745814 - DNA, 25 bp, Homo sapien
aaggccaggcattcatgctcctcaa

SEQ ID NO: 745815 - DNA, 25 bp, Homo sapien
ctagataccaaaggccaggcattca

SEQ ID NO: 745816 - DNA, 25 bp, Homo sapien
gtaccagcatcatccatgaatccag

SEQ ID NO: 745817 - DNA, 25 bp, Homo sapien
gctcctcaaagtcaaaccacgcctc

SEQ ID NO: 745818 - DNA, 25 bp, Homo sapien
caaggtgatggtggtaccacggtcc

SEQ ID NO: 745819 - DNA, 25 bp, Homo sapien
tgcccaacagctactgcagttgaat

SEQ ID NO: 745820 - DNA, 25 bp, Homo sapien
aagacagtctccaattgcccaacag

SEQ ID NO: 745821 - DNA, 25 bp, Homo sapien
tggtgaaagcaacaagcccctccca

SEQ ID NO: 745822 - DNA, 25 bp, Homo sapien
tgcctccgcccagactaggattcag

SEQ ID NO: 745823 - DNA, 25 bp, Homo sapien
ctcagagcctcaagatggcaccttc

SEQ ID NO: 745824 - DNA, 25 bp, Homo sapien
aaaagcatccaatcccttctcagag

SEQ ID NO: 745825 - DNA, 25 bp, Homo sapien
catggagaccctggaatctttggct

SEQ ID NO: 745826 - DNA, 25 bp, Homo sapien
cagttcctccagtgtggttaggagc

SEQ ID NO: 745827 - DNA, 25 bp, Homo sapien
taggagcaagaagtggcggatgagc

SEQ ID NO: 745828 - DNA, 25 bp, Homo sapien
caagaagtggcggatgagcgtaggg

SEQ ID NO: 745829 - DNA, 25 bp, Homo sapien
cctccagtgtggttaggagcaagaa

SEQ ID NO: 745830 - DNA, 25 bp, Homo sapien
gctttcatcagttggattcctgtcc

SEQ ID NO: 745831 - DNA, 25 bp, Homo sapien
cactgggctctcgaatagattttga

SEQ ID NO: 745832 - DNA, 25 bp, Homo sapien
gctctggatcccctagagtgaggct

SEQ ID NO: 745833 - DNA, 25 bp, Homo sapien
gaggccatgggacgcattcctccag

SEQ ID NO: 745834 - DNA, 25 bp, Homo sapien
tgtccttgcagcttcccctaaaatg

SEQ ID NO: 745835 - DNA, 25 bp, Homo sapien
ttgggtaactctgtggaccctcctg

SEQ ID NO: 745836 - DNA, 25 bp, Homo sapien
gaggcagctggatcaatgtccttct

SEQ ID NO: 745837 - DNA, 25 bp, Homo sapien
gaacatggtgagaagctaccccaca

SEQ ID NO: 745838 - DNA, 25 bp, Homo sapien
aacaaaaagagaatagtcagcaagc

SEQ ID NO: 745839 - DNA, 25 bp, Homo sapien
gttctacagatccattgcacaatat

SEQ ID NO: 745840 - DNA, 25 bp, Homo sapien
gcaagcaatccacgaagcatttata

SEQ ID NO: 745841 - DNA, 25 bp, Homo sapien
tgcaaatttgcctagagagtagatt

SEQ ID NO: 745842 - DNA, 25 bp, Homo sapien
catttgcctccagcacagcgggcag

SEQ ID NO: 745843 - DNA, 25 bp, Homo sapien
tcccatttgcctccagcacagcggg

SEQ ID NO: 745844 - DNA, 25 bp, Homo sapien
ccatttgcctccagcacagcgggca

SEQ ID NO: 745845 - DNA, 25 bp, Homo sapien
cctcccatttgcctccagcacagcg

SEQ ID NO: 745846 - DNA, 25 bp, Homo sapien
ctgcctgcagcaaccaccctgtgag

SEQ ID NO: 745847 - DNA, 25 bp, Homo sapien
tttaagactccagatactgtgctgc

SEQ ID NO: 745848 - DNA, 25 bp, Homo sapien
cgcagacctcctcggagcaacttta

SEQ ID NO: 745849 - DNA, 25 bp, Homo sapien
tggacgcatgtgttcatccttctct

SEQ ID NO: 745850 - DNA, 25 bp, Homo sapien
ctatggacgcatgtgttcatccttc

SEQ ID NO: 745851 - DNA, 25 bp, Homo sapien
catggtgcaagtttccagggagaaa

SEQ ID NO: 745852 - DNA, 25 bp, Homo sapien
tgttttcacagaagggccacactcc

SEQ ID NO: 745853 - DNA, 25 bp, Homo sapien
gaaaggccttgctactgtcaaatga

SEQ ID NO: 745854 - DNA, 25 bp, Homo sapien
tcttgatgacagcttggcacagtgg

SEQ ID NO: 745855 - DNA, 25 bp, Homo sapien
taaggctctgggcacaagaaattgg

SEQ ID NO: 745856 - DNA, 25 bp, Homo sapien
gctcatttgtcaaggcgaagtgcat

SEQ ID NO: 745857 - DNA, 25 bp, Homo sapien
tcaaggaactcatgtgggtctcagg

SEQ ID NO: 745858 - DNA, 25 bp, Homo sapien
gagacatctgacctaagcatttgag

SEQ ID NO: 745859 - DNA, 25 bp, Homo sapien
gcaagcaagtgcttagaactctcag

SEQ ID NO: 745860 - DNA, 25 bp, Homo sapien
tcaggttcaagaccatgggtaaagc

SEQ ID NO: 745861 - DNA, 25 bp, Homo sapien
tcactcactgtcttgaccaagggag

SEQ ID NO: 745862 - DNA, 25 bp, Homo sapien
cacagatccacaccatattagaggc

SEQ ID NO: 745863 - DNA, 25 bp, Homo sapien
gaaccataggattcccgggaataca

SEQ ID NO: 745864 - DNA, 25 bp, Homo sapien
ggaatcctccaaggaaccataggat

SEQ ID NO: 745865 - DNA, 25 bp, Homo sapien
aaaggatctccatggggaatcctcc

SEQ ID NO: 745866 - DNA, 25 bp, Homo sapien
ggattcccgggaatacagcctgaaa

SEQ ID NO: 745867 - DNA, 25 bp, Homo sapien
tgtaagcaaataagaaggcacccgt

SEQ ID NO: 745868 - DNA, 25 bp, Homo sapien
gagagaagcttcctctagaccacag

SEQ ID NO: 745869 - DNA, 25 bp, Homo sapien
ccacagtagccatggtctgtaagca

SEQ ID NO: 745870 - DNA, 25 bp, Homo sapien
aagaaagggctagatggtgacacaa

SEQ ID NO: 745871 - DNA, 25 bp, Homo sapien
tctaagcaaactgctgggtctctca

SEQ ID NO: 745872 - DNA, 25 bp, Homo sapien
gtagtgctccacagatacttgtatg

SEQ ID NO: 745873 - DNA, 25 bp, Homo sapien
cagatcctggtgagaattatcctaa

SEQ ID NO: 745874 - DNA, 25 bp, Homo sapien
cagtaaagcaccctgggttgaaatc

SEQ ID NO: 745875 - DNA, 25 bp, Homo sapien
caagtgatgtcagaagtttcaagcc

SEQ ID NO: 745876 - DNA, 25 bp, Homo sapien
tcaaggaaatcatgtgctagccact

SEQ ID NO: 745877 - DNA, 25 bp, Homo sapien
ttaagaaaaaggctccgctggcact

SEQ ID NO: 745878 - DNA, 25 bp, Homo sapien
gcacccctggatatgcagaagctgt

SEQ ID NO: 745879 - DNA, 25 bp, Homo sapien
tccagcggtttcgagttgttcccaa

SEQ ID NO: 745880 - DNA, 25 bp, Homo sapien
ggtctgctgaatggaaccaggaaag

SEQ ID NO: 745881 - DNA, 25 bp, Homo sapien
ccttcatggctctaattgggcagat

SEQ ID NO: 745882 - DNA, 25 bp, Homo sapien
aacctttcagtttgggaacgagatg

SEQ ID NO: 745883 - DNA, 25 bp, Homo sapien
gacccacagtaggtgccaccagtgc

SEQ ID NO: 745884 - DNA, 25 bp, Homo sapien
gccaccagtgcatatggcaagaggg

SEQ ID NO: 745885 - DNA, 25 bp, Homo sapien
catatacctgcccccaaggaagacc

SEQ ID NO: 745886 - DNA, 25 bp, Homo sapien
gtaggggccaccccaagagcctcca

SEQ ID NO: 745887 - DNA, 25 bp, Homo sapien
ccttcaagaagctctcaaaatcagg

SEQ ID NO: 745888 - DNA, 25 bp, Homo sapien
agaagctctcaaaatcagggccatc

SEQ ID NO: 745889 - DNA, 25 bp, Homo sapien
cttctctagccttcaagaagctctc

SEQ ID NO: 745890 - DNA, 25 bp, Homo sapien
caagaagctctcaaaatcagggcca

SEQ ID NO: 745891 - DNA, 25 bp, Homo sapien
taagaagacctcgacttgatcaagg

SEQ ID NO: 745892 - DNA, 25 bp, Homo sapien
gagacagggacctatccagagatgt

SEQ ID NO: 745893 - DNA, 25 bp, Homo sapien
tgttacagcacactgaagtcctgag

SEQ ID NO: 745894 - DNA, 25 bp, Homo sapien
gtcaggatgcgctgcaagtggacaa

SEQ ID NO: 745895 - DNA, 25 bp, Homo sapien
taatttgggaatatctcatccgttc

SEQ ID NO: 745896 - DNA, 25 bp, Homo sapien
ctaagtataagaagttcaggccaaa

SEQ ID NO: 745897 - DNA, 25 bp, Homo sapien
tcatccgttcaaatgccctgagaaa

SEQ ID NO: 745898 - DNA, 25 bp, Homo sapien
agtgtaacttggttagtcactacct

SEQ ID NO: 745899 - DNA, 25 bp, Homo sapien
gggcttgccccatcaaggcaatgca

SEQ ID NO: 745900 - DNA, 25 bp, Homo sapien
tgggtctccgcagacctctggctcg

SEQ ID NO: 745901 - DNA, 25 bp, Homo sapien
aacttctgtggggataactgggcag

SEQ ID NO: 745902 - DNA, 25 bp, Homo sapien
acatctgaagccagtgtactgggtc

SEQ ID NO: 745903 - DNA, 25 bp, Homo sapien
gaaactctccctggctagataagcc

SEQ ID NO: 745904 - DNA, 25 bp, Homo sapien
caggttgttaccatcagcagaaagc

SEQ ID NO: 745905 - DNA, 25 bp, Homo sapien
gaaaatggctactccctgcctgaga

SEQ ID NO: 745906 - DNA, 25 bp, Homo sapien
aaagaagcgtgtgcctgccatgggc

SEQ ID NO: 745907 - DNA, 25 bp, Homo sapien
ggtgatgtggacaatagctggctcc

SEQ ID NO: 745908 - DNA, 25 bp, Homo sapien
tgaagcctcctttcccgaaaatgtg

SEQ ID NO: 745909 - DNA, 25 bp, Homo sapien
aaatgagcccagatgtttcgggcca

SEQ ID NO: 745910 - DNA, 25 bp, Homo sapien
ggtacatcgggctgtcctgtgagaa

SEQ ID NO: 745911 - DNA, 25 bp, Homo sapien
ttctattgtcaaacaacaggtcccc

SEQ ID NO: 745912 - DNA, 25 bp, Homo sapien
gaaaatccagctctagagggagaag

SEQ ID NO: 745913 - DNA, 25 bp, Homo sapien
gggagtttctaacctgacttctgac

SEQ ID NO: 745914 - DNA, 25 bp, Homo sapien
ccatctggccaaactacatggactc

SEQ ID NO: 745915 - DNA, 25 bp, Homo sapien
caggtggtcttacccaagttggact

SEQ ID NO: 745916 - DNA, 25 bp, Homo sapien
ggttgtgcaccgcatgactccagag

SEQ ID NO: 745917 - DNA, 25 bp, Homo sapien
aaacacccactttgagcaggctaag

SEQ ID NO: 745918 - DNA, 25 bp, Homo sapien
ttgggcccagcttgaaaacctccta

SEQ ID NO: 745919 - DNA, 25 bp, Homo sapien
tttcgtcctatcagctgtcagaggg

SEQ ID NO: 745920 - DNA, 25 bp, Homo sapien
gggttgggatctgacttccatagga

SEQ ID NO: 745921 - DNA, 25 bp, Homo sapien
cactggagtttcgtcctatcagctg

SEQ ID NO: 745922 - DNA, 25 bp, Homo sapien
ttcctgccactggagtttcgtccta

SEQ ID NO: 745923 - DNA, 25 bp, Homo sapien
atgcacacgggccaccaatgtgggc

SEQ ID NO: 745924 - DNA, 25 bp, Homo sapien
ctgcatgcacacgggccaccaatgt

SEQ ID NO: 745925 - DNA, 25 bp, Homo sapien
gcacacgggccaccaatgtgggctc

SEQ ID NO: 745926 - DNA, 25 bp, Homo sapien
acacgggccaccaatgtgggctcca

SEQ ID NO: 745927 - DNA, 25 bp, Homo sapien
gctctgcatgaagaagggcaattgg

SEQ ID NO: 745928 - DNA, 25 bp, Homo sapien
gtgcttggaaaccaaaactcaaaga

SEQ ID NO: 745929 - DNA, 25 bp, Homo sapien
ttggaagcacaaccaactgctcagg

SEQ ID NO: 745930 - DNA, 25 bp, Homo sapien
tccaagactgttggagcccggacag

SEQ ID NO: 745931 - DNA, 25 bp, Homo sapien
cttcataggccagttcatcaaatat

SEQ ID NO: 745932 - DNA, 25 bp, Homo sapien
tcataggccagttcatcaaatataa

SEQ ID NO: 745933 - DNA, 25 bp, Homo sapien
aggccagttcatcaaatataataca

SEQ ID NO: 745934 - DNA, 25 bp, Homo sapien
ataggccagttcatcaaatataata

SEQ ID NO: 745935 - DNA, 25 bp, Homo sapien
tctctgtatcctgcagcccatatta

SEQ ID NO: 745936 - DNA, 25 bp, Homo sapien
gatcgacttgcggattgcttgcaag

SEQ ID NO: 745937 - DNA, 25 bp, Homo sapien
tgcaaaaagtcctcctggccagtag

SEQ ID NO: 745938 - DNA, 25 bp, Homo sapien
agggtgctgcatctttcactgttag

SEQ ID NO: 745939 - DNA, 25 bp, Homo sapien
ccgccagtaggtgttactttagcca

SEQ ID NO: 745940 - DNA, 25 bp, Homo sapien
tctgaaggcagagttgggcccctaa

SEQ ID NO: 745941 - DNA, 25 bp, Homo sapien
taagacaggatccagagctcgcctg

SEQ ID NO: 745942 - DNA, 25 bp, Homo sapien
tcaacagcggaaagcctgctctgag

SEQ ID NO: 745943 - DNA, 25 bp, Homo sapien
aaggatttatcatcccgtattggat

SEQ ID NO: 745944 - DNA, 25 bp, Homo sapien
atcatcccgtattggataatttttc

SEQ ID NO: 745945 - DNA, 25 bp, Homo sapien
tcaaggatttatcatcccgtattgg

SEQ ID NO: 745946 - DNA, 25 bp, Homo sapien
gctcatcaaggatttatcatcccgt

SEQ ID NO: 745947 - DNA, 25 bp, Homo sapien
caggatccatggttggtggacaatc

SEQ ID NO: 745948 - DNA, 25 bp, Homo sapien
gacaatcaattgtggtcagaactga

SEQ ID NO: 745949 - DNA, 25 bp, Homo sapien
cctacaggatccatggttggtggac

SEQ ID NO: 745950 - DNA, 25 bp, Homo sapien
catggttggtggacaatcaattgtg

SEQ ID NO: 745951 - DNA, 25 bp, Homo sapien
ttagaatctctaatgggttgaacat

SEQ ID NO: 745952 - DNA, 25 bp, Homo sapien
tggcttcccctgaaattagaatctc

SEQ ID NO: 745953 - DNA, 25 bp, Homo sapien
tccactctggggcataaacagtggt

SEQ ID NO: 745954 - DNA, 25 bp, Homo sapien
aacagtggtctgaccctttgcccac

SEQ ID NO: 745955 - DNA, 25 bp, Homo sapien
ggatggcagcaagcaaagagagctt

SEQ ID NO: 745956 - DNA, 25 bp, Homo sapien
atggatggcagcaagcaaagagagc

SEQ ID NO: 745957 - DNA, 25 bp, Homo sapien
gagagcttgtgcaggaaaactccac

SEQ ID NO: 745958 - DNA, 25 bp, Homo sapien
aagagagcttgtgcaggaaaactcc

SEQ ID NO: 745959 - DNA, 25 bp, Homo sapien
ttagaggagtagtgctgacaagaag

SEQ ID NO: 745960 - DNA, 25 bp, Homo sapien
attcactctgcacttagaggagtag

SEQ ID NO: 745961 - DNA, 25 bp, Homo sapien
tctgcacttagaggagtagtgctga

SEQ ID NO: 745962 - DNA, 25 bp, Homo sapien
cacttagaggagtagtgctgacaag

SEQ ID NO: 745963 - DNA, 25 bp, Homo sapien
catttacaaccatctacattcggtc

SEQ ID NO: 745964 - DNA, 25 bp, Homo sapien
tttgaagaagccctgagcgaccttt

SEQ ID NO: 745965 - DNA, 25 bp, Homo sapien
ccataatgatttcgtgtatttgtcc

SEQ ID NO: 745966 - DNA, 25 bp, Homo sapien
ggagaattttatccctaagccctgc

SEQ ID NO: 745967 - DNA, 25 bp, Homo sapien
ttggaaccacttggtgagtctatat

SEQ ID NO: 745968 - DNA, 25 bp, Homo sapien
aggcaaggttcttggaaccacttgg

SEQ ID NO: 745969 - DNA, 25 bp, Homo sapien
cacttggtgagtctatatcgaatat

SEQ ID NO: 745970 - DNA, 25 bp, Homo sapien
ggtgagtctatatcgaatattttac

SEQ ID NO: 745971 - DNA, 25 bp, Homo sapien
atccagagtgatccaacagcattcc

SEQ ID NO: 745972 - DNA, 25 bp, Homo sapien
aaaggcaaatccagagtgatccaac

SEQ ID NO: 745973 - DNA, 25 bp, Homo sapien
acttgtcgggtagaatatagagaaa

SEQ ID NO: 745974 - DNA, 25 bp, Homo sapien
actgctgaatataaacttgtcgggt

SEQ ID NO: 745975 - DNA, 25 bp, Homo sapien
tgtaggagaacaatactgccacata

SEQ ID NO: 745976 - DNA, 25 bp, Homo sapien
cagcaacaatagcaaacttacttgt

SEQ ID NO: 745977 - DNA, 25 bp, Homo sapien
taaacagcaataagacgaagacttc

SEQ ID NO: 745978 - DNA, 25 bp, Homo sapien
tcttttggtgtaattgaaagcatct

SEQ ID NO: 745979 - DNA, 25 bp, Homo sapien
gcgttttttatcaggactccaggga

SEQ ID NO: 745980 - DNA, 25 bp, Homo sapien
gagtgatcgtacttttgaaccgcag

SEQ ID NO: 745981 - DNA, 25 bp, Homo sapien
catgtgaccggtcctgggaacctaa

SEQ ID NO: 745982 - DNA, 25 bp, Homo sapien
gaagccctcacatcagaacgatctg

SEQ ID NO: 745983 - DNA, 25 bp, Homo sapien
gagagtgggaaggtgctaggaactg

SEQ ID NO: 745984 - DNA, 25 bp, Homo sapien
ggagagtgggaaggtgctaggaact

SEQ ID NO: 745985 - DNA, 25 bp, Homo sapien
aggagagtgggaaggtgctaggaac

SEQ ID NO: 745986 - DNA, 25 bp, Homo sapien
ggaggagagtgggaaggtgctagga

SEQ ID NO: 745987 - DNA, 25 bp, Homo sapien
tcatcaaggcagtaagacggtagaa

SEQ ID NO: 745988 - DNA, 25 bp, Homo sapien
caatggcatcatttgggctttcatc

SEQ ID NO: 745989 - DNA, 25 bp, Homo sapien
tgcagacagtaactctactggtcca

SEQ ID NO: 745990 - DNA, 25 bp, Homo sapien
ccacaaataatcaaactactgggct

SEQ ID NO: 745991 - DNA, 25 bp, Homo sapien
tgcttccgaaagagcagccttttct

SEQ ID NO: 745992 - DNA, 25 bp, Homo sapien
cttcttggcaaatgggccctgcttc

SEQ ID NO: 745993 - DNA, 25 bp, Homo sapien
cacccctcaagtgatagtctatcag

SEQ ID NO: 745994 - DNA, 25 bp, Homo sapien
tctgccaccagcgatttcccttgct

SEQ ID NO: 745995 - DNA, 25 bp, Homo sapien
ctccgtcgctctctcagcccggctg

SEQ ID NO: 745996 - DNA, 25 bp, Homo sapien
cagctcggagctccgtcgctctctc

SEQ ID NO: 745997 - DNA, 25 bp, Homo sapien
tcggagctccgtcgctctctcagcc

SEQ ID NO: 745998 - DNA, 25 bp, Homo sapien
ggctgcgccctctcgcctctgcagc

SEQ ID NO: 745999 - DNA, 25 bp, Homo sapien
cagagccgagaaggcgcgtctccac

SEQ ID NO: 746000 - DNA, 25 bp, Homo sapien
tagctgcagcgggaactctctcggc

SEQ ID NO: 746001 - DNA, 25 bp, Homo sapien
actgcgcgatagctgcagcgggaac

SEQ ID NO: 746002 - DNA, 25 bp, Homo sapien
gccgcaacagacgtgggctcaccgg

SEQ ID NO: 746003 - DNA, 25 bp, Homo sapien
cagccggagatagactgagaggagc

SEQ ID NO: 746004 - DNA, 25 bp, Homo sapien
tgcggcgctgccgactgcgcactgc

SEQ ID NO: 746005 - DNA, 25 bp, Homo sapien
caggctcctccgatgcggctttttt

SEQ ID NO: 746006 - DNA, 25 bp, Homo sapien
tttttcctgagggagttgcttgcag

SEQ ID NO: 746007 - DNA, 25 bp, Homo sapien
ctctcagccggcgtgtcgggagacc

SEQ ID NO: 746008 - DNA, 25 bp, Homo sapien
tgccgcagctcacagtcgaaaaggg

SEQ ID NO: 746009 - DNA, 25 bp, Homo sapien
tcacctggagggaatccctggcgac

SEQ ID NO: 746010 - DNA, 25 bp, Homo sapien
gaatccctggcgactgcaggtcccg

SEQ ID NO: 746011 - DNA, 25 bp, Homo sapien
ccccgagcaattgagtagcagcaag

SEQ ID NO: 746012 - DNA, 25 bp, Homo sapien
gagcggcggcagtaacgctcagcca

SEQ ID NO: 746013 - DNA, 25 bp, Homo sapien
cacgtaatcccaggcgagcggcggc

SEQ ID NO: 746014 - DNA, 25 bp, Homo sapien
gcagcaagacgcagcacgtaatccc

SEQ ID NO: 746015 - DNA, 25 bp, Homo sapien
gacacacattatgcaagggttgtct

SEQ ID NO: 746016 - DNA, 25 bp, Homo sapien
gcagacacacattatgcaagggttg

SEQ ID NO: 746017 - DNA, 25 bp, Homo sapien
cacattatgcaagggttgtctgtga

SEQ ID NO: 746018 - DNA, 25 bp, Homo sapien
cacacattatgcaagggttgtctgt

SEQ ID NO: 746019 - DNA, 25 bp, Homo sapien
gccaagtgtcattctctattaagga

SEQ ID NO: 746020 - DNA, 25 bp, Homo sapien
atggaattgtcctttccgactcatg

SEQ ID NO: 746021 - DNA, 25 bp, Homo sapien
gacagccaagtgtcattctctatta

SEQ ID NO: 746022 - DNA, 25 bp, Homo sapien
ctctattaaggatggaattgtcctt

SEQ ID NO: 746023 - DNA, 25 bp, Homo sapien
tatgagcaaagggtccatttctaca

SEQ ID NO: 746024 - DNA, 25 bp, Homo sapien
ggagctccttgttcagcgatattag

SEQ ID NO: 746025 - DNA, 25 bp, Homo sapien
ttgattggctccaagacaggtggag

SEQ ID NO: 746026 - DNA, 25 bp, Homo sapien
cagaatctaagatgctgggagctcc

SEQ ID NO: 746027 - DNA, 25 bp, Homo sapien
tctctctgtttcacacgtgcataca

SEQ ID NO: 746028 - DNA, 25 bp, Homo sapien
tgtatttgtgcatatactgagtgca

SEQ ID NO: 746029 - DNA, 25 bp, Homo sapien
gaacacatctggtctactttatatc

SEQ ID NO: 746030 - DNA, 25 bp, Homo sapien
tactgagtgcagtacctctctgaac

SEQ ID NO: 746031 - DNA, 25 bp, Homo sapien
caatcctatacattaactgttacct

SEQ ID NO: 746032 - DNA, 25 bp, Homo sapien
aaaggtaattggtcacatcaccttc

SEQ ID NO: 746033 - DNA, 25 bp, Homo sapien
catcaccttctaaacagagtaaaaa

SEQ ID NO: 746034 - DNA, 25 bp, Homo sapien
gccgacacaatcctatacattaact

SEQ ID NO: 746035 - DNA, 25 bp, Homo sapien
agaaggaactgacttcacatcccag

SEQ ID NO: 746036 - DNA, 25 bp, Homo sapien
gaaactctggtttagcaaagaagga

SEQ ID NO: 746037 - DNA, 25 bp, Homo sapien
tggtttagcaaagaaggaactgact

SEQ ID NO: 746038 - DNA, 25 bp, Homo sapien
agagggaaactctggtttagcaaag

SEQ ID NO: 746039 - DNA, 25 bp, Homo sapien
cagtttgggttgcaagatcaaaacc

SEQ ID NO: 746040 - DNA, 25 bp, Homo sapien
tataactgcctccatagagagccta

SEQ ID NO: 746041 - DNA, 25 bp, Homo sapien
taacccaagactgtctgatgtctgg

SEQ ID NO: 746042 - DNA, 25 bp, Homo sapien
tttgccaaaatgttatgatgccagc

SEQ ID NO: 746043 - DNA, 25 bp, Homo sapien
caagccccaggccaaactttatgtg

SEQ ID NO: 746044 - DNA, 25 bp, Homo sapien
tcacatagcaactctgtgaactaga

SEQ ID NO: 746045 - DNA, 25 bp, Homo sapien
ccatatgaggaaataagaattttta

SEQ ID NO: 746046 - DNA, 25 bp, Homo sapien
caggccaaactttatgtgctacatc

SEQ ID NO: 746047 - DNA, 25 bp, Homo sapien
tgtaagttgccagccgaaggaaata

SEQ ID NO: 746048 - DNA, 25 bp, Homo sapien
caactctgcgttgtttgcgtctggt

SEQ ID NO: 746049 - DNA, 25 bp, Homo sapien
aagggacctgctggctgtaagttgc

SEQ ID NO: 746050 - DNA, 25 bp, Homo sapien
tgcagctggcgcactaggtcagtca

SEQ ID NO: 746051 - DNA, 25 bp, Homo sapien
attttgcaacaagtcatatcccatg

SEQ ID NO: 746052 - DNA, 25 bp, Homo sapien
gcaacaagtcatatcccatgaagaa

SEQ ID NO: 746053 - DNA, 25 bp, Homo sapien
cccccgattattttgcaacaagtca

SEQ ID NO: 746054 - DNA, 25 bp, Homo sapien
gtcatatcccatgaagaaattcact

SEQ ID NO: 746055 - DNA, 25 bp, Homo sapien
taacgaaagcagagcaactccaggg

SEQ ID NO: 746056 - DNA, 25 bp, Homo sapien
tgtctgagatctgccacgagatggc

SEQ ID NO: 746057 - DNA, 25 bp, Homo sapien
tacagagaagatagcagagcaccgc

SEQ ID NO: 746058 - DNA, 25 bp, Homo sapien
aaccatgggaaggtctgcagacacc

SEQ ID NO: 746059 - DNA, 25 bp, Homo sapien
cccaatgatcgccatcttacagagg

SEQ ID NO: 746060 - DNA, 25 bp, Homo sapien
attcccaatgatcgccatcttacag

SEQ ID NO: 746061 - DNA, 25 bp, Homo sapien
aaaattcccaatgatcgccatctta

SEQ ID NO: 746062 - DNA, 25 bp, Homo sapien
catcttacagaggagggatcaatgt

SEQ ID NO: 746063 - DNA, 25 bp, Homo sapien
ggagtagtctttggaatcccaggcc

SEQ ID NO: 746064 - DNA, 25 bp, Homo sapien
gactcaagttcagggctcattccgt

SEQ ID NO: 746065 - DNA, 25 bp, Homo sapien
tccttaattgagtccagcagctaca

SEQ ID NO: 746066 - DNA, 25 bp, Homo sapien
aacggtcacattggtacagaactgc

SEQ ID NO: 746067 - DNA, 25 bp, Homo sapien
cagtctcgggacagcacggggcact

SEQ ID NO: 746068 - DNA, 25 bp, Homo sapien
actgttcacaacaggctcccctctg

SEQ ID NO: 746069 - DNA, 25 bp, Homo sapien
tctcgggacagcacggggcacttct

SEQ ID NO: 746070 - DNA, 25 bp, Homo sapien
ggccagggcacagtctcgggacagc

SEQ ID NO: 746071 - DNA, 25 bp, Homo sapien
tcggcagggcatgctacctctgaag

SEQ ID NO: 746072 - DNA, 25 bp, Homo sapien
cacttgggaagaatcaccccttgcc

SEQ ID NO: 746073 - DNA, 25 bp, Homo sapien
gatcaagaaagggtccatgtctccc

SEQ ID NO: 746074 - DNA, 25 bp, Homo sapien
tgggcactcctaagctggtggcagc

SEQ ID NO: 746075 - DNA, 25 bp, Homo sapien
ggagtactacctgctgctgttttga

SEQ ID NO: 746076 - DNA, 25 bp, Homo sapien
tggctccaagaaagtaccaccagga

SEQ ID NO: 746077 - DNA, 25 bp, Homo sapien
aaagtaccaccaggagtactacctg

SEQ ID NO: 746078 - DNA, 25 bp, Homo sapien
caccaggagtactacctgctgctgt

SEQ ID NO: 746079 - DNA, 25 bp, Homo sapien
ccacttctcaccaaaccaccaaaag

SEQ ID NO: 746080 - DNA, 25 bp, Homo sapien
ttaaatggagcttgataccacttct

SEQ ID NO: 746081 - DNA, 25 bp, Homo sapien
cacttctcaccaaaccaccaaaagg

SEQ ID NO: 746082 - DNA, 25 bp, Homo sapien
tgcagagaagctgtacttagaattc

SEQ ID NO: 746083 - DNA, 25 bp, Homo sapien
gcagagaagctgtacttagaattct

SEQ ID NO: 746084 - DNA, 25 bp, Homo sapien
tgtactccctccattgcagagaagc

SEQ ID NO: 746085 - DNA, 25 bp, Homo sapien
caaacttgtactccctccattgcag

SEQ ID NO: 746086 - DNA, 25 bp, Homo sapien
cacagcctaggtcttgagtcagttt

SEQ ID NO: 746087 - DNA, 25 bp, Homo sapien
gactaagcgaatctgaaactaccca

SEQ ID NO: 746088 - DNA, 25 bp, Homo sapien
gattgttgatgagctactgtcttcc

SEQ ID NO: 746089 - DNA, 25 bp, Homo sapien
tgtcttccctagataaaaccttcca

SEQ ID NO: 746090 - DNA, 25 bp, Homo sapien
tctctaagcccagattagcgatcaa

SEQ ID NO: 746091 - DNA, 25 bp, Homo sapien
gattagcgatcaaaggaaccaccat

SEQ ID NO: 746092 - DNA, 25 bp, Homo sapien
taagcccagattagcgatcaaagga

SEQ ID NO: 746093 - DNA, 25 bp, Homo sapien
gcccagattagcgatcaaaggaacc

SEQ ID NO: 746094 - DNA, 25 bp, Homo sapien
tgaaggagctgttataggtatttcc

SEQ ID NO: 746095 - DNA, 25 bp, Homo sapien
ctggcactggcgtagaacacaaggc

SEQ ID NO: 746096 - DNA, 25 bp, Homo sapien
cgtagaacacaaggctcagccgggc

SEQ ID NO: 746097 - DNA, 25 bp, Homo sapien
gttataggtatttccttcataggtg

SEQ ID NO: 746098 - DNA, 25 bp, Homo sapien
ttttacaatgaacaacacagcgcac

SEQ ID NO: 746099 - DNA, 25 bp, Homo sapien
aatgaacaacacagcgcaccccaga

SEQ ID NO: 746100 - DNA, 25 bp, Homo sapien
ttacaatgaacaacacagcgcaccc

SEQ ID NO: 746101 - DNA, 25 bp, Homo sapien
ccccagactctgtgacaacgccctc

SEQ ID NO: 746102 - DNA, 25 bp, Homo sapien
tgtcctcttcaaccagtggacaaga

SEQ ID NO: 746103 - DNA, 25 bp, Homo sapien
tcctcttcaaccagtggacaagatt

SEQ ID NO: 746104 - DNA, 25 bp, Homo sapien
gtcctcttcaaccagtggacaagat

SEQ ID NO: 746105 - DNA, 25 bp, Homo sapien
cctcttcaaccagtggacaagattg

SEQ ID NO: 746106 - DNA, 25 bp, Homo sapien
cttcttgatactgcacaccctcaaa

SEQ ID NO: 746107 - DNA, 25 bp, Homo sapien
tcctccccttcttgatactgcacac

SEQ ID NO: 746108 - DNA, 25 bp, Homo sapien
ccttcttgatactgcacaccctcaa

SEQ ID NO: 746109 - DNA, 25 bp, Homo sapien
ttcttgatactgcacaccctcaaac

SEQ ID NO: 746110 - DNA, 25 bp, Homo sapien
tgagtacaagaagtgctttgcccaa

SEQ ID NO: 746111 - DNA, 25 bp, Homo sapien
ctgggaacatccacagcaggactta

SEQ ID NO: 746112 - DNA, 25 bp, Homo sapien
ccctgggaacatccacagcaggact

SEQ ID NO: 746113 - DNA, 25 bp, Homo sapien
tcttggtgagtacaagaagtgcttt

SEQ ID NO: 746114 - DNA, 25 bp, Homo sapien
gatcagccctcagaccaggttctca

SEQ ID NO: 746115 - DNA, 25 bp, Homo sapien
gatggttgtactaactccctactgt

SEQ ID NO: 746116 - DNA, 25 bp, Homo sapien
gcagctggttaagactagattcccc

SEQ ID NO: 746117 - DNA, 25 bp, Homo sapien
tatttggctgcactaaagaaccaag

SEQ ID NO: 746118 - DNA, 25 bp, Homo sapien
caaggaggctcagctgcgtgacctt

SEQ ID NO: 746119 - DNA, 25 bp, Homo sapien
agctgcaggaactttccattctctt

SEQ ID NO: 746120 - DNA, 25 bp, Homo sapien
tccaaggaggctcagctgcgtgacc

SEQ ID NO: 746121 - DNA, 25 bp, Homo sapien
tctccaaggaggctcagctgcgtga

SEQ ID NO: 746122 - DNA, 25 bp, Homo sapien
cagaacaagcttccctaaagaagga

SEQ ID NO: 746123 - DNA, 25 bp, Homo sapien
tagatgtttggagcgtaaagtatgg

SEQ ID NO: 746124 - DNA, 25 bp, Homo sapien
ggtgctataaaagagtttcccaaca

SEQ ID NO: 746125 - DNA, 25 bp, Homo sapien
gtttcccaacaggaagtgatctggt

SEQ ID NO: 746126 - DNA, 25 bp, Homo sapien
catagaagggcccattagagggttt

SEQ ID NO: 746127 - DNA, 25 bp, Homo sapien
aagctcaactgtcaaaccactggcc

SEQ ID NO: 746128 - DNA, 25 bp, Homo sapien
caaattgcatcgcaaagaggaagag

SEQ ID NO: 746129 - DNA, 25 bp, Homo sapien
ggttcctggtgactaagcaaagctc

SEQ ID NO: 746130 - DNA, 25 bp, Homo sapien
tagcattatctcctgagggttcctg

SEQ ID NO: 746131 - DNA, 25 bp, Homo sapien
gatacagcattattcctcgtccttg

SEQ ID NO: 746132 - DNA, 25 bp, Homo sapien
gcaaaggcctatttacattctggtt

SEQ ID NO: 746133 - DNA, 25 bp, Homo sapien
tactcatcttccatagacagcggta

SEQ ID NO: 746134 - DNA, 25 bp, Homo sapien
tccagtgatacctttagaggaagcc

SEQ ID NO: 746135 - DNA, 25 bp, Homo sapien
actctggatgcattcttgggatttt

SEQ ID NO: 746136 - DNA, 25 bp, Homo sapien
aactctggatgcattcttgggattt

SEQ ID NO: 746137 - DNA, 25 bp, Homo sapien
ttcccaactgctgcatgacattcaa

SEQ ID NO: 746138 - DNA, 25 bp, Homo sapien
tttcccaactgctgcatgacattca

SEQ ID NO: 746139 - DNA, 25 bp, Homo sapien
gattgagcacaatgttctgcgtgca

SEQ ID NO: 746140 - DNA, 25 bp, Homo sapien
tctgcgtgcaagttttagatctttg

SEQ ID NO: 746141 - DNA, 25 bp, Homo sapien
ccagaagggattgagcacaatgttc

SEQ ID NO: 746142 - DNA, 25 bp, Homo sapien
tctttgggtcttttcagcaatgtct

SEQ ID NO: 746143 - DNA, 25 bp, Homo sapien
ccttttgaaggtgacgataagattc

SEQ ID NO: 746144 - DNA, 25 bp, Homo sapien
tgaaaaatgggacacagccgactcg

SEQ ID NO: 746145 - DNA, 25 bp, Homo sapien
tctctcaacttttgcgaggcatgca

SEQ ID NO: 746146 - DNA, 25 bp, Homo sapien
aagtccaccttcagtgctagatatc

SEQ ID NO: 746147 - DNA, 25 bp, Homo sapien
tgtgacatcatcacttcaaggagga

SEQ ID NO: 746148 - DNA, 25 bp, Homo sapien
gcaacatcaggcagcttgccatgaa

SEQ ID NO: 746149 - DNA, 25 bp, Homo sapien
tgccatgaaggctgcatgagctcat

SEQ ID NO: 746150 - DNA, 25 bp, Homo sapien
tcaaggaggagaccaaactcagcaa

SEQ ID NO: 746151 - DNA, 25 bp, Homo sapien
tggtgtatccacattcctctgacat

SEQ ID NO: 746152 - DNA, 25 bp, Homo sapien
tccttctttcctctggtgtatccac

SEQ ID NO: 746153 - DNA, 25 bp, Homo sapien
gtgtatccacattcctctgacattt

SEQ ID NO: 746154 - DNA, 25 bp, Homo sapien
ccctttcaaatccttctttcctctg

SEQ ID NO: 746155 - DNA, 25 bp, Homo sapien
gatcctgctatgagcagggtcaaca

SEQ ID NO: 746156 - DNA, 25 bp, Homo sapien
tctgggttccccaagatgtatgacg

SEQ ID NO: 746157 - DNA, 25 bp, Homo sapien
gactagccttagaggacacactgtg

SEQ ID NO: 746158 - DNA, 25 bp, Homo sapien
cactgtgacagcagtggatcctgct

SEQ ID NO: 746159 - DNA, 25 bp, Homo sapien
cagagggactggatcccgaattatc

SEQ ID NO: 746160 - DNA, 25 bp, Homo sapien
agagggactggatcccgaattatcc

SEQ ID NO: 746161 - DNA, 25 bp, Homo sapien
gagggactggatcccgaattatcct

SEQ ID NO: 746162 - DNA, 25 bp, Homo sapien
agggactggatcccgaattatcctt

SEQ ID NO: 746163 - DNA, 25 bp, Homo sapien
tttgcagactgcgatgccatatagg

SEQ ID NO: 746164 - DNA, 25 bp, Homo sapien
tatatttcactggccaagagaacgg

SEQ ID NO: 746165 - DNA, 25 bp, Homo sapien
tttcctctgaaaagttaggagaaca

SEQ ID NO: 746166 - DNA, 25 bp, Homo sapien
gctatgaaaggtacagagctgtggt

SEQ ID NO: 746167 - DNA, 25 bp, Homo sapien
tgtccttgggtttagccagtcaaag

SEQ ID NO: 746168 - DNA, 25 bp, Homo sapien
gcgatattgtttgaggcaaattcca

SEQ ID NO: 746169 - DNA, 25 bp, Homo sapien
caagctcagatgagatctctaaaca

SEQ ID NO: 746170 - DNA, 25 bp, Homo sapien
tcactgatgaaagactgcgatattg

SEQ ID NO: 746171 - DNA, 25 bp, Homo sapien
ttagaatgaggaagataagcccacc

SEQ ID NO: 746172 - DNA, 25 bp, Homo sapien
cagcacactgtggccgcctgttgtt

SEQ ID NO: 746173 - DNA, 25 bp, Homo sapien
ctgtggccgcctgttgtttctgttt

SEQ ID NO: 746174 - DNA, 25 bp, Homo sapien
cactgtggccgcctgttgtttctgt

SEQ ID NO: 746175 - DNA, 25 bp, Homo sapien
cacactgtggccgcctgttgtttct

SEQ ID NO: 746176 - DNA, 25 bp, Homo sapien
catctgatgcatttcctcacacctt

SEQ ID NO: 746177 - DNA, 25 bp, Homo sapien
tctggccatagcagagttagcctca

SEQ ID NO: 746178 - DNA, 25 bp, Homo sapien
tgtggaccccacaagggaaagattc

SEQ ID NO: 746179 - DNA, 25 bp, Homo sapien
cccacaagggaaagattccatctga

SEQ ID NO: 746180 - DNA, 25 bp, Homo sapien
gggacaggagagaatgggacagact

SEQ ID NO: 746181 - DNA, 25 bp, Homo sapien
actgtcctgggggtatgtgactaag

SEQ ID NO: 746182 - DNA, 25 bp, Homo sapien
acaggagagaatgggacagacttct

SEQ ID NO: 746183 - DNA, 25 bp, Homo sapien
gtatgtgactaaggtgctggggaca

SEQ ID NO: 746184 - DNA, 25 bp, Homo sapien
gcatcagaaagctgtgcacagcctg

SEQ ID NO: 746185 - DNA, 25 bp, Homo sapien
acagcctggatcacatagattttgc

SEQ ID NO: 746186 - DNA, 25 bp, Homo sapien
gcctggatcacatagattttgccca

SEQ ID NO: 746187 - DNA, 25 bp, Homo sapien
cctgaggcatcagaaagctgtgcac

SEQ ID NO: 746188 - DNA, 25 bp, Homo sapien
tcataaacatcacttcgaaagaggc

SEQ ID NO: 746189 - DNA, 25 bp, Homo sapien
cagctcccaaaagggaggtcaaaca

SEQ ID NO: 746190 - DNA, 25 bp, Homo sapien
tgcagttatcgtacagaaatgagga

SEQ ID NO: 746191 - DNA, 25 bp, Homo sapien
acatcacttcgaaagaggcagctcc

SEQ ID NO: 746192 - DNA, 25 bp, Homo sapien
cactgaaggtgaagagtttgtatca

SEQ ID NO: 746193 - DNA, 25 bp, Homo sapien
ccactgaaggtgaagagtttgtatc

SEQ ID NO: 746194 - DNA, 25 bp, Homo sapien
actgaaggtgaagagtttgtatcat

SEQ ID NO: 746195 - DNA, 25 bp, Homo sapien
tctttgcaacctgcactaatagtgc

SEQ ID NO: 746196 - DNA, 25 bp, Homo sapien
ggaacttaacgtaaaggcatgatat

SEQ ID NO: 746197 - DNA, 25 bp, Homo sapien
tgatttcacgttccagagactgatg

SEQ ID NO: 746198 - DNA, 25 bp, Homo sapien
tccacggctttatgccaccttttgg

SEQ ID NO: 746199 - DNA, 25 bp, Homo sapien
aaatttgcatactttgatgtcttct

SEQ ID NO: 746200 - DNA, 25 bp, Homo sapien
caaatttgcatactttgatgtcttc

SEQ ID NO: 746201 - DNA, 25 bp, Homo sapien
taattgtcagcgtagtaatacagga

SEQ ID NO: 746202 - DNA, 25 bp, Homo sapien
taatacaggagttcccatgtgcttg

SEQ ID NO: 746203 - DNA, 25 bp, Homo sapien
cccatgtgcttgtctcatgacatac

SEQ ID NO: 746204 - DNA, 25 bp, Homo sapien
tcagcgtagtaatacaggagttccc

SEQ ID NO: 746205 - DNA, 25 bp, Homo sapien
aaaagcttcaagctgtatagatcca

SEQ ID NO: 746206 - DNA, 25 bp, Homo sapien
gcatctccaacgagatgaggtactc

SEQ ID NO: 746207 - DNA, 25 bp, Homo sapien
tggctcaactacatacactattaac

SEQ ID NO: 746208 - DNA, 25 bp, Homo sapien
agatccatcaggatcttgacaagga

SEQ ID NO: 746209 - DNA, 25 bp, Homo sapien
ggtatcatgaggtgacagcttcggt

SEQ ID NO: 746210 - DNA, 25 bp, Homo sapien
ggtagagagtgatttgactccttcc

SEQ ID NO: 746211 - DNA, 25 bp, Homo sapien
cacaactgacttgtttatgtgggtc

SEQ ID NO: 746212 - DNA, 25 bp, Homo sapien
tatgtgggtcttgattctcatgggt

SEQ ID NO: 746213 - DNA, 25 bp, Homo sapien
aacagactgtaacctctccatggag

SEQ ID NO: 746214 - DNA, 25 bp, Homo sapien
ggcaacagactgtaacctctccatg

SEQ ID NO: 746215 - DNA, 25 bp, Homo sapien
tgaggcaacagactgtaacctctcc

SEQ ID NO: 746216 - DNA, 25 bp, Homo sapien
aggagttgaggcaacagactgtaac

SEQ ID NO: 746217 - DNA, 25 bp, Homo sapien
ctactgatgggaatgcactgcttat

SEQ ID NO: 746218 - DNA, 25 bp, Homo sapien
tattgcgacactccgtcctgccttt

SEQ ID NO: 746219 - DNA, 25 bp, Homo sapien
ttgatagaggaccacatctctccat

SEQ ID NO: 746220 - DNA, 25 bp, Homo sapien
cacaagcacagatggtacaattgat

SEQ ID NO: 746221 - DNA, 25 bp, Homo sapien
cagtgcaaataggacagcatccttt

SEQ ID NO: 746222 - DNA, 25 bp, Homo sapien
gtgcaaataggacagcatccttttc

SEQ ID NO: 746223 - DNA, 25 bp, Homo sapien
tttcagtgcaaataggacagcatcc

SEQ ID NO: 746224 - DNA, 25 bp, Homo sapien
ttcagtgcaaataggacagcatcct

SEQ ID NO: 746225 - DNA, 25 bp, Homo sapien
acttgagcagaaagacggagatgcc

SEQ ID NO: 746226 - DNA, 25 bp, Homo sapien
tcttaaggtccttcgccagtctcca

SEQ ID NO: 746227 - DNA, 25 bp, Homo sapien
gatgccacagtagaagaaagcctgg

SEQ ID NO: 746228 - DNA, 25 bp, Homo sapien
tacaagttgtaaagccctccagacc

SEQ ID NO: 746229 - DNA, 25 bp, Homo sapien
cttgtttgaatatgcgtaagtcaga

SEQ ID NO: 746230 - DNA, 25 bp, Homo sapien
atgccagcttatgactggtggcaca

SEQ ID NO: 746231 - DNA, 25 bp, Homo sapien
ttgcatagtcctgtaggtcaaatca

SEQ ID NO: 746232 - DNA, 25 bp, Homo sapien
gaaagatgccagcttatgactggtg

SEQ ID NO: 746233 - DNA, 25 bp, Homo sapien
cgaccgtcaaaagtgttgtagtggg

SEQ ID NO: 746234 - DNA, 25 bp, Homo sapien
ctgaaagttaaatgtccgaccgtca

SEQ ID NO: 746235 - DNA, 25 bp, Homo sapien
gggatctccaaacaccgtgcaaacg

SEQ ID NO: 746236 - DNA, 25 bp, Homo sapien
gtagtggggatctccaaacaccgtg

SEQ ID NO: 746237 - DNA, 25 bp, Homo sapien
gggaggagcagtcttttgtcaaaac

SEQ ID NO: 746238 - DNA, 25 bp, Homo sapien
aggggaggagcagtcttttgtcaaa

SEQ ID NO: 746239 - DNA, 25 bp, Homo sapien
ggagcagtcttttgtcaaaacgtac

SEQ ID NO: 746240 - DNA, 25 bp, Homo sapien
gaggagcagtcttttgtcaaaacgt

SEQ ID NO: 746241 - DNA, 25 bp, Homo sapien
tgtccggcgggcgtcgttcttcacc

SEQ ID NO: 746242 - DNA, 25 bp, Homo sapien
tggtggtcactttcaagaggtagcc

SEQ ID NO: 746243 - DNA, 25 bp, Homo sapien
ccgttccagcgcacggtgaggtgct

SEQ ID NO: 746244 - DNA, 25 bp, Homo sapien
tccaccgacttggtccacgagaagg

SEQ ID NO: 746245 - DNA, 25 bp, Homo sapien
gcaagtcccgcagttggaacctggc

SEQ ID NO: 746246 - DNA, 25 bp, Homo sapien
tcctgagtgctctaaccgagcagtg

SEQ ID NO: 746247 - DNA, 25 bp, Homo sapien
tttgctcggaggaggaaccacatct

SEQ ID NO: 746248 - DNA, 25 bp, Homo sapien
taaccgagcagtgctgctgaacggg

SEQ ID NO: 746249 - DNA, 25 bp, Homo sapien
gacaagagtttgagcctcgtggacc

SEQ ID NO: 746250 - DNA, 25 bp, Homo sapien
gcatcgacggcctaaaagagcaaca

SEQ ID NO: 746251 - DNA, 25 bp, Homo sapien
tgaaactgcacatagctagctgagc

SEQ ID NO: 746252 - DNA, 25 bp, Homo sapien
tgaggactccgctgcaaagacttgg

SEQ ID NO: 746253 - DNA, 25 bp, Homo sapien
actcccaggatttgagcttttggca

SEQ ID NO: 746254 - DNA, 25 bp, Homo sapien
gatgggcccggagctttaccttgac

SEQ ID NO: 746255 - DNA, 25 bp, Homo sapien
ccacagtcgagtggcaggtctgaaa

SEQ ID NO: 746256 - DNA, 25 bp, Homo sapien
cattgtagttgccacaaagaccaca

SEQ ID NO: 746257 - DNA, 25 bp, Homo sapien
gcaaagtctcacgttaagatccctc

SEQ ID NO: 746258 - DNA, 25 bp, Homo sapien
gatccctcagtttcactagacaaga

SEQ ID NO: 746259 - DNA, 25 bp, Homo sapien
gttaagatccctcagtttcactaga

SEQ ID NO: 746260 - DNA, 25 bp, Homo sapien
tcacgttaagatccctcagtttcac

SEQ ID NO: 746261 - DNA, 25 bp, Homo sapien
ccacattgcacctggtttattttct

SEQ ID NO: 746262 - DNA, 25 bp, Homo sapien
caaatataatctaaacaacttcacg

SEQ ID NO: 746263 - DNA, 25 bp, Homo sapien
ggtgggtacacagtacactgcctct

SEQ ID NO: 746264 - DNA, 25 bp, Homo sapien
ttttccaggtgggtacacagtacac

SEQ ID NO: 746265 - DNA, 25 bp, Homo sapien
cctacatttgaatccaaatataatc

SEQ ID NO: 746266 - DNA, 25 bp, Homo sapien
gtatttcataggcacaaggaataaa

SEQ ID NO: 746267 - DNA, 25 bp, Homo sapien
tgctggtatttcataggcacaagga

SEQ ID NO: 746268 - DNA, 25 bp, Homo sapien
ctggcctctcgttgtgccccaggct

SEQ ID NO: 746269 - DNA, 25 bp, Homo sapien
caaaggcatagctcatctcctggcc

SEQ ID NO: 746270 - DNA, 25 bp, Homo sapien
tccaagatgtgagtcgagttaggga

SEQ ID NO: 746271 - DNA, 25 bp, Homo sapien
atttcttccaagatgtgagtcgagt

SEQ ID NO: 746272 - DNA, 25 bp, Homo sapien
tgagtcgagttagggaaaaagccca

SEQ ID NO: 746273 - DNA, 25 bp, Homo sapien
tcttccaagatgtgagtcgagttag

SEQ ID NO: 746274 - DNA, 25 bp, Homo sapien
gtggatgcgagtatttcataagaag

SEQ ID NO: 746275 - DNA, 25 bp, Homo sapien
tcagggcagaaacatctgtggatgc

SEQ ID NO: 746276 - DNA, 25 bp, Homo sapien
acatctgtggatgcgagtatttcat

SEQ ID NO: 746277 - DNA, 25 bp, Homo sapien
cagaaacatctgtggatgcgagtat

SEQ ID NO: 746278 - DNA, 25 bp, Homo sapien
tgggatttacaagggaaacctcatc

SEQ ID NO: 746279 - DNA, 25 bp, Homo sapien
catgagaacctgttgggtgaagata

SEQ ID NO: 746280 - DNA, 25 bp, Homo sapien
ctgggatttacaagggaaacctcat

SEQ ID NO: 746281 - DNA, 25 bp, Homo sapien
tcatccagcctcatgagaacctgtt

SEQ ID NO: 746282 - DNA, 25 bp, Homo sapien
ggtgatgtgacgaggagaaagagac

SEQ ID NO: 746283 - DNA, 25 bp, Homo sapien
ctggtgatgtgacgaggagaaagag

SEQ ID NO: 746284 - DNA, 25 bp, Homo sapien
gtgatgtgacgaggagaaagagaca

SEQ ID NO: 746285 - DNA, 25 bp, Homo sapien
tgatgtgacgaggagaaagagacac

SEQ ID NO: 746286 - DNA, 25 bp, Homo sapien
ggcacccaggtggatatcctgattt

SEQ ID NO: 746287 - DNA, 25 bp, Homo sapien
agcactcaggcctgttcgcacaaga

SEQ ID NO: 746288 - DNA, 25 bp, Homo sapien
aagggcgacctgataccacagcact

SEQ ID NO: 746289 - DNA, 25 bp, Homo sapien
ggcctgttcgcacaagagccactag

SEQ ID NO: 746290 - DNA, 25 bp, Homo sapien
acagagtcctggatggccgtcaaac

SEQ ID NO: 746291 - DNA, 25 bp, Homo sapien
gatactgctcccaaaacagcacaga

SEQ ID NO: 746292 - DNA, 25 bp, Homo sapien
gtgtcatggacagtgcagcaaccct

SEQ ID NO: 746293 - DNA, 25 bp, Homo sapien
gttgattgggaaacggacagagtcc

SEQ ID NO: 746294 - DNA, 25 bp, Homo sapien
aatgcatctaccttcatgctcgcag

SEQ ID NO: 746295 - DNA, 25 bp, Homo sapien
catctaccttcatgctcgcagatgg

SEQ ID NO: 746296 - DNA, 25 bp, Homo sapien
ttcatgctcgcagatgggccatttg

SEQ ID NO: 746297 - DNA, 25 bp, Homo sapien
taccttcatgctcgcagatgggcca

SEQ ID NO: 746298 - DNA, 25 bp, Homo sapien
gtatctgcttaatatccttcctccc

SEQ ID NO: 746299 - DNA, 25 bp, Homo sapien
ggtggctacatggaccagcatgaca

SEQ ID NO: 746300 - DNA, 25 bp, Homo sapien
aaaatgggtggctacatggaccagc

SEQ ID NO: 746301 - DNA, 25 bp, Homo sapien
caggaagtcggtcacagttcccaag

SEQ ID NO: 746302 - DNA, 25 bp, Homo sapien
gaccagcatgacaggaagtcggtca

SEQ ID NO: 746303 - DNA, 25 bp, Homo sapien
caggccctcaggtgcttttagtttt

SEQ ID NO: 746304 - DNA, 25 bp, Homo sapien
tcaggtgcttttagttttcttccaa

SEQ ID NO: 746305 - DNA, 25 bp, Homo sapien
ctcaggtgcttttagttttcttcca

SEQ ID NO: 746306 - DNA, 25 bp, Homo sapien
ttgacaggccctcaggtgcttttag

SEQ ID NO: 746307 - DNA, 25 bp, Homo sapien
ttgagaggggacataaagcattgag

SEQ ID NO: 746308 - DNA, 25 bp, Homo sapien
gcattgagataggagaatgtataga

SEQ ID NO: 746309 - DNA, 25 bp, Homo sapien
tgtatagagcctgaaaaagggtctc

SEQ ID NO: 746310 - DNA, 25 bp, Homo sapien
tgcgggaacaccagtagaaattgag

SEQ ID NO: 746311 - DNA, 25 bp, Homo sapien
tagatataaaagttatctccggttc

SEQ ID NO: 746312 - DNA, 25 bp, Homo sapien
cagcctgtttctctggttgtagata

SEQ ID NO: 746313 - DNA, 25 bp, Homo sapien
ggagtccagcctgtttctctggttg

SEQ ID NO: 746314 - DNA, 25 bp, Homo sapien
tatctccggttcagctttcccaaat

SEQ ID NO: 746315 - DNA, 25 bp, Homo sapien
tattgagctgtcaatgaaagggcag

SEQ ID NO: 746316 - DNA, 25 bp, Homo sapien
attccaggttctatggctgcctggg

SEQ ID NO: 746317 - DNA, 25 bp, Homo sapien
ccatgctggcttaaatattgttgag

SEQ ID NO: 746318 - DNA, 25 bp, Homo sapien
gacagaacagcaagtccaggcattt

SEQ ID NO: 746319 - DNA, 25 bp, Homo sapien
cacatatctaggaaggtcatagaag

SEQ ID NO: 746320 - DNA, 25 bp, Homo sapien
caacagtgcaaggaagatagcaaga

SEQ ID NO: 746321 - DNA, 25 bp, Homo sapien
aaaccaccatttggtcatatggctt

SEQ ID NO: 746322 - DNA, 25 bp, Homo sapien
gcaggatcaaggcagaacgcaacag

SEQ ID NO: 746323 - DNA, 25 bp, Homo sapien
ggtcttcagctggacaatgtttgtc

SEQ ID NO: 746324 - DNA, 25 bp, Homo sapien
ggagccagatatccagcgttctggc

SEQ ID NO: 746325 - DNA, 25 bp, Homo sapien
ccagcgttctggctgttttctctgc

SEQ ID NO: 746326 - DNA, 25 bp, Homo sapien
tttgtcaatctgaaggtcagctttc

SEQ ID NO: 746327 - DNA, 25 bp, Homo sapien
caaacacatctatgcttcctagcaa

SEQ ID NO: 746328 - DNA, 25 bp, Homo sapien
tcctagcaacagcatatccgagtgg

SEQ ID NO: 746329 - DNA, 25 bp, Homo sapien
ttgaacgacagatgtattacccact

SEQ ID NO: 746330 - DNA, 25 bp, Homo sapien
gccatgcctgtcagacagaggcaag

SEQ ID NO: 746331 - DNA, 25 bp, Homo sapien
ttaatacggccaaggccacgggagc

SEQ ID NO: 746332 - DNA, 25 bp, Homo sapien
cacaggattggacagctggacactg

SEQ ID NO: 746333 - DNA, 25 bp, Homo sapien
cataacagcctctgaactaagctgc

SEQ ID NO: 746334 - DNA, 25 bp, Homo sapien
cactgatatctgaaggacatgaatt

SEQ ID NO: 746335 - DNA, 25 bp, Homo sapien
tgccaattctgttacaatagaaacc

SEQ ID NO: 746336 - DNA, 25 bp, Homo sapien
acccaaagagtcaggcaggcactgt

SEQ ID NO: 746337 - DNA, 25 bp, Homo sapien
cataggcctgattcctttgttattt

SEQ ID NO: 746338 - DNA, 25 bp, Homo sapien
tattttctacataggcctgattcct

SEQ ID NO: 746339 - DNA, 25 bp, Homo sapien
gacttctgtgatgaaacaccctaca

SEQ ID NO: 746340 - DNA, 25 bp, Homo sapien
ccaaatccaacggaaagctcggtgt

SEQ ID NO: 746341 - DNA, 25 bp, Homo sapien
tgtttcaacatcgtgtcatcacaca

SEQ ID NO: 746342 - DNA, 25 bp, Homo sapien
taagggccgagctagataaattcag

SEQ ID NO: 746343 - DNA, 25 bp, Homo sapien
tacactgggtagagactctggaatt

SEQ ID NO: 746344 - DNA, 25 bp, Homo sapien
cttcactagcaaatgcattcaggca

SEQ ID NO: 746345 - DNA, 25 bp, Homo sapien
tgtccttaaaatggcgtctaaatgc

SEQ ID NO: 746346 - DNA, 25 bp, Homo sapien
gaagccaaataaagcttgtccttaa

SEQ ID NO: 746347 - DNA, 25 bp, Homo sapien
tgccaaaaatgactcgcaataacag

SEQ ID NO: 746348 - DNA, 25 bp, Homo sapien
tcccagtggactttgatgccctctc

SEQ ID NO: 746349 - DNA, 25 bp, Homo sapien
gactcgcaataacagtttttatgga

SEQ ID NO: 746350 - DNA, 25 bp, Homo sapien
gtttttatggactggacattcacac

SEQ ID NO: 746351 - DNA, 25 bp, Homo sapien
gatgggctactggaagggattttcc

SEQ ID NO: 746352 - DNA, 25 bp, Homo sapien
tttgatgggtagatccagcaggact

SEQ ID NO: 746353 - DNA, 25 bp, Homo sapien
tcctccattgccatcttgggcattg

SEQ ID NO: 746354 - DNA, 25 bp, Homo sapien
tatcaagtagcaatccagatgggct

SEQ ID NO: 746355 - DNA, 25 bp, Homo sapien
ccactcttatcttcaaccaatgtag

SEQ ID NO: 746356 - DNA, 25 bp, Homo sapien
ttcaaggcaattcttaatgcttcct

SEQ ID NO: 746357 - DNA, 25 bp, Homo sapien
tcctttaaccagtgaccactcttat

SEQ ID NO: 746358 - DNA, 25 bp, Homo sapien
caatgtagacattgtggagtcagca

SEQ ID NO: 746359 - DNA, 25 bp, Homo sapien
cactaatgtccatatccaccaacat

SEQ ID NO: 746360 - DNA, 25 bp, Homo sapien
ttcactaatgtccatatccaccaac

SEQ ID NO: 746361 - DNA, 25 bp, Homo sapien
tccaaagttttcactaatgtccata

SEQ ID NO: 746362 - DNA, 25 bp, Homo sapien
tcactaatgtccatatccaccaaca

SEQ ID NO: 746363 - DNA, 25 bp, Homo sapien
ggctccctcatgcatggtggactcc

SEQ ID NO: 746364 - DNA, 25 bp, Homo sapien
tctggtgccattatctagcttggtg

SEQ ID NO: 746365 - DNA, 25 bp, Homo sapien
ggtgccattatctagcttggtgaat

SEQ ID NO: 746366 - DNA, 25 bp, Homo sapien
gctcttctctacagatgacatcaat

SEQ ID NO: 746367 - DNA, 25 bp, Homo sapien
ggaccacaggtatcgtacacagcac

SEQ ID NO: 746368 - DNA, 25 bp, Homo sapien
tcattccagttgtcacacgtcttga

SEQ ID NO: 746369 - DNA, 25 bp, Homo sapien
gtcttgatacatcccggaccacagg

SEQ ID NO: 746370 - DNA, 25 bp, Homo sapien
tacacagcaccatgcttacactggg

SEQ ID NO: 746371 - DNA, 25 bp, Homo sapien
gtgaaggaccaagtttgctggacag

SEQ ID NO: 746372 - DNA, 25 bp, Homo sapien
ggaccaagtttgctggacagtggca

SEQ ID NO: 746373 - DNA, 25 bp, Homo sapien
ccaagtttgctggacagtggcaccc

SEQ ID NO: 746374 - DNA, 25 bp, Homo sapien
gaaggaccaagtttgctggacagtg

SEQ ID NO: 746375 - DNA, 25 bp, Homo sapien
tcaccgctggggacaaaggactggc

SEQ ID NO: 746376 - DNA, 25 bp, Homo sapien
ctggggacaaaggactggcttgatg

SEQ ID NO: 746377 - DNA, 25 bp, Homo sapien
gggacaaaggactggcttgatgcac

SEQ ID NO: 746378 - DNA, 25 bp, Homo sapien
accgctggggacaaaggactggctt

SEQ ID NO: 746379 - DNA, 25 bp, Homo sapien
aatcaaatggtaactagtagcagcc

SEQ ID NO: 746380 - DNA, 25 bp, Homo sapien
ggaaacctgaaatgcccctagataa

SEQ ID NO: 746381 - DNA, 25 bp, Homo sapien
tgaggactacgcaaggatggcaaga

SEQ ID NO: 746382 - DNA, 25 bp, Homo sapien
ttcatgcaccattagggccggtcac

SEQ ID NO: 746383 - DNA, 25 bp, Homo sapien
tatgctggcttgtcaaaaacgtggg

SEQ ID NO: 746384 - DNA, 25 bp, Homo sapien
caaacaactagggattttccagtca

SEQ ID NO: 746385 - DNA, 25 bp, Homo sapien
aaatgtctttgacgagcattggcaa

SEQ ID NO: 746386 - DNA, 25 bp, Homo sapien
tattacgccctgcactttattcagt

SEQ ID NO: 746387 - DNA, 25 bp, Homo sapien
aatatgcaggccaaccattcagctg

SEQ ID NO: 746388 - DNA, 25 bp, Homo sapien
caggctgcagatacgagggtgatta

SEQ ID NO: 746389 - DNA, 25 bp, Homo sapien
gatgaaaccggctcatgcagaagag

SEQ ID NO: 746390 - DNA, 25 bp, Homo sapien
tacagaaggtaggaaccaccaggca

SEQ ID NO: 746391 - DNA, 25 bp, Homo sapien
gtcttaaacctaatgttcagaatgt

SEQ ID NO: 746392 - DNA, 25 bp, Homo sapien
ctggttcgtaccacaagccattcat

SEQ ID NO: 746393 - DNA, 25 bp, Homo sapien
gccattcatcctgcaccgtgactgt

SEQ ID NO: 746394 - DNA, 25 bp, Homo sapien
ccacggccagtggtatggccctctg

SEQ ID NO: 746395 - DNA, 25 bp, Homo sapien
ctcttgacactctcccaaacagaaa

SEQ ID NO: 746396 - DNA, 25 bp, Homo sapien
tcaggacagtgtgtggatcatcatg

SEQ ID NO: 746397 - DNA, 25 bp, Homo sapien
atgaatccactctgaccctccggag

SEQ ID NO: 746398 - DNA, 25 bp, Homo sapien
gcctgaacctccatgacaaagcaaa

SEQ ID NO: 746399 - DNA, 25 bp, Homo sapien
ggagaatgcttttcagtgcgatcaa

SEQ ID NO: 746400 - DNA, 25 bp, Homo sapien
agcatgagagataagccatcttgcc

SEQ ID NO: 746401 - DNA, 25 bp, Homo sapien
tgtattatctttggactggaaaacc

SEQ ID NO: 746402 - DNA, 25 bp, Homo sapien
aacaatacctgaaaattcattggag

SEQ ID NO: 746403 - DNA, 25 bp, Homo sapien
gacgcagaacacaaacaatacctga

SEQ ID NO: 746404 - DNA, 25 bp, Homo sapien
tcctactgttcccttggcaggtgac

SEQ ID NO: 746405 - DNA, 25 bp, Homo sapien
cttcacagctccaccaatacaatgc

SEQ ID NO: 746406 - DNA, 25 bp, Homo sapien
cctactgttcccttggcaggtgact

SEQ ID NO: 746407 - DNA, 25 bp, Homo sapien
acagctccaccaatacaatgcatct

SEQ ID NO: 746408 - DNA, 25 bp, Homo sapien
agtttcttagcctttccatgggact

SEQ ID NO: 746409 - DNA, 25 bp, Homo sapien
aagcctggcagcaccgtggcctcag

SEQ ID NO: 746410 - DNA, 25 bp, Homo sapien
ggcagcaccgtggcctcagctgcac

SEQ ID NO: 746411 - DNA, 25 bp, Homo sapien
ttgccccagagtttcttagcctttc

SEQ ID NO: 746412 - DNA, 25 bp, Homo sapien
cacagaatccttcaggatacacgcc

SEQ ID NO: 746413 - DNA, 25 bp, Homo sapien
cttcaggatacacgccaagctctgg

SEQ ID NO: 746414 - DNA, 25 bp, Homo sapien
atggaggacaagatcaagagcacag

SEQ ID NO: 746415 - DNA, 25 bp, Homo sapien
aagaatggaggacaagatcaagagc

SEQ ID NO: 746416 - DNA, 25 bp, Homo sapien
ccatgctgacatcttggcccctgca

SEQ ID NO: 746417 - DNA, 25 bp, Homo sapien
tagccatgctgacatcttggcccct

SEQ ID NO: 746418 - DNA, 25 bp, Homo sapien
ttagccatgctgacatcttggcccc

SEQ ID NO: 746419 - DNA, 25 bp, Homo sapien
agccatgctgacatcttggcccctg

SEQ ID NO: 746420 - DNA, 25 bp, Homo sapien
ggatacctggacttgaggtggccat

SEQ ID NO: 746421 - DNA, 25 bp, Homo sapien
cctaggtggtgtttgggctttagct

SEQ ID NO: 746422 - DNA, 25 bp, Homo sapien
ttagctggggatacctggacttgag

SEQ ID NO: 746423 - DNA, 25 bp, Homo sapien
tggacttgaggtggccatgactgcc

SEQ ID NO: 746424 - DNA, 25 bp, Homo sapien
cagaggtctagtttgggctttcgct

SEQ ID NO: 746425 - DNA, 25 bp, Homo sapien
gctgcgtgcatacggcagaggtcta

SEQ ID NO: 746426 - DNA, 25 bp, Homo sapien
cttgaatttcccaagtcagggaagg

SEQ ID NO: 746427 - DNA, 25 bp, Homo sapien
ggaagggccacctgtggaaccattg

SEQ ID NO: 746428 - DNA, 25 bp, Homo sapien
gataaggagcatagttgtcggccat

SEQ ID NO: 746429 - DNA, 25 bp, Homo sapien
aaagctcaataggtcagtgcctcag

SEQ ID NO: 746430 - DNA, 25 bp, Homo sapien
gaagttgatcctcttacagctatga

SEQ ID NO: 746431 - DNA, 25 bp, Homo sapien
caaccggcaatgatcagcttagtgg

SEQ ID NO: 746432 - DNA, 25 bp, Homo sapien
ggtttggtgggtttactgtgaatca

SEQ ID NO: 746433 - DNA, 25 bp, Homo sapien
tgccaggtgtgctaggtctctttaa

SEQ ID NO: 746434 - DNA, 25 bp, Homo sapien
aattctcatcacagatctcttcagc

SEQ ID NO: 746435 - DNA, 25 bp, Homo sapien
tataattgacagtcacatgctgcca

SEQ ID NO: 746436 - DNA, 25 bp, Homo sapien
tccagattcaattcagagtcctaaa

SEQ ID NO: 746437 - DNA, 25 bp, Homo sapien
gataggctatgcttcttatttttcc

SEQ ID NO: 746438 - DNA, 25 bp, Homo sapien
agatactcaatatcccttgtcccca

SEQ ID NO: 746439 - DNA, 25 bp, Homo sapien
ttgtccccactttgctcttactgct

SEQ ID NO: 746440 - DNA, 25 bp, Homo sapien
aggtgttcacaaaaaccgcagttgt

SEQ ID NO: 746441 - DNA, 25 bp, Homo sapien
atctccagtctcagctgctcactgg

SEQ ID NO: 746442 - DNA, 25 bp, Homo sapien
tctccagtctcagctgctcactggc

SEQ ID NO: 746443 - DNA, 25 bp, Homo sapien
atatttgctctatatgggtccacag

SEQ ID NO: 746444 - DNA, 25 bp, Homo sapien
tttgctctatatgggtccacagcat

SEQ ID NO: 746445 - DNA, 25 bp, Homo sapien
gctctatatgggtccacagcatcat

SEQ ID NO: 746446 - DNA, 25 bp, Homo sapien
tatttgctctatatgggtccacagc

SEQ ID NO: 746447 - DNA, 25 bp, Homo sapien
gaaaaggctgttggtctataggtcc

SEQ ID NO: 746448 - DNA, 25 bp, Homo sapien
taggtcccaccttgagtagaaaggc

SEQ ID NO: 746449 - DNA, 25 bp, Homo sapien
tggagccgctgctaagtgcaaccat

SEQ ID NO: 746450 - DNA, 25 bp, Homo sapien
taggacctgagattcagcatccatg

SEQ ID NO: 746451 - DNA, 25 bp, Homo sapien
catggaggttcttttctagcagaga

SEQ ID NO: 746452 - DNA, 25 bp, Homo sapien
tgtggtattccttgcctgccaacca

SEQ ID NO: 746453 - DNA, 25 bp, Homo sapien
gaagggatatctctatgccactgcc

SEQ ID NO: 746454 - DNA, 25 bp, Homo sapien
tgtctcttcaaacccaaagcacgtg

SEQ ID NO: 746455 - DNA, 25 bp, Homo sapien
caaatggaacaccaaagaaagatgt

SEQ ID NO: 746456 - DNA, 25 bp, Homo sapien
tgtcctgtaataagccaaatggaac

SEQ ID NO: 746457 - DNA, 25 bp, Homo sapien
ggttgaagatatgtttaccagtgtg

SEQ ID NO: 746458 - DNA, 25 bp, Homo sapien
taccagtgtgtgactctcttgcccc

SEQ ID NO: 746459 - DNA, 25 bp, Homo sapien
tttatagcttccacccgactcataa

SEQ ID NO: 746460 - DNA, 25 bp, Homo sapien
tagcttccacccgactcataaaatt

SEQ ID NO: 746461 - DNA, 25 bp, Homo sapien
ttccacccgactcataaaattcttc

SEQ ID NO: 746462 - DNA, 25 bp, Homo sapien
tgcttcttggacccatgaagtttta

SEQ ID NO: 746463 - DNA, 25 bp, Homo sapien
gctagtgactgtgcatcaaatccct

SEQ ID NO: 746464 - DNA, 25 bp, Homo sapien
tgaggtcactatttccatgccactg

SEQ ID NO: 746465 - DNA, 25 bp, Homo sapien
tggcccctccaatcttcaagctagt

SEQ ID NO: 746466 - DNA, 25 bp, Homo sapien
agttccccgtggttgtaagactgag

SEQ ID NO: 746467 - DNA, 25 bp, Homo sapien
tggccagtgtttcagatgacgcaat

SEQ ID NO: 746468 - DNA, 25 bp, Homo sapien
tctttgtcaggttcagtcactggtg

SEQ ID NO: 746469 - DNA, 25 bp, Homo sapien
tcagtagacttttcatttgtggcaa

SEQ ID NO: 746470 - DNA, 25 bp, Homo sapien
aatttcatctgatgtggaggaaggc

SEQ ID NO: 746471 - DNA, 25 bp, Homo sapien
ttaagagactgtgtctcttccatct

SEQ ID NO: 746472 - DNA, 25 bp, Homo sapien
atctcttcttactccatgacttctt

SEQ ID NO: 746473 - DNA, 25 bp, Homo sapien
tccatctcttcttactccatgactt

SEQ ID NO: 746474 - DNA, 25 bp, Homo sapien
ctcttcttactccatgacttcttac

SEQ ID NO: 746475 - DNA, 25 bp, Homo sapien
ctgtctgcttaggtcctccttcctt

SEQ ID NO: 746476 - DNA, 25 bp, Homo sapien
catcaatgatgatattataaggcct

SEQ ID NO: 746477 - DNA, 25 bp, Homo sapien
ctgcttaggtcctccttccttagat

SEQ ID NO: 746478 - DNA, 25 bp, Homo sapien
tacatcaatgatgatattataaggc

SEQ ID NO: 746479 - DNA, 25 bp, Homo sapien
ccatagtttttgaggcctgcttcct

SEQ ID NO: 746480 - DNA, 25 bp, Homo sapien
cctgcttatgaatgtttggaggtcc

SEQ ID NO: 746481 - DNA, 25 bp, Homo sapien
tttggaggtccaagatggatgtaag

SEQ ID NO: 746482 - DNA, 25 bp, Homo sapien
caagccctcatttgggggccatagt

SEQ ID NO: 746483 - DNA, 25 bp, Homo sapien
caatgatgccacagctctttgtcca

SEQ ID NO: 746484 - DNA, 25 bp, Homo sapien
cagttaaggaattactctgggcaga

SEQ ID NO: 746485 - DNA, 25 bp, Homo sapien
ggaggagcctccttgtccattattc

SEQ ID NO: 746486 - DNA, 25 bp, Homo sapien
caatctgtgctggaagtccattgtc

SEQ ID NO: 746487 - DNA, 25 bp, Homo sapien
ttgcagaccaagacatagctcctct

SEQ ID NO: 746488 - DNA, 25 bp, Homo sapien
cctgcattcagctcaagcccaggat

SEQ ID NO: 746489 - DNA, 25 bp, Homo sapien
tcttttttgcagaccaagacatagc

SEQ ID NO: 746490 - DNA, 25 bp, Homo sapien
agtccctgcattcagctcaagccca

SEQ ID NO: 746491 - DNA, 25 bp, Homo sapien
tatccagggattgagtatcctccaa

SEQ ID NO: 746492 - DNA, 25 bp, Homo sapien
ggagctacgttcatcccagtggaag

SEQ ID NO: 746493 - DNA, 25 bp, Homo sapien
ccaatcggatactcggttgcaggaa

SEQ ID NO: 746494 - DNA, 25 bp, Homo sapien
ttagaggcttgtccgttatccaggg

SEQ ID NO: 746495 - DNA, 25 bp, Homo sapien
tcactggccgcagtcaatgtgtctt

SEQ ID NO: 746496 - DNA, 25 bp, Homo sapien
agctgagtcccggactttcttctca

SEQ ID NO: 746497 - DNA, 25 bp, Homo sapien
cttctcactggccgcagtcaatgtg

SEQ ID NO: 746498 - DNA, 25 bp, Homo sapien
ggtccagctgagtcccggactttct

SEQ ID NO: 746499 - DNA, 25 bp, Homo sapien
atctctgagaaccaatcgctgggcc

SEQ ID NO: 746500 - DNA, 25 bp, Homo sapien
ttatctctgagaaccaatcgctggg

SEQ ID NO: 746501 - DNA, 25 bp, Homo sapien
atcgctgggcccgccactgctaaag

SEQ ID NO: 746502 - DNA, 25 bp, Homo sapien
gctgggcccgccactgctaaaggcc

SEQ ID NO: 746503 - DNA, 25 bp, Homo sapien
ccttttcaggccatgagcattcctc

SEQ ID NO: 746504 - DNA, 25 bp, Homo sapien
tctcagacccaagctccttttcagg

SEQ ID NO: 746505 - DNA, 25 bp, Homo sapien
tcctcttcagataagctgcctcctt

SEQ ID NO: 746506 - DNA, 25 bp, Homo sapien
aggccatgagcattcctctcctctt

SEQ ID NO: 746507 - DNA, 25 bp, Homo sapien
actggctgaaattgtgggccatgtc

SEQ ID NO: 746508 - DNA, 25 bp, Homo sapien
gatattgcctctattttctccaaag

SEQ ID NO: 746509 - DNA, 25 bp, Homo sapien
ttctccaaagcctgattggtggcca

SEQ ID NO: 746510 - DNA, 25 bp, Homo sapien
caccctccaaaatgatattgcctct

SEQ ID NO: 746511 - DNA, 25 bp, Homo sapien
gccagagagaattgatgttcttgac

SEQ ID NO: 746512 - DNA, 25 bp, Homo sapien
tccaagctattgcagtcgtgggcat

SEQ ID NO: 746513 - DNA, 25 bp, Homo sapien
ctccaagctattgcagtcgtgggca

SEQ ID NO: 746514 - DNA, 25 bp, Homo sapien
tctccaagctattgcagtcgtgggc

SEQ ID NO: 746515 - DNA, 25 bp, Homo sapien
ttctccaagctattgcagtcgtggg

SEQ ID NO: 746516 - DNA, 25 bp, Homo sapien
cgttgacatcaaacatagtccaaat

SEQ ID NO: 746517 - DNA, 25 bp, Homo sapien
tggtcgttgacatcaaacatagtcc

SEQ ID NO: 746518 - DNA, 25 bp, Homo sapien
ctgcgttggtcgttgacatcaaaca

SEQ ID NO: 746519 - DNA, 25 bp, Homo sapien
catcaaacatagtccaaatattttc

SEQ ID NO: 746520 - DNA, 25 bp, Homo sapien
tagtgtggcccacataatatgtcta

SEQ ID NO: 746521 - DNA, 25 bp, Homo sapien
gtctaagttggagcccctgctctca

SEQ ID NO: 746522 - DNA, 25 bp, Homo sapien
ggacaaggagctctgccgaatagtg

SEQ ID NO: 746523 - DNA, 25 bp, Homo sapien
aaattgttactgatcctctgcagag

SEQ ID NO: 746524 - DNA, 25 bp, Homo sapien
ttagtgagcctgtctgcaaagcctg

SEQ ID NO: 746525 - DNA, 25 bp, Homo sapien
tgcatcaacggattccactgctctt

SEQ ID NO: 746526 - DNA, 25 bp, Homo sapien
gatgctgttgccgtctgagttagtg

SEQ ID NO: 746527 - DNA, 25 bp, Homo sapien
tcattgcatcaacggattccactgc

SEQ ID NO: 746528 - DNA, 25 bp, Homo sapien
agagctgattgagagttgtgttttc

SEQ ID NO: 746529 - DNA, 25 bp, Homo sapien
ccagagctgattgagagttgtgttt

SEQ ID NO: 746530 - DNA, 25 bp, Homo sapien
cagagctgattgagagttgtgtttt

SEQ ID NO: 746531 - DNA, 25 bp, Homo sapien
gtgccgatgaagcccagaacaaaca

SEQ ID NO: 746532 - DNA, 25 bp, Homo sapien
tgtgccgatgaagcccagaacaaac

SEQ ID NO: 746533 - DNA, 25 bp, Homo sapien
tcttcgggtgccataataaggccat

SEQ ID NO: 746534 - DNA, 25 bp, Homo sapien
ccacagggacttagtgtctgactgt

SEQ ID NO: 746535 - DNA, 25 bp, Homo sapien
ccatctggttacgataatggcccat

SEQ ID NO: 746536 - DNA, 25 bp, Homo sapien
cctacacaggttgggaatggctttc

SEQ ID NO: 746537 - DNA, 25 bp, Homo sapien
ggacaggttctgcacaggcttctac

SEQ ID NO: 746538 - DNA, 25 bp, Homo sapien
gcttctacaagtttcttgcaggtgc

SEQ ID NO: 746539 - DNA, 25 bp, Homo sapien
tgcaggtgcagcctactattttctt

SEQ ID NO: 746540 - DNA, 25 bp, Homo sapien
caggttctgcacaggcttctacaag

SEQ ID NO: 746541 - DNA, 25 bp, Homo sapien
atagccttttatgtctaatagtgag

SEQ ID NO: 746542 - DNA, 25 bp, Homo sapien
ccaccttcatcctcaaggactattg

SEQ ID NO: 746543 - DNA, 25 bp, Homo sapien
tccttctccataggagtggggcgag

SEQ ID NO: 746544 - DNA, 25 bp, Homo sapien
gttcttctctagatcctcttcccat

SEQ ID NO: 746545 - DNA, 25 bp, Homo sapien
ttcccctaagaggatataggcttta

SEQ ID NO: 746546 - DNA, 25 bp, Homo sapien
ctggagagtgccataggtgtgtcac

SEQ ID NO: 746547 - DNA, 25 bp, Homo sapien
tgctctttgtgtagattcccctaag

SEQ ID NO: 746548 - DNA, 25 bp, Homo sapien
ggagagtgccataggtgtgtcacca

SEQ ID NO: 746549 - DNA, 25 bp, Homo sapien
gatggcatagaagttggagaagccc

SEQ ID NO: 746550 - DNA, 25 bp, Homo sapien
tcttgatggcatagaagttggagaa

SEQ ID NO: 746551 - DNA, 25 bp, Homo sapien
ttgatggcatagaagttggagaagc

SEQ ID NO: 746552 - DNA, 25 bp, Homo sapien
gcccttggcaaagatattgagctga

SEQ ID NO: 746553 - DNA, 25 bp, Homo sapien
gaaatctggacataacaggcagcct

SEQ ID NO: 746554 - DNA, 25 bp, Homo sapien
cattggtaagcttcattcggtgccc

SEQ ID NO: 746555 - DNA, 25 bp, Homo sapien
tctgcgagcagacaacaatggcctt

SEQ ID NO: 746556 - DNA, 25 bp, Homo sapien
catggcaacatttggcacttgagca

SEQ ID NO: 746557 - DNA, 25 bp, Homo sapien
cataaacagatttgtgttgctccat

SEQ ID NO: 746558 - DNA, 25 bp, Homo sapien
gtcacataaacagatttgtgttgct

SEQ ID NO: 746559 - DNA, 25 bp, Homo sapien
cacataaacagatttgtgttgctcc

SEQ ID NO: 746560 - DNA, 25 bp, Homo sapien
ctgtcacataaacagatttgtgttg

SEQ ID NO: 746561 - DNA, 25 bp, Homo sapien
tcttttaggcgtctctctcccttaa

SEQ ID NO: 746562 - DNA, 25 bp, Homo sapien
ctctttcttttaggcgtctctctcc

SEQ ID NO: 746563 - DNA, 25 bp, Homo sapien
tcccttaatcgcatcattgtcttgc

SEQ ID NO: 746564 - DNA, 25 bp, Homo sapien
gtctctctcccttaatcgcatcatt

SEQ ID NO: 746565 - DNA, 25 bp, Homo sapien
ctccctgagaggaattgtatgattg

SEQ ID NO: 746566 - DNA, 25 bp, Homo sapien
cctgagaggaattgtatgattggct

SEQ ID NO: 746567 - DNA, 25 bp, Homo sapien
gaggaattgtatgattggctcttaa

SEQ ID NO: 746568 - DNA, 25 bp, Homo sapien
tatgagcattatccccgcagcctca

SEQ ID NO: 746569 - DNA, 25 bp, Homo sapien
caataaaattgtctccaattgccat

SEQ ID NO: 746570 - DNA, 25 bp, Homo sapien
ccttcatgctcagcgctcagtcttt

SEQ ID NO: 746571 - DNA, 25 bp, Homo sapien
tgaaaagcccttcatgctcagcgct

SEQ ID NO: 746572 - DNA, 25 bp, Homo sapien
aagcccttcatgctcagcgctcagt

SEQ ID NO: 746573 - DNA, 25 bp, Homo sapien
aaagcccttcatgctcagcgctcag

SEQ ID NO: 746574 - DNA, 25 bp, Homo sapien
ggcctggggccgctatctactatta

SEQ ID NO: 746575 - DNA, 25 bp, Homo sapien
cctggggccgctatctactattatt

SEQ ID NO: 746576 - DNA, 25 bp, Homo sapien
gggccgctatctactattatttcca

SEQ ID NO: 746577 - DNA, 25 bp, Homo sapien
ttttctggcctggggccgctatcta

SEQ ID NO: 746578 - DNA, 25 bp, Homo sapien
atataagcaggatcttttgttctct

SEQ ID NO: 746579 - DNA, 25 bp, Homo sapien
cctctgcaaaccacgttactctgtg

SEQ ID NO: 746580 - DNA, 25 bp, Homo sapien
ctcctctgcaaaccacgttactctg

SEQ ID NO: 746581 - DNA, 25 bp, Homo sapien
aatataagcaggatcttttgttctc

SEQ ID NO: 746582 - DNA, 25 bp, Homo sapien
tccatctcaatacctctgaacttgc

SEQ ID NO: 746583 - DNA, 25 bp, Homo sapien
gtacaacctgatcttgtttcttctc

SEQ ID NO: 746584 - DNA, 25 bp, Homo sapien
gaacttgccccaattcaagtccaaa

SEQ ID NO: 746585 - DNA, 25 bp, Homo sapien
tccctggggtacaacctgatcttgt

SEQ ID NO: 746586 - DNA, 25 bp, Homo sapien
ccctcttcttatggcattgtaagtc

SEQ ID NO: 746587 - DNA, 25 bp, Homo sapien
gcctttccctcttcttatggcattg

SEQ ID NO: 746588 - DNA, 25 bp, Homo sapien
ttcttatggcattgtaagtctgtcc

SEQ ID NO: 746589 - DNA, 25 bp, Homo sapien
ggcattgtaagtctgtcctgtttgc

SEQ ID NO: 746590 - DNA, 25 bp, Homo sapien
ggatcattatgtatttgcctgagtc

SEQ ID NO: 746591 - DNA, 25 bp, Homo sapien
ggaaaaggatcattatgtatttgcc

SEQ ID NO: 746592 - DNA, 25 bp, Homo sapien
cagcttcatgaaggattggaaaagg

SEQ ID NO: 746593 - DNA, 25 bp, Homo sapien
tatctcgccgtcagttcatctgtcc

SEQ ID NO: 746594 - DNA, 25 bp, Homo sapien
ctgtgattcaggtaccttccggttt

SEQ ID NO: 746595 - DNA, 25 bp, Homo sapien
ccggttttggcaacaaagtgtcttg

SEQ ID NO: 746596 - DNA, 25 bp, Homo sapien
cggttttggcaacaaagtgtcttgt

SEQ ID NO: 746597 - DNA, 25 bp, Homo sapien
tgactatgaaagtggaaggccttcc

SEQ ID NO: 746598 - DNA, 25 bp, Homo sapien
tttagcttcttctgtgactcaccga

SEQ ID NO: 746599 - DNA, 25 bp, Homo sapien
gtgggttttggtgaagcagccacaa

SEQ ID NO: 746600 - DNA, 25 bp, Homo sapien
tggcagttcaggttgtgactatgaa

SEQ ID NO: 746601 - DNA, 25 bp, Homo sapien
ttatttaacgcaaacagcttctgct

SEQ ID NO: 746602 - DNA, 25 bp, Homo sapien
tttatttaacgcaaacagcttctgc

SEQ ID NO: 746603 - DNA, 25 bp, Homo sapien
gctgaagtatctgtgccttcaccat

SEQ ID NO: 746604 - DNA, 25 bp, Homo sapien
tccacgtcaacagggatttgtgcac

SEQ ID NO: 746605 - DNA, 25 bp, Homo sapien
gctgctgaagtatctgtgccttcac

SEQ ID NO: 746606 - DNA, 25 bp, Homo sapien
cagggatttgtgcacagtcatagac

SEQ ID NO: 746607 - DNA, 25 bp, Homo sapien
cactaggtctggttgaaagtcactc

SEQ ID NO: 746608 - DNA, 25 bp, Homo sapien
gtctggacactaggtctggttgaaa

SEQ ID NO: 746609 - DNA, 25 bp, Homo sapien
ctaggtctggttgaaagtcactcac

SEQ ID NO: 746610 - DNA, 25 bp, Homo sapien
ggacactaggtctggttgaaagtca

SEQ ID NO: 746611 - DNA, 25 bp, Homo sapien
tgtcatcattgcctgatagaccatc

SEQ ID NO: 746612 - DNA, 25 bp, Homo sapien
gatagaccatcttcagcatggcata

SEQ ID NO: 746613 - DNA, 25 bp, Homo sapien
gcataagtcgtatttgacaattttc

SEQ ID NO: 746614 - DNA, 25 bp, Homo sapien
cagcatggcataagtcgtatttgac

SEQ ID NO: 746615 - DNA, 25 bp, Homo sapien
agtacttgcaagccagtgaacagga

SEQ ID NO: 746616 - DNA, 25 bp, Homo sapien
gaggagcacagagtacttgcaagcc

SEQ ID NO: 746617 - DNA, 25 bp, Homo sapien
tgtcctgagtaacttgtggctttca

SEQ ID NO: 746618 - DNA, 25 bp, Homo sapien
ggctttcatgggaagctaagaagac

SEQ ID NO: 746619 - DNA, 25 bp, Homo sapien
gatcctttcgtgtctctgcagagag

SEQ ID NO: 746620 - DNA, 25 bp, Homo sapien
ctaagaagacgtgccttgaggatcc

SEQ ID NO: 746621 - DNA, 25 bp, Homo sapien
cagccctgttctgggtgagactcct

SEQ ID NO: 746622 - DNA, 25 bp, Homo sapien
tcactctgcccttgactgtgtgcag

SEQ ID NO: 746623 - DNA, 25 bp, Homo sapien
gtctcctgtgcagacaaaacccact

SEQ ID NO: 746624 - DNA, 25 bp, Homo sapien
caggcaggtagacacagtctcctgt

SEQ ID NO: 746625 - DNA, 25 bp, Homo sapien
aaatgtcattcctgggtggaaagcc

SEQ ID NO: 746626 - DNA, 25 bp, Homo sapien
tgtgatcatctctagatggaacggg

SEQ ID NO: 746627 - DNA, 25 bp, Homo sapien
tggataaccctgcactaacaaagag

SEQ ID NO: 746628 - DNA, 25 bp, Homo sapien
gggaggcacccatgaattccacttc

SEQ ID NO: 746629 - DNA, 25 bp, Homo sapien
tcctttggcactagctctgagctgc

SEQ ID NO: 746630 - DNA, 25 bp, Homo sapien
gctttgtcagtaatcgagcccttga

SEQ ID NO: 746631 - DNA, 25 bp, Homo sapien
tgcattctcctatcagctttgtcag

SEQ ID NO: 746632 - DNA, 25 bp, Homo sapien
gctatgttagtgaccaggttggcaa

SEQ ID NO: 746633 - DNA, 25 bp, Homo sapien
gagccatcagaaatagcactccctt

SEQ ID NO: 746634 - DNA, 25 bp, Homo sapien
ggtgcaagaacccatccctgtcaca

SEQ ID NO: 746635 - DNA, 25 bp, Homo sapien
gaaatgtcctgtatgcgcttcagtt

SEQ ID NO: 746636 - DNA, 25 bp, Homo sapien
ttcagctgaaggtgcaagaacccat

SEQ ID NO: 746637 - DNA, 25 bp, Homo sapien
cattacctgagttatattcatcctt

SEQ ID NO: 746638 - DNA, 25 bp, Homo sapien
ctgtcctgtagacctgggccactct

SEQ ID NO: 746639 - DNA, 25 bp, Homo sapien
tacatagagacgcagaggtcagtgc

SEQ ID NO: 746640 - DNA, 25 bp, Homo sapien
agcaccctcatgaggatacatagag

SEQ ID NO: 746641 - DNA, 25 bp, Homo sapien
tcttctcccatgagggagcagccgt

SEQ ID NO: 746642 - DNA, 25 bp, Homo sapien
tcagctgtatgagtggtttctccca

SEQ ID NO: 746643 - DNA, 25 bp, Homo sapien
caaggagccaagtcaaggaactctg

SEQ ID NO: 746644 - DNA, 25 bp, Homo sapien
gtttctcccactacttgatccagag

SEQ ID NO: 746645 - DNA, 25 bp, Homo sapien
aactctgggcgtagcactgctgcat

SEQ ID NO: 746646 - DNA, 25 bp, Homo sapien
catggctcctgagaggtggcagaag

SEQ ID NO: 746647 - DNA, 25 bp, Homo sapien
gagaggtggcagaaggctcctgtct

SEQ ID NO: 746648 - DNA, 25 bp, Homo sapien
ggtggcagaaggctcctgtctccat

SEQ ID NO: 746649 - DNA, 25 bp, Homo sapien
gaggtggcagaaggctcctgtctcc

SEQ ID NO: 746650 - DNA, 25 bp, Homo sapien
aaaacacattcatagctaggacggc

SEQ ID NO: 746651 - DNA, 25 bp, Homo sapien
ttcatagctaggacggcaacagcca

SEQ ID NO: 746652 - DNA, 25 bp, Homo sapien
gtgcagcagaatcagactcagggta

SEQ ID NO: 746653 - DNA, 25 bp, Homo sapien
cggcaacagccacagacagtgcagc

SEQ ID NO: 746654 - DNA, 25 bp, Homo sapien
cctggacaacttcacctttatctcc

SEQ ID NO: 746655 - DNA, 25 bp, Homo sapien
cctaatatttactccctggacaact

SEQ ID NO: 746656 - DNA, 25 bp, Homo sapien
ctaatatttactccctggacaactt

SEQ ID NO: 746657 - DNA, 25 bp, Homo sapien
ggacaacttcacctttatctcccat

SEQ ID NO: 746658 - DNA, 25 bp, Homo sapien
ccaatgctgtctacccacgttgctg

SEQ ID NO: 746659 - DNA, 25 bp, Homo sapien
cacgttgctgcaaggcattcttgaa

SEQ ID NO: 746660 - DNA, 25 bp, Homo sapien
agtctcttccaagacctgagatgag

SEQ ID NO: 746661 - DNA, 25 bp, Homo sapien
tctgagtctctgatatgcggatgtg

SEQ ID NO: 746662 - DNA, 25 bp, Homo sapien
atttttcttccatttatctgacata

SEQ ID NO: 746663 - DNA, 25 bp, Homo sapien
tttcttccatttatctgacataatc

SEQ ID NO: 746664 - DNA, 25 bp, Homo sapien
tttttcttccatttatctgacataa

SEQ ID NO: 746665 - DNA, 25 bp, Homo sapien
tcttccatttatctgacataatcac

SEQ ID NO: 746666 - DNA, 25 bp, Homo sapien
tctctatcagctcaatgccaaatat

SEQ ID NO: 746667 - DNA, 25 bp, Homo sapien
tatactccctaatggatctggcccc

SEQ ID NO: 746668 - DNA, 25 bp, Homo sapien
aatgtggtggtctgcagctatccat

SEQ ID NO: 746669 - DNA, 25 bp, Homo sapien
ggtctgcagctatccatacagtctt

SEQ ID NO: 746670 - DNA, 25 bp, Homo sapien
agggagtccagcttgcctcctgaga

SEQ ID NO: 746671 - DNA, 25 bp, Homo sapien
ctgagtgagggagtccagcttgcct

SEQ ID NO: 746672 - DNA, 25 bp, Homo sapien
tgcagctctgctgaacggaggcaca

SEQ ID NO: 746673 - DNA, 25 bp, Homo sapien
caggcggggttgagcctcactgtcc

SEQ ID NO: 746674 - DNA, 25 bp, Homo sapien
agcgtctgcccggtcccactggaat

SEQ ID NO: 746675 - DNA, 25 bp, Homo sapien
gtcccactggaatcgaagctgccct

SEQ ID NO: 746676 - DNA, 25 bp, Homo sapien
ctgcccggtcccactggaatcgaag

SEQ ID NO: 746677 - DNA, 25 bp, Homo sapien
tggggaagaatccagcgtctgcccg

SEQ ID NO: 746678 - DNA, 25 bp, Homo sapien
tttcaagtactgctataggattaat

SEQ ID NO: 746679 - DNA, 25 bp, Homo sapien
acagacatttcaagtactgctatag

SEQ ID NO: 746680 - DNA, 25 bp, Homo sapien
agacatttcaagtactgctatagga

SEQ ID NO: 746681 - DNA, 25 bp, Homo sapien
catttcaagtactgctataggatta

SEQ ID NO: 746682 - DNA, 25 bp, Homo sapien
gaatcagctagagatgctgtgattc

SEQ ID NO: 746683 - DNA, 25 bp, Homo sapien
tcaataggaatcagctagagatgct

SEQ ID NO: 746684 - DNA, 25 bp, Homo sapien
tctttagtgtctggcgatgatgttg

SEQ ID NO: 746685 - DNA, 25 bp, Homo sapien
ctctttagtgtctggcgatgatgtt

SEQ ID NO: 746686 - DNA, 25 bp, Homo sapien
ctatgtgggatgagagagggccaga

SEQ ID NO: 746687 - DNA, 25 bp, Homo sapien
gagggccagagatgctccattttgt

SEQ ID NO: 746688 - DNA, 25 bp, Homo sapien
gagagagggccagagatgctccatt

SEQ ID NO: 746689 - DNA, 25 bp, Homo sapien
gagagggccagagatgctccatttt

SEQ ID NO: 746690 - DNA, 25 bp, Homo sapien
catgaggtggaagttgtatagcgta

SEQ ID NO: 746691 - DNA, 25 bp, Homo sapien
tcatgaggtggaagttgtatagcgt

SEQ ID NO: 746692 - DNA, 25 bp, Homo sapien
ctatcatgaggtggaagttgtatag

SEQ ID NO: 746693 - DNA, 25 bp, Homo sapien
ggtggaagttgtatagcgtaggtgg

SEQ ID NO: 746694 - DNA, 25 bp, Homo sapien
tagggaccagggaagtacagtctcc

SEQ ID NO: 746695 - DNA, 25 bp, Homo sapien
gtagggaccagggaagtacagtctc

SEQ ID NO: 746696 - DNA, 25 bp, Homo sapien
cagagagcctggaataataaattcg

SEQ ID NO: 746697 - DNA, 25 bp, Homo sapien
gagatgcgaggcaactgagacaatg

SEQ ID NO: 746698 - DNA, 25 bp, Homo sapien
tgacaagagggtattggattgcccc

SEQ ID NO: 746699 - DNA, 25 bp, Homo sapien
gaacactgtgtcatcaatttcccca

SEQ ID NO: 746700 - DNA, 25 bp, Homo sapien
gaagtgcttccacctgcagtggtct

SEQ ID NO: 746701 - DNA, 25 bp, Homo sapien
cagcatcttccgaaacttcttcctt

SEQ ID NO: 746702 - DNA, 25 bp, Homo sapien
agcatcttccgaaacttcttcctta

SEQ ID NO: 746703 - DNA, 25 bp, Homo sapien
caaaatccgatagcatcatcattat

SEQ ID NO: 746704 - DNA, 25 bp, Homo sapien
ttttcccaaaatccgatagcatcat

SEQ ID NO: 746705 - DNA, 25 bp, Homo sapien
gatttttcccaaaatccgatagcat

SEQ ID NO: 746706 - DNA, 25 bp, Homo sapien
tcccaaaatccgatagcatcatcat

SEQ ID NO: 746707 - DNA, 25 bp, Homo sapien
tcagggggacatcagaatgccagca

SEQ ID NO: 746708 - DNA, 25 bp, Homo sapien
gccagcaatatctttccgctttcat

SEQ ID NO: 746709 - DNA, 25 bp, Homo sapien
gcaatatctttccgctttcatcaga

SEQ ID NO: 746710 - DNA, 25 bp, Homo sapien
cagcaatatctttccgctttcatca

SEQ ID NO: 746711 - DNA, 25 bp, Homo sapien
taaaaactgagcgtgcaaagtccaa

SEQ ID NO: 746712 - DNA, 25 bp, Homo sapien
ttaaaaactgagcgtgcaaagtcca

SEQ ID NO: 746713 - DNA, 25 bp, Homo sapien
gataaatgtcacacaagatgcagct

SEQ ID NO: 746714 - DNA, 25 bp, Homo sapien
gcataaggtccatgcattggaggaa

SEQ ID NO: 746715 - DNA, 25 bp, Homo sapien
gactctatggcaacatgtggcctcc

SEQ ID NO: 746716 - DNA, 25 bp, Homo sapien
tcctgggagtcacaaagctttccgt

SEQ ID NO: 746717 - DNA, 25 bp, Homo sapien
tgaagtttctgcctaatggaagagg

SEQ ID NO: 746718 - DNA, 25 bp, Homo sapien
tctgcttttcacatagagcgtcggc

SEQ ID NO: 746719 - DNA, 25 bp, Homo sapien
tgtagagtacaatccgagccaaggg

SEQ ID NO: 746720 - DNA, 25 bp, Homo sapien
gagcgtcggcattgatgactctggc

SEQ ID NO: 746721 - DNA, 25 bp, Homo sapien
tgcctgatgttgcaacatgttcatg

SEQ ID NO: 746722 - DNA, 25 bp, Homo sapien
gactggagctaaaactgtcaaaggg

SEQ ID NO: 746723 - DNA, 25 bp, Homo sapien
tagggtgaagggtgtcctgaggtca

SEQ ID NO: 746724 - DNA, 25 bp, Homo sapien
gaggtcaaagttaacagcagttgac

SEQ ID NO: 746725 - DNA, 25 bp, Homo sapien
caaagaggacccacagagttatcaa

SEQ ID NO: 746726 - DNA, 25 bp, Homo sapien
tcacaaagaaggtcattcttgactt

SEQ ID NO: 746727 - DNA, 25 bp, Homo sapien
cacaacggagtttccaacaatggta

SEQ ID NO: 746728 - DNA, 25 bp, Homo sapien
gctgagtcacaaagaaggtcattct

SEQ ID NO: 746729 - DNA, 25 bp, Homo sapien
catccagggatatttgcctctaagc

SEQ ID NO: 746730 - DNA, 25 bp, Homo sapien
ctacttctacggttataggagtgaa

SEQ ID NO: 746731 - DNA, 25 bp, Homo sapien
taagctgtggcatcctcatccaggg

SEQ ID NO: 746732 - DNA, 25 bp, Homo sapien
tggatgtttaccctggccactgcag

SEQ ID NO: 746733 - DNA, 25 bp, Homo sapien
tgaggctgaagcaaggtaaaactga

SEQ ID NO: 746734 - DNA, 25 bp, Homo sapien
ggtctctgagatcacggtttggtag

SEQ ID NO: 746735 - DNA, 25 bp, Homo sapien
tactagacatttagaagagagagca

SEQ ID NO: 746736 - DNA, 25 bp, Homo sapien
tcattgtaactagttccagggttct

SEQ ID NO: 746737 - DNA, 25 bp, Homo sapien
tatgtgaggaggctcactgcctcct

SEQ ID NO: 746738 - DNA, 25 bp, Homo sapien
ggtctcaggaggcttattacatttt

SEQ ID NO: 746739 - DNA, 25 bp, Homo sapien
tcagtggcaacgagtctgtataagc

SEQ ID NO: 746740 - DNA, 25 bp, Homo sapien
tagtagccgtgtactgggtatgtga

SEQ ID NO: 746741 - DNA, 25 bp, Homo sapien
gctcattagtaaattgctcttcaga

SEQ ID NO: 746742 - DNA, 25 bp, Homo sapien
cgttcaggtaatgtataggagggtt

SEQ ID NO: 746743 - DNA, 25 bp, Homo sapien
tcccttgctgaacgtctcaagtttc

SEQ ID NO: 746744 - DNA, 25 bp, Homo sapien
gcagagaattcctaagctcattagt

SEQ ID NO: 746745 - DNA, 25 bp, Homo sapien
tgttgaattacgaaagcaaagcagg

SEQ ID NO: 746746 - DNA, 25 bp, Homo sapien
tgggtccttagcacctggaaccatg

SEQ ID NO: 746747 - DNA, 25 bp, Homo sapien
catgcctcgccatagtaagtggtta

SEQ ID NO: 746748 - DNA, 25 bp, Homo sapien
tgtaatcaaatccactgtgggtcct

SEQ ID NO: 746749 - DNA, 25 bp, Homo sapien
cttctttgaaactcttttagctctt

SEQ ID NO: 746750 - DNA, 25 bp, Homo sapien
ttctttgaaactcttttagctcttg

SEQ ID NO: 746751 - DNA, 25 bp, Homo sapien
catctcttgaggcaaacttgtttct

SEQ ID NO: 746752 - DNA, 25 bp, Homo sapien
tctcttgaggcaaacttgtttctca

SEQ ID NO: 746753 - DNA, 25 bp, Homo sapien
aagcatctcttgaggcaaacttgtt

SEQ ID NO: 746754 - DNA, 25 bp, Homo sapien
agcatctcttgaggcaaacttgttt

SEQ ID NO: 746755 - DNA, 25 bp, Homo sapien
tttgggctcacatcattgatatctc

SEQ ID NO: 746756 - DNA, 25 bp, Homo sapien
acctttgggctcacatcattgatat

SEQ ID NO: 746757 - DNA, 25 bp, Homo sapien
gggctcacatcattgatatctctga

SEQ ID NO: 746758 - DNA, 25 bp, Homo sapien
cctttgggctcacatcattgatatc

SEQ ID NO: 746759 - DNA, 25 bp, Homo sapien
acaatcctcagcatgctaagcttgt

SEQ ID NO: 746760 - DNA, 25 bp, Homo sapien
tcagcatgctaagcttgttgagctt

SEQ ID NO: 746761 - DNA, 25 bp, Homo sapien
catgctaagcttgttgagcttaaca

SEQ ID NO: 746762 - DNA, 25 bp, Homo sapien
tcctcagcatgctaagcttgttgag

SEQ ID NO: 746763 - DNA, 25 bp, Homo sapien
aattggtatctatcatggcagttct

SEQ ID NO: 746764 - DNA, 25 bp, Homo sapien
caaattggtatctatcatggcagtt

SEQ ID NO: 746765 - DNA, 25 bp, Homo sapien
ggtatctatcatggcagttctcttc

SEQ ID NO: 746766 - DNA, 25 bp, Homo sapien
atcaaattggtatctatcatggcag

SEQ ID NO: 746767 - DNA, 25 bp, Homo sapien
tttgaagtgtttccagcagtacaaa

SEQ ID NO: 746768 - DNA, 25 bp, Homo sapien
gcagtacaaatttcatgaatcagat

SEQ ID NO: 746769 - DNA, 25 bp, Homo sapien
ttctaatgagcccattaatctggtc

SEQ ID NO: 746770 - DNA, 25 bp, Homo sapien
taatgagcccattaatctggtcttc

SEQ ID NO: 746771 - DNA, 25 bp, Homo sapien
cttggcaaggctcctctattgattc

SEQ ID NO: 746772 - DNA, 25 bp, Homo sapien
gattctaattggttagagacagacc

SEQ ID NO: 746773 - DNA, 25 bp, Homo sapien
cagccatcttttgcaaaccttggca

SEQ ID NO: 746774 - DNA, 25 bp, Homo sapien
ttgattcaaatgtgtagccggtgtt

SEQ ID NO: 746775 - DNA, 25 bp, Homo sapien
gatgctctaatatgtgaaagtcctt

SEQ ID NO: 746776 - DNA, 25 bp, Homo sapien
ggagctttgtagatgctctaatatg

SEQ ID NO: 746777 - DNA, 25 bp, Homo sapien
agtttatcttccaggagatctatca

SEQ ID NO: 746778 - DNA, 25 bp, Homo sapien
cttctcctcaagtttatcttccagg

SEQ ID NO: 746779 - DNA, 25 bp, Homo sapien
tcaagtttatcttccaggagatcta

SEQ ID NO: 746780 - DNA, 25 bp, Homo sapien
gtttatcttccaggagatctatcat

SEQ ID NO: 746781 - DNA, 25 bp, Homo sapien
ttctgacattagactgtctgtcact

SEQ ID NO: 746782 - DNA, 25 bp, Homo sapien
ccatctgccttacaattagtgtcag

SEQ ID NO: 746783 - DNA, 25 bp, Homo sapien
agctccatctgccttacaattagtg

SEQ ID NO: 746784 - DNA, 25 bp, Homo sapien
gacattagactgtctgtcactggtg

SEQ ID NO: 746785 - DNA, 25 bp, Homo sapien
tttcctcacaaatgtttcacacttt

SEQ ID NO: 746786 - DNA, 25 bp, Homo sapien
ctaggaatcaggctgtcgtctttct

SEQ ID NO: 746787 - DNA, 25 bp, Homo sapien
actggctctgccagcgtgcacccca

SEQ ID NO: 746788 - DNA, 25 bp, Homo sapien
ggatgaggcactgcacgcctctcta

SEQ ID NO: 746789 - DNA, 25 bp, Homo sapien
cactgcacgcctctctagttagcat

SEQ ID NO: 746790 - DNA, 25 bp, Homo sapien
tctagttagcatcactggctcaggt

SEQ ID NO: 746791 - DNA, 25 bp, Homo sapien
agctgaacctctgagtgggtgatga

SEQ ID NO: 746792 - DNA, 25 bp, Homo sapien
gtttgttcagagctgaacctctgag

SEQ ID NO: 746793 - DNA, 25 bp, Homo sapien
gaaggggtttgttcagagctgaacc

SEQ ID NO: 746794 - DNA, 25 bp, Homo sapien
gctcagaaggggtttgttcagagct

SEQ ID NO: 746795 - DNA, 25 bp, Homo sapien
ctggactgtgggttgataaggcttc

SEQ ID NO: 746796 - DNA, 25 bp, Homo sapien
ttctcaaacggtgaaggtggttctg

SEQ ID NO: 746797 - DNA, 25 bp, Homo sapien
caaacggtgaaggtggttctggact

SEQ ID NO: 746798 - DNA, 25 bp, Homo sapien
tctggactgtgggttgataaggctt

SEQ ID NO: 746799 - DNA, 25 bp, Homo sapien
taggcatcactagcactgcaagtac

SEQ ID NO: 746800 - DNA, 25 bp, Homo sapien
agtctgtaggcatcactagcactgc

SEQ ID NO: 746801 - DNA, 25 bp, Homo sapien
atctcaagtacaaggccaagcagtc

SEQ ID NO: 746802 - DNA, 25 bp, Homo sapien
tacaaggccaagcagtctgtaggca

SEQ ID NO: 746803 - DNA, 25 bp, Homo sapien
tgctgattgccactcccagtctgtg

SEQ ID NO: 746804 - DNA, 25 bp, Homo sapien
tccttgctgattgccactcccagtc

SEQ ID NO: 746805 - DNA, 25 bp, Homo sapien
cttgctgattgccactcccagtctg

SEQ ID NO: 746806 - DNA, 25 bp, Homo sapien
ttccttgctgattgccactcccagt

SEQ ID NO: 746807 - DNA, 25 bp, Homo sapien
ctgtcctctgaggacactcgctcca

SEQ ID NO: 746808 - DNA, 25 bp, Homo sapien
actgtcctctgaggacactcgctcc

SEQ ID NO: 746809 - DNA, 25 bp, Homo sapien
tgtcctctgaggacactcgctccat

SEQ ID NO: 746810 - DNA, 25 bp, Homo sapien
gattccaccttgcacttagctgtca

SEQ ID NO: 746811 - DNA, 25 bp, Homo sapien
caaagtggtgcctccttgttccaaa

SEQ ID NO: 746812 - DNA, 25 bp, Homo sapien
acaaaggcatggctcttgttgcaca

SEQ ID NO: 746813 - DNA, 25 bp, Homo sapien
tagctgtcagcagatcaaagtggtg

SEQ ID NO: 746814 - DNA, 25 bp, Homo sapien
cattctcagagcatcagctcgcagg

SEQ ID NO: 746815 - DNA, 25 bp, Homo sapien
tcagagcatcagctcgcaggcacag

SEQ ID NO: 746816 - DNA, 25 bp, Homo sapien
ttctcagagcatcagctcgcaggca

SEQ ID NO: 746817 - DNA, 25 bp, Homo sapien
ccattctcagagcatcagctcgcag

SEQ ID NO: 746818 - DNA, 25 bp, Homo sapien
gataggggtaaccatactgatgcca

SEQ ID NO: 746819 - DNA, 25 bp, Homo sapien
cctgctcctgggataggggtaacca

SEQ ID NO: 746820 - DNA, 25 bp, Homo sapien
aaacttagtacaaacatccgatcca

SEQ ID NO: 746821 - DNA, 25 bp, Homo sapien
catagcgcactatgagctcctgggc

SEQ ID NO: 746822 - DNA, 25 bp, Homo sapien
gtggcatttcaatgttgaacaccat

SEQ ID NO: 746823 - DNA, 25 bp, Homo sapien
caggtccccatgtggcatttcaatg

SEQ ID NO: 746824 - DNA, 25 bp, Homo sapien
ctcttgtcaggtccccatgtggcat

SEQ ID NO: 746825 - DNA, 25 bp, Homo sapien
tgtcaggtccccatgtggcatttca

SEQ ID NO: 746826 - DNA, 25 bp, Homo sapien
ttgaattacagaggcactaaggcca

SEQ ID NO: 746827 - DNA, 25 bp, Homo sapien
gaattacagaggcactaaggccaag

SEQ ID NO: 746828 - DNA, 25 bp, Homo sapien
gttgaattacagaggcactaaggcc

SEQ ID NO: 746829 - DNA, 25 bp, Homo sapien
ggttgaattacagaggcactaaggc

SEQ ID NO: 746830 - DNA, 25 bp, Homo sapien
tctccagtgaatcgccaattaatat

SEQ ID NO: 746831 - DNA, 25 bp, Homo sapien
gcaaaccaggtcaggtgccgtgaag

SEQ ID NO: 746832 - DNA, 25 bp, Homo sapien
tgcaaatagcggaccactcggcaaa

SEQ ID NO: 746833 - DNA, 25 bp, Homo sapien
caggtgccgtgaagtctccagtgaa

SEQ ID NO: 746834 - DNA, 25 bp, Homo sapien
tctttgttctgaattcgtgcctttt

SEQ ID NO: 746835 - DNA, 25 bp, Homo sapien
gttctgaattcgtgcctttttgttc

SEQ ID NO: 746836 - DNA, 25 bp, Homo sapien
tctctggctcagacaaataacaatc

SEQ ID NO: 746837 - DNA, 25 bp, Homo sapien
gctcagacaaataacaatcaagcac

SEQ ID NO: 746838 - DNA, 25 bp, Homo sapien
acaccaggacgtaggtagaggcgta

SEQ ID NO: 746839 - DNA, 25 bp, Homo sapien
gtagacgatggcatggtatctgtct

SEQ ID NO: 746840 - DNA, 25 bp, Homo sapien
taggtagaggcgtagagcagcacaa

SEQ ID NO: 746841 - DNA, 25 bp, Homo sapien
tctgtctatgctgagggacaccagg

SEQ ID NO: 746842 - DNA, 25 bp, Homo sapien
tgtacttctctgccgcttagccttc

SEQ ID NO: 746843 - DNA, 25 bp, Homo sapien
ttctgtacttctctgccgcttagcc

SEQ ID NO: 746844 - DNA, 25 bp, Homo sapien
ttctctgccgcttagccttcctctt

SEQ ID NO: 746845 - DNA, 25 bp, Homo sapien
tctctgccgcttagccttcctcttt

SEQ ID NO: 746846 - DNA, 25 bp, Homo sapien
ggctacactgtgaaagccccactct

SEQ ID NO: 746847 - DNA, 25 bp, Homo sapien
cagctgagcccatttgccatgaaga

SEQ ID NO: 746848 - DNA, 25 bp, Homo sapien
cagcagggagactgatggccttcca

SEQ ID NO: 746849 - DNA, 25 bp, Homo sapien
tccaggatcgaacagatgaaatgca

SEQ ID NO: 746850 - DNA, 25 bp, Homo sapien
caaggtctccgaagatgtttcccca

SEQ ID NO: 746851 - DNA, 25 bp, Homo sapien
aaaggcccagcagggtataggcttg

SEQ ID NO: 746852 - DNA, 25 bp, Homo sapien
cccaaaggcccagcagggtataggc

SEQ ID NO: 746853 - DNA, 25 bp, Homo sapien
agggtataggcttggagctgttttt

SEQ ID NO: 746854 - DNA, 25 bp, Homo sapien
taaaaaggaaggttgaggagcatcc

SEQ ID NO: 746855 - DNA, 25 bp, Homo sapien
gaggagcatcctcttgagatgtctt

SEQ ID NO: 746856 - DNA, 25 bp, Homo sapien
aaaggaaggttgaggagcatcctct

SEQ ID NO: 746857 - DNA, 25 bp, Homo sapien
ttgagatgtcttaagggaatcagcc

SEQ ID NO: 746858 - DNA, 25 bp, Homo sapien
tagtgatgactcacaggtgactgac

SEQ ID NO: 746859 - DNA, 25 bp, Homo sapien
cctgcctgcatttggaaactcgagt

SEQ ID NO: 746860 - DNA, 25 bp, Homo sapien
aaagagttgttattggcccactgag

SEQ ID NO: 746861 - DNA, 25 bp, Homo sapien
tacatgcaaccggtaatccactggg

SEQ ID NO: 746862 - DNA, 25 bp, Homo sapien
caaatatgatcagggtgggaatgga

SEQ ID NO: 746863 - DNA, 25 bp, Homo sapien
cctcttcccaaatatgatcagggtg

SEQ ID NO: 746864 - DNA, 25 bp, Homo sapien
tcttcccaaatatgatcagggtggg

SEQ ID NO: 746865 - DNA, 25 bp, Homo sapien
tcaccgttggacagtgtcctcttcc

SEQ ID NO: 746866 - DNA, 25 bp, Homo sapien
taggagtcgtcaggccacagggccc

SEQ ID NO: 746867 - DNA, 25 bp, Homo sapien
ccaggaaggccacgatggtcatgta

SEQ ID NO: 746868 - DNA, 25 bp, Homo sapien
tcatgtatggggtccagtaggagtc

SEQ ID NO: 746869 - DNA, 25 bp, Homo sapien
gattgtcagagggatgaagtacacc

SEQ ID NO: 746870 - DNA, 25 bp, Homo sapien
agtgactggtggatccctactgtga

SEQ ID NO: 746871 - DNA, 25 bp, Homo sapien
gtgactggtggatccctactgtgag

SEQ ID NO: 746872 - DNA, 25 bp, Homo sapien
aagtgactggtggatccctactgtg

SEQ ID NO: 746873 - DNA, 25 bp, Homo sapien
ccaaatagttcggatcacaatgcca

SEQ ID NO: 746874 - DNA, 25 bp, Homo sapien
ttaatccaaatagttcggatcacaa

SEQ ID NO: 746875 - DNA, 25 bp, Homo sapien
aaatcactgtttcgtaggttttgct

SEQ ID NO: 746876 - DNA, 25 bp, Homo sapien
gttcggatcacaatgccatacatga

SEQ ID NO: 746877 - DNA, 25 bp, Homo sapien
caaaattggtctccacactgccagt

SEQ ID NO: 746878 - DNA, 25 bp, Homo sapien
aattggtctccacactgccagtcat

SEQ ID NO: 746879 - DNA, 25 bp, Homo sapien
tccacaaaattggtctccacactgc

SEQ ID NO: 746880 - DNA, 25 bp, Homo sapien
ctccacaaaattggtctccacactg

SEQ ID NO: 746881 - DNA, 25 bp, Homo sapien
gagcatataagcttctgagaatacc

SEQ ID NO: 746882 - DNA, 25 bp, Homo sapien
gctgccctcatttcgggatgaggtc

SEQ ID NO: 746883 - DNA, 25 bp, Homo sapien
gctgcttggctgtaatgacagatgg

SEQ ID NO: 746884 - DNA, 25 bp, Homo sapien
acagatgggaaatcaactgtgttcc

SEQ ID NO: 746885 - DNA, 25 bp, Homo sapien
acttgatagccttgatttttgcctt

SEQ ID NO: 746886 - DNA, 25 bp, Homo sapien
gatgatgatgctatacttgatagcc

SEQ ID NO: 746887 - DNA, 25 bp, Homo sapien
tttgagatgagtcctcggttatagc

SEQ ID NO: 746888 - DNA, 25 bp, Homo sapien
ggttatagctgctgcacagtttccc

SEQ ID NO: 746889 - DNA, 25 bp, Homo sapien
aacatccagggaaggtgcatctgtg

SEQ ID NO: 746890 - DNA, 25 bp, Homo sapien
agggaaggtgcatctgtgcttctga

SEQ ID NO: 746891 - DNA, 25 bp, Homo sapien
ttttccaactcaacatccagggaag

SEQ ID NO: 746892 - DNA, 25 bp, Homo sapien
ccaactcaacatccagggaaggtgc

SEQ ID NO: 746893 - DNA, 25 bp, Homo sapien
tctgtaacttgttgggaattttgga

SEQ ID NO: 746894 - DNA, 25 bp, Homo sapien
aactgactcatgtttcccctctcga

SEQ ID NO: 746895 - DNA, 25 bp, Homo sapien
gggaattttggaatgataaactgac

SEQ ID NO: 746896 - DNA, 25 bp, Homo sapien
taatgtggattctgtaacttgttgg

SEQ ID NO: 746897 - DNA, 25 bp, Homo sapien
gagtagaagtttggcttccttggct

SEQ ID NO: 746898 - DNA, 25 bp, Homo sapien
tctgcatgcagggacaagctttccg

SEQ ID NO: 746899 - DNA, 25 bp, Homo sapien
atagaattttttctcggagtagaag

SEQ ID NO: 746900 - DNA, 25 bp, Homo sapien
ccttggctgtctgcatgcagggaca

SEQ ID NO: 746901 - DNA, 25 bp, Homo sapien
gatggcactattcaatgctggcagg

SEQ ID NO: 746902 - DNA, 25 bp, Homo sapien
catagaaacgctcctgggtgtctgg

SEQ ID NO: 746903 - DNA, 25 bp, Homo sapien
tgtcaaacaggaagtatggactcca

SEQ ID NO: 746904 - DNA, 25 bp, Homo sapien
caggttctgaatgatcacagaggca

SEQ ID NO: 746905 - DNA, 25 bp, Homo sapien
cagctctccttctcactggtcagca

SEQ ID NO: 746906 - DNA, 25 bp, Homo sapien
ctccttctcactggtcagcaccaga

SEQ ID NO: 746907 - DNA, 25 bp, Homo sapien
ttctccatgactcacagctctcctt

SEQ ID NO: 746908 - DNA, 25 bp, Homo sapien
ccttctccatgactcacagctctcc

SEQ ID NO: 746909 - DNA, 25 bp, Homo sapien
tcagttctctcccggaacgtcattc

SEQ ID NO: 746910 - DNA, 25 bp, Homo sapien
tctctcccggaacgtcattctggaa

SEQ ID NO: 746911 - DNA, 25 bp, Homo sapien
tctcccggaacgtcattctggaatc

SEQ ID NO: 746912 - DNA, 25 bp, Homo sapien
agttctctcccggaacgtcattctg

SEQ ID NO: 746913 - DNA, 25 bp, Homo sapien
tggcttggacagaatctgcatctca

SEQ ID NO: 746914 - DNA, 25 bp, Homo sapien
ttggacagaatctgcatctcatgcc

SEQ ID NO: 746915 - DNA, 25 bp, Homo sapien
ggacagaatctgcatctcatgcctc

SEQ ID NO: 746916 - DNA, 25 bp, Homo sapien
gcttggacagaatctgcatctcatg

SEQ ID NO: 746917 - DNA, 25 bp, Homo sapien
ttcctggctggcatgaataactggg

SEQ ID NO: 746918 - DNA, 25 bp, Homo sapien
tgttggccaatacttaagcagtgca

SEQ ID NO: 746919 - DNA, 25 bp, Homo sapien
acatttgtcttgtgcatctcccagg

SEQ ID NO: 746920 - DNA, 25 bp, Homo sapien
gttccatgcacgtgcccaagcaggt

SEQ ID NO: 746921 - DNA, 25 bp, Homo sapien
tttgttggcatttcaaggacaaaca

SEQ ID NO: 746922 - DNA, 25 bp, Homo sapien
caagcactgaacctccaatccaaaa

SEQ ID NO: 746923 - DNA, 25 bp, Homo sapien
tcttggctacaagcactgaacctcc

SEQ ID NO: 746924 - DNA, 25 bp, Homo sapien
aatttgttggcatttcaaggacaaa

SEQ ID NO: 746925 - DNA, 25 bp, Homo sapien
tgcaaaccgaggctatctgcagaag

SEQ ID NO: 746926 - DNA, 25 bp, Homo sapien
ctgcagaagaggtgcaaagcaccaa

SEQ ID NO: 746927 - DNA, 25 bp, Homo sapien
cagaagaggtgcaaagcaccaatgc

SEQ ID NO: 746928 - DNA, 25 bp, Homo sapien
caaaccgaggctatctgcagaagag

SEQ ID NO: 746929 - DNA, 25 bp, Homo sapien
tttggagggccaacagcatgccctt

SEQ ID NO: 746930 - DNA, 25 bp, Homo sapien
tggagggccaacagcatgccctttc

SEQ ID NO: 746931 - DNA, 25 bp, Homo sapien
cttgttttggagggccaacagcatg

SEQ ID NO: 746932 - DNA, 25 bp, Homo sapien
gttttggagggccaacagcatgccc

SEQ ID NO: 746933 - DNA, 25 bp, Homo sapien
tcaggggcccatggctttttaacac

SEQ ID NO: 746934 - DNA, 25 bp, Homo sapien
gtcaggggcccatggctttttaaca

SEQ ID NO: 746935 - DNA, 25 bp, Homo sapien
caggggcccatggctttttaacaca

SEQ ID NO: 746936 - DNA, 25 bp, Homo sapien
tattttagcaacagttccgtgggtc

SEQ ID NO: 746937 - DNA, 25 bp, Homo sapien
ggtagattatcctgcagcaacctgt

SEQ ID NO: 746938 - DNA, 25 bp, Homo sapien
gaaacattaagcctggaaaagccgc

SEQ ID NO: 746939 - DNA, 25 bp, Homo sapien
aaatgctcaaagcttccagggttgc

SEQ ID NO: 746940 - DNA, 25 bp, Homo sapien
tccacatgggcatcaaaggctacaa

SEQ ID NO: 746941 - DNA, 25 bp, Homo sapien
gtcactgagtcattggtcccctggg

SEQ ID NO: 746942 - DNA, 25 bp, Homo sapien
gactttttgacatcttggtgcagga

SEQ ID NO: 746943 - DNA, 25 bp, Homo sapien
tgtgtctgggaggaaccaccaagat

SEQ ID NO: 746944 - DNA, 25 bp, Homo sapien
tctccagtgttccctatatagagga

SEQ ID NO: 746945 - DNA, 25 bp, Homo sapien
gtgttccctatatagaggatgaatc

SEQ ID NO: 746946 - DNA, 25 bp, Homo sapien
tcaccgcatagtggggtattatgca

SEQ ID NO: 746947 - DNA, 25 bp, Homo sapien
ggggctaacatcaccgcatagtggg

SEQ ID NO: 746948 - DNA, 25 bp, Homo sapien
tgccactttgccatcttctccaggg

SEQ ID NO: 746949 - DNA, 25 bp, Homo sapien
agggcttggcttgggaataagcctt

SEQ ID NO: 746950 - DNA, 25 bp, Homo sapien
gcttggcttgggaataagccttctc

SEQ ID NO: 746951 - DNA, 25 bp, Homo sapien
tggcttgggaataagccttctcacc

SEQ ID NO: 746952 - DNA, 25 bp, Homo sapien
tctagaagcccttgtcttgtcttcc

SEQ ID NO: 746953 - DNA, 25 bp, Homo sapien
tctcctcaagactgtctgcaaggag

SEQ ID NO: 746954 - DNA, 25 bp, Homo sapien
tggctgccacactctctctagaagc

SEQ ID NO: 746955 - DNA, 25 bp, Homo sapien
aaatagtgcagtgacacttgtccca

SEQ ID NO: 746956 - DNA, 25 bp, Homo sapien
gactcctcgagtgggtggaccagtc

SEQ ID NO: 746957 - DNA, 25 bp, Homo sapien
gggcactcactattgctccgtccag

SEQ ID NO: 746958 - DNA, 25 bp, Homo sapien
tcctcatcaggtgtgtgtagtctgc

SEQ ID NO: 746959 - DNA, 25 bp, Homo sapien
tgtgtgtagtctgctacctgggcac

SEQ ID NO: 746960 - DNA, 25 bp, Homo sapien
ttccagttctctcgttgagggcaga

SEQ ID NO: 746961 - DNA, 25 bp, Homo sapien
caggaaggtacacctggccaagtac

SEQ ID NO: 746962 - DNA, 25 bp, Homo sapien
agagcattagcgcagcctcctggag

SEQ ID NO: 746963 - DNA, 25 bp, Homo sapien
cctcctggagctgacggagacggat

SEQ ID NO: 746964 - DNA, 25 bp, Homo sapien
cctgctgtgacccattttgggaacc

SEQ ID NO: 746965 - DNA, 25 bp, Homo sapien
ccctggtaagcagtgagaagtggca

SEQ ID NO: 746966 - DNA, 25 bp, Homo sapien
cttgtgccctggtaagcagtgagaa

SEQ ID NO: 746967 - DNA, 25 bp, Homo sapien
ctggtaagcagtgagaagtggcacc

SEQ ID NO: 746968 - DNA, 25 bp, Homo sapien
agagcaggcccacactgtcactcca

SEQ ID NO: 746969 - DNA, 25 bp, Homo sapien
tcagagcaggcccacactgtcactc

SEQ ID NO: 746970 - DNA, 25 bp, Homo sapien
gagcaggcccacactgtcactccat

SEQ ID NO: 746971 - DNA, 25 bp, Homo sapien
agcaggcccacactgtcactccatc

SEQ ID NO: 746972 - DNA, 25 bp, Homo sapien
ccttagcagcagatagtaattattc

SEQ ID NO: 746973 - DNA, 25 bp, Homo sapien
aaccttagcagcagatagtaattat

SEQ ID NO: 746974 - DNA, 25 bp, Homo sapien
accttagcagcagatagtaattatt

SEQ ID NO: 746975 - DNA, 25 bp, Homo sapien
cactcaacccgaaccagggccactt

SEQ ID NO: 746976 - DNA, 25 bp, Homo sapien
taacaccaccactgatcacatctac

SEQ ID NO: 746977 - DNA, 25 bp, Homo sapien
ccgaaccagggccacttgccttctg

SEQ ID NO: 746978 - DNA, 25 bp, Homo sapien
ccttctgctcccttgactgctaaca

SEQ ID NO: 746979 - DNA, 25 bp, Homo sapien
ggattcgcttgattccaatcactgt

SEQ ID NO: 746980 - DNA, 25 bp, Homo sapien
caaggattcgcttgattccaatcac

SEQ ID NO: 746981 - DNA, 25 bp, Homo sapien
cctccaaggattcgcttgattccaa

SEQ ID NO: 746982 - DNA, 25 bp, Homo sapien
tcgcttgattccaatcactgtctcc

SEQ ID NO: 746983 - DNA, 25 bp, Homo sapien
cctaggatgccagctacagttggca

SEQ ID NO: 746984 - DNA, 25 bp, Homo sapien
ggctctctctgctctatctaggtgt

SEQ ID NO: 746985 - DNA, 25 bp, Homo sapien
attggcctgaactcgctgtccctgg

SEQ ID NO: 746986 - DNA, 25 bp, Homo sapien
ttgctggatgctgacctcacgggct

SEQ ID NO: 746987 - DNA, 25 bp, Homo sapien
ttagcatgagaatgggccacacaga

SEQ ID NO: 746988 - DNA, 25 bp, Homo sapien
ctctgcagggaggtagcttggaaat

SEQ ID NO: 746989 - DNA, 25 bp, Homo sapien
gaaattgcttttagcatgagaatgg

SEQ ID NO: 746990 - DNA, 25 bp, Homo sapien
cagggaggtagcttggaaattgctt

SEQ ID NO: 746991 - DNA, 25 bp, Homo sapien
cctggtcagggagagacacgagaac

SEQ ID NO: 746992 - DNA, 25 bp, Homo sapien
ccctggacatgtgtgttgtgccaag

SEQ ID NO: 746993 - DNA, 25 bp, Homo sapien
gagtggttctaagcatgatggtgac

SEQ ID NO: 746994 - DNA, 25 bp, Homo sapien
tacactgtcgatggtaattctgcag

SEQ ID NO: 746995 - DNA, 25 bp, Homo sapien
caggttcctcaaagatcagatagct

SEQ ID NO: 746996 - DNA, 25 bp, Homo sapien
tcaggttcctcaaagatcagatagc

SEQ ID NO: 746997 - DNA, 25 bp, Homo sapien
ggttcctcaaagatcagatagctgt

SEQ ID NO: 746998 - DNA, 25 bp, Homo sapien
gttcctcaaagatcagatagctgta

SEQ ID NO: 746999 - DNA, 25 bp, Homo sapien
ctgccaactcaagacgcagcatgtc

SEQ ID NO: 747000 - DNA, 25 bp, Homo sapien
tccaaacactgccaactcaagacgc

SEQ ID NO: 747001 - DNA, 25 bp, Homo sapien
gaagcactgggtcacagttactgcc

SEQ ID NO: 747002 - DNA, 25 bp, Homo sapien
caaacactgccaactcaagacgcag

SEQ ID NO: 747003 - DNA, 25 bp, Homo sapien
cttccactcagctgggaatcctcct

SEQ ID NO: 747004 - DNA, 25 bp, Homo sapien
ctcccctagcacctgcaatgcctca

SEQ ID NO: 747005 - DNA, 25 bp, Homo sapien
gctcccctagcacctgcaatgcctc

SEQ ID NO: 747006 - DNA, 25 bp, Homo sapien
ccctagcacctgcaatgcctcactt

SEQ ID NO: 747007 - DNA, 25 bp, Homo sapien
ccaacaagtgaagagtatacattct

SEQ ID NO: 747008 - DNA, 25 bp, Homo sapien
ttaacagtcatatgtagaactgcac

SEQ ID NO: 747009 - DNA, 25 bp, Homo sapien
ctattcaggtatatgggacatttcc

SEQ ID NO: 747010 - DNA, 25 bp, Homo sapien
gaattgacagtagaacatgagctcc

SEQ ID NO: 747011 - DNA, 25 bp, Homo sapien
caatgcagattggtagcaggttcca

SEQ ID NO: 747012 - DNA, 25 bp, Homo sapien
cagaaggatccttttgtagcagtgt

SEQ ID NO: 747013 - DNA, 25 bp, Homo sapien
gaggcctgaaggtccctgctatgca

SEQ ID NO: 747014 - DNA, 25 bp, Homo sapien
gcaggttccataggcgtacaaaaca

SEQ ID NO: 747015 - DNA, 25 bp, Homo sapien
aacctcattgtggattgtccttcag

SEQ ID NO: 747016 - DNA, 25 bp, Homo sapien
gcttctctttcttaaccacaggcag

SEQ ID NO: 747017 - DNA, 25 bp, Homo sapien
caaagcgtgactatggctgacagac

SEQ ID NO: 747018 - DNA, 25 bp, Homo sapien
cgatgaaacctcatagctctgagaa

SEQ ID NO: 747019 - DNA, 25 bp, Homo sapien
cctgaaatttgggatgtagaagatc

SEQ ID NO: 747020 - DNA, 25 bp, Homo sapien
caaacctcacttcaccactgtattc

SEQ ID NO: 747021 - DNA, 25 bp, Homo sapien
aatttgggatgtagaagatcctgcc

SEQ ID NO: 747022 - DNA, 25 bp, Homo sapien
cctggttgcagtatgcctgaaattt

SEQ ID NO: 747023 - DNA, 25 bp, Homo sapien
cctttgctgcattgaccttgtccta

SEQ ID NO: 747024 - DNA, 25 bp, Homo sapien
acctttgctgcattgaccttgtcct

SEQ ID NO: 747025 - DNA, 25 bp, Homo sapien
ctattacattctagaagagtcatgg

SEQ ID NO: 747026 - DNA, 25 bp, Homo sapien
gaagtgaagcgagaactgataaagt

SEQ ID NO: 747027 - DNA, 25 bp, Homo sapien
cggaaagcagccgaagaagtgaagc

SEQ ID NO: 747028 - DNA, 25 bp, Homo sapien
aatagtatactcaatgtatagtcgg

SEQ ID NO: 747029 - DNA, 25 bp, Homo sapien
tccacattatgaagacgcaggcttg

SEQ ID NO: 747030 - DNA, 25 bp, Homo sapien
cagtgtttgcgggtgccatgcccac

SEQ ID NO: 747031 - DNA, 25 bp, Homo sapien
catgcccacgatggcaagtgttaag

SEQ ID NO: 747032 - DNA, 25 bp, Homo sapien
tgcacttcggcccattgtgaatcat

SEQ ID NO: 747033 - DNA, 25 bp, Homo sapien
tactaaatcatcttccagaactcct

SEQ ID NO: 747034 - DNA, 25 bp, Homo sapien
gaaataaactcatggaatgtgacat

SEQ ID NO: 747035 - DNA, 25 bp, Homo sapien
gacattttattcatgtgtggaaagg

SEQ ID NO: 747036 - DNA, 25 bp, Homo sapien
tgttgtcatctgagtatcaaatgat

SEQ ID NO: 747037 - DNA, 25 bp, Homo sapien
gcaaacccagtggaatattgtaggg

SEQ ID NO: 747038 - DNA, 25 bp, Homo sapien
tgccccaagaagaacttatagaatg

SEQ ID NO: 747039 - DNA, 25 bp, Homo sapien
gggagttcagcaatttgccccaaga

SEQ ID NO: 747040 - DNA, 25 bp, Homo sapien
tcaatacaaggttcagcaaatctgc

SEQ ID NO: 747041 - DNA, 25 bp, Homo sapien
attatgagactaaaactcttcttga

SEQ ID NO: 747042 - DNA, 25 bp, Homo sapien
ctggtttaccatgcattgcaattgt

SEQ ID NO: 747043 - DNA, 25 bp, Homo sapien
caattgttagcatatacagcccttg

SEQ ID NO: 747044 - DNA, 25 bp, Homo sapien
cacacatgtgtgttatggcatcact

SEQ ID NO: 747045 - DNA, 25 bp, Homo sapien
ccgtatctcctgaagggagcgatca

SEQ ID NO: 747046 - DNA, 25 bp, Homo sapien
aatgttgatgtgtgacccgtatctc

SEQ ID NO: 747047 - DNA, 25 bp, Homo sapien
gttgatgtgtgacccgtatctcctg

SEQ ID NO: 747048 - DNA, 25 bp, Homo sapien
tgaagggagcgatcatttttgttca

SEQ ID NO: 747049 - DNA, 25 bp, Homo sapien
tgtcttagctaaacaacagacacat

SEQ ID NO: 747050 - DNA, 25 bp, Homo sapien
tggggtgtcttagctaaacaacaga

SEQ ID NO: 747051 - DNA, 25 bp, Homo sapien
gatatgtggggtgtcttagctaaac

SEQ ID NO: 747052 - DNA, 25 bp, Homo sapien
ttagtgatatgtggggtgtcttagc

SEQ ID NO: 747053 - DNA, 25 bp, Homo sapien
gttcttgtagtgtttgttgctattg

SEQ ID NO: 747054 - DNA, 25 bp, Homo sapien
agacattattgcttccagttgttct

SEQ ID NO: 747055 - DNA, 25 bp, Homo sapien
gagatacacaaagacattattgctt

SEQ ID NO: 747056 - DNA, 25 bp, Homo sapien
cttccagttgttcttgtagtgtttg

SEQ ID NO: 747057 - DNA, 25 bp, Homo sapien
tattgagacatagcatgacttcagc

SEQ ID NO: 747058 - DNA, 25 bp, Homo sapien
tcttaattcatagggactgtgctgt

SEQ ID NO: 747059 - DNA, 25 bp, Homo sapien
gacagagtactgtcagttcagggaa

SEQ ID NO: 747060 - DNA, 25 bp, Homo sapien
gcaaaactgtttccagcataccatt

SEQ ID NO: 747061 - DNA, 25 bp, Homo sapien
ttattgtatacctgtgcagcggagt

SEQ ID NO: 747062 - DNA, 25 bp, Homo sapien
tattggcaacttactaacatcaaaa

SEQ ID NO: 747063 - DNA, 25 bp, Homo sapien
tgtgcagcggagtttgactttatgg

SEQ ID NO: 747064 - DNA, 25 bp, Homo sapien
ggcaacttactaacatcaaaattct

SEQ ID NO: 747065 - DNA, 25 bp, Homo sapien
tgtttttggttatttggaactgtca

SEQ ID NO: 747066 - DNA, 25 bp, Homo sapien
atgaaaccacatttcctgaaaataa

SEQ ID NO: 747067 - DNA, 25 bp, Homo sapien
tggcaatgaaaccacatttcctgaa

SEQ ID NO: 747068 - DNA, 25 bp, Homo sapien
aaatgtatctgaacttagtttatgg

SEQ ID NO: 747069 - DNA, 25 bp, Homo sapien
ggtattctggcaatgaaaccacatt

SEQ ID NO: 747070 - DNA, 25 bp, Homo sapien
atgttattaacttcttattatgctt

SEQ ID NO: 747071 - DNA, 25 bp, Homo sapien
tgttattaacttcttattatgcttc

SEQ ID NO: 747072 - DNA, 25 bp, Homo sapien
aatgttattaacttcttattatgct

SEQ ID NO: 747073 - DNA, 25 bp, Homo sapien
caatgttattaacttcttattatgc

SEQ ID NO: 747074 - DNA, 25 bp, Homo sapien
tgctcagtttgtacttcttactcag

SEQ ID NO: 747075 - DNA, 25 bp, Homo sapien
aactttatagaggaagcttgattgc

SEQ ID NO: 747076 - DNA, 25 bp, Homo sapien
agtttgctcagtttgtacttcttac

SEQ ID NO: 747077 - DNA, 25 bp, Homo sapien
aagcttgattgcactctgcatttcc

SEQ ID NO: 747078 - DNA, 25 bp, Homo sapien
tttttgctgagaagttttagagaac

SEQ ID NO: 747079 - DNA, 25 bp, Homo sapien
ttgctgagaagttttagagaacttt

SEQ ID NO: 747080 - DNA, 25 bp, Homo sapien
ctgagaagttttagagaactttcct

SEQ ID NO: 747081 - DNA, 25 bp, Homo sapien
tttcctttctttagagccttcttca

SEQ ID NO: 747082 - DNA, 25 bp, Homo sapien
actcactgatccgatctgtccctaa

SEQ ID NO: 747083 - DNA, 25 bp, Homo sapien
tcactcactgatccgatctgtccct

SEQ ID NO: 747084 - DNA, 25 bp, Homo sapien
tcactgatccgatctgtccctaagt

SEQ ID NO: 747085 - DNA, 25 bp, Homo sapien
ctcactgatccgatctgtccctaag

SEQ ID NO: 747086 - DNA, 25 bp, Homo sapien
cagatgttgctagtgactcatattc

SEQ ID NO: 747087 - DNA, 25 bp, Homo sapien
ggacaccacctctccgtgaaagctt

SEQ ID NO: 747088 - DNA, 25 bp, Homo sapien
tgtacccgtgtaatgtggacaccac

SEQ ID NO: 747089 - DNA, 25 bp, Homo sapien
tctccgtgaaagcttctcatatcca

SEQ ID NO: 747090 - DNA, 25 bp, Homo sapien
ttaggaggcctggttacagtgttgt

SEQ ID NO: 747091 - DNA, 25 bp, Homo sapien
gcctggttacagtgttgtgcttctt

SEQ ID NO: 747092 - DNA, 25 bp, Homo sapien
gaggcctggttacagtgttgtgctt

SEQ ID NO: 747093 - DNA, 25 bp, Homo sapien
gattaggaggcctggttacagtgtt

SEQ ID NO: 747094 - DNA, 25 bp, Homo sapien
gattatccctgctggccattgcatc

SEQ ID NO: 747095 - DNA, 25 bp, Homo sapien
ctgtctccttctggatactccctac

SEQ ID NO: 747096 - DNA, 25 bp, Homo sapien
tactccctacatggattatccctgc

SEQ ID NO: 747097 - DNA, 25 bp, Homo sapien
tctggatactccctacatggattat

SEQ ID NO: 747098 - DNA, 25 bp, Homo sapien
tctggcgatgaggtcgctttttgaa

SEQ ID NO: 747099 - DNA, 25 bp, Homo sapien
ctctggcgatgaggtcgctttttga

SEQ ID NO: 747100 - DNA, 25 bp, Homo sapien
taatgatgtttttaccctcccagaa

SEQ ID NO: 747101 - DNA, 25 bp, Homo sapien
caataaatattctctctaagggtat

SEQ ID NO: 747102 - DNA, 25 bp, Homo sapien
gaataaccttggcatcttctagctt

SEQ ID NO: 747103 - DNA, 25 bp, Homo sapien
gatgtttgtagtttccagtcctcta

SEQ ID NO: 747104 - DNA, 25 bp, Homo sapien
cccttctgtgttacccaactcttgg

SEQ ID NO: 747105 - DNA, 25 bp, Homo sapien
tgtgttacccaactcttggacccca

SEQ ID NO: 747106 - DNA, 25 bp, Homo sapien
gtggctatagcttgtttcactctgc

SEQ ID NO: 747107 - DNA, 25 bp, Homo sapien
tgctttgtgctttagctggcccctt

SEQ ID NO: 747108 - DNA, 25 bp, Homo sapien
gatgatgaaaggccttggtaactga

SEQ ID NO: 747109 - DNA, 25 bp, Homo sapien
atgatgaaaggccttggtaactgac

SEQ ID NO: 747110 - DNA, 25 bp, Homo sapien
ggatgatgaaaggccttggtaactg

SEQ ID NO: 747111 - DNA, 25 bp, Homo sapien
atgttcttcagggagtgttgtggag

SEQ ID NO: 747112 - DNA, 25 bp, Homo sapien
tttattttaaatggactaatgatgg

SEQ ID NO: 747113 - DNA, 25 bp, Homo sapien
ttattttaaatggactaatgatggc

SEQ ID NO: 747114 - DNA, 25 bp, Homo sapien
actaatgatggcattattcttcata

SEQ ID NO: 747115 - DNA, 25 bp, Homo sapien
taatgatggcattattcttcatata

SEQ ID NO: 747116 - DNA, 25 bp, Homo sapien
tggccagttggtaccggatttatac

SEQ ID NO: 747117 - DNA, 25 bp, Homo sapien
caagatatgttggacggttaccaga

SEQ ID NO: 747118 - DNA, 25 bp, Homo sapien
aataatggacttgattggtattcaa

SEQ ID NO: 747119 - DNA, 25 bp, Homo sapien
tgattggtattcaaaccaagatatg

SEQ ID NO: 747120 - DNA, 25 bp, Homo sapien
tgattatgaatgataaactgactga

SEQ ID NO: 747121 - DNA, 25 bp, Homo sapien
catttttgaatggagtatggatgat

SEQ ID NO: 747122 - DNA, 25 bp, Homo sapien
tcaagactattgtggaagcaccctc

SEQ ID NO: 747123 - DNA, 25 bp, Homo sapien
gaatgataaactgactgaatacccc

SEQ ID NO: 747124 - DNA, 25 bp, Homo sapien
aagggagatggcttttcgcactgaa

SEQ ID NO: 747125 - DNA, 25 bp, Homo sapien
aaagggagatggcttttcgcactga

SEQ ID NO: 747126 - DNA, 25 bp, Homo sapien
ggaaagggagatggcttttcgcact

SEQ ID NO: 747127 - DNA, 25 bp, Homo sapien
gggagatggcttttcgcactgaaat

SEQ ID NO: 747128 - DNA, 25 bp, Homo sapien
ttttcctgagagctcttaatagctg

SEQ ID NO: 747129 - DNA, 25 bp, Homo sapien
aatagctgtttgtgtttttctggca

SEQ ID NO: 747130 - DNA, 25 bp, Homo sapien
tttttttcctgagagctcttaatag

SEQ ID NO: 747131 - DNA, 25 bp, Homo sapien
ttcctgagagctcttaatagctgtt

SEQ ID NO: 747132 - DNA, 25 bp, Homo sapien
catattaggggtggcataagggcca

SEQ ID NO: 747133 - DNA, 25 bp, Homo sapien
gagatacaggaacaacaagtagaaa

SEQ ID NO: 747134 - DNA, 25 bp, Homo sapien
ggtggcataagggccaagaaaagct

SEQ ID NO: 747135 - DNA, 25 bp, Homo sapien
aacaagtagaaagagcatattaggg

SEQ ID NO: 747136 - DNA, 25 bp, Homo sapien
gacctatttcttccccacgattatg

SEQ ID NO: 747137 - DNA, 25 bp, Homo sapien
ggctctgtaccgtcataaactgatg

SEQ ID NO: 747138 - DNA, 25 bp, Homo sapien
acgattatgccctgccacagcgtca

SEQ ID NO: 747139 - DNA, 25 bp, Homo sapien
gattctgctgaatgattggacctgg

SEQ ID NO: 747140 - DNA, 25 bp, Homo sapien
gggaggcagcacgatacagtggatg

SEQ ID NO: 747141 - DNA, 25 bp, Homo sapien
cacgatacagtggatgaggcagagc

SEQ ID NO: 747142 - DNA, 25 bp, Homo sapien
gatacagtggatgaggcagagcctt

SEQ ID NO: 747143 - DNA, 25 bp, Homo sapien
gcagcacgatacagtggatgaggca

SEQ ID NO: 747144 - DNA, 25 bp, Homo sapien
acgattccgtggagctcaaagcaaa

SEQ ID NO: 747145 - DNA, 25 bp, Homo sapien
ggaaacgattccgtggagctcaaag

SEQ ID NO: 747146 - DNA, 25 bp, Homo sapien
gagctcaaagcaaacgcacgttcca

SEQ ID NO: 747147 - DNA, 25 bp, Homo sapien
cttggaaacgattccgtggagctca

SEQ ID NO: 747148 - DNA, 25 bp, Homo sapien
tatctcggcctctgaccgccaggat

SEQ ID NO: 747149 - DNA, 25 bp, Homo sapien
tctgcctgggctttaaaagaatggc

SEQ ID NO: 747150 - DNA, 25 bp, Homo sapien
ctgctgattggtacgactggccgcc

SEQ ID NO: 747151 - DNA, 25 bp, Homo sapien
gctaacgagacttgagcgctgctga

SEQ ID NO: 747152 - DNA, 25 bp, Homo sapien
aacggcggcgggctagcaagtccgg

SEQ ID NO: 747153 - DNA, 25 bp, Homo sapien
cggcgttccgcggtcgccgtgacaa

SEQ ID NO: 747154 - DNA, 25 bp, Homo sapien
cctggagcgcgcgtccggcgcagag

SEQ ID NO: 747155 - DNA, 25 bp, Homo sapien
tgcgccggaagtccgcgcgtgcgcg

SEQ ID NO: 747156 - DNA, 25 bp, Homo sapien
cgcgggcgccgaagaggtgtgggta

SEQ ID NO: 747157 - DNA, 25 bp, Homo sapien
cccgcgtcctcgcaccggccgagcc

SEQ ID NO: 747158 - DNA, 25 bp, Homo sapien
ggtgtgggtagccgggcgccagagg

SEQ ID NO: 747159 - DNA, 25 bp, Homo sapien
tagccgggcgccagaggggtcgggc

SEQ ID NO: 747160 - DNA, 25 bp, Homo sapien
gaaacttgaatcagcgccccgatcc

SEQ ID NO: 747161 - DNA, 25 bp, Homo sapien
gagggctcttccttcggccccatca

SEQ ID NO: 747162 - DNA, 25 bp, Homo sapien
ttaacaggctccgaaacttgaatca

SEQ ID NO: 747163 - DNA, 25 bp, Homo sapien
ggctccgaaacttgaatcagcgccc

SEQ ID NO: 747164 - DNA, 25 bp, Homo sapien
tactatcttaaatcgggtcgcaccc

SEQ ID NO: 747165 - DNA, 25 bp, Homo sapien
tactctgttactatcttaaatcggg

SEQ ID NO: 747166 - DNA, 25 bp, Homo sapien
ggctgcgctccaagttgcgcgacca

SEQ ID NO: 747167 - DNA, 25 bp, Homo sapien
acccgttcttcttgtcggtgagtga

SEQ ID NO: 747168 - DNA, 25 bp, Homo sapien
taagcatgcccaaatgacatggctg

SEQ ID NO: 747169 - DNA, 25 bp, Homo sapien
tgtgtgtcatagatcctgaaggcct

SEQ ID NO: 747170 - DNA, 25 bp, Homo sapien
catgtttctggttcacaggacacgc

SEQ ID NO: 747171 - DNA, 25 bp, Homo sapien
cagctctctggaagattgatgggca

SEQ ID NO: 747172 - DNA, 25 bp, Homo sapien
cattttgcaaggtgtggtcaagatc

SEQ ID NO: 747173 - DNA, 25 bp, Homo sapien
ttgcaaggtgtggtcaagatccgtg

SEQ ID NO: 747174 - DNA, 25 bp, Homo sapien
aggtgtggtcaagatccgtgtgcat

SEQ ID NO: 747175 - DNA, 25 bp, Homo sapien
caaggtgtggtcaagatccgtgtgc

SEQ ID NO: 747176 - DNA, 25 bp, Homo sapien
ttgatgtgtgaaacccacttccaca

SEQ ID NO: 747177 - DNA, 25 bp, Homo sapien
tttgatgtgtgaaacccacttccac

SEQ ID NO: 747178 - DNA, 25 bp, Homo sapien
tgatgtgtgaaacccacttccacat

SEQ ID NO: 747179 - DNA, 25 bp, Homo sapien
ctttgatgtgtgaaacccacttcca

SEQ ID NO: 747180 - DNA, 25 bp, Homo sapien
tgagtcctgctcaggttgcctgcgc

SEQ ID NO: 747181 - DNA, 25 bp, Homo sapien
cctgctcaggttgcctgcgctgcag

SEQ ID NO: 747182 - DNA, 25 bp, Homo sapien
tagggtgagtcctgctcaggttgcc

SEQ ID NO: 747183 - DNA, 25 bp, Homo sapien
agtcctgctcaggttgcctgcgctg

SEQ ID NO: 747184 - DNA, 25 bp, Homo sapien
atcatcttcacgctctttctgtttc

SEQ ID NO: 747185 - DNA, 25 bp, Homo sapien
ctccatccatcatcttcacgctctt

SEQ ID NO: 747186 - DNA, 25 bp, Homo sapien
catccatcatcttcacgctctttct

SEQ ID NO: 747187 - DNA, 25 bp, Homo sapien
tccatcatcttcacgctctttctgt

SEQ ID NO: 747188 - DNA, 25 bp, Homo sapien
accagctctcactcttgcaccttga

SEQ ID NO: 747189 - DNA, 25 bp, Homo sapien
tcatgactcttcaccagctctcact

SEQ ID NO: 747190 - DNA, 25 bp, Homo sapien
tgactcttcaccagctctcactctt

SEQ ID NO: 747191 - DNA, 25 bp, Homo sapien
ccagctctcactcttgcaccttgat

SEQ ID NO: 747192 - DNA, 25 bp, Homo sapien
tgagactgagaccagcgcactaagg

SEQ ID NO: 747193 - DNA, 25 bp, Homo sapien
aggaagtgactcatcccgtccctag

SEQ ID NO: 747194 - DNA, 25 bp, Homo sapien
cgctggacctgacaacaaagctttc

SEQ ID NO: 747195 - DNA, 25 bp, Homo sapien
taaggaacggaatagagcaccaggg

SEQ ID NO: 747196 - DNA, 25 bp, Homo sapien
aggatcgggtaggacccatggtcac

SEQ ID NO: 747197 - DNA, 25 bp, Homo sapien
ggagagtttgctcccatagggcagc

SEQ ID NO: 747198 - DNA, 25 bp, Homo sapien
caccacagtggctagtgctgtgagg

SEQ ID NO: 747199 - DNA, 25 bp, Homo sapien
cagcaggatcgggtaggacccatgg

SEQ ID NO: 747200 - DNA, 25 bp, Homo sapien
ttgtccttggatagccaatatcaag

SEQ ID NO: 747201 - DNA, 25 bp, Homo sapien
gccaatatcaagttaaatttgccag

SEQ ID NO: 747202 - DNA, 25 bp, Homo sapien
ccttggatagccaatatcaagttaa

SEQ ID NO: 747203 - DNA, 25 bp, Homo sapien
tcaagttaaatttgccagaattgtc

SEQ ID NO: 747204 - DNA, 25 bp, Homo sapien
gaaggtccagtaatggcaaggcagt

SEQ ID NO: 747205 - DNA, 25 bp, Homo sapien
catctgagaaggtccagtaatggca

SEQ ID NO: 747206 - DNA, 25 bp, Homo sapien
aaggcagtcaccaggggacccatgt

SEQ ID NO: 747207 - DNA, 25 bp, Homo sapien
tggcccctcggagaaactgcaggtt

SEQ ID NO: 747208 - DNA, 25 bp, Homo sapien
tgagatgtatttaccccactagata

SEQ ID NO: 747209 - DNA, 25 bp, Homo sapien
tccatctaagctcaagaggttattc

SEQ ID NO: 747210 - DNA, 25 bp, Homo sapien
gccactggttagttctccatctaag

SEQ ID NO: 747211 - DNA, 25 bp, Homo sapien
tagatacatatttgccactggttag

SEQ ID NO: 747212 - DNA, 25 bp, Homo sapien
gccagactacagcagaagatacttt

SEQ ID NO: 747213 - DNA, 25 bp, Homo sapien
tcccatcagtgctgtctcctctaat

SEQ ID NO: 747214 - DNA, 25 bp, Homo sapien
accgcttctgtcactcccatcagtg

SEQ ID NO: 747215 - DNA, 25 bp, Homo sapien
ggagttaaccggcaccgcttctgtc

SEQ ID NO: 747216 - DNA, 25 bp, Homo sapien
cccatgctggcttagaatgaagatt

SEQ ID NO: 747217 - DNA, 25 bp, Homo sapien
cctgcggaccacgtggaaagagtca

SEQ ID NO: 747218 - DNA, 25 bp, Homo sapien
taaaatgtgagcaggtttaccgccc

SEQ ID NO: 747219 - DNA, 25 bp, Homo sapien
ggctccacttagagggaccaatgca

SEQ ID NO: 747220 - DNA, 25 bp, Homo sapien
cctgcgtagaagaaatttgtatagc

SEQ ID NO: 747221 - DNA, 25 bp, Homo sapien
tgatctgttttgagtgggcctgcgt

SEQ ID NO: 747222 - DNA, 25 bp, Homo sapien
tccagggacaacaatgttaatatct

SEQ ID NO: 747223 - DNA, 25 bp, Homo sapien
taaagcacggtgaagtcttgatctg

SEQ ID NO: 747224 - DNA, 25 bp, Homo sapien
cccagggatcggtaaacacacattt

SEQ ID NO: 747225 - DNA, 25 bp, Homo sapien
tctcaaaagatatataccagtcacc

SEQ ID NO: 747226 - DNA, 25 bp, Homo sapien
agttacaatgtaggacccagggatc

SEQ ID NO: 747227 - DNA, 25 bp, Homo sapien
tatcatggcacttagtttgacatag

SEQ ID NO: 747228 - DNA, 25 bp, Homo sapien
tatttccacaggagtggtagaagaa

SEQ ID NO: 747229 - DNA, 25 bp, Homo sapien
gatttgggatacgtataagcagcca

SEQ ID NO: 747230 - DNA, 25 bp, Homo sapien
aacttcctttagattggctgggtgc

SEQ ID NO: 747231 - DNA, 25 bp, Homo sapien
gaagatgggctcatatatttccaca

SEQ ID NO: 747232 - DNA, 25 bp, Homo sapien
tttcggtgccttttacttgtgtaca

SEQ ID NO: 747233 - DNA, 25 bp, Homo sapien
tacttaaacgtgatatagaaatctc

SEQ ID NO: 747234 - DNA, 25 bp, Homo sapien
cagccagattgacttactgtattcc

SEQ ID NO: 747235 - DNA, 25 bp, Homo sapien
tgtgtacagccagattgacttactg

SEQ ID NO: 747236 - DNA, 25 bp, Homo sapien
ctgtagggctggagatttttgccat

SEQ ID NO: 747237 - DNA, 25 bp, Homo sapien
aatcagggactgaatgcaccgcaca

SEQ ID NO: 747238 - DNA, 25 bp, Homo sapien
gagagattgcagttgtaaccatcct

SEQ ID NO: 747239 - DNA, 25 bp, Homo sapien
gcccatcgctgctgacatccagttt

SEQ ID NO: 747240 - DNA, 25 bp, Homo sapien
ttttgggaaatctaactgcccatcg

SEQ ID NO: 747241 - DNA, 25 bp, Homo sapien
gagtcatcatctagcgaaggccctg

SEQ ID NO: 747242 - DNA, 25 bp, Homo sapien
catcatctagcgaaggccctgtgta

SEQ ID NO: 747243 - DNA, 25 bp, Homo sapien
atgagtcatcatctagcgaaggccc

SEQ ID NO: 747244 - DNA, 25 bp, Homo sapien
tactaacttagtcttctcctctcct

SEQ ID NO: 747245 - DNA, 25 bp, Homo sapien
agctccatgcaagggagtggcccca

SEQ ID NO: 747246 - DNA, 25 bp, Homo sapien
ggactacgccattcctctgctgtga

SEQ ID NO: 747247 - DNA, 25 bp, Homo sapien
catatagccgactgggaatgcctct

SEQ ID NO: 747248 - DNA, 25 bp, Homo sapien
ttcattccacatgccgcgataccat

SEQ ID NO: 747249 - DNA, 25 bp, Homo sapien
tacctacggaggagaagaagatgtc

SEQ ID NO: 747250 - DNA, 25 bp, Homo sapien
tgagagtcagacaaccccaaatcga

SEQ ID NO: 747251 - DNA, 25 bp, Homo sapien
tcacccatccgtacctacggaggag

SEQ ID NO: 747252 - DNA, 25 bp, Homo sapien
gcctgattcaaaagcattcctatgc

SEQ ID NO: 747253 - DNA, 25 bp, Homo sapien
ccaaaggattccgggattcctccag

SEQ ID NO: 747254 - DNA, 25 bp, Homo sapien
tgccaaaggattccgggattcctcc

SEQ ID NO: 747255 - DNA, 25 bp, Homo sapien
taacgaagctgaaaatagatagcaa

SEQ ID NO: 747256 - DNA, 25 bp, Homo sapien
ttgccaaaggattccgggattcctc

SEQ ID NO: 747257 - DNA, 25 bp, Homo sapien
gctgtggcagtactacactccacag

SEQ ID NO: 747258 - DNA, 25 bp, Homo sapien
aggggctgtggcagtactacactcc

SEQ ID NO: 747259 - DNA, 25 bp, Homo sapien
cgtaagcttaaggggctgtggcagt

SEQ ID NO: 747260 - DNA, 25 bp, Homo sapien
gggctgtggcagtactacactccac

SEQ ID NO: 747261 - DNA, 25 bp, Homo sapien
cagccaagggtgcacatcattaaga

SEQ ID NO: 747262 - DNA, 25 bp, Homo sapien
ttaagaagaaagaccacacagcctc

SEQ ID NO: 747263 - DNA, 25 bp, Homo sapien
tcaatgcataagtaccagccaaggg

SEQ ID NO: 747264 - DNA, 25 bp, Homo sapien
gaaacagtttttacggcagtcactg

SEQ ID NO: 747265 - DNA, 25 bp, Homo sapien
actcaccaacaatgaactggatcaa

SEQ ID NO: 747266 - DNA, 25 bp, Homo sapien
tctatgtgcatccagattctccttt

SEQ ID NO: 747267 - DNA, 25 bp, Homo sapien
caatgaactggatcaacatggccat

SEQ ID NO: 747268 - DNA, 25 bp, Homo sapien
ggtgagcaactactcaaacagatgg

SEQ ID NO: 747269 - DNA, 25 bp, Homo sapien
gggacttacaaagagctgcatttaa

SEQ ID NO: 747270 - DNA, 25 bp, Homo sapien
tggggacttacaaagagctgcattt

SEQ ID NO: 747271 - DNA, 25 bp, Homo sapien
atggggacttacaaagagctgcatt

SEQ ID NO: 747272 - DNA, 25 bp, Homo sapien
ggacttacaaagagctgcatttaag

SEQ ID NO: 747273 - DNA, 25 bp, Homo sapien
agaagttaatcactcttattaaaca

SEQ ID NO: 747274 - DNA, 25 bp, Homo sapien
tagtcctgatggacatcgtccctgt

SEQ ID NO: 747275 - DNA, 25 bp, Homo sapien
tcgtccctgtggacaacaagaggta

SEQ ID NO: 747276 - DNA, 25 bp, Homo sapien
gatcctgaggccaagtacatagtcc

SEQ ID NO: 747277 - DNA, 25 bp, Homo sapien
gacaacaagaggtaccgctacgcct

SEQ ID NO: 747278 - DNA, 25 bp, Homo sapien
cgagatgatcatcaccaagtcgggc

SEQ ID NO: 747279 - DNA, 25 bp, Homo sapien
ttgtggagaagtcgtcctgtgccca

SEQ ID NO: 747280 - DNA, 25 bp, Homo sapien
ccatgagctgggcaccgagatgatc

SEQ ID NO: 747281 - DNA, 25 bp, Homo sapien
gaaatggccaaaattgcctgcagcc

SEQ ID NO: 747282 - DNA, 25 bp, Homo sapien
aagccatgagccatacatcgcgggt

SEQ ID NO: 747283 - DNA, 25 bp, Homo sapien
caacgtctgatgctcaagccatgag

SEQ ID NO: 747284 - DNA, 25 bp, Homo sapien
catcgcgggtgggagatctttttct

SEQ ID NO: 747285 - DNA, 25 bp, Homo sapien
tctttggaggcttcagtctgttgaa

SEQ ID NO: 747286 - DNA, 25 bp, Homo sapien
agaaggaggcgacggagaacacaat

SEQ ID NO: 747287 - DNA, 25 bp, Homo sapien
ggcgacggagaacacaatcaaaccc

SEQ ID NO: 747288 - DNA, 25 bp, Homo sapien
gaggcgacggagaacacaatcaaac

SEQ ID NO: 747289 - DNA, 25 bp, Homo sapien
gacggagaacacaatcaaacccctg

SEQ ID NO: 747290 - DNA, 25 bp, Homo sapien
ctctcgggccaacgccttctccatt

SEQ ID NO: 747291 - DNA, 25 bp, Homo sapien
ggaccatggagttcacggcgtcccc

SEQ ID NO: 747292 - DNA, 25 bp, Homo sapien
gggaccatggagttcacggcgtccc

SEQ ID NO: 747293 - DNA, 25 bp, Homo sapien
attgccgcgctcatgtcgagcggcg

SEQ ID NO: 747294 - DNA, 25 bp, Homo sapien
tctggagtcgttggagctgacactt

SEQ ID NO: 747295 - DNA, 25 bp, Homo sapien
ccttggggaatctggacggcagttc

SEQ ID NO: 747296 - DNA, 25 bp, Homo sapien
ctgctctcggaaactttgagctgtg

SEQ ID NO: 747297 - DNA, 25 bp, Homo sapien
gctgtgtttcgggtctttgtctccc

SEQ ID NO: 747298 - DNA, 25 bp, Homo sapien
gtagtgctcggtgggccctctcctc

SEQ ID NO: 747299 - DNA, 25 bp, Homo sapien
cgccgtagtgctcggtgggccctct

SEQ ID NO: 747300 - DNA, 25 bp, Homo sapien
ccttcgaagtctctgcggctctggg

SEQ ID NO: 747301 - DNA, 25 bp, Homo sapien
tctccggctgccttcgaagtctctg

SEQ ID NO: 747302 - DNA, 25 bp, Homo sapien
gccgagcgccccggggcgtgcgcac

SEQ ID NO: 747303 - DNA, 25 bp, Homo sapien
cgtttccgccttcgggctgtgcaga

SEQ ID NO: 747304 - DNA, 25 bp, Homo sapien
ttgatgctcgtttccgccttcgggc

SEQ ID NO: 747305 - DNA, 25 bp, Homo sapien
tcctagcagccgcgctcggctggtg

SEQ ID NO: 747306 - DNA, 25 bp, Homo sapien
ggactttgtgcagttgatgctcgtt

SEQ ID NO: 747307 - DNA, 25 bp, Homo sapien
ttaggccgcggtgatgtgtcctctc

SEQ ID NO: 747308 - DNA, 25 bp, Homo sapien
catgcccggatctcgggcgttaggc

SEQ ID NO: 747309 - DNA, 25 bp, Homo sapien
cactggtctggtcatagcttcccca

SEQ ID NO: 747310 - DNA, 25 bp, Homo sapien
tggaaaaagcgagaactcccgaggc

SEQ ID NO: 747311 - DNA, 25 bp, Homo sapien
tgagcgcttccctactttcttttgg

SEQ ID NO: 747312 - DNA, 25 bp, Homo sapien
gaccatcgaatgagagtcccagccc

SEQ ID NO: 747313 - DNA, 25 bp, Homo sapien
gggatctgccccgagtatggacctg

SEQ ID NO: 747314 - DNA, 25 bp, Homo sapien
cagaggcgccggattctactgagcg

SEQ ID NO: 747315 - DNA, 25 bp, Homo sapien
aagccacggttctgagagcagcatc

SEQ ID NO: 747316 - DNA, 25 bp, Homo sapien
gctctcgctaagcttatctttttca

SEQ ID NO: 747317 - DNA, 25 bp, Homo sapien
agccacggttctgagagcagcatcc

SEQ ID NO: 747318 - DNA, 25 bp, Homo sapien
cctttgccaaatgcccgcagctctc

SEQ ID NO: 747319 - DNA, 25 bp, Homo sapien
tagtccgggcgctaccataaggttc

SEQ ID NO: 747320 - DNA, 25 bp, Homo sapien
ttctcttcggcagccgtcccatttt

SEQ ID NO: 747321 - DNA, 25 bp, Homo sapien
ataaggttcgcactctcccactacg

SEQ ID NO: 747322 - DNA, 25 bp, Homo sapien
tacgcgtcgcgtggttaccgtagag

SEQ ID NO: 747323 - DNA, 25 bp, Homo sapien
tgtgcccccgataataatgttgcag

SEQ ID NO: 747324 - DNA, 25 bp, Homo sapien
gcatatgttttactgccgaggtttc

SEQ ID NO: 747325 - DNA, 25 bp, Homo sapien
gaggtttcaacaccaacaagatgca

SEQ ID NO: 747326 - DNA, 25 bp, Homo sapien
gagggacggtgtgcccccgataata

SEQ ID NO: 747327 - DNA, 25 bp, Homo sapien
ccgctttgggaaggctttgaatcat

SEQ ID NO: 747328 - DNA, 25 bp, Homo sapien
tctccgctttgggaaggctttgaat

SEQ ID NO: 747329 - DNA, 25 bp, Homo sapien
tccgctttgggaaggctttgaatca

SEQ ID NO: 747330 - DNA, 25 bp, Homo sapien
ctccgctttgggaaggctttgaatc

SEQ ID NO: 747331 - DNA, 25 bp, Homo sapien
tttgcccttcgagcaagacttgggt

SEQ ID NO: 747332 - DNA, 25 bp, Homo sapien
cctttatcggctctatagctgggcg

SEQ ID NO: 747333 - DNA, 25 bp, Homo sapien
ggctcctcgagctttctggtgcgga

SEQ ID NO: 747334 - DNA, 25 bp, Homo sapien
tccgggaccactttggctcgataaa

SEQ ID NO: 747335 - DNA, 25 bp, Homo sapien
aagacgctacaaggcctggaggcgc

SEQ ID NO: 747336 - DNA, 25 bp, Homo sapien
ccagggcggacacgtggggtggcct

SEQ ID NO: 747337 - DNA, 25 bp, Homo sapien
cccacgtagcgcggctgctgaaact

SEQ ID NO: 747338 - DNA, 25 bp, Homo sapien
cgccgcgccttgggacccggaggag

SEQ ID NO: 747339 - DNA, 25 bp, Homo sapien
tcacgctgcgagttttgcacacaat

SEQ ID NO: 747340 - DNA, 25 bp, Homo sapien
gctgattcttccactgccgggagga

SEQ ID NO: 747341 - DNA, 25 bp, Homo sapien
tgcacacaatgttagcacgctgatt

SEQ ID NO: 747342 - DNA, 25 bp, Homo sapien
ccggtccctgcggtagtgagctcgt

SEQ ID NO: 747343 - DNA, 25 bp, Homo sapien
ttctgttttcttttgcagttcttga

SEQ ID NO: 747344 - DNA, 25 bp, Homo sapien
ggatcagaagagatttttcttttct

SEQ ID NO: 747345 - DNA, 25 bp, Homo sapien
cagaagagatttttcttttctgttt

SEQ ID NO: 747346 - DNA, 25 bp, Homo sapien
tcttttctgttttcttttgcagttc

SEQ ID NO: 747347 - DNA, 25 bp, Homo sapien
gctgactctggctcccggaaagcga

SEQ ID NO: 747348 - DNA, 25 bp, Homo sapien
gggatgctctagcagtcaccagagg

SEQ ID NO: 747349 - DNA, 25 bp, Homo sapien
tctggctcccggaaagcgaaggtga

SEQ ID NO: 747350 - DNA, 25 bp, Homo sapien
tgatctctcaaaactccttacaaaa

SEQ ID NO: 747351 - DNA, 25 bp, Homo sapien
ctgttgggagtaagatgaggttcaa

SEQ ID NO: 747352 - DNA, 25 bp, Homo sapien
agatgaggttcaatcaactgcttct

SEQ ID NO: 747353 - DNA, 25 bp, Homo sapien
gggagtaagatgaggttcaatcaac

SEQ ID NO: 747354 - DNA, 25 bp, Homo sapien
gtaagatgaggttcaatcaactgct

SEQ ID NO: 747355 - DNA, 25 bp, Homo sapien
ggcatccaagtgcttacagtatgaa

SEQ ID NO: 747356 - DNA, 25 bp, Homo sapien
gacatgtttcaagtcgtctggagca

SEQ ID NO: 747357 - DNA, 25 bp, Homo sapien
tgtttccttgcatacgacatgtttc

SEQ ID NO: 747358 - DNA, 25 bp, Homo sapien
gcacgtcgacatttgggaataggca

SEQ ID NO: 747359 - DNA, 25 bp, Homo sapien
gcccagatagcctagggtcacacgg

SEQ ID NO: 747360 - DNA, 25 bp, Homo sapien
cacctggcatcatagaagacgcgct

SEQ ID NO: 747361 - DNA, 25 bp, Homo sapien
gacacagctggcttcgaactctgac

SEQ ID NO: 747362 - DNA, 25 bp, Homo sapien
gagcaatccgcacagcctttcggag

SEQ ID NO: 747363 - DNA, 25 bp, Homo sapien
tagaggtctgggaccgacgacagct

SEQ ID NO: 747364 - DNA, 25 bp, Homo sapien
aggaaagtgcttcccgccatcgcat

SEQ ID NO: 747365 - DNA, 25 bp, Homo sapien
taagcgggatagagaacccacggat

SEQ ID NO: 747366 - DNA, 25 bp, Homo sapien
catcgcatcgacctaactggagcag

SEQ ID NO: 747367 - DNA, 25 bp, Homo sapien
ttgcagggaccctgatagcgttggc

SEQ ID NO: 747368 - DNA, 25 bp, Homo sapien
cttgggaggggtctttagaagtcag

SEQ ID NO: 747369 - DNA, 25 bp, Homo sapien
ttgggaggggtctttagaagtcaga

SEQ ID NO: 747370 - DNA, 25 bp, Homo sapien
cggcggggcttctaactcggcgtct

SEQ ID NO: 747371 - DNA, 25 bp, Homo sapien
accgcgccgaccaagcagggacctg

SEQ ID NO: 747372 - DNA, 25 bp, Homo sapien
tctaactcggcgtctgtgtcccgac

SEQ ID NO: 747373 - DNA, 25 bp, Homo sapien
gccagcgacaccgtcaccgcgccga

SEQ ID NO: 747374 - DNA, 25 bp, Homo sapien
ctcaacggtgccctctatgtagagt

SEQ ID NO: 747375 - DNA, 25 bp, Homo sapien
tttctgcagtcatgcatgctcctgc

SEQ ID NO: 747376 - DNA, 25 bp, Homo sapien
gccctctatgtagagtgtatatggg

SEQ ID NO: 747377 - DNA, 25 bp, Homo sapien
ggtagcttttctgcagtcatgcatg

SEQ ID NO: 747378 - DNA, 25 bp, Homo sapien
gcttgggcttgggtgctcatcacag

SEQ ID NO: 747379 - DNA, 25 bp, Homo sapien
tcccagctgatgtaagccacgttaa

SEQ ID NO: 747380 - DNA, 25 bp, Homo sapien
tgaactcaaccttactttccagagg

SEQ ID NO: 747381 - DNA, 25 bp, Homo sapien
gcaaactgacaattaggaccaggac

SEQ ID NO: 747382 - DNA, 25 bp, Homo sapien
ccaagagtccctcttagccctagta

SEQ ID NO: 747383 - DNA, 25 bp, Homo sapien
agtgattttacacaggctgagctcc

SEQ ID NO: 747384 - DNA, 25 bp, Homo sapien
ggtcttggtagcagtgattttacac

SEQ ID NO: 747385 - DNA, 25 bp, Homo sapien
tcatccattgaatcatgctcctcat

SEQ ID NO: 747386 - DNA, 25 bp, Homo sapien
tgctgagaagaatttaatgaaaaaa

SEQ ID NO: 747387 - DNA, 25 bp, Homo sapien
taatgaaaaaatagggatttgcact

SEQ ID NO: 747388 - DNA, 25 bp, Homo sapien
tgaaaaaatagggatttgcactaca

SEQ ID NO: 747389 - DNA, 25 bp, Homo sapien
gaaaaaatagggatttgcactacaa

SEQ ID NO: 747390 - DNA, 25 bp, Homo sapien
tgagtaattatcagtgccaactcct

SEQ ID NO: 747391 - DNA, 25 bp, Homo sapien
gacacatcgttctactgaaacctga

SEQ ID NO: 747392 - DNA, 25 bp, Homo sapien
tggcaggaagaatcgagccacaagg

SEQ ID NO: 747393 - DNA, 25 bp, Homo sapien
agccacaagggcttaagattcttgg

SEQ ID NO: 747394 - DNA, 25 bp, Homo sapien
aaacctcttgaaatcctgtgctgtt

SEQ ID NO: 747395 - DNA, 25 bp, Homo sapien
acctcttgaaatcctgtgctgttga

SEQ ID NO: 747396 - DNA, 25 bp, Homo sapien
ctcttgaaatcctgtgctgttgaaa

SEQ ID NO: 747397 - DNA, 25 bp, Homo sapien
cctcttgaaatcctgtgctgttgaa

SEQ ID NO: 747398 - DNA, 25 bp, Homo sapien
gagcttgctccacatggcacatgga

SEQ ID NO: 747399 - DNA, 25 bp, Homo sapien
catgttgggtgttttgacttctatt

SEQ ID NO: 747400 - DNA, 25 bp, Homo sapien
ttgcaagttacattctctcccccag

SEQ ID NO: 747401 - DNA, 25 bp, Homo sapien
acatggacacgggccgctctggcag

SEQ ID NO: 747402 - DNA, 25 bp, Homo sapien
ggaagtaaatggagaagcattagtg

SEQ ID NO: 747403 - DNA, 25 bp, Homo sapien
ttcttaaccctgactctatgcacca

SEQ ID NO: 747404 - DNA, 25 bp, Homo sapien
tgtgagctatttcttaaccctgact

SEQ ID NO: 747405 - DNA, 25 bp, Homo sapien
accctgactctatgcaccattccat

SEQ ID NO: 747406 - DNA, 25 bp, Homo sapien
ttaaccctgactctatgcaccattc

SEQ ID NO: 747407 - DNA, 25 bp, Homo sapien
tgtttctcttggcacattggccttt

SEQ ID NO: 747408 - DNA, 25 bp, Homo sapien
gtttctcttggcacattggcctttt

SEQ ID NO: 747409 - DNA, 25 bp, Homo sapien
ttagatgtagatcatattcttggtg

SEQ ID NO: 747410 - DNA, 25 bp, Homo sapien
aattcatactccgtggaactcgtgg

SEQ ID NO: 747411 - DNA, 25 bp, Homo sapien
acaggtattctggtgttagggcaca

SEQ ID NO: 747412 - DNA, 25 bp, Homo sapien
cacagaattcatactccgtggaact

SEQ ID NO: 747413 - DNA, 25 bp, Homo sapien
ctttactgaccgaactctctgcagc

SEQ ID NO: 747414 - DNA, 25 bp, Homo sapien
tttactgaccgaactctctgcagct

SEQ ID NO: 747415 - DNA, 25 bp, Homo sapien
gctggagacactttactgaccgaac

SEQ ID NO: 747416 - DNA, 25 bp, Homo sapien
ggagacactttactgaccgaactct

SEQ ID NO: 747417 - DNA, 25 bp, Homo sapien
gctttcaacctccagccactcttct

SEQ ID NO: 747418 - DNA, 25 bp, Homo sapien
gggctgtctccctccactccgccat

SEQ ID NO: 747419 - DNA, 25 bp, Homo sapien
catagggaacttctgggagactgct

SEQ ID NO: 747420 - DNA, 25 bp, Homo sapien
tctcttctgctttcaacctccagcc

SEQ ID NO: 747421 - DNA, 25 bp, Homo sapien
cttctggctccacagcgggctcggg

SEQ ID NO: 747422 - DNA, 25 bp, Homo sapien
tgtctgtgagcctagacagggtctc

SEQ ID NO: 747423 - DNA, 25 bp, Homo sapien
ctggaggaaactgcctgtctgtgag

SEQ ID NO: 747424 - DNA, 25 bp, Homo sapien
caacaactgataaggccctctgtga

SEQ ID NO: 747425 - DNA, 25 bp, Homo sapien
ggcactttctacagacaccgaagta

SEQ ID NO: 747426 - DNA, 25 bp, Homo sapien
gaacccagatttgccaagggcttgg

SEQ ID NO: 747427 - DNA, 25 bp, Homo sapien
tgaacccagatttgccaagggcttg

SEQ ID NO: 747428 - DNA, 25 bp, Homo sapien
gaagtacctaatgactctgccagct

SEQ ID NO: 747429 - DNA, 25 bp, Homo sapien
gattcctacagctccatgtaacctt

SEQ ID NO: 747430 - DNA, 25 bp, Homo sapien
agctccatgtaaccttctctcttct

SEQ ID NO: 747431 - DNA, 25 bp, Homo sapien
acagctccatgtaaccttctctctt

SEQ ID NO: 747432 - DNA, 25 bp, Homo sapien
ttagattcctacagctccatgtaac

SEQ ID NO: 747433 - DNA, 25 bp, Homo sapien
gttggaacatccaattctaggtgaa

SEQ ID NO: 747434 - DNA, 25 bp, Homo sapien
aacttggataggtcatttctcttct

SEQ ID NO: 747435 - DNA, 25 bp, Homo sapien
cttcttcagatctcggttccctcat

SEQ ID NO: 747436 - DNA, 25 bp, Homo sapien
ctgggggaacttggataggtcattt

SEQ ID NO: 747437 - DNA, 25 bp, Homo sapien
gctcggtgatgtaagggcaccacat

SEQ ID NO: 747438 - DNA, 25 bp, Homo sapien
agggccttccattgccgtgacccag

SEQ ID NO: 747439 - DNA, 25 bp, Homo sapien
tggagttacccatgaccagcgggct

SEQ ID NO: 747440 - DNA, 25 bp, Homo sapien
ccagtggagttacccatgaccagcg

SEQ ID NO: 747441 - DNA, 25 bp, Homo sapien
caagggagagttggacaatggggat

SEQ ID NO: 747442 - DNA, 25 bp, Homo sapien
gagggccaaggagccttgcattcct

SEQ ID NO: 747443 - DNA, 25 bp, Homo sapien
gacaatggggattgcgagggccaag

SEQ ID NO: 747444 - DNA, 25 bp, Homo sapien
attgcgagggccaaggagccttgca

SEQ ID NO: 747445 - DNA, 25 bp, Homo sapien
gaggctgagtaaaagccttggtttg

SEQ ID NO: 747446 - DNA, 25 bp, Homo sapien
aggctgagtaaaagccttggtttgg

SEQ ID NO: 747447 - DNA, 25 bp, Homo sapien
cgaggctgagtaaaagccttggttt

SEQ ID NO: 747448 - DNA, 25 bp, Homo sapien
tgtaacagggaaatactggaagagc

SEQ ID NO: 747449 - DNA, 25 bp, Homo sapien
gatagacttggccttgcatcctagg

SEQ ID NO: 747450 - DNA, 25 bp, Homo sapien
taaacagatgcccttcgaggtggag

SEQ ID NO: 747451 - DNA, 25 bp, Homo sapien
gatttgaatgttgtatgcccctgaa

SEQ ID NO: 747452 - DNA, 25 bp, Homo sapien
gaaatgtggtggagcccatacagcc

SEQ ID NO: 747453 - DNA, 25 bp, Homo sapien
cattccgcatatttagggggctcct

SEQ ID NO: 747454 - DNA, 25 bp, Homo sapien
ccacaaggagccactccctgaggat

SEQ ID NO: 747455 - DNA, 25 bp, Homo sapien
ggatcctttcttgatgggtcatgag

SEQ ID NO: 747456 - DNA, 25 bp, Homo sapien
cctgacactttgaagctgacccaca

SEQ ID NO: 747457 - DNA, 25 bp, Homo sapien
cattcccaagatttggacagtggga

SEQ ID NO: 747458 - DNA, 25 bp, Homo sapien
aactctgtgcagcaaatagagaaga

SEQ ID NO: 747459 - DNA, 25 bp, Homo sapien
aatgaaagcaaaccgtaattcgtag

SEQ ID NO: 747460 - DNA, 25 bp, Homo sapien
gagcattggaactggcaaggagcca

SEQ ID NO: 747461 - DNA, 25 bp, Homo sapien
aggttgcgcacgttgctggtgtata

SEQ ID NO: 747462 - DNA, 25 bp, Homo sapien
tctaatccacctttctgtgataatg

SEQ ID NO: 747463 - DNA, 25 bp, Homo sapien
gaaagcagagcggagataacttcta

SEQ ID NO: 747464 - DNA, 25 bp, Homo sapien
tttatatcgaggtggctgtgttgcc

SEQ ID NO: 747465 - DNA, 25 bp, Homo sapien
gctccccggcggtatctgccctggg

SEQ ID NO: 747466 - DNA, 25 bp, Homo sapien
cttgaagcgttgaggctggcactcc

SEQ ID NO: 747467 - DNA, 25 bp, Homo sapien
ctcctgatgtccttgctccccggcg

SEQ ID NO: 747468 - DNA, 25 bp, Homo sapien
gaggctggcactcctttgtgtcctg

SEQ ID NO: 747469 - DNA, 25 bp, Homo sapien
gcttatgcccgaatcaagtttgtgg

SEQ ID NO: 747470 - DNA, 25 bp, Homo sapien
gaaaatgtttgacagagcctcctaa

SEQ ID NO: 747471 - DNA, 25 bp, Homo sapien
gtgtctccaagcaagagggcctttt

SEQ ID NO: 747472 - DNA, 25 bp, Homo sapien
ggcccctgagcttgtgctaaccaaa

SEQ ID NO: 747473 - DNA, 25 bp, Homo sapien
cctgagtaaccgtggaagacaatgc

SEQ ID NO: 747474 - DNA, 25 bp, Homo sapien
tatggctccaagatgtgagttgaat

SEQ ID NO: 747475 - DNA, 25 bp, Homo sapien
tttgctgctgtcaccggaggaagca

SEQ ID NO: 747476 - DNA, 25 bp, Homo sapien
gtgagttgaatgtttgagctcagag

SEQ ID NO: 747477 - DNA, 25 bp, Homo sapien
ctctctgctgtgagggtctatggta

SEQ ID NO: 747478 - DNA, 25 bp, Homo sapien
tctatggtatgctcagttgctgttg

SEQ ID NO: 747479 - DNA, 25 bp, Homo sapien
cttttattccataagcagagctgct

SEQ ID NO: 747480 - DNA, 25 bp, Homo sapien
tctgctcccaaacctagtcctttct

SEQ ID NO: 747481 - DNA, 25 bp, Homo sapien
catggcagacatgtggactgggcat

SEQ ID NO: 747482 - DNA, 25 bp, Homo sapien
aacactgttgtatccgacagcatta

SEQ ID NO: 747483 - DNA, 25 bp, Homo sapien
tggctggagccctaaaacactgttg

SEQ ID NO: 747484 - DNA, 25 bp, Homo sapien
tatccgaaacagagcaacatggcag

SEQ ID NO: 747485 - DNA, 25 bp, Homo sapien
tcactgtccctctataggcctcaag

SEQ ID NO: 747486 - DNA, 25 bp, Homo sapien
gggcgccgtttgcattgctttggat

SEQ ID NO: 747487 - DNA, 25 bp, Homo sapien
cctgtgagaggcctattgctggatg

SEQ ID NO: 747488 - DNA, 25 bp, Homo sapien
gagatgacactgggcgccgtttgca

SEQ ID NO: 747489 - DNA, 25 bp, Homo sapien
tggaagaggtccttacaatcattcc

SEQ ID NO: 747490 - DNA, 25 bp, Homo sapien
tctctgctccggttgtaactggggc

SEQ ID NO: 747491 - DNA, 25 bp, Homo sapien
agatcagcaccacaagaatcccatg

SEQ ID NO: 747492 - DNA, 25 bp, Homo sapien
agaggcctagggcagcgtcttgcaa

SEQ ID NO: 747493 - DNA, 25 bp, Homo sapien
tgaggagtcaggactccccccggct

SEQ ID NO: 747494 - DNA, 25 bp, Homo sapien
cgcaagagggtgtggcggtctctgt

SEQ ID NO: 747495 - DNA, 25 bp, Homo sapien
tgtggcggtctctgttctgtgaaga

SEQ ID NO: 747496 - DNA, 25 bp, Homo sapien
cttcagtccccacagcgcaagaggg

SEQ ID NO: 747497 - DNA, 25 bp, Homo sapien
ccccagtggctgattgccaggatgg

SEQ ID NO: 747498 - DNA, 25 bp, Homo sapien
tctatcacttttgacccccagtggc

SEQ ID NO: 747499 - DNA, 25 bp, Homo sapien
ctatcacttttgacccccagtggct

SEQ ID NO: 747500 - DNA, 25 bp, Homo sapien
tgctctatcacttttgacccccagt

SEQ ID NO: 747501 - DNA, 25 bp, Homo sapien
tgtacagcgtgcagcaaagtcccac

SEQ ID NO: 747502 - DNA, 25 bp, Homo sapien
cagcaaagtcccaccttgagaagca

SEQ ID NO: 747503 - DNA, 25 bp, Homo sapien
aagtcccaccttgagaagcaagtcc

SEQ ID NO: 747504 - DNA, 25 bp, Homo sapien
cagaagcaaccaatttgtacagcgt

SEQ ID NO: 747505 - DNA, 25 bp, Homo sapien
gcctgcctgctttatcgaatcagaa

SEQ ID NO: 747506 - DNA, 25 bp, Homo sapien
tcgtctgctttttgggttgcctgcc

SEQ ID NO: 747507 - DNA, 25 bp, Homo sapien
tgacagtcccattgacattcgttcg

SEQ ID NO: 747508 - DNA, 25 bp, Homo sapien
ttttgcgcatggcagctgacagtcc

SEQ ID NO: 747509 - DNA, 25 bp, Homo sapien
catttccttgtgactgctgggggct

SEQ ID NO: 747510 - DNA, 25 bp, Homo sapien
taggcacatttgtcctcatttcctt

SEQ ID NO: 747511 - DNA, 25 bp, Homo sapien
tttgtcctcatttccttgtgactgc

SEQ ID NO: 747512 - DNA, 25 bp, Homo sapien
tcctcatttccttgtgactgctggg

SEQ ID NO: 747513 - DNA, 25 bp, Homo sapien
ccagactgcggccagacttgacagg

SEQ ID NO: 747514 - DNA, 25 bp, Homo sapien
agactgcggccagacttgacaggat

SEQ ID NO: 747515 - DNA, 25 bp, Homo sapien
ccgctggctcccagactgcggccag

SEQ ID NO: 747516 - DNA, 25 bp, Homo sapien
ggctcccagactgcggccagacttg

SEQ ID NO: 747517 - DNA, 25 bp, Homo sapien
aatgctgccagaaagaagggatcgg

SEQ ID NO: 747518 - DNA, 25 bp, Homo sapien
tgtgcaagacagagtcagatactgc

SEQ ID NO: 747519 - DNA, 25 bp, Homo sapien
aactgcattaattctctcagactag

SEQ ID NO: 747520 - DNA, 25 bp, Homo sapien
tattgcagatgcagctccttcaaaa

SEQ ID NO: 747521 - DNA, 25 bp, Homo sapien
agatagtcgttcaaaggcacgccgc

SEQ ID NO: 747522 - DNA, 25 bp, Homo sapien
gggtagatagtcgttcaaaggcacg

SEQ ID NO: 747523 - DNA, 25 bp, Homo sapien
caggaggggtagatagtcgttcaaa

SEQ ID NO: 747524 - DNA, 25 bp, Homo sapien
gtagatagtcgttcaaaggcacgcc

SEQ ID NO: 747525 - DNA, 25 bp, Homo sapien
agattggcgtagctagttctttggt

SEQ ID NO: 747526 - DNA, 25 bp, Homo sapien
gaagctgataaattgttgcagcatc

SEQ ID NO: 747527 - DNA, 25 bp, Homo sapien
tctttggtccaggaaccttcctggc

SEQ ID NO: 747528 - DNA, 25 bp, Homo sapien
ttctaaatcctccatggaagattgg

SEQ ID NO: 747529 - DNA, 25 bp, Homo sapien
tctccttcttaatcttcctgtggct

SEQ ID NO: 747530 - DNA, 25 bp, Homo sapien
tatctctggggtcacctcttctgtt

SEQ ID NO: 747531 - DNA, 25 bp, Homo sapien
aagtccaagtccacaatttcttcct

SEQ ID NO: 747532 - DNA, 25 bp, Homo sapien
taaggaagtccaagtccacaatttc

SEQ ID NO: 747533 - DNA, 25 bp, Homo sapien
gttggagccccagcaaatggcagct

SEQ ID NO: 747534 - DNA, 25 bp, Homo sapien
ttgcctcattcctaacttcaaagcc

SEQ ID NO: 747535 - DNA, 25 bp, Homo sapien
tgcctcattcctaacttcaaagcct

SEQ ID NO: 747536 - DNA, 25 bp, Homo sapien
ctctgaaatttttttggccctgcaa

SEQ ID NO: 747537 - DNA, 25 bp, Homo sapien
ctgaaatttttttggccctgcaatt

SEQ ID NO: 747538 - DNA, 25 bp, Homo sapien
gaccgtttttccactacctgagtga

SEQ ID NO: 747539 - DNA, 25 bp, Homo sapien
atgccactcttggaccgtttttcca

SEQ ID NO: 747540 - DNA, 25 bp, Homo sapien
tgctcccacaaggaaaccaagacgc

SEQ ID NO: 747541 - DNA, 25 bp, Homo sapien
gactcggactcacaaaaactgctcc

SEQ ID NO: 747542 - DNA, 25 bp, Homo sapien
tcaaaactccctgaacattaaatca

SEQ ID NO: 747543 - DNA, 25 bp, Homo sapien
cattaaatcaccaaggttgggtggg

SEQ ID NO: 747544 - DNA, 25 bp, Homo sapien
ttagtacccaacagaagcctcctgg

SEQ ID NO: 747545 - DNA, 25 bp, Homo sapien
tcctggattcttcgctgttccctga

SEQ ID NO: 747546 - DNA, 25 bp, Homo sapien
ggctgggccgcagcatcagattcct

SEQ ID NO: 747547 - DNA, 25 bp, Homo sapien
cagcatcagattccttgcccctcat

SEQ ID NO: 747548 - DNA, 25 bp, Homo sapien
gctgggccgcagcatcagattcctt

SEQ ID NO: 747549 - DNA, 25 bp, Homo sapien
gggccgcagcatcagattccttgcc

SEQ ID NO: 747550 - DNA, 25 bp, Homo sapien
ggaacaggtggtgcatagtattgaa

SEQ ID NO: 747551 - DNA, 25 bp, Homo sapien
ctggaacaggtggtgcatagtattg

SEQ ID NO: 747552 - DNA, 25 bp, Homo sapien
tggaacaggtggtgcatagtattga

SEQ ID NO: 747553 - DNA, 25 bp, Homo sapien
aggaaggtctcccccatagttgcaa

SEQ ID NO: 747554 - DNA, 25 bp, Homo sapien
gaaggtctcccccatagttgcaaca

SEQ ID NO: 747555 - DNA, 25 bp, Homo sapien
caggaaggtctcccccatagttgca

SEQ ID NO: 747556 - DNA, 25 bp, Homo sapien
ggaaggtctcccccatagttgcaac

SEQ ID NO: 747557 - DNA, 25 bp, Homo sapien
ggcaggctttggcattcgcaggtca

SEQ ID NO: 747558 - DNA, 25 bp, Homo sapien
caggtcaatgcaagaagatggttct

SEQ ID NO: 747559 - DNA, 25 bp, Homo sapien
tgaagacccaggctctttgtattct

SEQ ID NO: 747560 - DNA, 25 bp, Homo sapien
caagaagatggttctaaaatgctga

SEQ ID NO: 747561 - DNA, 25 bp, Homo sapien
aagattatctatgtggatttcacct

SEQ ID NO: 747562 - DNA, 25 bp, Homo sapien
tatctatgtggatttcacctgatct

SEQ ID NO: 747563 - DNA, 25 bp, Homo sapien
gattatctatgtggatttcacctga

SEQ ID NO: 747564 - DNA, 25 bp, Homo sapien
tatgtggatttcacctgatcttgtc

SEQ ID NO: 747565 - DNA, 25 bp, Homo sapien
gtctccaagggggagataaatgcac

SEQ ID NO: 747566 - DNA, 25 bp, Homo sapien
tcttgtctccaagggggagataaat

SEQ ID NO: 747567 - DNA, 25 bp, Homo sapien
ttgtctccaagggggagataaatgc

SEQ ID NO: 747568 - DNA, 25 bp, Homo sapien
ttttcttgtctccaagggggagata

SEQ ID NO: 747569 - DNA, 25 bp, Homo sapien
gcatggttttcacactagccctgca

SEQ ID NO: 747570 - DNA, 25 bp, Homo sapien
catggttttcacactagccctgcag

SEQ ID NO: 747571 - DNA, 25 bp, Homo sapien
tggaatttgtaccaggatgctgagg

SEQ ID NO: 747572 - DNA, 25 bp, Homo sapien
aatctggaatttgtaccaggatgct

SEQ ID NO: 747573 - DNA, 25 bp, Homo sapien
tttgtaccaggatgctgaggggcat

SEQ ID NO: 747574 - DNA, 25 bp, Homo sapien
ccccaaaggctttgccatgaaaata

SEQ ID NO: 747575 - DNA, 25 bp, Homo sapien
gggcttcttcaattctccaggtaag

SEQ ID NO: 747576 - DNA, 25 bp, Homo sapien
tctgttttagcaagggcttcttcaa

SEQ ID NO: 747577 - DNA, 25 bp, Homo sapien
acatttccggccctggtaatgttct

SEQ ID NO: 747578 - DNA, 25 bp, Homo sapien
ttttctggaactccactggacattt

SEQ ID NO: 747579 - DNA, 25 bp, Homo sapien
ccttgggggagctatgaagacaaca

SEQ ID NO: 747580 - DNA, 25 bp, Homo sapien
atgacccgtgaaggcccaagggcag

SEQ ID NO: 747581 - DNA, 25 bp, Homo sapien
gaagacaacatatggggatgacccg

SEQ ID NO: 747582 - DNA, 25 bp, Homo sapien
catatggggatgacccgtgaaggcc

SEQ ID NO: 747583 - DNA, 25 bp, Homo sapien
tgaaaggaaaggctgccccatgctg

SEQ ID NO: 747584 - DNA, 25 bp, Homo sapien
aggtcacagggcccttgcgggcctt

SEQ ID NO: 747585 - DNA, 25 bp, Homo sapien
cacagggcccttgcgggccttggtt

SEQ ID NO: 747586 - DNA, 25 bp, Homo sapien
aaagtgactgcagggaggtcacagg

SEQ ID NO: 747587 - DNA, 25 bp, Homo sapien
ccacgacgtcgtgtttggcttggca

SEQ ID NO: 747588 - DNA, 25 bp, Homo sapien
tggcttggcaatagggaggatttct

SEQ ID NO: 747589 - DNA, 25 bp, Homo sapien
ggagcagcgccctgttgtctagaag

SEQ ID NO: 747590 - DNA, 25 bp, Homo sapien
aaggtgctgccgaggccttagctgc

SEQ ID NO: 747591 - DNA, 25 bp, Homo sapien
ggcccagctccgatgaagacagaaa

SEQ ID NO: 747592 - DNA, 25 bp, Homo sapien
tagagctgttgaaggcgagcttccc

SEQ ID NO: 747593 - DNA, 25 bp, Homo sapien
gagcttccccgccagaaatctgaag

SEQ ID NO: 747594 - DNA, 25 bp, Homo sapien
tctgaagcccatagaaggtctgtct

SEQ ID NO: 747595 - DNA, 25 bp, Homo sapien
tgtttctggcttttgatggggtgag

SEQ ID NO: 747596 - DNA, 25 bp, Homo sapien
gattgattgtgagagactgcaatcc

SEQ ID NO: 747597 - DNA, 25 bp, Homo sapien
ggattgattgtgagagactgcaatc

SEQ ID NO: 747598 - DNA, 25 bp, Homo sapien
tgctttgcagggcatgaaggggcct

SEQ ID NO: 747599 - DNA, 25 bp, Homo sapien
gcatgaaggggccttcacgccagat

SEQ ID NO: 747600 - DNA, 25 bp, Homo sapien
tcttgctttgcagggcatgaagggg

SEQ ID NO: 747601 - DNA, 25 bp, Homo sapien
gggccttcacgccagatcccatctc

SEQ ID NO: 747602 - DNA, 25 bp, Homo sapien
caaggtgtatcccataattgccacc

SEQ ID NO: 747603 - DNA, 25 bp, Homo sapien
tgggcaatgttgatgccatcttgta

SEQ ID NO: 747604 - DNA, 25 bp, Homo sapien
gccatcttgtattgggccctttggg

SEQ ID NO: 747605 - DNA, 25 bp, Homo sapien
ccagaagtggtataaaatctgccag

SEQ ID NO: 747606 - DNA, 25 bp, Homo sapien
gagcagactcctagccttcactttc

SEQ ID NO: 747607 - DNA, 25 bp, Homo sapien
catgagatccgtccaacttttcctt

SEQ ID NO: 747608 - DNA, 25 bp, Homo sapien
actttccagtcctgattagagtgca

SEQ ID NO: 747609 - DNA, 25 bp, Homo sapien
catctttgagcagactcctagcctt

SEQ ID NO: 747610 - DNA, 25 bp, Homo sapien
gatattgttagcattaaatttgcca

SEQ ID NO: 747611 - DNA, 25 bp, Homo sapien
ctttgagggatattgttagcattaa

SEQ ID NO: 747612 - DNA, 25 bp, Homo sapien
agggatattgttagcattaaatttg

SEQ ID NO: 747613 - DNA, 25 bp, Homo sapien
tagcattaaatttgccatttacatt

SEQ ID NO: 747614 - DNA, 25 bp, Homo sapien
tgtggactcttgtccaaggggcttt

SEQ ID NO: 747615 - DNA, 25 bp, Homo sapien
agagtaactgatttcctggatgtgg

SEQ ID NO: 747616 - DNA, 25 bp, Homo sapien
tgttgtttgcagatggccgggaaac

SEQ ID NO: 747617 - DNA, 25 bp, Homo sapien
ggactcttgtccaaggggctttgct

SEQ ID NO: 747618 - DNA, 25 bp, Homo sapien
atcaggttagtgcaatcaagtctgc

SEQ ID NO: 747619 - DNA, 25 bp, Homo sapien
gcaatcaagtctgcaggtgcaaaga

SEQ ID NO: 747620 - DNA, 25 bp, Homo sapien
ggtggtagagtgagtgcaggaattc

SEQ ID NO: 747621 - DNA, 25 bp, Homo sapien
tgtcgacttagcttagggtggtaga

SEQ ID NO: 747622 - DNA, 25 bp, Homo sapien
aaacacaagaggttcggttggtgca

SEQ ID NO: 747623 - DNA, 25 bp, Homo sapien
cattgtgtctatgaccttgcatttc

SEQ ID NO: 747624 - DNA, 25 bp, Homo sapien
gactgatggatgtagaagtttctaa

SEQ ID NO: 747625 - DNA, 25 bp, Homo sapien
tcccaggactttctggtcttcaagg

SEQ ID NO: 747626 - DNA, 25 bp, Homo sapien
taaatgtctatagctagtagcctgg

SEQ ID NO: 747627 - DNA, 25 bp, Homo sapien
tgtgctagtagcatcttgcccagcc

SEQ ID NO: 747628 - DNA, 25 bp, Homo sapien
ggtcttccaggtgttactcatttca

SEQ ID NO: 747629 - DNA, 25 bp, Homo sapien
tatgtgtagtataccaggacagacc

SEQ ID NO: 747630 - DNA, 25 bp, Homo sapien
ggattactttcactgttcaggctct

SEQ ID NO: 747631 - DNA, 25 bp, Homo sapien
ttcaagtcaaattgtgtgatgcctc

SEQ ID NO: 747632 - DNA, 25 bp, Homo sapien
cttttgttcaggattactttcactg

SEQ ID NO: 747633 - DNA, 25 bp, Homo sapien
tttcaagtcaaattgtgtgatgcct

SEQ ID NO: 747634 - DNA, 25 bp, Homo sapien
aaacctttttggggcttgcatggct

SEQ ID NO: 747635 - DNA, 25 bp, Homo sapien
acctttttggggcttgcatggcttg

SEQ ID NO: 747636 - DNA, 25 bp, Homo sapien
aggcaaacctttttggggcttgcat

SEQ ID NO: 747637 - DNA, 25 bp, Homo sapien
gcaaacctttttggggcttgcatgg

SEQ ID NO: 747638 - DNA, 25 bp, Homo sapien
gtaaaaagttgatggctctcatcaa

SEQ ID NO: 747639 - DNA, 25 bp, Homo sapien
caggagtgccccagtaagtaaaaag

SEQ ID NO: 747640 - DNA, 25 bp, Homo sapien
ctctaattggatctgatgggtcagg

SEQ ID NO: 747641 - DNA, 25 bp, Homo sapien
gcagagtagggctccagtgctttgt

SEQ ID NO: 747642 - DNA, 25 bp, Homo sapien
cctcatcccagtcgcgccggcggtg

SEQ ID NO: 747643 - DNA, 25 bp, Homo sapien
tcccagtcgcgccggcggtgaccat

SEQ ID NO: 747644 - DNA, 25 bp, Homo sapien
atcccagtcgcgccggcggtgacca

SEQ ID NO: 747645 - DNA, 25 bp, Homo sapien
tgtcctcatcccagtcgcgccggcg

SEQ ID NO: 747646 - DNA, 25 bp, Homo sapien
ccttggtaccggcaatgggcttcgt

SEQ ID NO: 747647 - DNA, 25 bp, Homo sapien
ggcttcgtatcctccagtgcacttg

SEQ ID NO: 747648 - DNA, 25 bp, Homo sapien
ctcagtccatccttggtaccggcaa

SEQ ID NO: 747649 - DNA, 25 bp, Homo sapien
tccttcgtatagcttcctttctcct

SEQ ID NO: 747650 - DNA, 25 bp, Homo sapien
cttgttgcgttccagcttgggggtc

SEQ ID NO: 747651 - DNA, 25 bp, Homo sapien
ctgcttccccgatccgcaccgcggg

SEQ ID NO: 747652 - DNA, 25 bp, Homo sapien
ggccgtggcgtaggggccttgttgc

SEQ ID NO: 747653 - DNA, 25 bp, Homo sapien
ggccggccgttgtgccctcatccct

SEQ ID NO: 747654 - DNA, 25 bp, Homo sapien
agcggtggcgcaacggctctcgtcc

SEQ ID NO: 747655 - DNA, 25 bp, Homo sapien
cgccctgcctgttccggcttaaagg

SEQ ID NO: 747656 - DNA, 25 bp, Homo sapien
tcgcaataacaacaaaaccggcgcg

SEQ ID NO: 747657 - DNA, 25 bp, Homo sapien
tcctgctacctgtagtcgcctgggc

SEQ ID NO: 747658 - DNA, 25 bp, Homo sapien
tcatcagcttgtggtcaggtaggca

SEQ ID NO: 747659 - DNA, 25 bp, Homo sapien
taggcattaccgtccccattagaga

SEQ ID NO: 747660 - DNA, 25 bp, Homo sapien
tgaagtgtgtcaaatggctgcccct

SEQ ID NO: 747661 - DNA, 25 bp, Homo sapien
caaatcttcagggtgcggtcaagac

SEQ ID NO: 747662 - DNA, 25 bp, Homo sapien
gcaaaaaggattgtgctaggcaaca

SEQ ID NO: 747663 - DNA, 25 bp, Homo sapien
tagcctcagggagcacatagtctag

SEQ ID NO: 747664 - DNA, 25 bp, Homo sapien
tcaagggctttagtatcaacagctc

SEQ ID NO: 747665 - DNA, 25 bp, Homo sapien
agacttaagtcattaccagccaggg

SEQ ID NO: 747666 - DNA, 25 bp, Homo sapien
tacagcataaaacaggtggaaggac

SEQ ID NO: 747667 - DNA, 25 bp, Homo sapien
cgcacttggaagtttgtcttacagc

SEQ ID NO: 747668 - DNA, 25 bp, Homo sapien
gagttctgctggcatgtcttatcac

SEQ ID NO: 747669 - DNA, 25 bp, Homo sapien
gaccagatataactgggaacagcag

SEQ ID NO: 747670 - DNA, 25 bp, Homo sapien
gctctcctgaatgcccgacttcagt

SEQ ID NO: 747671 - DNA, 25 bp, Homo sapien
tgaatgcccgacttcagtgcctggg

SEQ ID NO: 747672 - DNA, 25 bp, Homo sapien
ctgaatgcccgacttcagtgcctgg

SEQ ID NO: 747673 - DNA, 25 bp, Homo sapien
ttagctctcctgaatgcccgacttc

SEQ ID NO: 747674 - DNA, 25 bp, Homo sapien
tgtctcctgagatgtagaataaatc

SEQ ID NO: 747675 - DNA, 25 bp, Homo sapien
caggtgatttcaacatcgtggtgag

SEQ ID NO: 747676 - DNA, 25 bp, Homo sapien
catctacgaaaggtggcagagtcct

SEQ ID NO: 747677 - DNA, 25 bp, Homo sapien
gaggtttgaaataggcactgccaca

SEQ ID NO: 747678 - DNA, 25 bp, Homo sapien
taaggcagagatatcccgtataccc

SEQ ID NO: 747679 - DNA, 25 bp, Homo sapien
tatgttacaggcaatgtggatacag

SEQ ID NO: 747680 - DNA, 25 bp, Homo sapien
aaatgtcaaagttcctgcctccttg

SEQ ID NO: 747681 - DNA, 25 bp, Homo sapien
gtgaccaaatatgggcacatcttcc

SEQ ID NO: 747682 - DNA, 25 bp, Homo sapien
gcctccttgagtctgcagtcaggaa

SEQ ID NO: 747683 - DNA, 25 bp, Homo sapien
cccaacgataagcaagttgtaatgg

SEQ ID NO: 747684 - DNA, 25 bp, Homo sapien
ggttagggccaacatctcatgcctt

SEQ ID NO: 747685 - DNA, 25 bp, Homo sapien
cctggatataacctctacccaacga

SEQ ID NO: 747686 - DNA, 25 bp, Homo sapien
caatctaggttagggccaacatctc

SEQ ID NO: 747687 - DNA, 25 bp, Homo sapien
gcagctgtctgccacctacgaggag

SEQ ID NO: 747688 - DNA, 25 bp, Homo sapien
gtctgccacctacgaggagagccct

SEQ ID NO: 747689 - DNA, 25 bp, Homo sapien
caccagctctgctataccttggtct

SEQ ID NO: 747690 - DNA, 25 bp, Homo sapien
gacaccagctctgctataccttggt

SEQ ID NO: 747691 - DNA, 25 bp, Homo sapien
tttctgcatcgtcttgcctcaatgg

SEQ ID NO: 747692 - DNA, 25 bp, Homo sapien
tctgactgccccgaccgaattttct

SEQ ID NO: 747693 - DNA, 25 bp, Homo sapien
tcaatggcctgctgttgtctgctgg

SEQ ID NO: 747694 - DNA, 25 bp, Homo sapien
tgccccgaccgaattttctgcatcg

SEQ ID NO: 747695 - DNA, 25 bp, Homo sapien
tcttagctgtctcagcaacacttgg

SEQ ID NO: 747696 - DNA, 25 bp, Homo sapien
gctgtctcagcaacacttggttcta

SEQ ID NO: 747697 - DNA, 25 bp, Homo sapien
ttggttctactccccaggtcacaaa

SEQ ID NO: 747698 - DNA, 25 bp, Homo sapien
tctcagcaacacttggttctactcc

SEQ ID NO: 747699 - DNA, 25 bp, Homo sapien
tgtgtcattcgtgcttataaaccag

SEQ ID NO: 747700 - DNA, 25 bp, Homo sapien
tctgcagggccacatggaaatcctc

SEQ ID NO: 747701 - DNA, 25 bp, Homo sapien
taaaccagctgccataaccgcatgg

SEQ ID NO: 747702 - DNA, 25 bp, Homo sapien
tcacagcccatcatgaaagcagtgc

SEQ ID NO: 747703 - DNA, 25 bp, Homo sapien
gatcaagcctgctctcaatggccat

SEQ ID NO: 747704 - DNA, 25 bp, Homo sapien
tttcattctgtggatcaagcctgct

SEQ ID NO: 747705 - DNA, 25 bp, Homo sapien
gtggatcaagcctgctctcaatggc

SEQ ID NO: 747706 - DNA, 25 bp, Homo sapien
ctttcattctgtggatcaagcctgc

SEQ ID NO: 747707 - DNA, 25 bp, Homo sapien
gaatccataggccaaaaggcttgct

SEQ ID NO: 747708 - DNA, 25 bp, Homo sapien
tatcatctgaaatacccggagggac

SEQ ID NO: 747709 - DNA, 25 bp, Homo sapien
catccaatagcggtgtcagcctctg

SEQ ID NO: 747710 - DNA, 25 bp, Homo sapien
caaacgctttgcttgtggcatcagc

SEQ ID NO: 747711 - DNA, 25 bp, Homo sapien
ggtctcagtgggcttgataggcctc

SEQ ID NO: 747712 - DNA, 25 bp, Homo sapien
agtggtctcagtgggcttgataggc

SEQ ID NO: 747713 - DNA, 25 bp, Homo sapien
gtctcagtgggcttgataggcctcc

SEQ ID NO: 747714 - DNA, 25 bp, Homo sapien
tggtctcagtgggcttgataggcct

SEQ ID NO: 747715 - DNA, 25 bp, Homo sapien
ggaaaacatgtcaagggcacccaga

SEQ ID NO: 747716 - DNA, 25 bp, Homo sapien
aaggaaaacatgtcaagggcaccca

SEQ ID NO: 747717 - DNA, 25 bp, Homo sapien
aggaaaacatgtcaagggcacccag

SEQ ID NO: 747718 - DNA, 25 bp, Homo sapien
agctcatctgtagtaggaaagaatg

SEQ ID NO: 747719 - DNA, 25 bp, Homo sapien
cgatgacaaaaccagtgcttgtctg

SEQ ID NO: 747720 - DNA, 25 bp, Homo sapien
tctgtagtaggaaagaatgtaggaa

SEQ ID NO: 747721 - DNA, 25 bp, Homo sapien
ctagacagcgatgacaaaaccagtg

SEQ ID NO: 747722 - DNA, 25 bp, Homo sapien
tgcggactcgccacattcatattgg

SEQ ID NO: 747723 - DNA, 25 bp, Homo sapien
gactcgccacattcatattggctca

SEQ ID NO: 747724 - DNA, 25 bp, Homo sapien
ttcatattggctcaccttgtcggtg

SEQ ID NO: 747725 - DNA, 25 bp, Homo sapien
gccacattcatattggctcaccttg

SEQ ID NO: 747726 - DNA, 25 bp, Homo sapien
acagccccagaggtcggccgctgta

SEQ ID NO: 747727 - DNA, 25 bp, Homo sapien
ttcgaggcaggtgtctgtgctcccc

SEQ ID NO: 747728 - DNA, 25 bp, Homo sapien
tccctgtttccgtggctatcttgac

SEQ ID NO: 747729 - DNA, 25 bp, Homo sapien
gcgccatcacactctagtggcctgg

SEQ ID NO: 747730 - DNA, 25 bp, Homo sapien
tcttgcccgaattaaagatggccgc

SEQ ID NO: 747731 - DNA, 25 bp, Homo sapien
cacgtcaagttttggagctgcggga

SEQ ID NO: 747732 - DNA, 25 bp, Homo sapien
tcatggatactcaggcctctttgcg

SEQ ID NO: 747733 - DNA, 25 bp, Homo sapien
ggtttcgcaccactgaggtcatgga

SEQ ID NO: 747734 - DNA, 25 bp, Homo sapien
tttgctgttcgggtttagccgccat

SEQ ID NO: 747735 - DNA, 25 bp, Homo sapien
tcagcaacgttttgctgttcgggtt

SEQ ID NO: 747736 - DNA, 25 bp, Homo sapien
catgacttcattggcgtcagcaacg

SEQ ID NO: 747737 - DNA, 25 bp, Homo sapien
gcctcgctccatttcgagcatgact

SEQ ID NO: 747738 - DNA, 25 bp, Homo sapien
tcagacgaggcttccgggcctagcg

SEQ ID NO: 747739 - DNA, 25 bp, Homo sapien
gctggcttccatctcgcgagattac

SEQ ID NO: 747740 - DNA, 25 bp, Homo sapien
cctcagacgaggcttccgggcctag

SEQ ID NO: 747741 - DNA, 25 bp, Homo sapien
cttccgggcctagcggaggctggct

SEQ ID NO: 747742 - DNA, 25 bp, Homo sapien
tacagcaggcggactcctccacagg

SEQ ID NO: 747743 - DNA, 25 bp, Homo sapien
ctacagcaggcggactcctccacag

SEQ ID NO: 747744 - DNA, 25 bp, Homo sapien
gcgcctacgccgattccgcagcgta

SEQ ID NO: 747745 - DNA, 25 bp, Homo sapien
gcagcccgccgattctccaaaggcg

SEQ ID NO: 747746 - DNA, 25 bp, Homo sapien
gtagccgcccggcgtagctgccttg

SEQ ID NO: 747747 - DNA, 25 bp, Homo sapien
ttctccaaaggcgcctacgccgatt

SEQ ID NO: 747748 - DNA, 25 bp, Homo sapien
tctcctcagcagcagcggatctcgc

SEQ ID NO: 747749 - DNA, 25 bp, Homo sapien
tcctcagcagcagcggatctcgcac

SEQ ID NO: 747750 - DNA, 25 bp, Homo sapien
tcagcagcagcggatctcgcactga

SEQ ID NO: 747751 - DNA, 25 bp, Homo sapien
ctcagcagcagcggatctcgcactg

SEQ ID NO: 747752 - DNA, 25 bp, Homo sapien
tctccctccgttctcaagactcgcc

SEQ ID NO: 747753 - DNA, 25 bp, Homo sapien
gttctcaagactcgcccgccatcca

SEQ ID NO: 747754 - DNA, 25 bp, Homo sapien
cggccttccgggctgcgcctggaga

SEQ ID NO: 747755 - DNA, 25 bp, Homo sapien
gacgcggtgactggagctgcggctg

SEQ ID NO: 747756 - DNA, 25 bp, Homo sapien
tcaaggcctaaagcagagtcaccga

SEQ ID NO: 747757 - DNA, 25 bp, Homo sapien
tgcgagctacatggagtacaggata

SEQ ID NO: 747758 - DNA, 25 bp, Homo sapien
tcagatctctctaaccatgcgagct

SEQ ID NO: 747759 - DNA, 25 bp, Homo sapien
caaataggagtaggcctcagatctc

SEQ ID NO: 747760 - DNA, 25 bp, Homo sapien
cctgggcgacacagagagactccat

SEQ ID NO: 747761 - DNA, 25 bp, Homo sapien
ccagcctgggcgacacagagagact

SEQ ID NO: 747762 - DNA, 25 bp, Homo sapien
cttcttacagcgagccgagatcgcg

SEQ ID NO: 747763 - DNA, 25 bp, Homo sapien
agcctgggcgacacagagagactcc

SEQ ID NO: 747764 - DNA, 25 bp, Homo sapien
gtagaaaacattgctgctaaacagt

SEQ ID NO: 747765 - DNA, 25 bp, Homo sapien
aatgatgatggagcttggagcagaa

SEQ ID NO: 747766 - DNA, 25 bp, Homo sapien
caattataaatatcccagtagaggg

SEQ ID NO: 747767 - DNA, 25 bp, Homo sapien
agcctctcgtattaccgcctgagct

SEQ ID NO: 747768 - DNA, 25 bp, Homo sapien
ttccagattccaacagaagaaatcc

SEQ ID NO: 747769 - DNA, 25 bp, Homo sapien
tccagtgttccagattccaacagaa

SEQ ID NO: 747770 - DNA, 25 bp, Homo sapien
tcattccagtgttccagattccaac

SEQ ID NO: 747771 - DNA, 25 bp, Homo sapien
cagtgttccagattccaacagaaga

SEQ ID NO: 747772 - DNA, 25 bp, Homo sapien
caatgtttactagtcatgtagctaa

SEQ ID NO: 747773 - DNA, 25 bp, Homo sapien
tatttgaaagtctgctatgagtgga

SEQ ID NO: 747774 - DNA, 25 bp, Homo sapien
ggaggcagtcttatctcaacattaa

SEQ ID NO: 747775 - DNA, 25 bp, Homo sapien
tgagaaatgctgtccgtagttaaga

SEQ ID NO: 747776 - DNA, 25 bp, Homo sapien
gcaaatcccacatagccttcaaggt

SEQ ID NO: 747777 - DNA, 25 bp, Homo sapien
tcttcaccgattttctgtatacttg

SEQ ID NO: 747778 - DNA, 25 bp, Homo sapien
ccactaccataagcgtgaattcaaa

SEQ ID NO: 747779 - DNA, 25 bp, Homo sapien
cataagcgtgaattcaaaacctctc

SEQ ID NO: 747780 - DNA, 25 bp, Homo sapien
caagattagccacgggcaacatggt

SEQ ID NO: 747781 - DNA, 25 bp, Homo sapien
gaagcaaaaacagattaagaatcat

SEQ ID NO: 747782 - DNA, 25 bp, Homo sapien
tatgtcaatccagatagtgctcttg

SEQ ID NO: 747783 - DNA, 25 bp, Homo sapien
gattaagacactggatttaagccat

SEQ ID NO: 747784 - DNA, 25 bp, Homo sapien
taatagactgcaatctgtaagactg

SEQ ID NO: 747785 - DNA, 25 bp, Homo sapien
tgccttgggagagactaaacccgat

SEQ ID NO: 747786 - DNA, 25 bp, Homo sapien
tcacctaagaaaacgatggacccac

SEQ ID NO: 747787 - DNA, 25 bp, Homo sapien
aatactgacagactatgcggccttc

SEQ ID NO: 747788 - DNA, 25 bp, Homo sapien
tacttgaaaacttcctgccttggga

SEQ ID NO: 747789 - DNA, 25 bp, Homo sapien
aatctgcacggtcttggcgaggtct

SEQ ID NO: 747790 - DNA, 25 bp, Homo sapien
tgtcaaatttggtatctgctaataa

SEQ ID NO: 747791 - DNA, 25 bp, Homo sapien
tggtatctgctaataaagatctgtg

SEQ ID NO: 747792 - DNA, 25 bp, Homo sapien
tggcatgggaatagtcagtggaatc

SEQ ID NO: 747793 - DNA, 25 bp, Homo sapien
gttcctgaaatccaagagtggtccc

SEQ ID NO: 747794 - DNA, 25 bp, Homo sapien
ggttcctgaaatccaagagtggtcc

SEQ ID NO: 747795 - DNA, 25 bp, Homo sapien
tctcaaaggaatgcaagccctattg

SEQ ID NO: 747796 - DNA, 25 bp, Homo sapien
gaagaacaatctagaccaggcatcc

SEQ ID NO: 747797 - DNA, 25 bp, Homo sapien
cctattgcacactgcacatgtgagg

SEQ ID NO: 747798 - DNA, 25 bp, Homo sapien
tagtgaacactactgccagagctcc

SEQ ID NO: 747799 - DNA, 25 bp, Homo sapien
ctctgtcgtgcaggtttaagtgaga

SEQ ID NO: 747800 - DNA, 25 bp, Homo sapien
cagactctgagcaggcgaaaggaac

SEQ ID NO: 747801 - DNA, 25 bp, Homo sapien
gagctacagctcaatctgaatggca

SEQ ID NO: 747802 - DNA, 25 bp, Homo sapien
tgaaacctctgaaagtaacttgcca

SEQ ID NO: 747803 - DNA, 25 bp, Homo sapien
taattctttattgtgaggagtgcct

SEQ ID NO: 747804 - DNA, 25 bp, Homo sapien
caaagaagtcaagaatgcctgagaa

SEQ ID NO: 747805 - DNA, 25 bp, Homo sapien
gctccagacagctgtactacaggaa

SEQ ID NO: 747806 - DNA, 25 bp, Homo sapien
gaagaggctacctgcaaatatagtg

SEQ ID NO: 747807 - DNA, 25 bp, Homo sapien
tgtacagtctttttaattctatgag

SEQ ID NO: 747808 - DNA, 25 bp, Homo sapien
gagttgattaatgtcgactttccca

SEQ ID NO: 747809 - DNA, 25 bp, Homo sapien
ggacctggatactctggagaataca

SEQ ID NO: 747810 - DNA, 25 bp, Homo sapien
gtcgactttcccaatccagattcac

SEQ ID NO: 747811 - DNA, 25 bp, Homo sapien
aaatctaacagtgtcattgcacaaa

SEQ ID NO: 747812 - DNA, 25 bp, Homo sapien
cagtgacatgaagtatgatttaaaa

SEQ ID NO: 747813 - DNA, 25 bp, Homo sapien
gggagcagcgtagtttccaactaag

SEQ ID NO: 747814 - DNA, 25 bp, Homo sapien
cccaagaaaagacagatgataccct

SEQ ID NO: 747815 - DNA, 25 bp, Homo sapien
atacagtatacaagagttccagtat

SEQ ID NO: 747816 - DNA, 25 bp, Homo sapien
tatacaagagttccagtatactgag

SEQ ID NO: 747817 - DNA, 25 bp, Homo sapien
gagttccagtatactgagttttcag

SEQ ID NO: 747818 - DNA, 25 bp, Homo sapien
tcttttggcatctgagattccagaa

SEQ ID NO: 747819 - DNA, 25 bp, Homo sapien
tctcatctagtttaggaggtttaca

SEQ ID NO: 747820 - DNA, 25 bp, Homo sapien
taacatagtactacacactagaaag

SEQ ID NO: 747821 - DNA, 25 bp, Homo sapien
gaatcatctcccaattttacttcaa

SEQ ID NO: 747822 - DNA, 25 bp, Homo sapien
caacaatatagtaaatctacatgaa

SEQ ID NO: 747823 - DNA, 25 bp, Homo sapien
cagttcctggaacaatttaagacat

SEQ ID NO: 747824 - DNA, 25 bp, Homo sapien
agacattctgtaatctcaagctctg

SEQ ID NO: 747825 - DNA, 25 bp, Homo sapien
taactgattattggacttaaatgat

SEQ ID NO: 747826 - DNA, 25 bp, Homo sapien
gtatcagaagatgtattatcattca

SEQ ID NO: 747827 - DNA, 25 bp, Homo sapien
gggtatcaactattgtgagcagcaa

SEQ ID NO: 747828 - DNA, 25 bp, Homo sapien
gagcagcaactgaacaccaccttct

SEQ ID NO: 747829 - DNA, 25 bp, Homo sapien
tgattaaaactttggattgttccac

SEQ ID NO: 747830 - DNA, 25 bp, Homo sapien
tactattatccactgcatctccaaa

SEQ ID NO: 747831 - DNA, 25 bp, Homo sapien
ctatcaatgtagtcgataacaggct

SEQ ID NO: 747832 - DNA, 25 bp, Homo sapien
acgtctgttcactcgtgattctgca

SEQ ID NO: 747833 - DNA, 25 bp, Homo sapien
aggcatctgacgtctgttcactcgt

SEQ ID NO: 747834 - DNA, 25 bp, Homo sapien
tctgacgtctgttcactcgtgattc

SEQ ID NO: 747835 - DNA, 25 bp, Homo sapien
ctgaaggagcaatgaagtataaaca

SEQ ID NO: 747836 - DNA, 25 bp, Homo sapien
aaggagcaatgaagtataaacaaca

SEQ ID NO: 747837 - DNA, 25 bp, Homo sapien
agcaatgaagtataaacaacactgc

SEQ ID NO: 747838 - DNA, 25 bp, Homo sapien
ggagcaatgaagtataaacaacact

SEQ ID NO: 747839 - DNA, 25 bp, Homo sapien
gaacaacacgtctatgacagctaag

SEQ ID NO: 747840 - DNA, 25 bp, Homo sapien
tatgtctaactggtatggctgcttc

SEQ ID NO: 747841 - DNA, 25 bp, Homo sapien
gacaatatgatacctgaacaacacg

SEQ ID NO: 747842 - DNA, 25 bp, Homo sapien
cattgagacctcaaaccatggtggc

SEQ ID NO: 747843 - DNA, 25 bp, Homo sapien
gattcatctattagactgcatggaa

SEQ ID NO: 747844 - DNA, 25 bp, Homo sapien
aatagctgaaatcatacattagcca

SEQ ID NO: 747845 - DNA, 25 bp, Homo sapien
aatactgaacaatgcaaatgaagca

SEQ ID NO: 747846 - DNA, 25 bp, Homo sapien
tacactgttggaccaatttataatt

SEQ ID NO: 747847 - DNA, 25 bp, Homo sapien
aaagtctacagcataatgaacaacc

SEQ ID NO: 747848 - DNA, 25 bp, Homo sapien
tatcccaacttctagaaagaaagat

SEQ ID NO: 747849 - DNA, 25 bp, Homo sapien
taatatcccaacttctagaaagaaa

SEQ ID NO: 747850 - DNA, 25 bp, Homo sapien
taacctcaaagtctacagcataatg

SEQ ID NO: 747851 - DNA, 25 bp, Homo sapien
taagctagtcccttaagaagtacat

SEQ ID NO: 747852 - DNA, 25 bp, Homo sapien
tctctgacaagatgctcacaagata

SEQ ID NO: 747853 - DNA, 25 bp, Homo sapien
cattctttagaattccctaccaggc

SEQ ID NO: 747854 - DNA, 25 bp, Homo sapien
tgctgcctccagtttgcctctgtac

SEQ ID NO: 747855 - DNA, 25 bp, Homo sapien
gtattaggccagcaaaagttaggta

SEQ ID NO: 747856 - DNA, 25 bp, Homo sapien
tgactcctgcccttgaaccctggtc

SEQ ID NO: 747857 - DNA, 25 bp, Homo sapien
caagaagcattggagtggctaaggc

SEQ ID NO: 747858 - DNA, 25 bp, Homo sapien
gaaacactctgaagatgtattaggc

SEQ ID NO: 747859 - DNA, 25 bp, Homo sapien
ctagttaaatacaatgtaactactt

SEQ ID NO: 747860 - DNA, 25 bp, Homo sapien
gaacaagattcttcacatccccaat

SEQ ID NO: 747861 - DNA, 25 bp, Homo sapien
tgggagaacaagattcttcacatcc

SEQ ID NO: 747862 - DNA, 25 bp, Homo sapien
tgatcagtttgggagaacaagattc

SEQ ID NO: 747863 - DNA, 25 bp, Homo sapien
taatttgactgaattgatcagtttg

SEQ ID NO: 747864 - DNA, 25 bp, Homo sapien
gctttggcaataagtgggatgatat

SEQ ID NO: 747865 - DNA, 25 bp, Homo sapien
gttggcattcctctggtgtgagtgt

SEQ ID NO: 747866 - DNA, 25 bp, Homo sapien
actttttcatgcaaacgcttcataa

SEQ ID NO: 747867 - DNA, 25 bp, Homo sapien
tgcaaacgcttcataaactcaatat

SEQ ID NO: 747868 - DNA, 25 bp, Homo sapien
tatagtaaagcagtaagaggaatgg

SEQ ID NO: 747869 - DNA, 25 bp, Homo sapien
tatgagaacggtataagaaacctgg

SEQ ID NO: 747870 - DNA, 25 bp, Homo sapien
aggcagaagattgaagagttatttc

SEQ ID NO: 747871 - DNA, 25 bp, Homo sapien
gaaacctgggttaacacatcctgct

SEQ ID NO: 747872 - DNA, 25 bp, Homo sapien
tagcctttgaaagaataatccactt

SEQ ID NO: 747873 - DNA, 25 bp, Homo sapien
caagtactactggtcaaaaagacaa

SEQ ID NO: 747874 - DNA, 25 bp, Homo sapien
gattggttaccacttcattccaaaa

SEQ ID NO: 747875 - DNA, 25 bp, Homo sapien
gttttattgggaaagcaccatgaca

SEQ ID NO: 747876 - DNA, 25 bp, Homo sapien
ggtaaaactaagtacagcactgctc

SEQ ID NO: 747877 - DNA, 25 bp, Homo sapien
tgcagaaacctagagaagacaactt

SEQ ID NO: 747878 - DNA, 25 bp, Homo sapien
tacacacaaattgaggagcaacagg

SEQ ID NO: 747879 - DNA, 25 bp, Homo sapien
tagctgtcataccaaaagagttcca

SEQ ID NO: 747880 - DNA, 25 bp, Homo sapien
cgtatattttaattttatgttcttg

SEQ ID NO: 747881 - DNA, 25 bp, Homo sapien
tatgttcttggatttctttcattat

SEQ ID NO: 747882 - DNA, 25 bp, Homo sapien
tctgtttctggaaattcgtatattt

SEQ ID NO: 747883 - DNA, 25 bp, Homo sapien
catctgtttctggaaattcgtatat

SEQ ID NO: 747884 - DNA, 25 bp, Homo sapien
tagtattactacctaccacagcaag

SEQ ID NO: 747885 - DNA, 25 bp, Homo sapien
ctaccacagcaagaggtaaacggtc

SEQ ID NO: 747886 - DNA, 25 bp, Homo sapien
aaggatactgccttcctctgaccct

SEQ ID NO: 747887 - DNA, 25 bp, Homo sapien
gccattaacttcaatgatagtatta

SEQ ID NO: 747888 - DNA, 25 bp, Homo sapien
gaaaaaagcagaccgcatatgttat

SEQ ID NO: 747889 - DNA, 25 bp, Homo sapien
gccttattgtagtttaatcctcaga

SEQ ID NO: 747890 - DNA, 25 bp, Homo sapien
taaacctaacaaatgaactctccag

SEQ ID NO: 747891 - DNA, 25 bp, Homo sapien
acatagtacactcaatgtgagggca

SEQ ID NO: 747892 - DNA, 25 bp, Homo sapien
atatttcttaggattgtaaaatcac

SEQ ID NO: 747893 - DNA, 25 bp, Homo sapien
ttcttaggattgtaaaatcacaatg

SEQ ID NO: 747894 - DNA, 25 bp, Homo sapien
aaatcacaatgttcaccattttcaa

SEQ ID NO: 747895 - DNA, 25 bp, Homo sapien
atttcttaggattgtaaaatcacaa

SEQ ID NO: 747896 - DNA, 25 bp, Homo sapien
agctaccaggctgtgcaccttttaa

SEQ ID NO: 747897 - DNA, 25 bp, Homo sapien
cacctggtaggaatactggttttat

SEQ ID NO: 747898 - DNA, 25 bp, Homo sapien
aaatctgtccaactcttacttaggg

SEQ ID NO: 747899 - DNA, 25 bp, Homo sapien
gctttggactcaaaaactagccttc

SEQ ID NO: 747900 - DNA, 25 bp, Homo sapien
taattagcaatagtttccccacagt

SEQ ID NO: 747901 - DNA, 25 bp, Homo sapien
ccatttcccattgctgatatcgtaa

SEQ ID NO: 747902 - DNA, 25 bp, Homo sapien
gctgatatcgtaactctttctgttc

SEQ ID NO: 747903 - DNA, 25 bp, Homo sapien
gagaacttctttgaacttgcctctt

SEQ ID NO: 747904 - DNA, 25 bp, Homo sapien
catcactgaaaaatcgttaaaggtc

SEQ ID NO: 747905 - DNA, 25 bp, Homo sapien
ctgcatcactgaaaaatcgttaaag

SEQ ID NO: 747906 - DNA, 25 bp, Homo sapien
cactgcatcactgaaaaatcgttaa

SEQ ID NO: 747907 - DNA, 25 bp, Homo sapien
tgcatcactgaaaaatcgttaaagg

SEQ ID NO: 747908 - DNA, 25 bp, Homo sapien
gatatacatggtgtggcaataccgt

SEQ ID NO: 747909 - DNA, 25 bp, Homo sapien
tgactccccttagtcctaagtctgg

SEQ ID NO: 747910 - DNA, 25 bp, Homo sapien
gagtacatgagcaagagaccgtctt

SEQ ID NO: 747911 - DNA, 25 bp, Homo sapien
gaagatatccttagctgctctatgg

SEQ ID NO: 747912 - DNA, 25 bp, Homo sapien
agcaagagtttgcttctattaatag

SEQ ID NO: 747913 - DNA, 25 bp, Homo sapien
aacagcaagagtttgcttctattaa

SEQ ID NO: 747914 - DNA, 25 bp, Homo sapien
cagcaagagtttgcttctattaata

SEQ ID NO: 747915 - DNA, 25 bp, Homo sapien
acaaacagcaagagtttgcttctat

SEQ ID NO: 747916 - DNA, 25 bp, Homo sapien
ttctgtagttctcatagtggacatt

SEQ ID NO: 747917 - DNA, 25 bp, Homo sapien
cagctgcaagttttctgcttctgta

SEQ ID NO: 747918 - DNA, 25 bp, Homo sapien
ttttctgcttctgtagttctcatag

SEQ ID NO: 747919 - DNA, 25 bp, Homo sapien
gcttctgtagttctcatagtggaca

SEQ ID NO: 747920 - DNA, 25 bp, Homo sapien
tcaaacctaaggatgacataccaaa

SEQ ID NO: 747921 - DNA, 25 bp, Homo sapien
tgttctctaaacctactgcatatca

SEQ ID NO: 747922 - DNA, 25 bp, Homo sapien
gttcttcaaacaacattttaccatg

SEQ ID NO: 747923 - DNA, 25 bp, Homo sapien
caaatcagatgctatatgtcactat

SEQ ID NO: 747924 - DNA, 25 bp, Homo sapien
cacgaatattaagggtaatcattaa

SEQ ID NO: 747925 - DNA, 25 bp, Homo sapien
gaatattaagggtaatcattaaatg

SEQ ID NO: 747926 - DNA, 25 bp, Homo sapien
tgtcacgaatattaagggtaatcat

SEQ ID NO: 747927 - DNA, 25 bp, Homo sapien
ctgtcacgaatattaagggtaatca

SEQ ID NO: 747928 - DNA, 25 bp, Homo sapien
tttcttcttccatttgtgccagagg

SEQ ID NO: 747929 - DNA, 25 bp, Homo sapien
ttcttccatttgtgccagagggctc

SEQ ID NO: 747930 - DNA, 25 bp, Homo sapien
tcttcttccatttgtgccagagggc

SEQ ID NO: 747931 - DNA, 25 bp, Homo sapien
tttagctacatgctcccttctttct

SEQ ID NO: 747932 - DNA, 25 bp, Homo sapien
tgaccttcatctcaaacacctgctc

SEQ ID NO: 747933 - DNA, 25 bp, Homo sapien
tcagagtccttcagtttttgaactt

SEQ ID NO: 747934 - DNA, 25 bp, Homo sapien
ttctttgaccttcatctcaaacacc

SEQ ID NO: 747935 - DNA, 25 bp, Homo sapien
gcttcagagtccttcagtttttgaa

SEQ ID NO: 747936 - DNA, 25 bp, Homo sapien
tgtctgctaagagatgggatattag

SEQ ID NO: 747937 - DNA, 25 bp, Homo sapien
caatgtctgctaagagatgggatat

SEQ ID NO: 747938 - DNA, 25 bp, Homo sapien
atgtctgctaagagatgggatatta

SEQ ID NO: 747939 - DNA, 25 bp, Homo sapien
aatgtctgctaagagatgggatatt

SEQ ID NO: 747940 - DNA, 25 bp, Homo sapien
ctcttctttaattgtgtggaattta

SEQ ID NO: 747941 - DNA, 25 bp, Homo sapien
gtaacaccaggaactaccttgacac

SEQ ID NO: 747942 - DNA, 25 bp, Homo sapien
tagtgaagccacataaaacagggat

SEQ ID NO: 747943 - DNA, 25 bp, Homo sapien
caactgtaagaatataacgagagat

SEQ ID NO: 747944 - DNA, 25 bp, Homo sapien
tactcaatggattagcatacttttg

SEQ ID NO: 747945 - DNA, 25 bp, Homo sapien
caaaagcaatgagatcaactgtaag

SEQ ID NO: 747946 - DNA, 25 bp, Homo sapien
ccttgtagggctgtggtgtgcacta

SEQ ID NO: 747947 - DNA, 25 bp, Homo sapien
gactgtggacctatctagcttaact

SEQ ID NO: 747948 - DNA, 25 bp, Homo sapien
cgacaacaccgcttagaaaggagta

SEQ ID NO: 747949 - DNA, 25 bp, Homo sapien
tactgtgctgctagctgtgccccaa

SEQ ID NO: 747950 - DNA, 25 bp, Homo sapien
cacaattcggaatagtagttacctc

SEQ ID NO: 747951 - DNA, 25 bp, Homo sapien
tcctgatgacagcaaacaagttact

SEQ ID NO: 747952 - DNA, 25 bp, Homo sapien
ccaggtagtaggcttacagtgttca

SEQ ID NO: 747953 - DNA, 25 bp, Homo sapien
aaagagtcacatatacacaattcgg

SEQ ID NO: 747954 - DNA, 25 bp, Homo sapien
gcccaagattgctagccagaaagtg

SEQ ID NO: 747955 - DNA, 25 bp, Homo sapien
taggaccctaagagctcaaagatgc

SEQ ID NO: 747956 - DNA, 25 bp, Homo sapien
cacaaatatgttggaggctgggcag

SEQ ID NO: 747957 - DNA, 25 bp, Homo sapien
gtaaacactcatgcgaagtaactgc

SEQ ID NO: 747958 - DNA, 25 bp, Homo sapien
aaaaggccagtgacccaagacaata

SEQ ID NO: 747959 - DNA, 25 bp, Homo sapien
aaaggccagtgacccaagacaataa

SEQ ID NO: 747960 - DNA, 25 bp, Homo sapien
gagcactatttgaatagccctgttg

SEQ ID NO: 747961 - DNA, 25 bp, Homo sapien
ctaatgataaggagtatgagcacta

SEQ ID NO: 747962 - DNA, 25 bp, Homo sapien
gaatagccctgttgtaaattcagag

SEQ ID NO: 747963 - DNA, 25 bp, Homo sapien
ccctgttgtaaattcagagtactac

SEQ ID NO: 747964 - DNA, 25 bp, Homo sapien
cagaagcagaggtatgtttcatcca

SEQ ID NO: 747965 - DNA, 25 bp, Homo sapien
aatcagaagcagaggtatgtttcat

SEQ ID NO: 747966 - DNA, 25 bp, Homo sapien
gaagcagaggtatgtttcatccaga

SEQ ID NO: 747967 - DNA, 25 bp, Homo sapien
cagaggtatgtttcatccagacacc

SEQ ID NO: 747968 - DNA, 25 bp, Homo sapien
tcgaactgacgacgtttttcctcca

SEQ ID NO: 747969 - DNA, 25 bp, Homo sapien
cccagtttgctttctcatcctcgaa

SEQ ID NO: 747970 - DNA, 25 bp, Homo sapien
tcatttgctcatggcgccgctggag

SEQ ID NO: 747971 - DNA, 25 bp, Homo sapien
ctccaattctttgtgctgtgcttcc

SEQ ID NO: 747972 - DNA, 25 bp, Homo sapien
aaatactgctaatggacacagactg

SEQ ID NO: 747973 - DNA, 25 bp, Homo sapien
caatgttgggattttcagatactac

SEQ ID NO: 747974 - DNA, 25 bp, Homo sapien
gatagacaacatgataacaacagct

SEQ ID NO: 747975 - DNA, 25 bp, Homo sapien
aactggcagcaaacagggtattctt

SEQ ID NO: 747976 - DNA, 25 bp, Homo sapien
agatcttccctttcttcttgttctt

SEQ ID NO: 747977 - DNA, 25 bp, Homo sapien
aagatcttccctttcttcttgttct

SEQ ID NO: 747978 - DNA, 25 bp, Homo sapien
agctggcatattggcaactaatacg

SEQ ID NO: 747979 - DNA, 25 bp, Homo sapien
tgttctcttgcattaaactgaagat

SEQ ID NO: 747980 - DNA, 25 bp, Homo sapien
cagaacatgattgtacaacagtaaa

SEQ ID NO: 747981 - DNA, 25 bp, Homo sapien
caacagtaaaatgttctcttgcatt

SEQ ID NO: 747982 - DNA, 25 bp, Homo sapien
agtaaaatgttctcttgcattaaac

SEQ ID NO: 747983 - DNA, 25 bp, Homo sapien
actgaatggaacctttgtattgtaa

SEQ ID NO: 747984 - DNA, 25 bp, Homo sapien
agggtcaactgtgttagactaaatt

SEQ ID NO: 747985 - DNA, 25 bp, Homo sapien
tggaagtgtcaaaaaatagggtcaa

SEQ ID NO: 747986 - DNA, 25 bp, Homo sapien
tgtgttagactaaattacattattg

SEQ ID NO: 747987 - DNA, 25 bp, Homo sapien
tagaggaggcaaacttaagctgaaa

SEQ ID NO: 747988 - DNA, 25 bp, Homo sapien
tagtacttaaccagttcagcaggca

SEQ ID NO: 747989 - DNA, 25 bp, Homo sapien
gtcaagtcgtgtttgtgccaccgca

SEQ ID NO: 747990 - DNA, 25 bp, Homo sapien
catcgactgtaggatatttaagacc

SEQ ID NO: 747991 - DNA, 25 bp, Homo sapien
tgttcagccccacttaattagcaga

SEQ ID NO: 747992 - DNA, 25 bp, Homo sapien
taagcctggagtcaacaatcaaaag

SEQ ID NO: 747993 - DNA, 25 bp, Homo sapien
gaaatagcatcaggtttggagacca

SEQ ID NO: 747994 - DNA, 25 bp, Homo sapien
tatcagattcaggtaaaaccctggg

SEQ ID NO: 747995 - DNA, 25 bp, Homo sapien
tgaatcccaaattatgggaaccaag

SEQ ID NO: 747996 - DNA, 25 bp, Homo sapien
ttatgggaaccaagtttgcttgaaa

SEQ ID NO: 747997 - DNA, 25 bp, Homo sapien
ggatgaatcccaaattatgggaacc

SEQ ID NO: 747998 - DNA, 25 bp, Homo sapien
gatgaatcccaaattatgggaacca

SEQ ID NO: 747999 - DNA, 25 bp, Homo sapien
cctggcgcagaacaaggtctccttt

SEQ ID NO: 748000 - DNA, 25 bp, Homo sapien
tctaaaagaggttccgtgtggccaa

SEQ ID NO: 748001 - DNA, 25 bp, Homo sapien
cctgagtggcattcgatttcggcag

SEQ ID NO: 748002 - DNA, 25 bp, Homo sapien
tttcggcaggtccacaaacagcatc

SEQ ID NO: 748003 - DNA, 25 bp, Homo sapien
caacacacttggacaaaagggagct

SEQ ID NO: 748004 - DNA, 25 bp, Homo sapien
gcaaatctcccggtgaaatgctgct

SEQ ID NO: 748005 - DNA, 25 bp, Homo sapien
ggtgaaatgctgctcccttgcaaca

SEQ ID NO: 748006 - DNA, 25 bp, Homo sapien
gctgctcccttgcaacacacttgga

SEQ ID NO: 748007 - DNA, 25 bp, Homo sapien
ggcaaagagaagtgccgagaccagc

SEQ ID NO: 748008 - DNA, 25 bp, Homo sapien
aggcaaagagaagtgccgagaccag

SEQ ID NO: 748009 - DNA, 25 bp, Homo sapien
gttgccattgatgtggcagatccca

SEQ ID NO: 748010 - DNA, 25 bp, Homo sapien
gtggcagatcccagcatacgaggag

SEQ ID NO: 748011 - DNA, 25 bp, Homo sapien
ttgccattgatgtggcagatcccag

SEQ ID NO: 748012 - DNA, 25 bp, Homo sapien
cccagcatacgaggagcaaaggaga

SEQ ID NO: 748013 - DNA, 25 bp, Homo sapien
tcaggacttccaaacacctggagca

SEQ ID NO: 748014 - DNA, 25 bp, Homo sapien
gacttccaaacacctggagcaaatt

SEQ ID NO: 748015 - DNA, 25 bp, Homo sapien
cttccaaacacctggagcaaattct

SEQ ID NO: 748016 - DNA, 25 bp, Homo sapien
aggacttccaaacacctggagcaaa

SEQ ID NO: 748017 - DNA, 25 bp, Homo sapien
tctttctcaatgttatgcttagacg

SEQ ID NO: 748018 - DNA, 25 bp, Homo sapien
tcaatgttatgcttagacgtatttc

SEQ ID NO: 748019 - DNA, 25 bp, Homo sapien
tctcaatgttatgcttagacgtatt

SEQ ID NO: 748020 - DNA, 25 bp, Homo sapien
tttctcaatgttatgcttagacgta

SEQ ID NO: 748021 - DNA, 25 bp, Homo sapien
gaacaaggcctgtttgcggtggata

SEQ ID NO: 748022 - DNA, 25 bp, Homo sapien
cctgtttgcggtggatatgattgga

SEQ ID NO: 748023 - DNA, 25 bp, Homo sapien
ctgtttgcggtggatatgattggat

SEQ ID NO: 748024 - DNA, 25 bp, Homo sapien
caaggcctgtttgcggtggatatga

SEQ ID NO: 748025 - DNA, 25 bp, Homo sapien
ttcaagctgtgagtttgaggggtgt

SEQ ID NO: 748026 - DNA, 25 bp, Homo sapien
ggcaactgtggggtaactgcgccct

SEQ ID NO: 748027 - DNA, 25 bp, Homo sapien
ctgtggggtaactgcgccctctggt

SEQ ID NO: 748028 - DNA, 25 bp, Homo sapien
aactgtggggtaactgcgccctctg

SEQ ID NO: 748029 - DNA, 25 bp, Homo sapien
atgacgccctcagggagtagcctgg

SEQ ID NO: 748030 - DNA, 25 bp, Homo sapien
gtccacgtgggtgatgacgccctca

SEQ ID NO: 748031 - DNA, 25 bp, Homo sapien
gacgccctcagggagtagcctggca

SEQ ID NO: 748032 - DNA, 25 bp, Homo sapien
acgccctcagggagtagcctggcat

SEQ ID NO: 748033 - DNA, 25 bp, Homo sapien
gaattgggggacgttcttgagccat

SEQ ID NO: 748034 - DNA, 25 bp, Homo sapien
tgctgtgggaattgggggacgttct

SEQ ID NO: 748035 - DNA, 25 bp, Homo sapien
tgggaattgggggacgttcttgagc

SEQ ID NO: 748036 - DNA, 25 bp, Homo sapien
ttctgctgtgggaattgggggacgt

SEQ ID NO: 748037 - DNA, 25 bp, Homo sapien
accaggtgaaggctattggagaagc

SEQ ID NO: 748038 - DNA, 25 bp, Homo sapien
ggtagcaaaggccattctaaagaga

SEQ ID NO: 748039 - DNA, 25 bp, Homo sapien
ccatgggggtagcaaaggccattct

SEQ ID NO: 748040 - DNA, 25 bp, Homo sapien
gctaggcatccccatgggggtagca

SEQ ID NO: 748041 - DNA, 25 bp, Homo sapien
ttgctcaagtcctggaattgtatag

SEQ ID NO: 748042 - DNA, 25 bp, Homo sapien
tgagagatctttgaagaggggccgc

SEQ ID NO: 748043 - DNA, 25 bp, Homo sapien
agatctttgaagaggggccgcccct

SEQ ID NO: 748044 - DNA, 25 bp, Homo sapien
tgtcctctggatggtccaagaatcc

SEQ ID NO: 748045 - DNA, 25 bp, Homo sapien
ttgtcctctggatggtccaagaatc

SEQ ID NO: 748046 - DNA, 25 bp, Homo sapien
tccaataacagctcgcctccgtctg

SEQ ID NO: 748047 - DNA, 25 bp, Homo sapien
tttcgcatctccaataacagctcgc

SEQ ID NO: 748048 - DNA, 25 bp, Homo sapien
attttcgcatctccaataacagctc

SEQ ID NO: 748049 - DNA, 25 bp, Homo sapien
aataacagctcgcctccgtctgagg

SEQ ID NO: 748050 - DNA, 25 bp, Homo sapien
catgtattttaacgttatgttcttg

SEQ ID NO: 748051 - DNA, 25 bp, Homo sapien
gaaattcatgtattttaacgttatg

SEQ ID NO: 748052 - DNA, 25 bp, Homo sapien
tcatgtattttaacgttatgttctt

SEQ ID NO: 748053 - DNA, 25 bp, Homo sapien
attcatgtattttaacgttatgttc

SEQ ID NO: 748054 - DNA, 25 bp, Homo sapien
aagttttttttcttcttcatcatct

SEQ ID NO: 748055 - DNA, 25 bp, Homo sapien
tttttttcttcttcatcatctgttt

SEQ ID NO: 748056 - DNA, 25 bp, Homo sapien
gttttttttcttcttcatcatctgt

SEQ ID NO: 748057 - DNA, 25 bp, Homo sapien
acaagttttttttcttcttcatcat

SEQ ID NO: 748058 - DNA, 25 bp, Homo sapien
ccaccacagcaagaggtaaatggtc

SEQ ID NO: 748059 - DNA, 25 bp, Homo sapien
cccaccacagcaagaggtaaatggt

SEQ ID NO: 748060 - DNA, 25 bp, Homo sapien
acccaccacagcaagaggtaaatgg

SEQ ID NO: 748061 - DNA, 25 bp, Homo sapien
tgttttcaaataagaacacagaaat

SEQ ID NO: 748062 - DNA, 25 bp, Homo sapien
atgttttcaaataagaacacagaaa

SEQ ID NO: 748063 - DNA, 25 bp, Homo sapien
tttcaaataagaacacagaaataga

SEQ ID NO: 748064 - DNA, 25 bp, Homo sapien
ctcaattttagttatgttttcaaat

SEQ ID NO: 748065 - DNA, 25 bp, Homo sapien
gacccatctgacattccgataaaag

SEQ ID NO: 748066 - DNA, 25 bp, Homo sapien
aataattcttgagggtccatgaccc

SEQ ID NO: 748067 - DNA, 25 bp, Homo sapien
ggttcattagattccctgggagcaa

SEQ ID NO: 748068 - DNA, 25 bp, Homo sapien
ccgataaaagtgactggccttctct

SEQ ID NO: 748069 - DNA, 25 bp, Homo sapien
atcacaatgttcaccattttcaact

SEQ ID NO: 748070 - DNA, 25 bp, Homo sapien
ggcctcccttggcgttttgacagct

SEQ ID NO: 748071 - DNA, 25 bp, Homo sapien
ctcccttggcgttttgacagctgct

SEQ ID NO: 748072 - DNA, 25 bp, Homo sapien
cctcccttggcgttttgacagctgc

SEQ ID NO: 748073 - DNA, 25 bp, Homo sapien
taaataaacagcaagagtttgtttc

SEQ ID NO: 748074 - DNA, 25 bp, Homo sapien
gcgtgtgttctgtcataaataaaca

SEQ ID NO: 748075 - DNA, 25 bp, Homo sapien
ctgcgtgtgttctgtcataaataaa

SEQ ID NO: 748076 - DNA, 25 bp, Homo sapien
tcataaataaacagcaagagtttgt

SEQ ID NO: 748077 - DNA, 25 bp, Homo sapien
agcaaactgccctttattcttcttg

SEQ ID NO: 748078 - DNA, 25 bp, Homo sapien
gctgccagttttctgattccatagt

SEQ ID NO: 748079 - DNA, 25 bp, Homo sapien
ttagcaaactgccctttattcttct

SEQ ID NO: 748080 - DNA, 25 bp, Homo sapien
gattccatagttctcgtagtggaca

SEQ ID NO: 748081 - DNA, 25 bp, Homo sapien
cacgaatattaagggtaatcattaa

SEQ ID NO: 748082 - DNA, 25 bp, Homo sapien
gaatattaagggtaatcattaaatg

SEQ ID NO: 748083 - DNA, 25 bp, Homo sapien
tgtcacgaatattaagggtaatcat

SEQ ID NO: 748084 - DNA, 25 bp, Homo sapien
ctgtcacgaatattaagggtaatca

SEQ ID NO: 748085 - DNA, 25 bp, Homo sapien
aattttagctacttgctcccttctt

SEQ ID NO: 748086 - DNA, 25 bp, Homo sapien
ttaattttagctacttgctcccttc

SEQ ID NO: 748087 - DNA, 25 bp, Homo sapien
tcagagtccttcagtttttgaactt

SEQ ID NO: 748088 - DNA, 25 bp, Homo sapien
tcttaattttagctacttgctccct

SEQ ID NO: 748089 - DNA, 25 bp, Homo sapien
tgtaacaccaggaactaccttgaca

SEQ ID NO: 748090 - DNA, 25 bp, Homo sapien
caatgttgtaacaccaggaactacc

SEQ ID NO: 748091 - DNA, 25 bp, Homo sapien
tgcccaatgttgtaacaccaggaac

SEQ ID NO: 748092 - DNA, 25 bp, Homo sapien
ccctgcccaatgttgtaacaccagg

SEQ ID NO: 748093 - DNA, 25 bp, Homo sapien
taatagaaactaaatgtataactcg

SEQ ID NO: 748094 - DNA, 25 bp, Homo sapien
atagaaactaaatgtataactcgac

SEQ ID NO: 748095 - DNA, 25 bp, Homo sapien
agaaactaaatgtataactcgacat

SEQ ID NO: 748096 - DNA, 25 bp, Homo sapien
ttaatagaaactaaatgtataactc

SEQ ID NO: 748097 - DNA, 25 bp, Homo sapien
cgtgggtgcctacgcctgggagccc

SEQ ID NO: 748098 - DNA, 25 bp, Homo sapien
aagctacggtcagcgtaagggccgt

SEQ ID NO: 748099 - DNA, 25 bp, Homo sapien
taagggccgtgggtgcctacgcctg

SEQ ID NO: 748100 - DNA, 25 bp, Homo sapien
ggcagcggcgtccaagctacggtca

SEQ ID NO: 748101 - DNA, 25 bp, Homo sapien
aagctgttgtacttggtgcgggcca

SEQ ID NO: 748102 - DNA, 25 bp, Homo sapien
gaaggagcacaacccccgcgggatg

SEQ ID NO: 748103 - DNA, 25 bp, Homo sapien
caggtggtgtgtggaccatggaagg

SEQ ID NO: 748104 - DNA, 25 bp, Homo sapien
cacagaccgcatgcaggcaggtggt

SEQ ID NO: 748105 - DNA, 25 bp, Homo sapien
aggcggccagcgtgccccagtgaca

SEQ ID NO: 748106 - DNA, 25 bp, Homo sapien
gcaggaagtggatgaagccctacag

SEQ ID NO: 748107 - DNA, 25 bp, Homo sapien
ctgcagctgaagtagagcaggaagt

SEQ ID NO: 748108 - DNA, 25 bp, Homo sapien
ggcagaagaaggcggccagcgtgcc

SEQ ID NO: 748109 - DNA, 25 bp, Homo sapien
agcacaggaggacgctaacgcccaa

SEQ ID NO: 748110 - DNA, 25 bp, Homo sapien
gaagcacaggaggacgctaacgccc

SEQ ID NO: 748111 - DNA, 25 bp, Homo sapien
cacaggaggacgctaacgcccaagt

SEQ ID NO: 748112 - DNA, 25 bp, Homo sapien
acaggaggacgctaacgcccaagta

SEQ ID NO: 748113 - DNA, 25 bp, Homo sapien
ccatgggcgccgggcagcagcgact

SEQ ID NO: 748114 - DNA, 25 bp, Homo sapien
atgggcgccgggcagcagcgactgc

SEQ ID NO: 748115 - DNA, 25 bp, Homo sapien
ctccatgggcgccgggcagcagcga

SEQ ID NO: 748116 - DNA, 25 bp, Homo sapien
ttactctccatgggcgccgggcagc

SEQ ID NO: 748117 - DNA, 25 bp, Homo sapien
cagcatatacccgaggctttaagac

SEQ ID NO: 748118 - DNA, 25 bp, Homo sapien
gctccggacactcggacgcgcaagt

SEQ ID NO: 748119 - DNA, 25 bp, Homo sapien
ccgaggctttaagacgctgctggtg

SEQ ID NO: 748120 - DNA, 25 bp, Homo sapien
tgtggttgccacactgaagcctctg

SEQ ID NO: 748121 - DNA, 25 bp, Homo sapien
tggctgccacaggacaatagctgcc

SEQ ID NO: 748122 - DNA, 25 bp, Homo sapien
ttcgtctctggcctcctggacaaga

SEQ ID NO: 748123 - DNA, 25 bp, Homo sapien
cccgacccaggcaaacggtggctgc

SEQ ID NO: 748124 - DNA, 25 bp, Homo sapien
ccaggaagagtagatcccagaactg

SEQ ID NO: 748125 - DNA, 25 bp, Homo sapien
gggacaaagggcaggcggatcggcg

SEQ ID NO: 748126 - DNA, 25 bp, Homo sapien
ggcggcgcagggaacggcccgacgc

SEQ ID NO: 748127 - DNA, 25 bp, Homo sapien
tctgggtgttaaggggtggcggtca

SEQ ID NO: 748128 - DNA, 25 bp, Homo sapien
cggggacctaaccagagccagccgg

SEQ ID NO: 748129 - DNA, 25 bp, Homo sapien
tcctcctattttaggacctgccacg

SEQ ID NO: 748130 - DNA, 25 bp, Homo sapien
aaagcacggtcaaggactcctccta

SEQ ID NO: 748131 - DNA, 25 bp, Homo sapien
gcacggtcaaggactcctcctattt

SEQ ID NO: 748132 - DNA, 25 bp, Homo sapien
tcctattttaggacctgccacggaa

SEQ ID NO: 748133 - DNA, 25 bp, Homo sapien
tcatttgctcatggcgccgctggag

SEQ ID NO: 748134 - DNA, 25 bp, Homo sapien
tcatcctcaaactgacgacgttttt

SEQ ID NO: 748135 - DNA, 25 bp, Homo sapien
tcaaactgacgacgtttttcctcca

SEQ ID NO: 748136 - DNA, 25 bp, Homo sapien
ctccaattctttgtgctgtgcttcc

SEQ ID NO: 748137 - DNA, 25 bp, Homo sapien
gaagagttctgttgttctaaaatac

SEQ ID NO: 748138 - DNA, 25 bp, Homo sapien
tgaagagttctgttgttctaaaata

SEQ ID NO: 748139 - DNA, 25 bp, Homo sapien
atattggcaactaatacgtaactgg

SEQ ID NO: 748140 - DNA, 25 bp, Homo sapien
ctggcatattggcaactaatacgta

SEQ ID NO: 748141 - DNA, 25 bp, Homo sapien
tggcatattggcaactaatacgtaa

SEQ ID NO: 748142 - DNA, 25 bp, Homo sapien
gcatattggcaactaatacgtaact

SEQ ID NO: 748143 - DNA, 25 bp, Homo sapien
tcatattatggcaatttatcctcaa

SEQ ID NO: 748144 - DNA, 25 bp, Homo sapien
atagagaagcacagtttgcatcata

SEQ ID NO: 748145 - DNA, 25 bp, Homo sapien
tattatggcaatttatcctcaatga

SEQ ID NO: 748146 - DNA, 25 bp, Homo sapien
gcacagtttgcatcatattatggca

SEQ ID NO: 748147 - DNA, 25 bp, Homo sapien
tggagggcagaagcgtagtgtatgt

SEQ ID NO: 748148 - DNA, 25 bp, Homo sapien
cagaagcgtagtgtatgtgcgtgtc

SEQ ID NO: 748149 - DNA, 25 bp, Homo sapien
tctgcagactgtgaccctgcgctaa

SEQ ID NO: 748150 - DNA, 25 bp, Homo sapien
tgaccctgcgctaaaaagcgtccct

SEQ ID NO: 748151 - DNA, 25 bp, Homo sapien
ccctcggaagggaacactgattttg

SEQ ID NO: 748152 - DNA, 25 bp, Homo sapien
cctcggaagggaacactgattttga

SEQ ID NO: 748153 - DNA, 25 bp, Homo sapien
tgggccctcggaagggaacactgat

SEQ ID NO: 748154 - DNA, 25 bp, Homo sapien
ctcggaagggaacactgattttgac

SEQ ID NO: 748155 - DNA, 25 bp, Homo sapien
gaagcctgagggtttgagtctttac

SEQ ID NO: 748156 - DNA, 25 bp, Homo sapien
tggggacggaagcctgagggtttga

SEQ ID NO: 748157 - DNA, 25 bp, Homo sapien
ggacggaagcctgagggtttgagtc

SEQ ID NO: 748158 - DNA, 25 bp, Homo sapien
acggaagcctgagggtttgagtctt

SEQ ID NO: 748159 - DNA, 25 bp, Homo sapien
ccactgctgaatggcgtgggtcgca

SEQ ID NO: 748160 - DNA, 25 bp, Homo sapien
cctcgcgacccgcaaggaggtgctg

SEQ ID NO: 748161 - DNA, 25 bp, Homo sapien
tgtggcaacggcctcggccgctgct

SEQ ID NO: 748162 - DNA, 25 bp, Homo sapien
tgggtcgcagggtcgcgctccaaaa

SEQ ID NO: 748163 - DNA, 25 bp, Homo sapien
tgcgggccacggggagattctatgc

SEQ ID NO: 748164 - DNA, 25 bp, Homo sapien
cgtactgcccctccatccgctgggt

SEQ ID NO: 748165 - DNA, 25 bp, Homo sapien
gccctggggaacagtgccgtactgc

SEQ ID NO: 748166 - DNA, 25 bp, Homo sapien
ctgggtccttgccttactcttcggg

SEQ ID NO: 748167 - DNA, 25 bp, Homo sapien
gttaagtcattcaattgcccctggc

SEQ ID NO: 748168 - DNA, 25 bp, Homo sapien
cctgctgggtttgcgatgggctcaa

SEQ ID NO: 748169 - DNA, 25 bp, Homo sapien
tgccttccatttgcatgactccagt

SEQ ID NO: 748170 - DNA, 25 bp, Homo sapien
tgggtttgcgatgggctcaaatcct

SEQ ID NO: 748171 - DNA, 25 bp, Homo sapien
gctgctcagagggacgctgtgcctc

SEQ ID NO: 748172 - DNA, 25 bp, Homo sapien
tatggtgttcccagggatgtgaggg

SEQ ID NO: 748173 - DNA, 25 bp, Homo sapien
cccaggcgcctgctggctgctcaga

SEQ ID NO: 748174 - DNA, 25 bp, Homo sapien
tgctcagagggacgctgtgcctcac

SEQ ID NO: 748175 - DNA, 25 bp, Homo sapien
tctcccacctgataggggagtcggg

SEQ ID NO: 748176 - DNA, 25 bp, Homo sapien
agccccaggagtttactgcctctgc

SEQ ID NO: 748177 - DNA, 25 bp, Homo sapien
cccactgggagttatgtccccagct

SEQ ID NO: 748178 - DNA, 25 bp, Homo sapien
gagtcggggcccatacttggcttct

SEQ ID NO: 748179 - DNA, 25 bp, Homo sapien
ggccagcccaaagcacaccgatatt

SEQ ID NO: 748180 - DNA, 25 bp, Homo sapien
caaagcacaccgatattgtctccat

SEQ ID NO: 748181 - DNA, 25 bp, Homo sapien
gggagagacgaaggctcgtattctt

SEQ ID NO: 748182 - DNA, 25 bp, Homo sapien
gagagacgaaggctcgtattcttgt

SEQ ID NO: 748183 - DNA, 25 bp, Homo sapien
cactgccggcagatcaggaccgctt

SEQ ID NO: 748184 - DNA, 25 bp, Homo sapien
gcagatcaggcccactgccggcaga

SEQ ID NO: 748185 - DNA, 25 bp, Homo sapien
aagggtgaggtaggcctcaggccgc

SEQ ID NO: 748186 - DNA, 25 bp, Homo sapien
ggcagatcaggaccgcttcctggct

SEQ ID NO: 748187 - DNA, 25 bp, Homo sapien
ggccatcgaatcctctggttctgtg

SEQ ID NO: 748188 - DNA, 25 bp, Homo sapien
cagcaccctcggaagagttgaagca

SEQ ID NO: 748189 - DNA, 25 bp, Homo sapien
gggaaaaaggcttcaatccatgaat

SEQ ID NO: 748190 - DNA, 25 bp, Homo sapien
gacgtcctgttgattcgcttcctcc

SEQ ID NO: 748191 - DNA, 25 bp, Homo sapien
ccacctcgatatcccaaagggccag

SEQ ID NO: 748192 - DNA, 25 bp, Homo sapien
acctcgatatcccaaagggccagta

SEQ ID NO: 748193 - DNA, 25 bp, Homo sapien
cctcgatatcccaaagggccagtat

SEQ ID NO: 748194 - DNA, 25 bp, Homo sapien
ctcgatatcccaaagggccagtatt

SEQ ID NO: 748195 - DNA, 25 bp, Homo sapien
cgcaaacagggagagatccaccgac

SEQ ID NO: 748196 - DNA, 25 bp, Homo sapien
ctctcatcgccgcaaacagggagag

SEQ ID NO: 748197 - DNA, 25 bp, Homo sapien
atcgccgcaaacagggagagatcca

SEQ ID NO: 748198 - DNA, 25 bp, Homo sapien
tcatcgccgcaaacagggagagatc

SEQ ID NO: 748199 - DNA, 25 bp, Homo sapien
ccagtacagcccactaccaggggca

SEQ ID NO: 748200 - DNA, 25 bp, Homo sapien
cagtacagcccactaccaggggcat

SEQ ID NO: 748201 - DNA, 25 bp, Homo sapien
tccagtacagcccactaccaggggc

SEQ ID NO: 748202 - DNA, 25 bp, Homo sapien
cctccagtacagcccactaccaggg

SEQ ID NO: 748203 - DNA, 25 bp, Homo sapien
ccaccaaggcccactggtaggaggg

SEQ ID NO: 748204 - DNA, 25 bp, Homo sapien
caccaaggcccactggtaggagggc

SEQ ID NO: 748205 - DNA, 25 bp, Homo sapien
acgcttggcctaggagaactgagcc

SEQ ID NO: 748206 - DNA, 25 bp, Homo sapien
ccagggacgcttggcctaggagaac

SEQ ID NO: 748207 - DNA, 25 bp, Homo sapien
gacgcttggcctaggagaactgagc

SEQ ID NO: 748208 - DNA, 25 bp, Homo sapien
gcaaggccagggacgcttggcctag

SEQ ID NO: 748209 - DNA, 25 bp, Homo sapien
ggacccttcaaaacaagcactgtat

SEQ ID NO: 748210 - DNA, 25 bp, Homo sapien
gcagagccctcacttcagctgaaga

SEQ ID NO: 748211 - DNA, 25 bp, Homo sapien
caacatgcattaagacagctcagag

SEQ ID NO: 748212 - DNA, 25 bp, Homo sapien
tgtagatcaatatcccgcagagccc

SEQ ID NO: 748213 - DNA, 25 bp, Homo sapien
gaatggatggatgccttttgacagc

SEQ ID NO: 748214 - DNA, 25 bp, Homo sapien
tgtcccagtcaatgcatcggcaggg

SEQ ID NO: 748215 - DNA, 25 bp, Homo sapien
tctctctaggcagtcacgagggtgg

SEQ ID NO: 748216 - DNA, 25 bp, Homo sapien
tcagagcacacgtcttccagaatgt

SEQ ID NO: 748217 - DNA, 25 bp, Homo sapien
aatactcctcagtttatgacggggt

SEQ ID NO: 748218 - DNA, 25 bp, Homo sapien
tgtcaaactcagctctatttctaaa

SEQ ID NO: 748219 - DNA, 25 bp, Homo sapien
ttgcctacagttcggcaaaattatc

SEQ ID NO: 748220 - DNA, 25 bp, Homo sapien
gcctaacagacaaagttggctgtca

SEQ ID NO: 748221 - DNA, 25 bp, Homo sapien
gttacttcctgacatcgccatggca

SEQ ID NO: 748222 - DNA, 25 bp, Homo sapien
tattttacctagtccttattcaaga

SEQ ID NO: 748223 - DNA, 25 bp, Homo sapien
catatagggttacttcctgacatcg

SEQ ID NO: 748224 - DNA, 25 bp, Homo sapien
gggttacttcctgacatcgccatgg

SEQ ID NO: 748225 - DNA, 25 bp, Homo sapien
actgatttcctagtacccttctgca

SEQ ID NO: 748226 - DNA, 25 bp, Homo sapien
tgcctctgcttgcattttgggaccc

SEQ ID NO: 748227 - DNA, 25 bp, Homo sapien
cctcgaagctcaccccagtctcttt

SEQ ID NO: 748228 - DNA, 25 bp, Homo sapien
tcctttctcgaaatgcatcagcctg

SEQ ID NO: 748229 - DNA, 25 bp, Homo sapien
tctgggcgctgacaatgagacagag

SEQ ID NO: 748230 - DNA, 25 bp, Homo sapien
gatgacagccagaggtaggtgcttc

SEQ ID NO: 748231 - DNA, 25 bp, Homo sapien
ctggaggaagcccatcttggcagtg

SEQ ID NO: 748232 - DNA, 25 bp, Homo sapien
gagaggtccccttcaatttgctaat

SEQ ID NO: 748233 - DNA, 25 bp, Homo sapien
tgtcaaagttgtttcaggtctagtg

SEQ ID NO: 748234 - DNA, 25 bp, Homo sapien
tagcacaacgaatgaacagagaggg

SEQ ID NO: 748235 - DNA, 25 bp, Homo sapien
tagactcgtggactggttcagctcc

SEQ ID NO: 748236 - DNA, 25 bp, Homo sapien
cttgcaaaatcagcgtagactcgtg

SEQ ID NO: 748237 - DNA, 25 bp, Homo sapien
accgaggttccctgtcaatcttcct

SEQ ID NO: 748238 - DNA, 25 bp, Homo sapien
cttttgtgattgctgggagcaccga

SEQ ID NO: 748239 - DNA, 25 bp, Homo sapien
ttccctgtcaatcttcctgaagcag

SEQ ID NO: 748240 - DNA, 25 bp, Homo sapien
gacttggggcggaagggccttgtgc

SEQ ID NO: 748241 - DNA, 25 bp, Homo sapien
aattgtgtttacagctgtgtgttct

SEQ ID NO: 748242 - DNA, 25 bp, Homo sapien
ggcaacacggaaatggtcacaagta

SEQ ID NO: 748243 - DNA, 25 bp, Homo sapien
ccaccttgagggcaacacggaaatg

SEQ ID NO: 748244 - DNA, 25 bp, Homo sapien
cacggaaatggtcacaagtagaaaa

SEQ ID NO: 748245 - DNA, 25 bp, Homo sapien
aaagttgagttgttcttcataactc

SEQ ID NO: 748246 - DNA, 25 bp, Homo sapien
tagacaaagtttgacaaagttgagt

SEQ ID NO: 748247 - DNA, 25 bp, Homo sapien
tctcacgtatccacaaatttagaca

SEQ ID NO: 748248 - DNA, 25 bp, Homo sapien
aagacagctttgaaatctcacgtat

SEQ ID NO: 748249 - DNA, 25 bp, Homo sapien
cacaggggtcgctttcccacctgct

SEQ ID NO: 748250 - DNA, 25 bp, Homo sapien
tcctgctccatccacaggggtcgct

SEQ ID NO: 748251 - DNA, 25 bp, Homo sapien
ttcctgctccatccacaggggtcgc

SEQ ID NO: 748252 - DNA, 25 bp, Homo sapien
acaggggtcgctttcccacctgctg

SEQ ID NO: 748253 - DNA, 25 bp, Homo sapien
cgaacaatgttgaccttccagtggg

SEQ ID NO: 748254 - DNA, 25 bp, Homo sapien
gaggaatcccgaacaatgttgacct

SEQ ID NO: 748255 - DNA, 25 bp, Homo sapien
cttgacaggtgaagtcgcctgggtt

SEQ ID NO: 748256 - DNA, 25 bp, Homo sapien
agagccacggcaagatgaggaatcc

SEQ ID NO: 748257 - DNA, 25 bp, Homo sapien
ctttgtacagtgtgcctccgtggct

SEQ ID NO: 748258 - DNA, 25 bp, Homo sapien
aagaatggtttgctatagtgagtga

SEQ ID NO: 748259 - DNA, 25 bp, Homo sapien
aacctttgtacagtgtgcctccgtg

SEQ ID NO: 748260 - DNA, 25 bp, Homo sapien
agaatggtttgctatagtgagtgag

SEQ ID NO: 748261 - DNA, 25 bp, Homo sapien
gatttccaatgtatggactcatgaa

SEQ ID NO: 748262 - DNA, 25 bp, Homo sapien
ggtcaaacttccacaatattgctga

SEQ ID NO: 748263 - DNA, 25 bp, Homo sapien
gcagaggttcgctcagaaaatcaat

SEQ ID NO: 748264 - DNA, 25 bp, Homo sapien
gatcacaaaatgtcgtaggaacatg

SEQ ID NO: 748265 - DNA, 25 bp, Homo sapien
tgacagtccctgctagatttccgtg

SEQ ID NO: 748266 - DNA, 25 bp, Homo sapien
ggccctctggtaaagcatctgcaat

SEQ ID NO: 748267 - DNA, 25 bp, Homo sapien
tcctggtgagtagcaggccctctgg

SEQ ID NO: 748268 - DNA, 25 bp, Homo sapien
gatttccgtgtaggtctgttccgca

SEQ ID NO: 748269 - DNA, 25 bp, Homo sapien
cctgagggtaacaggcattctcatt

SEQ ID NO: 748270 - DNA, 25 bp, Homo sapien
ggtaacaggcattctcatttggaag

SEQ ID NO: 748271 - DNA, 25 bp, Homo sapien
ggcattctcatttggaagcatctgc

SEQ ID NO: 748272 - DNA, 25 bp, Homo sapien
ccactcctgagggtaacaggcattc

SEQ ID NO: 748273 - DNA, 25 bp, Homo sapien
cagcctcagcaagcgtggcagctgg

SEQ ID NO: 748274 - DNA, 25 bp, Homo sapien
tcagagagtcaccaaggacccaaag

SEQ ID NO: 748275 - DNA, 25 bp, Homo sapien
ctctcagagagtcaccaaggaccca

SEQ ID NO: 748276 - DNA, 25 bp, Homo sapien
catgctgtcaatttgtccagtgcct

SEQ ID NO: 748277 - DNA, 25 bp, Homo sapien
ttctcctcccttcaactctaaatta

SEQ ID NO: 748278 - DNA, 25 bp, Homo sapien
cctggggtggccgagaatcccatcg

SEQ ID NO: 748279 - DNA, 25 bp, Homo sapien
cgagaatcccatcgccagggctgca

SEQ ID NO: 748280 - DNA, 25 bp, Homo sapien
gcctcctccaccgaacctctggtcc

SEQ ID NO: 748281 - DNA, 25 bp, Homo sapien
gtgccagcagtaagatccggaggaa

SEQ ID NO: 748282 - DNA, 25 bp, Homo sapien
aactggacggttgagctgcgtgtct

SEQ ID NO: 748283 - DNA, 25 bp, Homo sapien
tccacatcgctccacccaaaggctt

SEQ ID NO: 748284 - DNA, 25 bp, Homo sapien
cttccacctcaatatgggtgccagc

SEQ ID NO: 748285 - DNA, 25 bp, Homo sapien
gaggtgctcgcagacctgcaggtca

SEQ ID NO: 748286 - DNA, 25 bp, Homo sapien
ggtgctcgcagacctgcaggtcacc

SEQ ID NO: 748287 - DNA, 25 bp, Homo sapien
aggtgctcgcagacctgcaggtcac

SEQ ID NO: 748288 - DNA, 25 bp, Homo sapien
aggaggtgctcgcagacctgcaggt

SEQ ID NO: 748289 - DNA, 25 bp, Homo sapien
ctggtgcacaaggaggtaacgacat

SEQ ID NO: 748290 - DNA, 25 bp, Homo sapien
catggacttgaatgtgaagaacctg

SEQ ID NO: 748291 - DNA, 25 bp, Homo sapien
atggacttgaatgtgaagaacctgc

SEQ ID NO: 748292 - DNA, 25 bp, Homo sapien
tcatggacttgaatgtgaagaacct

SEQ ID NO: 748293 - DNA, 25 bp, Homo sapien
gtcatggacttgaatgtgaagaacc

SEQ ID NO: 748294 - DNA, 25 bp, Homo sapien
gatctggaccttgccaaccgattgg

SEQ ID NO: 748295 - DNA, 25 bp, Homo sapien
gaagggagcagttccatagaatctg

SEQ ID NO: 748296 - DNA, 25 bp, Homo sapien
aatcaagcgcttatctgcaatgcag

SEQ ID NO: 748297 - DNA, 25 bp, Homo sapien
agataaccagcctcctgccgtgact

SEQ ID NO: 748298 - DNA, 25 bp, Homo sapien
gagccgtgaggttgccacaaacaca

SEQ ID NO: 748299 - DNA, 25 bp, Homo sapien
tggatcattaactccagcagtggag

SEQ ID NO: 748300 - DNA, 25 bp, Homo sapien
gtggttccagcgtcctccatgtgaa

SEQ ID NO: 748301 - DNA, 25 bp, Homo sapien
gtgaactccgatcttgcttcccagg

SEQ ID NO: 748302 - DNA, 25 bp, Homo sapien
gtgtccatccgccagcggccagtgt

SEQ ID NO: 748303 - DNA, 25 bp, Homo sapien
catggcggtgtccatccgccagcgg

SEQ ID NO: 748304 - DNA, 25 bp, Homo sapien
agatctagcatggcggtgtccatcc

SEQ ID NO: 748305 - DNA, 25 bp, Homo sapien
gtccatccgccagcggccagtgtgg

SEQ ID NO: 748306 - DNA, 25 bp, Homo sapien
agacaaggtggaggactgctgcgct

SEQ ID NO: 748307 - DNA, 25 bp, Homo sapien
cttgttaggaatggcccggtgctcc

SEQ ID NO: 748308 - DNA, 25 bp, Homo sapien
tgtctgcatctcgactgcacgcttg

SEQ ID NO: 748309 - DNA, 25 bp, Homo sapien
gggccacgcgctgccgtgtgctgaa

SEQ ID NO: 748310 - DNA, 25 bp, Homo sapien
cagggttgcagcacagacgagcagt

SEQ ID NO: 748311 - DNA, 25 bp, Homo sapien
gtgactttccaaggcgcgctactgg

SEQ ID NO: 748312 - DNA, 25 bp, Homo sapien
taactgctgacttcgcatgcaccgc

SEQ ID NO: 748313 - DNA, 25 bp, Homo sapien
ccagaagtgccagtcgagtaggtca

SEQ ID NO: 748314 - DNA, 25 bp, Homo sapien
gacgcatgcagcttggaagctctcc

SEQ ID NO: 748315 - DNA, 25 bp, Homo sapien
gatgcatgcctcctcttgacgcatg

SEQ ID NO: 748316 - DNA, 25 bp, Homo sapien
gcaggacacagtcactcaggccttg

SEQ ID NO: 748317 - DNA, 25 bp, Homo sapien
tgacagaggccacatcttcaaacct

SEQ ID NO: 748318 - DNA, 25 bp, Homo sapien
ccatctgcacaaaatacgccctgga

SEQ ID NO: 748319 - DNA, 25 bp, Homo sapien
acaaaatacgccctggatcaataca

SEQ ID NO: 748320 - DNA, 25 bp, Homo sapien
gagcattccacgcttttctccattg

SEQ ID NO: 748321 - DNA, 25 bp, Homo sapien
cattgctgctaacttcccagggtcc

SEQ ID NO: 748322 - DNA, 25 bp, Homo sapien
gtgcagtgttccatggccagggtgg

SEQ ID NO: 748323 - DNA, 25 bp, Homo sapien
gtcccaaggacttccggagcagctg

SEQ ID NO: 748324 - DNA, 25 bp, Homo sapien
tgtgcagtgttccatggccagggtg

SEQ ID NO: 748325 - DNA, 25 bp, Homo sapien
taattacgatgcatctgggcacggt

SEQ ID NO: 748326 - DNA, 25 bp, Homo sapien
gaatctgttgtgtgtatgttgccca

SEQ ID NO: 748327 - DNA, 25 bp, Homo sapien
taagtatttcggtgctctccaggct

SEQ ID NO: 748328 - DNA, 25 bp, Homo sapien
cacaccatgtgcagcttagaagtaa

SEQ ID NO: 748329 - DNA, 25 bp, Homo sapien
tcctctgttctgaaccctcagtaac

SEQ ID NO: 748330 - DNA, 25 bp, Homo sapien
gctatttaagggtcctctgttctga

SEQ ID NO: 748331 - DNA, 25 bp, Homo sapien
ggtggtcagaccactgctatttaag

SEQ ID NO: 748332 - DNA, 25 bp, Homo sapien
tgttctgaaccctcagtaaccccat

SEQ ID NO: 748333 - DNA, 25 bp, Homo sapien
agagaggaccactccccctgcacag

SEQ ID NO: 748334 - DNA, 25 bp, Homo sapien
acaccccagcaacagtggtggagcc

SEQ ID NO: 748335 - DNA, 25 bp, Homo sapien
tggagccccaggtggaaccaacttc

SEQ ID NO: 748336 - DNA, 25 bp, Homo sapien
tggcctggagagaggaccactcccc

SEQ ID NO: 748337 - DNA, 25 bp, Homo sapien
cgtgaacatcgagactgcaggcttg

SEQ ID NO: 748338 - DNA, 25 bp, Homo sapien
tctttggcaacaagctgggtacctt

SEQ ID NO: 748339 - DNA, 25 bp, Homo sapien
gtaccttctgtggtagtgcccctca

SEQ ID NO: 748340 - DNA, 25 bp, Homo sapien
tgctgccagaagtgtagtattgccc

SEQ ID NO: 748341 - DNA, 25 bp, Homo sapien
gcacctggatattcaccccaggcat

SEQ ID NO: 748342 - DNA, 25 bp, Homo sapien
catgggggcatcagggataacttct

SEQ ID NO: 748343 - DNA, 25 bp, Homo sapien
gggcatcagggataacttctcgtat

SEQ ID NO: 748344 - DNA, 25 bp, Homo sapien
cagggataacttctcgtatttatac

SEQ ID NO: 748345 - DNA, 25 bp, Homo sapien
cttctcgtatttatacctgatgcac

SEQ ID NO: 748346 - DNA, 25 bp, Homo sapien
ctggataagaggaaatagcaaggtg

SEQ ID NO: 748347 - DNA, 25 bp, Homo sapien
acattatccgaaagccagtgcctgg

SEQ ID NO: 748348 - DNA, 25 bp, Homo sapien
ctggaacctgtgacattatccgaaa

SEQ ID NO: 748349 - DNA, 25 bp, Homo sapien
gaaatagcaaggtgcatccagatac

SEQ ID NO: 748350 - DNA, 25 bp, Homo sapien
actgtggtatagtctccagcttgga

SEQ ID NO: 748351 - DNA, 25 bp, Homo sapien
tacttccggtgctgcaaggatcctg

SEQ ID NO: 748352 - DNA, 25 bp, Homo sapien
tgtgttgatggcttccgccctgcct

SEQ ID NO: 748353 - DNA, 25 bp, Homo sapien
gatgggtggccagtacttcattgta

SEQ ID NO: 748354 - DNA, 25 bp, Homo sapien
cagagtgaatagaagccgcagggct

SEQ ID NO: 748355 - DNA, 25 bp, Homo sapien
tcgcagtcggtgtcaaagccaaagt

SEQ ID NO: 748356 - DNA, 25 bp, Homo sapien
gaaacttagcatcgctctcccagag

SEQ ID NO: 748357 - DNA, 25 bp, Homo sapien
tcccggctctttctatgggagaaac

SEQ ID NO: 748358 - DNA, 25 bp, Homo sapien
tgtccaaaattacctttcacttggc

SEQ ID NO: 748359 - DNA, 25 bp, Homo sapien
ctatagacaaacaccgaatcttcca

SEQ ID NO: 748360 - DNA, 25 bp, Homo sapien
tgaagaggttactatagacaaacac

SEQ ID NO: 748361 - DNA, 25 bp, Homo sapien
aacaccgaatcttccatgcctggcg

SEQ ID NO: 748362 - DNA, 25 bp, Homo sapien
cagggactgaagaggttactataga

SEQ ID NO: 748363 - DNA, 25 bp, Homo sapien
ctggctagggaggaagcccagtagg

SEQ ID NO: 748364 - DNA, 25 bp, Homo sapien
ggaggaagcccagtaggccgtacaa

SEQ ID NO: 748365 - DNA, 25 bp, Homo sapien
ggaagcccagtaggccgtacaagca

SEQ ID NO: 748366 - DNA, 25 bp, Homo sapien
cagtaggccgtacaagcacagaaaa

SEQ ID NO: 748367 - DNA, 25 bp, Homo sapien
ttacaggctgcgctgaacttgcggc

SEQ ID NO: 748368 - DNA, 25 bp, Homo sapien
acttgcggctatgggacaggtccga

SEQ ID NO: 748369 - DNA, 25 bp, Homo sapien
tgcgctgaacttgcggctatgggac

SEQ ID NO: 748370 - DNA, 25 bp, Homo sapien
tgaagttacaggctgcgctgaactt

SEQ ID NO: 748371 - DNA, 25 bp, Homo sapien
gcaaacacctggtgccggatcctgt

SEQ ID NO: 748372 - DNA, 25 bp, Homo sapien
gatatactctcggtactccacgatg

SEQ ID NO: 748373 - DNA, 25 bp, Homo sapien
ccaggaaggcggcattgataccatc

SEQ ID NO: 748374 - DNA, 25 bp, Homo sapien
actaggtcctcaacgctgcgaaagg

SEQ ID NO: 748375 - DNA, 25 bp, Homo sapien
aggagtgtcatgcacaccacctctc

SEQ ID NO: 748376 - DNA, 25 bp, Homo sapien
gtgtcatgcacaccacctctcgcac

SEQ ID NO: 748377 - DNA, 25 bp, Homo sapien
ttttccaggagtgtcatgcacacca

SEQ ID NO: 748378 - DNA, 25 bp, Homo sapien
gttttccaggagtgtcatgcacacc

SEQ ID NO: 748379 - DNA, 25 bp, Homo sapien
gacttggtgtagacccagcatcctc

SEQ ID NO: 748380 - DNA, 25 bp, Homo sapien
gacagcccattctcaggtgacggta

SEQ ID NO: 748381 - DNA, 25 bp, Homo sapien
gatatctcacactcaagacatgggt

SEQ ID NO: 748382 - DNA, 25 bp, Homo sapien
tagatgaggtcacgcacaagttgcc

SEQ ID NO: 748383 - DNA, 25 bp, Homo sapien
agactttgcagaaggagtgagttag

SEQ ID NO: 748384 - DNA, 25 bp, Homo sapien
gaagactttgcagaaggagtgagtt

SEQ ID NO: 748385 - DNA, 25 bp, Homo sapien
aagactttgcagaaggagtgagtta

SEQ ID NO: 748386 - DNA, 25 bp, Homo sapien
tttcctgtactcttgcctgacgaca

SEQ ID NO: 748387 - DNA, 25 bp, Homo sapien
tgatcccttctacaccctggtgggt

SEQ ID NO: 748388 - DNA, 25 bp, Homo sapien
cgacagtagttcaatgtcttcagca

SEQ ID NO: 748389 - DNA, 25 bp, Homo sapien
aggtgatcccttctacaccctggtg

SEQ ID NO: 748390 - DNA, 25 bp, Homo sapien
gacagcttttgataccctaggacag

SEQ ID NO: 748391 - DNA, 25 bp, Homo sapien
tgtgaccaggcaaagagaaccatca

SEQ ID NO: 748392 - DNA, 25 bp, Homo sapien
tgaatcaggacgaacacacagctct

SEQ ID NO: 748393 - DNA, 25 bp, Homo sapien
gctgctatcattgaggacacgagat

SEQ ID NO: 748394 - DNA, 25 bp, Homo sapien
aggagccctgacgccttttggattg

SEQ ID NO: 748395 - DNA, 25 bp, Homo sapien
gaggagccctgacgccttttggatt

SEQ ID NO: 748396 - DNA, 25 bp, Homo sapien
gagccctgacgccttttggattggc

SEQ ID NO: 748397 - DNA, 25 bp, Homo sapien
ggagccctgacgccttttggattgg

SEQ ID NO: 748398 - DNA, 25 bp, Homo sapien
agcagacagcgaccaagtccctgtg

SEQ ID NO: 748399 - DNA, 25 bp, Homo sapien
ggtctcttagcaagcttcacatcct

SEQ ID NO: 748400 - DNA, 25 bp, Homo sapien
tcatcccacacatcatcctggaaat

SEQ ID NO: 748401 - DNA, 25 bp, Homo sapien
cctgtgctctcaggtctcttagcaa

SEQ ID NO: 748402 - DNA, 25 bp, Homo sapien
cttcatccctgaccgaatgctgagg

SEQ ID NO: 748403 - DNA, 25 bp, Homo sapien
atccacctgacttggtcctttccct

SEQ ID NO: 748404 - DNA, 25 bp, Homo sapien
tcagcctcaattgtcactatgccac

SEQ ID NO: 748405 - DNA, 25 bp, Homo sapien
tgactttcagcctcaattgtcacta

SEQ ID NO: 748406 - DNA, 25 bp, Homo sapien
gctggggaaggtcattttgaaatta

SEQ ID NO: 748407 - DNA, 25 bp, Homo sapien
tgtataccggattctctcactgtga

SEQ ID NO: 748408 - DNA, 25 bp, Homo sapien
caccttcctgcttataagcttggca

SEQ ID NO: 748409 - DNA, 25 bp, Homo sapien
agcttggcatttgtataccggattc

SEQ ID NO: 748410 - DNA, 25 bp, Homo sapien
tctgtatctgtaacttagctatggc

SEQ ID NO: 748411 - DNA, 25 bp, Homo sapien
tagcacaacctctaccaccaagtgg

SEQ ID NO: 748412 - DNA, 25 bp, Homo sapien
cagtaaaatttctcagcttcgctga

SEQ ID NO: 748413 - DNA, 25 bp, Homo sapien
tacaccatcgagtaagggagagtag

SEQ ID NO: 748414 - DNA, 25 bp, Homo sapien
tcatgaagatgtcaccaggcaacag

SEQ ID NO: 748415 - DNA, 25 bp, Homo sapien
atgtcaccaggcaacaggaattttc

SEQ ID NO: 748416 - DNA, 25 bp, Homo sapien
ggatcaggatcatgaagatgtcacc

SEQ ID NO: 748417 - DNA, 25 bp, Homo sapien
gaagatgtcaccaggcaacaggaat

SEQ ID NO: 748418 - DNA, 25 bp, Homo sapien
aggtccagctgcggtccccacagtg

SEQ ID NO: 748419 - DNA, 25 bp, Homo sapien
ccggcagtgacctgctcagcccctc

SEQ ID NO: 748420 - DNA, 25 bp, Homo sapien
gaggcttctactatagccaaggaaa

SEQ ID NO: 748421 - DNA, 25 bp, Homo sapien
gccaaggaaaatttgtcaggtccag

SEQ ID NO: 748422 - DNA, 25 bp, Homo sapien
ttccaagagccacacgatgctggta

SEQ ID NO: 748423 - DNA, 25 bp, Homo sapien
agggcctatcatgcactcctggctg

SEQ ID NO: 748424 - DNA, 25 bp, Homo sapien
ggggcacaaagtagacagggcctat

SEQ ID NO: 748425 - DNA, 25 bp, Homo sapien
atggtaattacaattctggagggct

SEQ ID NO: 748426 - DNA, 25 bp, Homo sapien
tgcagaagtccaggtgcatgatgag

SEQ ID NO: 748427 - DNA, 25 bp, Homo sapien
agggggaccctgatgcagaagtcca

SEQ ID NO: 748428 - DNA, 25 bp, Homo sapien
tccaacccagctttaagaaacgctg

SEQ ID NO: 748429 - DNA, 25 bp, Homo sapien
gagaggccaggagccgactgagggg

SEQ ID NO: 748430 - DNA, 25 bp, Homo sapien
tgtatctccgttggtcacagcgccg

SEQ ID NO: 748431 - DNA, 25 bp, Homo sapien
tctccgttggtcacagcgccgctgg

SEQ ID NO: 748432 - DNA, 25 bp, Homo sapien
ccagcctgtgtatctccgttggtca

SEQ ID NO: 748433 - DNA, 25 bp, Homo sapien
tgtgtatctccgttggtcacagcgc

SEQ ID NO: 748434 - DNA, 25 bp, Homo sapien
tggaatccatagttagtatctcacc

SEQ ID NO: 748435 - DNA, 25 bp, Homo sapien
gtagcctctgactcctgcattcaag

SEQ ID NO: 748436 - DNA, 25 bp, Homo sapien
gtatctcaccatgtgttatatttgt

SEQ ID NO: 748437 - DNA, 25 bp, Homo sapien
actgtagcctctgactcctgcattc

SEQ ID NO: 748438 - DNA, 25 bp, Homo sapien
cttccacctggtccggagatctggc

SEQ ID NO: 748439 - DNA, 25 bp, Homo sapien
ggttggcacttccaccttggcattc

SEQ ID NO: 748440 - DNA, 25 bp, Homo sapien
tcatgacgcactgctctgtgcccgg

SEQ ID NO: 748441 - DNA, 25 bp, Homo sapien
gaatgcttcccactcggatgctctg

SEQ ID NO: 748442 - DNA, 25 bp, Homo sapien
taagatctgagatgaatgttcacaa

SEQ ID NO: 748443 - DNA, 25 bp, Homo sapien
taggttctgatacaagggaaatgca

SEQ ID NO: 748444 - DNA, 25 bp, Homo sapien
gggatttgattcagaagacttaggt

SEQ ID NO: 748445 - DNA, 25 bp, Homo sapien
gctttttcccatgagtgtaagatct

SEQ ID NO: 748446 - DNA, 25 bp, Homo sapien
gactcctcctaggttgtagagtcac

SEQ ID NO: 748447 - DNA, 25 bp, Homo sapien
tccatgatcaattccttcgctcttc

SEQ ID NO: 748448 - DNA, 25 bp, Homo sapien
ggactcctcctaggttgtagagtca

SEQ ID NO: 748449 - DNA, 25 bp, Homo sapien
cagagctccatgatcaattccttcg

SEQ ID NO: 748450 - DNA, 25 bp, Homo sapien
ttttcctaggcagagtgtttgtgtc

SEQ ID NO: 748451 - DNA, 25 bp, Homo sapien
attccacaaaactgctatcgtcatc

SEQ ID NO: 748452 - DNA, 25 bp, Homo sapien
ttcctaggcagagtgtttgtgtccc

SEQ ID NO: 748453 - DNA, 25 bp, Homo sapien
cacaaaactgctatcgtcatcatgg

SEQ ID NO: 748454 - DNA, 25 bp, Homo sapien
aacacttatccctgacatgtcaaga

SEQ ID NO: 748455 - DNA, 25 bp, Homo sapien
tatccctgacatgtcaagagtggcc

SEQ ID NO: 748456 - DNA, 25 bp, Homo sapien
aaaaagggggcattctgaccctgca

SEQ ID NO: 748457 - DNA, 25 bp, Homo sapien
gacatgtcaagagtggccaccagca

SEQ ID NO: 748458 - DNA, 25 bp, Homo sapien
gatgcaaggatttcatgggcccaga

SEQ ID NO: 748459 - DNA, 25 bp, Homo sapien
cactgggcacctgaaatacggcaga

SEQ ID NO: 748460 - DNA, 25 bp, Homo sapien
tgtcctgtaactggaagggcctgtg

SEQ ID NO: 748461 - DNA, 25 bp, Homo sapien
tatgtggctcacattgcacacagcc

SEQ ID NO: 748462 - DNA, 25 bp, Homo sapien
aaatttgtcagttgagcaggctgcc

SEQ ID NO: 748463 - DNA, 25 bp, Homo sapien
ttagcatgaagtcctcctggtttga

SEQ ID NO: 748464 - DNA, 25 bp, Homo sapien
gaggtacacatgcttaattctgcac

SEQ ID NO: 748465 - DNA, 25 bp, Homo sapien
gggtcactaggattcacacttcaaa

SEQ ID NO: 748466 - DNA, 25 bp, Homo sapien
cagcttgattctctccgctcaggga

SEQ ID NO: 748467 - DNA, 25 bp, Homo sapien
cccgtaataccgagtggctgcatga

SEQ ID NO: 748468 - DNA, 25 bp, Homo sapien
caaaggaggttctgagtggagtcaa

SEQ ID NO: 748469 - DNA, 25 bp, Homo sapien
tctgagtggagtcaacttcaaaagc

SEQ ID NO: 748470 - DNA, 25 bp, Homo sapien
gagctgcagttaaaaggttgggccc

SEQ ID NO: 748471 - DNA, 25 bp, Homo sapien
tactgagagctgcagttaaaaggtt

SEQ ID NO: 748472 - DNA, 25 bp, Homo sapien
ccagccccgccaaatcggctttcat

SEQ ID NO: 748473 - DNA, 25 bp, Homo sapien
gccccgccaaatcggctttcatctc

SEQ ID NO: 748474 - DNA, 25 bp, Homo sapien
ctggaatcagcttccggatgtgtgg

SEQ ID NO: 748475 - DNA, 25 bp, Homo sapien
gggatctggttggcctctagatatc

SEQ ID NO: 748476 - DNA, 25 bp, Homo sapien
tttctggaatcagcttccggatgtg

SEQ ID NO: 748477 - DNA, 25 bp, Homo sapien
gatctggttggcctctagatatctg

SEQ ID NO: 748478 - DNA, 25 bp, Homo sapien
cttcttcccgcaacctgctcaggcc

SEQ ID NO: 748479 - DNA, 25 bp, Homo sapien
acctgctcaggccatgtgggatgga

SEQ ID NO: 748480 - DNA, 25 bp, Homo sapien
tgtgctcttcttcccgcaacctgct

SEQ ID NO: 748481 - DNA, 25 bp, Homo sapien
aacctgctcaggccatgtgggatgg

SEQ ID NO: 748482 - DNA, 25 bp, Homo sapien
tgttctctgcaggatatgagatgga

SEQ ID NO: 748483 - DNA, 25 bp, Homo sapien
caggatatgagatggagtcgatgcc

SEQ ID NO: 748484 - DNA, 25 bp, Homo sapien
tggagtcgatgccattagctctgct

SEQ ID NO: 748485 - DNA, 25 bp, Homo sapien
tctgacacactctgaaccacagaca

SEQ ID NO: 748486 - DNA, 25 bp, Homo sapien
cgaattcagtgtagttataagtttg

SEQ ID NO: 748487 - DNA, 25 bp, Homo sapien
ccacacagggatgaggccaagctta

SEQ ID NO: 748488 - DNA, 25 bp, Homo sapien
gacgaagcttacgttctaatgaggg

SEQ ID NO: 748489 - DNA, 25 bp, Homo sapien
gagatgcgcacaaaaagctcccaag

SEQ ID NO: 748490 - DNA, 25 bp, Homo sapien
gtggcttattcagggtccacacagg

SEQ ID NO: 748491 - DNA, 25 bp, Homo sapien
cttttgctgtatactgaggatgcca

SEQ ID NO: 748492 - DNA, 25 bp, Homo sapien
caaaactatcttctggagtctgctg

SEQ ID NO: 748493 - DNA, 25 bp, Homo sapien
gaaactccatctcagtctacagaag

SEQ ID NO: 748494 - DNA, 25 bp, Homo sapien
tcttcacgttttactgttcctggcc

SEQ ID NO: 748495 - DNA, 25 bp, Homo sapien
tgtgtgcaggtgaccaaggatccat

SEQ ID NO: 748496 - DNA, 25 bp, Homo sapien
ccagaatatgatgtactgtatgcca

SEQ ID NO: 748497 - DNA, 25 bp, Homo sapien
ttgacagcgccctactgtgtgcagg

SEQ ID NO: 748498 - DNA, 25 bp, Homo sapien
gatccatgattgctatggcattccc

SEQ ID NO: 748499 - DNA, 25 bp, Homo sapien
gtcaagcagttcttgcacagctaga

SEQ ID NO: 748500 - DNA, 25 bp, Homo sapien
aggcctctctgtcaagcagttcttg

SEQ ID NO: 748501 - DNA, 25 bp, Homo sapien
tccaaggcctctctgtcaagcagtt

SEQ ID NO: 748502 - DNA, 25 bp, Homo sapien
tctctgtcaagcagttcttgcacag

SEQ ID NO: 748503 - DNA, 25 bp, Homo sapien
tgaacatagaaagccgagacacact

SEQ ID NO: 748504 - DNA, 25 bp, Homo sapien
tatttgtcttagtgccaaccagcag

SEQ ID NO: 748505 - DNA, 25 bp, Homo sapien
gaaactcagcgaatttggctccctg

SEQ ID NO: 748506 - DNA, 25 bp, Homo sapien
gggcagcagctaactcttggagatc

SEQ ID NO: 748507 - DNA, 25 bp, Homo sapien
taatccaccagtacttgtgaaggaa

SEQ ID NO: 748508 - DNA, 25 bp, Homo sapien
aaatttaatccaccagtacttgtga

SEQ ID NO: 748509 - DNA, 25 bp, Homo sapien
aatccaccagtacttgtgaaggaaa

SEQ ID NO: 748510 - DNA, 25 bp, Homo sapien
tttaatccaccagtacttgtgaagg

SEQ ID NO: 748511 - DNA, 25 bp, Homo sapien
gtgttccttcacttttaggtgctcc

SEQ ID NO: 748512 - DNA, 25 bp, Homo sapien
gaacctccttctgcgtcctctatcc

SEQ ID NO: 748513 - DNA, 25 bp, Homo sapien
taggtgctcctttgacattgtccac

SEQ ID NO: 748514 - DNA, 25 bp, Homo sapien
cagaacctccttctgcgtcctctat

SEQ ID NO: 748515 - DNA, 25 bp, Homo sapien
gctctttcaaggagaagttgccatc

SEQ ID NO: 748516 - DNA, 25 bp, Homo sapien
cagctctttcaaggagaagttgcca

SEQ ID NO: 748517 - DNA, 25 bp, Homo sapien
ctctttcaaggagaagttgccatct

SEQ ID NO: 748518 - DNA, 25 bp, Homo sapien
ctttcaaggagaagttgccatcttc

SEQ ID NO: 748519 - DNA, 25 bp, Homo sapien
gaactgttcaccgttcaccgttcac

SEQ ID NO: 748520 - DNA, 25 bp, Homo sapien
tggaagttccaactgggcggagctc

SEQ ID NO: 748521 - DNA, 25 bp, Homo sapien
tcccgtggaaataaggctgaagcca

SEQ ID NO: 748522 - DNA, 25 bp, Homo sapien
gaatgccagcaaaaccgaactgttc

SEQ ID NO: 748523 - DNA, 25 bp, Homo sapien
gtagcctcttagatagatttcttga

SEQ ID NO: 748524 - DNA, 25 bp, Homo sapien
gggcaaaacccagaacgtgacatct

SEQ ID NO: 748525 - DNA, 25 bp, Homo sapien
agatccccagagctatacacattgg

SEQ ID NO: 748526 - DNA, 25 bp, Homo sapien
tttaatcctggacacttctgacccc

SEQ ID NO: 748527 - DNA, 25 bp, Homo sapien
cgaattgtacatgctagggatcttg

SEQ ID NO: 748528 - DNA, 25 bp, Homo sapien
ttctggctccctccaacatactggg

SEQ ID NO: 748529 - DNA, 25 bp, Homo sapien
aaaactgtttggtgctagtttcaca

SEQ ID NO: 748530 - DNA, 25 bp, Homo sapien
aaactgtttggtgctagtttcacag

SEQ ID NO: 748531 - DNA, 25 bp, Homo sapien
atgtcctcagagtcactggttctgt

SEQ ID NO: 748532 - DNA, 25 bp, Homo sapien
agaatgtcctcagagtcactggttc

SEQ ID NO: 748533 - DNA, 25 bp, Homo sapien
tttggagaatgtcctcagagtcact

SEQ ID NO: 748534 - DNA, 25 bp, Homo sapien
ttggagaatgtcctcagagtcactg

SEQ ID NO: 748535 - DNA, 25 bp, Homo sapien
ggcacccagcaagtctctgtatgtg

SEQ ID NO: 748536 - DNA, 25 bp, Homo sapien
gacaaaaatttagcaagcagctggg

SEQ ID NO: 748537 - DNA, 25 bp, Homo sapien
caaaataaagcactgctggcatgga

SEQ ID NO: 748538 - DNA, 25 bp, Homo sapien
tggttgttagacacactgggctgct

SEQ ID NO: 748539 - DNA, 25 bp, Homo sapien
acaaggggcaaagaatcattcccgc

SEQ ID NO: 748540 - DNA, 25 bp, Homo sapien
taacaaggggcaaagaatcattccc

SEQ ID NO: 748541 - DNA, 25 bp, Homo sapien
tgtaacaaggggcaaagaatcattc

SEQ ID NO: 748542 - DNA, 25 bp, Homo sapien
aaggggcaaagaatcattcccgcct

SEQ ID NO: 748543 - DNA, 25 bp, Homo sapien
ggccattgtcatcagcgtcatcttc

SEQ ID NO: 748544 - DNA, 25 bp, Homo sapien
cactgtggccattgtcatcagcgtc

SEQ ID NO: 748545 - DNA, 25 bp, Homo sapien
tttcacactgtggccattgtcatca

SEQ ID NO: 748546 - DNA, 25 bp, Homo sapien
ctgtggccattgtcatcagcgtcat

SEQ ID NO: 748547 - DNA, 25 bp, Homo sapien
tgcatgatggtgcatccttgtttaa

SEQ ID NO: 748548 - DNA, 25 bp, Homo sapien
cccattcttcttccatgggggccag

SEQ ID NO: 748549 - DNA, 25 bp, Homo sapien
acagtgtgccacttgaagggtggct

SEQ ID NO: 748550 - DNA, 25 bp, Homo sapien
caggaaggcattctgcatgatggtg

SEQ ID NO: 748551 - DNA, 25 bp, Homo sapien
tagttaataacttgagcgacgaggg

SEQ ID NO: 748552 - DNA, 25 bp, Homo sapien
gaagcagaatccctgacccttaagg

SEQ ID NO: 748553 - DNA, 25 bp, Homo sapien
taagctctaggagccctaaggaagc

SEQ ID NO: 748554 - DNA, 25 bp, Homo sapien
taacagcccctctagatgactctga

SEQ ID NO: 748555 - DNA, 25 bp, Homo sapien
tcaaggcaagactgcagtcttcaaa

SEQ ID NO: 748556 - DNA, 25 bp, Homo sapien
gggcagcccacatacaatggttggg

SEQ ID NO: 748557 - DNA, 25 bp, Homo sapien
tagggaccagtagccacagaatcac

SEQ ID NO: 748558 - DNA, 25 bp, Homo sapien
tctgtgcctgaacaaacccactgga

SEQ ID NO: 748559 - DNA, 25 bp, Homo sapien
cctgagaacgtgctagaaatcctag

SEQ ID NO: 748560 - DNA, 25 bp, Homo sapien
tcactggcatagcttctaagaagtc

SEQ ID NO: 748561 - DNA, 25 bp, Homo sapien
cactgctggagcctgtttcagagtc

SEQ ID NO: 748562 - DNA, 25 bp, Homo sapien
taagaagtccgtcactggacccacc

SEQ ID NO: 748563 - DNA, 25 bp, Homo sapien
tgtcgcatgtgtcttgggtgcttcc

SEQ ID NO: 748564 - DNA, 25 bp, Homo sapien
aaagcacttccatccttcccgctgc

SEQ ID NO: 748565 - DNA, 25 bp, Homo sapien
atctgtacccgtcgccagctgctct

SEQ ID NO: 748566 - DNA, 25 bp, Homo sapien
ccacctggaggtctccttagcccct

SEQ ID NO: 748567 - DNA, 25 bp, Homo sapien
tgcccatcttggtccaaagcacttc

SEQ ID NO: 748568 - DNA, 25 bp, Homo sapien
aattgcacacagtaggatgaggagt

SEQ ID NO: 748569 - DNA, 25 bp, Homo sapien
ttgcacacagtaggatgaggagtgg

SEQ ID NO: 748570 - DNA, 25 bp, Homo sapien
tgcacacagtaggatgaggagtgga

SEQ ID NO: 748571 - DNA, 25 bp, Homo sapien
attgcacacagtaggatgaggagtg

SEQ ID NO: 748572 - DNA, 25 bp, Homo sapien
aatgcatgttgcaccaatatggctg

SEQ ID NO: 748573 - DNA, 25 bp, Homo sapien
tgcatgttgcaccaatatggctgta

SEQ ID NO: 748574 - DNA, 25 bp, Homo sapien
gcatgttgcaccaatatggctgtaa

SEQ ID NO: 748575 - DNA, 25 bp, Homo sapien
ctaatgcatgttgcaccaatatggc

SEQ ID NO: 748576 - DNA, 25 bp, Homo sapien
ttgaaccaccgtagtgcttgtcttg

SEQ ID NO: 748577 - DNA, 25 bp, Homo sapien
acttgaaccaccgtagtgcttgtct

SEQ ID NO: 748578 - DNA, 25 bp, Homo sapien
ccaccgtagtgcttgtcttgtttac

SEQ ID NO: 748579 - DNA, 25 bp, Homo sapien
gaaccaccgtagtgcttgtcttgtt

SEQ ID NO: 748580 - DNA, 25 bp, Homo sapien
ctgctgaactacatccctgtttttc

SEQ ID NO: 748581 - DNA, 25 bp, Homo sapien
cactgctgaactacatccctgtttt

SEQ ID NO: 748582 - DNA, 25 bp, Homo sapien
actgctgaactacatccctgttttt

SEQ ID NO: 748583 - DNA, 25 bp, Homo sapien
ctgagaagccaggcactgcatgatt

SEQ ID NO: 748584 - DNA, 25 bp, Homo sapien
taaagcagtcccggctggcggcggc

SEQ ID NO: 748585 - DNA, 25 bp, Homo sapien
ctaaagcagtcccggctggcggcgg

SEQ ID NO: 748586 - DNA, 25 bp, Homo sapien
acaggtcagaagcgtgggttcgcgc

SEQ ID NO: 748587 - DNA, 25 bp, Homo sapien
cacaggtcagaagcgtgggttcgcg

SEQ ID NO: 748588 - DNA, 25 bp, Homo sapien
gcacaggtcagaagcgtgggttcgc

SEQ ID NO: 748589 - DNA, 25 bp, Homo sapien
ggcagggtcggctggtttagctccg

SEQ ID NO: 748590 - DNA, 25 bp, Homo sapien
tcggctggtttagctccgtgcagaa

SEQ ID NO: 748591 - DNA, 25 bp, Homo sapien
gggccccttccacttgcggatgttg

SEQ ID NO: 748592 - DNA, 25 bp, Homo sapien
ctcgagggcttctcagcaacaacag

SEQ ID NO: 748593 - DNA, 25 bp, Homo sapien
tggactggaagggagaaccctgaac

SEQ ID NO: 748594 - DNA, 25 bp, Homo sapien
cagtgctgaatggactataaaaggc

SEQ ID NO: 748595 - DNA, 25 bp, Homo sapien
catgcaggcatggagtttttctcac

SEQ ID NO: 748596 - DNA, 25 bp, Homo sapien
gcttactgtcaaaaaatggccactt

SEQ ID NO: 748597 - DNA, 25 bp, Homo sapien
ctagggacagagattgaacattttc

SEQ ID NO: 748598 - DNA, 25 bp, Homo sapien
gctatcgtgtaagccctagggagct

SEQ ID NO: 748599 - DNA, 25 bp, Homo sapien
ttcaggcatcggagaaatggcccac

SEQ ID NO: 748600 - DNA, 25 bp, Homo sapien
ttttcaacctgcagatatattctgt

SEQ ID NO: 748601 - DNA, 25 bp, Homo sapien
atcttccgcccaaaagccttcaggg

SEQ ID NO: 748602 - DNA, 25 bp, Homo sapien
actcgagtcatcttccgcccaaaag

SEQ ID NO: 748603 - DNA, 25 bp, Homo sapien
aagcatcactcgagtcatcttccgc

SEQ ID NO: 748604 - DNA, 25 bp, Homo sapien
atcactcgagtcatcttccgcccaa

SEQ ID NO: 748605 - DNA, 25 bp, Homo sapien
cagagtcttggtgccagagccctag

SEQ ID NO: 748606 - DNA, 25 bp, Homo sapien
gtcttggtgccagagccctagcgcc

SEQ ID NO: 748607 - DNA, 25 bp, Homo sapien
cttggtgccagagccctagcgccac

SEQ ID NO: 748608 - DNA, 25 bp, Homo sapien
gacagagtcttggtgccagagccct

SEQ ID NO: 748609 - DNA, 25 bp, Homo sapien
ttgaacctcccgaggtatgggctgg

SEQ ID NO: 748610 - DNA, 25 bp, Homo sapien
tcccgtgcccgttgcttggcgagct

SEQ ID NO: 748611 - DNA, 25 bp, Homo sapien
agctctcctgtgaacccgcgtctct

SEQ ID NO: 748612 - DNA, 25 bp, Homo sapien
gccggcagccgcgtcccataggaat

SEQ ID NO: 748613 - DNA, 25 bp, Homo sapien
ggtggcacagggccttgtagcctca

SEQ ID NO: 748614 - DNA, 25 bp, Homo sapien
tgtagcctcaacacaggggctgctc

SEQ ID NO: 748615 - DNA, 25 bp, Homo sapien
ccctcagctggcagatactccctgg

SEQ ID NO: 748616 - DNA, 25 bp, Homo sapien
ccttgtagcctcaacacaggggctg

SEQ ID NO: 748617 - DNA, 25 bp, Homo sapien
ccagtttgccagcaaccaggaccaa

SEQ ID NO: 748618 - DNA, 25 bp, Homo sapien
gtttgccagcaaccaggaccaagag

SEQ ID NO: 748619 - DNA, 25 bp, Homo sapien
ttgccagcaaccaggaccaagagct

SEQ ID NO: 748620 - DNA, 25 bp, Homo sapien
tgcctgctagagaaagcatcttaag

SEQ ID NO: 748621 - DNA, 25 bp, Homo sapien
gaaacaaagcaacagggagaggctc

SEQ ID NO: 748622 - DNA, 25 bp, Homo sapien
ctaggcagcaggaaacaaagcaaca

SEQ ID NO: 748623 - DNA, 25 bp, Homo sapien
cagggagaggctcagaagctcatat

SEQ ID NO: 748624 - DNA, 25 bp, Homo sapien
aaagcaacagggagaggctcagaag

SEQ ID NO: 748625 - DNA, 25 bp, Homo sapien
cactgtgattcttgctgggattctc

SEQ ID NO: 748626 - DNA, 25 bp, Homo sapien
tgggattctcgctccccaggagggt

SEQ ID NO: 748627 - DNA, 25 bp, Homo sapien
ccaggtgaaggttaacaagggtcag

SEQ ID NO: 748628 - DNA, 25 bp, Homo sapien
gtagggtctgtgcaaagctcgccaa

SEQ ID NO: 748629 - DNA, 25 bp, Homo sapien
gaacgcatatgctaggtccacagag

SEQ ID NO: 748630 - DNA, 25 bp, Homo sapien
ctgctatgagatgagtactgtcccc

SEQ ID NO: 748631 - DNA, 25 bp, Homo sapien
gatgccagaggtttgactgtcccct

SEQ ID NO: 748632 - DNA, 25 bp, Homo sapien
tctgcaaaacagtggccgagtcaca

SEQ ID NO: 748633 - DNA, 25 bp, Homo sapien
gcgcatgtgcattgcagatggcgcc

SEQ ID NO: 748634 - DNA, 25 bp, Homo sapien
accagagggcgcatgtgcattgcag

SEQ ID NO: 748635 - DNA, 25 bp, Homo sapien
cagagggcgcatgtgcattgcagat

SEQ ID NO: 748636 - DNA, 25 bp, Homo sapien
gcatgtgcattgcagatggcgccct

SEQ ID NO: 748637 - DNA, 25 bp, Homo sapien
gctttagggaaagcagttcataaac

SEQ ID NO: 748638 - DNA, 25 bp, Homo sapien
cacgggtgtgcttccgtaataacaa

SEQ ID NO: 748639 - DNA, 25 bp, Homo sapien
gttcataaacgaagtcataaatgta

SEQ ID NO: 748640 - DNA, 25 bp, Homo sapien
tttttcctggccacgggtgtgcttc

SEQ ID NO: 748641 - DNA, 25 bp, Homo sapien
cctttgaaacgggattgagattctc

SEQ ID NO: 748642 - DNA, 25 bp, Homo sapien
acgggattgagattctctgacttga

SEQ ID NO: 748643 - DNA, 25 bp, Homo sapien
tgaaacgggattgagattctctgac

SEQ ID NO: 748644 - DNA, 25 bp, Homo sapien
cgtggccctttgaaacgggattgag

SEQ ID NO: 748645 - DNA, 25 bp, Homo sapien
ctcaggatatcatagtcattgctgt

SEQ ID NO: 748646 - DNA, 25 bp, Homo sapien
cagagacttcgagccttgagggttc

SEQ ID NO: 748647 - DNA, 25 bp, Homo sapien
gccaaaatcccctaagataatgaca

SEQ ID NO: 748648 - DNA, 25 bp, Homo sapien
gttgtccagagacttcgagccttga

SEQ ID NO: 748649 - DNA, 25 bp, Homo sapien
gagaaaggacaagtgagttctgcct

SEQ ID NO: 748650 - DNA, 25 bp, Homo sapien
aatcctatgtatgcctcagaggagg

SEQ ID NO: 748651 - DNA, 25 bp, Homo sapien
aaaacaattagagaatggctggaaa

SEQ ID NO: 748652 - DNA, 25 bp, Homo sapien
cagtcacgtaaaccacaatcctatg

SEQ ID NO: 748653 - DNA, 25 bp, Homo sapien
tgtagcgggggcaactcctccctga

SEQ ID NO: 748654 - DNA, 25 bp, Homo sapien
tgctgaccattctgtagcgggggca

SEQ ID NO: 748655 - DNA, 25 bp, Homo sapien
ttccttcaatagacaccttcctggg

SEQ ID NO: 748656 - DNA, 25 bp, Homo sapien
tcttttcctggcccatagcgcattt

SEQ ID NO: 748657 - DNA, 25 bp, Homo sapien
tatccggaatccaagggttcgtgag

SEQ ID NO: 748658 - DNA, 25 bp, Homo sapien
cttgctccagtccttttcagtgtag

SEQ ID NO: 748659 - DNA, 25 bp, Homo sapien
cgccccaagaccagttatccggaat

SEQ ID NO: 748660 - DNA, 25 bp, Homo sapien
tgtagaactcggctagcactgggca

SEQ ID NO: 748661 - DNA, 25 bp, Homo sapien
gctccaaggccaccccgctgccgtt

SEQ ID NO: 748662 - DNA, 25 bp, Homo sapien
aggccaccccgctgccgttccgagg

SEQ ID NO: 748663 - DNA, 25 bp, Homo sapien
ttcgctccaaggccaccccgctgcc

SEQ ID NO: 748664 - DNA, 25 bp, Homo sapien
aaggccaccccgctgccgttccgag

SEQ ID NO: 748665 - DNA, 25 bp, Homo sapien
tcgctcgtgcttgatgttggcttca

SEQ ID NO: 748666 - DNA, 25 bp, Homo sapien
catcgctcgtgcttgatgttggctt

SEQ ID NO: 748667 - DNA, 25 bp, Homo sapien
cgctcgtgcttgatgttggcttcac

SEQ ID NO: 748668 - DNA, 25 bp, Homo sapien
tcatcgctcgtgcttgatgttggct

SEQ ID NO: 748669 - DNA, 25 bp, Homo sapien
caaggcctcaagtgctgatgctctg

SEQ ID NO: 748670 - DNA, 25 bp, Homo sapien
cactggaggtcctgaatggtccaca

SEQ ID NO: 748671 - DNA, 25 bp, Homo sapien
cagggtggacacatggatttggtgt

SEQ ID NO: 748672 - DNA, 25 bp, Homo sapien
tccgctccccgcaggtttctgcttt

SEQ ID NO: 748673 - DNA, 25 bp, Homo sapien
cctggtggtcagaaatgagtgcttc

SEQ ID NO: 748674 - DNA, 25 bp, Homo sapien
tatctgagcagagtgcctgatcaca

SEQ ID NO: 748675 - DNA, 25 bp, Homo sapien
ttctggcgctgctggactgtggccc

SEQ ID NO: 748676 - DNA, 25 bp, Homo sapien
tctgtaatgcgcagcaggaacgtca

SEQ ID NO: 748677 - DNA, 25 bp, Homo sapien
tgatagtcaaccacaggaggctccg

SEQ ID NO: 748678 - DNA, 25 bp, Homo sapien
tcagctgtgaaacgcaaattgtggc

SEQ ID NO: 748679 - DNA, 25 bp, Homo sapien
tgtgagcacatagcaaaacctgagt

SEQ ID NO: 748680 - DNA, 25 bp, Homo sapien
tcaagcccgattacgaacacaaagg

SEQ ID NO: 748681 - DNA, 25 bp, Homo sapien
tttttgtttcttggctaggaattgc

SEQ ID NO: 748682 - DNA, 25 bp, Homo sapien
taggaattgcttaatcctgaaagtt

SEQ ID NO: 748683 - DNA, 25 bp, Homo sapien
gtctttattaccagtttccatctga

SEQ ID NO: 748684 - DNA, 25 bp, Homo sapien
tgcttaatcctgaaagttttgtgag

SEQ ID NO: 748685 - DNA, 25 bp, Homo sapien
ctgatggtttttgccatcacagctc

SEQ ID NO: 748686 - DNA, 25 bp, Homo sapien
tgcagcctggaactcacagactcaa

SEQ ID NO: 748687 - DNA, 25 bp, Homo sapien
atggtttttgccatcacagctctct

SEQ ID NO: 748688 - DNA, 25 bp, Homo sapien
ctgcctctcgaatagctgggactcc

SEQ ID NO: 748689 - DNA, 25 bp, Homo sapien
ttttttcatataagccgacaggccg

SEQ ID NO: 748690 - DNA, 25 bp, Homo sapien
taacagccggctggtaaaattcctg

SEQ ID NO: 748691 - DNA, 25 bp, Homo sapien
tatctcagacccagttcccaagagg

SEQ ID NO: 748692 - DNA, 25 bp, Homo sapien
taaatactctcaccaagggcaaagc

SEQ ID NO: 748693 - DNA, 25 bp, Homo sapien
taaaaattgcaaggctcaatgagga

SEQ ID NO: 748694 - DNA, 25 bp, Homo sapien
tttaaaaattgcaaggctcaatgag

SEQ ID NO: 748695 - DNA, 25 bp, Homo sapien
ttaaaaattgcaaggctcaatgagg

SEQ ID NO: 748696 - DNA, 25 bp, Homo sapien
aaaaattgcaaggctcaatgaggag

SEQ ID NO: 748697 - DNA, 25 bp, Homo sapien
gcttgcagaggcttaaaaggcacat

SEQ ID NO: 748698 - DNA, 25 bp, Homo sapien
tgttctggaaataagccctgaggtg

SEQ ID NO: 748699 - DNA, 25 bp, Homo sapien
cacttgcctcgaacaattgaaggtc

SEQ ID NO: 748700 - DNA, 25 bp, Homo sapien
gaatgcaagtcctacagtacccaga

SEQ ID NO: 748701 - DNA, 25 bp, Homo sapien
tggaggcagaactcgaacccatgtc

SEQ ID NO: 748702 - DNA, 25 bp, Homo sapien
tctgagactagtgtgaccaacctgg

SEQ ID NO: 748703 - DNA, 25 bp, Homo sapien
taatatgccggcaacgagagccatc

SEQ ID NO: 748704 - DNA, 25 bp, Homo sapien
cgaaggaccgcacaataatatgccg

SEQ ID NO: 748705 - DNA, 25 bp, Homo sapien
tactggaaattgcagaggtctgact

SEQ ID NO: 748706 - DNA, 25 bp, Homo sapien
cagtaataatgcatccttcagaccc

SEQ ID NO: 748707 - DNA, 25 bp, Homo sapien
agccccattgtttctagagcacagg

SEQ ID NO: 748708 - DNA, 25 bp, Homo sapien
ggtacacagacctcctataaactga

SEQ ID NO: 748709 - DNA, 25 bp, Homo sapien
cttgtcagcaagttgtgggagcact

SEQ ID NO: 748710 - DNA, 25 bp, Homo sapien
gccaaaccatatgaccaggctttga

SEQ ID NO: 748711 - DNA, 25 bp, Homo sapien
catttcaagagactatagagttctg

SEQ ID NO: 748712 - DNA, 25 bp, Homo sapien
taatgtcttgaaactcatggcagga

SEQ ID NO: 748713 - DNA, 25 bp, Homo sapien
tcccactatgtctttggtttctacc

SEQ ID NO: 748714 - DNA, 25 bp, Homo sapien
catcccactatgtctttggtttcta

SEQ ID NO: 748715 - DNA, 25 bp, Homo sapien
atcccactatgtctttggtttctac

SEQ ID NO: 748716 - DNA, 25 bp, Homo sapien
tcggcctctgcagccgttcaaattt

SEQ ID NO: 748717 - DNA, 25 bp, Homo sapien
tctcggcttccagtgacggactcgg

SEQ ID NO: 748718 - DNA, 25 bp, Homo sapien
tctgaggcgggggaactctcccaca

SEQ ID NO: 748719 - DNA, 25 bp, Homo sapien
ctgcagccgttcaaatttgaatttc

SEQ ID NO: 748720 - DNA, 25 bp, Homo sapien
cccaggcgtcggactacgagacgat

SEQ ID NO: 748721 - DNA, 25 bp, Homo sapien
atggaaacggtggttcaaattcagg

SEQ ID NO: 748722 - DNA, 25 bp, Homo sapien
aaaagtgagtctcagctcagtgtgt

SEQ ID NO: 748723 - DNA, 25 bp, Homo sapien
tacgagacgatggaaacggtggttc

SEQ ID NO: 748724 - DNA, 25 bp, Homo sapien
taggacagactcaaagccttcctcc

SEQ ID NO: 748725 - DNA, 25 bp, Homo sapien
gctgaaagacctctcgcaacagcct

SEQ ID NO: 748726 - DNA, 25 bp, Homo sapien
gacctctcgcaacagccttttagga

SEQ ID NO: 748727 - DNA, 25 bp, Homo sapien
gcaacagccttttaggacagactca

SEQ ID NO: 748728 - DNA, 25 bp, Homo sapien
gcgcctcactcttgctgcgccagga

SEQ ID NO: 748729 - DNA, 25 bp, Homo sapien
gggctgcgtgaactccgcaaatcac

SEQ ID NO: 748730 - DNA, 25 bp, Homo sapien
gctgcttccagcaggacccgttccg

SEQ ID NO: 748731 - DNA, 25 bp, Homo sapien
tttcattagcatctcccctgcgggc

SEQ ID NO: 748732 - DNA, 25 bp, Homo sapien
gattctctcgcctggcacgggttcg

SEQ ID NO: 748733 - DNA, 25 bp, Homo sapien
ttctctgaagattctctcgcctggc

SEQ ID NO: 748734 - DNA, 25 bp, Homo sapien
ctggcacgggttcgctccagcagtt

SEQ ID NO: 748735 - DNA, 25 bp, Homo sapien
gcctggcacgggttcgctccagcag

SEQ ID NO: 748736 - DNA, 25 bp, Homo sapien
gctcgcttagcatgagtcatagacc

SEQ ID NO: 748737 - DNA, 25 bp, Homo sapien
gaaagtggctgtctagctcgcttag

SEQ ID NO: 748738 - DNA, 25 bp, Homo sapien
ggctgtctagctcgcttagcatgag

SEQ ID NO: 748739 - DNA, 25 bp, Homo sapien
tgagtcatagaccttggagctgctg

SEQ ID NO: 748740 - DNA, 25 bp, Homo sapien
ggagacaccacccaaactcagtggc

SEQ ID NO: 748741 - DNA, 25 bp, Homo sapien
cattgccttgctggtaccggagaca

SEQ ID NO: 748742 - DNA, 25 bp, Homo sapien
tacactccaggaaaagactaaggag

SEQ ID NO: 748743 - DNA, 25 bp, Homo sapien
aaatgtcaagcatgggcagtgtgcc

SEQ ID NO: 748744 - DNA, 25 bp, Homo sapien
aggagacacaggacttggagaacaa

SEQ ID NO: 748745 - DNA, 25 bp, Homo sapien
gactcaactggttgtttattttcca

SEQ ID NO: 748746 - DNA, 25 bp, Homo sapien
ggcgatggttttgtacaagatttct

SEQ ID NO: 748747 - DNA, 25 bp, Homo sapien
cagaacagcgtttttttgatggcga

SEQ ID NO: 748748 - DNA, 25 bp, Homo sapien
actgatggtatctgctgcttgtggc

SEQ ID NO: 748749 - DNA, 25 bp, Homo sapien
gatgccgggacagcaacagaatcac

SEQ ID NO: 748750 - DNA, 25 bp, Homo sapien
tcatatcatcattatcccaacggcg

SEQ ID NO: 748751 - DNA, 25 bp, Homo sapien
caacggcgccgttgctctgcaagtt

SEQ ID NO: 748752 - DNA, 25 bp, Homo sapien
ctttaacatggagctgagggtcagc

SEQ ID NO: 748753 - DNA, 25 bp, Homo sapien
tcatgaaaggtaaggatcaagccac

SEQ ID NO: 748754 - DNA, 25 bp, Homo sapien
tcaggttccccttccgattataggc

SEQ ID NO: 748755 - DNA, 25 bp, Homo sapien
tagacaaaccatatgcaagcaaagg

SEQ ID NO: 748756 - DNA, 25 bp, Homo sapien
tggagttgccgaggcatttgaaagc

SEQ ID NO: 748757 - DNA, 25 bp, Homo sapien
aagattggccagacggccccttctg

SEQ ID NO: 748758 - DNA, 25 bp, Homo sapien
ttcccaggagcaaatagttgcagca

SEQ ID NO: 748759 - DNA, 25 bp, Homo sapien
tgccaactggagttgccgaggcatt

SEQ ID NO: 748760 - DNA, 25 bp, Homo sapien
cagaatgtagcttcctgcttaacac

SEQ ID NO: 748761 - DNA, 25 bp, Homo sapien
catcatcagcacttgaggatagggc

SEQ ID NO: 748762 - DNA, 25 bp, Homo sapien
ctttattcaaagaggcatcgccatc

SEQ ID NO: 748763 - DNA, 25 bp, Homo sapien
tttggataaacaagcggtaccaggc

SEQ ID NO: 748764 - DNA, 25 bp, Homo sapien
tgacttcacaattggtttcgatacc

SEQ ID NO: 748765 - DNA, 25 bp, Homo sapien
gctcaggattttgtccctcacaact

SEQ ID NO: 748766 - DNA, 25 bp, Homo sapien
gatagatgtagtagatttcactgga

SEQ ID NO: 748767 - DNA, 25 bp, Homo sapien
ccttggatggaactgtctgggataa

SEQ ID NO: 748768 - DNA, 25 bp, Homo sapien
tgaatataatcagcaataactaaat

SEQ ID NO: 748769 - DNA, 25 bp, Homo sapien
gaatataatcagcaataactaaatt

SEQ ID NO: 748770 - DNA, 25 bp, Homo sapien
ctgagaatagatatcctgaatataa

SEQ ID NO: 748771 - DNA, 25 bp, Homo sapien
ctgaatataatcagcaataactaaa

SEQ ID NO: 748772 - DNA, 25 bp, Homo sapien
tgtgctacgagctggactttctttg

SEQ ID NO: 748773 - DNA, 25 bp, Homo sapien
tctccaaagcgttccaggaaaggct

SEQ ID NO: 748774 - DNA, 25 bp, Homo sapien
tcttggatggcctttgtatttggag

SEQ ID NO: 748775 - DNA, 25 bp, Homo sapien
tgttcttgacaacgctctccaaagc

SEQ ID NO: 748776 - DNA, 25 bp, Homo sapien
gatttctaggttctatgcagagacc

SEQ ID NO: 748777 - DNA, 25 bp, Homo sapien
taatacacatggaattcaggacaat

SEQ ID NO: 748778 - DNA, 25 bp, Homo sapien
gagatgagtgatactgtctacggcc

SEQ ID NO: 748779 - DNA, 25 bp, Homo sapien
gactggcatcagaacccattttgat

SEQ ID NO: 748780 - DNA, 25 bp, Homo sapien
catatattgcccttgtcaaatcggc

SEQ ID NO: 748781 - DNA, 25 bp, Homo sapien
tcggccacgaagacatgctagttct

SEQ ID NO: 748782 - DNA, 25 bp, Homo sapien
tttttctgcactccatatattgccc

SEQ ID NO: 748783 - DNA, 25 bp, Homo sapien
tttgagtttccgcctttttctgcac

SEQ ID NO: 748784 - DNA, 25 bp, Homo sapien
actggaagtgactgagtttttgaaa

SEQ ID NO: 748785 - DNA, 25 bp, Homo sapien
ctgtactagaatttttggctggtat

SEQ ID NO: 748786 - DNA, 25 bp, Homo sapien
gctggtatctggttttcggtcacct

SEQ ID NO: 748787 - DNA, 25 bp, Homo sapien
ctggaagtgactgagtttttgaaac

SEQ ID NO: 748788 - DNA, 25 bp, Homo sapien
ttctgctcaacctttgggtctgatg

SEQ ID NO: 748789 - DNA, 25 bp, Homo sapien
aagacattgaggagatattcagtgc

SEQ ID NO: 748790 - DNA, 25 bp, Homo sapien
ccttcctctaggacatcactgaaga

SEQ ID NO: 748791 - DNA, 25 bp, Homo sapien
ccaactgtttgtgccaatggtgcaa

SEQ ID NO: 748792 - DNA, 25 bp, Homo sapien
gctgctttctgctaatgcttgatcc

SEQ ID NO: 748793 - DNA, 25 bp, Homo sapien
ctttcaattccagtctaggtgtgga

SEQ ID NO: 748794 - DNA, 25 bp, Homo sapien
ctgctggtgtctttcaattccagtc

SEQ ID NO: 748795 - DNA, 25 bp, Homo sapien
gtgtctttcaattccagtctaggtg

SEQ ID NO: 748796 - DNA, 25 bp, Homo sapien
ccagtctaggtgtggacactaaact

SEQ ID NO: 748797 - DNA, 25 bp, Homo sapien
gaaccaaggctatcaccagattcag

SEQ ID NO: 748798 - DNA, 25 bp, Homo sapien
ttcagctcgagggacacgagttctt

SEQ ID NO: 748799 - DNA, 25 bp, Homo sapien
ctgtaaagaagatcacgatcttcag

SEQ ID NO: 748800 - DNA, 25 bp, Homo sapien
gatcacgatcttcagaaccaaggct

SEQ ID NO: 748801 - DNA, 25 bp, Homo sapien
gctttattgatggacgttctgtttc

SEQ ID NO: 748802 - DNA, 25 bp, Homo sapien
ttgatggacgttctgtttctttgaa

SEQ ID NO: 748803 - DNA, 25 bp, Homo sapien
gtaacatcttccttccgaacaatca

SEQ ID NO: 748804 - DNA, 25 bp, Homo sapien
atcacctgctttattgatggacgtt

SEQ ID NO: 748805 - DNA, 25 bp, Homo sapien
gctagcttgatagatcactgtctgt

SEQ ID NO: 748806 - DNA, 25 bp, Homo sapien
gcatatttatttcgttattgagttc

SEQ ID NO: 748807 - DNA, 25 bp, Homo sapien
acagcagttaagagcctggctagct

SEQ ID NO: 748808 - DNA, 25 bp, Homo sapien
tgcaattagaagaagtctttctgct

SEQ ID NO: 748809 - DNA, 25 bp, Homo sapien
attaaaatcgtaactgtttctaatg

SEQ ID NO: 748810 - DNA, 25 bp, Homo sapien
aaaacaacgcaatattccaaatatt

SEQ ID NO: 748811 - DNA, 25 bp, Homo sapien
actgtttctaatgagagcaaattca

SEQ ID NO: 748812 - DNA, 25 bp, Homo sapien
ctatgtaaaacaacgcaatattcca

SEQ ID NO: 748813 - DNA, 25 bp, Homo sapien
aaagtaactgatcctttggatggca

SEQ ID NO: 748814 - DNA, 25 bp, Homo sapien
aaatctgcttttagaggcaagcgga

SEQ ID NO: 748815 - DNA, 25 bp, Homo sapien
ggcaagcggatttctgacaaagtaa

SEQ ID NO: 748816 - DNA, 25 bp, Homo sapien
tgaaccgtactgcagacaaaatctg

SEQ ID NO: 748817 - DNA, 25 bp, Homo sapien
gagtaaatgtagtagtgaatgtcag

SEQ ID NO: 748818 - DNA, 25 bp, Homo sapien
tacttgctaatggtgtggctaccat

SEQ ID NO: 748819 - DNA, 25 bp, Homo sapien
aatgtcagagcatcaccgttaagag

SEQ ID NO: 748820 - DNA, 25 bp, Homo sapien
gagcatcaccgttaagagagtttga

SEQ ID NO: 748821 - DNA, 25 bp, Homo sapien
gatgctacaaatactcttacaagac

SEQ ID NO: 748822 - DNA, 25 bp, Homo sapien
ctcaatcacaccattaaaaatgatg

SEQ ID NO: 748823 - DNA, 25 bp, Homo sapien
tacaagactctaagtaaaggaatcc

SEQ ID NO: 748824 - DNA, 25 bp, Homo sapien
gcattaagtaaaaccttgagagaaa

SEQ ID NO: 748825 - DNA, 25 bp, Homo sapien
tatttcaaagtcattggatacatct

SEQ ID NO: 748826 - DNA, 25 bp, Homo sapien
caagctgtaaacttcaatatttatt

SEQ ID NO: 748827 - DNA, 25 bp, Homo sapien
ttcaaagtcattggatacatcttgc

SEQ ID NO: 748828 - DNA, 25 bp, Homo sapien
agctgtaaacttcaatatttatttc

SEQ ID NO: 748829 - DNA, 25 bp, Homo sapien
tcttatcaaggcctgagggatcttt

SEQ ID NO: 748830 - DNA, 25 bp, Homo sapien
cttcttatcaaggcctgagggatct

SEQ ID NO: 748831 - DNA, 25 bp, Homo sapien
tatcaaggcctgagggatctttctt

SEQ ID NO: 748832 - DNA, 25 bp, Homo sapien
cttatcaaggcctgagggatctttc

SEQ ID NO: 748833 - DNA, 25 bp, Homo sapien
tgtggttatagatgtgaggagtcgc

SEQ ID NO: 748834 - DNA, 25 bp, Homo sapien
atgtgaggagtcgctttggagtaat

SEQ ID NO: 748835 - DNA, 25 bp, Homo sapien
tgaggagtcgctttggagtaatagc

SEQ ID NO: 748836 - DNA, 25 bp, Homo sapien
tgtgaggagtcgctttggagtaata

SEQ ID NO: 748837 - DNA, 25 bp, Homo sapien
gcgaagttgctggttcgcacagcac

SEQ ID NO: 748838 - DNA, 25 bp, Homo sapien
agcactaagacctcctggactggcc

SEQ ID NO: 748839 - DNA, 25 bp, Homo sapien
taagatccaacaagggcgaagttgc

SEQ ID NO: 748840 - DNA, 25 bp, Homo sapien
gacaatgataatgtgtaagatccaa

SEQ ID NO: 748841 - DNA, 25 bp, Homo sapien
tagcccagtagctctcgctctctta

SEQ ID NO: 748842 - DNA, 25 bp, Homo sapien
ttttcctggaacaaatagcccagta

SEQ ID NO: 748843 - DNA, 25 bp, Homo sapien
tcctggaacaaatagcccagtagct

SEQ ID NO: 748844 - DNA, 25 bp, Homo sapien
gaacaaatagcccagtagctctcgc

SEQ ID NO: 748845 - DNA, 25 bp, Homo sapien
tgagaagtgatggttgaagacatgt

SEQ ID NO: 748846 - DNA, 25 bp, Homo sapien
tagaaaacctctttcttcaacactg

SEQ ID NO: 748847 - DNA, 25 bp, Homo sapien
taaatatgaccttccaaagaagata

SEQ ID NO: 748848 - DNA, 25 bp, Homo sapien
cctctttcttcaacactggaattca

SEQ ID NO: 748849 - DNA, 25 bp, Homo sapien
ttcaacactggaattcacttgacat

SEQ ID NO: 748850 - DNA, 25 bp, Homo sapien
taggtgagacgttatatgcaaatgg

SEQ ID NO: 748851 - DNA, 25 bp, Homo sapien
caatgtttaggcagaggacagaagt

SEQ ID NO: 748852 - DNA, 25 bp, Homo sapien
gggctacaggattcaagacagagta

SEQ ID NO: 748853 - DNA, 25 bp, Homo sapien
taacaagctcgttaagagcccatct

SEQ ID NO: 748854 - DNA, 25 bp, Homo sapien
ctttggttggagtcgccctcctcca

SEQ ID NO: 748855 - DNA, 25 bp, Homo sapien
ctctttggttggagtcgccctcctc

SEQ ID NO: 748856 - DNA, 25 bp, Homo sapien
tctttggttggagtcgccctcctcc

SEQ ID NO: 748857 - DNA, 25 bp, Homo sapien
tttggttggagtcgccctcctccag

SEQ ID NO: 748858 - DNA, 25 bp, Homo sapien
tctaggcaacactgcttacagctcc

SEQ ID NO: 748859 - DNA, 25 bp, Homo sapien
caagattaacaccagctattatgac

SEQ ID NO: 748860 - DNA, 25 bp, Homo sapien
cagattaattggcttgctccaacca

SEQ ID NO: 748861 - DNA, 25 bp, Homo sapien
tgacatcatactataatcagagagg

SEQ ID NO: 748862 - DNA, 25 bp, Homo sapien
catcttcgatgccaggcaccaaaac

SEQ ID NO: 748863 - DNA, 25 bp, Homo sapien
gaaagaacacaccatcttcgatgcc

SEQ ID NO: 748864 - DNA, 25 bp, Homo sapien
gtccaataagatatacagtttccag

SEQ ID NO: 748865 - DNA, 25 bp, Homo sapien
catcatctggataagtccaataaga

SEQ ID NO: 748866 - DNA, 25 bp, Homo sapien
cttggtctcctggatccaagagatt

SEQ ID NO: 748867 - DNA, 25 bp, Homo sapien
aaccttggtctcctggatccaagag

SEQ ID NO: 748868 - DNA, 25 bp, Homo sapien
ccttggtctcctggatccaagagat

SEQ ID NO: 748869 - DNA, 25 bp, Homo sapien
gcaaccttggtctcctggatccaag

SEQ ID NO: 748870 - DNA, 25 bp, Homo sapien
ccatactgacccaaaaaaggcaagt

SEQ ID NO: 748871 - DNA, 25 bp, Homo sapien
aaacatgcaattgcagcaacatata

SEQ ID NO: 748872 - DNA, 25 bp, Homo sapien
gacaatctaaagctacacataccac

SEQ ID NO: 748873 - DNA, 25 bp, Homo sapien
tttcacaaaccatactgacccaaaa

SEQ ID NO: 748874 - DNA, 25 bp, Homo sapien
gatgtaatctcctgccatcgcacct

SEQ ID NO: 748875 - DNA, 25 bp, Homo sapien
tgtgttcaagtagcccctatctgac

SEQ ID NO: 748876 - DNA, 25 bp, Homo sapien
ccaagaatagtcatacagtagcccc

SEQ ID NO: 748877 - DNA, 25 bp, Homo sapien
tatatttccatgaggtgatggcagg

SEQ ID NO: 748878 - DNA, 25 bp, Homo sapien
caaacaacagtataatgagccccag

SEQ ID NO: 748879 - DNA, 25 bp, Homo sapien
ggcagccatgaattcctatgatacg

SEQ ID NO: 748880 - DNA, 25 bp, Homo sapien
taggcacacatgagccaacagccaa

SEQ ID NO: 748881 - DNA, 25 bp, Homo sapien
aaatatcaactggtagctcttgcca

SEQ ID NO: 748882 - DNA, 25 bp, Homo sapien
tacaattagccagatttatccttcc

SEQ ID NO: 748883 - DNA, 25 bp, Homo sapien
caattagccagatttatccttccta

SEQ ID NO: 748884 - DNA, 25 bp, Homo sapien
ctggtacaattagccagatttatcc

SEQ ID NO: 748885 - DNA, 25 bp, Homo sapien
attagccagatttatccttcctatg

SEQ ID NO: 748886 - DNA, 25 bp, Homo sapien
cattggctgacaagagtctctcggt

SEQ ID NO: 748887 - DNA, 25 bp, Homo sapien
cggtcatcttctctttgtggtcgga

SEQ ID NO: 748888 - DNA, 25 bp, Homo sapien
aattcaaaagtgttgcgtcttgcac

SEQ ID NO: 748889 - DNA, 25 bp, Homo sapien
cacagagtgtgtccctgcattggct

SEQ ID NO: 748890 - DNA, 25 bp, Homo sapien
gggattccctacctcatagccagaa

SEQ ID NO: 748891 - DNA, 25 bp, Homo sapien
gaacatgcttccagagaacagccag

SEQ ID NO: 748892 - DNA, 25 bp, Homo sapien
taatagccaccacttgttaagctca

SEQ ID NO: 748893 - DNA, 25 bp, Homo sapien
catgaataagtgaagtttaccacct

SEQ ID NO: 748894 - DNA, 25 bp, Homo sapien
actgagtgtgggcaacttctctgca

SEQ ID NO: 748895 - DNA, 25 bp, Homo sapien
taacctgatggtataggacacccac

SEQ ID NO: 748896 - DNA, 25 bp, Homo sapien
tataggcactccctgaatatgggca

SEQ ID NO: 748897 - DNA, 25 bp, Homo sapien
tgttttatacaggtagtgtgcggcc

SEQ ID NO: 748898 - DNA, 25 bp, Homo sapien
ccagaggcgaatatcaacaagaact

SEQ ID NO: 748899 - DNA, 25 bp, Homo sapien
gaacttgattgagtttttgcatcca

SEQ ID NO: 748900 - DNA, 25 bp, Homo sapien
cttctttagtatctgcagacagcca

SEQ ID NO: 748901 - DNA, 25 bp, Homo sapien
ttttgcatccagagatcccgctctt

SEQ ID NO: 748902 - DNA, 25 bp, Homo sapien
aggctttccaataggtttgtagcaa

SEQ ID NO: 748903 - DNA, 25 bp, Homo sapien
taaggctttccaataggtttgtagc

SEQ ID NO: 748904 - DNA, 25 bp, Homo sapien
aaggctttccaataggtttgtagca

SEQ ID NO: 748905 - DNA, 25 bp, Homo sapien
tatgctaagtctgtaagctacgcag

SEQ ID NO: 748906 - DNA, 25 bp, Homo sapien
tcaagacctacagctccaagaagac

SEQ ID NO: 748907 - DNA, 25 bp, Homo sapien
cagcctttcgaaaaaactactgaga

SEQ ID NO: 748908 - DNA, 25 bp, Homo sapien
gaatattggcacaaaccctttcgta

SEQ ID NO: 748909 - DNA, 25 bp, Homo sapien
tatgcattcaatagcagccctaaga

SEQ ID NO: 748910 - DNA, 25 bp, Homo sapien
tgaaatgcctcagaaatagatcctt

SEQ ID NO: 748911 - DNA, 25 bp, Homo sapien
tgtcagcacagtaccctcaagaagc

SEQ ID NO: 748912 - DNA, 25 bp, Homo sapien
tcagtatctgctaaagacttgggaa

SEQ ID NO: 748913 - DNA, 25 bp, Homo sapien
cctctggcaggacataaacattggt

SEQ ID NO: 748914 - DNA, 25 bp, Homo sapien
aatatttgtatgcaatatgtgtagt

SEQ ID NO: 748915 - DNA, 25 bp, Homo sapien
tgtttaacttacaataaatggtatg

SEQ ID NO: 748916 - DNA, 25 bp, Homo sapien
ggtaaaagtagttatgacagtagga

SEQ ID NO: 748917 - DNA, 25 bp, Homo sapien
aacagtgaaccacttgttggttctt

SEQ ID NO: 748918 - DNA, 25 bp, Homo sapien
gatggttaccagagcctaggcacag

SEQ ID NO: 748919 - DNA, 25 bp, Homo sapien
tgatggttaccagagcctaggcaca

SEQ ID NO: 748920 - DNA, 25 bp, Homo sapien
cttcttcaagatccagctcccgcat

SEQ ID NO: 748921 - DNA, 25 bp, Homo sapien
aaactggaacactccttcttcaaga

SEQ ID NO: 748922 - DNA, 25 bp, Homo sapien
aactggaacactccttcttcaagat

SEQ ID NO: 748923 - DNA, 25 bp, Homo sapien
gggcagtaggtaagtctccaaagct

SEQ ID NO: 748924 - DNA, 25 bp, Homo sapien
tcttctttgatcctgcatcccagtc

SEQ ID NO: 748925 - DNA, 25 bp, Homo sapien
gtcattacaaaacatgggcagtagg

SEQ ID NO: 748926 - DNA, 25 bp, Homo sapien
gcatcccagtcacaggaagcttgtc

SEQ ID NO: 748927 - DNA, 25 bp, Homo sapien
gtcagctttgtctgtagcgtaaact

SEQ ID NO: 748928 - DNA, 25 bp, Homo sapien
gctttgtctgtagcgtaaactccaa

SEQ ID NO: 748929 - DNA, 25 bp, Homo sapien
gtagcgtaaactccaaactcgtcac

SEQ ID NO: 748930 - DNA, 25 bp, Homo sapien
ctgtagcgtaaactccaaactcgtc

SEQ ID NO: 748931 - DNA, 25 bp, Homo sapien
cttagcatcattataaccaggatgt

SEQ ID NO: 748932 - DNA, 25 bp, Homo sapien
gctcttagcatcattataaccagga

SEQ ID NO: 748933 - DNA, 25 bp, Homo sapien
ggctcttagcatcattataaccagg

SEQ ID NO: 748934 - DNA, 25 bp, Homo sapien
gcatcattataaccaggatgtgatc

SEQ ID NO: 748935 - DNA, 25 bp, Homo sapien
acaggtagagactccaggctcgtgt

SEQ ID NO: 748936 - DNA, 25 bp, Homo sapien
ctccaggctcgtgtaagtctcatgg

SEQ ID NO: 748937 - DNA, 25 bp, Homo sapien
gctgtaggggagcaaaggactcttc

SEQ ID NO: 748938 - DNA, 25 bp, Homo sapien
caggctcgtgtaagtctcatggaaa

SEQ ID NO: 748939 - DNA, 25 bp, Homo sapien
catctttggtgtgaggcagaatgtc

SEQ ID NO: 748940 - DNA, 25 bp, Homo sapien
ttcagaagcaccttggaagatgttg

SEQ ID NO: 748941 - DNA, 25 bp, Homo sapien
taagaccagaattcccgacctctca

SEQ ID NO: 748942 - DNA, 25 bp, Homo sapien
ggaatccctttcattgcaacaacag

SEQ ID NO: 748943 - DNA, 25 bp, Homo sapien
ttgtggcaataatcaatagcttacc

SEQ ID NO: 748944 - DNA, 25 bp, Homo sapien
taacaggagctgaaattgtggcaat

SEQ ID NO: 748945 - DNA, 25 bp, Homo sapien
gataaattccttgacacatacgctc

SEQ ID NO: 748946 - DNA, 25 bp, Homo sapien
ccaataacaggagctgaaattgtgg

SEQ ID NO: 748947 - DNA, 25 bp, Homo sapien
gagaagcacatcagactaacagctg

SEQ ID NO: 748948 - DNA, 25 bp, Homo sapien
atctctcagcagaaactctacaagc

SEQ ID NO: 748949 - DNA, 25 bp, Homo sapien
attcaacattcttaaagaaaagaat

SEQ ID NO: 748950 - DNA, 25 bp, Homo sapien
cagaggagagtgggggccaatattc

SEQ ID NO: 748951 - DNA, 25 bp, Homo sapien
gaaattcaaaagtgcctaacggcat

SEQ ID NO: 748952 - DNA, 25 bp, Homo sapien
tgttttcagaaattcaaaagtgcct

SEQ ID NO: 748953 - DNA, 25 bp, Homo sapien
cagaaattcaaaagtgcctaacggc

SEQ ID NO: 748954 - DNA, 25 bp, Homo sapien
tttcagaaattcaaaagtgcctaac

SEQ ID NO: 748955 - DNA, 25 bp, Homo sapien
tcatctgcttttgaacagaaaccaa

SEQ ID NO: 748956 - DNA, 25 bp, Homo sapien
tctaaagtaaacaagactcatctgc

SEQ ID NO: 748957 - DNA, 25 bp, Homo sapien
tctgaatttgcattgcggccaccca

SEQ ID NO: 748958 - DNA, 25 bp, Homo sapien
gaaaccaatcccaggtctgaatttg

SEQ ID NO: 748959 - DNA, 25 bp, Homo sapien
tccagggaatgattctctggtgcag

SEQ ID NO: 748960 - DNA, 25 bp, Homo sapien
caagagtgctgccaaatcttttttg

SEQ ID NO: 748961 - DNA, 25 bp, Homo sapien
gttaggaatggcaagagtgctgcca

SEQ ID NO: 748962 - DNA, 25 bp, Homo sapien
agaacttcctcgataccaaaatggc

SEQ ID NO: 748963 - DNA, 25 bp, Homo sapien
atcaatgtaaaatcccactagctct

SEQ ID NO: 748964 - DNA, 25 bp, Homo sapien
tagctcttcaatcctgcagcagttt

SEQ ID NO: 748965 - DNA, 25 bp, Homo sapien
cactagctcttcaatcctgcagcag

SEQ ID NO: 748966 - DNA, 25 bp, Homo sapien
caggggtttactcccttatcaatgt

SEQ ID NO: 748967 - DNA, 25 bp, Homo sapien
tctggactccactgttgggtaagtg

SEQ ID NO: 748968 - DNA, 25 bp, Homo sapien
tgtgcaccctcagacatttcaatac

SEQ ID NO: 748969 - DNA, 25 bp, Homo sapien
ctctctggtgctacaggatttctgg

SEQ ID NO: 748970 - DNA, 25 bp, Homo sapien
actgttgggtaagtgtctttgtgca

SEQ ID NO: 748971 - DNA, 25 bp, Homo sapien
gacccatggttccaacgctaagcag

SEQ ID NO: 748972 - DNA, 25 bp, Homo sapien
ggccttgaaactctccagcgttatt

SEQ ID NO: 748973 - DNA, 25 bp, Homo sapien
cttgtctttgattcccgggccttga

SEQ ID NO: 748974 - DNA, 25 bp, Homo sapien
aactagcggaactgggagacccatg

SEQ ID NO: 748975 - DNA, 25 bp, Homo sapien
tgccagatgctgaactttcgatatg

SEQ ID NO: 748976 - DNA, 25 bp, Homo sapien
gatatgtttcctcacttagttctca

SEQ ID NO: 748977 - DNA, 25 bp, Homo sapien
taagctacttctaatatgaccactg

SEQ ID NO: 748978 - DNA, 25 bp, Homo sapien
gtttatgggcgctgttccaggtgcc

SEQ ID NO: 748979 - DNA, 25 bp, Homo sapien
gttttagacaccaggataagttgct

SEQ ID NO: 748980 - DNA, 25 bp, Homo sapien
cgcaatgtgtgtacccttggaagat

SEQ ID NO: 748981 - DNA, 25 bp, Homo sapien
agttgcttatggagatcagcgtagc

SEQ ID NO: 748982 - DNA, 25 bp, Homo sapien
gatgaggtgttagcttgcacagcaa

SEQ ID NO: 748983 - DNA, 25 bp, Homo sapien
attgttgagcagattacttcagggc

SEQ ID NO: 748984 - DNA, 25 bp, Homo sapien
ttgttgagcagattacttcagggct

SEQ ID NO: 748985 - DNA, 25 bp, Homo sapien
tgttgagcagattacttcagggctg

SEQ ID NO: 748986 - DNA, 25 bp, Homo sapien
ttgagcagattacttcagggctgta

SEQ ID NO: 748987 - DNA, 25 bp, Homo sapien
taatgtcacaggtctaaatatgagc

SEQ ID NO: 748988 - DNA, 25 bp, Homo sapien
gttatatgaagaagatcttccagtt

SEQ ID NO: 748989 - DNA, 25 bp, Homo sapien
ggatgtgacctagaaacaagataaa

SEQ ID NO: 748990 - DNA, 25 bp, Homo sapien
tctagtacactataaaggatgtgac

SEQ ID NO: 748991 - DNA, 25 bp, Homo sapien
tgtcctcagccctaagagcgccagc

SEQ ID NO: 748992 - DNA, 25 bp, Homo sapien
tcagccctaagagcgccagcaagtg

SEQ ID NO: 748993 - DNA, 25 bp, Homo sapien
ccctaagagcgccagcaagtgaagt

SEQ ID NO: 748994 - DNA, 25 bp, Homo sapien
taagagcgccagcaagtgaagtttc

SEQ ID NO: 748995 - DNA, 25 bp, Homo sapien
actgcagactccgctcataaagcca

SEQ ID NO: 748996 - DNA, 25 bp, Homo sapien
agagcaccatgaagtgcagggcaga

SEQ ID NO: 748997 - DNA, 25 bp, Homo sapien
ggcagaggctcatagcttggaagca

SEQ ID NO: 748998 - DNA, 25 bp, Homo sapien
gcagagcaccatgaagtgcagggca

SEQ ID NO: 748999 - DNA, 25 bp, Homo sapien
agcctctcgaatgggcacacctgtg

SEQ ID NO: 749000 - DNA, 25 bp, Homo sapien
cagttgggagcttccaaagccgggt

SEQ ID NO: 749001 - DNA, 25 bp, Homo sapien
taagattccaggtaaggcaccagta

SEQ ID NO: 749002 - DNA, 25 bp, Homo sapien
tggaaaatccttacggtggcgcctc

SEQ ID NO: 749003 - DNA, 25 bp, Homo sapien
tctgagctgttgaaggaggacctgc

SEQ ID NO: 749004 - DNA, 25 bp, Homo sapien
tcaagcctggcaagaagtaattcgt

SEQ ID NO: 749005 - DNA, 25 bp, Homo sapien
tggcaggcgaacatccgtctggctg

SEQ ID NO: 749006 - DNA, 25 bp, Homo sapien
cgttccagctaagagcagtttgggc

SEQ ID NO: 749007 - DNA, 25 bp, Homo sapien
tgtcttttggcttgaactctgcgag

SEQ ID NO: 749008 - DNA, 25 bp, Homo sapien
ctggctagatgatcccattgtcttt

SEQ ID NO: 749009 - DNA, 25 bp, Homo sapien
tccagcaaagcagtgaatgccaggg

SEQ ID NO: 749010 - DNA, 25 bp, Homo sapien
tagcaaatggcctgcaagagtctgg

SEQ ID NO: 749011 - DNA, 25 bp, Homo sapien
gctgcagccctgaccagggtactgt

SEQ ID NO: 749012 - DNA, 25 bp, Homo sapien
tggaatagcagacctcatcagccac

SEQ ID NO: 749013 - DNA, 25 bp, Homo sapien
gatctctttgcccctggaatagcag

SEQ ID NO: 749014 - DNA, 25 bp, Homo sapien
cttgctgcagccctgaccagggtac

SEQ ID NO: 749015 - DNA, 25 bp, Homo sapien
tctggagctgaaatctgtagctggc

SEQ ID NO: 749016 - DNA, 25 bp, Homo sapien
gctggcgcatttgcagttgatctct

SEQ ID NO: 749017 - DNA, 25 bp, Homo sapien
ctgtagctggcgcatttgcagttga

SEQ ID NO: 749018 - DNA, 25 bp, Homo sapien
tttgcagttgatctctgggctccat

SEQ ID NO: 749019 - DNA, 25 bp, Homo sapien
tgactaagagatcccactggcaggc

SEQ ID NO: 749020 - DNA, 25 bp, Homo sapien
gccagcttgcttgctcagtttcata

SEQ ID NO: 749021 - DNA, 25 bp, Homo sapien
taagaggttgcttccttattaggaa

SEQ ID NO: 749022 - DNA, 25 bp, Homo sapien
gttgccacgtgtactgggctgcaca

SEQ ID NO: 749023 - DNA, 25 bp, Homo sapien
agaaaggcgccaggcttctgtagct

SEQ ID NO: 749024 - DNA, 25 bp, Homo sapien
agaagagcctgagaaaggcgccagg

SEQ ID NO: 749025 - DNA, 25 bp, Homo sapien
gaaaggcgccaggcttctgtagctc

SEQ ID NO: 749026 - DNA, 25 bp, Homo sapien
tgcatttgctcaagttggctcccat

SEQ ID NO: 749027 - DNA, 25 bp, Homo sapien
tgctcaagttggctcccatggcttt

SEQ ID NO: 749028 - DNA, 25 bp, Homo sapien
cagtgccccatccattgcatttgct

SEQ ID NO: 749029 - DNA, 25 bp, Homo sapien
ctgggctctttactgtgtcccccgg

SEQ ID NO: 749030 - DNA, 25 bp, Homo sapien
tactgcttcccgaaatcactctctc

SEQ ID NO: 749031 - DNA, 25 bp, Homo sapien
tttctgactcatggccaggagagtg

SEQ ID NO: 749032 - DNA, 25 bp, Homo sapien
tactggggagagtgactgatccttc

SEQ ID NO: 749033 - DNA, 25 bp, Homo sapien
gtgaagcctagaccccttattcgta

SEQ ID NO: 749034 - DNA, 25 bp, Homo sapien
tcacactggccatggatcgtgttcc

SEQ ID NO: 749035 - DNA, 25 bp, Homo sapien
gatcgtgttcccagaggatgtcact

SEQ ID NO: 749036 - DNA, 25 bp, Homo sapien
ccagaggatgtcactatttccctgg

SEQ ID NO: 749037 - DNA, 25 bp, Homo sapien
cttataatacacctcacactggcca

SEQ ID NO: 749038 - DNA, 25 bp, Homo sapien
ttagctcatagtattgcagcagaag

SEQ ID NO: 749039 - DNA, 25 bp, Homo sapien
ccttccccttcatttagctcatagt

SEQ ID NO: 749040 - DNA, 25 bp, Homo sapien
catttagctcatagtattgcagcag

SEQ ID NO: 749041 - DNA, 25 bp, Homo sapien
ccttcatttagctcatagtattgca

SEQ ID NO: 749042 - DNA, 25 bp, Homo sapien
caaatgaggatgtgtggtctgacaa

SEQ ID NO: 749043 - DNA, 25 bp, Homo sapien
ctgagctccaaatgaggatgtgtgg

SEQ ID NO: 749044 - DNA, 25 bp, Homo sapien
tacgaggattacattttctgagctc

SEQ ID NO: 749045 - DNA, 25 bp, Homo sapien
ctacgaggattacattttctgagct

SEQ ID NO: 749046 - DNA, 25 bp, Homo sapien
agaaaattgcttgccccagacttct

SEQ ID NO: 749047 - DNA, 25 bp, Homo sapien
aagaaaattgcttgccccagacttc

SEQ ID NO: 749048 - DNA, 25 bp, Homo sapien
tgtggccttatgtgatgaagtttgc

SEQ ID NO: 749049 - DNA, 25 bp, Homo sapien
ttggcattgtccagctaacagctgc

SEQ ID NO: 749050 - DNA, 25 bp, Homo sapien
ggccccatatctagtccactcttga

SEQ ID NO: 749051 - DNA, 25 bp, Homo sapien
ggcagactctttgttggccccatat

SEQ ID NO: 749052 - DNA, 25 bp, Homo sapien
caacttgataccaaaagacaaagtc

SEQ ID NO: 749053 - DNA, 25 bp, Homo sapien
tcatatattaaccaacttgatacca

SEQ ID NO: 749054 - DNA, 25 bp, Homo sapien
tgttgcaggtatgcatatttacatt

SEQ ID NO: 749055 - DNA, 25 bp, Homo sapien
actctgatgcactttgttgcaggta

SEQ ID NO: 749056 - DNA, 25 bp, Homo sapien
ttgacagtgaactctgtgagggagt

SEQ ID NO: 749057 - DNA, 25 bp, Homo sapien
ggctatttgctttctcgtgtctctc

SEQ ID NO: 749058 - DNA, 25 bp, Homo sapien
cttacttgacagtgaactctgtgag

SEQ ID NO: 749059 - DNA, 25 bp, Homo sapien
tcttcctccacaaatgaagtcccat

SEQ ID NO: 749060 - DNA, 25 bp, Homo sapien
ccaagtgtagtgagagcagcctgca

SEQ ID NO: 749061 - DNA, 25 bp, Homo sapien
cacaatctctctggcctgtggaagg

SEQ ID NO: 749062 - DNA, 25 bp, Homo sapien
cagagtaagatcctaccagactgag

SEQ ID NO: 749063 - DNA, 25 bp, Homo sapien
tttggacgtaatacaagcagcttct

SEQ ID NO: 749064 - DNA, 25 bp, Homo sapien
ggagctgccggatgtgggaggccag

SEQ ID NO: 749065 - DNA, 25 bp, Homo sapien
tggagctgccggatgtgggaggcca

SEQ ID NO: 749066 - DNA, 25 bp, Homo sapien
ttctcatccacagtaagacaggctc

SEQ ID NO: 749067 - DNA, 25 bp, Homo sapien
cagatgcccatgactgtccagtgca

SEQ ID NO: 749068 - DNA, 25 bp, Homo sapien
gagtaaagccttgcagctcagaagg

SEQ ID NO: 749069 - DNA, 25 bp, Homo sapien
aggctcttgaaaatgcacacagaca

SEQ ID NO: 749070 - DNA, 25 bp, Homo sapien
tcccatagtgcatcttctataactg

SEQ ID NO: 749071 - DNA, 25 bp, Homo sapien
ctcttctttgcatggggcccaccga

SEQ ID NO: 749072 - DNA, 25 bp, Homo sapien
ccgattggaatgtgccatcatcttt

SEQ ID NO: 749073 - DNA, 25 bp, Homo sapien
catagtgcatcttctataactgtta

SEQ ID NO: 749074 - DNA, 25 bp, Homo sapien
tgtctgtgttgattagatcaagttt

SEQ ID NO: 749075 - DNA, 25 bp, Homo sapien
ctgggtccttaatgctgagagctgg

SEQ ID NO: 749076 - DNA, 25 bp, Homo sapien
gtctgtgttgattagatcaagtttc

SEQ ID NO: 749077 - DNA, 25 bp, Homo sapien
tttctgggtccttaatgctgagagc

SEQ ID NO: 749078 - DNA, 25 bp, Homo sapien
cggaaaagattgttctggggtctca

SEQ ID NO: 749079 - DNA, 25 bp, Homo sapien
tatccacttgaaagtgattgtcagc

SEQ ID NO: 749080 - DNA, 25 bp, Homo sapien
cccctgagctgaccgttcttgaaga

SEQ ID NO: 749081 - DNA, 25 bp, Homo sapien
tgaatcttcctccacagtgactaag

SEQ ID NO: 749082 - DNA, 25 bp, Homo sapien
tcttcacgggtgctttttcttcagt

SEQ ID NO: 749083 - DNA, 25 bp, Homo sapien
catttttggctcgagtatcttgtat

SEQ ID NO: 749084 - DNA, 25 bp, Homo sapien
atcttgtatagatttcttcacgggt

SEQ ID NO: 749085 - DNA, 25 bp, Homo sapien
atttttggctcgagtatcttgtata

SEQ ID NO: 749086 - DNA, 25 bp, Homo sapien
cccctggactgttcaatatgctttt

SEQ ID NO: 749087 - DNA, 25 bp, Homo sapien
tagtcccctggactgttcaatatgc

SEQ ID NO: 749088 - DNA, 25 bp, Homo sapien
aatttactagtagtcccctggactg

SEQ ID NO: 749089 - DNA, 25 bp, Homo sapien
tagtagtcccctggactgttcaata

SEQ ID NO: 749090 - DNA, 25 bp, Homo sapien
cttgtaagcatcacattatttactc

SEQ ID NO: 749091 - DNA, 25 bp, Homo sapien
atatgtatgaatatctctctcttca

SEQ ID NO: 749092 - DNA, 25 bp, Homo sapien
ttcttgtaagcatcacattatttac

SEQ ID NO: 749093 - DNA, 25 bp, Homo sapien
tatgtatgaatatctctctcttcat

SEQ ID NO: 749094 - DNA, 25 bp, Homo sapien
tctggtgacactttgagcatcatta

SEQ ID NO: 749095 - DNA, 25 bp, Homo sapien
tgttccttcaattaccaatctggtg

SEQ ID NO: 749096 - DNA, 25 bp, Homo sapien
gagctgctcggcaatgttctgatag

SEQ ID NO: 749097 - DNA, 25 bp, Homo sapien
cagtttgtaactggtccagacagga

SEQ ID NO: 749098 - DNA, 25 bp, Homo sapien
ccaactgaggagccagccagtccat

SEQ ID NO: 749099 - DNA, 25 bp, Homo sapien
tcaaccaactgaggagccagccagt

SEQ ID NO: 749100 - DNA, 25 bp, Homo sapien
aaccaactgaggagccagccagtcc

SEQ ID NO: 749101 - DNA, 25 bp, Homo sapien
ttcaaccaactgaggagccagccag

SEQ ID NO: 749102 - DNA, 25 bp, Homo sapien
ggagttcgttgctagaagtctctgc

SEQ ID NO: 749103 - DNA, 25 bp, Homo sapien
cccagggatgtcagtgtcggagttc

SEQ ID NO: 749104 - DNA, 25 bp, Homo sapien
tgtcggagttcgttgctagaagtct

SEQ ID NO: 749105 - DNA, 25 bp, Homo sapien
tgtcagtgtcggagttcgttgctag

SEQ ID NO: 749106 - DNA, 25 bp, Homo sapien
tacgaagaggaaagcaatgtcacat

SEQ ID NO: 749107 - DNA, 25 bp, Homo sapien
tcatttggctcaagtcatctcagca

SEQ ID NO: 749108 - DNA, 25 bp, Homo sapien
gagtgaggagaaatgaacagtcata

SEQ ID NO: 749109 - DNA, 25 bp, Homo sapien
tctgtctctggcacctaccgtgagt

SEQ ID NO: 749110 - DNA, 25 bp, Homo sapien
cagctgcatgcagctctctaggagc

SEQ ID NO: 749111 - DNA, 25 bp, Homo sapien
gcaagtgcccaagggtgacatcgcc

SEQ ID NO: 749112 - DNA, 25 bp, Homo sapien
gcttggcctcagcggagcctgctgt

SEQ ID NO: 749113 - DNA, 25 bp, Homo sapien
ctgctgtgggcgatattgctgtgct

SEQ ID NO: 749114 - DNA, 25 bp, Homo sapien
tttggaaaagagtgatttgccatca

SEQ ID NO: 749115 - DNA, 25 bp, Homo sapien
ttggaaaagagtgatttgccatcat

SEQ ID NO: 749116 - DNA, 25 bp, Homo sapien
aagtgagaacattccttctcaagac

SEQ ID NO: 749117 - DNA, 25 bp, Homo sapien
tccagtgtcagcagattaaggacct

SEQ ID NO: 749118 - DNA, 25 bp, Homo sapien
tcgcgctcggctctactaacgtgtt

SEQ ID NO: 749119 - DNA, 25 bp, Homo sapien
tgtcagcagattaaggacctggact

SEQ ID NO: 749120 - DNA, 25 bp, Homo sapien
tctgattgactagaactctgggaat

SEQ ID NO: 749121 - DNA, 25 bp, Homo sapien
tgacaaccaggccatcaattcttct

SEQ ID NO: 749122 - DNA, 25 bp, Homo sapien
accaggccatcaattcttctgcata

SEQ ID NO: 749123 - DNA, 25 bp, Homo sapien
accctgacaaccaggccatcaattc

SEQ ID NO: 749124 - DNA, 25 bp, Homo sapien
ataccagtgaccagtccacagtgca

SEQ ID NO: 749125 - DNA, 25 bp, Homo sapien
ccggatgcatatgagagagcaaagg

SEQ ID NO: 749126 - DNA, 25 bp, Homo sapien
tgccggatgcatatgagagagcaaa

SEQ ID NO: 749127 - DNA, 25 bp, Homo sapien
ctgtgccggatgcatatgagagagc

SEQ ID NO: 749128 - DNA, 25 bp, Homo sapien
gctgctgtgccggatgcatatgaga

SEQ ID NO: 749129 - DNA, 25 bp, Homo sapien
ggaaaccctccaccattgctaggtc

SEQ ID NO: 749130 - DNA, 25 bp, Homo sapien
gctgaattgggtgatgtttatgtac

SEQ ID NO: 749131 - DNA, 25 bp, Homo sapien
taggttcttgctactcagtcatcag

SEQ ID NO: 749132 - DNA, 25 bp, Homo sapien
ttgctaggtcaccataggctctgag

SEQ ID NO: 749133 - DNA, 25 bp, Homo sapien
tgcccactttgcgtctgcactgtga

SEQ ID NO: 749134 - DNA, 25 bp, Homo sapien
gacggactgttgctatccaagcgtt

SEQ ID NO: 749135 - DNA, 25 bp, Homo sapien
cactgtgatcgtgacaaatcttccc

SEQ ID NO: 749136 - DNA, 25 bp, Homo sapien
ggtgaaatcagtagtctcgctccat

SEQ ID NO: 749137 - DNA, 25 bp, Homo sapien
gcacagaggagttggatctaaccca

SEQ ID NO: 749138 - DNA, 25 bp, Homo sapien
ggaccagtttgatagtgaccccagt

SEQ ID NO: 749139 - DNA, 25 bp, Homo sapien
caagaagtaccatggcccactggag

SEQ ID NO: 749140 - DNA, 25 bp, Homo sapien
cacagcatttaagcaggtgggccag

SEQ ID NO: 749141 - DNA, 25 bp, Homo sapien
gcctgctctgccagattccccaaaa

SEQ ID NO: 749142 - DNA, 25 bp, Homo sapien
tgctctgccagattccccaaaactc

SEQ ID NO: 749143 - DNA, 25 bp, Homo sapien
gctctgccagattccccaaaactcc

SEQ ID NO: 749144 - DNA, 25 bp, Homo sapien
ctgctctgccagattccccaaaact

SEQ ID NO: 749145 - DNA, 25 bp, Homo sapien
tcaggcccgctgcctttctggcagg

SEQ ID NO: 749146 - DNA, 25 bp, Homo sapien
gcctcaggcccgctgcctttctggc

SEQ ID NO: 749147 - DNA, 25 bp, Homo sapien
ggcccgctgcctttctggcaggtgc

SEQ ID NO: 749148 - DNA, 25 bp, Homo sapien
aagcctcaggcccgctgcctttctg

SEQ ID NO: 749149 - DNA, 25 bp, Homo sapien
tctgaggtaggacccaggttccgca

SEQ ID NO: 749150 - DNA, 25 bp, Homo sapien
taggacccaggttccgcaggtagtc

SEQ ID NO: 749151 - DNA, 25 bp, Homo sapien
agcctgccgtgaccatgatctgaag

SEQ ID NO: 749152 - DNA, 25 bp, Homo sapien
gtcacactgaactgtcccacatgcc

SEQ ID NO: 749153 - DNA, 25 bp, Homo sapien
tacacttgctattgccctgggttcg

SEQ ID NO: 749154 - DNA, 25 bp, Homo sapien
tatccccggagagtagagcaaagct

SEQ ID NO: 749155 - DNA, 25 bp, Homo sapien
cagtcactgctagcataggctcctt

SEQ ID NO: 749156 - DNA, 25 bp, Homo sapien
ttcgcagagtgaattcaggaccctt

SEQ ID NO: 749157 - DNA, 25 bp, Homo sapien
aataatgaagtaatgatggtaccac

SEQ ID NO: 749158 - DNA, 25 bp, Homo sapien
taatgaagtaatgatggtaccacac

SEQ ID NO: 749159 - DNA, 25 bp, Homo sapien
tgaataatgaagtaatgatggtacc

SEQ ID NO: 749160 - DNA, 25 bp, Homo sapien
gaataatgaagtaatgatggtacca

SEQ ID NO: 749161 - DNA, 25 bp, Homo sapien
cttccttgggttctacagtccaaag

SEQ ID NO: 749162 - DNA, 25 bp, Homo sapien
gtctgatctggggatgtgttcgccc

SEQ ID NO: 749163 - DNA, 25 bp, Homo sapien
acagtccaaagtgggaatctgtctg

SEQ ID NO: 749164 - DNA, 25 bp, Homo sapien
tctacagtccaaagtgggaatctgt

SEQ ID NO: 749165 - DNA, 25 bp, Homo sapien
ggactgtagtcctcatagctgcccc

SEQ ID NO: 749166 - DNA, 25 bp, Homo sapien
cctgtaaccatgaataccactcatt

SEQ ID NO: 749167 - DNA, 25 bp, Homo sapien
ctcattctctcacttactgggaggg

SEQ ID NO: 749168 - DNA, 25 bp, Homo sapien
cagtctccctttctagtgatggaaa

SEQ ID NO: 749169 - DNA, 25 bp, Homo sapien
gcaaggcagatggaagtaagtacct

SEQ ID NO: 749170 - DNA, 25 bp, Homo sapien
tgcaaggcagatggaagtaagtacc

SEQ ID NO: 749171 - DNA, 25 bp, Homo sapien
catgcaaggcagatggaagtaagta

SEQ ID NO: 749172 - DNA, 25 bp, Homo sapien
atgcaaggcagatggaagtaagtac

SEQ ID NO: 749173 - DNA, 25 bp, Homo sapien
gaataagaagtggtgccgtttccag

SEQ ID NO: 749174 - DNA, 25 bp, Homo sapien
cttgtgtgagtctccgtgaaaatca

SEQ ID NO: 749175 - DNA, 25 bp, Homo sapien
gatatttatatcctccatttgtggc

SEQ ID NO: 749176 - DNA, 25 bp, Homo sapien
ccagttcagtgatagggtctctcat

SEQ ID NO: 749177 - DNA, 25 bp, Homo sapien
gctgtcccgggcaccttgttgatgg

SEQ ID NO: 749178 - DNA, 25 bp, Homo sapien
tgatggtgggtcttgcatagtacat

SEQ ID NO: 749179 - DNA, 25 bp, Homo sapien
tgtgtctgtttaggatatacaggga

SEQ ID NO: 749180 - DNA, 25 bp, Homo sapien
taataatgagcatgccagtcaatcc

SEQ ID NO: 749181 - DNA, 25 bp, Homo sapien
tccccgccccgcttgctcttggagg

SEQ ID NO: 749182 - DNA, 25 bp, Homo sapien
cccgtggccacgtgctgtgtttggc

SEQ ID NO: 749183 - DNA, 25 bp, Homo sapien
tctttcactgtgctcgtctccccgc

SEQ ID NO: 749184 - DNA, 25 bp, Homo sapien
aagattcattagtgtcttctttcac

SEQ ID NO: 749185 - DNA, 25 bp, Homo sapien
ccagctgagattggccttgttctcc

SEQ ID NO: 749186 - DNA, 25 bp, Homo sapien
gcttctgaaggtcctctttgacagg

SEQ ID NO: 749187 - DNA, 25 bp, Homo sapien
aaaatgcaggcaccctttgctaggc

SEQ ID NO: 749188 - DNA, 25 bp, Homo sapien
caccaaataaaggagttgctagcat

SEQ ID NO: 749189 - DNA, 25 bp, Homo sapien
tggtagtcttcaagtctaattagtt

SEQ ID NO: 749190 - DNA, 25 bp, Homo sapien
attagttttcttgtacgcctgggtg

SEQ ID NO: 749191 - DNA, 25 bp, Homo sapien
tgcccgatcgatgatttttatatag

SEQ ID NO: 749192 - DNA, 25 bp, Homo sapien
tacgcctgggtgcatttttgagcta

SEQ ID NO: 749193 - DNA, 25 bp, Homo sapien
ggaaagggcaatcaacacgtgcttt

SEQ ID NO: 749194 - DNA, 25 bp, Homo sapien
tactaagttggttgaatgcttccac

SEQ ID NO: 749195 - DNA, 25 bp, Homo sapien
gctgacagcccttaaatagctttgg

SEQ ID NO: 749196 - DNA, 25 bp, Homo sapien
ttgggaaacaggctaccagaagagt

SEQ ID NO: 749197 - DNA, 25 bp, Homo sapien
gtatgcgttgtgtatgcgcaggttc

SEQ ID NO: 749198 - DNA, 25 bp, Homo sapien
tatgcgttgtgtatgcgcaggttca

SEQ ID NO: 749199 - DNA, 25 bp, Homo sapien
tatgcgcaggttcatttggttcata

SEQ ID NO: 749200 - DNA, 25 bp, Homo sapien
gttgtgtatgcgcaggttcatttgg

SEQ ID NO: 749201 - DNA, 25 bp, Homo sapien
gaaagtaggcaagataatgtaagac

SEQ ID NO: 749202 - DNA, 25 bp, Homo sapien
ctgaaagtaggcaagataatgtaag

SEQ ID NO: 749203 - DNA, 25 bp, Homo sapien
tgtaagacttgaatggggttgcatt

SEQ ID NO: 749204 - DNA, 25 bp, Homo sapien
taatgtaagacttgaatggggttgc

SEQ ID NO: 749205 - DNA, 25 bp, Homo sapien
accttcacgctgacccatagattca

SEQ ID NO: 749206 - DNA, 25 bp, Homo sapien
tttcacaaatgggaatacggccaag

SEQ ID NO: 749207 - DNA, 25 bp, Homo sapien
tacggccaaggtatacagttaggtc

SEQ ID NO: 749208 - DNA, 25 bp, Homo sapien
ttaaactcatattggcagaattcca

SEQ ID NO: 749209 - DNA, 25 bp, Homo sapien
cagcatagccaccaagtaagattta

SEQ ID NO: 749210 - DNA, 25 bp, Homo sapien
gggtcaagtttcagcatagccacca

SEQ ID NO: 749211 - DNA, 25 bp, Homo sapien
ccagggcctgggtcaagtttcagca

SEQ ID NO: 749212 - DNA, 25 bp, Homo sapien
ccaagtaagatttaggtttcgccat

SEQ ID NO: 749213 - DNA, 25 bp, Homo sapien
ctttccaacttggttggaattcttg

SEQ ID NO: 749214 - DNA, 25 bp, Homo sapien
tttaagatagcatctggggcagttc

SEQ ID NO: 749215 - DNA, 25 bp, Homo sapien
atatttaagatagcatctggggcag

SEQ ID NO: 749216 - DNA, 25 bp, Homo sapien
caacttggttggaattcttgcagct

SEQ ID NO: 749217 - DNA, 25 bp, Homo sapien
ctttgagctgtaagtgatgagagac

SEQ ID NO: 749218 - DNA, 25 bp, Homo sapien
tcctttgagctgtaagtgatgagag

SEQ ID NO: 749219 - DNA, 25 bp, Homo sapien
tatcatcagtatgcagggttttggt

SEQ ID NO: 749220 - DNA, 25 bp, Homo sapien
ttttggtgataaggcagacagctct

SEQ ID NO: 749221 - DNA, 25 bp, Homo sapien
agacagctctttactcatcctcttg

SEQ ID NO: 749222 - DNA, 25 bp, Homo sapien
tgctcagctgttccgtggaggtgtt

SEQ ID NO: 749223 - DNA, 25 bp, Homo sapien
tgcaagactttgaaaagaagcatac

SEQ ID NO: 749224 - DNA, 25 bp, Homo sapien
tcagctcagtgccttgtgcaagact

SEQ ID NO: 749225 - DNA, 25 bp, Homo sapien
cagctcagtgccttgtgcaagactt

SEQ ID NO: 749226 - DNA, 25 bp, Homo sapien
ctcagtgccttgtgcaagactttga

SEQ ID NO: 749227 - DNA, 25 bp, Homo sapien
agctcagtcctcttaaactttccct

SEQ ID NO: 749228 - DNA, 25 bp, Homo sapien
tgatttcacccaaatcaaacgggtg

SEQ ID NO: 749229 - DNA, 25 bp, Homo sapien
tcctaatgatgtccccagttgatga

SEQ ID NO: 749230 - DNA, 25 bp, Homo sapien
gaggcatctagtcttagtctcctaa

SEQ ID NO: 749231 - DNA, 25 bp, Homo sapien
cagtctcttcaataactagatcaaa

SEQ ID NO: 749232 - DNA, 25 bp, Homo sapien
ctcttttacctccacaaggtacctg

SEQ ID NO: 749233 - DNA, 25 bp, Homo sapien
gaatcctccactcctggttcagcca

SEQ ID NO: 749234 - DNA, 25 bp, Homo sapien
tgctagggcaatgtggagctggatg

SEQ ID NO: 749235 - DNA, 25 bp, Homo sapien
tttgagggaggattgatggctgcta

SEQ ID NO: 749236 - DNA, 25 bp, Homo sapien
actgtgttcgtcagagtttgaggga

SEQ ID NO: 749237 - DNA, 25 bp, Homo sapien
ggccaaagcaatggcgagggtgatg

SEQ ID NO: 749238 - DNA, 25 bp, Homo sapien
aaagcaatggcgagggtgatgaaca

SEQ ID NO: 749239 - DNA, 25 bp, Homo sapien
ccaaagcaatggcgagggtgatgaa

SEQ ID NO: 749240 - DNA, 25 bp, Homo sapien
aagcaatggcgagggtgatgaacaa

SEQ ID NO: 749241 - DNA, 25 bp, Homo sapien
gagcttggtgagtaaacctccgtct

SEQ ID NO: 749242 - DNA, 25 bp, Homo sapien
agctttgtcctattgtctgccgaga

SEQ ID NO: 749243 - DNA, 25 bp, Homo sapien
ttatcagcctgagctaaatgtagct

SEQ ID NO: 749244 - DNA, 25 bp, Homo sapien
cgtctcacacatgtgtccaccggta

SEQ ID NO: 749245 - DNA, 25 bp, Homo sapien
ttggctgatctttccccgactcctg

SEQ ID NO: 749246 - DNA, 25 bp, Homo sapien
tccctgaaatggaggcgccctttga

SEQ ID NO: 749247 - DNA, 25 bp, Homo sapien
tcttctggacttggagtgtatacca

SEQ ID NO: 749248 - DNA, 25 bp, Homo sapien
atttaaaggtgtgcggcgggtctct

SEQ ID NO: 749249 - DNA, 25 bp, Homo sapien
aatccaactcgctgcagccagtctg

SEQ ID NO: 749250 - DNA, 25 bp, Homo sapien
tgcagttgattatgggtctggcagc

SEQ ID NO: 749251 - DNA, 25 bp, Homo sapien
gcagatgttctgcacgaatccaact

SEQ ID NO: 749252 - DNA, 25 bp, Homo sapien
agttgattatgggtctggcagcaga

SEQ ID NO: 749253 - DNA, 25 bp, Homo sapien
attcactgctcagtggcgacccctg

SEQ ID NO: 749254 - DNA, 25 bp, Homo sapien
gagtgagattgccaccttatgagcc

SEQ ID NO: 749255 - DNA, 25 bp, Homo sapien
cccctcgagtctgaccaggatgtgc

SEQ ID NO: 749256 - DNA, 25 bp, Homo sapien
ggatgtgcagccattcactgctcag

SEQ ID NO: 749257 - DNA, 25 bp, Homo sapien
tggtcacttctccaagcctggtgct

SEQ ID NO: 749258 - DNA, 25 bp, Homo sapien
gtcctgtgaatgcaaatcatggtca

SEQ ID NO: 749259 - DNA, 25 bp, Homo sapien
cttgactctccagtcctgtgaatgc

SEQ ID NO: 749260 - DNA, 25 bp, Homo sapien
atgcaaatcatggtcacttctccaa

SEQ ID NO: 749261 - DNA, 25 bp, Homo sapien
gatcagagatgcatcatgttggccc

SEQ ID NO: 749262 - DNA, 25 bp, Homo sapien
gcatgatcagagatgcatcatgttg

SEQ ID NO: 749263 - DNA, 25 bp, Homo sapien
atgatcagagatgcatcatgttggc

SEQ ID NO: 749264 - DNA, 25 bp, Homo sapien
tgatcagagatgcatcatgttggcc

SEQ ID NO: 749265 - DNA, 25 bp, Homo sapien
tgacctccctggaattgactgcctt

SEQ ID NO: 749266 - DNA, 25 bp, Homo sapien
ccctgatgcactcttttctgatgta

SEQ ID NO: 749267 - DNA, 25 bp, Homo sapien
cttgccagggtaagctgagtctgct

SEQ ID NO: 749268 - DNA, 25 bp, Homo sapien
ttgctcatcagaccctatattcttc

SEQ ID NO: 749269 - DNA, 25 bp, Homo sapien
gctttttgccgcttgagctgccaca

SEQ ID NO: 749270 - DNA, 25 bp, Homo sapien
ttgtttgcgtggcttggctggatcc

SEQ ID NO: 749271 - DNA, 25 bp, Homo sapien
tttgtgaatcacagagcacgggatt

SEQ ID NO: 749272 - DNA, 25 bp, Homo sapien
ggattctgtccgaaagctccctggc

SEQ ID NO: 749273 - DNA, 25 bp, Homo sapien
ccgcgcccggcccatgtaattttca

SEQ ID NO: 749274 - DNA, 25 bp, Homo sapien
ggccagaatggtctcgctatcctga

SEQ ID NO: 749275 - DNA, 25 bp, Homo sapien
gcccggcccatgtaattttcataaa

SEQ ID NO: 749276 - DNA, 25 bp, Homo sapien
gcgcccggcccatgtaattttcata

SEQ ID NO: 749277 - DNA, 25 bp, Homo sapien
tcatttgcgtgaggcaggtgactgt

SEQ ID NO: 749278 - DNA, 25 bp, Homo sapien
tcatcatgaataaacatgagtctcc

SEQ ID NO: 749279 - DNA, 25 bp, Homo sapien
ctgggaggactcagcgttgtttatc

SEQ ID NO: 749280 - DNA, 25 bp, Homo sapien
tcagcgttgtttatcttcattagaa

SEQ ID NO: 749281 - DNA, 25 bp, Homo sapien
cttcctcagcacagtgatctcactt

SEQ ID NO: 749282 - DNA, 25 bp, Homo sapien
catcccaacgatctgtcctttgcat

SEQ ID NO: 749283 - DNA, 25 bp, Homo sapien
tctgtcatcccaacgatctgtcctt

SEQ ID NO: 749284 - DNA, 25 bp, Homo sapien
gatctcacttgccatatcatctctg

SEQ ID NO: 749285 - DNA, 25 bp, Homo sapien
tatacttgttggtcattgcctccct

SEQ ID NO: 749286 - DNA, 25 bp, Homo sapien
taatatacttgttggtcattgcctc

SEQ ID NO: 749287 - DNA, 25 bp, Homo sapien
tctcatccttgtttcccactatatt

SEQ ID NO: 749288 - DNA, 25 bp, Homo sapien
gttggtcattgcctccctgtcacct

SEQ ID NO: 749289 - DNA, 25 bp, Homo sapien
ggatgccttgtcaatattgcaagat

SEQ ID NO: 749290 - DNA, 25 bp, Homo sapien
gcagagagtttttcttgggacacgt

SEQ ID NO: 749291 - DNA, 25 bp, Homo sapien
ttatcaaggcgaatgttttctttca

SEQ ID NO: 749292 - DNA, 25 bp, Homo sapien
caatattgcaagatctgtcggggaa

SEQ ID NO: 749293 - DNA, 25 bp, Homo sapien
tgtagacatgaatctgtgtgctggg

SEQ ID NO: 749294 - DNA, 25 bp, Homo sapien
catgaatctgtgtgctggggatgac

SEQ ID NO: 749295 - DNA, 25 bp, Homo sapien
gacatgaatctgtgtgctggggatg

SEQ ID NO: 749296 - DNA, 25 bp, Homo sapien
ctgtgtagacatgaatctgtgtgct

SEQ ID NO: 749297 - DNA, 25 bp, Homo sapien
gggaaatgaggaagattgcaatgat

SEQ ID NO: 749298 - DNA, 25 bp, Homo sapien
ctgtgtgcagaaggcaattggcaag

SEQ ID NO: 749299 - DNA, 25 bp, Homo sapien
aatgaggaagattgcaatgatagtt

SEQ ID NO: 749300 - DNA, 25 bp, Homo sapien
gaggaagattgcaatgatagttgct

SEQ ID NO: 749301 - DNA, 25 bp, Homo sapien
gctagtgagacctgcaacgacttcc

SEQ ID NO: 749302 - DNA, 25 bp, Homo sapien
atgagggcaacttctgaagacttca

SEQ ID NO: 749303 - DNA, 25 bp, Homo sapien
cacccacgacagatcctttgaggag

SEQ ID NO: 749304 - DNA, 25 bp, Homo sapien
taatgtggatctcggatagaggcag

SEQ ID NO: 749305 - DNA, 25 bp, Homo sapien
gcttgtctccctttggggcacatac

SEQ ID NO: 749306 - DNA, 25 bp, Homo sapien
ccgcttgtctccctttggggcacat

SEQ ID NO: 749307 - DNA, 25 bp, Homo sapien
ctccgcttgtctccctttggggcac

SEQ ID NO: 749308 - DNA, 25 bp, Homo sapien
cgcttgtctccctttggggcacata

SEQ ID NO: 749309 - DNA, 25 bp, Homo sapien
atactttttcaccattattgcctga

SEQ ID NO: 749310 - DNA, 25 bp, Homo sapien
ccattattgcctgaaccaaagatac

SEQ ID NO: 749311 - DNA, 25 bp, Homo sapien
actttttcaccattattgcctgaac

SEQ ID NO: 749312 - DNA, 25 bp, Homo sapien
ttcaccattattgcctgaaccaaag

SEQ ID NO: 749313 - DNA, 25 bp, Homo sapien
caaagttgcaattaatcgtgtattc

SEQ ID NO: 749314 - DNA, 25 bp, Homo sapien
gctgtttccaaagttgcaattaatc

SEQ ID NO: 749315 - DNA, 25 bp, Homo sapien
tgcaattaatcgtgtattcaggaaa

SEQ ID NO: 749316 - DNA, 25 bp, Homo sapien
aatcgtgtattcaggaaaacccatc

SEQ ID NO: 749317 - DNA, 25 bp, Homo sapien
taaagttccgagcactaggtgtgac

SEQ ID NO: 749318 - DNA, 25 bp, Homo sapien
tgccgccttcaaagctattcaggtt

SEQ ID NO: 749319 - DNA, 25 bp, Homo sapien
ggcagttttggctgattttatgatt

SEQ ID NO: 749320 - DNA, 25 bp, Homo sapien
taggtgtgacccaaggaagctctac

SEQ ID NO: 749321 - DNA, 25 bp, Homo sapien
cataagatacgagtggtaagaggaa

SEQ ID NO: 749322 - DNA, 25 bp, Homo sapien
cctcatccataagatacgagtggta

SEQ ID NO: 749323 - DNA, 25 bp, Homo sapien
ggctccacagtatcctcatccataa

SEQ ID NO: 749324 - DNA, 25 bp, Homo sapien
gctccacagtatcctcatccataag

SEQ ID NO: 749325 - DNA, 25 bp, Homo sapien
cagggcctgaaacccttccattctg

SEQ ID NO: 749326 - DNA, 25 bp, Homo sapien
caggcaccagggctctccccgagaa

SEQ ID NO: 749327 - DNA, 25 bp, Homo sapien
ggcctgaaacccttccattctgagc

SEQ ID NO: 749328 - DNA, 25 bp, Homo sapien
ggctctccccgagaacagaagctct

SEQ ID NO: 749329 - DNA, 25 bp, Homo sapien
gtgtgggcatggtctccacggagcc

SEQ ID NO: 749330 - DNA, 25 bp, Homo sapien
tgggcatggtctccacggagccttc

SEQ ID NO: 749331 - DNA, 25 bp, Homo sapien
aaatgtgtgggcatggtctccacgg

SEQ ID NO: 749332 - DNA, 25 bp, Homo sapien
aatgtgtgggcatggtctccacgga

SEQ ID NO: 749333 - DNA, 25 bp, Homo sapien
tctgccagtgacaggtcatgagcat

SEQ ID NO: 749334 - DNA, 25 bp, Homo sapien
catgagcatcttgaggcatccagaa

SEQ ID NO: 749335 - DNA, 25 bp, Homo sapien
gttgtttgtaactggcacagaaccc

SEQ ID NO: 749336 - DNA, 25 bp, Homo sapien
catccagaagattgtcgtggttgga

SEQ ID NO: 749337 - DNA, 25 bp, Homo sapien
cctcaccacaggaaatgtttgtgcc

SEQ ID NO: 749338 - DNA, 25 bp, Homo sapien
tagcggacagagttggctggaaccc

SEQ ID NO: 749339 - DNA, 25 bp, Homo sapien
ttggctggaacccagtaaaagaatg

SEQ ID NO: 749340 - DNA, 25 bp, Homo sapien
taggtagcagctcaattattttccc

SEQ ID NO: 749341 - DNA, 25 bp, Homo sapien
gaaaacccgtgtccactttggtgca

SEQ ID NO: 749342 - DNA, 25 bp, Homo sapien
gcgacaagtgtttcatcaacataga

SEQ ID NO: 749343 - DNA, 25 bp, Homo sapien
aaagggtgccgtcgcagggctcaca

SEQ ID NO: 749344 - DNA, 25 bp, Homo sapien
tgcttttctgccacgttaactcatg

SEQ ID NO: 749345 - DNA, 25 bp, Homo sapien
gtaactgtggcatcactcacagggc

SEQ ID NO: 749346 - DNA, 25 bp, Homo sapien
ggaattacagctgaccgggcccaaa

SEQ ID NO: 749347 - DNA, 25 bp, Homo sapien
aattacagctgaccgggcccaaaga

SEQ ID NO: 749348 - DNA, 25 bp, Homo sapien
cagttgagcaactctgttttgggct

SEQ ID NO: 749349 - DNA, 25 bp, Homo sapien
taatgggatacagtttacagatgac

SEQ ID NO: 749350 - DNA, 25 bp, Homo sapien
gatgactttcatgtgggttggctgc

SEQ ID NO: 749351 - DNA, 25 bp, Homo sapien
tgactttcatgtgggttggctgctc

SEQ ID NO: 749352 - DNA, 25 bp, Homo sapien
atgactttcatgtgggttggctgct

SEQ ID NO: 749353 - DNA, 25 bp, Homo sapien
ctgaatccactgttgtggtcagccc

SEQ ID NO: 749354 - DNA, 25 bp, Homo sapien
tgaatccactgttgtggtcagccca

SEQ ID NO: 749355 - DNA, 25 bp, Homo sapien
tgtcttgcttaggtgttttaaagca

SEQ ID NO: 749356 - DNA, 25 bp, Homo sapien
atggtcagagaagaatcccggccca

SEQ ID NO: 749357 - DNA, 25 bp, Homo sapien
gaagagagctggacgcatcacatag

SEQ ID NO: 749358 - DNA, 25 bp, Homo sapien
tgctcggttgcaggcagtgaccctc

SEQ ID NO: 749359 - DNA, 25 bp, Homo sapien
gatacagcaggctcccaagaagaag

SEQ ID NO: 749360 - DNA, 25 bp, Homo sapien
cctgagcctctggtttatctagttg

SEQ ID NO: 749361 - DNA, 25 bp, Homo sapien
tctttgaatcccatgaacgaatatg

SEQ ID NO: 749362 - DNA, 25 bp, Homo sapien
cctgaagaaagcctacagagggcag

SEQ ID NO: 749363 - DNA, 25 bp, Homo sapien
aggaaatctgtgatggacccctctc

SEQ ID NO: 749364 - DNA, 25 bp, Homo sapien
ttaatgtgttagagacatctttcag

SEQ ID NO: 749365 - DNA, 25 bp, Homo sapien
tagatagggtcattttgtggatatg

SEQ ID NO: 749366 - DNA, 25 bp, Homo sapien
taatacgcatattactttatatcct

SEQ ID NO: 749367 - DNA, 25 bp, Homo sapien
aaatgaactaatacgcatattactt

SEQ ID NO: 749368 - DNA, 25 bp, Homo sapien
gcaggtgctcctatccaccaggact

SEQ ID NO: 749369 - DNA, 25 bp, Homo sapien
agcaggtgctcctatccaccaggac

SEQ ID NO: 749370 - DNA, 25 bp, Homo sapien
caggacttgatgggagccaggtccc

SEQ ID NO: 749371 - DNA, 25 bp, Homo sapien
ttctgatggagagaagactcccaac

SEQ ID NO: 749372 - DNA, 25 bp, Homo sapien
aagcagtctctcttcacctaagacg

SEQ ID NO: 749373 - DNA, 25 bp, Homo sapien
gagatgccacagatgctcttcatgc

SEQ ID NO: 749374 - DNA, 25 bp, Homo sapien
tcaggcctggtttctgcattgagac

SEQ ID NO: 749375 - DNA, 25 bp, Homo sapien
gcagaaggcccactctccatgtgta

SEQ ID NO: 749376 - DNA, 25 bp, Homo sapien
gacaacctttggctgtttatgctca

SEQ ID NO: 749377 - DNA, 25 bp, Homo sapien
gctgtttatgctcatcttgatggca

SEQ ID NO: 749378 - DNA, 25 bp, Homo sapien
tgtccaaggtactgctctgcactgc

SEQ ID NO: 749379 - DNA, 25 bp, Homo sapien
tggtttacagctcaccaaatgtgaa

SEQ ID NO: 749380 - DNA, 25 bp, Homo sapien
tactcagcttaaggatgtaagtcct

SEQ ID NO: 749381 - DNA, 25 bp, Homo sapien
actaagaaattgagcctggttggcc

SEQ ID NO: 749382 - DNA, 25 bp, Homo sapien
cagtagcagtgtaacctgagagatc

SEQ ID NO: 749383 - DNA, 25 bp, Homo sapien
agcatacatacttttgcatgtctgg

SEQ ID NO: 749384 - DNA, 25 bp, Homo sapien
cggtcatcactgtggataggttgat

SEQ ID NO: 749385 - DNA, 25 bp, Homo sapien
aaatcccaagatgccgacagcttct

SEQ ID NO: 749386 - DNA, 25 bp, Homo sapien
tattatttggctcaggtttacagca

SEQ ID NO: 749387 - DNA, 25 bp, Homo sapien
tctggttagaatcagaatggtttcc

SEQ ID NO: 749388 - DNA, 25 bp, Homo sapien
tctaaagagatgctaaaagaacttg

SEQ ID NO: 749389 - DNA, 25 bp, Homo sapien
tgctgagaatgatgtagaaccactt

SEQ ID NO: 749390 - DNA, 25 bp, Homo sapien
tcatccaagtccttactttaccaaa

SEQ ID NO: 749391 - DNA, 25 bp, Homo sapien
aacccatgtaagtcagaaatatgat

SEQ ID NO: 749392 - DNA, 25 bp, Homo sapien
cctggacataccatggatggccgcc

SEQ ID NO: 749393 - DNA, 25 bp, Homo sapien
cagcctggacataccatggatggcc

SEQ ID NO: 749394 - DNA, 25 bp, Homo sapien
ctccgcagcctggacataccatgga

SEQ ID NO: 749395 - DNA, 25 bp, Homo sapien
ggacataccatggatggccgcctct

SEQ ID NO: 749396 - DNA, 25 bp, Homo sapien
ttccctggtcgtcagttatactcac

SEQ ID NO: 749397 - DNA, 25 bp, Homo sapien
cttttccctggtcgtcagttatact

SEQ ID NO: 749398 - DNA, 25 bp, Homo sapien
tccttttccctggtcgtcagttata

SEQ ID NO: 749399 - DNA, 25 bp, Homo sapien
tgtccttttccctggtcgtcagtta

SEQ ID NO: 749400 - DNA, 25 bp, Homo sapien
gagttaactgagaggcaggccagtc

SEQ ID NO: 749401 - DNA, 25 bp, Homo sapien
ctgaaagcgtccaagagttaactga

SEQ ID NO: 749402 - DNA, 25 bp, Homo sapien
gcgtccaagagttaactgagaggca

SEQ ID NO: 749403 - DNA, 25 bp, Homo sapien
caagagttaactgagaggcaggcca

SEQ ID NO: 749404 - DNA, 25 bp, Homo sapien
gaggacctggttcatcccagagggc

SEQ ID NO: 749405 - DNA, 25 bp, Homo sapien
tctggaggcggtcaaggttgcttcc

SEQ ID NO: 749406 - DNA, 25 bp, Homo sapien
ttgcttcctggtaaaaaccacgagc

SEQ ID NO: 749407 - DNA, 25 bp, Homo sapien
cctggtaaaaaccacgagcgttcat

SEQ ID NO: 749408 - DNA, 25 bp, Homo sapien
ccatgcaagggtgcagctgcttgga

SEQ ID NO: 749409 - DNA, 25 bp, Homo sapien
cagccatgcaagggtgcagctgctt

SEQ ID NO: 749410 - DNA, 25 bp, Homo sapien
ttagggagtggctgtcatggtccat

SEQ ID NO: 749411 - DNA, 25 bp, Homo sapien
cagcatggggctgattgggaaagtc

SEQ ID NO: 749412 - DNA, 25 bp, Homo sapien
aacactctcttactgactctctcag

SEQ ID NO: 749413 - DNA, 25 bp, Homo sapien
ctcttactgactctctcagggcagg

SEQ ID NO: 749414 - DNA, 25 bp, Homo sapien
agtcatgtgtccagtccataatgcc

SEQ ID NO: 749415 - DNA, 25 bp, Homo sapien
ctgatcttttcaatgggtgagtcat

SEQ ID NO: 749416 - DNA, 25 bp, Homo sapien
gcctttccatggttttgatgcaaaa

SEQ ID NO: 749417 - DNA, 25 bp, Homo sapien
ggctgcctttccatggttttgatgc

SEQ ID NO: 749418 - DNA, 25 bp, Homo sapien
ttccatggttttgatgcaaaagcag

SEQ ID NO: 749419 - DNA, 25 bp, Homo sapien
ttctaggatgacccaggctgccttt

SEQ ID NO: 749420 - DNA, 25 bp, Homo sapien
atgcaggatgtagcctgccctcttg

SEQ ID NO: 749421 - DNA, 25 bp, Homo sapien
tggtgatctccttgcccacacactc

SEQ ID NO: 749422 - DNA, 25 bp, Homo sapien
cactcgttcctgtggaagtcattgc

SEQ ID NO: 749423 - DNA, 25 bp, Homo sapien
caggtccagggctaagatctcagga

SEQ ID NO: 749424 - DNA, 25 bp, Homo sapien
gtgacccgcaggttggacagtctgt

SEQ ID NO: 749425 - DNA, 25 bp, Homo sapien
gctccacgtggtgttttgaaattta

SEQ ID NO: 749426 - DNA, 25 bp, Homo sapien
atccaaacagctccacgtggtgttt

SEQ ID NO: 749427 - DNA, 25 bp, Homo sapien
cccgcaggttggacagtctgtgaaa

SEQ ID NO: 749428 - DNA, 25 bp, Homo sapien
ggatccctcgcaggacaacagtatg

SEQ ID NO: 749429 - DNA, 25 bp, Homo sapien
caacagtatgcattgaagggaacag

SEQ ID NO: 749430 - DNA, 25 bp, Homo sapien
caggagtcagaccatagagtggatc

SEQ ID NO: 749431 - DNA, 25 bp, Homo sapien
ggaacaggaaccaagtagcctctgt

SEQ ID NO: 749432 - DNA, 25 bp, Homo sapien
tctttgcatactggctgactgttat

SEQ ID NO: 749433 - DNA, 25 bp, Homo sapien
ttggaaaatctttgcatactggctg

SEQ ID NO: 749434 - DNA, 25 bp, Homo sapien
agttggaaaatctttgcatactggc

SEQ ID NO: 749435 - DNA, 25 bp, Homo sapien
actggctgactgttatagaagataa

SEQ ID NO: 749436 - DNA, 25 bp, Homo sapien
aagaaccagcatatcgtttcattta

SEQ ID NO: 749437 - DNA, 25 bp, Homo sapien
ttcaaagaaccagcatatcgtttca

SEQ ID NO: 749438 - DNA, 25 bp, Homo sapien
tcaaagaaccagcatatcgtttcat

SEQ ID NO: 749439 - DNA, 25 bp, Homo sapien
aaccagcatatcgtttcatttatct

SEQ ID NO: 749440 - DNA, 25 bp, Homo sapien
tgggctccaggagaatgggcttcat

SEQ ID NO: 749441 - DNA, 25 bp, Homo sapien
ctgcctggaaagctgtgctgggctc

SEQ ID NO: 749442 - DNA, 25 bp, Homo sapien
cagaggctgcctggaaagctgtgct

SEQ ID NO: 749443 - DNA, 25 bp, Homo sapien
ctgggctccaggagaatgggcttca

SEQ ID NO: 749444 - DNA, 25 bp, Homo sapien
cgagtacttgagcagggtcgaggat

SEQ ID NO: 749445 - DNA, 25 bp, Homo sapien
gaggcgcttcagcgagtacttgagc

SEQ ID NO: 749446 - DNA, 25 bp, Homo sapien
tgagcagggtcgaggatgagaagcc

SEQ ID NO: 749447 - DNA, 25 bp, Homo sapien
cagggtcgaggatgagaagccaaac

SEQ ID NO: 749448 - DNA, 25 bp, Homo sapien
cagagggctgacttgggcaggtggg

SEQ ID NO: 749449 - DNA, 25 bp, Homo sapien
ttctgcccagcgtgagtccctctgg

SEQ ID NO: 749450 - DNA, 25 bp, Homo sapien
agagggctgacttgggcaggtgggc

SEQ ID NO: 749451 - DNA, 25 bp, Homo sapien
cagcgtgagtccctctggcacagct

SEQ ID NO: 749452 - DNA, 25 bp, Homo sapien
catacagtccccctgacgaactgtg

SEQ ID NO: 749453 - DNA, 25 bp, Homo sapien
tagtgtgaacggtcaggctccagga

SEQ ID NO: 749454 - DNA, 25 bp, Homo sapien
ctgtgaagtgtagtgtgaacggtca

SEQ ID NO: 749455 - DNA, 25 bp, Homo sapien
gaggtgtaggcttcaaggattacaa

SEQ ID NO: 749456 - DNA, 25 bp, Homo sapien
aattgcccagttggtgatgaattga

SEQ ID NO: 749457 - DNA, 25 bp, Homo sapien
gggcacaggactcccaggcacctgt

SEQ ID NO: 749458 - DNA, 25 bp, Homo sapien
gtcatgcagaagccacgtgactggt

SEQ ID NO: 749459 - DNA, 25 bp, Homo sapien
aagcccaattggggtgggacatctg

SEQ ID NO: 749460 - DNA, 25 bp, Homo sapien
tggtcatgcagaagccacgtgactg

SEQ ID NO: 749461 - DNA, 25 bp, Homo sapien
agaggctccagaaacgcaaggttgg

SEQ ID NO: 749462 - DNA, 25 bp, Homo sapien
tccagaaacgcaaggttgggtcttc

SEQ ID NO: 749463 - DNA, 25 bp, Homo sapien
tttgaggatttgagcctctttttgc

SEQ ID NO: 749464 - DNA, 25 bp, Homo sapien
ccttgtccttcaggggatttgagga

SEQ ID NO: 749465 - DNA, 25 bp, Homo sapien
tctgatagtagcttagctcctccat

SEQ ID NO: 749466 - DNA, 25 bp, Homo sapien
ttctgatagtagcttagctcctcca

SEQ ID NO: 749467 - DNA, 25 bp, Homo sapien
gatagtagcttagctcctccattta

SEQ ID NO: 749468 - DNA, 25 bp, Homo sapien
aaatcttactttttctgcattcagc

SEQ ID NO: 749469 - DNA, 25 bp, Homo sapien
atgggctgatgtggccatggattca

SEQ ID NO: 749470 - DNA, 25 bp, Homo sapien
tgtctaacctcactaaagccagccg

SEQ ID NO: 749471 - DNA, 25 bp, Homo sapien
caccatgtggtttatctttgtctaa

SEQ ID NO: 749472 - DNA, 25 bp, Homo sapien
caggacacaagccagatgacgttag

SEQ ID NO: 749473 - DNA, 25 bp, Homo sapien
tgcaaaaacatctcatcagtaagtg

SEQ ID NO: 749474 - DNA, 25 bp, Homo sapien
cactgtaaggtacaacttcatgtaa

SEQ ID NO: 749475 - DNA, 25 bp, Homo sapien
agtctgtatgttaagcactagcccc

SEQ ID NO: 749476 - DNA, 25 bp, Homo sapien
tgtcatttggaacctaaggactggg

SEQ ID NO: 749477 - DNA, 25 bp, Homo sapien
tacaatcactgtgcgggttgggctg

SEQ ID NO: 749478 - DNA, 25 bp, Homo sapien
tgggaaaatgttaggcagatcatag

SEQ ID NO: 749479 - DNA, 25 bp, Homo sapien
gggccttggttggatacaatcactg

SEQ ID NO: 749480 - DNA, 25 bp, Homo sapien
aatgttaggcagatcatagagagcc

SEQ ID NO: 749481 - DNA, 25 bp, Homo sapien
actttgatcagaccggactctctct

SEQ ID NO: 749482 - DNA, 25 bp, Homo sapien
gacactttgatcagaccggactctc

SEQ ID NO: 749483 - DNA, 25 bp, Homo sapien
tgctgcagacctcagttctaataac

SEQ ID NO: 749484 - DNA, 25 bp, Homo sapien
ctgaaatgctgcagacctcagttct

SEQ ID NO: 749485 - DNA, 25 bp, Homo sapien
cgggggcagttggatcccagaatgc

SEQ ID NO: 749486 - DNA, 25 bp, Homo sapien
tttcttctgagctatgtagaaaatc

SEQ ID NO: 749487 - DNA, 25 bp, Homo sapien
ccatgtgctgcctccgggatgcatg

SEQ ID NO: 749488 - DNA, 25 bp, Homo sapien
gattttcctcgggggcagttggatc

SEQ ID NO: 749489 - DNA, 25 bp, Homo sapien
gagggctctcccagaaatttgcatc

SEQ ID NO: 749490 - DNA, 25 bp, Homo sapien
tgcagtcaaccccagctgtgatggc

SEQ ID NO: 749491 - DNA, 25 bp, Homo sapien
tttgcatcacaaaggccaaagaggc

SEQ ID NO: 749492 - DNA, 25 bp, Homo sapien
caaagaggccaaccttcttgggctt

SEQ ID NO: 749493 - DNA, 25 bp, Homo sapien
caaggccagctgacaccatgcacgt

SEQ ID NO: 749494 - DNA, 25 bp, Homo sapien
cagctgacaccatgcacgttttgca

SEQ ID NO: 749495 - DNA, 25 bp, Homo sapien
tgacaccatgcacgttttgcacttt

SEQ ID NO: 749496 - DNA, 25 bp, Homo sapien
ggccagctgacaccatgcacgtttt

SEQ ID NO: 749497 - DNA, 25 bp, Homo sapien
gcatagagtctgaggtcctctgttg

SEQ ID NO: 749498 - DNA, 25 bp, Homo sapien
tattgttcgtatcagaaacagcttg

SEQ ID NO: 749499 - DNA, 25 bp, Homo sapien
ctattgttcgtatcagaaacagctt

SEQ ID NO: 749500 - DNA, 25 bp, Homo sapien
atagctgtgggcatagagtctgagg

SEQ ID NO: 749501 - DNA, 25 bp, Homo sapien
agccaaataaggacatctcaacatc

SEQ ID NO: 749502 - DNA, 25 bp, Homo sapien
cttcgtctgcctcagctgaactctc

SEQ ID NO: 749503 - DNA, 25 bp, Homo sapien
ttcgtctgcctcagctgaactctcc

SEQ ID NO: 749504 - DNA, 25 bp, Homo sapien
ggattagcaggaatgcccctccgta

SEQ ID NO: 749505 - DNA, 25 bp, Homo sapien
tgaggttgactttagtgcaaagcaa

SEQ ID NO: 749506 - DNA, 25 bp, Homo sapien
gcaaaaggcttccagaatgtcctga

SEQ ID NO: 749507 - DNA, 25 bp, Homo sapien
aactctttgctctgcgtttctgcta

SEQ ID NO: 749508 - DNA, 25 bp, Homo sapien
tctttggtcatgcttactgatggtg

SEQ ID NO: 749509 - DNA, 25 bp, Homo sapien
ggtgttcagtgctcttccaagccat

SEQ ID NO: 749510 - DNA, 25 bp, Homo sapien
tccaagccatgaattgcctaattcc

SEQ ID NO: 749511 - DNA, 25 bp, Homo sapien
ggtatctgatttatcatctgttgaa

SEQ ID NO: 749512 - DNA, 25 bp, Homo sapien
aaagtagatggctcagaagcatgga

SEQ ID NO: 749513 - DNA, 25 bp, Homo sapien
gaagatagggtatagacacagcctt

SEQ ID NO: 749514 - DNA, 25 bp, Homo sapien
ggctttgtcgttacctttcagattc

SEQ ID NO: 749515 - DNA, 25 bp, Homo sapien
agcatggagagtggtggtaggatca

SEQ ID NO: 749516 - DNA, 25 bp, Homo sapien
gttgattccaagtttatattctgac

SEQ ID NO: 749517 - DNA, 25 bp, Homo sapien
cctgtacccacaggcagaataaaga

SEQ ID NO: 749518 - DNA, 25 bp, Homo sapien
gctttgagagtcactccggactgca

SEQ ID NO: 749519 - DNA, 25 bp, Homo sapien
caaacaacaatatgaaggagagagg

SEQ ID NO: 749520 - DNA, 25 bp, Homo sapien
tcctttagacgcttgttcccgcaca

SEQ ID NO: 749521 - DNA, 25 bp, Homo sapien
cctttagacgcttgttcccgcacat

SEQ ID NO: 749522 - DNA, 25 bp, Homo sapien
tttagacgcttgttcccgcacattc

SEQ ID NO: 749523 - DNA, 25 bp, Homo sapien
tagacgcttgttcccgcacattcat

SEQ ID NO: 749524 - DNA, 25 bp, Homo sapien
tctcggttacgctcggcaaagctgc

SEQ ID NO: 749525 - DNA, 25 bp, Homo sapien
cctctcggttacgctcggcaaagct

SEQ ID NO: 749526 - DNA, 25 bp, Homo sapien
ctcggttacgctcggcaaagctgcc

SEQ ID NO: 749527 - DNA, 25 bp, Homo sapien
ccctgtttgattcatctgggattgt

SEQ ID NO: 749528 - DNA, 25 bp, Homo sapien
ctctctacagggctcccctttttgg

SEQ ID NO: 749529 - DNA, 25 bp, Homo sapien
tacagggctcccctttttggtggca

SEQ ID NO: 749530 - DNA, 25 bp, Homo sapien
ctctacagggctcccctttttggtg

SEQ ID NO: 749531 - DNA, 25 bp, Homo sapien
cctagtaactctcttttggtagtat

SEQ ID NO: 749532 - DNA, 25 bp, Homo sapien
ctccccttgacctagtaactctctt

SEQ ID NO: 749533 - DNA, 25 bp, Homo sapien
cttgacctagtaactctcttttggt

SEQ ID NO: 749534 - DNA, 25 bp, Homo sapien
tgacctagtaactctcttttggtag

SEQ ID NO: 749535 - DNA, 25 bp, Homo sapien
aggaagacacagaccagaaagctac

SEQ ID NO: 749536 - DNA, 25 bp, Homo sapien
gaaagctaccacttctgtctttgcc

SEQ ID NO: 749537 - DNA, 25 bp, Homo sapien
tgcataaactcttcaagcctccagt

SEQ ID NO: 749538 - DNA, 25 bp, Homo sapien
caggccttgcttttcaaggaagaca

SEQ ID NO: 749539 - DNA, 25 bp, Homo sapien
gggtttttatactcttccagcatcc

SEQ ID NO: 749540 - DNA, 25 bp, Homo sapien
ggaattttcatagactttggatagc

SEQ ID NO: 749541 - DNA, 25 bp, Homo sapien
caggttagtaacgtgacagcattgg

SEQ ID NO: 749542 - DNA, 25 bp, Homo sapien
tggccatagaatggccgggcgccta

SEQ ID NO: 749543 - DNA, 25 bp, Homo sapien
ccgtttacgctgtaggatcctcatt

SEQ ID NO: 749544 - DNA, 25 bp, Homo sapien
tatagacacgtgtggccgtttacgc

SEQ ID NO: 749545 - DNA, 25 bp, Homo sapien
cctcattaggtatagacacgtgtgg

SEQ ID NO: 749546 - DNA, 25 bp, Homo sapien
cacgtgtggccgtttacgctgtagg

SEQ ID NO: 749547 - DNA, 25 bp, Homo sapien
tgaagattcgcgcaagccgtgcccc

SEQ ID NO: 749548 - DNA, 25 bp, Homo sapien
cattgtaccgttggctgtgcccctg

SEQ ID NO: 749549 - DNA, 25 bp, Homo sapien
gctttgactcaagggcgttggcacg

SEQ ID NO: 749550 - DNA, 25 bp, Homo sapien
tttctttccactgaagattcgcgca

SEQ ID NO: 749551 - DNA, 25 bp, Homo sapien
cgaaggtgcattgtgtgaaccgacc

SEQ ID NO: 749552 - DNA, 25 bp, Homo sapien
ccccaccgaaggtgcattgtgtgaa

SEQ ID NO: 749553 - DNA, 25 bp, Homo sapien
accgaaggtgcattgtgtgaaccga

SEQ ID NO: 749554 - DNA, 25 bp, Homo sapien
gtgcattgtgtgaaccgaccttggg

SEQ ID NO: 749555 - DNA, 25 bp, Homo sapien
tgctgctcccatgggaaacaaagac

SEQ ID NO: 749556 - DNA, 25 bp, Homo sapien
atgacacccccaccatatacccatc

SEQ ID NO: 749557 - DNA, 25 bp, Homo sapien
ggggggacatgtgcccaccactgct

SEQ ID NO: 749558 - DNA, 25 bp, Homo sapien
tccatccagaccctccagtgtaggg

SEQ ID NO: 749559 - DNA, 25 bp, Homo sapien
gccatcaggtccctgatacgggaac

SEQ ID NO: 749560 - DNA, 25 bp, Homo sapien
tggccatcaggtccctgatacggga

SEQ ID NO: 749561 - DNA, 25 bp, Homo sapien
gaatggccatcaggtccctgatacg

SEQ ID NO: 749562 - DNA, 25 bp, Homo sapien
aatggccatcaggtccctgatacgg

SEQ ID NO: 749563 - DNA, 25 bp, Homo sapien
tagtatatatgctgctgaagcgagc

SEQ ID NO: 749564 - DNA, 25 bp, Homo sapien
tatatatgctgctgaagcgagcact

SEQ ID NO: 749565 - DNA, 25 bp, Homo sapien
ttacacatgggtcatgctaatcttc

SEQ ID NO: 749566 - DNA, 25 bp, Homo sapien
tctgtattgttccagttttagtata

SEQ ID NO: 749567 - DNA, 25 bp, Homo sapien
gccaccagcaggtgccgcaaatgga

SEQ ID NO: 749568 - DNA, 25 bp, Homo sapien
ggttcctttacgcattgccaccagc

SEQ ID NO: 749569 - DNA, 25 bp, Homo sapien
tggcagtcttaaggtagaaccagtt

SEQ ID NO: 749570 - DNA, 25 bp, Homo sapien
aaatggaccattggcagtcttaagg

SEQ ID NO: 749571 - DNA, 25 bp, Homo sapien
taagagaaactggtgcatgagattg

SEQ ID NO: 749572 - DNA, 25 bp, Homo sapien
aaactggtgcatgagattggcactg

SEQ ID NO: 749573 - DNA, 25 bp, Homo sapien
gagaaactggtgcatgagattggca

SEQ ID NO: 749574 - DNA, 25 bp, Homo sapien
ctttaagagaaactggtgcatgaga

SEQ ID NO: 749575 - DNA, 25 bp, Homo sapien
agttacttctagcacgggaggccgt

SEQ ID NO: 749576 - DNA, 25 bp, Homo sapien
caaataggataaggtgtggaaaagt

SEQ ID NO: 749577 - DNA, 25 bp, Homo sapien
tctggtaggtcactgtaagcgccta

SEQ ID NO: 749578 - DNA, 25 bp, Homo sapien
taagcgcctaagaagacagattcag

SEQ ID NO: 749579 - DNA, 25 bp, Homo sapien
gagatgagtaagatatgagtcctac

SEQ ID NO: 749580 - DNA, 25 bp, Homo sapien
agagatgagtaagatatgagtccta

SEQ ID NO: 749581 - DNA, 25 bp, Homo sapien
cagagatgagtaagatatgagtcct

SEQ ID NO: 749582 - DNA, 25 bp, Homo sapien
tgaagaaatgccggaaggttttctg

SEQ ID NO: 749583 - DNA, 25 bp, Homo sapien
agaaatgccggaaggttttctgtgc

SEQ ID NO: 749584 - DNA, 25 bp, Homo sapien
aagaaatgccggaaggttttctgtg

SEQ ID NO: 749585 - DNA, 25 bp, Homo sapien
tgtggcttcgagtctggtttctgcg

SEQ ID NO: 749586 - DNA, 25 bp, Homo sapien
ttctgcgatagggaactgggctcga

SEQ ID NO: 749587 - DNA, 25 bp, Homo sapien
gctccagcacttcctgtggcttcga

SEQ ID NO: 749588 - DNA, 25 bp, Homo sapien
cacacatcaccgagtgacaggcttg

SEQ ID NO: 749589 - DNA, 25 bp, Homo sapien
tggaaactttgaatgtttggctcac

SEQ ID NO: 749590 - DNA, 25 bp, Homo sapien
gtttcacatattgttttttgatcag

SEQ ID NO: 749591 - DNA, 25 bp, Homo sapien
tttggaaactttgaatgtttggctc

SEQ ID NO: 749592 - DNA, 25 bp, Homo sapien
aagtttcacatattgttttttgatc

SEQ ID NO: 749593 - DNA, 25 bp, Homo sapien
tgttttatcttaaaccaaactgcag

SEQ ID NO: 749594 - DNA, 25 bp, Homo sapien
agtatggccgtatggccatgctgat

SEQ ID NO: 749595 - DNA, 25 bp, Homo sapien
taccctgactgtgttttatcttaaa

SEQ ID NO: 749596 - DNA, 25 bp, Homo sapien
tgctgatagcatgtaccctgactgt

SEQ ID NO: 749597 - DNA, 25 bp, Homo sapien
tgaataggcagccactttagctctt

SEQ ID NO: 749598 - DNA, 25 bp, Homo sapien
tgggtataccgaggactacccacag

SEQ ID NO: 749599 - DNA, 25 bp, Homo sapien
gctcttcctgggtataccgaggact

SEQ ID NO: 749600 - DNA, 25 bp, Homo sapien
cagccactttagctcttcctgggta

SEQ ID NO: 749601 - DNA, 25 bp, Homo sapien
tgtgttatctttctatcaatggtaa

SEQ ID NO: 749602 - DNA, 25 bp, Homo sapien
gccgatatccttagttgtctggtac

SEQ ID NO: 749603 - DNA, 25 bp, Homo sapien
tggtaatagaaaagccgatatcctt

SEQ ID NO: 749604 - DNA, 25 bp, Homo sapien
ctatcaatggtaatagaaaagccga

SEQ ID NO: 749605 - DNA, 25 bp, Homo sapien
aagctcctgggtccactcttatctt

SEQ ID NO: 749606 - DNA, 25 bp, Homo sapien
ctgggtccactcttatcttgcccat

SEQ ID NO: 749607 - DNA, 25 bp, Homo sapien
ctctgtggagctcggaagctcctgg

SEQ ID NO: 749608 - DNA, 25 bp, Homo sapien
tgactctgtggagctcggaagctcc

SEQ ID NO: 749609 - DNA, 25 bp, Homo sapien
gcaggtgtcctgctacccgttctgt

SEQ ID NO: 749610 - DNA, 25 bp, Homo sapien
gcccatgatgggtagaagaaggctt

SEQ ID NO: 749611 - DNA, 25 bp, Homo sapien
gaaagaatgactgagatgagtagtt

SEQ ID NO: 749612 - DNA, 25 bp, Homo sapien
tttttccagcgggagagcttcttca

SEQ ID NO: 749613 - DNA, 25 bp, Homo sapien
taggcatcaacatcttggtggctct

SEQ ID NO: 749614 - DNA, 25 bp, Homo sapien
ggcatcaacatcttggtggctctgg

SEQ ID NO: 749615 - DNA, 25 bp, Homo sapien
gcatcaacatcttggtggctctggg

SEQ ID NO: 749616 - DNA, 25 bp, Homo sapien
atcaacatcttggtggctctggggt

SEQ ID NO: 749617 - DNA, 25 bp, Homo sapien
ccttcttggccaccatgactccctc

SEQ ID NO: 749618 - DNA, 25 bp, Homo sapien
ctgcagtgtacagtggcaggcacag

SEQ ID NO: 749619 - DNA, 25 bp, Homo sapien
gcagtgtacagtggcaggcacagtc

SEQ ID NO: 749620 - DNA, 25 bp, Homo sapien
tctggacggctgcagtgtacagtgg

SEQ ID NO: 749621 - DNA, 25 bp, Homo sapien
tctctggacggctgcagtgtacagt

SEQ ID NO: 749622 - DNA, 25 bp, Homo sapien
actatgtctgcacgtatctctgttg

SEQ ID NO: 749623 - DNA, 25 bp, Homo sapien
tatgtctgcacgtatctctgttggc

SEQ ID NO: 749624 - DNA, 25 bp, Homo sapien
gcactatgtctgcacgtatctctgt

SEQ ID NO: 749625 - DNA, 25 bp, Homo sapien
gcagcactatgtctgcacgtatctc

SEQ ID NO: 749626 - DNA, 25 bp, Homo sapien
catttacgtaactgtgtgaggccac

SEQ ID NO: 749627 - DNA, 25 bp, Homo sapien
ggtactggcgcattccatttacgta

SEQ ID NO: 749628 - DNA, 25 bp, Homo sapien
tgttcacagaaaggtggtattcccc

SEQ ID NO: 749629 - DNA, 25 bp, Homo sapien
attccccattctacccttgttggtg

SEQ ID NO: 749630 - DNA, 25 bp, Homo sapien
tgtgcattaactgtcaatagacaga

SEQ ID NO: 749631 - DNA, 25 bp, Homo sapien
gggctgtgcattaactgtcaataga

SEQ ID NO: 749632 - DNA, 25 bp, Homo sapien
gatgggggctgtgcattaactgtca

SEQ ID NO: 749633 - DNA, 25 bp, Homo sapien
tgggggctgtgcattaactgtcaat

SEQ ID NO: 749634 - DNA, 25 bp, Homo sapien
ccatctttgggaattgccttgggaa

SEQ ID NO: 749635 - DNA, 25 bp, Homo sapien
gaccatagaagcttcagtggcagcc

SEQ ID NO: 749636 - DNA, 25 bp, Homo sapien
tcagctggaccaacccatccatagg

SEQ ID NO: 749637 - DNA, 25 bp, Homo sapien
gaacttgggttgtacttctgacttc

SEQ ID NO: 749638 - DNA, 25 bp, Homo sapien
gattcttgtacaggccacacagtac

SEQ ID NO: 749639 - DNA, 25 bp, Homo sapien
tagattcttgtacaggccacacagt

SEQ ID NO: 749640 - DNA, 25 bp, Homo sapien
agattcttgtacaggccacacagta

SEQ ID NO: 749641 - DNA, 25 bp, Homo sapien
ctagattcttgtacaggccacacag

SEQ ID NO: 749642 - DNA, 25 bp, Homo sapien
agattggccgccccttcgtattttg

SEQ ID NO: 749643 - DNA, 25 bp, Homo sapien
ggcagattggccgccccttcgtatt

SEQ ID NO: 749644 - DNA, 25 bp, Homo sapien
tggccgccccttcgtattttgtgtg

SEQ ID NO: 749645 - DNA, 25 bp, Homo sapien
tgtgaaggcagattggccgcccctt

SEQ ID NO: 749646 - DNA, 25 bp, Homo sapien
gacagccctggagctctccggttga

SEQ ID NO: 749647 - DNA, 25 bp, Homo sapien
gcctggcactggtagtttcccatgt

SEQ ID NO: 749648 - DNA, 25 bp, Homo sapien
gggaattggcatctccggaagctgg

SEQ ID NO: 749649 - DNA, 25 bp, Homo sapien
tggagcacgtaacactaggacttcc

SEQ ID NO: 749650 - DNA, 25 bp, Homo sapien
ttctgggtaaaaggcaggcaactaa

SEQ ID NO: 749651 - DNA, 25 bp, Homo sapien
cagggctgggcatgaaatcactgtg

SEQ ID NO: 749652 - DNA, 25 bp, Homo sapien
ctgtggcttgcaccactgtgggttg

SEQ ID NO: 749653 - DNA, 25 bp, Homo sapien
tgggttgcaggcacttccttaaagg

SEQ ID NO: 749654 - DNA, 25 bp, Homo sapien
gggcttcatgtgaaaccgttcatac

SEQ ID NO: 749655 - DNA, 25 bp, Homo sapien
ccttgcacagtgagtgcgggcttca

SEQ ID NO: 749656 - DNA, 25 bp, Homo sapien
tcagatttcctacttgatgggagga

SEQ ID NO: 749657 - DNA, 25 bp, Homo sapien
actctgcgagaccttcccttgcaca

SEQ ID NO: 749658 - DNA, 25 bp, Homo sapien
aatcttgaagctcttgagtagcaga

SEQ ID NO: 749659 - DNA, 25 bp, Homo sapien
ctgtggtcccaaatcgttccttgta

SEQ ID NO: 749660 - DNA, 25 bp, Homo sapien
tctgggtacttagccctggaacctg

SEQ ID NO: 749661 - DNA, 25 bp, Homo sapien
ttgctgctctttcttgcacagatgg

SEQ ID NO: 749662 - DNA, 25 bp, Homo sapien
tgtatatgcttatgccccttgcttc

SEQ ID NO: 749663 - DNA, 25 bp, Homo sapien
tccattgtctcctcatgtatatgct

SEQ ID NO: 749664 - DNA, 25 bp, Homo sapien
gttcctgccctagatgaaccctcat

SEQ ID NO: 749665 - DNA, 25 bp, Homo sapien
tgcagatgggttccttaggttgttg

SEQ ID NO: 749666 - DNA, 25 bp, Homo sapien
tgtaaatgtacagttcctaagttca

SEQ ID NO: 749667 - DNA, 25 bp, Homo sapien
gagccataattgcttctagactcta

SEQ ID NO: 749668 - DNA, 25 bp, Homo sapien
agaggtgcttgctttacattaacaa

SEQ ID NO: 749669 - DNA, 25 bp, Homo sapien
gctgagactgcctacaaaaaactat

SEQ ID NO: 749670 - DNA, 25 bp, Homo sapien
gaacagggtgccttgaaagaagcct

SEQ ID NO: 749671 - DNA, 25 bp, Homo sapien
gggtgccttgaaagaagccttcctg

SEQ ID NO: 749672 - DNA, 25 bp, Homo sapien
tgcaggaacagggtgccttgaaaga

SEQ ID NO: 749673 - DNA, 25 bp, Homo sapien
ggtgccttgaaagaagccttcctgt

SEQ ID NO: 749674 - DNA, 25 bp, Homo sapien
tgggatactgctccatgccgcacta

SEQ ID NO: 749675 - DNA, 25 bp, Homo sapien
aggatcgccgttcacccaagaggca

SEQ ID NO: 749676 - DNA, 25 bp, Homo sapien
gcattggctcgttgggctggtacag

SEQ ID NO: 749677 - DNA, 25 bp, Homo sapien
tgccgcactaagctgtaataatgct

SEQ ID NO: 749678 - DNA, 25 bp, Homo sapien
gcttcctcccagtgtagggttccta

SEQ ID NO: 749679 - DNA, 25 bp, Homo sapien
agcttcctcccagtgtagggttcct

SEQ ID NO: 749680 - DNA, 25 bp, Homo sapien
taagcttcctcccagtgtagggttc

SEQ ID NO: 749681 - DNA, 25 bp, Homo sapien
cttcctcccagtgtagggttcctag

SEQ ID NO: 749682 - DNA, 25 bp, Homo sapien
tgtcttggttataggagaaccttta

SEQ ID NO: 749683 - DNA, 25 bp, Homo sapien
tggttataggagaacctttattgga

SEQ ID NO: 749684 - DNA, 25 bp, Homo sapien
gaacatctcaacactgattggcatc

SEQ ID NO: 749685 - DNA, 25 bp, Homo sapien
aagaggaggaacatctcaacactga

SEQ ID NO: 749686 - DNA, 25 bp, Homo sapien
gccaactttccagaggctagctgtt

SEQ ID NO: 749687 - DNA, 25 bp, Homo sapien
cgtggtcagctctcttgaggccaac

SEQ ID NO: 749688 - DNA, 25 bp, Homo sapien
ctgttgggaccagcggagttgacct

SEQ ID NO: 749689 - DNA, 25 bp, Homo sapien
ggacagcatatgcactgtcctctga

SEQ ID NO: 749690 - DNA, 25 bp, Homo sapien
ttaggatgggttctccagtgaattc

SEQ ID NO: 749691 - DNA, 25 bp, Homo sapien
taggatgggttctccagtgaattct

SEQ ID NO: 749692 - DNA, 25 bp, Homo sapien
gatgggttctccagtgaattctgac

SEQ ID NO: 749693 - DNA, 25 bp, Homo sapien
ggatgggttctccagtgaattctga

SEQ ID NO: 749694 - DNA, 25 bp, Homo sapien
gtaagttctgatagtggcattgtca

SEQ ID NO: 749695 - DNA, 25 bp, Homo sapien
ttcagtaagttctgatagtggcatt

SEQ ID NO: 749696 - DNA, 25 bp, Homo sapien
cagtaagttctgatagtggcattgt

SEQ ID NO: 749697 - DNA, 25 bp, Homo sapien
taagttctgatagtggcattgtcat

SEQ ID NO: 749698 - DNA, 25 bp, Homo sapien
gggtagaggtatggggagcagagat

SEQ ID NO: 749699 - DNA, 25 bp, Homo sapien
tagaggtatggggagcagagatgcc

SEQ ID NO: 749700 - DNA, 25 bp, Homo sapien
caggggtagaggtatggggagcaga

SEQ ID NO: 749701 - DNA, 25 bp, Homo sapien
tgtcaggggtagaggtatggggagc

SEQ ID NO: 749702 - DNA, 25 bp, Homo sapien
ggccaccagatattgcactttgaaa

SEQ ID NO: 749703 - DNA, 25 bp, Homo sapien
tgaagttgctaactgcttgcagtac

SEQ ID NO: 749704 - DNA, 25 bp, Homo sapien
cttgcagtactgtggtgctgcaggc

SEQ ID NO: 749705 - DNA, 25 bp, Homo sapien
gccaggccaccagatattgcacttt

SEQ ID NO: 749706 - DNA, 25 bp, Homo sapien
gcctgcatcctgagcggctgtttct

SEQ ID NO: 749707 - DNA, 25 bp, Homo sapien
cctgcatcctgagcggctgtttctg

SEQ ID NO: 749708 - DNA, 25 bp, Homo sapien
tgctttctgcatttcagctaaggca

SEQ ID NO: 749709 - DNA, 25 bp, Homo sapien
taaggcatttagaagtccacattgg

SEQ ID NO: 749710 - DNA, 25 bp, Homo sapien
ttttctccgagcttggaaacctagc

SEQ ID NO: 749711 - DNA, 25 bp, Homo sapien
cgagcttggaaacctagccttgttc

SEQ ID NO: 749712 - DNA, 25 bp, Homo sapien
tctccgagcttggaaacctagcctt

SEQ ID NO: 749713 - DNA, 25 bp, Homo sapien
gcttggaaacctagccttgttctac

SEQ ID NO: 749714 - DNA, 25 bp, Homo sapien
tcagtcagtgtaagaagacagcctt

SEQ ID NO: 749715 - DNA, 25 bp, Homo sapien
ggtataggtttactctgcttcctct

SEQ ID NO: 749716 - DNA, 25 bp, Homo sapien
tgaggtgcacatggtataggtttac

SEQ ID NO: 749717 - DNA, 25 bp, Homo sapien
cagtcagtgtaagaagacagccttg

SEQ ID NO: 749718 - DNA, 25 bp, Homo sapien
tggtactgagagcacaagactcgtc

SEQ ID NO: 749719 - DNA, 25 bp, Homo sapien
cagggcttagtcaagtggaaggctc

SEQ ID NO: 749720 - DNA, 25 bp, Homo sapien
tgaacagtgctgcagccttgctggg

SEQ ID NO: 749721 - DNA, 25 bp, Homo sapien
acattgcccttggagtgaacagtgc

SEQ ID NO: 749722 - DNA, 25 bp, Homo sapien
ggaaaaccacacgagcttctctatt

SEQ ID NO: 749723 - DNA, 25 bp, Homo sapien
atagctgaatcctctaagagaagca

SEQ ID NO: 749724 - DNA, 25 bp, Homo sapien
tcttgtatattcctgcgaatagctg

SEQ ID NO: 749725 - DNA, 25 bp, Homo sapien
tgctgatgtgttgtgacttgtacca

SEQ ID NO: 749726 - DNA, 25 bp, Homo sapien
tggctaatgttcgtacagtatgaga

SEQ ID NO: 749727 - DNA, 25 bp, Homo sapien
tatttgtttctagcataggaaaact

SEQ ID NO: 749728 - DNA, 25 bp, Homo sapien
ggaaggatgatagctttctttgcat

SEQ ID NO: 749729 - DNA, 25 bp, Homo sapien
tgagaagtttttagtccactggact

SEQ ID NO: 749730 - DNA, 25 bp, Homo sapien
tgtctgtgctctccgtcaatgccaa

SEQ ID NO: 749731 - DNA, 25 bp, Homo sapien
tagaatctgggatctcatcactaga

SEQ ID NO: 749732 - DNA, 25 bp, Homo sapien
ccaggtaattgtagtctgaagcccc

SEQ ID NO: 749733 - DNA, 25 bp, Homo sapien
tactctcatgcaggcagaaacccag

SEQ ID NO: 749734 - DNA, 25 bp, Homo sapien
ctgtaaatggttaagatcaattagt

SEQ ID NO: 749735 - DNA, 25 bp, Homo sapien
aaatggttaagatcaattagttgta

SEQ ID NO: 749736 - DNA, 25 bp, Homo sapien
tctgtaaatggttaagatcaattag

SEQ ID NO: 749737 - DNA, 25 bp, Homo sapien
gtaaatggttaagatcaattagttg

SEQ ID NO: 749738 - DNA, 25 bp, Homo sapien
tttgaggaagaggaaatacagaact

SEQ ID NO: 749739 - DNA, 25 bp, Homo sapien
ttgaggaagaggaaatacagaactc

SEQ ID NO: 749740 - DNA, 25 bp, Homo sapien
ctttgaggaagaggaaatacagaac

SEQ ID NO: 749741 - DNA, 25 bp, Homo sapien
gaggaagaggaaatacagaactcag

SEQ ID NO: 749742 - DNA, 25 bp, Homo sapien
cccgggaatcggagcggagagtggc

SEQ ID NO: 749743 - DNA, 25 bp, Homo sapien
tcgtggaaatctcggcttcggagag

SEQ ID NO: 749744 - DNA, 25 bp, Homo sapien
ggagctttgtggagcttcgtggaaa

SEQ ID NO: 749745 - DNA, 25 bp, Homo sapien
tctccgccgagaccgagagaggcgg

SEQ ID NO: 749746 - DNA, 25 bp, Homo sapien
taattagtgcctccaaacgccgtgt

SEQ ID NO: 749747 - DNA, 25 bp, Homo sapien
gccgacccagagtgtaagtgcgtgt

SEQ ID NO: 749748 - DNA, 25 bp, Homo sapien
taaagtagcgttcaaacagcccacc

SEQ ID NO: 749749 - DNA, 25 bp, Homo sapien
gatgcaaaatgtgtctctggccagc

SEQ ID NO: 749750 - DNA, 25 bp, Homo sapien
tgactgtcatgcaatcgattaataa

SEQ ID NO: 749751 - DNA, 25 bp, Homo sapien
caagtgtatagtggttagcattcat

SEQ ID NO: 749752 - DNA, 25 bp, Homo sapien
catgcaatcgattaataaccattac

SEQ ID NO: 749753 - DNA, 25 bp, Homo sapien
aataaccattacaagtgtatagtgg

SEQ ID NO: 749754 - DNA, 25 bp, Homo sapien
ataaactaccggcatgtccacctgg

SEQ ID NO: 749755 - DNA, 25 bp, Homo sapien
atatgagcaactgggttgaaatgga

SEQ ID NO: 749756 - DNA, 25 bp, Homo sapien
gctaccacacactggagataaacta

SEQ ID NO: 749757 - DNA, 25 bp, Homo sapien
tccccacagggcagtgaatatgagc

SEQ ID NO: 749758 - DNA, 25 bp, Homo sapien
ttaaacatggcttgcgtttcccaca

SEQ ID NO: 749759 - DNA, 25 bp, Homo sapien
cccagtatgtgtgtactcatctgaa

SEQ ID NO: 749760 - DNA, 25 bp, Homo sapien
tgtgtactcatctgaatgcagctgc

SEQ ID NO: 749761 - DNA, 25 bp, Homo sapien
cattccccagtatgtgtgtactcat

SEQ ID NO: 749762 - DNA, 25 bp, Homo sapien
accttcactgttttgtcagcaagat

SEQ ID NO: 749763 - DNA, 25 bp, Homo sapien
gaccttcactgttttgtcagcaaga

SEQ ID NO: 749764 - DNA, 25 bp, Homo sapien
cttcactgttttgtcagcaagatct

SEQ ID NO: 749765 - DNA, 25 bp, Homo sapien
ccttcactgttttgtcagcaagatc

SEQ ID NO: 749766 - DNA, 25 bp, Homo sapien
ctaaagaggagaggagcctcccttt

SEQ ID NO: 749767 - DNA, 25 bp, Homo sapien
tgcctggattctccctgaacactcg

SEQ ID NO: 749768 - DNA, 25 bp, Homo sapien
catgaccacatgaggatggctttgc

SEQ ID NO: 749769 - DNA, 25 bp, Homo sapien
gatacttaattgttctcccatgacc

SEQ ID NO: 749770 - DNA, 25 bp, Homo sapien
gaacactcggagaatgttttcttcc

SEQ ID NO: 749771 - DNA, 25 bp, Homo sapien
ctaaagttctcaagcttagggaatg

SEQ ID NO: 749772 - DNA, 25 bp, Homo sapien
gatgtaagtacaggagcagattcat

SEQ ID NO: 749773 - DNA, 25 bp, Homo sapien
caagcttagggaatgatgtaagtac

SEQ ID NO: 749774 - DNA, 25 bp, Homo sapien
tcccttcttgccctaaagttctcaa

SEQ ID NO: 749775 - DNA, 25 bp, Homo sapien
aaagtccccgaaataagacactgat

SEQ ID NO: 749776 - DNA, 25 bp, Homo sapien
cgggaaatctccaccttgagcaact

SEQ ID NO: 749777 - DNA, 25 bp, Homo sapien
agtccccgaaataagacactgattg

SEQ ID NO: 749778 - DNA, 25 bp, Homo sapien
cccgaaataagacactgattgaaaa

SEQ ID NO: 749779 - DNA, 25 bp, Homo sapien
agagcatggcccctagagcacactg

SEQ ID NO: 749780 - DNA, 25 bp, Homo sapien
agcatggcccctagagcacactggt

SEQ ID NO: 749781 - DNA, 25 bp, Homo sapien
catggcccctagagcacactggtgc

SEQ ID NO: 749782 - DNA, 25 bp, Homo sapien
cagagcatggcccctagagcacact

SEQ ID NO: 749783 - DNA, 25 bp, Homo sapien
gctggctctgcatagttactgatac

SEQ ID NO: 749784 - DNA, 25 bp, Homo sapien
tctgcatagttactgataccatatg

SEQ ID NO: 749785 - DNA, 25 bp, Homo sapien
gccgctggctctgcatagttactga

SEQ ID NO: 749786 - DNA, 25 bp, Homo sapien
tcacgccgctggctctgcatagtta

SEQ ID NO: 749787 - DNA, 25 bp, Homo sapien
gaagtgacagagtggtcacgcttag

SEQ ID NO: 749788 - DNA, 25 bp, Homo sapien
acagagtggtcacgcttagttgtcg

SEQ ID NO: 749789 - DNA, 25 bp, Homo sapien
tggtcacgcttagttgtcgtggcat

SEQ ID NO: 749790 - DNA, 25 bp, Homo sapien
ttctgaagtgacagagtggtcacgc

SEQ ID NO: 749791 - DNA, 25 bp, Homo sapien
tagtggatttgtcaactgctttttc

SEQ ID NO: 749792 - DNA, 25 bp, Homo sapien
cttagtggatttgtcaactgctttt

SEQ ID NO: 749793 - DNA, 25 bp, Homo sapien
ctgctttttcaggctcaggaatcat

SEQ ID NO: 749794 - DNA, 25 bp, Homo sapien
tgtcaactgctttttcaggctcagg

SEQ ID NO: 749795 - DNA, 25 bp, Homo sapien
caaatagaaagcttgcaggggaggc

SEQ ID NO: 749796 - DNA, 25 bp, Homo sapien
ggcagcttctcaccccttttaggaa

SEQ ID NO: 749797 - DNA, 25 bp, Homo sapien
aggaggagggcaaatagaaagcttg

SEQ ID NO: 749798 - DNA, 25 bp, Homo sapien
gaggcagcttctcaccccttttagg

SEQ ID NO: 749799 - DNA, 25 bp, Homo sapien
agcatatcctctcctaggcaaaacc

SEQ ID NO: 749800 - DNA, 25 bp, Homo sapien
ggcaaaaccttgtgaaggagtggca

SEQ ID NO: 749801 - DNA, 25 bp, Homo sapien
tgaagcatatcctctcctaggcaaa

SEQ ID NO: 749802 - DNA, 25 bp, Homo sapien
caaaaccttgtgaaggagtggcaga

SEQ ID NO: 749803 - DNA, 25 bp, Homo sapien
tttaacatgtgtgaaccaggtatcc

SEQ ID NO: 749804 - DNA, 25 bp, Homo sapien
cttgcctttgcaaggtacagtgaga

SEQ ID NO: 749805 - DNA, 25 bp, Homo sapien
ttcttatggaaatattgcccaggag

SEQ ID NO: 749806 - DNA, 25 bp, Homo sapien
caggtatcccttagatctgatgtga

SEQ ID NO: 749807 - DNA, 25 bp, Homo sapien
tatagtgtatgttcaccccaacccc

SEQ ID NO: 749808 - DNA, 25 bp, Homo sapien
tgcactgaccctgacaccttgacag

SEQ ID NO: 749809 - DNA, 25 bp, Homo sapien
aaaggctaccttggatgcgttgcac

SEQ ID NO: 749810 - DNA, 25 bp, Homo sapien
gaagagcaagtagggctgttcccac

SEQ ID NO: 749811 - DNA, 25 bp, Homo sapien
aatagaaccagctgtcttgtaagct

SEQ ID NO: 749812 - DNA, 25 bp, Homo sapien
aaaatagaaccagctgtcttgtaag

SEQ ID NO: 749813 - DNA, 25 bp, Homo sapien
ctgtcttgtaagctgggtcttcccc

SEQ ID NO: 749814 - DNA, 25 bp, Homo sapien
gaaccagctgtcttgtaagctgggt

SEQ ID NO: 749815 - DNA, 25 bp, Homo sapien
acctccacttctcatttcatccaca

SEQ ID NO: 749816 - DNA, 25 bp, Homo sapien
aaactggtacattccacctccactt

SEQ ID NO: 749817 - DNA, 25 bp, Homo sapien
cttgaaactggtacattccacctcc

SEQ ID NO: 749818 - DNA, 25 bp, Homo sapien
gaaactggtacattccacctccact

SEQ ID NO: 749819 - DNA, 25 bp, Homo sapien
tctggaggtgccctaagagtgtagc

SEQ ID NO: 749820 - DNA, 25 bp, Homo sapien
gataacagacatcctgaaagctggc

SEQ ID NO: 749821 - DNA, 25 bp, Homo sapien
agagtgtagctttggataacagaca

SEQ ID NO: 749822 - DNA, 25 bp, Homo sapien
gatcagattggaaagcccgagagtc

SEQ ID NO: 749823 - DNA, 25 bp, Homo sapien
catgagttttccgggtaatttattg

SEQ ID NO: 749824 - DNA, 25 bp, Homo sapien
gcctgctagtgtgttataattagca

SEQ ID NO: 749825 - DNA, 25 bp, Homo sapien
caataaaaacgtgcctactccatag

SEQ ID NO: 749826 - DNA, 25 bp, Homo sapien
tgcctttttgcctgctagtgtgtta

SEQ ID NO: 749827 - DNA, 25 bp, Homo sapien
ttcgctgactcctttctcggactca

SEQ ID NO: 749828 - DNA, 25 bp, Homo sapien
tctgagcaagacaaccttggagtct

SEQ ID NO: 749829 - DNA, 25 bp, Homo sapien
tttggatcatcagaaagaaccgtgg

SEQ ID NO: 749830 - DNA, 25 bp, Homo sapien
catgccctattaaaggaagtaccag

SEQ ID NO: 749831 - DNA, 25 bp, Homo sapien
ggtcgaggacctgttctggatctac

SEQ ID NO: 749832 - DNA, 25 bp, Homo sapien
tgttcattcctactacagggtcgag

SEQ ID NO: 749833 - DNA, 25 bp, Homo sapien
tgtgaacaggactcaatgacctctg

SEQ ID NO: 749834 - DNA, 25 bp, Homo sapien
tctgcaatgtttggcctcctgtgaa

SEQ ID NO: 749835 - DNA, 25 bp, Homo sapien
tttgccaacattatccttcagagcc

SEQ ID NO: 749836 - DNA, 25 bp, Homo sapien
tggacacaaacatcactaacagaag

SEQ ID NO: 749837 - DNA, 25 bp, Homo sapien
ccctctcagatggtgtctggacaca

SEQ ID NO: 749838 - DNA, 25 bp, Homo sapien
tccagctggcaccatttgaatatga

SEQ ID NO: 749839 - DNA, 25 bp, Homo sapien
gaaatgtcttgactctaagcctcct

SEQ ID NO: 749840 - DNA, 25 bp, Homo sapien
acagctgagttgaacaaggtcaagg

SEQ ID NO: 749841 - DNA, 25 bp, Homo sapien
taacagaataacacacagaggacaa

SEQ ID NO: 749842 - DNA, 25 bp, Homo sapien
gaaagctagcataatcctcataaca

SEQ ID NO: 749843 - DNA, 25 bp, Homo sapien
tcagactggagcaatgtatggccca

SEQ ID NO: 749844 - DNA, 25 bp, Homo sapien
taatcagctagcaattggaggaggc

SEQ ID NO: 749845 - DNA, 25 bp, Homo sapien
taaggctgcgccctctgaggagtga

SEQ ID NO: 749846 - DNA, 25 bp, Homo sapien
aaactgtgtacatgcctaaggctgc

SEQ ID NO: 749847 - DNA, 25 bp, Homo sapien
gtgagaagtgtgaaaagtgaggctc

SEQ ID NO: 749848 - DNA, 25 bp, Homo sapien
tgagaagtgtgaaaagtgaggctct

SEQ ID NO: 749849 - DNA, 25 bp, Homo sapien
tggtgagaagtgtgaaaagtgaggc

SEQ ID NO: 749850 - DNA, 25 bp, Homo sapien
cagctatggtgagaagtgtgaaaag

SEQ ID NO: 749851 - DNA, 25 bp, Homo sapien
accaccgagcagtcagtgatgaagg

SEQ ID NO: 749852 - DNA, 25 bp, Homo sapien
tgcttccaaccaccgagcagtcagt

SEQ ID NO: 749853 - DNA, 25 bp, Homo sapien
tccaaccaccgagcagtcagtgatg

SEQ ID NO: 749854 - DNA, 25 bp, Homo sapien
tttgcttccaaccaccgagcagtca

SEQ ID NO: 749855 - DNA, 25 bp, Homo sapien
gaagcattgggatatccacatgcca

SEQ ID NO: 749856 - DNA, 25 bp, Homo sapien
catctgtatgaagcattgggatatc

SEQ ID NO: 749857 - DNA, 25 bp, Homo sapien
ccatagcatctgtatgaagcattgg

SEQ ID NO: 749858 - DNA, 25 bp, Homo sapien
tatccacatgccatgcttccaggtg

SEQ ID NO: 749859 - DNA, 25 bp, Homo sapien
cttaaaatggcagaaagtgaaggct

SEQ ID NO: 749860 - DNA, 25 bp, Homo sapien
ttaaaatggcagaaagtgaaggctg

SEQ ID NO: 749861 - DNA, 25 bp, Homo sapien
caaacccaaggattgtgataaatca

SEQ ID NO: 749862 - DNA, 25 bp, Homo sapien
tatgcctgtgcatgtaggatcttca

SEQ ID NO: 749863 - DNA, 25 bp, Homo sapien
agaagggtggagaacccatatggat

SEQ ID NO: 749864 - DNA, 25 bp, Homo sapien
cagtgctctttgacacaaacccaag

SEQ ID NO: 749865 - DNA, 25 bp, Homo sapien
aagatccaaaactgacaccctaaca

SEQ ID NO: 749866 - DNA, 25 bp, Homo sapien
gcaggaaagatccaaaactgacacc

SEQ ID NO: 749867 - DNA, 25 bp, Homo sapien
aagcaggaaagatccaaaactgaca

SEQ ID NO: 749868 - DNA, 25 bp, Homo sapien
gatccaaaactgacaccctaacatc

SEQ ID NO: 749869 - DNA, 25 bp, Homo sapien
tggaggatgcctgcttacatcagca

SEQ ID NO: 749870 - DNA, 25 bp, Homo sapien
tggaggtgaaatcccacaatatgcc

SEQ ID NO: 749871 - DNA, 25 bp, Homo sapien
taaaagttatgctttcggaggagcc

SEQ ID NO: 749872 - DNA, 25 bp, Homo sapien
agtagagttctccagacaaacggaa

SEQ ID NO: 749873 - DNA, 25 bp, Homo sapien
atgtgttgcttccaataccagttcc

SEQ ID NO: 749874 - DNA, 25 bp, Homo sapien
tgtgttgcttccaataccagttccc

SEQ ID NO: 749875 - DNA, 25 bp, Homo sapien
tgcttccaataccagttccctttcc

SEQ ID NO: 749876 - DNA, 25 bp, Homo sapien
tgttgcttccaataccagttccctt

SEQ ID NO: 749877 - DNA, 25 bp, Homo sapien
ccggttttcgtatgtggatgtgctc

SEQ ID NO: 749878 - DNA, 25 bp, Homo sapien
ctactcatattcttcccggttttcg

SEQ ID NO: 749879 - DNA, 25 bp, Homo sapien
tgctcttagattctgtatgtggatg

SEQ ID NO: 749880 - DNA, 25 bp, Homo sapien
tatgtggatgtgtaatgtgctcagt

SEQ ID NO: 749881 - DNA, 25 bp, Homo sapien
ttccaaataggattctgtttcaaca

SEQ ID NO: 749882 - DNA, 25 bp, Homo sapien
tccaaataggattctgtttcaacag

SEQ ID NO: 749883 - DNA, 25 bp, Homo sapien
cagatttctcagtgatggctacaga

SEQ ID NO: 749884 - DNA, 25 bp, Homo sapien
tgatggctacagagatgggccacat

SEQ ID NO: 749885 - DNA, 25 bp, Homo sapien
ctcagtgatggctacagagatgggc

SEQ ID NO: 749886 - DNA, 25 bp, Homo sapien
gaaaatccagatttctcagtgatgg

SEQ ID NO: 749887 - DNA, 25 bp, Homo sapien
cagttatgtagaacgctgaagtcca

SEQ ID NO: 749888 - DNA, 25 bp, Homo sapien
caaagacatgtaattctggagtact

SEQ ID NO: 749889 - DNA, 25 bp, Homo sapien
gaagtccagagaattaagtgaccta

SEQ ID NO: 749890 - DNA, 25 bp, Homo sapien
caggttaggcattactgacttattg

SEQ ID NO: 749891 - DNA, 25 bp, Homo sapien
tctcttatccagtctacaacttcca

SEQ ID NO: 749892 - DNA, 25 bp, Homo sapien
gaccatccaggaactcccttagctg

SEQ ID NO: 749893 - DNA, 25 bp, Homo sapien
cttagctgagcatctcttatccagt

SEQ ID NO: 749894 - DNA, 25 bp, Homo sapien
aagaccatccaggaactcccttagc

SEQ ID NO: 749895 - DNA, 25 bp, Homo sapien
atttttgcatgcaatttcagaggat

SEQ ID NO: 749896 - DNA, 25 bp, Homo sapien
caatttcagaggattggtgtatcaa

SEQ ID NO: 749897 - DNA, 25 bp, Homo sapien
catgcaatttcagaggattggtgta

SEQ ID NO: 749898 - DNA, 25 bp, Homo sapien
tgcatgcaatttcagaggattggtg

SEQ ID NO: 749899 - DNA, 25 bp, Homo sapien
agggagggagagaaacacacacacg

SEQ ID NO: 749900 - DNA, 25 bp, Homo sapien
ggcaggcaggtaggcaggaaggaag

SEQ ID NO: 749901 - DNA, 25 bp, Homo sapien
aggcaggcaggtaggcaggaaggaa

SEQ ID NO: 749902 - DNA, 25 bp, Homo sapien
acacacacgcacaaaaggaagaaaa

SEQ ID NO: 749903 - DNA, 25 bp, Homo sapien
agccatgattgagtcgctaaactcc

SEQ ID NO: 749904 - DNA, 25 bp, Homo sapien
atgattgagtcgctaaactccagcc

SEQ ID NO: 749905 - DNA, 25 bp, Homo sapien
tgattgagtcgctaaactccagcct

SEQ ID NO: 749906 - DNA, 25 bp, Homo sapien
ccatgattgagtcgctaaactccag

SEQ ID NO: 749907 - DNA, 25 bp, Homo sapien
tgtttttctgcaaatgtctccgaat

SEQ ID NO: 749908 - DNA, 25 bp, Homo sapien
ggcctgttttagatctgttcctgtg

SEQ ID NO: 749909 - DNA, 25 bp, Homo sapien
gcaaatgtctccgaattggcctgtt

SEQ ID NO: 749910 - DNA, 25 bp, Homo sapien
tgaagaaaatttgacgcttaacttg

SEQ ID NO: 749911 - DNA, 25 bp, Homo sapien
ccacctgccacctgattttataaat

SEQ ID NO: 749912 - DNA, 25 bp, Homo sapien
ttttactggagcataactacaccta

SEQ ID NO: 749913 - DNA, 25 bp, Homo sapien
caaactatagccaaagggcccaatc

SEQ ID NO: 749914 - DNA, 25 bp, Homo sapien
tatcatctagataaaaagtttgcaa

SEQ ID NO: 749915 - DNA, 25 bp, Homo sapien
gaaaatttgtatttgacagcaataa

SEQ ID NO: 749916 - DNA, 25 bp, Homo sapien
gactttctgtctatgtgttccgaga

SEQ ID NO: 749917 - DNA, 25 bp, Homo sapien
tgtttgagaagaaagtaagattatt

SEQ ID NO: 749918 - DNA, 25 bp, Homo sapien
aaaatagagtgtatatcttccgaac

SEQ ID NO: 749919 - DNA, 25 bp, Homo sapien
gacttggcatagagtgtacacttga

SEQ ID NO: 749920 - DNA, 25 bp, Homo sapien
aattataatgccacaactagagtca

SEQ ID NO: 749921 - DNA, 25 bp, Homo sapien
ggtgattataatgttacccgtttca

SEQ ID NO: 749922 - DNA, 25 bp, Homo sapien
tataccacttgatttgaatattagc

SEQ ID NO: 749923 - DNA, 25 bp, Homo sapien
cttggcccattgagagtcactttgc

SEQ ID NO: 749924 - DNA, 25 bp, Homo sapien
gcccattgagagtcactttgccatt

SEQ ID NO: 749925 - DNA, 25 bp, Homo sapien
ctttgccattggagggaaacatcca

SEQ ID NO: 749926 - DNA, 25 bp, Homo sapien
ttaagctgccttttacagggatttc

SEQ ID NO: 749927 - DNA, 25 bp, Homo sapien
attcataggaaagcattataaatta

SEQ ID NO: 749928 - DNA, 25 bp, Homo sapien
ttattcataggaaagcattataaat

SEQ ID NO: 749929 - DNA, 25 bp, Homo sapien
tattcataggaaagcattataaatt

SEQ ID NO: 749930 - DNA, 25 bp, Homo sapien
ggaactaacattgcgataaactaag

SEQ ID NO: 749931 - DNA, 25 bp, Homo sapien
gactggatgctgaacaatcactcca

SEQ ID NO: 749932 - DNA, 25 bp, Homo sapien
taaactaagtaaagcacccagcgta

SEQ ID NO: 749933 - DNA, 25 bp, Homo sapien
attagacacgtttggtggctcacac

SEQ ID NO: 749934 - DNA, 25 bp, Homo sapien
acctgctggccacagtcttctaggg

SEQ ID NO: 749935 - DNA, 25 bp, Homo sapien
ctgacgctaatacctgctggccaca

SEQ ID NO: 749936 - DNA, 25 bp, Homo sapien
ctcctgacgctaatacctgctggcc

SEQ ID NO: 749937 - DNA, 25 bp, Homo sapien
ctgctggccacagtcttctagggat

SEQ ID NO: 749938 - DNA, 25 bp, Homo sapien
gaaccaaccagaactgtgtggacat

SEQ ID NO: 749939 - DNA, 25 bp, Homo sapien
tgaaactcttcacgcacaggcaaga

SEQ ID NO: 749940 - DNA, 25 bp, Homo sapien
ttaggctcaatcaacacaactgtct

SEQ ID NO: 749941 - DNA, 25 bp, Homo sapien
gatagtgctggttaccaagcagcca

SEQ ID NO: 749942 - DNA, 25 bp, Homo sapien
cactttacacccaaacagagacgtg

SEQ ID NO: 749943 - DNA, 25 bp, Homo sapien
aatataatctgccaacaagttcagc

SEQ ID NO: 749944 - DNA, 25 bp, Homo sapien
tcaacctttgtcttggagcccaata

SEQ ID NO: 749945 - DNA, 25 bp, Homo sapien
aagttcagctgccacgccaacaaaa

SEQ ID NO: 749946 - DNA, 25 bp, Homo sapien
ctaaaggtgaggatgcaagttctgg

SEQ ID NO: 749947 - DNA, 25 bp, Homo sapien
taaaggtgaggatgcaagttctggt

SEQ ID NO: 749948 - DNA, 25 bp, Homo sapien
aggtgaggatgcaagttctggttac

SEQ ID NO: 749949 - DNA, 25 bp, Homo sapien
aaggtgaggatgcaagttctggtta

SEQ ID NO: 749950 - DNA, 25 bp, Homo sapien
gcttctggatttgagctatcctttc

SEQ ID NO: 749951 - DNA, 25 bp, Homo sapien
aggcttctggatttgagctatcctt

SEQ ID NO: 749952 - DNA, 25 bp, Homo sapien
tctggatttgagctatcctttctct

SEQ ID NO: 749953 - DNA, 25 bp, Homo sapien
atcctttctctcctcacttgaggag

SEQ ID NO: 749954 - DNA, 25 bp, Homo sapien
tttctttgtcattctctatattcac

SEQ ID NO: 749955 - DNA, 25 bp, Homo sapien
tcattctctatattcaccccttctt

SEQ ID NO: 749956 - DNA, 25 bp, Homo sapien
ctttgtcattctctatattcacccc

SEQ ID NO: 749957 - DNA, 25 bp, Homo sapien
tctatattcaccccttcttccaaga

SEQ ID NO: 749958 - DNA, 25 bp, Homo sapien
tcttgattcttgaccactcaataca

SEQ ID NO: 749959 - DNA, 25 bp, Homo sapien
ttgaccactcaatacaaggaaccag

SEQ ID NO: 749960 - DNA, 25 bp, Homo sapien
aaggaaccagccctacccaagccat

SEQ ID NO: 749961 - DNA, 25 bp, Homo sapien
tgcagattcaccttcttgattcttg

SEQ ID NO: 749962 - DNA, 25 bp, Homo sapien
atgtggccgctcattcctccttgct

SEQ ID NO: 749963 - DNA, 25 bp, Homo sapien
tgatgtggccgctcattcctccttg

SEQ ID NO: 749964 - DNA, 25 bp, Homo sapien
ggcctggtccctctgatgtggccgc

SEQ ID NO: 749965 - DNA, 25 bp, Homo sapien
gtccctctgatgtggccgctcattc

SEQ ID NO: 749966 - DNA, 25 bp, Homo sapien
ttagaggactaggaggatgccgtgc

SEQ ID NO: 749967 - DNA, 25 bp, Homo sapien
gaggactaggaggatgccgtgccag

SEQ ID NO: 749968 - DNA, 25 bp, Homo sapien
gaaccaggagccctggatgcctcac

SEQ ID NO: 749969 - DNA, 25 bp, Homo sapien
ctaggaggatgccgtgccaggaacc

SEQ ID NO: 749970 - DNA, 25 bp, Homo sapien
tgtcattcttggaatgttctctttc

SEQ ID NO: 749971 - DNA, 25 bp, Homo sapien
tcattcttggaatgttctctttcat

SEQ ID NO: 749972 - DNA, 25 bp, Homo sapien
gtcattcttggaatgttctctttca

SEQ ID NO: 749973 - DNA, 25 bp, Homo sapien
ctgtcattcttggaatgttctcttt

SEQ ID NO: 749974 - DNA, 25 bp, Homo sapien
tctccaatatacttttgctaaggag

SEQ ID NO: 749975 - DNA, 25 bp, Homo sapien
taatattttcctgggatctggtctt

SEQ ID NO: 749976 - DNA, 25 bp, Homo sapien
tttcctgggatctggtctttcttta

SEQ ID NO: 749977 - DNA, 25 bp, Homo sapien
tattttcctgggatctggtctttct

SEQ ID NO: 749978 - DNA, 25 bp, Homo sapien
atcgttgccagatatgagaaacaca

SEQ ID NO: 749979 - DNA, 25 bp, Homo sapien
gatcgttgccagatatgagaaacac

SEQ ID NO: 749980 - DNA, 25 bp, Homo sapien
tcgttgccagatatgagaaacacat

SEQ ID NO: 749981 - DNA, 25 bp, Homo sapien
tgaaagtaaagtaagtagcacatca

SEQ ID NO: 749982 - DNA, 25 bp, Homo sapien
tcctttggctattggcctagtagga

SEQ ID NO: 749983 - DNA, 25 bp, Homo sapien
taagtagcacatcacttgtcccaag

SEQ ID NO: 749984 - DNA, 25 bp, Homo sapien
gtaggattgactcctaattgatgaa

SEQ ID NO: 749985 - DNA, 25 bp, Homo sapien
aattcctggaggtattgtggccagg

SEQ ID NO: 749986 - DNA, 25 bp, Homo sapien
gggtgtcactataggatcgcaagag

SEQ ID NO: 749987 - DNA, 25 bp, Homo sapien
tataggatcgcaagaggaattcctg

SEQ ID NO: 749988 - DNA, 25 bp, Homo sapien
aataagcactatgaagtagaggctg

SEQ ID NO: 749989 - DNA, 25 bp, Homo sapien
ggatcaccacatagaataggaacgt

SEQ ID NO: 749990 - DNA, 25 bp, Homo sapien
cactcacaaatttgcagaagggcag

SEQ ID NO: 749991 - DNA, 25 bp, Homo sapien
tgaggtaggtcaagcgaaatggcac

SEQ ID NO: 749992 - DNA, 25 bp, Homo sapien
attccataccgggagacaaccaggg

SEQ ID NO: 749993 - DNA, 25 bp, Homo sapien
aaaatgcaaccttgctgttacaggc

SEQ ID NO: 749994 - DNA, 25 bp, Homo sapien
cagctaattgctgttacactcaaga

SEQ ID NO: 749995 - DNA, 25 bp, Homo sapien
tacaggcattggaatgcgtcacaac

SEQ ID NO: 749996 - DNA, 25 bp, Homo sapien
gtaaagagtggcgtagcttctgcac

SEQ ID NO: 749997 - DNA, 25 bp, Homo sapien
gatcaggttgccagtggttacatct

SEQ ID NO: 749998 - DNA, 25 bp, Homo sapien
tctgatcaggttgccagtggttaca

SEQ ID NO: 749999 - DNA, 25 bp, Homo sapien
tacatctttgtaaccacaccctgtc

SEQ ID NO: 750000 - DNA, 25 bp, Homo sapien
gttacatctttgtaaccacaccctg

SEQ ID NO: 750001 - DNA, 25 bp, Homo sapien
cacaaagggcattgagcataacttc

SEQ ID NO: 750002 - DNA, 25 bp, Homo sapien
tctgaagatagtggctgctggctac

SEQ ID NO: 750003 - DNA, 25 bp, Homo sapien
tacccctatgagtggcttttcagca

SEQ ID NO: 750004 - DNA, 25 bp, Homo sapien
tcataattggaacccgatggacaca

SEQ ID NO: 750005 - DNA, 25 bp, Homo sapien
ctgcctaatgcacgcaatgcatgtg

SEQ ID NO: 750006 - DNA, 25 bp, Homo sapien
ctcctgcctaatgcacgcaatgcat

SEQ ID NO: 750007 - DNA, 25 bp, Homo sapien
aatgcacgcaatgcatgtggcctcc

SEQ ID NO: 750008 - DNA, 25 bp, Homo sapien
cctaatgcacgcaatgcatgtggcc

SEQ ID NO: 750009 - DNA, 25 bp, Homo sapien
tatgctaagctgctcagtgacgggc

SEQ ID NO: 750010 - DNA, 25 bp, Homo sapien
gaggagatatcatccaacctggtga

SEQ ID NO: 750011 - DNA, 25 bp, Homo sapien
caagggtctgatcatggcgtttaca

SEQ ID NO: 750012 - DNA, 25 bp, Homo sapien
ttatgaatgatacagaggaaccagc

SEQ ID NO: 750013 - DNA, 25 bp, Homo sapien
ccaaggttaggagtacgaattatct

SEQ ID NO: 750014 - DNA, 25 bp, Homo sapien
tggaggattcgcacactgttttggt

SEQ ID NO: 750015 - DNA, 25 bp, Homo sapien
tcaatggaagactctgactgacact

SEQ ID NO: 750016 - DNA, 25 bp, Homo sapien
gactgacactgattctagtcggcca

SEQ ID NO: 750017 - DNA, 25 bp, Homo sapien
tcataaagtatctctctttattcat

SEQ ID NO: 750018 - DNA, 25 bp, Homo sapien
ttcataaagtatctctctttattca

SEQ ID NO: 750019 - DNA, 25 bp, Homo sapien
attcataaagtatctctctttattc

SEQ ID NO: 750020 - DNA, 25 bp, Homo sapien
tgtattctcagcagtaagcgtccaa

SEQ ID NO: 750021 - DNA, 25 bp, Homo sapien
ttcagaatgaaaacgacctgtggca

SEQ ID NO: 750022 - DNA, 25 bp, Homo sapien
cctgtggcatgacttcctgtgagac

SEQ ID NO: 750023 - DNA, 25 bp, Homo sapien
tttgctaatcatgatcagggcaggc

SEQ ID NO: 750024 - DNA, 25 bp, Homo sapien
taacatcataaccattcctgcagtg

SEQ ID NO: 750025 - DNA, 25 bp, Homo sapien
gattgtaccgatcattgattggcta

SEQ ID NO: 750026 - DNA, 25 bp, Homo sapien
tgcagtgccactaagtacaaccaca

SEQ ID NO: 750027 - DNA, 25 bp, Homo sapien
gagtgcagcactatgatattgaaga

SEQ ID NO: 750028 - DNA, 25 bp, Homo sapien
ctgagtaacttggatctatgccata

SEQ ID NO: 750029 - DNA, 25 bp, Homo sapien
aattcaaagcatcgttgttctgagt

SEQ ID NO: 750030 - DNA, 25 bp, Homo sapien
caaagcatcgttgttctgagtaact

SEQ ID NO: 750031 - DNA, 25 bp, Homo sapien
agcatcgttgttctgagtaacttgg

SEQ ID NO: 750032 - DNA, 25 bp, Homo sapien
cattgtcatccgtagtgacaatcac

SEQ ID NO: 750033 - DNA, 25 bp, Homo sapien
ggtcaaagagcttttatcagttgaa

SEQ ID NO: 750034 - DNA, 25 bp, Homo sapien
tcaggtcaaagagcttttatcagtt

SEQ ID NO: 750035 - DNA, 25 bp, Homo sapien
aggaagaggatcacaaccattgtca

SEQ ID NO: 750036 - DNA, 25 bp, Homo sapien
tgctggaggtacaagcaaaacaatc

SEQ ID NO: 750037 - DNA, 25 bp, Homo sapien
tataaggtacctgcactagctgtga

SEQ ID NO: 750038 - DNA, 25 bp, Homo sapien
cagcagtgatacaagggatagaagg

SEQ ID NO: 750039 - DNA, 25 bp, Homo sapien
actggactcctttgaatatggtggc

SEQ ID NO: 750040 - DNA, 25 bp, Homo sapien
gctgtagactttcctcttaacaatg

SEQ ID NO: 750041 - DNA, 25 bp, Homo sapien
gctagtggtctacaagtcttattta

SEQ ID NO: 750042 - DNA, 25 bp, Homo sapien
cattgtttaccccaaattactcaag

SEQ ID NO: 750043 - DNA, 25 bp, Homo sapien
tctaaatttgatgtggccatttagt

SEQ ID NO: 750044 - DNA, 25 bp, Homo sapien
tgaagtcatagcacaaactgctgct

SEQ ID NO: 750045 - DNA, 25 bp, Homo sapien
tccagctcactctagctagatagag

SEQ ID NO: 750046 - DNA, 25 bp, Homo sapien
gctgggatggtatcaagcctaacta

SEQ ID NO: 750047 - DNA, 25 bp, Homo sapien
caaggagattgggtgttgcctctcc

SEQ ID NO: 750048 - DNA, 25 bp, Homo sapien
tggtgatgtacaagtactctagcat

SEQ ID NO: 750049 - DNA, 25 bp, Homo sapien
gtcatcatgtatttagtgtggaacc

SEQ ID NO: 750050 - DNA, 25 bp, Homo sapien
tcattgtcatcatgtatttagtgtg

SEQ ID NO: 750051 - DNA, 25 bp, Homo sapien
aacctggtgatgtacaagtactcta

SEQ ID NO: 750052 - DNA, 25 bp, Homo sapien
gtttggcatgaaactcaatctggtt

SEQ ID NO: 750053 - DNA, 25 bp, Homo sapien
tgtttggcatgaaactcaatctggt

SEQ ID NO: 750054 - DNA, 25 bp, Homo sapien
ctgtttggcatgaaactcaatctgg

SEQ ID NO: 750055 - DNA, 25 bp, Homo sapien
gaatggtgagggacaatctccctag

SEQ ID NO: 750056 - DNA, 25 bp, Homo sapien
gacaatctccctagtatcttgccat

SEQ ID NO: 750057 - DNA, 25 bp, Homo sapien
tgtcagggtgccagacgagttgttc

SEQ ID NO: 750058 - DNA, 25 bp, Homo sapien
gacgagttgttctcctgcagaatgg

SEQ ID NO: 750059 - DNA, 25 bp, Homo sapien
cttttcagaagttgcccagttccaa

SEQ ID NO: 750060 - DNA, 25 bp, Homo sapien
gtcttccacttttcagaagttgccc

SEQ ID NO: 750061 - DNA, 25 bp, Homo sapien
cattttcacttagtgaagactgctt

SEQ ID NO: 750062 - DNA, 25 bp, Homo sapien
ttttcacttagtgaagactgcttac

SEQ ID NO: 750063 - DNA, 25 bp, Homo sapien
atgtgaggaattcatgtgagggcat

SEQ ID NO: 750064 - DNA, 25 bp, Homo sapien
tgatgtgaggaattcatgtgagggc

SEQ ID NO: 750065 - DNA, 25 bp, Homo sapien
tgtgaggaattcatgtgagggcatg

SEQ ID NO: 750066 - DNA, 25 bp, Homo sapien
tgaggaattcatgtgagggcatgac

SEQ ID NO: 750067 - DNA, 25 bp, Homo sapien
gcgtggtctgggaaagtcccttgag

SEQ ID NO: 750068 - DNA, 25 bp, Homo sapien
cgtggtctgggaaagtcccttgaga

SEQ ID NO: 750069 - DNA, 25 bp, Homo sapien
ctgagcaacaaagatgccagtggtg

SEQ ID NO: 750070 - DNA, 25 bp, Homo sapien
ctgggtacaaggtcagcaggaggca

SEQ ID NO: 750071 - DNA, 25 bp, Homo sapien
gtcagcaggaggcagatctggagga

SEQ ID NO: 750072 - DNA, 25 bp, Homo sapien
acaaggtcagcaggaggcagatctg

SEQ ID NO: 750073 - DNA, 25 bp, Homo sapien
gtacaaggtcagcaggaggcagatc

SEQ ID NO: 750074 - DNA, 25 bp, Homo sapien
gttgaaatgactcccgttgtgttcc

SEQ ID NO: 750075 - DNA, 25 bp, Homo sapien
cctgtgcgatgaccctgtcgtgaga

SEQ ID NO: 750076 - DNA, 25 bp, Homo sapien
caaggatcagaataggcttcctgaa

SEQ ID NO: 750077 - DNA, 25 bp, Homo sapien
gctgcttggagtaccaaggatcaga

SEQ ID NO: 750078 - DNA, 25 bp, Homo sapien
tctcaagacgtccataaggtggcag

SEQ ID NO: 750079 - DNA, 25 bp, Homo sapien
tccagttttaggtctcagttccgag

SEQ ID NO: 750080 - DNA, 25 bp, Homo sapien
tgtcaagtacccagaagagtcagaa

SEQ ID NO: 750081 - DNA, 25 bp, Homo sapien
cagataaacatctacgcgaccacgt

SEQ ID NO: 750082 - DNA, 25 bp, Homo sapien
cagtctgcagaacactataggatta

SEQ ID NO: 750083 - DNA, 25 bp, Homo sapien
tataggattacttgtaatgtaagtc

SEQ ID NO: 750084 - DNA, 25 bp, Homo sapien
tagtgacaaacgctctcagttctgt

SEQ ID NO: 750085 - DNA, 25 bp, Homo sapien
catcagaattgccatctcgtttcat

SEQ ID NO: 750086 - DNA, 25 bp, Homo sapien
gttcttaacttactaactcacatac

SEQ ID NO: 750087 - DNA, 25 bp, Homo sapien
gagttcttaacttactaactcacat

SEQ ID NO: 750088 - DNA, 25 bp, Homo sapien
tcttaacttactaactcacatactt

SEQ ID NO: 750089 - DNA, 25 bp, Homo sapien
gaagagttcttaacttactaactca

SEQ ID NO: 750090 - DNA, 25 bp, Homo sapien
ttctatatccgagcaaatctgccag

SEQ ID NO: 750091 - DNA, 25 bp, Homo sapien
gactcagcgagttgcaataaaccaa

SEQ ID NO: 750092 - DNA, 25 bp, Homo sapien
tacaactgcaacctgttgggaactg

SEQ ID NO: 750093 - DNA, 25 bp, Homo sapien
gaatgggtgaacctattacaactgc

SEQ ID NO: 750094 - DNA, 25 bp, Homo sapien
cctccgtgtccttcgtctccttcgt

SEQ ID NO: 750095 - DNA, 25 bp, Homo sapien
tccgtgtccttcgtctccttcgtct

SEQ ID NO: 750096 - DNA, 25 bp, Homo sapien
cgtgtccttcgtctccttcgtcttc

SEQ ID NO: 750097 - DNA, 25 bp, Homo sapien
tcctccgtgtccttcgtctccttcg

SEQ ID NO: 750098 - DNA, 25 bp, Homo sapien
gcagatttgatcatatctctcctcg

SEQ ID NO: 750099 - DNA, 25 bp, Homo sapien
cccaagtgcagatttgatcatatct

SEQ ID NO: 750100 - DNA, 25 bp, Homo sapien
tgtgactggccacgctttacagcat

SEQ ID NO: 750101 - DNA, 25 bp, Homo sapien
catacacctcaaatcggagcagaag

SEQ ID NO: 750102 - DNA, 25 bp, Homo sapien
caatgaaggaacaacgaagtcctgg

SEQ ID NO: 750103 - DNA, 25 bp, Homo sapien
ggttccaccatcacaagactctgtt

SEQ ID NO: 750104 - DNA, 25 bp, Homo sapien
accaggtggcgcctaaaatcctcca

SEQ ID NO: 750105 - DNA, 25 bp, Homo sapien
gtcctggttccaccatcacaagact

SEQ ID NO: 750106 - DNA, 25 bp, Homo sapien
taaatcggctccctcgttgtggccg

SEQ ID NO: 750107 - DNA, 25 bp, Homo sapien
ggtcctcctctaagctagactggga

SEQ ID NO: 750108 - DNA, 25 bp, Homo sapien
caggcccagaggatctaaatcggct

SEQ ID NO: 750109 - DNA, 25 bp, Homo sapien
tgacctcggcgaagttccattccag

SEQ ID NO: 750110 - DNA, 25 bp, Homo sapien
ctgtaactggacttctcgttttttg

SEQ ID NO: 750111 - DNA, 25 bp, Homo sapien
tggacttctcgttttttgcttgcca

SEQ ID NO: 750112 - DNA, 25 bp, Homo sapien
aactggacttctcgttttttgcttg

SEQ ID NO: 750113 - DNA, 25 bp, Homo sapien
ggacttctcgttttttgcttgccat

SEQ ID NO: 750114 - DNA, 25 bp, Homo sapien
catctcatcccacaggctttgatta

SEQ ID NO: 750115 - DNA, 25 bp, Homo sapien
acatctcatcccacaggctttgatt

SEQ ID NO: 750116 - DNA, 25 bp, Homo sapien
acaggctttgattattgatgactgt

SEQ ID NO: 750117 - DNA, 25 bp, Homo sapien
tttcttggtcaaagtggggactcta

SEQ ID NO: 750118 - DNA, 25 bp, Homo sapien
atagcagttatcccaatctggagcc

SEQ ID NO: 750119 - DNA, 25 bp, Homo sapien
tagcagttatcccaatctggagcca

SEQ ID NO: 750120 - DNA, 25 bp, Homo sapien
gccagacagccggggagtccttata

SEQ ID NO: 750121 - DNA, 25 bp, Homo sapien
gaatttcgtcttcgttcagttcatt

SEQ ID NO: 750122 - DNA, 25 bp, Homo sapien
aatgcagaatttcgtcttcgttcag

SEQ ID NO: 750123 - DNA, 25 bp, Homo sapien
gaataaaggttgcattgctctgcaa

SEQ ID NO: 750124 - DNA, 25 bp, Homo sapien
attgctctgcaaggtccacaccagg

SEQ ID NO: 750125 - DNA, 25 bp, Homo sapien
aaaaacaggttcacatttatctcta

SEQ ID NO: 750126 - DNA, 25 bp, Homo sapien
aaacaggttcacatttatctctaaa

SEQ ID NO: 750127 - DNA, 25 bp, Homo sapien
ggttcacatttatctctaaatggct

SEQ ID NO: 750128 - DNA, 25 bp, Homo sapien
caggttcacatttatctctaaatgg

SEQ ID NO: 750129 - DNA, 25 bp, Homo sapien
tagctatggtaattaacgttttaca

SEQ ID NO: 750130 - DNA, 25 bp, Homo sapien
gttcttgacttgataaactcagctc

SEQ ID NO: 750131 - DNA, 25 bp, Homo sapien
gagttctacctccaatttgcatgtc

SEQ ID NO: 750132 - DNA, 25 bp, Homo sapien
tcatcctcatgaatcctcttttagc

SEQ ID NO: 750133 - DNA, 25 bp, Homo sapien
gcaccctgaatcttttcgataattt

SEQ ID NO: 750134 - DNA, 25 bp, Homo sapien
gcatttgcaccctgaatcttttcga

SEQ ID NO: 750135 - DNA, 25 bp, Homo sapien
ttttattaacaagcggtgcatttgc

SEQ ID NO: 750136 - DNA, 25 bp, Homo sapien
tctcctcatcgatcaaattaataac

SEQ ID NO: 750137 - DNA, 25 bp, Homo sapien
tttcacatggtgattcttcactaac

SEQ ID NO: 750138 - DNA, 25 bp, Homo sapien
aacactttcacatggtgattcttca

SEQ ID NO: 750139 - DNA, 25 bp, Homo sapien
cactttcacatggtgattcttcact

SEQ ID NO: 750140 - DNA, 25 bp, Homo sapien
actttcacatggtgattcttcacta

SEQ ID NO: 750141 - DNA, 25 bp, Homo sapien
ccggtttgataatagcaatactgta

SEQ ID NO: 750142 - DNA, 25 bp, Homo sapien
atccggtttgataatagcaatactg

SEQ ID NO: 750143 - DNA, 25 bp, Homo sapien
ctaatcacagcatccggtttgataa

SEQ ID NO: 750144 - DNA, 25 bp, Homo sapien
tttttactaatcacagcatccggtt

SEQ ID NO: 750145 - DNA, 25 bp, Homo sapien
tgcttctataataaatccagctttg

SEQ ID NO: 750146 - DNA, 25 bp, Homo sapien
actgtcttatgctctgcttctataa

SEQ ID NO: 750147 - DNA, 25 bp, Homo sapien
ttcgactatagaagttgacaacttg

SEQ ID NO: 750148 - DNA, 25 bp, Homo sapien
ctggtctgctattcgactatagaag

SEQ ID NO: 750149 - DNA, 25 bp, Homo sapien
aagccacttgtcataaaagagacaa

SEQ ID NO: 750150 - DNA, 25 bp, Homo sapien
gcttaagccacttgtcataaaagag

SEQ ID NO: 750151 - DNA, 25 bp, Homo sapien
gagatacaactagaatatagcttaa

SEQ ID NO: 750152 - DNA, 25 bp, Homo sapien
ttaagccacttgtcataaaagagac

SEQ ID NO: 750153 - DNA, 25 bp, Homo sapien
taggttcggtgtcagtctgtggttc

SEQ ID NO: 750154 - DNA, 25 bp, Homo sapien
tcttcatcattccaggtgtaacctg

SEQ ID NO: 750155 - DNA, 25 bp, Homo sapien
acctgggcttcgacctcaggttgat

SEQ ID NO: 750156 - DNA, 25 bp, Homo sapien
tcaggttgatcctcagatcgttcgt

SEQ ID NO: 750157 - DNA, 25 bp, Homo sapien
aacagcagcgcataaaaccaacatt

SEQ ID NO: 750158 - DNA, 25 bp, Homo sapien
tctttccggtgcagcctgacaactg

SEQ ID NO: 750159 - DNA, 25 bp, Homo sapien
ccggtgcagcctgacaactgctttg

SEQ ID NO: 750160 - DNA, 25 bp, Homo sapien
agaggaataacaggcgcaaacagca

SEQ ID NO: 750161 - DNA, 25 bp, Homo sapien
gcttatcagttaagcttccctttga

SEQ ID NO: 750162 - DNA, 25 bp, Homo sapien
agttcaggagctccccaaactctcg

SEQ ID NO: 750163 - DNA, 25 bp, Homo sapien
gctccccaaactctcggtggagaaa

SEQ ID NO: 750164 - DNA, 25 bp, Homo sapien
ggtctgtggttgtctgcaggtcctt

SEQ ID NO: 750165 - DNA, 25 bp, Homo sapien
tgtcaaaatccaaaatataatttaa

SEQ ID NO: 750166 - DNA, 25 bp, Homo sapien
ctgtcaaaatccaaaatataattta

SEQ ID NO: 750167 - DNA, 25 bp, Homo sapien
tcaaaatccaaaatataatttaaga

SEQ ID NO: 750168 - DNA, 25 bp, Homo sapien
caaaatccaaaatataatttaagat

SEQ ID NO: 750169 - DNA, 25 bp, Homo sapien
ggtcgaagtaatgccaatgtctttt

SEQ ID NO: 750170 - DNA, 25 bp, Homo sapien
tgaaagagatttggtcgaagtaatg

SEQ ID NO: 750171 - DNA, 25 bp, Homo sapien
cagagctgagctaaatgttgtcttt

SEQ ID NO: 750172 - DNA, 25 bp, Homo sapien
aaaatcggggaagaaagcatccatg

SEQ ID NO: 750173 - DNA, 25 bp, Homo sapien
tctttttccgataatactacttgtc

SEQ ID NO: 750174 - DNA, 25 bp, Homo sapien
tgtgcttctttttccgataatacta

SEQ ID NO: 750175 - DNA, 25 bp, Homo sapien
taatactacttgtctttgctccagt

SEQ ID NO: 750176 - DNA, 25 bp, Homo sapien
cttgcacagtgcttgtgcttctttt

SEQ ID NO: 750177 - DNA, 25 bp, Homo sapien
tccagtattgcaagccattgtctct

SEQ ID NO: 750178 - DNA, 25 bp, Homo sapien
taattgtttccagtattgcaagcca

SEQ ID NO: 750179 - DNA, 25 bp, Homo sapien
taaaacaagggctagagatggacca

SEQ ID NO: 750180 - DNA, 25 bp, Homo sapien
tcttggtcccagtaattgtttccag

SEQ ID NO: 750181 - DNA, 25 bp, Homo sapien
tacaactggttgaccggcaaactgt

SEQ ID NO: 750182 - DNA, 25 bp, Homo sapien
tgaggtttaatcaagcctaaagtgc

SEQ ID NO: 750183 - DNA, 25 bp, Homo sapien
cggtttctaatgaatcgctgccata

SEQ ID NO: 750184 - DNA, 25 bp, Homo sapien
tgtatttccctttcagcggtttcta

SEQ ID NO: 750185 - DNA, 25 bp, Homo sapien
tccttaactatcttcaggatctgct

SEQ ID NO: 750186 - DNA, 25 bp, Homo sapien
atccagcctccttaactatcttcag

SEQ ID NO: 750187 - DNA, 25 bp, Homo sapien
ttcacctgtgtcagatcaaatccag

SEQ ID NO: 750188 - DNA, 25 bp, Homo sapien
tctatttgctcaggagttaggaaca

SEQ ID NO: 750189 - DNA, 25 bp, Homo sapien
gcaaagaacggtgctttcagaagac

SEQ ID NO: 750190 - DNA, 25 bp, Homo sapien
tgcaaagaacggtgctttcagaaga

SEQ ID NO: 750191 - DNA, 25 bp, Homo sapien
ctgcaaagaacggtgctttcagaag

SEQ ID NO: 750192 - DNA, 25 bp, Homo sapien
ccaaactgggctcggatggagtcag

SEQ ID NO: 750193 - DNA, 25 bp, Homo sapien
gttgggcccatcaatcgtctccatt

SEQ ID NO: 750194 - DNA, 25 bp, Homo sapien
gcattccacttggtcagaatcatga

SEQ ID NO: 750195 - DNA, 25 bp, Homo sapien
gtctccattctgcaacagcattcca

SEQ ID NO: 750196 - DNA, 25 bp, Homo sapien
cataggcgttagatgctccatggac

SEQ ID NO: 750197 - DNA, 25 bp, Homo sapien
aacaacctcttttgcttcataggcg

SEQ ID NO: 750198 - DNA, 25 bp, Homo sapien
agttttcctcaggatcctcaaagag

SEQ ID NO: 750199 - DNA, 25 bp, Homo sapien
cctcaaagagtctattaacaacctc

SEQ ID NO: 750200 - DNA, 25 bp, Homo sapien
gaacatatgtattatcttctcaaag

SEQ ID NO: 750201 - DNA, 25 bp, Homo sapien
ctgtgccaaatggttgtatattgac

SEQ ID NO: 750202 - DNA, 25 bp, Homo sapien
tattgttattatgcatagccattca

SEQ ID NO: 750203 - DNA, 25 bp, Homo sapien
caaatggttgtatattgacgtgaac

SEQ ID NO: 750204 - DNA, 25 bp, Homo sapien
gcctctgccgcttttgagatccgga

SEQ ID NO: 750205 - DNA, 25 bp, Homo sapien
cagtggtgccactagcatcctggga

SEQ ID NO: 750206 - DNA, 25 bp, Homo sapien
gaatcgcgcgggagctatttctgcc

SEQ ID NO: 750207 - DNA, 25 bp, Homo sapien
tctttccgcactgtgccgggagtgt

SEQ ID NO: 750208 - DNA, 25 bp, Homo sapien
cggtgcggaggggagcgcgtcctgg

SEQ ID NO: 750209 - DNA, 25 bp, Homo sapien
gcacccagggcgcccgggacggtgc

SEQ ID NO: 750210 - DNA, 25 bp, Homo sapien
cagggcgcccgggacggtgcggagg

SEQ ID NO: 750211 - DNA, 25 bp, Homo sapien
gtgcggaggggagcgcgtcctggca

SEQ ID NO: 750212 - DNA, 25 bp, Homo sapien
cgcccccaggctgcacaggccgcac

SEQ ID NO: 750213 - DNA, 25 bp, Homo sapien
tcgtaggagagcagggcgcggctgt

SEQ ID NO: 750214 - DNA, 25 bp, Homo sapien
gcacgcgctggttgagcccgtcgta

SEQ ID NO: 750215 - DNA, 25 bp, Homo sapien
ggatcagcgccttcctctcgtccag

SEQ ID NO: 750216 - DNA, 25 bp, Homo sapien
tgttgcgcccgctactttgctggta

SEQ ID NO: 750217 - DNA, 25 bp, Homo sapien
ttgatcccgccctggatgggtccct

SEQ ID NO: 750218 - DNA, 25 bp, Homo sapien
caccgcctcgctgggtgttactgag

SEQ ID NO: 750219 - DNA, 25 bp, Homo sapien
ccggaccatgctatccccaagagac

SEQ ID NO: 750220 - DNA, 25 bp, Homo sapien
aagagaccctcctcgcgaaagatct

SEQ ID NO: 750221 - DNA, 25 bp, Homo sapien
agcgcagaagacacgccctagactg

SEQ ID NO: 750222 - DNA, 25 bp, Homo sapien
agaagacacgccctagactgcaggg

SEQ ID NO: 750223 - DNA, 25 bp, Homo sapien
gaaagaaatgagatagcgcagaaga

SEQ ID NO: 750224 - DNA, 25 bp, Homo sapien
aatgagatagcgcagaagacacgcc

SEQ ID NO: 750225 - DNA, 25 bp, Homo sapien
agtccattggcgtttcaaaccatgg

SEQ ID NO: 750226 - DNA, 25 bp, Homo sapien
tgagaggaacacacttagggggaac

SEQ ID NO: 750227 - DNA, 25 bp, Homo sapien
aatgccataaagagaggccagtgag

SEQ ID NO: 750228 - DNA, 25 bp, Homo sapien
ggaaattcactttgcaactcctaat

SEQ ID NO: 750229 - DNA, 25 bp, Homo sapien
tgggcccgaggcatttcaaggtagc

SEQ ID NO: 750230 - DNA, 25 bp, Homo sapien
tactatcaaacagttcaggcgaggg

SEQ ID NO: 750231 - DNA, 25 bp, Homo sapien
agttaccttaggtgatagcagccct

SEQ ID NO: 750232 - DNA, 25 bp, Homo sapien
caactggcaaaacatgaatgacacc

SEQ ID NO: 750233 - DNA, 25 bp, Homo sapien
gtgcctcttccaaggtgagcttttg

SEQ ID NO: 750234 - DNA, 25 bp, Homo sapien
gagcagcgtcttccctgagagagct

SEQ ID NO: 750235 - DNA, 25 bp, Homo sapien
ctggtggcttctgagatgctctgga

SEQ ID NO: 750236 - DNA, 25 bp, Homo sapien
tccaaggtgagcttttggctgtcac

SEQ ID NO: 750237 - DNA, 25 bp, Homo sapien
gaagctgtaaggtgatgggcctcca

SEQ ID NO: 750238 - DNA, 25 bp, Homo sapien
attggcaatgtgtaggcaaatactc

SEQ ID NO: 750239 - DNA, 25 bp, Homo sapien
aaattacttaagaatgcagcctgag

SEQ ID NO: 750240 - DNA, 25 bp, Homo sapien
tatatctggatgaatattggcaatg

SEQ ID NO: 750241 - DNA, 25 bp, Homo sapien
ccagtgctccatggagagacccggg

SEQ ID NO: 750242 - DNA, 25 bp, Homo sapien
ggactccagtgctccatggagagac

SEQ ID NO: 750243 - DNA, 25 bp, Homo sapien
tacaataagcttcctttgttctaat

SEQ ID NO: 750244 - DNA, 25 bp, Homo sapien
gagttacaataagcttcctttgttc

SEQ ID NO: 750245 - DNA, 25 bp, Homo sapien
cttctcagactgcaatagttgttcc

SEQ ID NO: 750246 - DNA, 25 bp, Homo sapien
tgctgatatccctgttgtgtgcttc

SEQ ID NO: 750247 - DNA, 25 bp, Homo sapien
aaggcattcctagcttttgctgata

SEQ ID NO: 750248 - DNA, 25 bp, Homo sapien
agtgctagatatctgggctagaaag

SEQ ID NO: 750249 - DNA, 25 bp, Homo sapien
ggcagtttcacagttaccttttatg

SEQ ID NO: 750250 - DNA, 25 bp, Homo sapien
gttaccttttatgtaagtgggagca

SEQ ID NO: 750251 - DNA, 25 bp, Homo sapien
ttatgtaagtgggagcacactctaa

SEQ ID NO: 750252 - DNA, 25 bp, Homo sapien
aagtgggagcacactctaaaataac

SEQ ID NO: 750253 - DNA, 25 bp, Homo sapien
tggatggaccgagtgcctgtgcttc

SEQ ID NO: 750254 - DNA, 25 bp, Homo sapien
gaggcgaccccagagcaaatgactc

SEQ ID NO: 750255 - DNA, 25 bp, Homo sapien
tttgatgcgcatagctgatccggca

SEQ ID NO: 750256 - DNA, 25 bp, Homo sapien
actgccgagcagtcatgagtaaggg

SEQ ID NO: 750257 - DNA, 25 bp, Homo sapien
tcctggacggtgatctgctcctgag

SEQ ID NO: 750258 - DNA, 25 bp, Homo sapien
cgatggagtactggtcttcaaaggt

SEQ ID NO: 750259 - DNA, 25 bp, Homo sapien
aggaatgtcaagaggatcccagggc

SEQ ID NO: 750260 - DNA, 25 bp, Homo sapien
tgcttggtggcttggtcaatctgaa

SEQ ID NO: 750261 - DNA, 25 bp, Homo sapien
ttagatcccgttgccacatagtgag

SEQ ID NO: 750262 - DNA, 25 bp, Homo sapien
aagtaacctgcagacctaagtggag

SEQ ID NO: 750263 - DNA, 25 bp, Homo sapien
taaaagtaggctggtttgcacactc

SEQ ID NO: 750264 - DNA, 25 bp, Homo sapien
gataggcgtatatcagcagcagggc

SEQ ID NO: 750265 - DNA, 25 bp, Homo sapien
tccagttgggccatctggcacgtgc

SEQ ID NO: 750266 - DNA, 25 bp, Homo sapien
tttcctggacaggatagcaatcctt

SEQ ID NO: 750267 - DNA, 25 bp, Homo sapien
aaaaaccgcgtagacaatatcacac

SEQ ID NO: 750268 - DNA, 25 bp, Homo sapien
gggtctttaatacccagctggatgt

SEQ ID NO: 750269 - DNA, 25 bp, Homo sapien
tgaccaaaggagtgacagtacgagg

SEQ ID NO: 750270 - DNA, 25 bp, Homo sapien
tgtttatatcaattgggccatgcca

SEQ ID NO: 750271 - DNA, 25 bp, Homo sapien
tatacccgtgcatgcagaaaaccag

SEQ ID NO: 750272 - DNA, 25 bp, Homo sapien
ttctaggaaggccaaagtgcgggca

SEQ ID NO: 750273 - DNA, 25 bp, Homo sapien
cataaggaaaccagggacaagagag

SEQ ID NO: 750274 - DNA, 25 bp, Homo sapien
catgctcaagatgcaaggtgcaact

SEQ ID NO: 750275 - DNA, 25 bp, Homo sapien
tctacgaatacttagggcactgact

SEQ ID NO: 750276 - DNA, 25 bp, Homo sapien
ggaagtctctccctagcaatggaca

SEQ ID NO: 750277 - DNA, 25 bp, Homo sapien
tgcaaaagcaacagtatcaaagaat

SEQ ID NO: 750278 - DNA, 25 bp, Homo sapien
gcaacagtatcaaagaatgctttaa

SEQ ID NO: 750279 - DNA, 25 bp, Homo sapien
ttattgcaaaagcaacagtatcaaa

SEQ ID NO: 750280 - DNA, 25 bp, Homo sapien
caaaagcaacagtatcaaagaatgc

SEQ ID NO: 750281 - DNA, 25 bp, Homo sapien
cactggagtttagggaaggtaagag

SEQ ID NO: 750282 - DNA, 25 bp, Homo sapien
attatgtcaaatttaatttggcggg

SEQ ID NO: 750283 - DNA, 25 bp, Homo sapien
tatgtcaaatttaatttggcgggaa

SEQ ID NO: 750284 - DNA, 25 bp, Homo sapien
gcaagaggtgagcgttttgttttca

SEQ ID NO: 750285 - DNA, 25 bp, Homo sapien
agcaagaggtgagcgttttgttttc

SEQ ID NO: 750286 - DNA, 25 bp, Homo sapien
cattgggaatgatataactgcaacc

SEQ ID NO: 750287 - DNA, 25 bp, Homo sapien
cctgagtgtgttgtattcattgcac

SEQ ID NO: 750288 - DNA, 25 bp, Homo sapien
agagtacctattttgccatcagtta

SEQ ID NO: 750289 - DNA, 25 bp, Homo sapien
ccatcagttatcttggtgaaggaaa

SEQ ID NO: 750290 - DNA, 25 bp, Homo sapien
gcaatcttgctttcatcggacttca

SEQ ID NO: 750291 - DNA, 25 bp, Homo sapien
tcagacgaaattacaacattccagt

SEQ ID NO: 750292 - DNA, 25 bp, Homo sapien
ttgatgagactgcatttcaatggca

SEQ ID NO: 750293 - DNA, 25 bp, Homo sapien
agtgttcttttacatcagccccaat

SEQ ID NO: 750294 - DNA, 25 bp, Homo sapien
ggattacagcccacaccaatgaact

SEQ ID NO: 750295 - DNA, 25 bp, Homo sapien
tctgaggcccgatgttttgagacct

SEQ ID NO: 750296 - DNA, 25 bp, Homo sapien
caatccgcaatagaggtcacaccca

SEQ ID NO: 750297 - DNA, 25 bp, Homo sapien
cacaattcgggctatgacaatccgc

SEQ ID NO: 750298 - DNA, 25 bp, Homo sapien
atgatgctttaatcattgtcagctg

SEQ ID NO: 750299 - DNA, 25 bp, Homo sapien
ctttagcttatcatcttccaaagat

SEQ ID NO: 750300 - DNA, 25 bp, Homo sapien
tttagcttatcatcttccaaagatg

SEQ ID NO: 750301 - DNA, 25 bp, Homo sapien
gctttaatcattgtcagctggttat

SEQ ID NO: 750302 - DNA, 25 bp, Homo sapien
attgggattatcctctaattctaaa

SEQ ID NO: 750303 - DNA, 25 bp, Homo sapien
ccatctctcaggaacctgataataa

SEQ ID NO: 750304 - DNA, 25 bp, Homo sapien
ccacaaaattgggattatcctctaa

SEQ ID NO: 750305 - DNA, 25 bp, Homo sapien
catctctcaggaacctgataataaa

SEQ ID NO: 750306 - DNA, 25 bp, Homo sapien
ctacctctgatccttctgaagacca

SEQ ID NO: 750307 - DNA, 25 bp, Homo sapien
taatctctaagtacatcagttcaag

SEQ ID NO: 750308 - DNA, 25 bp, Homo sapien
gaaccatctggatggctcatttgac

SEQ ID NO: 750309 - DNA, 25 bp, Homo sapien
ggatggctcatttgactttgctcag

SEQ ID NO: 750310 - DNA, 25 bp, Homo sapien
gagcaactcatgctcctttggaagt

SEQ ID NO: 750311 - DNA, 25 bp, Homo sapien
gaaattgcatgctctttaaactggc

SEQ ID NO: 750312 - DNA, 25 bp, Homo sapien
gttgccccagtcttgagagtctggt

SEQ ID NO: 750313 - DNA, 25 bp, Homo sapien
caaacggattttgctgtcctttgag

SEQ ID NO: 750314 - DNA, 25 bp, Homo sapien
gctaagtaaacaccaaacaggatat

SEQ ID NO: 750315 - DNA, 25 bp, Homo sapien
cggagacaaggcattacatatagag

SEQ ID NO: 750316 - DNA, 25 bp, Homo sapien
ctaggaaagaaagcgagacaacagt

SEQ ID NO: 750317 - DNA, 25 bp, Homo sapien
taccttgaaagtagccggagacaag

SEQ ID NO: 750318 - DNA, 25 bp, Homo sapien
aaccactatgagagatgggcagatc

SEQ ID NO: 750319 - DNA, 25 bp, Homo sapien
gctctggactcaagattatctattt

SEQ ID NO: 750320 - DNA, 25 bp, Homo sapien
tgctgtctaatgttggataagtgaa

SEQ ID NO: 750321 - DNA, 25 bp, Homo sapien
gatctttgaattaagagctctggac

SEQ ID NO: 750322 - DNA, 25 bp, Homo sapien
ctgatcctacttggcagtctgtacc

SEQ ID NO: 750323 - DNA, 25 bp, Homo sapien
tcttgttttgcctatgccctctata

SEQ ID NO: 750324 - DNA, 25 bp, Homo sapien
tgcctatgccctctatattaatttt

SEQ ID NO: 750325 - DNA, 25 bp, Homo sapien
tgttttctgatcctacttggcagtc

SEQ ID NO: 750326 - DNA, 25 bp, Homo sapien
ttctccactttacttgatatcctcc

SEQ ID NO: 750327 - DNA, 25 bp, Homo sapien
tttcaatccactatccttattcaca

SEQ ID NO: 750328 - DNA, 25 bp, Homo sapien
tagctttactctcattaccactctc

SEQ ID NO: 750329 - DNA, 25 bp, Homo sapien
tcttccttgtttcaccacatctccc

SEQ ID NO: 750330 - DNA, 25 bp, Homo sapien
ctgtggccagtcagctgctgctgtc

SEQ ID NO: 750331 - DNA, 25 bp, Homo sapien
tgctgtccataccacagccctctcc

SEQ ID NO: 750332 - DNA, 25 bp, Homo sapien
tgctgctgtccataccacagccctc

SEQ ID NO: 750333 - DNA, 25 bp, Homo sapien
tgtggccagtcagctgctgctgtcc

SEQ ID NO: 750334 - DNA, 25 bp, Homo sapien
gagaatttggacatgttcttcaaac

SEQ ID NO: 750335 - DNA, 25 bp, Homo sapien
attctgaaccagacagccaatggga

SEQ ID NO: 750336 - DNA, 25 bp, Homo sapien
gagacgccgacaaagcattatgaat

SEQ ID NO: 750337 - DNA, 25 bp, Homo sapien
ccaacagttgcattgaatggaggtg

SEQ ID NO: 750338 - DNA, 25 bp, Homo sapien
tctaattgatggctgaggaaaacca

SEQ ID NO: 750339 - DNA, 25 bp, Homo sapien
catgacccaaagctgaatgagcaaa

SEQ ID NO: 750340 - DNA, 25 bp, Homo sapien
tgtagcatcctgtgagatccagtaa

SEQ ID NO: 750341 - DNA, 25 bp, Homo sapien
tccagtaatctaaattggcatgacc

SEQ ID NO: 750342 - DNA, 25 bp, Homo sapien
caaaagagacatggttgactgaaag

SEQ ID NO: 750343 - DNA, 25 bp, Homo sapien
aagtcctcaaaagcatagacaacaa

SEQ ID NO: 750344 - DNA, 25 bp, Homo sapien
tagagaaattggagtatattaaacc

SEQ ID NO: 750345 - DNA, 25 bp, Homo sapien
tcaaagattttacggctaagtcctc

SEQ ID NO: 750346 - DNA, 25 bp, Homo sapien
cgtacagcgaacacttgaggccaaa

SEQ ID NO: 750347 - DNA, 25 bp, Homo sapien
tgaagcatgagccattgacagtgac

SEQ ID NO: 750348 - DNA, 25 bp, Homo sapien
ggataggctacctcacgtacagcga

SEQ ID NO: 750349 - DNA, 25 bp, Homo sapien
cattcataagcaccccgaggatagg

SEQ ID NO: 750350 - DNA, 25 bp, Homo sapien
gctgcttttctaccaagctaaacac

SEQ ID NO: 750351 - DNA, 25 bp, Homo sapien
attattagcaatttgaccagtggct

SEQ ID NO: 750352 - DNA, 25 bp, Homo sapien
caagctaaacacgaggccatcatta

SEQ ID NO: 750353 - DNA, 25 bp, Homo sapien
agatcatacaccaactctcttccga

SEQ ID NO: 750354 - DNA, 25 bp, Homo sapien
gatggatgcccaatctgccagcagt

SEQ ID NO: 750355 - DNA, 25 bp, Homo sapien
agcagtagcaaccagcactgagtcc

SEQ ID NO: 750356 - DNA, 25 bp, Homo sapien
gatgcccaatctgccagcagtagca

SEQ ID NO: 750357 - DNA, 25 bp, Homo sapien
ccgctgatggatgcccaatctgcca

SEQ ID NO: 750358 - DNA, 25 bp, Homo sapien
tataagacccttagtctctcctcat

SEQ ID NO: 750359 - DNA, 25 bp, Homo sapien
agttggttccctcataagtgattag

SEQ ID NO: 750360 - DNA, 25 bp, Homo sapien
cactccctctggcatgcaaggtttc

SEQ ID NO: 750361 - DNA, 25 bp, Homo sapien
ccctctggaattactataatgtgta

SEQ ID NO: 750362 - DNA, 25 bp, Homo sapien
catgcatgggactgagctggtgacc

SEQ ID NO: 750363 - DNA, 25 bp, Homo sapien
tgcatgggactgagctggtgacccg

SEQ ID NO: 750364 - DNA, 25 bp, Homo sapien
tggtgacccggggagggagctgctg

SEQ ID NO: 750365 - DNA, 25 bp, Homo sapien
catgggactgagctggtgacccggg

SEQ ID NO: 750366 - DNA, 25 bp, Homo sapien
gcatctcgctcgagggaccaaagac

SEQ ID NO: 750367 - DNA, 25 bp, Homo sapien
ctcgagggaccaaagacccgactgg

SEQ ID NO: 750368 - DNA, 25 bp, Homo sapien
cacagctcgcatctcgctcgaggga

SEQ ID NO: 750369 - DNA, 25 bp, Homo sapien
tgacgtcgacgcacacagctcgcat

SEQ ID NO: 750370 - DNA, 25 bp, Homo sapien
cagcagccccgggacctccggcccg

SEQ ID NO: 750371 - DNA, 25 bp, Homo sapien
tggcccgggaactgcggatccgcgg

SEQ ID NO: 750372 - DNA, 25 bp, Homo sapien
ggaactgcggatccgcggtcgcgcc

SEQ ID NO: 750373 - DNA, 25 bp, Homo sapien
gggacccagtccagcggacaacgcg

SEQ ID NO: 750374 - DNA, 25 bp, Homo sapien
gaccgggacccagtccagcggacaa

SEQ ID NO: 750375 - DNA, 25 bp, Homo sapien
ccagtcaccaattcttggtccttct

SEQ ID NO: 750376 - DNA, 25 bp, Homo sapien
gcattacacccagtcaccaattctt

SEQ ID NO: 750377 - DNA, 25 bp, Homo sapien
tacacccagtcaccaattcttggtc

SEQ ID NO: 750378 - DNA, 25 bp, Homo sapien
tgtctggacaacccacgcattacac

SEQ ID NO: 750379 - DNA, 25 bp, Homo sapien
aacttatccaaactagtactgtgtc

SEQ ID NO: 750380 - DNA, 25 bp, Homo sapien
caaactagtactgtgtcaagtgatg

SEQ ID NO: 750381 - DNA, 25 bp, Homo sapien
agtactgtgtcaagtgatgaattca

SEQ ID NO: 750382 - DNA, 25 bp, Homo sapien
cttgctaaacttatccaaactagta

SEQ ID NO: 750383 - DNA, 25 bp, Homo sapien
aaagaaagccctctatatgcatcag

SEQ ID NO: 750384 - DNA, 25 bp, Homo sapien
tacatgagtaggaacccatctaacc

SEQ ID NO: 750385 - DNA, 25 bp, Homo sapien
agcatttagaacaactcctggcaca

SEQ ID NO: 750386 - DNA, 25 bp, Homo sapien
aaagacatggactagaggaggtacc

SEQ ID NO: 750387 - DNA, 25 bp, Homo sapien
ttaggagactaataaggtcacttcc

SEQ ID NO: 750388 - DNA, 25 bp, Homo sapien
ggagactaataaggtcacttccaca

SEQ ID NO: 750389 - DNA, 25 bp, Homo sapien
ctaataaggtcacttccacaagtac

SEQ ID NO: 750390 - DNA, 25 bp, Homo sapien
cagttgttgactatctttttccaga

SEQ ID NO: 750391 - DNA, 25 bp, Homo sapien
attgactttgccagcctgatctttc

SEQ ID NO: 750392 - DNA, 25 bp, Homo sapien
aacggtggggcctacatggatccat

SEQ ID NO: 750393 - DNA, 25 bp, Homo sapien
ttcacctagcctggaggcaattgac

SEQ ID NO: 750394 - DNA, 25 bp, Homo sapien
ccagttggcctcaatcttcacctag

SEQ ID NO: 750395 - DNA, 25 bp, Homo sapien
acattagacaggagtggtagtgcac

SEQ ID NO: 750396 - DNA, 25 bp, Homo sapien
cattagacaggagtggtagtgcaca

SEQ ID NO: 750397 - DNA, 25 bp, Homo sapien
cacaaagcttgcaaagcactaccgc

SEQ ID NO: 750398 - DNA, 25 bp, Homo sapien
cctagtggaaggtacagcaacaaca

SEQ ID NO: 750399 - DNA, 25 bp, Homo sapien
cgcctgtcagaattctaggagttaa

SEQ ID NO: 750400 - DNA, 25 bp, Homo sapien
ccagtagcagctcttaacacaaagc

SEQ ID NO: 750401 - DNA, 25 bp, Homo sapien
ctcaccatccctaaagagaagacac

SEQ ID NO: 750402 - DNA, 25 bp, Homo sapien
ctggaggagggttacaggagccttt

SEQ ID NO: 750403 - DNA, 25 bp, Homo sapien
cctcaccatccctaaagagaagaca

SEQ ID NO: 750404 - DNA, 25 bp, Homo sapien
ctattatccacagtaatgttacgaa

SEQ ID NO: 750405 - DNA, 25 bp, Homo sapien
tggaatggatattgcgcagagaagc

SEQ ID NO: 750406 - DNA, 25 bp, Homo sapien
tcctgacatcagatatgcctttctt

SEQ ID NO: 750407 - DNA, 25 bp, Homo sapien
tacgaataagaggtcaaaggtgaca

SEQ ID NO: 750408 - DNA, 25 bp, Homo sapien
aaaacaggcctactgaatttgtctt

SEQ ID NO: 750409 - DNA, 25 bp, Homo sapien
tgtcttacagcctatagtttgtcaa

SEQ ID NO: 750410 - DNA, 25 bp, Homo sapien
acaagaaaggtccaaatcaggagga

SEQ ID NO: 750411 - DNA, 25 bp, Homo sapien
gaaacaaatgataagagaaacgaac

SEQ ID NO: 750412 - DNA, 25 bp, Homo sapien
gcctccaggacaacttttccgatga

SEQ ID NO: 750413 - DNA, 25 bp, Homo sapien
tgtgcaaaatcttaaacctaggaac

SEQ ID NO: 750414 - DNA, 25 bp, Homo sapien
ttgcctttgtgggtcagagggtctc

SEQ ID NO: 750415 - DNA, 25 bp, Homo sapien
gcataaacctccaaatgcctccagg

SEQ ID NO: 750416 - DNA, 25 bp, Homo sapien
gacattttctagaacgccagttaga

SEQ ID NO: 750417 - DNA, 25 bp, Homo sapien
ggtcacgacagctctaagtcaaatt

SEQ ID NO: 750418 - DNA, 25 bp, Homo sapien
cttattaaacagcttgcccaaggcc

SEQ ID NO: 750419 - DNA, 25 bp, Homo sapien
catttgatcttcacatggacccatg

SEQ ID NO: 750420 - DNA, 25 bp, Homo sapien
tgtcttaggtcttggaaggccaaga

SEQ ID NO: 750421 - DNA, 25 bp, Homo sapien
ctgtcttaggtcttggaaggccaag

SEQ ID NO: 750422 - DNA, 25 bp, Homo sapien
actgtcttaggtcttggaaggccaa

SEQ ID NO: 750423 - DNA, 25 bp, Homo sapien
cactgtcttaggtcttggaaggcca

SEQ ID NO: 750424 - DNA, 25 bp, Homo sapien
tgcatcacctccttctctaatgtgt

SEQ ID NO: 750425 - DNA, 25 bp, Homo sapien
tagtagtcatactgcatcacctcct

SEQ ID NO: 750426 - DNA, 25 bp, Homo sapien
tctaatgtgttctcaatgcctccat

SEQ ID NO: 750427 - DNA, 25 bp, Homo sapien
aagaatagtagtcatactgcatcac

SEQ ID NO: 750428 - DNA, 25 bp, Homo sapien
gcatatgcaagtattaacactttaa

SEQ ID NO: 750429 - DNA, 25 bp, Homo sapien
ctgcacacagcatatgcaagtatta

SEQ ID NO: 750430 - DNA, 25 bp, Homo sapien
cgctattgcccaccaatggcgcagt

SEQ ID NO: 750431 - DNA, 25 bp, Homo sapien
ctttaaatcgaaaaactgccagaag

SEQ ID NO: 750432 - DNA, 25 bp, Homo sapien
tgcattagaactgtatcttctccca

SEQ ID NO: 750433 - DNA, 25 bp, Homo sapien
ctgcattagaactgtatcttctccc

SEQ ID NO: 750434 - DNA, 25 bp, Homo sapien
gcattagaactgtatcttctcccag

SEQ ID NO: 750435 - DNA, 25 bp, Homo sapien
taaagtgcataggtagggctctcgc

SEQ ID NO: 750436 - DNA, 25 bp, Homo sapien
gcttccggattaacagatggtctga

SEQ ID NO: 750437 - DNA, 25 bp, Homo sapien
tattctcccacatttcagcaggctg

SEQ ID NO: 750438 - DNA, 25 bp, Homo sapien
tcaggaaagggagtcaagtctggcc

SEQ ID NO: 750439 - DNA, 25 bp, Homo sapien
cttttgctagtaaaaaggcactggt

SEQ ID NO: 750440 - DNA, 25 bp, Homo sapien
tgaaaaacgaggcttcatcactgaa

SEQ ID NO: 750441 - DNA, 25 bp, Homo sapien
taactgtatagaaaaagtggtaggc

SEQ ID NO: 750442 - DNA, 25 bp, Homo sapien
gtatagaaaaagtggtaggccatac

SEQ ID NO: 750443 - DNA, 25 bp, Homo sapien
gatggtaactgtatagaaaaagtgg

SEQ ID NO: 750444 - DNA, 25 bp, Homo sapien
tacgaccaggaaagggaaatgcagt

SEQ ID NO: 750445 - DNA, 25 bp, Homo sapien
aatacgaccaggaaagggaaatgca

SEQ ID NO: 750446 - DNA, 25 bp, Homo sapien
gaaagggaaatgcagttaccacaaa

SEQ ID NO: 750447 - DNA, 25 bp, Homo sapien
ccaggaaagggaaatgcagttacca

SEQ ID NO: 750448 - DNA, 25 bp, Homo sapien
actttgaaatccaggaaccacgtct

SEQ ID NO: 750449 - DNA, 25 bp, Homo sapien
ggaaccacgtctcaatccaggcaag

SEQ ID NO: 750450 - DNA, 25 bp, Homo sapien
tgaaatgatgggcagcacatagcca

SEQ ID NO: 750451 - DNA, 25 bp, Homo sapien
cacgtctcaatccaggcaaggatga

SEQ ID NO: 750452 - DNA, 25 bp, Homo sapien
gtacaccttgttagctatgactcag

SEQ ID NO: 750453 - DNA, 25 bp, Homo sapien
tcttgaaactgcatgggtgtctgaa

SEQ ID NO: 750454 - DNA, 25 bp, Homo sapien
ctttggcaggattcatgagtacacc

SEQ ID NO: 750455 - DNA, 25 bp, Homo sapien
tgctgtatggatcacaatgggagac

SEQ ID NO: 750456 - DNA, 25 bp, Homo sapien
ttcaggaggggaataaaactgacca

SEQ ID NO: 750457 - DNA, 25 bp, Homo sapien
gaccaccaggtataagtgctgccct

SEQ ID NO: 750458 - DNA, 25 bp, Homo sapien
ctgaagcatcctgaactatcaggag

SEQ ID NO: 750459 - DNA, 25 bp, Homo sapien
ctgcttcggattcaggaggggaata

SEQ ID NO: 750460 - DNA, 25 bp, Homo sapien
tgagcatgggtatacacatatctgc

SEQ ID NO: 750461 - DNA, 25 bp, Homo sapien
aatcttttacggaaacaccatactg

SEQ ID NO: 750462 - DNA, 25 bp, Homo sapien
tctgctgacagctgtttgatttgtt

SEQ ID NO: 750463 - DNA, 25 bp, Homo sapien
gatgtacatacatgtcgtttatcca

SEQ ID NO: 750464 - DNA, 25 bp, Homo sapien
tctcagaagataagcagacaaggga

SEQ ID NO: 750465 - DNA, 25 bp, Homo sapien
taagcatgccatccagtgcattcag

SEQ ID NO: 750466 - DNA, 25 bp, Homo sapien
catcacagagtggaggcacttagca

SEQ ID NO: 750467 - DNA, 25 bp, Homo sapien
catttgctcatctctacattaggga

SEQ ID NO: 750468 - DNA, 25 bp, Homo sapien
tgctgcaggcaaaccaggatgcatg

SEQ ID NO: 750469 - DNA, 25 bp, Homo sapien
tttcaacccagtcatctgagagagg

SEQ ID NO: 750470 - DNA, 25 bp, Homo sapien
tgcggtctgatcaacaagcaagcct

SEQ ID NO: 750471 - DNA, 25 bp, Homo sapien
cttatctagacttgcacaggacagg

SEQ ID NO: 750472 - DNA, 25 bp, Homo sapien
tcctaagtgactaccaggtgggcag

SEQ ID NO: 750473 - DNA, 25 bp, Homo sapien
gatgattcacgttctggacaggacg

SEQ ID NO: 750474 - DNA, 25 bp, Homo sapien
taaaacagccacgatcaagaacagt

SEQ ID NO: 750475 - DNA, 25 bp, Homo sapien
tactgggatggtcaatctgataacc

SEQ ID NO: 750476 - DNA, 25 bp, Homo sapien
ttcatgtcatagagttaaagagttc

SEQ ID NO: 750477 - DNA, 25 bp, Homo sapien
tattatccataagagaacaaattca

SEQ ID NO: 750478 - DNA, 25 bp, Homo sapien
taatcccttacctcctccatatttg

SEQ ID NO: 750479 - DNA, 25 bp, Homo sapien
ttcaactgagtatccaaaagcaaga

SEQ ID NO: 750480 - DNA, 25 bp, Homo sapien
tagttctaaaagtggtttctcactg

SEQ ID NO: 750481 - DNA, 25 bp, Homo sapien
tcactgtcctgtttttcttcagctt

SEQ ID NO: 750482 - DNA, 25 bp, Homo sapien
tttctcactgtcctgtttttcttca

SEQ ID NO: 750483 - DNA, 25 bp, Homo sapien
tcatagttctaaaagtggtttctca

SEQ ID NO: 750484 - DNA, 25 bp, Homo sapien
taaaaggcaaaatgccacggtcacc

SEQ ID NO: 750485 - DNA, 25 bp, Homo sapien
tgtgacagacacacgaaggaccatg

SEQ ID NO: 750486 - DNA, 25 bp, Homo sapien
gacctggtaccagaaagtgtgggcc

SEQ ID NO: 750487 - DNA, 25 bp, Homo sapien
tttggagcccattaagcatgactgc

SEQ ID NO: 750488 - DNA, 25 bp, Homo sapien
caactttactgtcgacagggagact

SEQ ID NO: 750489 - DNA, 25 bp, Homo sapien
aagccagcagtggacgtcaccattt

SEQ ID NO: 750490 - DNA, 25 bp, Homo sapien
gcctcgatgactttctgtgagggtt

SEQ ID NO: 750491 - DNA, 25 bp, Homo sapien
gcctctttttgcctcgatgactttc

SEQ ID NO: 750492 - DNA, 25 bp, Homo sapien
ggaatacagcacaagactttcttca

SEQ ID NO: 750493 - DNA, 25 bp, Homo sapien
tgtgcatggatatggtacaacgtct

SEQ ID NO: 750494 - DNA, 25 bp, Homo sapien
gaatcatgacattaccttaccagcc

SEQ ID NO: 750495 - DNA, 25 bp, Homo sapien
tgttaacacatcaggctcagtctca

SEQ ID NO: 750496 - DNA, 25 bp, Homo sapien
catgtattcgcaattcctttcttcc

SEQ ID NO: 750497 - DNA, 25 bp, Homo sapien
tcaggccatacacataatgcaaaac

SEQ ID NO: 750498 - DNA, 25 bp, Homo sapien
ttttgcaagtccaacacttcaggcc

SEQ ID NO: 750499 - DNA, 25 bp, Homo sapien
ggctgaacgcaaaggaaacatgata

SEQ ID NO: 750500 - DNA, 25 bp, Homo sapien
ggtccatcagaggattgctcagcaa

SEQ ID NO: 750501 - DNA, 25 bp, Homo sapien
gatttcagcatcaaccagaccaagg

SEQ ID NO: 750502 - DNA, 25 bp, Homo sapien
tatgagacgctcatcctggttagac

SEQ ID NO: 750503 - DNA, 25 bp, Homo sapien
taccccaccgaaacatggcagagtg

SEQ ID NO: 750504 - DNA, 25 bp, Homo sapien
ggcacctgattcagagacactaata

SEQ ID NO: 750505 - DNA, 25 bp, Homo sapien
actgttcagacatggcaccttcggt

SEQ ID NO: 750506 - DNA, 25 bp, Homo sapien
ccagtatctgtaccttccagaggca

SEQ ID NO: 750507 - DNA, 25 bp, Homo sapien
gcacggagatgatcctaacattcca

SEQ ID NO: 750508 - DNA, 25 bp, Homo sapien
tctttagggcaaatacctggcctct

SEQ ID NO: 750509 - DNA, 25 bp, Homo sapien
cagccgaggtactgggcaatgtctc

SEQ ID NO: 750510 - DNA, 25 bp, Homo sapien
cctggcctctatagagaaatctgga

SEQ ID NO: 750511 - DNA, 25 bp, Homo sapien
gaggaaactttcagatcactaaggg

SEQ ID NO: 750512 - DNA, 25 bp, Homo sapien
cacaaacacctctgcatattacacg

SEQ ID NO: 750513 - DNA, 25 bp, Homo sapien
tgcatattacacgtacctcctcctg

SEQ ID NO: 750514 - DNA, 25 bp, Homo sapien
tcaagagtgtggtctattttgccat

SEQ ID NO: 750515 - DNA, 25 bp, Homo sapien
tgtggtctattttgccatcatcacc

SEQ ID NO: 750516 - DNA, 25 bp, Homo sapien
tgaatttagggtgtattggcctctt

SEQ ID NO: 750517 - DNA, 25 bp, Homo sapien
gatctactatgccaaatgtctattc

SEQ ID NO: 750518 - DNA, 25 bp, Homo sapien
aatgctccagcatgtttttaatagc

SEQ ID NO: 750519 - DNA, 25 bp, Homo sapien
caacatgtcgtagtaattctgacta

SEQ ID NO: 750520 - DNA, 25 bp, Homo sapien
gcttgtctactccaaagtgcctggt

SEQ ID NO: 750521 - DNA, 25 bp, Homo sapien
tttattgagagccagacaccatgct

SEQ ID NO: 750522 - DNA, 25 bp, Homo sapien
gaggcctagagaagctcagttactt

SEQ ID NO: 750523 - DNA, 25 bp, Homo sapien
tcagacctatgcaggagatcctctt

SEQ ID NO: 750524 - DNA, 25 bp, Homo sapien
gcaaccacagcggtttgctcagctg

SEQ ID NO: 750525 - DNA, 25 bp, Homo sapien
ccacagcggtttgctcagctgggtg

SEQ ID NO: 750526 - DNA, 25 bp, Homo sapien
aaccacagcggtttgctcagctggg

SEQ ID NO: 750527 - DNA, 25 bp, Homo sapien
gtgggcaaccacagcggtttgctca

SEQ ID NO: 750528 - DNA, 25 bp, Homo sapien
tgtgcctgctggattaggcaccaca

SEQ ID NO: 750529 - DNA, 25 bp, Homo sapien
caagataacctacacagaaactatc

SEQ ID NO: 750530 - DNA, 25 bp, Homo sapien
gcaccacagtgttagagttgtcaag

SEQ ID NO: 750531 - DNA, 25 bp, Homo sapien
gaaactatctccgagtctgtgcctg

SEQ ID NO: 750532 - DNA, 25 bp, Homo sapien
ggcatccatccaaggctttagcagt

SEQ ID NO: 750533 - DNA, 25 bp, Homo sapien
cacttgggcagttggaacaacctga

SEQ ID NO: 750534 - DNA, 25 bp, Homo sapien
gcccacatatcttggaaggcatcca

SEQ ID NO: 750535 - DNA, 25 bp, Homo sapien
cagcaaataagagtgcccacatatc

SEQ ID NO: 750536 - DNA, 25 bp, Homo sapien
ctcaggtacaggataaatgggacat

SEQ ID NO: 750537 - DNA, 25 bp, Homo sapien
acctcctcaggtacaggataaatgg

SEQ ID NO: 750538 - DNA, 25 bp, Homo sapien
caggtacaggataaatgggacattt

SEQ ID NO: 750539 - DNA, 25 bp, Homo sapien
tcctcaggtacaggataaatgggac

SEQ ID NO: 750540 - DNA, 25 bp, Homo sapien
cctcagtccgctggggagcacagaa

SEQ ID NO: 750541 - DNA, 25 bp, Homo sapien
gcacagaaatgttatccaaaggtgg

SEQ ID NO: 750542 - DNA, 25 bp, Homo sapien
cacagaaatgttatccaaaggtgga

SEQ ID NO: 750543 - DNA, 25 bp, Homo sapien
ggagcacagaaatgttatccaaagg

SEQ ID NO: 750544 - DNA, 25 bp, Homo sapien
gggacccgggcgatcttaaatgaca

SEQ ID NO: 750545 - DNA, 25 bp, Homo sapien
gagggacccgggcgatcttaaatga

SEQ ID NO: 750546 - DNA, 25 bp, Homo sapien
ggacccgggcgatcttaaatgacag

SEQ ID NO: 750547 - DNA, 25 bp, Homo sapien
ggcaggtgggcagagggcgcggcgg

SEQ ID NO: 750548 - DNA, 25 bp, Homo sapien
gtgggggcaggtgggcagagggcgc

SEQ ID NO: 750549 - DNA, 25 bp, Homo sapien
ggggcaggtgggcagagggcgcggc

SEQ ID NO: 750550 - DNA, 25 bp, Homo sapien
caggtgggcagagggcgcggcggga

SEQ ID NO: 750551 - DNA, 25 bp, Homo sapien
tggacgccatctaagccatgaggct

SEQ ID NO: 750552 - DNA, 25 bp, Homo sapien
gccatctaagccatgaggctcggct

SEQ ID NO: 750553 - DNA, 25 bp, Homo sapien
gacgccatctaagccatgaggctcg

SEQ ID NO: 750554 - DNA, 25 bp, Homo sapien
gccatggacgccatctaagccatga

SEQ ID NO: 750555 - DNA, 25 bp, Homo sapien
tcgtaggcgcaggaccccatctgca

SEQ ID NO: 750556 - DNA, 25 bp, Homo sapien
caggaactgccggatctcgtaggcg

SEQ ID NO: 750557 - DNA, 25 bp, Homo sapien
tcactctgcgtggtcgaacagtcca

SEQ ID NO: 750558 - DNA, 25 bp, Homo sapien
gggcagcgcgtgtgggggtctgctg

SEQ ID NO: 750559 - DNA, 25 bp, Homo sapien
ggcctcgctgaagccttcacacagg

SEQ ID NO: 750560 - DNA, 25 bp, Homo sapien
ttcagggcctcgctgaagccttcac

SEQ ID NO: 750561 - DNA, 25 bp, Homo sapien
tcgctgaagccttcacacagggaca

SEQ ID NO: 750562 - DNA, 25 bp, Homo sapien
gctgaagccttcacacagggacagg

SEQ ID NO: 750563 - DNA, 25 bp, Homo sapien
tgtggtccagctgtcggcaaagggt

SEQ ID NO: 750564 - DNA, 25 bp, Homo sapien
ttgtggtccagctgtcggcaaaggg

SEQ ID NO: 750565 - DNA, 25 bp, Homo sapien
ggtccagctgtcggcaaagggtaga

SEQ ID NO: 750566 - DNA, 25 bp, Homo sapien
tggtccagctgtcggcaaagggtag

SEQ ID NO: 750567 - DNA, 25 bp, Homo sapien
cttcagaggcatcatcaccagactt

SEQ ID NO: 750568 - DNA, 25 bp, Homo sapien
catcaccagacttttcaagttttgt

SEQ ID NO: 750569 - DNA, 25 bp, Homo sapien
gaggcatcatcaccagacttttcaa

SEQ ID NO: 750570 - DNA, 25 bp, Homo sapien
atggtcccaagttctttccctctca

SEQ ID NO: 750571 - DNA, 25 bp, Homo sapien
actgatgtgagtagacagtcgccat

SEQ ID NO: 750572 - DNA, 25 bp, Homo sapien
cataggaactgatgtgagtagacag

SEQ ID NO: 750573 - DNA, 25 bp, Homo sapien
ggctgcataggaactgatgtgagta

SEQ ID NO: 750574 - DNA, 25 bp, Homo sapien
tttcacccgtgggcgggctgcatag

SEQ ID NO: 750575 - DNA, 25 bp, Homo sapien
gacaggcatcgagggcatgaactac

SEQ ID NO: 750576 - DNA, 25 bp, Homo sapien
tcccgatccaacaaggccttgggca

SEQ ID NO: 750577 - DNA, 25 bp, Homo sapien
tgccccagccctacacaaaaggact

SEQ ID NO: 750578 - DNA, 25 bp, Homo sapien
tgggccctgcgcagccttgcatgct

SEQ ID NO: 750579 - DNA, 25 bp, Homo sapien
gggcactagggaagcttggtcatcc

SEQ ID NO: 750580 - DNA, 25 bp, Homo sapien
gtggtccgcaccaggatcagctaca

SEQ ID NO: 750581 - DNA, 25 bp, Homo sapien
gtcatcctgcagtgcgtggtccgca

SEQ ID NO: 750582 - DNA, 25 bp, Homo sapien
gctggccatgtccaagttggatgtg

SEQ ID NO: 750583 - DNA, 25 bp, Homo sapien
ccctggagatctgggatcttggtca

SEQ ID NO: 750584 - DNA, 25 bp, Homo sapien
tacaccttgactgcgttttgcccaa

SEQ ID NO: 750585 - DNA, 25 bp, Homo sapien
gagggcaagccctcctacaccttga

SEQ ID NO: 750586 - DNA, 25 bp, Homo sapien
tggtcagaatccttcaaacgccacc

SEQ ID NO: 750587 - DNA, 25 bp, Homo sapien
cccagtcttgtcaattttgctaata

SEQ ID NO: 750588 - DNA, 25 bp, Homo sapien
cagtcttgtcaattttgctaataac

SEQ ID NO: 750589 - DNA, 25 bp, Homo sapien
tcatcctgggaatacccaatttatc

SEQ ID NO: 750590 - DNA, 25 bp, Homo sapien
tgtcccagtcttgtcaattttgcta

SEQ ID NO: 750591 - DNA, 25 bp, Homo sapien
tctactgtgcatgtcggcttgtact

SEQ ID NO: 750592 - DNA, 25 bp, Homo sapien
gcatgtcggcttgtacttttgccag

SEQ ID NO: 750593 - DNA, 25 bp, Homo sapien
tcggcttgtacttttgccagtttct

SEQ ID NO: 750594 - DNA, 25 bp, Homo sapien
cttcttctctactgtgcatgtcggc

SEQ ID NO: 750595 - DNA, 25 bp, Homo sapien
caaaggccccggtatgcaggaatga

SEQ ID NO: 750596 - DNA, 25 bp, Homo sapien
tcacagctgatgtgtcaaaggcccc

SEQ ID NO: 750597 - DNA, 25 bp, Homo sapien
cacctggataagaagcacgtgaggc

SEQ ID NO: 750598 - DNA, 25 bp, Homo sapien
aagtgtactccacggaccacctgga

SEQ ID NO: 750599 - DNA, 25 bp, Homo sapien
aactctgaagtgctgggtgtgaacc

SEQ ID NO: 750600 - DNA, 25 bp, Homo sapien
tttagggccctaatcagaagcttcc

SEQ ID NO: 750601 - DNA, 25 bp, Homo sapien
aagcttcccggcagaatgagggtct

SEQ ID NO: 750602 - DNA, 25 bp, Homo sapien
gtgtgaacctgctgtgagactaccc

SEQ ID NO: 750603 - DNA, 25 bp, Homo sapien
gcaagctgtgaaacgcactcatttc

SEQ ID NO: 750604 - DNA, 25 bp, Homo sapien
caagctgtgaaacgcactcatttcc

SEQ ID NO: 750605 - DNA, 25 bp, Homo sapien
agcaagctgtgaaacgcactcattt

SEQ ID NO: 750606 - DNA, 25 bp, Homo sapien
gcaggacaaggtcctggcatcagca

SEQ ID NO: 750607 - DNA, 25 bp, Homo sapien
gcatcagcattagctgctgcaactc

SEQ ID NO: 750608 - DNA, 25 bp, Homo sapien
agctgctgcaactctgaagggcagg

SEQ ID NO: 750609 - DNA, 25 bp, Homo sapien
agatgtgaaaaggaagttggttcac

SEQ ID NO: 750610 - DNA, 25 bp, Homo sapien
ctaggacaacacaacaaccaagaga

SEQ ID NO: 750611 - DNA, 25 bp, Homo sapien
aacacaacaaccaagagagacattg

SEQ ID NO: 750612 - DNA, 25 bp, Homo sapien
aggacaacacaacaaccaagagaga

SEQ ID NO: 750613 - DNA, 25 bp, Homo sapien
cacaacaaccaagagagacattgtt

SEQ ID NO: 750614 - DNA, 25 bp, Homo sapien
agcctcatgtcctccacgtgtgctc

SEQ ID NO: 750615 - DNA, 25 bp, Homo sapien
aagcctcatgtcctccacgtgtgct

SEQ ID NO: 750616 - DNA, 25 bp, Homo sapien
gtttgtcatagcagagtatgtattg

SEQ ID NO: 750617 - DNA, 25 bp, Homo sapien
gtcatagcagagtatgtattgtttc

SEQ ID NO: 750618 - DNA, 25 bp, Homo sapien
tttggacccgctcagccaacatggt

SEQ ID NO: 750619 - DNA, 25 bp, Homo sapien
taggccgggagatttggacccgctc

SEQ ID NO: 750620 - DNA, 25 bp, Homo sapien
ctgcagatgcgaaaaggaacttggt

SEQ ID NO: 750621 - DNA, 25 bp, Homo sapien
cacgttcaacccttctcagagtggc

SEQ ID NO: 750622 - DNA, 25 bp, Homo sapien
aagcacgttcaacccttctcagagt

SEQ ID NO: 750623 - DNA, 25 bp, Homo sapien
tttaaagcacgttcaacccttctca

SEQ ID NO: 750624 - DNA, 25 bp, Homo sapien
taaagcacgttcaacccttctcaga

SEQ ID NO: 750625 - DNA, 25 bp, Homo sapien
cagcagcctcttgtcctgcatgtgt

SEQ ID NO: 750626 - DNA, 25 bp, Homo sapien
gaattctctgagctagcccaacaca

SEQ ID NO: 750627 - DNA, 25 bp, Homo sapien
aacacaacaactgagagggacactg

SEQ ID NO: 750628 - DNA, 25 bp, Homo sapien
tctatatacttcttacagaggtggt

SEQ ID NO: 750629 - DNA, 25 bp, Homo sapien
gggtggtccagtcattacgatcact

SEQ ID NO: 750630 - DNA, 25 bp, Homo sapien
tgaatgtctttatgcattgattatt

SEQ ID NO: 750631 - DNA, 25 bp, Homo sapien
atttgggtggtccagtcattacgat

SEQ ID NO: 750632 - DNA, 25 bp, Homo sapien
tttttcactgtttgtcatagtgccg

SEQ ID NO: 750633 - DNA, 25 bp, Homo sapien
tttatactgaatcatgtatccagtc

SEQ ID NO: 750634 - DNA, 25 bp, Homo sapien
agtcatggtccagagatcacagctg

SEQ ID NO: 750635 - DNA, 25 bp, Homo sapien
catgtatccagtcatggtccagaga

SEQ ID NO: 750636 - DNA, 25 bp, Homo sapien
gaatcatgtatccagtcatggtcca

SEQ ID NO: 750637 - DNA, 25 bp, Homo sapien
tcaactgccacaagatggcgcagaa

SEQ ID NO: 750638 - DNA, 25 bp, Homo sapien
caacatctgcagtccctcagctgga

SEQ ID NO: 750639 - DNA, 25 bp, Homo sapien
aaagggcctgaggagatgcgggagc

SEQ ID NO: 750640 - DNA, 25 bp, Homo sapien
caagatggcgcagaagaaagggcct

SEQ ID NO: 750641 - DNA, 25 bp, Homo sapien
cgttcaacccttctcagagtgacct

SEQ ID NO: 750642 - DNA, 25 bp, Homo sapien
gttcaacccttctcagagtgacctt

SEQ ID NO: 750643 - DNA, 25 bp, Homo sapien
gcacgttcaacccttctcagagtga

SEQ ID NO: 750644 - DNA, 25 bp, Homo sapien
cacgttcaacccttctcagagtgac

SEQ ID NO: 750645 - DNA, 25 bp, Homo sapien
cactataggtaacaatatttttggc

SEQ ID NO: 750646 - DNA, 25 bp, Homo sapien
gacactataggtaacaatatttttg

SEQ ID NO: 750647 - DNA, 25 bp, Homo sapien
ttctccctgacactataggtaacaa

SEQ ID NO: 750648 - DNA, 25 bp, Homo sapien
ccctgacactataggtaacaatatt

SEQ ID NO: 750649 - DNA, 25 bp, Homo sapien
tcttgctgaaggaagtaccggctac

SEQ ID NO: 750650 - DNA, 25 bp, Homo sapien
gtctcctggtgagtgcgctgcctac

SEQ ID NO: 750651 - DNA, 25 bp, Homo sapien
cagtgggccctagcggtgcttctag

SEQ ID NO: 750652 - DNA, 25 bp, Homo sapien
tctgtgctagggatcacttccttgt

SEQ ID NO: 750653 - DNA, 25 bp, Homo sapien
gctatcaatttttctagggtgtcta

SEQ ID NO: 750654 - DNA, 25 bp, Homo sapien
tgtttccatgtggtaagtcaatacc

SEQ ID NO: 750655 - DNA, 25 bp, Homo sapien
tgtcaggcttagaaaggccaatctc

SEQ ID NO: 750656 - DNA, 25 bp, Homo sapien
aataactgactatttccttgtgggt

SEQ ID NO: 750657 - DNA, 25 bp, Homo sapien
tctcagctgccacaagagggcgccg

SEQ ID NO: 750658 - DNA, 25 bp, Homo sapien
gaggcctgagctcttaatgcccctg

SEQ ID NO: 750659 - DNA, 25 bp, Homo sapien
ttgggagtcccctaagacacatctt

SEQ ID NO: 750660 - DNA, 25 bp, Homo sapien
caacatctgcagtccctcagctgga

SEQ ID NO: 750661 - DNA, 25 bp, Homo sapien
cacgttcaacccttctcagagtggc

SEQ ID NO: 750662 - DNA, 25 bp, Homo sapien
aagcacgttcaacccttctcagagt

SEQ ID NO: 750663 - DNA, 25 bp, Homo sapien
tttaaagcacgttcaacccttctca

SEQ ID NO: 750664 - DNA, 25 bp, Homo sapien
taaagcacgttcaacccttctcaga

SEQ ID NO: 750665 - DNA, 25 bp, Homo sapien
gtattatacttacgcaagcacaagg

SEQ ID NO: 750666 - DNA, 25 bp, Homo sapien
caaatttaccgtgtgctgaacaaga

SEQ ID NO: 750667 - DNA, 25 bp, Homo sapien
tatgactcctacaactccaaggttg

SEQ ID NO: 750668 - DNA, 25 bp, Homo sapien
tattactgtgccacctgggacgggc

SEQ ID NO: 750669 - DNA, 25 bp, Homo sapien
acaggacacaggaacgtaaactggg

SEQ ID NO: 750670 - DNA, 25 bp, Homo sapien
acttccctggaaacgatgcctgaca

SEQ ID NO: 750671 - DNA, 25 bp, Homo sapien
tggaaacgatgcctgacaccgcctg

SEQ ID NO: 750672 - DNA, 25 bp, Homo sapien
ttaacttccctggaaacgatgcctg

SEQ ID NO: 750673 - DNA, 25 bp, Homo sapien
tttggctgaggtttctgggacacac

SEQ ID NO: 750674 - DNA, 25 bp, Homo sapien
caggaagtgaagctttggctgaggt

SEQ ID NO: 750675 - DNA, 25 bp, Homo sapien
aagctttggctgaggtttctgggac

SEQ ID NO: 750676 - DNA, 25 bp, Homo sapien
gctttggctgaggtttctgggacac

SEQ ID NO: 750677 - DNA, 25 bp, Homo sapien
ggctgaggcccatgaccggaccatt

SEQ ID NO: 750678 - DNA, 25 bp, Homo sapien
ttcgtgggattgcattgttggctgc

SEQ ID NO: 750679 - DNA, 25 bp, Homo sapien
ttccgcacactcttcgtgggattgc

SEQ ID NO: 750680 - DNA, 25 bp, Homo sapien
agtaacctctcccttccgcacactc

SEQ ID NO: 750681 - DNA, 25 bp, Homo sapien
gttctcaggccagactctccaaagt

SEQ ID NO: 750682 - DNA, 25 bp, Homo sapien
tctcaggccagactctccaaagtgt

SEQ ID NO: 750683 - DNA, 25 bp, Homo sapien
tcaggccagactctccaaagtgtcc

SEQ ID NO: 750684 - DNA, 25 bp, Homo sapien
caaagcaatacattcttgaaactaa

SEQ ID NO: 750685 - DNA, 25 bp, Homo sapien
catcggcctcatgtagtggccaggc

SEQ ID NO: 750686 - DNA, 25 bp, Homo sapien
gaaccaagtacctgtaagaatcagc

SEQ ID NO: 750687 - DNA, 25 bp, Homo sapien
taacatcaaagcatggtgggaattc

SEQ ID NO: 750688 - DNA, 25 bp, Homo sapien
taagtttgttaaagtcatcggcctc

SEQ ID NO: 750689 - DNA, 25 bp, Homo sapien
agaacttgtcttttagccaaaacat

SEQ ID NO: 750690 - DNA, 25 bp, Homo sapien
taccatgtccttcagagtcaaggca

SEQ ID NO: 750691 - DNA, 25 bp, Homo sapien
ttttctaaaccacaggcagttacca

SEQ ID NO: 750692 - DNA, 25 bp, Homo sapien
taaaccacaggcagttaccatgtcc

SEQ ID NO: 750693 - DNA, 25 bp, Homo sapien
gccttggccgctgggcattggtctt

SEQ ID NO: 750694 - DNA, 25 bp, Homo sapien
tcaggaacactggattcaggcattg

SEQ ID NO: 750695 - DNA, 25 bp, Homo sapien
caggatggtcaaagctcacccagag

SEQ ID NO: 750696 - DNA, 25 bp, Homo sapien
aaaatccgtgtacactggctgccag

SEQ ID NO: 750697 - DNA, 25 bp, Homo sapien
catgggactgtggtacatgcggccc

SEQ ID NO: 750698 - DNA, 25 bp, Homo sapien
catgcggcccatcgttactgaaatg

SEQ ID NO: 750699 - DNA, 25 bp, Homo sapien
tagtcttcacagatacggaggctct

SEQ ID NO: 750700 - DNA, 25 bp, Homo sapien
ggtcaccacaaatgagagtcgtgtt

SEQ ID NO: 750701 - DNA, 25 bp, Homo sapien
taggcctacagggtcgagatcttca

SEQ ID NO: 750702 - DNA, 25 bp, Homo sapien
cacagtcaataaatggcagggccag

SEQ ID NO: 750703 - DNA, 25 bp, Homo sapien
tccacatcttgtacccacggagggt

SEQ ID NO: 750704 - DNA, 25 bp, Homo sapien
cttgcacgaggaataagaggaccct

SEQ ID NO: 750705 - DNA, 25 bp, Homo sapien
gatgatcctgtcctgaatcaccagg

SEQ ID NO: 750706 - DNA, 25 bp, Homo sapien
gagaccgcctggatgttcacgggca

SEQ ID NO: 750707 - DNA, 25 bp, Homo sapien
taaggatcacttaacaagcagcagc

SEQ ID NO: 750708 - DNA, 25 bp, Homo sapien
tcacgggcagcgttcttcaaggcac

SEQ ID NO: 750709 - DNA, 25 bp, Homo sapien
gatttatctagctgtccagccgctg

SEQ ID NO: 750710 - DNA, 25 bp, Homo sapien
caagctagttcccatgactcctgga

SEQ ID NO: 750711 - DNA, 25 bp, Homo sapien
tatatggacacacagtcacgcaagc

SEQ ID NO: 750712 - DNA, 25 bp, Homo sapien
gatagcacgactacactgaggcacc

SEQ ID NO: 750713 - DNA, 25 bp, Homo sapien
ttcagtacagagaccttgccaccta

SEQ ID NO: 750714 - DNA, 25 bp, Homo sapien
tttgctggaccctgaaagttctgtc

SEQ ID NO: 750715 - DNA, 25 bp, Homo sapien
cctgtaatgtgacatcctggttcag

SEQ ID NO: 750716 - DNA, 25 bp, Homo sapien
tcacggcacagcactttacctgtaa

SEQ ID NO: 750717 - DNA, 25 bp, Homo sapien
gccttcaaaaattgggctgtctaaa

SEQ ID NO: 750718 - DNA, 25 bp, Homo sapien
gtttgttcagactaaacctggccat

SEQ ID NO: 750719 - DNA, 25 bp, Homo sapien
caagggcagaccacagcctctgttt

SEQ ID NO: 750720 - DNA, 25 bp, Homo sapien
agatagtcatttcccactccttgca

SEQ ID NO: 750721 - DNA, 25 bp, Homo sapien
gtgctggtggtcccctcagattcag

SEQ ID NO: 750722 - DNA, 25 bp, Homo sapien
tgctggtggtcccctcagattcaga

SEQ ID NO: 750723 - DNA, 25 bp, Homo sapien
gctggtggtcccctcagattcagaa

SEQ ID NO: 750724 - DNA, 25 bp, Homo sapien
tcatatcagagaataggacttccct

SEQ ID NO: 750725 - DNA, 25 bp, Homo sapien
tactgtataacctgcaagtggtggt

SEQ ID NO: 750726 - DNA, 25 bp, Homo sapien
tcctccttgggatatggcaaatatc

SEQ ID NO: 750727 - DNA, 25 bp, Homo sapien
tcccttctggctttagaggccttct

SEQ ID NO: 750728 - DNA, 25 bp, Homo sapien
gagcatagcccattatagtctgatg

SEQ ID NO: 750729 - DNA, 25 bp, Homo sapien
aagaagctcaattaattggccaggg

SEQ ID NO: 750730 - DNA, 25 bp, Homo sapien
gattgatctcaatcaaagtctgagc

SEQ ID NO: 750731 - DNA, 25 bp, Homo sapien
tcctagacattacgtacatgtgcat

SEQ ID NO: 750732 - DNA, 25 bp, Homo sapien
ctgtttcatcagagtccccagagtc

SEQ ID NO: 750733 - DNA, 25 bp, Homo sapien
cagagtccccagagtcttgagtcat

SEQ ID NO: 750734 - DNA, 25 bp, Homo sapien
ctgcacgactctgtttcatcagagt

SEQ ID NO: 750735 - DNA, 25 bp, Homo sapien
gactctgtttcatcagagtccccag

SEQ ID NO: 750736 - DNA, 25 bp, Homo sapien
ggaacttacacttgaatgaacccaa

SEQ ID NO: 750737 - DNA, 25 bp, Homo sapien
tgttccaaggaacttacacttgaat

SEQ ID NO: 750738 - DNA, 25 bp, Homo sapien
caagaagtggggtcataggtggcca

SEQ ID NO: 750739 - DNA, 25 bp, Homo sapien
caaggaacttacacttgaatgaacc

SEQ ID NO: 750740 - DNA, 25 bp, Homo sapien
aattcagaatcccttttgccgtcaa

SEQ ID NO: 750741 - DNA, 25 bp, Homo sapien
ctaattcagaatcccttttgccgtc

SEQ ID NO: 750742 - DNA, 25 bp, Homo sapien
attcagaatcccttttgccgtcaag

SEQ ID NO: 750743 - DNA, 25 bp, Homo sapien
atcctaattcagaatcccttttgcc

SEQ ID NO: 750744 - DNA, 25 bp, Homo sapien
tcccaggaatatgactgcaaatatc

SEQ ID NO: 750745 - DNA, 25 bp, Homo sapien
ggccacgaatcttggataaaactgt

SEQ ID NO: 750746 - DNA, 25 bp, Homo sapien
tcagtcttcagatcgtagatattcc

SEQ ID NO: 750747 - DNA, 25 bp, Homo sapien
ggatagttggaaattgggccacgaa

SEQ ID NO: 750748 - DNA, 25 bp, Homo sapien
ttcccaggttcaatgggtgtctcct

SEQ ID NO: 750749 - DNA, 25 bp, Homo sapien
acaatcccattttcagctagacttc

SEQ ID NO: 750750 - DNA, 25 bp, Homo sapien
tgtctcctgttcgtttctgcaaaaa

SEQ ID NO: 750751 - DNA, 25 bp, Homo sapien
ttttcagctagacttcccaggttca

SEQ ID NO: 750752 - DNA, 25 bp, Homo sapien
gagcagataggcctagcatatacct

SEQ ID NO: 750753 - DNA, 25 bp, Homo sapien
ttttgcaatttgcttgagcagatag

SEQ ID NO: 750754 - DNA, 25 bp, Homo sapien
taggcctagcatataccttagaaca

SEQ ID NO: 750755 - DNA, 25 bp, Homo sapien
gcttgagcagataggcctagcatat

SEQ ID NO: 750756 - DNA, 25 bp, Homo sapien
cctttcctctcgtcaactgccccat

SEQ ID NO: 750757 - DNA, 25 bp, Homo sapien
cttgaactgctttgtggcctgcagc

SEQ ID NO: 750758 - DNA, 25 bp, Homo sapien
gctttgtggcctgcagcctttcctc

SEQ ID NO: 750759 - DNA, 25 bp, Homo sapien
cagcctttcctctcgtcaactgccc

SEQ ID NO: 750760 - DNA, 25 bp, Homo sapien
gccttctgatttagtttactcctga

SEQ ID NO: 750761 - DNA, 25 bp, Homo sapien
ggccttctgatttagtttactcctg

SEQ ID NO: 750762 - DNA, 25 bp, Homo sapien
cttctgatttagtttactcctgatt

SEQ ID NO: 750763 - DNA, 25 bp, Homo sapien
tctgatttagtttactcctgattaa

SEQ ID NO: 750764 - DNA, 25 bp, Homo sapien
tgggcacaagtagaagaccacccct

SEQ ID NO: 750765 - DNA, 25 bp, Homo sapien
ggcctctccagtcataagttatggg

SEQ ID NO: 750766 - DNA, 25 bp, Homo sapien
taagaactcttgatggataggtggg

SEQ ID NO: 750767 - DNA, 25 bp, Homo sapien
gaatgaatcatctggacatgggcac

SEQ ID NO: 750768 - DNA, 25 bp, Homo sapien
gagcttggccaaacacgtaagaatc

SEQ ID NO: 750769 - DNA, 25 bp, Homo sapien
gaagatctaagttccctgtcagacc

SEQ ID NO: 750770 - DNA, 25 bp, Homo sapien
gaatctcttccattggatcaactgg

SEQ ID NO: 750771 - DNA, 25 bp, Homo sapien
gaaagtcgaagatgtgagcttggcc

SEQ ID NO: 750772 - DNA, 25 bp, Homo sapien
caccagaaatcataatgtgcacaaa

SEQ ID NO: 750773 - DNA, 25 bp, Homo sapien
ctggttatctgctgaatttgggaag

SEQ ID NO: 750774 - DNA, 25 bp, Homo sapien
ccagaaatcataatgtgcacaaatc

SEQ ID NO: 750775 - DNA, 25 bp, Homo sapien
gaaatcataatgtgcacaaatccaa

SEQ ID NO: 750776 - DNA, 25 bp, Homo sapien
gagagaagctgaagtaatacggctg

SEQ ID NO: 750777 - DNA, 25 bp, Homo sapien
cccacaggccgtgttacaaaatgct

SEQ ID NO: 750778 - DNA, 25 bp, Homo sapien
tttgtgggtccctaggaacctgaga

SEQ ID NO: 750779 - DNA, 25 bp, Homo sapien
taatacggctgggtaactggttgtg

SEQ ID NO: 750780 - DNA, 25 bp, Homo sapien
gcccctctggacttaggattcctca

SEQ ID NO: 750781 - DNA, 25 bp, Homo sapien
tttgcctcggatctgtcactttcat

SEQ ID NO: 750782 - DNA, 25 bp, Homo sapien
cagcccctctggacttaggattcct

SEQ ID NO: 750783 - DNA, 25 bp, Homo sapien
taggattcctcaacttttgcctcgg

SEQ ID NO: 750784 - DNA, 25 bp, Homo sapien
gaattctgtttcaagttaagcttta

SEQ ID NO: 750785 - DNA, 25 bp, Homo sapien
aaacattcaggtaagctgtatctga

SEQ ID NO: 750786 - DNA, 25 bp, Homo sapien
tggcttggaattctgtttcaagtta

SEQ ID NO: 750787 - DNA, 25 bp, Homo sapien
gctgtatctgagactaatgatggct

SEQ ID NO: 750788 - DNA, 25 bp, Homo sapien
tgcttttctgtcaggctgttccaca

SEQ ID NO: 750789 - DNA, 25 bp, Homo sapien
tgccacttgaggacttttctctgca

SEQ ID NO: 750790 - DNA, 25 bp, Homo sapien
ggtggccaccaccttgccacttgag

SEQ ID NO: 750791 - DNA, 25 bp, Homo sapien
caccaccttgccacttgaggacttt

SEQ ID NO: 750792 - DNA, 25 bp, Homo sapien
taggagatgctaccacaccaaggca

SEQ ID NO: 750793 - DNA, 25 bp, Homo sapien
gacaccattttgtcaataacactaa

SEQ ID NO: 750794 - DNA, 25 bp, Homo sapien
cagggtacagtaaggcgctttttgc

SEQ ID NO: 750795 - DNA, 25 bp, Homo sapien
ctatgtaatgaatcggaatcttgac

SEQ ID NO: 750796 - DNA, 25 bp, Homo sapien
gaagcttaaggatgctgatctggga

SEQ ID NO: 750797 - DNA, 25 bp, Homo sapien
aagcttaaggatgctgatctgggaa

SEQ ID NO: 750798 - DNA, 25 bp, Homo sapien
gttgaagcttaaggatgctgatctg

SEQ ID NO: 750799 - DNA, 25 bp, Homo sapien
tgaagcttaaggatgctgatctggg

SEQ ID NO: 750800 - DNA, 25 bp, Homo sapien
tctggcgaacattgtgtacattttc

SEQ ID NO: 750801 - DNA, 25 bp, Homo sapien
gagtgtttattcatgagtctgggac

SEQ ID NO: 750802 - DNA, 25 bp, Homo sapien
gactggtatgcattttctggcgaac

SEQ ID NO: 750803 - DNA, 25 bp, Homo sapien
tcatgagtctgggactggtatgcat

SEQ ID NO: 750804 - DNA, 25 bp, Homo sapien
tataggacttggtgggtagtaagca

SEQ ID NO: 750805 - DNA, 25 bp, Homo sapien
gattataggacttggtgggtagtaa

SEQ ID NO: 750806 - DNA, 25 bp, Homo sapien
aagattataggacttggtgggtagt

SEQ ID NO: 750807 - DNA, 25 bp, Homo sapien
tggaaggaagattataggacttggt

SEQ ID NO: 750808 - DNA, 25 bp, Homo sapien
cctcatggacggcattgtcagaaaa

SEQ ID NO: 750809 - DNA, 25 bp, Homo sapien
tggacggcattgtcagaaaaggacg

SEQ ID NO: 750810 - DNA, 25 bp, Homo sapien
gacggtgttaggtggtagtaaatga

SEQ ID NO: 750811 - DNA, 25 bp, Homo sapien
cattgtcagaaaaggacggtgttag

SEQ ID NO: 750812 - DNA, 25 bp, Homo sapien
cagttcaggaatggcatatctctgc

SEQ ID NO: 750813 - DNA, 25 bp, Homo sapien
gaatggcatatctctgcagggagct

SEQ ID NO: 750814 - DNA, 25 bp, Homo sapien
ctgcagggagctttgatttttggca

SEQ ID NO: 750815 - DNA, 25 bp, Homo sapien
tttggcagaataactgccttcaggg

SEQ ID NO: 750816 - DNA, 25 bp, Homo sapien
tacagtaaacagtgtcgactcagtg

SEQ ID NO: 750817 - DNA, 25 bp, Homo sapien
cagtgtcgactcagtgtccagatga

SEQ ID NO: 750818 - DNA, 25 bp, Homo sapien
ctttgaagtacagtaaacagtgtcg

SEQ ID NO: 750819 - DNA, 25 bp, Homo sapien
taaaggtgctttgaagtacagtaaa

SEQ ID NO: 750820 - DNA, 25 bp, Homo sapien
tgattcagaggcatctaggtcaaat

SEQ ID NO: 750821 - DNA, 25 bp, Homo sapien
aagtcctagttgcagagctgattca

SEQ ID NO: 750822 - DNA, 25 bp, Homo sapien
catctaggtcaaatacatgatcttc

SEQ ID NO: 750823 - DNA, 25 bp, Homo sapien
gatcttctgatgtcagtgattcatt

SEQ ID NO: 750824 - DNA, 25 bp, Homo sapien
gaattctcgggacaactgttgcagt

SEQ ID NO: 750825 - DNA, 25 bp, Homo sapien
tagtatcagagtgaattctcgggac

SEQ ID NO: 750826 - DNA, 25 bp, Homo sapien
aatgagggcttccaattagtatcag

SEQ ID NO: 750827 - DNA, 25 bp, Homo sapien
actgttgcagtagcgaagaagggcc

SEQ ID NO: 750828 - DNA, 25 bp, Homo sapien
tgctgcccactgttgggctgtagag

SEQ ID NO: 750829 - DNA, 25 bp, Homo sapien
taacatcctccattatcaatggcat

SEQ ID NO: 750830 - DNA, 25 bp, Homo sapien
ggttgaaggacttttatttgctgcc

SEQ ID NO: 750831 - DNA, 25 bp, Homo sapien
cccactgttgggctgtagagtgtct

SEQ ID NO: 750832 - DNA, 25 bp, Homo sapien
gaaggggtctgtcaccctcctgctg

SEQ ID NO: 750833 - DNA, 25 bp, Homo sapien
tcaccgggggtcctgaggtccctga

SEQ ID NO: 750834 - DNA, 25 bp, Homo sapien
ttgcttcaccgggggtcctgaggtc

SEQ ID NO: 750835 - DNA, 25 bp, Homo sapien
ggtctgtcaccctcctgctgttgac

SEQ ID NO: 750836 - DNA, 25 bp, Homo sapien
tctcctttgccctaattcttctgta

SEQ ID NO: 750837 - DNA, 25 bp, Homo sapien
taaactgcccgttgtgttgcttaga

SEQ ID NO: 750838 - DNA, 25 bp, Homo sapien
tctgtaggaatattcctaatgtggg

SEQ ID NO: 750839 - DNA, 25 bp, Homo sapien
tgcttagaactctcatatctccttt

SEQ ID NO: 750840 - DNA, 25 bp, Homo sapien
ctactggctctcgggtaccctcatc

SEQ ID NO: 750841 - DNA, 25 bp, Homo sapien
ggctctcgggtaccctcatcttcaa

SEQ ID NO: 750842 - DNA, 25 bp, Homo sapien
tggctctcgggtaccctcatcttca

SEQ ID NO: 750843 - DNA, 25 bp, Homo sapien
actggctctcgggtaccctcatctt

SEQ ID NO: 750844 - DNA, 25 bp, Homo sapien
ctgttgaagggtccttctggggcat

SEQ ID NO: 750845 - DNA, 25 bp, Homo sapien
caaggagatttgtactgtgaggccc

SEQ ID NO: 750846 - DNA, 25 bp, Homo sapien
gtcaaggagatttgtactgtgaggc

SEQ ID NO: 750847 - DNA, 25 bp, Homo sapien
aggagatttgtactgtgaggcccag

SEQ ID NO: 750848 - DNA, 25 bp, Homo sapien
ctgtcaaggagatttgtactgtgag

SEQ ID NO: 750849 - DNA, 25 bp, Homo sapien
catttggattctttttcgattgtcg

SEQ ID NO: 750850 - DNA, 25 bp, Homo sapien
gtcatatttgtgagtcaaacagtca

SEQ ID NO: 750851 - DNA, 25 bp, Homo sapien
ccttccatctgtctggttgtgtgac

SEQ ID NO: 750852 - DNA, 25 bp, Homo sapien
gattgtcgctttgccgatgcctgca

SEQ ID NO: 750853 - DNA, 25 bp, Homo sapien
taatcccgatgagggtgagcagtga

SEQ ID NO: 750854 - DNA, 25 bp, Homo sapien
ggcacattgtagtgggggatcccat

SEQ ID NO: 750855 - DNA, 25 bp, Homo sapien
gaagtaagggctctgagtggtggca

SEQ ID NO: 750856 - DNA, 25 bp, Homo sapien
ccataatcccgatgagggtgagcag

SEQ ID NO: 750857 - DNA, 25 bp, Homo sapien
taactccctgatctccctggaggcg

SEQ ID NO: 750858 - DNA, 25 bp, Homo sapien
cctaactccctgatctccctggagg

SEQ ID NO: 750859 - DNA, 25 bp, Homo sapien
ctacctaactccctgatctccctgg

SEQ ID NO: 750860 - DNA, 25 bp, Homo sapien
aactccctgatctccctggaggcgg

SEQ ID NO: 750861 - DNA, 25 bp, Homo sapien
tttcttgaagttctccgccagcctc

SEQ ID NO: 750862 - DNA, 25 bp, Homo sapien
caccaggcccactcatgtgagagca

SEQ ID NO: 750863 - DNA, 25 bp, Homo sapien
ccagccgctgcataaagttgttgat

SEQ ID NO: 750864 - DNA, 25 bp, Homo sapien
ctgctccaggaaacgtatcttgtca

SEQ ID NO: 750865 - DNA, 25 bp, Homo sapien
atctctgtacgcttattgatttcat

SEQ ID NO: 750866 - DNA, 25 bp, Homo sapien
ctccatctctgtacgcttattgatt

SEQ ID NO: 750867 - DNA, 25 bp, Homo sapien
tgtacgcttattgatttcatcctca

SEQ ID NO: 750868 - DNA, 25 bp, Homo sapien
ccacatctgaggagaaattcattct

SEQ ID NO: 750869 - DNA, 25 bp, Homo sapien
aggaagctgatctcttcagtcagcg

SEQ ID NO: 750870 - DNA, 25 bp, Homo sapien
ctgatctcttcagtcagcgcttcca

SEQ ID NO: 750871 - DNA, 25 bp, Homo sapien
gaagctgatctcttcagtcagcgct

SEQ ID NO: 750872 - DNA, 25 bp, Homo sapien
gctgatctcttcagtcagcgcttcc

SEQ ID NO: 750873 - DNA, 25 bp, Homo sapien
gacagcaccacagacgtgtccgaga

SEQ ID NO: 750874 - DNA, 25 bp, Homo sapien
acagcaccacagacgtgtccgagat

SEQ ID NO: 750875 - DNA, 25 bp, Homo sapien
catctggtccgtgctctcagcctca

SEQ ID NO: 750876 - DNA, 25 bp, Homo sapien
gcctcagtcaggctgcggttggcga

SEQ ID NO: 750877 - DNA, 25 bp, Homo sapien
ttcatctggtccgtgctctcagcct

SEQ ID NO: 750878 - DNA, 25 bp, Homo sapien
cggttggcgatcaccttgtactgag

SEQ ID NO: 750879 - DNA, 25 bp, Homo sapien
ttggctttggcacccttcatggcca

SEQ ID NO: 750880 - DNA, 25 bp, Homo sapien
tctgcgtctgtgacggcggcctcta

SEQ ID NO: 750881 - DNA, 25 bp, Homo sapien
ggagatctcagcctttgtacgcccc

SEQ ID NO: 750882 - DNA, 25 bp, Homo sapien
acagcttggctttggcacccttcat

SEQ ID NO: 750883 - DNA, 25 bp, Homo sapien
gcagcttcctgtaggcgtccagggc

SEQ ID NO: 750884 - DNA, 25 bp, Homo sapien
agcttcctgtaggcgtccagggcca

SEQ ID NO: 750885 - DNA, 25 bp, Homo sapien
cagcttcctgtaggcgtccagggcc

SEQ ID NO: 750886 - DNA, 25 bp, Homo sapien
tgtgaggcgcccgtaggagagctca

SEQ ID NO: 750887 - DNA, 25 bp, Homo sapien
aggcgcccgtaggagagctcagacc

SEQ ID NO: 750888 - DNA, 25 bp, Homo sapien
ggcttgtgaggcgcccgtaggagag

SEQ ID NO: 750889 - DNA, 25 bp, Homo sapien
gcccgtaggagagctcagaccacct

SEQ ID NO: 750890 - DNA, 25 bp, Homo sapien
ctttgtacctgcagagcatttgcca

SEQ ID NO: 750891 - DNA, 25 bp, Homo sapien
accagaggctgatacggtctcacca

SEQ ID NO: 750892 - DNA, 25 bp, Homo sapien
ccaaattgttcagggctaccaaggc

SEQ ID NO: 750893 - DNA, 25 bp, Homo sapien
catttgccaatccacactgcaggcg

SEQ ID NO: 750894 - DNA, 25 bp, Homo sapien
aaaaaagatggagctgttaggccac

SEQ ID NO: 750895 - DNA, 25 bp, Homo sapien
acaaaaaagatggagctgttaggcc

SEQ ID NO: 750896 - DNA, 25 bp, Homo sapien
aaaagatggagctgttaggccacac

SEQ ID NO: 750897 - DNA, 25 bp, Homo sapien
aacacaaaaaagatggagctgttag

SEQ ID NO: 750898 - DNA, 25 bp, Homo sapien
catgtgatagcacaggatgaatgtt

SEQ ID NO: 750899 - DNA, 25 bp, Homo sapien
cgatgccgcatgtgatagcacagga

SEQ ID NO: 750900 - DNA, 25 bp, Homo sapien
gaggcgatgccgcatgtgatagcac

SEQ ID NO: 750901 - DNA, 25 bp, Homo sapien
tgccgcatgtgatagcacaggatga

SEQ ID NO: 750902 - DNA, 25 bp, Homo sapien
caggaaagaggcaagtagagggagt

SEQ ID NO: 750903 - DNA, 25 bp, Homo sapien
gggacatgccttccagaacgactct

SEQ ID NO: 750904 - DNA, 25 bp, Homo sapien
gcattttgccaaattactccggaga

SEQ ID NO: 750905 - DNA, 25 bp, Homo sapien
gcttcagagcgtgaacataatcttc

SEQ ID NO: 750906 - DNA, 25 bp, Homo sapien
gatatacccataagagttttgaagc

SEQ ID NO: 750907 - DNA, 25 bp, Homo sapien
tatttaagccgggactttgagctgc

SEQ ID NO: 750908 - DNA, 25 bp, Homo sapien
gagttttaccacaaggatgggcagt

SEQ ID NO: 750909 - DNA, 25 bp, Homo sapien
aatagtgtcagctagagtcagggcc

SEQ ID NO: 750910 - DNA, 25 bp, Homo sapien
gaggagcctcggagaaccactggtt

SEQ ID NO: 750911 - DNA, 25 bp, Homo sapien
tgctgccatcatttctaggatgtct

SEQ ID NO: 750912 - DNA, 25 bp, Homo sapien
tctaggttgccttgaagtttgggtg

SEQ ID NO: 750913 - DNA, 25 bp, Homo sapien
caggccggcattggctggaatgcca

SEQ ID NO: 750914 - DNA, 25 bp, Homo sapien
cagaatcaattagaaggaggcaggt

SEQ ID NO: 750915 - DNA, 25 bp, Homo sapien
acaggttggaactgcaaggatccac

SEQ ID NO: 750916 - DNA, 25 bp, Homo sapien
gcctactcagtatgaagacgacaga

SEQ ID NO: 750917 - DNA, 25 bp, Homo sapien
tcttgaagtgtaaaacagccaggtg

SEQ ID NO: 750918 - DNA, 25 bp, Homo sapien
gccaaagggatttcatactggttta

SEQ ID NO: 750919 - DNA, 25 bp, Homo sapien
tgtgctttctgctacactgctagtt

SEQ ID NO: 750920 - DNA, 25 bp, Homo sapien
tatcctagttaccaagtcctatttg

SEQ ID NO: 750921 - DNA, 25 bp, Homo sapien
tattattgaatgtacccctcagcct

SEQ ID NO: 750922 - DNA, 25 bp, Homo sapien
tccttatcccaagactagtgtgctt

SEQ ID NO: 750923 - DNA, 25 bp, Homo sapien
gcagggcttctgatccctttaagaa

SEQ ID NO: 750924 - DNA, 25 bp, Homo sapien
agcagggcttctgatccctttaaga

SEQ ID NO: 750925 - DNA, 25 bp, Homo sapien
gatcacctgagatcgcacgttcgag

SEQ ID NO: 750926 - DNA, 25 bp, Homo sapien
tcaaagagtatctggccatggcgga

SEQ ID NO: 750927 - DNA, 25 bp, Homo sapien
tgacacctgggaataacattagcag

SEQ ID NO: 750928 - DNA, 25 bp, Homo sapien
ggactcacttttactgggataaaca

SEQ ID NO: 750929 - DNA, 25 bp, Homo sapien
catggcggacactcagcatttgttg

SEQ ID NO: 750930 - DNA, 25 bp, Homo sapien
cacgtgctctgctggctacgattct

SEQ ID NO: 750931 - DNA, 25 bp, Homo sapien
ctggctacgattcttgcattctggg

SEQ ID NO: 750932 - DNA, 25 bp, Homo sapien
ctgcaacttggacgttgtttccacg

SEQ ID NO: 750933 - DNA, 25 bp, Homo sapien
tgtttccacgtgctctgctggctac

SEQ ID NO: 750934 - DNA, 25 bp, Homo sapien
gaattctcccagctgcctgaaagcg

SEQ ID NO: 750935 - DNA, 25 bp, Homo sapien
aactgagaattctcccagctgcctg

SEQ ID NO: 750936 - DNA, 25 bp, Homo sapien
tgaaagcgtcgccaactgtggttat

SEQ ID NO: 750937 - DNA, 25 bp, Homo sapien
agctgcctgaaagcgtcgccaactg

SEQ ID NO: 750938 - DNA, 25 bp, Homo sapien
aatggaaacataagtctaggagtta

SEQ ID NO: 750939 - DNA, 25 bp, Homo sapien
gtaatggaaacataagtctaggagt

SEQ ID NO: 750940 - DNA, 25 bp, Homo sapien
taatggaaacataagtctaggagtt

SEQ ID NO: 750941 - DNA, 25 bp, Homo sapien
taagcattgcagtatgaacaaggca

SEQ ID NO: 750942 - DNA, 25 bp, Homo sapien
cagcttttaggtgacataggtggcc

SEQ ID NO: 750943 - DNA, 25 bp, Homo sapien
gaaaagtttctcagtctaccctgtg

SEQ ID NO: 750944 - DNA, 25 bp, Homo sapien
ttataagaatcccagccgaaagcaa

SEQ ID NO: 750945 - DNA, 25 bp, Homo sapien
tatagttcagcagatttataccgga

SEQ ID NO: 750946 - DNA, 25 bp, Homo sapien
gatgtggtcatcaggcactggtttt

SEQ ID NO: 750947 - DNA, 25 bp, Homo sapien
tctaatagtattcacaaggtggcag

SEQ ID NO: 750948 - DNA, 25 bp, Homo sapien
tataccggaatttgtgatcgctctc

SEQ ID NO: 750949 - DNA, 25 bp, Homo sapien
tatggaaatgagtttagtgcccgct

SEQ ID NO: 750950 - DNA, 25 bp, Homo sapien
tgtcccaggactctaccctcttttg

SEQ ID NO: 750951 - DNA, 25 bp, Homo sapien
agtgcccgctacttgagtttttaag

SEQ ID NO: 750952 - DNA, 25 bp, Homo sapien
tttttatgatctgggaagaccactc

SEQ ID NO: 750953 - DNA, 25 bp, Homo sapien
tctctagaaccttccgcagcctggt

SEQ ID NO: 750954 - DNA, 25 bp, Homo sapien
acagcactgtgagcttctctagaac

SEQ ID NO: 750955 - DNA, 25 bp, Homo sapien
tatcatctgtacattccggctctcc

SEQ ID NO: 750956 - DNA, 25 bp, Homo sapien
cctggttacgctagaaacactgtct

SEQ ID NO: 750957 - DNA, 25 bp, Homo sapien
cagccagctctattaaatctgtggg

SEQ ID NO: 750958 - DNA, 25 bp, Homo sapien
caacgtgtttggtatgaacagccag

SEQ ID NO: 750959 - DNA, 25 bp, Homo sapien
gggactacctcacatgctggcttga

SEQ ID NO: 750960 - DNA, 25 bp, Homo sapien
cttgattgccaagcccacataggtg

SEQ ID NO: 750961 - DNA, 25 bp, Homo sapien
gaaggtaagtgctgtgtgtctctac

SEQ ID NO: 750962 - DNA, 25 bp, Homo sapien
catttcgtgagatccagttgcaagc

SEQ ID NO: 750963 - DNA, 25 bp, Homo sapien
cattaggagaaattcgagaaagaca

SEQ ID NO: 750964 - DNA, 25 bp, Homo sapien
tctaccttgatatgtagccttgagg

SEQ ID NO: 750965 - DNA, 25 bp, Homo sapien
ccctttctgtaactgtcctacagtt

SEQ ID NO: 750966 - DNA, 25 bp, Homo sapien
cctttctgtaactgtcctacagttc

SEQ ID NO: 750967 - DNA, 25 bp, Homo sapien
gagagaagtcttctaggagcccaag

SEQ ID NO: 750968 - DNA, 25 bp, Homo sapien
ctggttgaaagcctgtatgagagaa

SEQ ID NO: 750969 - DNA, 25 bp, Homo sapien
gccagctgggccaagccttctccca

SEQ ID NO: 750970 - DNA, 25 bp, Homo sapien
tagggttctatgctgatgggaggat

SEQ ID NO: 750971 - DNA, 25 bp, Homo sapien
tactgggtcagagtcaatgaggcac

SEQ ID NO: 750972 - DNA, 25 bp, Homo sapien
tgagtccatgacttcctactgggtc

SEQ ID NO: 750973 - DNA, 25 bp, Homo sapien
tgagcaagctacagacagagtactg

SEQ ID NO: 750974 - DNA, 25 bp, Homo sapien
ggtactgaggcaatcaccacatgct

SEQ ID NO: 750975 - DNA, 25 bp, Homo sapien
taatcaagagagtatactgaatgcg

SEQ ID NO: 750976 - DNA, 25 bp, Homo sapien
caagagagtatactgaatgcggaac

SEQ ID NO: 750977 - DNA, 25 bp, Homo sapien
ggaaagaggctcataatactttatt

SEQ ID NO: 750978 - DNA, 25 bp, Homo sapien
gagagtatactgaatgcggaacaaa

SEQ ID NO: 750979 - DNA, 25 bp, Homo sapien
cacgaacctgctagttcatagtagg

SEQ ID NO: 750980 - DNA, 25 bp, Homo sapien
gtcccagcacgaacctgctagttca

SEQ ID NO: 750981 - DNA, 25 bp, Homo sapien
gtccactgtcccagcacgaacctgc

SEQ ID NO: 750982 - DNA, 25 bp, Homo sapien
ccagcacgaacctgctagttcatag

SEQ ID NO: 750983 - DNA, 25 bp, Homo sapien
gcacagaccctatagcttaagagct

SEQ ID NO: 750984 - DNA, 25 bp, Homo sapien
cataacttgttagaatgactcacag

SEQ ID NO: 750985 - DNA, 25 bp, Homo sapien
caaccaggtataaataggagcttcc

SEQ ID NO: 750986 - DNA, 25 bp, Homo sapien
gaagcccttgtatacatatctgtgg

SEQ ID NO: 750987 - DNA, 25 bp, Homo sapien
tcacaaatatcaagccctctgtgtc

SEQ ID NO: 750988 - DNA, 25 bp, Homo sapien
caaatatcaagccctctgtgtccat

SEQ ID NO: 750989 - DNA, 25 bp, Homo sapien
cacaaatatcaagccctctgtgtcc

SEQ ID NO: 750990 - DNA, 25 bp, Homo sapien
gtcacaaatatcaagccctctgtgt

SEQ ID NO: 750991 - DNA, 25 bp, Homo sapien
taacccggattccaagaaagcttga

SEQ ID NO: 750992 - DNA, 25 bp, Homo sapien
tgatgtgtaaaaatggcctctgcca

SEQ ID NO: 750993 - DNA, 25 bp, Homo sapien
ggaacatattaaggtgataaagttg

SEQ ID NO: 750994 - DNA, 25 bp, Homo sapien
tggacagccagtccttcccatttaa

SEQ ID NO: 750995 - DNA, 25 bp, Homo sapien
tgtgtagcagacattttattgaagg

SEQ ID NO: 750996 - DNA, 25 bp, Homo sapien
tgtagcagacattttattgaaggct

SEQ ID NO: 750997 - DNA, 25 bp, Homo sapien
gcagacattttattgaaggcttagg

SEQ ID NO: 750998 - DNA, 25 bp, Homo sapien
tagcagacattttattgaaggctta

SEQ ID NO: 750999 - DNA, 25 bp, Homo sapien
ttttctcaaaggaccgctaaccaca

SEQ ID NO: 751000 - DNA, 25 bp, Homo sapien
tctctgaacttccttacgccatgcc

SEQ ID NO: 751001 - DNA, 25 bp, Homo sapien
caaaggaccgctaaccacagctgtt

SEQ ID NO: 751002 - DNA, 25 bp, Homo sapien
tgaacttccttacgccatgcccaac

SEQ ID NO: 751003 - DNA, 25 bp, Homo sapien
gaggtcctggcagcaactgtctttt

SEQ ID NO: 751004 - DNA, 25 bp, Homo sapien
tctgtatatctttaacacagtgcca

SEQ ID NO: 751005 - DNA, 25 bp, Homo sapien
ctgtatatctttaacacagtgccag

SEQ ID NO: 751006 - DNA, 25 bp, Homo sapien
ccagcaagaggtcctggcagcaact

SEQ ID NO: 751007 - DNA, 25 bp, Homo sapien
gaatatccacggcgcaaagaagttt

SEQ ID NO: 751008 - DNA, 25 bp, Homo sapien
cagaatatccacggcgcaaagaagt

SEQ ID NO: 751009 - DNA, 25 bp, Homo sapien
atccacggcgcaaagaagtttattg

SEQ ID NO: 751010 - DNA, 25 bp, Homo sapien
atatccacggcgcaaagaagtttat

SEQ ID NO: 751011 - DNA, 25 bp, Homo sapien
tgcctcaacatacccactcaaatat

SEQ ID NO: 751012 - DNA, 25 bp, Homo sapien
ttcatccacaaatatcgtttcaaaa

SEQ ID NO: 751013 - DNA, 25 bp, Homo sapien
tcaacatacccactcaaatattcat

SEQ ID NO: 751014 - DNA, 25 bp, Homo sapien
aatatcgtttcaaaatttccagtct

SEQ ID NO: 751015 - DNA, 25 bp, Homo sapien
tcatgctgtttacccgttcttaact

SEQ ID NO: 751016 - DNA, 25 bp, Homo sapien
ttcttgttatgaccaggatcttttt

SEQ ID NO: 751017 - DNA, 25 bp, Homo sapien
ttaactttatcccttgactctctac

SEQ ID NO: 751018 - DNA, 25 bp, Homo sapien
tgttatgaccaggatcttttttgag

SEQ ID NO: 751019 - DNA, 25 bp, Homo sapien
caaaggttgttagggatgaatgtcc

SEQ ID NO: 751020 - DNA, 25 bp, Homo sapien
ctatcacatgccacaaagtagaggc

SEQ ID NO: 751021 - DNA, 25 bp, Homo sapien
gagtcagctgagatatgcaatacct

SEQ ID NO: 751022 - DNA, 25 bp, Homo sapien
aatccccacgttagttggcaaacag

SEQ ID NO: 751023 - DNA, 25 bp, Homo sapien
taaatgtcccgtctgcgctgaagtc

SEQ ID NO: 751024 - DNA, 25 bp, Homo sapien
gttatcccagatcagaacctcaggc

SEQ ID NO: 751025 - DNA, 25 bp, Homo sapien
gaagccgagcctggagcatcgacaa

SEQ ID NO: 751026 - DNA, 25 bp, Homo sapien
gcatcgacaaggactgagccaaact

SEQ ID NO: 751027 - DNA, 25 bp, Homo sapien
cctctgagagatattcttctggcat

SEQ ID NO: 751028 - DNA, 25 bp, Homo sapien
caaaatctccaactcgtatccttgt

SEQ ID NO: 751029 - DNA, 25 bp, Homo sapien
cttgtctactgtgttggattctagc

SEQ ID NO: 751030 - DNA, 25 bp, Homo sapien
tcaacccaatttcccgcattgctgg

SEQ ID NO: 751031 - DNA, 25 bp, Homo sapien
gttggattctagcacacgtctctct

SEQ ID NO: 751032 - DNA, 25 bp, Homo sapien
ttcctcttggatcattataagaaca

SEQ ID NO: 751033 - DNA, 25 bp, Homo sapien
cttcctcttggatcattataagaac

SEQ ID NO: 751034 - DNA, 25 bp, Homo sapien
tatgcaagctgcgaaggaaatccat

SEQ ID NO: 751035 - DNA, 25 bp, Homo sapien
tgaagcctgacatatgcaagctgcg

SEQ ID NO: 751036 - DNA, 25 bp, Homo sapien
ttcctagaatgaagcctgacatatg

SEQ ID NO: 751037 - DNA, 25 bp, Homo sapien
cctgacatatgcaagctgcgaagga

SEQ ID NO: 751038 - DNA, 25 bp, Homo sapien
gagtccttcatagacttccccagaa

SEQ ID NO: 751039 - DNA, 25 bp, Homo sapien
cagttcccctgtgggatacaccaaa

SEQ ID NO: 751040 - DNA, 25 bp, Homo sapien
aacagaaaacgccagtgccttccct

SEQ ID NO: 751041 - DNA, 25 bp, Homo sapien
gcatatctcagtggcaatgtgacat

SEQ ID NO: 751042 - DNA, 25 bp, Homo sapien
gtcaaattagccaatcctcctcgca

SEQ ID NO: 751043 - DNA, 25 bp, Homo sapien
tcaaattagccaatcctcctcgcat

SEQ ID NO: 751044 - DNA, 25 bp, Homo sapien
agtcaaattagccaatcctcctcgc

SEQ ID NO: 751045 - DNA, 25 bp, Homo sapien
acaaacataaatggcccatgtgatg

SEQ ID NO: 751046 - DNA, 25 bp, Homo sapien
tccaggttcaagcaattctcctgcc

SEQ ID NO: 751047 - DNA, 25 bp, Homo sapien
tcactgcaacctccacctccaggtt

SEQ ID NO: 751048 - DNA, 25 bp, Homo sapien
gctagagtgtagaggcatgatctcg

SEQ ID NO: 751049 - DNA, 25 bp, Homo sapien
ctagtagctagtactacaggcacgt

SEQ ID NO: 751050 - DNA, 25 bp, Homo sapien
tcttgctcaaacatacagactctga

SEQ ID NO: 751051 - DNA, 25 bp, Homo sapien
gtacttttgttcttgctcaaacata

SEQ ID NO: 751052 - DNA, 25 bp, Homo sapien
tttgttcttgctcaaacatacagac

SEQ ID NO: 751053 - DNA, 25 bp, Homo sapien
caaacatacagactctgatcacaaa

SEQ ID NO: 751054 - DNA, 25 bp, Homo sapien
caagaaagcttgatcctccacggct

SEQ ID NO: 751055 - DNA, 25 bp, Homo sapien
aagcttgatcctccacggctggaat

SEQ ID NO: 751056 - DNA, 25 bp, Homo sapien
gaaagcttgatcctccacggctgga

SEQ ID NO: 751057 - DNA, 25 bp, Homo sapien
agaaagcttgatcctccacggctgg

SEQ ID NO: 751058 - DNA, 25 bp, Homo sapien
catctagtagacatcagcaaaggga

SEQ ID NO: 751059 - DNA, 25 bp, Homo sapien
gaatcagagcctacttaagacaaaa

SEQ ID NO: 751060 - DNA, 25 bp, Homo sapien
gacagttcatcagtaccaggtgttg

SEQ ID NO: 751061 - DNA, 25 bp, Homo sapien
gaagagagtaattgtattcggcatc

SEQ ID NO: 751062 - DNA, 25 bp, Homo sapien
aagggtgacccttgactgtcctttg

SEQ ID NO: 751063 - DNA, 25 bp, Homo sapien
ggcttctgagcttttaagacgagca

SEQ ID NO: 751064 - DNA, 25 bp, Homo sapien
gccactccaattcaaaaggcttctg

SEQ ID NO: 751065 - DNA, 25 bp, Homo sapien
gataacataattccaaggagatggg

SEQ ID NO: 751066 - DNA, 25 bp, Homo sapien
tacatactgacccatatgctgcttc

SEQ ID NO: 751067 - DNA, 25 bp, Homo sapien
cttgtgtgactgcattacttgtaac

SEQ ID NO: 751068 - DNA, 25 bp, Homo sapien
cagaagtgagttcagcttgtgtgac

SEQ ID NO: 751069 - DNA, 25 bp, Homo sapien
ttacttgtaacacaggacaagatgg

SEQ ID NO: 751070 - DNA, 25 bp, Homo sapien
aggaggttaaaatgactgtatgaac

SEQ ID NO: 751071 - DNA, 25 bp, Homo sapien
ctaggaggttaaaatgactgtatga

SEQ ID NO: 751072 - DNA, 25 bp, Homo sapien
taggaggttaaaatgactgtatgaa

SEQ ID NO: 751073 - DNA, 25 bp, Homo sapien
ctcctcggaatcctcaccttgaacc

SEQ ID NO: 751074 - DNA, 25 bp, Homo sapien
ggaatcctcaccttgaacctctaca

SEQ ID NO: 751075 - DNA, 25 bp, Homo sapien
aatcctcaccttgaacctctacaag

SEQ ID NO: 751076 - DNA, 25 bp, Homo sapien
tcggaatcctcaccttgaacctcta

SEQ ID NO: 751077 - DNA, 25 bp, Homo sapien
tttgattccacaggcgcaagcaggg

SEQ ID NO: 751078 - DNA, 25 bp, Homo sapien
gcaagggcttactgacttgtccagc

SEQ ID NO: 751079 - DNA, 25 bp, Homo sapien
agagcttgctgggagtgtcctcgct

SEQ ID NO: 751080 - DNA, 25 bp, Homo sapien
tttcactccgcactgacagcaaggg

SEQ ID NO: 751081 - DNA, 25 bp, Homo sapien
cctttgtttatccatagagggcatc

SEQ ID NO: 751082 - DNA, 25 bp, Homo sapien
ggcatcagtattagcccttctcctg

SEQ ID NO: 751083 - DNA, 25 bp, Homo sapien
actgaaacattctgcacagtatgtt

SEQ ID NO: 751084 - DNA, 25 bp, Homo sapien
ccctttggatgctgttaagtgcaga

SEQ ID NO: 751085 - DNA, 25 bp, Homo sapien
tctccaatgtgaccagctctttttt

SEQ ID NO: 751086 - DNA, 25 bp, Homo sapien
atcagcaatctccaatgtgaccagc

SEQ ID NO: 751087 - DNA, 25 bp, Homo sapien
ctaggctactgcaaccacctcgatg

SEQ ID NO: 751088 - DNA, 25 bp, Homo sapien
cacctcgatgccatcagcaatctcc

SEQ ID NO: 751089 - DNA, 25 bp, Homo sapien
ccctaagtgtgtgaaataagagccc

SEQ ID NO: 751090 - DNA, 25 bp, Homo sapien
gctgaatcagaacgagtgtgggcca

SEQ ID NO: 751091 - DNA, 25 bp, Homo sapien
tccctgggagagtaaatgcaaactg

SEQ ID NO: 751092 - DNA, 25 bp, Homo sapien
gatgatagaagcatcacatccctgg

SEQ ID NO: 751093 - DNA, 25 bp, Homo sapien
cagctccaagtaacacaaaactacc

SEQ ID NO: 751094 - DNA, 25 bp, Homo sapien
tccagctccaagtaacacaaaacta

SEQ ID NO: 751095 - DNA, 25 bp, Homo sapien
ggtttgccagtacaggggttctcca

SEQ ID NO: 751096 - DNA, 25 bp, Homo sapien
tttgccagtacaggggttctccagc

SEQ ID NO: 751097 - DNA, 25 bp, Homo sapien
tggctttccatgtatcccctgggta

SEQ ID NO: 751098 - DNA, 25 bp, Homo sapien
tgtgtgaaggctggcatccaactag

SEQ ID NO: 751099 - DNA, 25 bp, Homo sapien
acttgggaacatccctggctgtact

SEQ ID NO: 751100 - DNA, 25 bp, Homo sapien
gtgtgtgaaggctggcatccaacta

SEQ ID NO: 751101 - DNA, 25 bp, Homo sapien
acatccctggctgtactgtgtgtga

SEQ ID NO: 751102 - DNA, 25 bp, Homo sapien
tgtgtgggagccattgccatgagca

SEQ ID NO: 751103 - DNA, 25 bp, Homo sapien
gagagacacaggtctgtctggatgc

SEQ ID NO: 751104 - DNA, 25 bp, Homo sapien
tctgtctggatgctgtgtgggagcc

SEQ ID NO: 751105 - DNA, 25 bp, Homo sapien
ggagccattgccatgagcagtccag

SEQ ID NO: 751106 - DNA, 25 bp, Homo sapien
tcaagtttctggggatgtggcacag

SEQ ID NO: 751107 - DNA, 25 bp, Homo sapien
cacagggtaccccagagcctcccct

SEQ ID NO: 751108 - DNA, 25 bp, Homo sapien
tgtggcacagggtaccccagagcct

SEQ ID NO: 751109 - DNA, 25 bp, Homo sapien
ggatgtggcacagggtaccccagag

SEQ ID NO: 751110 - DNA, 25 bp, Homo sapien
catttgatctatgaactttctcaag

SEQ ID NO: 751111 - DNA, 25 bp, Homo sapien
tgatctatgaactttctcaagtaaa

SEQ ID NO: 751112 - DNA, 25 bp, Homo sapien
gatctatgaactttctcaagtaaaa

SEQ ID NO: 751113 - DNA, 25 bp, Homo sapien
tttgatctatgaactttctcaagta

SEQ ID NO: 751114 - DNA, 25 bp, Homo sapien
caggcctgatactgagctccggaag

SEQ ID NO: 751115 - DNA, 25 bp, Homo sapien
tactgagctccggaagctttgactt

SEQ ID NO: 751116 - DNA, 25 bp, Homo sapien
gctccggaagctttgacttgatcaa

SEQ ID NO: 751117 - DNA, 25 bp, Homo sapien
tgatactgagctccggaagctttga

SEQ ID NO: 751118 - DNA, 25 bp, Homo sapien
agggaggtcatcaggatatctaaca

SEQ ID NO: 751119 - DNA, 25 bp, Homo sapien
aaggagggaggtcatcaggatatct

SEQ ID NO: 751120 - DNA, 25 bp, Homo sapien
ttatttggaaggagggaggtcatca

SEQ ID NO: 751121 - DNA, 25 bp, Homo sapien
ggagggaggtcatcaggatatctaa

SEQ ID NO: 751122 - DNA, 25 bp, Homo sapien
taacgcattgtctcatgtttgaacc

SEQ ID NO: 751123 - DNA, 25 bp, Homo sapien
tcaattcatcgtatgtgccttctaa

SEQ ID NO: 751124 - DNA, 25 bp, Homo sapien
aatgagagccttgtgttccccaacc

SEQ ID NO: 751125 - DNA, 25 bp, Homo sapien
caaccccaagaacatcaattcatcg

SEQ ID NO: 751126 - DNA, 25 bp, Homo sapien
tggcactcctgtatcagattccaat

SEQ ID NO: 751127 - DNA, 25 bp, Homo sapien
tatgtgattctcaccagtcctggca

SEQ ID NO: 751128 - DNA, 25 bp, Homo sapien
agtcctggcactcctgtatcagatt

SEQ ID NO: 751129 - DNA, 25 bp, Homo sapien
cctgtatcagattccaatgaggatc

SEQ ID NO: 751130 - DNA, 25 bp, Homo sapien
ccttgctgtctcgtgtaagagctga

SEQ ID NO: 751131 - DNA, 25 bp, Homo sapien
gagctgataatgagcaagactggaa

SEQ ID NO: 751132 - DNA, 25 bp, Homo sapien
tgcagataaagacatctgtccttgc

SEQ ID NO: 751133 - DNA, 25 bp, Homo sapien
atggtgacgaaggttaggtctaaca

SEQ ID NO: 751134 - DNA, 25 bp, Homo sapien
ttcagataccacttgttcatttggg

SEQ ID NO: 751135 - DNA, 25 bp, Homo sapien
caaggcggccaaatcccaagtgtac

SEQ ID NO: 751136 - DNA, 25 bp, Homo sapien
ttcatttggggtgactgacaattcc

SEQ ID NO: 751137 - DNA, 25 bp, Homo sapien
tgcatccgtgagacgcagcaactag

SEQ ID NO: 751138 - DNA, 25 bp, Homo sapien
gattagccttgaacgagagtatggc

SEQ ID NO: 751139 - DNA, 25 bp, Homo sapien
tttctgaaattgtagggtcatcatt

SEQ ID NO: 751140 - DNA, 25 bp, Homo sapien
catttgcctctctgattagccttga

SEQ ID NO: 751141 - DNA, 25 bp, Homo sapien
gcctctctgattagccttgaacgag

SEQ ID NO: 751142 - DNA, 25 bp, Homo sapien
gatttcacttagagctacagttgag

SEQ ID NO: 751143 - DNA, 25 bp, Homo sapien
caatatgtgaccaattgtgttagat

SEQ ID NO: 751144 - DNA, 25 bp, Homo sapien
tgtgttagattgttcggccattgat

SEQ ID NO: 751145 - DNA, 25 bp, Homo sapien
ttccttgccatacctcacacggtga

SEQ ID NO: 751146 - DNA, 25 bp, Homo sapien
gcctgagcaatggggcgagacggtc

SEQ ID NO: 751147 - DNA, 25 bp, Homo sapien
gcaatggggcgagacggtctaaaaa

SEQ ID NO: 751148 - DNA, 25 bp, Homo sapien
tgagcaatggggcgagacggtctaa

SEQ ID NO: 751149 - DNA, 25 bp, Homo sapien
agcaatggggcgagacggtctaaaa

SEQ ID NO: 751150 - DNA, 25 bp, Homo sapien
caagtagtcatcaaaagttggcagc

SEQ ID NO: 751151 - DNA, 25 bp, Homo sapien
cacactttcaagacagtaactgagc

SEQ ID NO: 751152 - DNA, 25 bp, Homo sapien
gtaactgagctccaatgtaaagaca

SEQ ID NO: 751153 - DNA, 25 bp, Homo sapien
cctaagaaggttgctggtcccactc

SEQ ID NO: 751154 - DNA, 25 bp, Homo sapien
caggactcatttgggacctatcaaa

SEQ ID NO: 751155 - DNA, 25 bp, Homo sapien
tggtagtttaatgcacttgcgaagc

SEQ ID NO: 751156 - DNA, 25 bp, Homo sapien
ccctctgtatgtgggctgtcagact

SEQ ID NO: 751157 - DNA, 25 bp, Homo sapien
tgcctttgactgtatcttgcccaca

SEQ ID NO: 751158 - DNA, 25 bp, Homo sapien
tgcagtggcacaattgcagctgact

SEQ ID NO: 751159 - DNA, 25 bp, Homo sapien
gtgcagtggcacaattgcagctgac

SEQ ID NO: 751160 - DNA, 25 bp, Homo sapien
gtggcacaattgcagctgactgcag

SEQ ID NO: 751161 - DNA, 25 bp, Homo sapien
cagtggcacaattgcagctgactgc

SEQ ID NO: 751162 - DNA, 25 bp, Homo sapien
tgttaagggactcaactacagtact

SEQ ID NO: 751163 - DNA, 25 bp, Homo sapien
tggatgttaagggactcaactacag

SEQ ID NO: 751164 - DNA, 25 bp, Homo sapien
taagggactcaactacagtactgat

SEQ ID NO: 751165 - DNA, 25 bp, Homo sapien
gcctggatgttaagggactcaacta

SEQ ID NO: 751166 - DNA, 25 bp, Homo sapien
cccctttgcccgcaaggcttctcat

SEQ ID NO: 751167 - DNA, 25 bp, Homo sapien
cagcaacccggctgtttttccaagt

SEQ ID NO: 751168 - DNA, 25 bp, Homo sapien
aagtgcgtcccctttgcccgcaagg

SEQ ID NO: 751169 - DNA, 25 bp, Homo sapien
ttccaagtgcgtcccctttgcccgc

SEQ ID NO: 751170 - DNA, 25 bp, Homo sapien
gaaaagacggcatttcaatcagcga

SEQ ID NO: 751171 - DNA, 25 bp, Homo sapien
gcacccagcctgcaacggttaattt

SEQ ID NO: 751172 - DNA, 25 bp, Homo sapien
tctcctggagttggaacacccttct

SEQ ID NO: 751173 - DNA, 25 bp, Homo sapien
acttggctagattaaggaataccca

SEQ ID NO: 751174 - DNA, 25 bp, Homo sapien
tcacagttctgatagtctgacccag

SEQ ID NO: 751175 - DNA, 25 bp, Homo sapien
ctgatagtctgacccagaactttca

SEQ ID NO: 751176 - DNA, 25 bp, Homo sapien
ttctgatagtctgacccagaacttt

SEQ ID NO: 751177 - DNA, 25 bp, Homo sapien
cagttctgatagtctgacccagaac

SEQ ID NO: 751178 - DNA, 25 bp, Homo sapien
tcactgaccaatagagccatgagcc

SEQ ID NO: 751179 - DNA, 25 bp, Homo sapien
tctgtctccggatgttcttccctga

SEQ ID NO: 751180 - DNA, 25 bp, Homo sapien
ccctgatttgcatagtaccgctttt

SEQ ID NO: 751181 - DNA, 25 bp, Homo sapien
tgagccaagcaatactcatatggct

SEQ ID NO: 751182 - DNA, 25 bp, Homo sapien
cagggtgaactgaagggagccttct

SEQ ID NO: 751183 - DNA, 25 bp, Homo sapien
gggtgaactgaagggagccttctcc

SEQ ID NO: 751184 - DNA, 25 bp, Homo sapien
ctccagggtgaactgaagggagcct

SEQ ID NO: 751185 - DNA, 25 bp, Homo sapien
tccagggtgaactgaagggagcctt

SEQ ID NO: 751186 - DNA, 25 bp, Homo sapien
tctctctgacaaagagagaagcacc

SEQ ID NO: 751187 - DNA, 25 bp, Homo sapien
gcattaaggataatgtagaaaaaca

SEQ ID NO: 751188 - DNA, 25 bp, Homo sapien
gccagttaagtcatgctcattctct

SEQ ID NO: 751189 - DNA, 25 bp, Homo sapien
agatgctcctcacagcccaagaaca

SEQ ID NO: 751190 - DNA, 25 bp, Homo sapien
tctttctggaaaagacacgcttctc

SEQ ID NO: 751191 - DNA, 25 bp, Homo sapien
gcagcgatgatccaggaagcatatt

SEQ ID NO: 751192 - DNA, 25 bp, Homo sapien
gttatgatcagtagagcagcgatga

SEQ ID NO: 751193 - DNA, 25 bp, Homo sapien
ccctagtgttgcctcattggtccaa

SEQ ID NO: 751194 - DNA, 25 bp, Homo sapien
ttttctaaggaatgaaggacaccag

SEQ ID NO: 751195 - DNA, 25 bp, Homo sapien
actgagagctcacatgataagttgg

SEQ ID NO: 751196 - DNA, 25 bp, Homo sapien
ggtggttgtgacgttttagacagtc

SEQ ID NO: 751197 - DNA, 25 bp, Homo sapien
gttcctgatggaataagcttctgaa

SEQ ID NO: 751198 - DNA, 25 bp, Homo sapien
tctgatggcagtaaagacttgtcca

SEQ ID NO: 751199 - DNA, 25 bp, Homo sapien
ctgatggcagtaaagacttgtccat

SEQ ID NO: 751200 - DNA, 25 bp, Homo sapien
cctctgatggcagtaaagacttgtc

SEQ ID NO: 751201 - DNA, 25 bp, Homo sapien
ctctgatggcagtaaagacttgtcc

SEQ ID NO: 751202 - DNA, 25 bp, Homo sapien
aaatgctgcatgctactgttgctgg

SEQ ID NO: 751203 - DNA, 25 bp, Homo sapien
ttcagcggccctcggtgacgtgcag

SEQ ID NO: 751204 - DNA, 25 bp, Homo sapien
tcggtgacgtgcagaccacaagcat

SEQ ID NO: 751205 - DNA, 25 bp, Homo sapien
gaagtagcggctctcaaatccaaaa

SEQ ID NO: 751206 - DNA, 25 bp, Homo sapien
actgttaaccaagtggccccacatg

SEQ ID NO: 751207 - DNA, 25 bp, Homo sapien
caagtggccccacatggatactgga

SEQ ID NO: 751208 - DNA, 25 bp, Homo sapien
gagactgttaaccaagtggccccac

SEQ ID NO: 751209 - DNA, 25 bp, Homo sapien
cgagactgttaaccaagtggcccca

SEQ ID NO: 751210 - DNA, 25 bp, Homo sapien
cttgacaaggggacaagatctagat

SEQ ID NO: 751211 - DNA, 25 bp, Homo sapien
ttgacaaggggacaagatctagatt

SEQ ID NO: 751212 - DNA, 25 bp, Homo sapien
acagtgtttcgctttcactaccacc

SEQ ID NO: 751213 - DNA, 25 bp, Homo sapien
ttgtaacagtgtttcgctttcacta

SEQ ID NO: 751214 - DNA, 25 bp, Homo sapien
tcagctgtagatctacctttgtaac

SEQ ID NO: 751215 - DNA, 25 bp, Homo sapien
ctggctggccgccgaatcactgtgg

SEQ ID NO: 751216 - DNA, 25 bp, Homo sapien
ggtctgactggcctggtgttggtca

SEQ ID NO: 751217 - DNA, 25 bp, Homo sapien
gggtctgataatgctgggtttcctc

SEQ ID NO: 751218 - DNA, 25 bp, Homo sapien
gataatgctgggtttcctctagccc

SEQ ID NO: 751219 - DNA, 25 bp, Homo sapien
gcctgggtctgataatgctgggttt

SEQ ID NO: 751220 - DNA, 25 bp, Homo sapien
ggtgatttatatggttaaaccatcc

SEQ ID NO: 751221 - DNA, 25 bp, Homo sapien
tgctctgttggagtcaattggattt

SEQ ID NO: 751222 - DNA, 25 bp, Homo sapien
ggagtcaattggatttaactcatta

SEQ ID NO: 751223 - DNA, 25 bp, Homo sapien
taaaccatcctaaatgcagcccagt

SEQ ID NO: 751224 - DNA, 25 bp, Homo sapien
tgcaaggaaacagatacagctagct

SEQ ID NO: 751225 - DNA, 25 bp, Homo sapien
gcaaggaaacagatacagctagctc

SEQ ID NO: 751226 - DNA, 25 bp, Homo sapien
ctgcaaggaaacagatacagctagc

SEQ ID NO: 751227 - DNA, 25 bp, Homo sapien
tagctgtcccgccatgttgaaggga

SEQ ID NO: 751228 - DNA, 25 bp, Homo sapien
cagcccttggatgttggtgagattc

SEQ ID NO: 751229 - DNA, 25 bp, Homo sapien
gaagctaactgctgtgccgtcagaa

SEQ ID NO: 751230 - DNA, 25 bp, Homo sapien
gtcataatgcctccggctgcagctg

SEQ ID NO: 751231 - DNA, 25 bp, Homo sapien
cccgagtcccactgcttctgcaaca

SEQ ID NO: 751232 - DNA, 25 bp, Homo sapien
catcccgagtcccactgcttctgca

SEQ ID NO: 751233 - DNA, 25 bp, Homo sapien
cgagtcccactgcttctgcaacata

SEQ ID NO: 751234 - DNA, 25 bp, Homo sapien
gagtcccactgcttctgcaacataa

SEQ ID NO: 751235 - DNA, 25 bp, Homo sapien
atgatgtcagcggagatgcaacttt

SEQ ID NO: 751236 - DNA, 25 bp, Homo sapien
tggtaacggatctctgctgtcaagt

SEQ ID NO: 751237 - DNA, 25 bp, Homo sapien
tgctgtcaagttcatgatgtcagcg

SEQ ID NO: 751238 - DNA, 25 bp, Homo sapien
gcccttttctgtgagtggtaacgga

SEQ ID NO: 751239 - DNA, 25 bp, Homo sapien
cagaaaaggtaacatgcttcgaaat

SEQ ID NO: 751240 - DNA, 25 bp, Homo sapien
gaaattcaaccccagtacactgaga

SEQ ID NO: 751241 - DNA, 25 bp, Homo sapien
taacatgcttcgaaatccaggtttc

SEQ ID NO: 751242 - DNA, 25 bp, Homo sapien
aagaaattcaaccccagtacattga

SEQ ID NO: 751243 - DNA, 25 bp, Homo sapien
taattctatgaatgtcgtggatgtg

SEQ ID NO: 751244 - DNA, 25 bp, Homo sapien
attctatgaatgtcgtggatgtgga

SEQ ID NO: 751245 - DNA, 25 bp, Homo sapien
ctgataattctatgaatgtcgtgga

SEQ ID NO: 751246 - DNA, 25 bp, Homo sapien
ctatgaatgtcgtggatgtggaatt

SEQ ID NO: 751247 - DNA, 25 bp, Homo sapien
cagttttgctgaagaacacacgcac

SEQ ID NO: 751248 - DNA, 25 bp, Homo sapien
tttgctgaagaacacacgcacattc

SEQ ID NO: 751249 - DNA, 25 bp, Homo sapien
cattttatacctgcataaagtacaa

SEQ ID NO: 751250 - DNA, 25 bp, Homo sapien
catacacagcatgtggctatatcat

SEQ ID NO: 751251 - DNA, 25 bp, Homo sapien
gctgcaattacaacccaaaaggttc

SEQ ID NO: 751252 - DNA, 25 bp, Homo sapien
cagctattaattaaggtaattattc

SEQ ID NO: 751253 - DNA, 25 bp, Homo sapien
ggtaattattcccagggctgcaatt

SEQ ID NO: 751254 - DNA, 25 bp, Homo sapien
aggttccacttagcatctcttcttg

SEQ ID NO: 751255 - DNA, 25 bp, Homo sapien
gaggctctcagtgcctaagcctggt

SEQ ID NO: 751256 - DNA, 25 bp, Homo sapien
catccaattccacaaccatggctca

SEQ ID NO: 751257 - DNA, 25 bp, Homo sapien
ccagagtgtgtttaccccattgaca

SEQ ID NO: 751258 - DNA, 25 bp, Homo sapien
ggctcactactttgtggtctatgga

SEQ ID NO: 751259 - DNA, 25 bp, Homo sapien
tgcaatctgatctagactgaggtct

SEQ ID NO: 751260 - DNA, 25 bp, Homo sapien
tgtcaacaccaaggacctcagaggg

SEQ ID NO: 751261 - DNA, 25 bp, Homo sapien
tctaaggaagggctccccatatgtt

SEQ ID NO: 751262 - DNA, 25 bp, Homo sapien
tacaatacgcctaggtgacagctat

SEQ ID NO: 751263 - DNA, 25 bp, Homo sapien
ggtaaaaaatgaaaagcggcagcat

SEQ ID NO: 751264 - DNA, 25 bp, Homo sapien
tcatcacaagaaatgtatgcactgg

SEQ ID NO: 751265 - DNA, 25 bp, Homo sapien
tacaagcttgctcaagatgcggaca

SEQ ID NO: 751266 - DNA, 25 bp, Homo sapien
tagcaacaggttcagcaaagggcac

SEQ ID NO: 751267 - DNA, 25 bp, Homo sapien
gccatgtgccactatccgagtgaca

SEQ ID NO: 751268 - DNA, 25 bp, Homo sapien
catatccagaccatccaagttcagg

SEQ ID NO: 751269 - DNA, 25 bp, Homo sapien
caggccatgtgccactatccgagtg

SEQ ID NO: 751270 - DNA, 25 bp, Homo sapien
ccatccaagttcaggccatgtgcca

SEQ ID NO: 751271 - DNA, 25 bp, Homo sapien
ctgtgtgtccctgtgccgcctgatc

SEQ ID NO: 751272 - DNA, 25 bp, Homo sapien
gtgtgtccctgtgccgcctgatcat

SEQ ID NO: 751273 - DNA, 25 bp, Homo sapien
cgcccaggaaagttaggaatgcaca

SEQ ID NO: 751274 - DNA, 25 bp, Homo sapien
aaagttaggaatgcacaggcccagg

SEQ ID NO: 751275 - DNA, 25 bp, Homo sapien
gcccacagatttcccgaaggagcag

SEQ ID NO: 751276 - DNA, 25 bp, Homo sapien
gggagcagcccacagatttcccgaa

SEQ ID NO: 751277 - DNA, 25 bp, Homo sapien
agcagcccacagatttcccgaagga

SEQ ID NO: 751278 - DNA, 25 bp, Homo sapien
gcagcccacagatttcccgaaggag

SEQ ID NO: 751279 - DNA, 25 bp, Homo sapien
ctgggtgtcggaagaagagctggca

SEQ ID NO: 751280 - DNA, 25 bp, Homo sapien
cagtgcaggaagagcatcccagtgg

SEQ ID NO: 751281 - DNA, 25 bp, Homo sapien
gcctgggtgtcggaagaagagctgg

SEQ ID NO: 751282 - DNA, 25 bp, Homo sapien
aaatgcctgggtgtcggaagaagag

SEQ ID NO: 751283 - DNA, 25 bp, Homo sapien
tcctgttttgtaaggccatcctttc

SEQ ID NO: 751284 - DNA, 25 bp, Homo sapien
aatctgggcacgtgactgtgtgact

SEQ ID NO: 751285 - DNA, 25 bp, Homo sapien
attatctttgatggactttacagca

SEQ ID NO: 751286 - DNA, 25 bp, Homo sapien
ttatctttgatggactttacagcag

SEQ ID NO: 751287 - DNA, 25 bp, Homo sapien
gtcaatctgggcacgtgactgtgtg

SEQ ID NO: 751288 - DNA, 25 bp, Homo sapien
cttccactctgcaggagaagagaag

SEQ ID NO: 751289 - DNA, 25 bp, Homo sapien
actctgcaggagaagagaagcgaag

SEQ ID NO: 751290 - DNA, 25 bp, Homo sapien
cactctgcaggagaagagaagcgaa

SEQ ID NO: 751291 - DNA, 25 bp, Homo sapien
tccactctgcaggagaagagaagcg

SEQ ID NO: 751292 - DNA, 25 bp, Homo sapien
tcccaaagttgagctaaataggtgt

SEQ ID NO: 751293 - DNA, 25 bp, Homo sapien
gtctctatctctctacagtagtggg

SEQ ID NO: 751294 - DNA, 25 bp, Homo sapien
tattgggctcctattacagctctgt

SEQ ID NO: 751295 - DNA, 25 bp, Homo sapien
gagggattagcctggagtctctatc

SEQ ID NO: 751296 - DNA, 25 bp, Homo sapien
aggcagtccggagagactggggcca

SEQ ID NO: 751297 - DNA, 25 bp, Homo sapien
ggcagtccggagagactggggccat

SEQ ID NO: 751298 - DNA, 25 bp, Homo sapien
caggcagtccggagagactggggcc

SEQ ID NO: 751299 - DNA, 25 bp, Homo sapien
gcatggtggccatacatcctacagg

SEQ ID NO: 751300 - DNA, 25 bp, Homo sapien
tctgtgcatcatgcatggaaccaaa

SEQ ID NO: 751301 - DNA, 25 bp, Homo sapien
cacgacatacgatgagcatggtggc

SEQ ID NO: 751302 - DNA, 25 bp, Homo sapien
gaaaactgtgagtgactaatacacg

SEQ ID NO: 751303 - DNA, 25 bp, Homo sapien
gggagacttgtctaggcagcctgaa

SEQ ID NO: 751304 - DNA, 25 bp, Homo sapien
ttactcctattggttggcagccacg

SEQ ID NO: 751305 - DNA, 25 bp, Homo sapien
gacacatggtctgcctcttaaggag

SEQ ID NO: 751306 - DNA, 25 bp, Homo sapien
gcttttagcactgtcccagggagct

SEQ ID NO: 751307 - DNA, 25 bp, Homo sapien
tgatttacgctctgttggtggacac

SEQ ID NO: 751308 - DNA, 25 bp, Homo sapien
aagatgggccgagcacaaactgttt

SEQ ID NO: 751309 - DNA, 25 bp, Homo sapien
tgaacatggtaatcagagcccgtgg

SEQ ID NO: 751310 - DNA, 25 bp, Homo sapien
tagtgcttgcattggtgccttgaac

SEQ ID NO: 751311 - DNA, 25 bp, Homo sapien
aagtgggcctgcttccctcggctat

SEQ ID NO: 751312 - DNA, 25 bp, Homo sapien
tccctcggctatcacgtggtctgaa

SEQ ID NO: 751313 - DNA, 25 bp, Homo sapien
cacccatccttaacaggaagtgggc

SEQ ID NO: 751314 - DNA, 25 bp, Homo sapien
gggttcacacacagtccagtgaacg

SEQ ID NO: 751315 - DNA, 25 bp, Homo sapien
gacacagtttcctatgcttgggttt

SEQ ID NO: 751316 - DNA, 25 bp, Homo sapien
tatgcttgggtttcaggatttcatc

SEQ ID NO: 751317 - DNA, 25 bp, Homo sapien
tggctgaaggtgattggcactggaa

SEQ ID NO: 751318 - DNA, 25 bp, Homo sapien
aaatacagtatatggtgggtcctcg

SEQ ID NO: 751319 - DNA, 25 bp, Homo sapien
tattaaatagccactgaaaaaccac

SEQ ID NO: 751320 - DNA, 25 bp, Homo sapien
ttgagcatctggatagccttctgga

SEQ ID NO: 751321 - DNA, 25 bp, Homo sapien
atctggatagccttctggatagcca

SEQ ID NO: 751322 - DNA, 25 bp, Homo sapien
tagccatcatagtggaccaaaatat

SEQ ID NO: 751323 - DNA, 25 bp, Homo sapien
tgatgacttccaagccaacgtggac

SEQ ID NO: 751324 - DNA, 25 bp, Homo sapien
tttacaagccatcggcgagttccca

SEQ ID NO: 751325 - DNA, 25 bp, Homo sapien
ccactttagaaaggacacagctccc

SEQ ID NO: 751326 - DNA, 25 bp, Homo sapien
ggactatgaaagagggatccacttt

SEQ ID NO: 751327 - DNA, 25 bp, Homo sapien
tctgtccctgaaacatatggccctt

SEQ ID NO: 751328 - DNA, 25 bp, Homo sapien
taggtcttctgacggagattcagaa

SEQ ID NO: 751329 - DNA, 25 bp, Homo sapien
gggagaggtaggtcttctgacggag

SEQ ID NO: 751330 - DNA, 25 bp, Homo sapien
tgtccctgaaacatatggcccttcc

SEQ ID NO: 751331 - DNA, 25 bp, Homo sapien
ttgatggtaagaaaatgcctcctcc

SEQ ID NO: 751332 - DNA, 25 bp, Homo sapien
cttgatggtaagaaaatgcctcctc

SEQ ID NO: 751333 - DNA, 25 bp, Homo sapien
tgatggtaagaaaatgcctcctcca

SEQ ID NO: 751334 - DNA, 25 bp, Homo sapien
gatggtaagaaaatgcctcctccat

SEQ ID NO: 751335 - DNA, 25 bp, Homo sapien
ccaggatgccggcacagggagaaac

SEQ ID NO: 751336 - DNA, 25 bp, Homo sapien
caccagcaagggctgtcctgttgga

SEQ ID NO: 751337 - DNA, 25 bp, Homo sapien
tcctttgctcttcatggctttatgg

SEQ ID NO: 751338 - DNA, 25 bp, Homo sapien
ctgttggagccacaggagagccttg

SEQ ID NO: 751339 - DNA, 25 bp, Homo sapien
ctactaatgagccttggtcccaaat

SEQ ID NO: 751340 - DNA, 25 bp, Homo sapien
ccttcctccatatccgtaagttcat

SEQ ID NO: 751341 - DNA, 25 bp, Homo sapien
cttggtcccaaatatgtctcccttc

SEQ ID NO: 751342 - DNA, 25 bp, Homo sapien
tatccgtaagttcatattgcttggg

SEQ ID NO: 751343 - DNA, 25 bp, Homo sapien
agtaccccggcatcatcccgtttat

SEQ ID NO: 751344 - DNA, 25 bp, Homo sapien
ccccggcatcatcccgtttattaga

SEQ ID NO: 751345 - DNA, 25 bp, Homo sapien
gcatcatcccgtttattagaccttt

SEQ ID NO: 751346 - DNA, 25 bp, Homo sapien
tggaaagtaccccggcatcatcccg

SEQ ID NO: 751347 - DNA, 25 bp, Homo sapien
atgtaatcgtagagatagagatggc

SEQ ID NO: 751348 - DNA, 25 bp, Homo sapien
ccactgaactgctctaggtctatgc

SEQ ID NO: 751349 - DNA, 25 bp, Homo sapien
tatgcaagcagtccagtgtgtggcc

SEQ ID NO: 751350 - DNA, 25 bp, Homo sapien
gggcttgtgatgtaatcgtagagat

SEQ ID NO: 751351 - DNA, 25 bp, Homo sapien
ggagctgggagttcagggatgaggt

SEQ ID NO: 751352 - DNA, 25 bp, Homo sapien
tggagctgggagttcagggatgagg

SEQ ID NO: 751353 - DNA, 25 bp, Homo sapien
gagctgggagttcagggatgaggta

SEQ ID NO: 751354 - DNA, 25 bp, Homo sapien
agctgggagttcagggatgaggtag

SEQ ID NO: 751355 - DNA, 25 bp, Homo sapien
cagctgagatgtaggagctggcggc

SEQ ID NO: 751356 - DNA, 25 bp, Homo sapien
tgtcctggagactgactaggtttct

SEQ ID NO: 751357 - DNA, 25 bp, Homo sapien
tagaggattgggtggcgtgagcggt

SEQ ID NO: 751358 - DNA, 25 bp, Homo sapien
cgtgagcggtgaaggcaggccatgt

SEQ ID NO: 751359 - DNA, 25 bp, Homo sapien
tccttggtgctcctaggggcagacg

SEQ ID NO: 751360 - DNA, 25 bp, Homo sapien
gatgctaagttttgtgtggtccctc

SEQ ID NO: 751361 - DNA, 25 bp, Homo sapien
gcaccaccccatggaaaggtccttg

SEQ ID NO: 751362 - DNA, 25 bp, Homo sapien
ggatggcaccaccccatggaaaggt

SEQ ID NO: 751363 - DNA, 25 bp, Homo sapien
gatgacgctacgaaactgacatgca

SEQ ID NO: 751364 - DNA, 25 bp, Homo sapien
ctcaggatgacgctacgaaactgac

SEQ ID NO: 751365 - DNA, 25 bp, Homo sapien
ggatgacgctacgaaactgacatgc

SEQ ID NO: 751366 - DNA, 25 bp, Homo sapien
caggatgacgctacgaaactgacat

SEQ ID NO: 751367 - DNA, 25 bp, Homo sapien
tatacttggttttctccacggccca

SEQ ID NO: 751368 - DNA, 25 bp, Homo sapien
cagcctattggacctagtctgtgga

SEQ ID NO: 751369 - DNA, 25 bp, Homo sapien
ttctatacttggttttctccacggc

SEQ ID NO: 751370 - DNA, 25 bp, Homo sapien
agtctgtggatttctacatactgtc

SEQ ID NO: 751371 - DNA, 25 bp, Homo sapien
cagttctgtcggtcccgtgggtctg

SEQ ID NO: 751372 - DNA, 25 bp, Homo sapien
agaaggggagaaggcatgcactctc

SEQ ID NO: 751373 - DNA, 25 bp, Homo sapien
catgaggaggcaggactccggttgt

SEQ ID NO: 751374 - DNA, 25 bp, Homo sapien
ggcaccctggccgtgattctcatgc

SEQ ID NO: 751375 - DNA, 25 bp, Homo sapien
gtgatggatagccaaggttttcctg

SEQ ID NO: 751376 - DNA, 25 bp, Homo sapien
ggtgatggatagccaaggttttcct

SEQ ID NO: 751377 - DNA, 25 bp, Homo sapien
tgatggatagccaaggttttcctgt

SEQ ID NO: 751378 - DNA, 25 bp, Homo sapien
cagaggggagcacgacattgactat

SEQ ID NO: 751379 - DNA, 25 bp, Homo sapien
ggggagcacgacattgactattacc

SEQ ID NO: 751380 - DNA, 25 bp, Homo sapien
ctgcagaggggagcacgacattgac

SEQ ID NO: 751381 - DNA, 25 bp, Homo sapien
gaggggagcacgacattgactatta

SEQ ID NO: 751382 - DNA, 25 bp, Homo sapien
ctttcagggttgatgtcatgagccc

SEQ ID NO: 751383 - DNA, 25 bp, Homo sapien
tccagcttagactgtttctgcccca

SEQ ID NO: 751384 - DNA, 25 bp, Homo sapien
gagcagttgctgttccagcttagac

SEQ ID NO: 751385 - DNA, 25 bp, Homo sapien
gctgagatacaacttctctgagcag

SEQ ID NO: 751386 - DNA, 25 bp, Homo sapien
tatttctctgtgacaaacatcttct

SEQ ID NO: 751387 - DNA, 25 bp, Homo sapien
ctgtgacaaacatcttcttgaggag

SEQ ID NO: 751388 - DNA, 25 bp, Homo sapien
tacttgtgtttcttatggccattgc

SEQ ID NO: 751389 - DNA, 25 bp, Homo sapien
ttgtgtttcttatggccattgctag

SEQ ID NO: 751390 - DNA, 25 bp, Homo sapien
cacagacagtgggtgcaagccaatc

SEQ ID NO: 751391 - DNA, 25 bp, Homo sapien
caagccaatctgtaagctgacggca

SEQ ID NO: 751392 - DNA, 25 bp, Homo sapien
tgggtgcaagccaatctgtaagctg

SEQ ID NO: 751393 - DNA, 25 bp, Homo sapien
tcacggagtgtggtgtgcacagaca

SEQ ID NO: 751394 - DNA, 25 bp, Homo sapien
ctttgtggaagttgtctgggttctg

SEQ ID NO: 751395 - DNA, 25 bp, Homo sapien
tctttgtggaagttgtctgggttct

SEQ ID NO: 751396 - DNA, 25 bp, Homo sapien
gtctttgtggaagttgtctgggttc

SEQ ID NO: 751397 - DNA, 25 bp, Homo sapien
gcgtggcgaacattcccccggaagc

SEQ ID NO: 751398 - DNA, 25 bp, Homo sapien
cgtggcgaacattcccccggaagct

SEQ ID NO: 751399 - DNA, 25 bp, Homo sapien
cctgtgagcttgctatggagctcat

SEQ ID NO: 751400 - DNA, 25 bp, Homo sapien
tagtaactagttgacctgtgacccc

SEQ ID NO: 751401 - DNA, 25 bp, Homo sapien
cctgtgaccccctgaagactggaga

SEQ ID NO: 751402 - DNA, 25 bp, Homo sapien
cgctgcagcctgacttgctagtgga

SEQ ID NO: 751403 - DNA, 25 bp, Homo sapien
acagttgtaggacatgcaccatttc

SEQ ID NO: 751404 - DNA, 25 bp, Homo sapien
cacacaagtatctctgtgccaacag

SEQ ID NO: 751405 - DNA, 25 bp, Homo sapien
ggccctgacgtcccgcgcgtccgca

SEQ ID NO: 751406 - DNA, 25 bp, Homo sapien
agcttcctgtcaagtccgccgcccg

SEQ ID NO: 751407 - DNA, 25 bp, Homo sapien
tgacgtcccgcgcgtccgcagctgg

SEQ ID NO: 751408 - DNA, 25 bp, Homo sapien
ggccgccccgcagcaaagcttcctg

SEQ ID NO: 751409 - DNA, 25 bp, Homo sapien
cattttatggtacatggcagcctgc

SEQ ID NO: 751410 - DNA, 25 bp, Homo sapien
ccattttatggtacatggcagcctg

SEQ ID NO: 751411 - DNA, 25 bp, Homo sapien
tggtacatggcagcctgcactgctg

SEQ ID NO: 751412 - DNA, 25 bp, Homo sapien
catggcagcctgcactgctgagttt

SEQ ID NO: 751413 - DNA, 25 bp, Homo sapien
gaatcctgcaaactagatttctcac

SEQ ID NO: 751414 - DNA, 25 bp, Homo sapien
atttctcactgtgcattcccgcaca

SEQ ID NO: 751415 - DNA, 25 bp, Homo sapien
cctgcaaactagatttctcactgtg

SEQ ID NO: 751416 - DNA, 25 bp, Homo sapien
cagagagaatcctgcaaactagatt

SEQ ID NO: 751417 - DNA, 25 bp, Homo sapien
caattccctgacactacctgtctgg

SEQ ID NO: 751418 - DNA, 25 bp, Homo sapien
tgtatgccttcgagagaaatctgtg

SEQ ID NO: 751419 - DNA, 25 bp, Homo sapien
gactctgaacccgagaaaatcaggg

SEQ ID NO: 751420 - DNA, 25 bp, Homo sapien
tttgtgacatgtctgcggaacagcc

SEQ ID NO: 751421 - DNA, 25 bp, Homo sapien
catttgatgagtgcccatacgaagc

SEQ ID NO: 751422 - DNA, 25 bp, Homo sapien
tatcaatcccacagagtaagaagac

SEQ ID NO: 751423 - DNA, 25 bp, Homo sapien
gggtcttgccacattaggagctcaa

SEQ ID NO: 751424 - DNA, 25 bp, Homo sapien
caacagaagattcactgggataggg

SEQ ID NO: 751425 - DNA, 25 bp, Homo sapien
ggtttcaagacagatgcgagtgcca

SEQ ID NO: 751426 - DNA, 25 bp, Homo sapien
agacagatgcgagtgccaaggattt

SEQ ID NO: 751427 - DNA, 25 bp, Homo sapien
ttcaagacagatgcgagtgccaagg

SEQ ID NO: 751428 - DNA, 25 bp, Homo sapien
gggtttcaagacagatgcgagtgcc

SEQ ID NO: 751429 - DNA, 25 bp, Homo sapien
tcactaatgtgtgggcagctgactc

SEQ ID NO: 751430 - DNA, 25 bp, Homo sapien
cccagtgtcttaggcctttgcagcc

SEQ ID NO: 751431 - DNA, 25 bp, Homo sapien
tccccagtgtcttaggcctttgcag

SEQ ID NO: 751432 - DNA, 25 bp, Homo sapien
agtgtcttaggcctttgcagcctca

SEQ ID NO: 751433 - DNA, 25 bp, Homo sapien
cttccccagtgtcttaggcctttgc

SEQ ID NO: 751434 - DNA, 25 bp, Homo sapien
actggccgtgtggatgcttttctgc

SEQ ID NO: 751435 - DNA, 25 bp, Homo sapien
cacacacggtaggatggttacctag

SEQ ID NO: 751436 - DNA, 25 bp, Homo sapien
tccaactgtggtggcatctcctgag

SEQ ID NO: 751437 - DNA, 25 bp, Homo sapien
atctcctgagaagcgacgtggcact

SEQ ID NO: 751438 - DNA, 25 bp, Homo sapien
tgcagtgcctggtctctctaggatg

SEQ ID NO: 751439 - DNA, 25 bp, Homo sapien
ccatgcagtgcctggtctctctagg

SEQ ID NO: 751440 - DNA, 25 bp, Homo sapien
agtgcctggtctctctaggatgctc

SEQ ID NO: 751441 - DNA, 25 bp, Homo sapien
gagctggctcggtgaagggtctgtg

SEQ ID NO: 751442 - DNA, 25 bp, Homo sapien
cacgggcaggatctggttcccaatg

SEQ ID NO: 751443 - DNA, 25 bp, Homo sapien
aatgactgtggcgatgatctggccc

SEQ ID NO: 751444 - DNA, 25 bp, Homo sapien
ccgcttgctgcttggctcgatggcc

SEQ ID NO: 751445 - DNA, 25 bp, Homo sapien
ggcatcagtggaatggtcccgataa

SEQ ID NO: 751446 - DNA, 25 bp, Homo sapien
tttttccagttgctaatctccaatc

SEQ ID NO: 751447 - DNA, 25 bp, Homo sapien
catatgtgtactggtgaagggagcc

SEQ ID NO: 751448 - DNA, 25 bp, Homo sapien
gatttgcaaggtacatccccaagaa

SEQ ID NO: 751449 - DNA, 25 bp, Homo sapien
aagggagcccgctctttgggatgct

SEQ ID NO: 751450 - DNA, 25 bp, Homo sapien
agcttgagtttctctccgtctgagt

SEQ ID NO: 751451 - DNA, 25 bp, Homo sapien
gagctgtgagcccagtgtaaatagg

SEQ ID NO: 751452 - DNA, 25 bp, Homo sapien
tccgtctgagtttacataatcactt

SEQ ID NO: 751453 - DNA, 25 bp, Homo sapien
gctgtgagcccagtgtaaataggct

SEQ ID NO: 751454 - DNA, 25 bp, Homo sapien
gggtttctgtggagttgataaaatg

SEQ ID NO: 751455 - DNA, 25 bp, Homo sapien
ggtttctgtggagttgataaaatgc

SEQ ID NO: 751456 - DNA, 25 bp, Homo sapien
agactctagagtccggatgggtttc

SEQ ID NO: 751457 - DNA, 25 bp, Homo sapien
tctagagtccggatgggtttctgtg

SEQ ID NO: 751458 - DNA, 25 bp, Homo sapien
cctgccggacgggactttgagacat

SEQ ID NO: 751459 - DNA, 25 bp, Homo sapien
agaagaggaagcctgccggacggga

SEQ ID NO: 751460 - DNA, 25 bp, Homo sapien
ggcccacgctcaaagctgaagaaga

SEQ ID NO: 751461 - DNA, 25 bp, Homo sapien
tgctgactaactggcccacgctcaa

SEQ ID NO: 751462 - DNA, 25 bp, Homo sapien
cacttgaggtggcttattgtacaca

SEQ ID NO: 751463 - DNA, 25 bp, Homo sapien
aatatactatctatccctagggcca

SEQ ID NO: 751464 - DNA, 25 bp, Homo sapien
ttctcatctgattccggcccatgca

SEQ ID NO: 751465 - DNA, 25 bp, Homo sapien
gaggcagacttgcaggcttatccta

SEQ ID NO: 751466 - DNA, 25 bp, Homo sapien
tccataatgcctcattccattttct

SEQ ID NO: 751467 - DNA, 25 bp, Homo sapien
taacatctttccataatgcctcatt

SEQ ID NO: 751468 - DNA, 25 bp, Homo sapien
tctttccataatgcctcattccatt

SEQ ID NO: 751469 - DNA, 25 bp, Homo sapien
acatctttccataatgcctcattcc

SEQ ID NO: 751470 - DNA, 25 bp, Homo sapien
ctgtcactacttatggcaagtggcc

SEQ ID NO: 751471 - DNA, 25 bp, Homo sapien
cactacttatggcaagtggccaaga

SEQ ID NO: 751472 - DNA, 25 bp, Homo sapien
taccccactgtcactacttatggca

SEQ ID NO: 751473 - DNA, 25 bp, Homo sapien
cccactgtcactacttatggcaagt

SEQ ID NO: 751474 - DNA, 25 bp, Homo sapien
gtataggactgacgggccagacagg

SEQ ID NO: 751475 - DNA, 25 bp, Homo sapien
ctgtataggactgacgggccagaca

SEQ ID NO: 751476 - DNA, 25 bp, Homo sapien
tgtataggactgacgggccagacag

SEQ ID NO: 751477 - DNA, 25 bp, Homo sapien
tataggactgacgggccagacaggt

SEQ ID NO: 751478 - DNA, 25 bp, Homo sapien
gccaagggacaggcgccggatttta

SEQ ID NO: 751479 - DNA, 25 bp, Homo sapien
ctttggcaaattctcggatctcctc

SEQ ID NO: 751480 - DNA, 25 bp, Homo sapien
tgcagatggccgactggctgtacgc

SEQ ID NO: 751481 - DNA, 25 bp, Homo sapien
ggatctcctccagattaaccccatc

SEQ ID NO: 751482 - DNA, 25 bp, Homo sapien
caaaaggccagggttcagtttggct

SEQ ID NO: 751483 - DNA, 25 bp, Homo sapien
tcagtttggctgtcagactgctagc

SEQ ID NO: 751484 - DNA, 25 bp, Homo sapien
actgctagctatagtgttctcttgg

SEQ ID NO: 751485 - DNA, 25 bp, Homo sapien
atacaaaaggccagggttcagtttg

SEQ ID NO: 751486 - DNA, 25 bp, Homo sapien
tgttaagggctccaaagggactgcc

SEQ ID NO: 751487 - DNA, 25 bp, Homo sapien
taaactcggtcaggttctgcatacc

SEQ ID NO: 751488 - DNA, 25 bp, Homo sapien
tctgcatacctgctcgatggcgggc

SEQ ID NO: 751489 - DNA, 25 bp, Homo sapien
aagcaccggcttgatcttctgggca

SEQ ID NO: 751490 - DNA, 25 bp, Homo sapien
tttggaaaaccaacggacatgtaga

SEQ ID NO: 751491 - DNA, 25 bp, Homo sapien
tacttacaagggtgatgacgactgg

SEQ ID NO: 751492 - DNA, 25 bp, Homo sapien
tattcgctttgaacagatcaaagtt

SEQ ID NO: 751493 - DNA, 25 bp, Homo sapien
gcttctgattatgggtgggcatctc

SEQ ID NO: 751494 - DNA, 25 bp, Homo sapien
gagaagcgtagacgaacgatcgcgt

SEQ ID NO: 751495 - DNA, 25 bp, Homo sapien
gcgtagacgaacgatcgcgttgcaa

SEQ ID NO: 751496 - DNA, 25 bp, Homo sapien
tgcggagaagcgtagacgaacgatc

SEQ ID NO: 751497 - DNA, 25 bp, Homo sapien
acgaacgatcgcgttgcaatgccat

SEQ ID NO: 751498 - DNA, 25 bp, Homo sapien
accgtctgcctgtacctgggtgaaa

SEQ ID NO: 751499 - DNA, 25 bp, Homo sapien
tgctcctttaatggaacaccgtctg

SEQ ID NO: 751500 - DNA, 25 bp, Homo sapien
tatatcccgaagagtaattattccc

SEQ ID NO: 751501 - DNA, 25 bp, Homo sapien
ggcatttctaatcagttgggcaact

SEQ ID NO: 751502 - DNA, 25 bp, Homo sapien
tgcatgaatcattggaggggacaat

SEQ ID NO: 751503 - DNA, 25 bp, Homo sapien
gcatgaatcattggaggggacaatt

SEQ ID NO: 751504 - DNA, 25 bp, Homo sapien
ctgcatgaatcattggaggggacaa

SEQ ID NO: 751505 - DNA, 25 bp, Homo sapien
tggaaacacctttacgagtgacttg

SEQ ID NO: 751506 - DNA, 25 bp, Homo sapien
cagttagcattgactggtaaaatgg

SEQ ID NO: 751507 - DNA, 25 bp, Homo sapien
ttctgggttgtccatgtttgtgcag

SEQ ID NO: 751508 - DNA, 25 bp, Homo sapien
caagttagctgtggtccagttagca

SEQ ID NO: 751509 - DNA, 25 bp, Homo sapien
taagcattaggtgtggtcccaaaga

SEQ ID NO: 751510 - DNA, 25 bp, Homo sapien
tttggtccagcgtagagaaacgagc

SEQ ID NO: 751511 - DNA, 25 bp, Homo sapien
aactgagcaggccttatgtaaccgc

SEQ ID NO: 751512 - DNA, 25 bp, Homo sapien
tggtgcctcataagtgaccccggtg

SEQ ID NO: 751513 - DNA, 25 bp, Homo sapien
tgtggaaatgatctcgggccttgtg

SEQ ID NO: 751514 - DNA, 25 bp, Homo sapien
tacctcttgattggttagcaaagcc

SEQ ID NO: 751515 - DNA, 25 bp, Homo sapien
gggtgcatgtttccatgactgaaat

SEQ ID NO: 751516 - DNA, 25 bp, Homo sapien
aatccacttttcttcactcatacct

SEQ ID NO: 751517 - DNA, 25 bp, Homo sapien
taagtaagagatcatcatgccagcc

SEQ ID NO: 751518 - DNA, 25 bp, Homo sapien
tttaagtaagagatcatcatgccag

SEQ ID NO: 751519 - DNA, 25 bp, Homo sapien
ttaagtaagagatcatcatgccagc

SEQ ID NO: 751520 - DNA, 25 bp, Homo sapien
tgtaagcgatttattaaggaaggac

SEQ ID NO: 751521 - DNA, 25 bp, Homo sapien
ctgggccccggataaatctagggat

SEQ ID NO: 751522 - DNA, 25 bp, Homo sapien
tttagaacattttgagacggtgccg

SEQ ID NO: 751523 - DNA, 25 bp, Homo sapien
agacggtgccggaggtcagcttccc

SEQ ID NO: 751524 - DNA, 25 bp, Homo sapien
acctcaattgagggccgggtttgag

SEQ ID NO: 751525 - DNA, 25 bp, Homo sapien
cttctgcaagtgtttgaacctcaat

SEQ ID NO: 751526 - DNA, 25 bp, Homo sapien
tctgcaagtgtttgaacctcaattg

SEQ ID NO: 751527 - DNA, 25 bp, Homo sapien
caattgagggccgggtttgaggtct

SEQ ID NO: 751528 - DNA, 25 bp, Homo sapien
caggaggaagtctccttccccattt

SEQ ID NO: 751529 - DNA, 25 bp, Homo sapien
gctgttactttcaagctgccaactt

SEQ ID NO: 751530 - DNA, 25 bp, Homo sapien
cagatgagcagccttttcccaagag

SEQ ID NO: 751531 - DNA, 25 bp, Homo sapien
gctgactttctggagctcttctctg

SEQ ID NO: 751532 - DNA, 25 bp, Homo sapien
tccactgggattagactagaagggt

SEQ ID NO: 751533 - DNA, 25 bp, Homo sapien
agggactggccatgagcatctgcag

SEQ ID NO: 751534 - DNA, 25 bp, Homo sapien
gcatctgcagctgaaggaagcacgg

SEQ ID NO: 751535 - DNA, 25 bp, Homo sapien
aagctggccaggtgcctcctttctc

SEQ ID NO: 751536 - DNA, 25 bp, Homo sapien
catgaccaggtacagaggtcactcc

SEQ ID NO: 751537 - DNA, 25 bp, Homo sapien
gtcactcctctgatgctattcagct

SEQ ID NO: 751538 - DNA, 25 bp, Homo sapien
tgcatgggtggctgctgcatgacca

SEQ ID NO: 751539 - DNA, 25 bp, Homo sapien
ggcatggtccaatgctgtgttaccc

SEQ ID NO: 751540 - DNA, 25 bp, Homo sapien
tcatcttcctgtcttagtgccttca

SEQ ID NO: 751541 - DNA, 25 bp, Homo sapien
ccttcagggtgggagactgtttggc

SEQ ID NO: 751542 - DNA, 25 bp, Homo sapien
cttcctgtcttagtgccttcagggt

SEQ ID NO: 751543 - DNA, 25 bp, Homo sapien
ggtgggagactgtttggctttttca

SEQ ID NO: 751544 - DNA, 25 bp, Homo sapien
ttggcaaattctctcccagcgaaat

SEQ ID NO: 751545 - DNA, 25 bp, Homo sapien
ctgatgtcgtgacccccctctggtt

SEQ ID NO: 751546 - DNA, 25 bp, Homo sapien
acaaacagctgatgtcgtgaccccc

SEQ ID NO: 751547 - DNA, 25 bp, Homo sapien
ctcccagcgaaatgaatacaaacag

SEQ ID NO: 751548 - DNA, 25 bp, Homo sapien
gtaatgaggctcagtcccgtaagtc

SEQ ID NO: 751549 - DNA, 25 bp, Homo sapien
tgtttctgccacctggttgttagct

SEQ ID NO: 751550 - DNA, 25 bp, Homo sapien
tcagtcccgtaagtcctctcctgag

SEQ ID NO: 751551 - DNA, 25 bp, Homo sapien
ttctgccacctggttgttagctgtg

SEQ ID NO: 751552 - DNA, 25 bp, Homo sapien
gataatcctagcgtatcagtaacca

SEQ ID NO: 751553 - DNA, 25 bp, Homo sapien
ggtgtagtcaattataacgccaact

SEQ ID NO: 751554 - DNA, 25 bp, Homo sapien
cagcaactgagcattaatatttaag

SEQ ID NO: 751555 - DNA, 25 bp, Homo sapien
taacgccaacttcttcaatctctat

SEQ ID NO: 751556 - DNA, 25 bp, Homo sapien
actggggggacaaactcggatatag

SEQ ID NO: 751557 - DNA, 25 bp, Homo sapien
gactggggggacaaactcggatata

SEQ ID NO: 751558 - DNA, 25 bp, Homo sapien
caggactggggggacaaactcggat

SEQ ID NO: 751559 - DNA, 25 bp, Homo sapien
aatcaggactggggggacaaactcg

SEQ ID NO: 751560 - DNA, 25 bp, Homo sapien
cttgacatgttcacttgtggaccac

SEQ ID NO: 751561 - DNA, 25 bp, Homo sapien
gacagcacacgcattcttgacatgt

SEQ ID NO: 751562 - DNA, 25 bp, Homo sapien
tggtcttgaccaaggacagcacacg

SEQ ID NO: 751563 - DNA, 25 bp, Homo sapien
acacacttaagtcccagccaccttt

SEQ ID NO: 751564 - DNA, 25 bp, Homo sapien
ctggtgggaagtgacgttgctgcag

SEQ ID NO: 751565 - DNA, 25 bp, Homo sapien
tgggaagtgacgttgctgcagaagc

SEQ ID NO: 751566 - DNA, 25 bp, Homo sapien
cagaagctgcagtgctgacgaggag

SEQ ID NO: 751567 - DNA, 25 bp, Homo sapien
agaatcctgaacagccgccggtgtg

SEQ ID NO: 751568 - DNA, 25 bp, Homo sapien
tatgcagggatggagatgatccagg

SEQ ID NO: 751569 - DNA, 25 bp, Homo sapien
atgcagggatggagatgatccaggc

SEQ ID NO: 751570 - DNA, 25 bp, Homo sapien
agatgatccaggctggaccaatcag

SEQ ID NO: 751571 - DNA, 25 bp, Homo sapien
ctatgcagggatggagatgatccag

SEQ ID NO: 751572 - DNA, 25 bp, Homo sapien
gagctttgctataaggagactgcct

SEQ ID NO: 751573 - DNA, 25 bp, Homo sapien
ggatcgaaacaagccagctcagtgg

SEQ ID NO: 751574 - DNA, 25 bp, Homo sapien
tttgactacatggatcgaaacaagc

SEQ ID NO: 751575 - DNA, 25 bp, Homo sapien
ttaagagctttgctataaggagact

SEQ ID NO: 751576 - DNA, 25 bp, Homo sapien
gtgaatgcaccgtaggcgaagccgt

SEQ ID NO: 751577 - DNA, 25 bp, Homo sapien
cacggtgaatgcaccgtaggcgaag

SEQ ID NO: 751578 - DNA, 25 bp, Homo sapien
tgcaccgtaggcgaagccgtttccc

SEQ ID NO: 751579 - DNA, 25 bp, Homo sapien
cacacggtgaatgcaccgtaggcga

SEQ ID NO: 751580 - DNA, 25 bp, Homo sapien
tgcatctggtgcatccatgctttat

SEQ ID NO: 751581 - DNA, 25 bp, Homo sapien
gcatctggtgcatccatgctttatt

SEQ ID NO: 751582 - DNA, 25 bp, Homo sapien
ccactgcatctggtgcatccatgct

SEQ ID NO: 751583 - DNA, 25 bp, Homo sapien
actgcatctggtgcatccatgcttt

SEQ ID NO: 751584 - DNA, 25 bp, Homo sapien
gtccaagcgatatggaagaactcag

SEQ ID NO: 751585 - DNA, 25 bp, Homo sapien
tatggtcatgcttccaggtgtttgc

SEQ ID NO: 751586 - DNA, 25 bp, Homo sapien
ttccaggtgtttgcataagcttcac

SEQ ID NO: 751587 - DNA, 25 bp, Homo sapien
gggctcccgtatggtcatgcttcca

SEQ ID NO: 751588 - DNA, 25 bp, Homo sapien
gaagatctttcaagatagcaagggt

SEQ ID NO: 751589 - DNA, 25 bp, Homo sapien
agtacctgctcccctcgtagggttg

SEQ ID NO: 751590 - DNA, 25 bp, Homo sapien
ggttgttgggaagatctttcaagat

SEQ ID NO: 751591 - DNA, 25 bp, Homo sapien
tgctcccctcgtagggttgttggga

SEQ ID NO: 751592 - DNA, 25 bp, Homo sapien
cttcaaagatgcagttcaggactga

SEQ ID NO: 751593 - DNA, 25 bp, Homo sapien
ccttcaaagatgcagttcaggactg

SEQ ID NO: 751594 - DNA, 25 bp, Homo sapien
ttcagttgctgaagtgacatagccc

SEQ ID NO: 751595 - DNA, 25 bp, Homo sapien
tttgccaaatgattgaaggtgccag

SEQ ID NO: 751596 - DNA, 25 bp, Homo sapien
gctattaccccagtaacatcactga

SEQ ID NO: 751597 - DNA, 25 bp, Homo sapien
ggtgccagacagcttgctattaccc

SEQ ID NO: 751598 - DNA, 25 bp, Homo sapien
gggaccctcagtgagacaccttcca

SEQ ID NO: 751599 - DNA, 25 bp, Homo sapien
cgggaccctcagtgagacaccttcc

SEQ ID NO: 751600 - DNA, 25 bp, Homo sapien
tgagttgtgagcgaggcagatttcc

SEQ ID NO: 751601 - DNA, 25 bp, Homo sapien
cgccggagcctttcgcttgcggtga

SEQ ID NO: 751602 - DNA, 25 bp, Homo sapien
ccctcggttggcagtgttgatgtgt

SEQ ID NO: 751603 - DNA, 25 bp, Homo sapien
tcgcttgcggtgattttgggctccc

SEQ ID NO: 751604 - DNA, 25 bp, Homo sapien
gggccctggatcaaggaggctgctt

SEQ ID NO: 751605 - DNA, 25 bp, Homo sapien
atgttactctgccattcccgctgcg

SEQ ID NO: 751606 - DNA, 25 bp, Homo sapien
tgcgccaggagcgactcgtctgctt

SEQ ID NO: 751607 - DNA, 25 bp, Homo sapien
gtctgcttcttcgtcaaacacgtcc

SEQ ID NO: 751608 - DNA, 25 bp, Homo sapien
gataaagagagcagcgccgggccag

SEQ ID NO: 751609 - DNA, 25 bp, Homo sapien
cttcttcacaactccgcgcctcttc

SEQ ID NO: 751610 - DNA, 25 bp, Homo sapien
cttcacaactccgcgcctcttccca

SEQ ID NO: 751611 - DNA, 25 bp, Homo sapien
ggataaagagagcagcgccgggcca

SEQ ID NO: 751612 - DNA, 25 bp, Homo sapien
agaatgcgtcttgttgttttacacg

SEQ ID NO: 751613 - DNA, 25 bp, Homo sapien
ccatcgagaaatcctagcaagacgc

SEQ ID NO: 751614 - DNA, 25 bp, Homo sapien
cacgctttcaagtaaccatcgagaa

SEQ ID NO: 751615 - DNA, 25 bp, Homo sapien
aatcctagcaagacgcgggtcggac

SEQ ID NO: 751616 - DNA, 25 bp, Homo sapien
catagttaattttggtcggtcctca

SEQ ID NO: 751617 - DNA, 25 bp, Homo sapien
tggtcggtcctcagtttctaacgca

SEQ ID NO: 751618 - DNA, 25 bp, Homo sapien
cacatagttaattttggtcggtcct

SEQ ID NO: 751619 - DNA, 25 bp, Homo sapien
cagtttctaacgcatcccgtaggcg

SEQ ID NO: 751620 - DNA, 25 bp, Homo sapien
caatacttattagtgtggccccagt

SEQ ID NO: 751621 - DNA, 25 bp, Homo sapien
gacaacatggtttttgggctaagca

SEQ ID NO: 751622 - DNA, 25 bp, Homo sapien
aaaattacacatctgggctcttgcc

SEQ ID NO: 751623 - DNA, 25 bp, Homo sapien
ttcaagccacccatataaactgcgt

SEQ ID NO: 751624 - DNA, 25 bp, Homo sapien
gcattcagtctagattgtcattaaa

SEQ ID NO: 751625 - DNA, 25 bp, Homo sapien
tcagtgacaattccgtggttttaga

SEQ ID NO: 751626 - DNA, 25 bp, Homo sapien
tcccataaatgggaactttgcccac

SEQ ID NO: 751627 - DNA, 25 bp, Homo sapien
cttttggtttgaagtgaactgtgac

SEQ ID NO: 751628 - DNA, 25 bp, Homo sapien
taaagagtggaagagtattgaaccc

SEQ ID NO: 751629 - DNA, 25 bp, Homo sapien
tatctacgtggatcaggacttgcca

SEQ ID NO: 751630 - DNA, 25 bp, Homo sapien
caggagtcttgcagttccgctggca

SEQ ID NO: 751631 - DNA, 25 bp, Homo sapien
ggcggcagagcaacgtacgcatcat

SEQ ID NO: 751632 - DNA, 25 bp, Homo sapien
tcttataaccttgattgaagccctg

SEQ ID NO: 751633 - DNA, 25 bp, Homo sapien
tcctcggagtcgtccatagtttaaa

SEQ ID NO: 751634 - DNA, 25 bp, Homo sapien
gctttgccagcatctattccatctc

SEQ ID NO: 751635 - DNA, 25 bp, Homo sapien
agccctgttgaagagtaactgcttt

SEQ ID NO: 751636 - DNA, 25 bp, Homo sapien
aaaatgattcagcatttagacttta

SEQ ID NO: 751637 - DNA, 25 bp, Homo sapien
gaaacatcctccagtagtattgagg

SEQ ID NO: 751638 - DNA, 25 bp, Homo sapien
atgattcagcatttagactttaaaa

SEQ ID NO: 751639 - DNA, 25 bp, Homo sapien
aaacatcctccagtagtattgaggt

SEQ ID NO: 751640 - DNA, 25 bp, Homo sapien
cacatgtgatatgcaggccactggt

SEQ ID NO: 751641 - DNA, 25 bp, Homo sapien
tggtatagagcatcaaactggacaa

SEQ ID NO: 751642 - DNA, 25 bp, Homo sapien
tataattctatgatctgcgacacgc

SEQ ID NO: 751643 - DNA, 25 bp, Homo sapien
actggacaaggctgctaggctcctg

SEQ ID NO: 751644 - DNA, 25 bp, Homo sapien
aaggtgacaccaggagagcaaagca

SEQ ID NO: 751645 - DNA, 25 bp, Homo sapien
tattattatgaaggtgacaccagga

SEQ ID NO: 751646 - DNA, 25 bp, Homo sapien
ttatgaaggtgacaccaggagagca

SEQ ID NO: 751647 - DNA, 25 bp, Homo sapien
attattattatgaaggtgacaccag

SEQ ID NO: 751648 - DNA, 25 bp, Homo sapien
tctacaacatgggacggtggagtga

SEQ ID NO: 751649 - DNA, 25 bp, Homo sapien
gagtgattgatttcagatgtttgag

SEQ ID NO: 751650 - DNA, 25 bp, Homo sapien
caatggagtccaataaatctacaac

SEQ ID NO: 751651 - DNA, 25 bp, Homo sapien
gacaaaggtccatatcctcaatgga

SEQ ID NO: 751652 - DNA, 25 bp, Homo sapien
ggttttctgaatgtgcatgctcctg

SEQ ID NO: 751653 - DNA, 25 bp, Homo sapien
actaaactggctgtctgttccaaaa

SEQ ID NO: 751654 - DNA, 25 bp, Homo sapien
tatgaacaatctatcccactatggc

SEQ ID NO: 751655 - DNA, 25 bp, Homo sapien
taatacatctactgataggcccagc

SEQ ID NO: 751656 - DNA, 25 bp, Homo sapien
tagtgttaattttgaagacaatagt

SEQ ID NO: 751657 - DNA, 25 bp, Homo sapien
ccagtacaaatttcgattgttagga

SEQ ID NO: 751658 - DNA, 25 bp, Homo sapien
cataaagggtaaccctacagttgag

SEQ ID NO: 751659 - DNA, 25 bp, Homo sapien
ggtgtttgatgcagaaaccagtaca

SEQ ID NO: 751660 - DNA, 25 bp, Homo sapien
tgaggtcctgaccacctaatagtga

SEQ ID NO: 751661 - DNA, 25 bp, Homo sapien
gaataaaagtgctgagaaatcctct

SEQ ID NO: 751662 - DNA, 25 bp, Homo sapien
caattaaggctaccaatgagggaca

SEQ ID NO: 751663 - DNA, 25 bp, Homo sapien
caatatgcctgtctttcagcttaga

SEQ ID NO: 751664 - DNA, 25 bp, Homo sapien
tgaggagggtcatagtacagtgtac

SEQ ID NO: 751665 - DNA, 25 bp, Homo sapien
ccagctgtcaaatggcactggtatc

SEQ ID NO: 751666 - DNA, 25 bp, Homo sapien
tgtgaactttgaggagggtcatagt

SEQ ID NO: 751667 - DNA, 25 bp, Homo sapien
tcctgaaactcaatatggctttctg

SEQ ID NO: 751668 - DNA, 25 bp, Homo sapien
ggctgcttataatacccatattcca

SEQ ID NO: 751669 - DNA, 25 bp, Homo sapien
tataatacccatattccatgtggag

SEQ ID NO: 751670 - DNA, 25 bp, Homo sapien
cccatattccatgtggagttgagat

SEQ ID NO: 751671 - DNA, 25 bp, Homo sapien
tagaggctgcttataatacccatat

SEQ ID NO: 751672 - DNA, 25 bp, Homo sapien
tcccacaaagcagttaataagtagt

SEQ ID NO: 751673 - DNA, 25 bp, Homo sapien
ggcctcagcagttctagtaactaaa

SEQ ID NO: 751674 - DNA, 25 bp, Homo sapien
tcagatatattagcacccagaagta

SEQ ID NO: 751675 - DNA, 25 bp, Homo sapien
caggtatatgcattcagctgcccac

SEQ ID NO: 751676 - DNA, 25 bp, Homo sapien
caggaagacagctagattgtaggta

SEQ ID NO: 751677 - DNA, 25 bp, Homo sapien
aatctgggtgattagaatgaaagga

SEQ ID NO: 751678 - DNA, 25 bp, Homo sapien
ggaagacagctagattgtaggtact

SEQ ID NO: 751679 - DNA, 25 bp, Homo sapien
ttaaaatctgggtgattagaatgaa

SEQ ID NO: 751680 - DNA, 25 bp, Homo sapien
aagtattctaggcagaagagtcagc

SEQ ID NO: 751681 - DNA, 25 bp, Homo sapien
gaagagcaatcacctctgcctgatg

SEQ ID NO: 751682 - DNA, 25 bp, Homo sapien
ctatgcatctatgtacagggtgtga

SEQ ID NO: 751683 - DNA, 25 bp, Homo sapien
gaataagcctagtgtgtccataaag

SEQ ID NO: 751684 - DNA, 25 bp, Homo sapien
ccatctcaaaaaagaaaagctaaca

SEQ ID NO: 751685 - DNA, 25 bp, Homo sapien
tctcaaaaaagaaaagctaacataa

SEQ ID NO: 751686 - DNA, 25 bp, Homo sapien
agaaaagctaacataaagatttaca

SEQ ID NO: 751687 - DNA, 25 bp, Homo sapien
gaaaagctaacataaagatttacaa

SEQ ID NO: 751688 - DNA, 25 bp, Homo sapien
ctcccaccagaagctcacgctggct

SEQ ID NO: 751689 - DNA, 25 bp, Homo sapien
cgtcacctctcaatgacacagtttg

SEQ ID NO: 751690 - DNA, 25 bp, Homo sapien
aaggcaaacataaggcaggtgtggt

SEQ ID NO: 751691 - DNA, 25 bp, Homo sapien
tgctggccggccactccaagtgcag

SEQ ID NO: 751692 - DNA, 25 bp, Homo sapien
cccttgggcagcctgcaactagacc

SEQ ID NO: 751693 - DNA, 25 bp, Homo sapien
cttgggcagcctgcaactagaccct

SEQ ID NO: 751694 - DNA, 25 bp, Homo sapien
tgggcagcctgcaactagacccttg

SEQ ID NO: 751695 - DNA, 25 bp, Homo sapien
ggcagcctgcaactagacccttggg

SEQ ID NO: 751696 - DNA, 25 bp, Homo sapien
tatttagtaagcatccaccctgagt

SEQ ID NO: 751697 - DNA, 25 bp, Homo sapien
tgggccatttagtagctacaaactg

SEQ ID NO: 751698 - DNA, 25 bp, Homo sapien
tggacacattacttagccttcttgg

SEQ ID NO: 751699 - DNA, 25 bp, Homo sapien
cgatttcctaatctctaagatgggc

SEQ ID NO: 751700 - DNA, 25 bp, Homo sapien
agacacagttctcagaagctggtgt

SEQ ID NO: 751701 - DNA, 25 bp, Homo sapien
gaatatcaccaaagtactaatcaga

SEQ ID NO: 751702 - DNA, 25 bp, Homo sapien
taatcagaactacctacagacacag

SEQ ID NO: 751703 - DNA, 25 bp, Homo sapien
ggctgccataagctgtaattgtacc

SEQ ID NO: 751704 - DNA, 25 bp, Homo sapien
tccttggagacaaagcaacctgtga

SEQ ID NO: 751705 - DNA, 25 bp, Homo sapien
tgatgagtagctgagtgaaatccca

SEQ ID NO: 751706 - DNA, 25 bp, Homo sapien
tttgttaagagcaggcactcccaga

SEQ ID NO: 751707 - DNA, 25 bp, Homo sapien
tcatgttcacactaaagaggcaagg

SEQ ID NO: 751708 - DNA, 25 bp, Homo sapien
catgttgtatgccaccacagagttt

SEQ ID NO: 751709 - DNA, 25 bp, Homo sapien
ccacagagtttgaatatgtacaagg

SEQ ID NO: 751710 - DNA, 25 bp, Homo sapien
tatgtacaagggcatctccagtcat

SEQ ID NO: 751711 - DNA, 25 bp, Homo sapien
ggcatctccagtcattgtacttggg

SEQ ID NO: 751712 - DNA, 25 bp, Homo sapien
tgactgtcttctatagataaccact

SEQ ID NO: 751713 - DNA, 25 bp, Homo sapien
cttctatagataaccacttgctggg

SEQ ID NO: 751714 - DNA, 25 bp, Homo sapien
ccacttgctgggcactcttcggcat

SEQ ID NO: 751715 - DNA, 25 bp, Homo sapien
ctgtcttctatagataaccacttgc

SEQ ID NO: 751716 - DNA, 25 bp, Homo sapien
gtttcttatgttctttctgactggc

SEQ ID NO: 751717 - DNA, 25 bp, Homo sapien
ctaaccagatgttctcttaagtttc

SEQ ID NO: 751718 - DNA, 25 bp, Homo sapien
tgactggctgtctctttgagtcctc

SEQ ID NO: 751719 - DNA, 25 bp, Homo sapien
gactggctgtctctttgagtcctct

SEQ ID NO: 751720 - DNA, 25 bp, Homo sapien
aatatcctctcgatatttctttgaa

SEQ ID NO: 751721 - DNA, 25 bp, Homo sapien
ggcggaagatctaatatcctctcga

SEQ ID NO: 751722 - DNA, 25 bp, Homo sapien
ctttgaatttcctcagaatgacttt

SEQ ID NO: 751723 - DNA, 25 bp, Homo sapien
tcatctcacagttggcggaagatct

SEQ ID NO: 751724 - DNA, 25 bp, Homo sapien
ttctgataaacttataacgaagatt

SEQ ID NO: 751725 - DNA, 25 bp, Homo sapien
tgatagacaattggatagacagaga

SEQ ID NO: 751726 - DNA, 25 bp, Homo sapien
ccattctcccaattcgataacatca

SEQ ID NO: 751727 - DNA, 25 bp, Homo sapien
agacagagatttggctctgttatca

SEQ ID NO: 751728 - DNA, 25 bp, Homo sapien
tgggctgcttcggtgtcgccccgct

SEQ ID NO: 751729 - DNA, 25 bp, Homo sapien
gacgcggcagtagttgcgtcccaac

SEQ ID NO: 751730 - DNA, 25 bp, Homo sapien
cagtaggctccaatccgttgagttc

SEQ ID NO: 751731 - DNA, 25 bp, Homo sapien
tcgcctcgagctccgtgggctgctt

SEQ ID NO: 751732 - DNA, 25 bp, Homo sapien
gtcgcggtggggtttgcgtctgaaa

SEQ ID NO: 751733 - DNA, 25 bp, Homo sapien
tttgcgtctgaaacgccggcggtgg

SEQ ID NO: 751734 - DNA, 25 bp, Homo sapien
tgtttcggagttggaaggtgcctct

SEQ ID NO: 751735 - DNA, 25 bp, Homo sapien
tgaaaaatgtgtttcggagttggaa

SEQ ID NO: 751736 - DNA, 25 bp, Homo sapien
tgtgaatttcacaaacgactcgtat

SEQ ID NO: 751737 - DNA, 25 bp, Homo sapien
tcacaaacgactcgtattgctctgc

SEQ ID NO: 751738 - DNA, 25 bp, Homo sapien
tcttcatagtttgagagacgtgtac

SEQ ID NO: 751739 - DNA, 25 bp, Homo sapien
tattgttctagcttgccggagggcc

SEQ ID NO: 751740 - DNA, 25 bp, Homo sapien
tctaacacagctaggcagagtccat

SEQ ID NO: 751741 - DNA, 25 bp, Homo sapien
cacatagtttgttgggcttgtccca

SEQ ID NO: 751742 - DNA, 25 bp, Homo sapien
taaagtgctcctgcaactagcagtg

SEQ ID NO: 751743 - DNA, 25 bp, Homo sapien
gtaccgagatctgcaacaaaaagct

SEQ ID NO: 751744 - DNA, 25 bp, Homo sapien
actgcaggcatgcacggtggcaccc

SEQ ID NO: 751745 - DNA, 25 bp, Homo sapien
ctgcaggcatgcacggtggcaccca

SEQ ID NO: 751746 - DNA, 25 bp, Homo sapien
agtaaatcctgggttgggactctga

SEQ ID NO: 751747 - DNA, 25 bp, Homo sapien
ctagagagggctagatgtctttcgg

SEQ ID NO: 751748 - DNA, 25 bp, Homo sapien
catgtgtccactattagactggtga

SEQ ID NO: 751749 - DNA, 25 bp, Homo sapien
gagggctagatgtctttcggttttg

SEQ ID NO: 751750 - DNA, 25 bp, Homo sapien
cctgcgactctgcaggtgtcggtgt

SEQ ID NO: 751751 - DNA, 25 bp, Homo sapien
ctggagaattcgctttctcggacgg

SEQ ID NO: 751752 - DNA, 25 bp, Homo sapien
gacggtctgcgagttctttctgagg

SEQ ID NO: 751753 - DNA, 25 bp, Homo sapien
cctgggcctcatctaactgctgatc

SEQ ID NO: 751754 - DNA, 25 bp, Homo sapien
tcgttgccgcggtgtccttgtcttt

SEQ ID NO: 751755 - DNA, 25 bp, Homo sapien
tgagctccgcgaggtgaagtcatct

SEQ ID NO: 751756 - DNA, 25 bp, Homo sapien
gctgagggctgtccgcgctgtcttt

SEQ ID NO: 751757 - DNA, 25 bp, Homo sapien
ggttcccggatctcggcgtcgttgc

SEQ ID NO: 751758 - DNA, 25 bp, Homo sapien
cccgcgccgggagcggtcgaaggag

SEQ ID NO: 751759 - DNA, 25 bp, Homo sapien
gaggaggactccgacgctttgctct

SEQ ID NO: 751760 - DNA, 25 bp, Homo sapien
ggaggactccgacgctttgctctgg

SEQ ID NO: 751761 - DNA, 25 bp, Homo sapien
aaggaggagtctgacgggtggcggg

SEQ ID NO: 751762 - DNA, 25 bp, Homo sapien
tgcaccgcgagccagtccgccgccc

SEQ ID NO: 751763 - DNA, 25 bp, Homo sapien
gcggctgcgtggctccggccggagg

SEQ ID NO: 751764 - DNA, 25 bp, Homo sapien
gggctccggaagccgcggctgcgtg

SEQ ID NO: 751765 - DNA, 25 bp, Homo sapien
gagccagtccgccgccccgagggct

SEQ ID NO: 751766 - DNA, 25 bp, Homo sapien
ggcggcccgagcgggcatcgctcac

SEQ ID NO: 751767 - DNA, 25 bp, Homo sapien
gggcggcccgagcgggcatcgctca

SEQ ID NO: 751768 - DNA, 25 bp, Homo sapien
gaacgtgggatgtgcaatctcggca

SEQ ID NO: 751769 - DNA, 25 bp, Homo sapien
cccgggcagaacgtgggatgtgcaa

SEQ ID NO: 751770 - DNA, 25 bp, Homo sapien
tcggcagcccgaacccgcgtcaggg

SEQ ID NO: 751771 - DNA, 25 bp, Homo sapien
ggcgaacgcggtgccccggattcca

SEQ ID NO: 751772 - DNA, 25 bp, Homo sapien
aaaaagcagcggctctagcacaggc

SEQ ID NO: 751773 - DNA, 25 bp, Homo sapien
ccctggcggagatgcttaaaaagca

SEQ ID NO: 751774 - DNA, 25 bp, Homo sapien
caaggccaggtattcagttcagtgc

SEQ ID NO: 751775 - DNA, 25 bp, Homo sapien
gtgaccttcggacgaggccaactga

SEQ ID NO: 751776 - DNA, 25 bp, Homo sapien
acacttgatgtccaagagagaggaa

SEQ ID NO: 751777 - DNA, 25 bp, Homo sapien
caaccccaggccacacttgatgtcc

SEQ ID NO: 751778 - DNA, 25 bp, Homo sapien
cacacttgatgtccaagagagagga

SEQ ID NO: 751779 - DNA, 25 bp, Homo sapien
cggtgataacactgtatttgtaggc

SEQ ID NO: 751780 - DNA, 25 bp, Homo sapien
tgataacactgtatttgtaggcacg

SEQ ID NO: 751781 - DNA, 25 bp, Homo sapien
catggcacacatggacggtgataac

SEQ ID NO: 751782 - DNA, 25 bp, Homo sapien
cacatggacggtgataacactgtat

SEQ ID NO: 751783 - DNA, 25 bp, Homo sapien
caccagaattgagtccaaatacttt

SEQ ID NO: 751784 - DNA, 25 bp, Homo sapien
tcaaacaccagaattgagtccaaat

SEQ ID NO: 751785 - DNA, 25 bp, Homo sapien
aaacaccagaattgagtccaaatac

SEQ ID NO: 751786 - DNA, 25 bp, Homo sapien
ccagaattgagtccaaatactttac

SEQ ID NO: 751787 - DNA, 25 bp, Homo sapien
cactcttcttttgccatgtgtcaca

SEQ ID NO: 751788 - DNA, 25 bp, Homo sapien
tgaggcctcaactcgccaagcagat

SEQ ID NO: 751789 - DNA, 25 bp, Homo sapien
ctggaaagtctgagagaagcaatga

SEQ ID NO: 751790 - DNA, 25 bp, Homo sapien
gatgtttccgtcatagggcagattc

SEQ ID NO: 751791 - DNA, 25 bp, Homo sapien
tagggactggcatgacataactcaa

SEQ ID NO: 751792 - DNA, 25 bp, Homo sapien
tcagagactccacattgctcatagg

SEQ ID NO: 751793 - DNA, 25 bp, Homo sapien
aattccttaattctgcccctgcgca

SEQ ID NO: 751794 - DNA, 25 bp, Homo sapien
taccaagtaaggttaacagactctg

SEQ ID NO: 751795 - DNA, 25 bp, Homo sapien
taagacaagccctgcatttagcaac

SEQ ID NO: 751796 - DNA, 25 bp, Homo sapien
tgtgctcaagaaagggacaacgctc

SEQ ID NO: 751797 - DNA, 25 bp, Homo sapien
gaatacggactagaatgcatgtgct

SEQ ID NO: 751798 - DNA, 25 bp, Homo sapien
gaatgaactagtatcacacaggctg

SEQ ID NO: 751799 - DNA, 25 bp, Homo sapien
aggggtagtggtgcaatgcaatctc

SEQ ID NO: 751800 - DNA, 25 bp, Homo sapien
gaggggtagtggtgcaatgcaatct

SEQ ID NO: 751801 - DNA, 25 bp, Homo sapien
gtcatttttatacaggagccacact

SEQ ID NO: 751802 - DNA, 25 bp, Homo sapien
tgcaaattagagagaacacgctagt

SEQ ID NO: 751803 - DNA, 25 bp, Homo sapien
tagtgcctatttacccagagattcc

SEQ ID NO: 751804 - DNA, 25 bp, Homo sapien
atccaagggccaagagctgcacata

SEQ ID NO: 751805 - DNA, 25 bp, Homo sapien
tctaggttatacagctcacctgcaa

SEQ ID NO: 751806 - DNA, 25 bp, Homo sapien
tacaatcacatgaatgggcccaata

SEQ ID NO: 751807 - DNA, 25 bp, Homo sapien
gaattcttctgagttaagcactaga

SEQ ID NO: 751808 - DNA, 25 bp, Homo sapien
aatctgcgtaagtaaactattgtgg

SEQ ID NO: 751809 - DNA, 25 bp, Homo sapien
tcttcaatggtgtgagccttctagg

SEQ ID NO: 751810 - DNA, 25 bp, Homo sapien
gctgaattcagagacgtagtgtttg

SEQ ID NO: 751811 - DNA, 25 bp, Homo sapien
cagtttcgacctcatagggtttggg

SEQ ID NO: 751812 - DNA, 25 bp, Homo sapien
gttgtacaacaacctaaagactggc

SEQ ID NO: 751813 - DNA, 25 bp, Homo sapien
gcagtctagtgaatgtgtagtggta

SEQ ID NO: 751814 - DNA, 25 bp, Homo sapien
tttcttgggtaaacaacagatgcag

SEQ ID NO: 751815 - DNA, 25 bp, Homo sapien
catgtagttacttgccatccatatg

SEQ ID NO: 751816 - DNA, 25 bp, Homo sapien
agttgctttcacatcctggcactgt

SEQ ID NO: 751817 - DNA, 25 bp, Homo sapien
gtctggccaaccctcttaagggaga

SEQ ID NO: 751818 - DNA, 25 bp, Homo sapien
taagtttgagccactaggtctggcc

SEQ ID NO: 751819 - DNA, 25 bp, Homo sapien
tcactcttacttggcactgttctgg

SEQ ID NO: 751820 - DNA, 25 bp, Homo sapien
taagggtggctgctagcatcactct

SEQ ID NO: 751821 - DNA, 25 bp, Homo sapien
tagaatgtaatggtaccatcacagc

SEQ ID NO: 751822 - DNA, 25 bp, Homo sapien
tctctaacctgaagatcggacatgc

SEQ ID NO: 751823 - DNA, 25 bp, Homo sapien
tctaacctgaagatcggacatgctc

SEQ ID NO: 751824 - DNA, 25 bp, Homo sapien
tttcctaactgacagaagaacaagt

SEQ ID NO: 751825 - DNA, 25 bp, Homo sapien
cagttttcaccaaaggattaagaag

SEQ ID NO: 751826 - DNA, 25 bp, Homo sapien
tgtgtctcagttttcaccaaaggat

SEQ ID NO: 751827 - DNA, 25 bp, Homo sapien
ttgtgtctcagttttcaccaaagga

SEQ ID NO: 751828 - DNA, 25 bp, Homo sapien
gtctcagttttcaccaaaggattaa

SEQ ID NO: 751829 - DNA, 25 bp, Homo sapien
gacccttgggcttatttgcagccat

SEQ ID NO: 751830 - DNA, 25 bp, Homo sapien
caaagaattctgacccttgggctta

SEQ ID NO: 751831 - DNA, 25 bp, Homo sapien
taaagccaaagaattctgacccttg

SEQ ID NO: 751832 - DNA, 25 bp, Homo sapien
tgactttgtgtaaagccaaagaatt

SEQ ID NO: 751833 - DNA, 25 bp, Homo sapien
gctgacttgcccacgccaccactgc

SEQ ID NO: 751834 - DNA, 25 bp, Homo sapien
gtcagagctgacttgcccacgccac

SEQ ID NO: 751835 - DNA, 25 bp, Homo sapien
ctcatcgtacatgaactgtagagtc

SEQ ID NO: 751836 - DNA, 25 bp, Homo sapien
acatgaactgtagagtcagagctga

SEQ ID NO: 751837 - DNA, 25 bp, Homo sapien
gctgtctgctttggtaggctcatag

SEQ ID NO: 751838 - DNA, 25 bp, Homo sapien
cccacttcggaagtagttgtctcta

SEQ ID NO: 751839 - DNA, 25 bp, Homo sapien
taagatatcgatctggacttcctcc

SEQ ID NO: 751840 - DNA, 25 bp, Homo sapien
taccttcttccgatagctgtctgct

SEQ ID NO: 751841 - DNA, 25 bp, Homo sapien
taaatctgatttgttaccaaccagt

SEQ ID NO: 751842 - DNA, 25 bp, Homo sapien
aatctgatttgttaccaaccagtag

SEQ ID NO: 751843 - DNA, 25 bp, Homo sapien
atttgttaccaaccagtagaaatgg

SEQ ID NO: 751844 - DNA, 25 bp, Homo sapien
tctgatttgttaccaaccagtagaa

SEQ ID NO: 751845 - DNA, 25 bp, Homo sapien
ctttctagatactggagctggtcta

SEQ ID NO: 751846 - DNA, 25 bp, Homo sapien
cagtctttctagatactggagctgg

SEQ ID NO: 751847 - DNA, 25 bp, Homo sapien
gagcagtctttctagatactggagc

SEQ ID NO: 751848 - DNA, 25 bp, Homo sapien
gtgagcagtctttctagatactgga

SEQ ID NO: 751849 - DNA, 25 bp, Homo sapien
ctaattctggaaattgaatagttgc

SEQ ID NO: 751850 - DNA, 25 bp, Homo sapien
agtgcctggctcttataaacacaaa

SEQ ID NO: 751851 - DNA, 25 bp, Homo sapien
cagtgcctggctcttataaacacaa

SEQ ID NO: 751852 - DNA, 25 bp, Homo sapien
cacaaacacaagtataacctaattc

SEQ ID NO: 751853 - DNA, 25 bp, Homo sapien
ttctctgattctcttggctaaactt

SEQ ID NO: 751854 - DNA, 25 bp, Homo sapien
tcttccatctttctcgctcgaattt

SEQ ID NO: 751855 - DNA, 25 bp, Homo sapien
atctttctcgctcgaatttctctca

SEQ ID NO: 751856 - DNA, 25 bp, Homo sapien
gattctcttggctaaacttttcctc

SEQ ID NO: 751857 - DNA, 25 bp, Homo sapien
tattagtatggtcaagataagaaag

SEQ ID NO: 751858 - DNA, 25 bp, Homo sapien
tggtcaagataagaaaggagtttgg

SEQ ID NO: 751859 - DNA, 25 bp, Homo sapien
agtatggtcaagataagaaaggagt

SEQ ID NO: 751860 - DNA, 25 bp, Homo sapien
atttattagtatggtcaagataaga

SEQ ID NO: 751861 - DNA, 25 bp, Homo sapien
gacagacttctagcggacagttact

SEQ ID NO: 751862 - DNA, 25 bp, Homo sapien
tgttgaatcaactgtcctagcccca

SEQ ID NO: 751863 - DNA, 25 bp, Homo sapien
tattttcccgaagcgttctagtgca

SEQ ID NO: 751864 - DNA, 25 bp, Homo sapien
ggtaacttgaattccgcacatggca

SEQ ID NO: 751865 - DNA, 25 bp, Homo sapien
caatgttagtggttaggacccctgg

SEQ ID NO: 751866 - DNA, 25 bp, Homo sapien
ggaaaggtctcaaagcaaagtcaca

SEQ ID NO: 751867 - DNA, 25 bp, Homo sapien
gtacacatggagattgctgggcccg

SEQ ID NO: 751868 - DNA, 25 bp, Homo sapien
aacaaatcgggtagtggcatcagcc

SEQ ID NO: 751869 - DNA, 25 bp, Homo sapien
attgtaaacatcaagtaacaccaca

SEQ ID NO: 751870 - DNA, 25 bp, Homo sapien
tttggtaaagatgcctcatttgata

SEQ ID NO: 751871 - DNA, 25 bp, Homo sapien
acattgtaaacatcaagtaacacca

SEQ ID NO: 751872 - DNA, 25 bp, Homo sapien
tggtaaagatgcctcatttgataca

SEQ ID NO: 751873 - DNA, 25 bp, Homo sapien
tctactgtaagaggagcggcccttg

SEQ ID NO: 751874 - DNA, 25 bp, Homo sapien
tgtcgttggcagagaagacttcagg

SEQ ID NO: 751875 - DNA, 25 bp, Homo sapien
gacttcaggagaaatccggtccctg

SEQ ID NO: 751876 - DNA, 25 bp, Homo sapien
gaattccatttcgatgcaggcaccg

SEQ ID NO: 751877 - DNA, 25 bp, Homo sapien
ggagaggaaatagccaccaacgaga

SEQ ID NO: 751878 - DNA, 25 bp, Homo sapien
aaatagccaccaacgagatagcggg

SEQ ID NO: 751879 - DNA, 25 bp, Homo sapien
gaggaaatagccaccaacgagatag

SEQ ID NO: 751880 - DNA, 25 bp, Homo sapien
ggaccacagcgggagaggaaatagc

SEQ ID NO: 751881 - DNA, 25 bp, Homo sapien
ggttctccgggtgtagccgcctctg

SEQ ID NO: 751882 - DNA, 25 bp, Homo sapien
aggatctgcgcttccggtttccggg

SEQ ID NO: 751883 - DNA, 25 bp, Homo sapien
ttgtcacggaaatctcctccggcgt

SEQ ID NO: 751884 - DNA, 25 bp, Homo sapien
tacgtgggcggcttcgttgcagcca

SEQ ID NO: 751885 - DNA, 25 bp, Homo sapien
cacgggcggcttcagggtctatata

SEQ ID NO: 751886 - DNA, 25 bp, Homo sapien
cctgcttacagaacatcacgggcgg

SEQ ID NO: 751887 - DNA, 25 bp, Homo sapien
gcaagggcaggtctagcatccaggt

SEQ ID NO: 751888 - DNA, 25 bp, Homo sapien
tatttacagcggaaaaaggcagagg

SEQ ID NO: 751889 - DNA, 25 bp, Homo sapien
gagctaagtttggctcagctgggcc

SEQ ID NO: 751890 - DNA, 25 bp, Homo sapien
gcacacggcccgggactggctggca

SEQ ID NO: 751891 - DNA, 25 bp, Homo sapien
tccatggcgtccggtcccatcgacc

SEQ ID NO: 751892 - DNA, 25 bp, Homo sapien
ggctaaggagtgcgggcacacggcc

SEQ ID NO: 751893 - DNA, 25 bp, Homo sapien
agcctgccatgtctgagtctccccc

SEQ ID NO: 751894 - DNA, 25 bp, Homo sapien
tctgaaaagtctgtactaaggcaga

SEQ ID NO: 751895 - DNA, 25 bp, Homo sapien
tcagaaactggagggctctagtgga

SEQ ID NO: 751896 - DNA, 25 bp, Homo sapien
aataattctactaaatgtgctcagc

SEQ ID NO: 751897 - DNA, 25 bp, Homo sapien
ccaaacaataggttttgtgaaattg

SEQ ID NO: 751898 - DNA, 25 bp, Homo sapien
tcagccatagcacaactcttaagag

SEQ ID NO: 751899 - DNA, 25 bp, Homo sapien
tgcactcagccatagcacaactctt

SEQ ID NO: 751900 - DNA, 25 bp, Homo sapien
ctatctactgcctgtcattttttgg

SEQ ID NO: 751901 - DNA, 25 bp, Homo sapien
cttaagagaaagatttcagtctatc

SEQ ID NO: 751902 - DNA, 25 bp, Homo sapien
gcggctcaaatgtgttgaggtcccc

SEQ ID NO: 751903 - DNA, 25 bp, Homo sapien
ctgcggctcaaatgtgttgaggtcc

SEQ ID NO: 751904 - DNA, 25 bp, Homo sapien
tctgcggctcaaatgtgttgaggtc

SEQ ID NO: 751905 - DNA, 25 bp, Homo sapien
tgcggctcaaatgtgttgaggtccc

SEQ ID NO: 751906 - DNA, 25 bp, Homo sapien
agtatgtgtgttactggagcaagca

SEQ ID NO: 751907 - DNA, 25 bp, Homo sapien
taagtatgtgtgttactggagcaag

SEQ ID NO: 751908 - DNA, 25 bp, Homo sapien
acttaagtatgtgtgttactggagc

SEQ ID NO: 751909 - DNA, 25 bp, Homo sapien
gtatgtgtgttactggagcaagcat

SEQ ID NO: 751910 - DNA, 25 bp, Homo sapien
ggtagatccagccggaagtgacaaa

SEQ ID NO: 751911 - DNA, 25 bp, Homo sapien
agatccagccggaagtgacaaaaag

SEQ ID NO: 751912 - DNA, 25 bp, Homo sapien
tagatccagccggaagtgacaaaaa

SEQ ID NO: 751913 - DNA, 25 bp, Homo sapien
catggtagatccagccggaagtgac

SEQ ID NO: 751914 - DNA, 25 bp, Homo sapien
cttgtcctgtgcatctctttcatcg

SEQ ID NO: 751915 - DNA, 25 bp, Homo sapien
tgtcctgtgcatctctttcatcggc

SEQ ID NO: 751916 - DNA, 25 bp, Homo sapien
cctgtgcatctctttcatcggctgt

SEQ ID NO: 751917 - DNA, 25 bp, Homo sapien
tcctgtgcatctctttcatcggctg

SEQ ID NO: 751918 - DNA, 25 bp, Homo sapien
gaagactgacgtggtaggattgctt

SEQ ID NO: 751919 - DNA, 25 bp, Homo sapien
tgggaagactgacgtggtaggattg

SEQ ID NO: 751920 - DNA, 25 bp, Homo sapien
tactgggaagactgacgtggtagga

SEQ ID NO: 751921 - DNA, 25 bp, Homo sapien
agctactgggaagactgacgtggta

SEQ ID NO: 751922 - DNA, 25 bp, Homo sapien
tgagccaagatcatgccactgcact

SEQ ID NO: 751923 - DNA, 25 bp, Homo sapien
ccagcctgggcgacagagtgagacc

SEQ ID NO: 751924 - DNA, 25 bp, Homo sapien
gctgggaagtctacactacagtgag

SEQ ID NO: 751925 - DNA, 25 bp, Homo sapien
aggatcccttgaggctgggaagtct

SEQ ID NO: 751926 - DNA, 25 bp, Homo sapien
ctgtactgcagcctgagtgagagca

SEQ ID NO: 751927 - DNA, 25 bp, Homo sapien
gtactgcagcctgagtgagagcatg

SEQ ID NO: 751928 - DNA, 25 bp, Homo sapien
tgcagcctgagtgagagcatgagac

SEQ ID NO: 751929 - DNA, 25 bp, Homo sapien
actgcagcctgagtgagagcatgag

SEQ ID NO: 751930 - DNA, 25 bp, Homo sapien
ctggcatttcacaatgaacagtatg

SEQ ID NO: 751931 - DNA, 25 bp, Homo sapien
ggcatttcacaatgaacagtatgtg

SEQ ID NO: 751932 - DNA, 25 bp, Homo sapien
catttcacaatgaacagtatgtggt

SEQ ID NO: 751933 - DNA, 25 bp, Homo sapien
tttcacaatgaacagtatgtggtag

SEQ ID NO: 751934 - DNA, 25 bp, Homo sapien
ctaagctcacaggacatatgcttca

SEQ ID NO: 751935 - DNA, 25 bp, Homo sapien
taagctcacaggacatatgcttcaa

SEQ ID NO: 751936 - DNA, 25 bp, Homo sapien
tcgaaaggatccatcccatgccatt

SEQ ID NO: 751937 - DNA, 25 bp, Homo sapien
tgcattcgaaaggatccatcccatg

SEQ ID NO: 751938 - DNA, 25 bp, Homo sapien
cattcgaaaggatccatcccatgcc

SEQ ID NO: 751939 - DNA, 25 bp, Homo sapien
gtgcattcgaaaggatccatcccat

SEQ ID NO: 751940 - DNA, 25 bp, Homo sapien
ataacgtagactcagtgggatctct

SEQ ID NO: 751941 - DNA, 25 bp, Homo sapien
taacatgttgcccagtcagtctctc

SEQ ID NO: 751942 - DNA, 25 bp, Homo sapien
cagaagtctttcatggtagatccag

SEQ ID NO: 751943 - DNA, 25 bp, Homo sapien
tctctcttcctggattcagaagtct

SEQ ID NO: 751944 - DNA, 25 bp, Homo sapien
ggattcagaagtctttcatggtaga

SEQ ID NO: 751945 - DNA, 25 bp, Homo sapien
tctgtacagtgctggtttcccttcc

SEQ ID NO: 751946 - DNA, 25 bp, Homo sapien
ctgtacagtgctggtttcccttccc

SEQ ID NO: 751947 - DNA, 25 bp, Homo sapien
gctcaggtaggaggatccttagccc

SEQ ID NO: 751948 - DNA, 25 bp, Homo sapien
aggctcaggtaggaggatccttagc

SEQ ID NO: 751949 - DNA, 25 bp, Homo sapien
tgtgatagcactactgtactcaagc

SEQ ID NO: 751950 - DNA, 25 bp, Homo sapien
tcaggtaggaggatccttagcccag

SEQ ID NO: 751951 - DNA, 25 bp, Homo sapien
tcacccctctggaatccacgtatag

SEQ ID NO: 751952 - DNA, 25 bp, Homo sapien
cccctctggaatccacgtataggaa

SEQ ID NO: 751953 - DNA, 25 bp, Homo sapien
tctcagccacgtgggaggttgagat

SEQ ID NO: 751954 - DNA, 25 bp, Homo sapien
tcagctgtgatagcactactacact

SEQ ID NO: 751955 - DNA, 25 bp, Homo sapien
gctagagaccggtctggacaacaca

SEQ ID NO: 751956 - DNA, 25 bp, Homo sapien
ctagagaccggtctggacaacacag

SEQ ID NO: 751957 - DNA, 25 bp, Homo sapien
agagaccggtctggacaacacagtg

SEQ ID NO: 751958 - DNA, 25 bp, Homo sapien
agctagagaccggtctggacaacac

SEQ ID NO: 751959 - DNA, 25 bp, Homo sapien
tgggcgtgttaagctcgttttcctg

SEQ ID NO: 751960 - DNA, 25 bp, Homo sapien
gcgtgttaagctcgttttcctgcaa

SEQ ID NO: 751961 - DNA, 25 bp, Homo sapien
gaatcagtgggcgtgttaagctcgt

SEQ ID NO: 751962 - DNA, 25 bp, Homo sapien
cagtgggcgtgttaagctcgttttc

SEQ ID NO: 751963 - DNA, 25 bp, Homo sapien
tagggtatgggcctaaataggccat

SEQ ID NO: 751964 - DNA, 25 bp, Homo sapien
agggtatgggcctaaataggccatt

SEQ ID NO: 751965 - DNA, 25 bp, Homo sapien
gtagggtatgggcctaaataggcca

SEQ ID NO: 751966 - DNA, 25 bp, Homo sapien
gggtatgggcctaaataggccattg

SEQ ID NO: 751967 - DNA, 25 bp, Homo sapien
tgaagaggcactggcaggcgggagc

SEQ ID NO: 751968 - DNA, 25 bp, Homo sapien
gcctgaagaggcactggcaggcggg

SEQ ID NO: 751969 - DNA, 25 bp, Homo sapien
cctgaagaggcactggcaggcggga

SEQ ID NO: 751970 - DNA, 25 bp, Homo sapien
gggcctgaagaggcactggcaggcg

SEQ ID NO: 751971 - DNA, 25 bp, Homo sapien
ggccgttgtgaggaatgagccccat

SEQ ID NO: 751972 - DNA, 25 bp, Homo sapien
ccaacttgaggaggttctgggcccg

SEQ ID NO: 751973 - DNA, 25 bp, Homo sapien
tggagaggacgcccggagggtgcaa

SEQ ID NO: 751974 - DNA, 25 bp, Homo sapien
aaggccgttgtgaggaatgagcccc

SEQ ID NO: 751975 - DNA, 25 bp, Homo sapien
ggagtcgggcctggagacgcagccg

SEQ ID NO: 751976 - DNA, 25 bp, Homo sapien
ccaggagatgggcaggcactgagtc

SEQ ID NO: 751977 - DNA, 25 bp, Homo sapien
gagatgggcaggcactgagtccaaa

SEQ ID NO: 751978 - DNA, 25 bp, Homo sapien
gcaggagtcgggcctggagacgcag

SEQ ID NO: 751979 - DNA, 25 bp, Homo sapien
agacaccatcggagggcaggagctg

SEQ ID NO: 751980 - DNA, 25 bp, Homo sapien
accatcggagggcaggagctgatcc

SEQ ID NO: 751981 - DNA, 25 bp, Homo sapien
tggagacaccatcggagggcaggag

SEQ ID NO: 751982 - DNA, 25 bp, Homo sapien
acaccatcggagggcaggagctgat

SEQ ID NO: 751983 - DNA, 25 bp, Homo sapien
tgggcgtggaggagcccactggccg

SEQ ID NO: 751984 - DNA, 25 bp, Homo sapien
gggaggcagggccgggagaggccga

SEQ ID NO: 751985 - DNA, 25 bp, Homo sapien
cgtggaggagcccactggccggaga

SEQ ID NO: 751986 - DNA, 25 bp, Homo sapien
ggcagggccgggagaggccgacttc

SEQ ID NO: 751987 - DNA, 25 bp, Homo sapien
agctaagccaaaaaagcttgcttac

SEQ ID NO: 751988 - DNA, 25 bp, Homo sapien
gagctaagccaaaaaagcttgctta

SEQ ID NO: 751989 - DNA, 25 bp, Homo sapien
ccagagctgggcctgtacaggccac

SEQ ID NO: 751990 - DNA, 25 bp, Homo sapien
ggctggagaaagttcggggcctaca

SEQ ID NO: 751991 - DNA, 25 bp, Homo sapien
ggaggtgggcccgaagagcttggct

SEQ ID NO: 751992 - DNA, 25 bp, Homo sapien
gaggctgttctccagccagagctgg

SEQ ID NO: 751993 - DNA, 25 bp, Homo sapien
aagctcttgccccaccgcggcctcc

SEQ ID NO: 751994 - DNA, 25 bp, Homo sapien
agtggcctgtacagtcccagctctg

SEQ ID NO: 751995 - DNA, 25 bp, Homo sapien
aggggcgtctccaggccaagctctt

SEQ ID NO: 751996 - DNA, 25 bp, Homo sapien
ctggagaagagcgtctgcaggccct

SEQ ID NO: 751997 - DNA, 25 bp, Homo sapien
aagcaagctctttcggctcagctct

SEQ ID NO: 751998 - DNA, 25 bp, Homo sapien
cggctcagctctcgccggcgtttgt

SEQ ID NO: 751999 - DNA, 25 bp, Homo sapien
tctttcggctcagctctcgccggcg

SEQ ID NO: 752000 - DNA, 25 bp, Homo sapien
tttcggctcagctctcgccggcgtt

SEQ ID NO: 752001 - DNA, 25 bp, Homo sapien
gaggccaacttgaggaggcccagcc

SEQ ID NO: 752002 - DNA, 25 bp, Homo sapien
aggccaacttgaggaggcccagcct

SEQ ID NO: 752003 - DNA, 25 bp, Homo sapien
ccaacttgaggaggcccagcctctg

SEQ ID NO: 752004 - DNA, 25 bp, Homo sapien
gagaggccaacttgaggaggcccag

SEQ ID NO: 752005 - DNA, 25 bp, Homo sapien
ctggagacgcagccgggaggaagag

SEQ ID NO: 752006 - DNA, 25 bp, Homo sapien
agaccttgttgggaggccggagttg

SEQ ID NO: 752007 - DNA, 25 bp, Homo sapien
caaagaccttgttgggaggccggag

SEQ ID NO: 752008 - DNA, 25 bp, Homo sapien
tggagacgctgtcggagggcaggag

SEQ ID NO: 752009 - DNA, 25 bp, Homo sapien
gcctggagacgctgtcggagggcag

SEQ ID NO: 752010 - DNA, 25 bp, Homo sapien
ccgtttggggcctggagacgctgtc

SEQ ID NO: 752011 - DNA, 25 bp, Homo sapien
tggggcctggagacgctgtcggagg

SEQ ID NO: 752012 - DNA, 25 bp, Homo sapien
ataaaaaattcgggcttggtgcaga

SEQ ID NO: 752013 - DNA, 25 bp, Homo sapien
aggccgggcccatgcagaccttcga

SEQ ID NO: 752014 - DNA, 25 bp, Homo sapien
cgggcccatgcagaccttcgagagg

SEQ ID NO: 752015 - DNA, 25 bp, Homo sapien
gcttggtgcagaaactcactccaaa

SEQ ID NO: 752016 - DNA, 25 bp, Homo sapien
gggactgatgactgcatgatcttct

SEQ ID NO: 752017 - DNA, 25 bp, Homo sapien
tgggactgatgactgcatgatcttc

SEQ ID NO: 752018 - DNA, 25 bp, Homo sapien
ggaccccaccatgcccaaatgcagg

SEQ ID NO: 752019 - DNA, 25 bp, Homo sapien
accatgcccaaatgcaggatgagaa

SEQ ID NO: 752020 - DNA, 25 bp, Homo sapien
ccccaccatgcccaaatgcaggatg

SEQ ID NO: 752021 - DNA, 25 bp, Homo sapien
ccaccatgcccaaatgcaggatgag

SEQ ID NO: 752022 - DNA, 25 bp, Homo sapien
caatgaagaattcagtctcctgaca

SEQ ID NO: 752023 - DNA, 25 bp, Homo sapien
gctgtgcagcctcgtgcagttatac

SEQ ID NO: 752024 - DNA, 25 bp, Homo sapien
gcagttatactagctctctgatgag

SEQ ID NO: 752025 - DNA, 25 bp, Homo sapien
cctgtgttacatgatcggttctgga

SEQ ID NO: 752026 - DNA, 25 bp, Homo sapien
tggaggcctatagagttttcactgg

SEQ ID NO: 752027 - DNA, 25 bp, Homo sapien
aatggtggtcctagcataagttgca

SEQ ID NO: 752028 - DNA, 25 bp, Homo sapien
cataagttgcaggttctagggcaga

SEQ ID NO: 752029 - DNA, 25 bp, Homo sapien
cagatggaggttctttgggttctat

SEQ ID NO: 752030 - DNA, 25 bp, Homo sapien
cagacttgggagtaatacaatggtg

SEQ ID NO: 752031 - DNA, 25 bp, Homo sapien
ccttagctgatgtaggctgtaaatc

SEQ ID NO: 752032 - DNA, 25 bp, Homo sapien
cacaatcacggtcttccttagctga

SEQ ID NO: 752033 - DNA, 25 bp, Homo sapien
cttgatatcacaatcacggtcttcc

SEQ ID NO: 752034 - DNA, 25 bp, Homo sapien
attgatcgcctgtttgccggaaagc

SEQ ID NO: 752035 - DNA, 25 bp, Homo sapien
tgctgctagaactggttggtatttt

SEQ ID NO: 752036 - DNA, 25 bp, Homo sapien
ctggttggtattttgggcaaagcat

SEQ ID NO: 752037 - DNA, 25 bp, Homo sapien
actggttggtattttgggcaaagca

SEQ ID NO: 752038 - DNA, 25 bp, Homo sapien
ctgctagaactggttggtattttgg

SEQ ID NO: 752039 - DNA, 25 bp, Homo sapien
tgtcaaagcgtcagcccgggccgcg

SEQ ID NO: 752040 - DNA, 25 bp, Homo sapien
tggaactccttcggcgccggctcgg

SEQ ID NO: 752041 - DNA, 25 bp, Homo sapien
ttccagctgtcaaagcgtcagcccg

SEQ ID NO: 752042 - DNA, 25 bp, Homo sapien
cgccctggaactccttcggcgccgg

SEQ ID NO: 752043 - DNA, 25 bp, Homo sapien
gctggcgctctcctcgccgcgctcc

SEQ ID NO: 752044 - DNA, 25 bp, Homo sapien
tcgaatctccgacaagaaggtctct

SEQ ID NO: 752045 - DNA, 25 bp, Homo sapien
aggtctctgcagatttctgtactct

SEQ ID NO: 752046 - DNA, 25 bp, Homo sapien
tactcttacgtgcagtaaatattcg

SEQ ID NO: 752047 - DNA, 25 bp, Homo sapien
tttcccatcgaatctccgacaagaa

SEQ ID NO: 752048 - DNA, 25 bp, Homo sapien
ccatcatgctgctaggattgtgagg

SEQ ID NO: 752049 - DNA, 25 bp, Homo sapien
gggtcccatcatgctgctaggattg

SEQ ID NO: 752050 - DNA, 25 bp, Homo sapien
tcccatcatgctgctaggattgtga

SEQ ID NO: 752051 - DNA, 25 bp, Homo sapien
catcatgctgctaggattgtgaggt

SEQ ID NO: 752052 - DNA, 25 bp, Homo sapien
agggttcattctctgcattgatcct

SEQ ID NO: 752053 - DNA, 25 bp, Homo sapien
agctcccgggcccatgttaatcccg

SEQ ID NO: 752054 - DNA, 25 bp, Homo sapien
tgccagctcccgggcccatgttaat

SEQ ID NO: 752055 - DNA, 25 bp, Homo sapien
gccagctcccgggcccatgttaatc

SEQ ID NO: 752056 - DNA, 25 bp, Homo sapien
ccgggcccatgttaatcccgggcat

SEQ ID NO: 752057 - DNA, 25 bp, Homo sapien
tgaatctgcgggactgggcataatg

SEQ ID NO: 752058 - DNA, 25 bp, Homo sapien
cgccaccaccgggggtcccacatag

SEQ ID NO: 752059 - DNA, 25 bp, Homo sapien
gaatatggaattgagttagcactgt

SEQ ID NO: 752060 - DNA, 25 bp, Homo sapien
cataatgggtgttcctggagggccg

SEQ ID NO: 752061 - DNA, 25 bp, Homo sapien
gaagttggacctgccgccaggtcat

SEQ ID NO: 752062 - DNA, 25 bp, Homo sapien
tcgggaagttggacctgccgccagg

SEQ ID NO: 752063 - DNA, 25 bp, Homo sapien
ggaagttggacctgccgccaggtca

SEQ ID NO: 752064 - DNA, 25 bp, Homo sapien
agttggacctgccgccaggtcattg

SEQ ID NO: 752065 - DNA, 25 bp, Homo sapien
ggctctctcagcgtctcggagaagg

SEQ ID NO: 752066 - DNA, 25 bp, Homo sapien
cgtcttcccgcctgcaatgccggct

SEQ ID NO: 752067 - DNA, 25 bp, Homo sapien
cagctcctggataataacacctcac

SEQ ID NO: 752068 - DNA, 25 bp, Homo sapien
aatgccggctctctcagcgtctcgg

SEQ ID NO: 752069 - DNA, 25 bp, Homo sapien
ccatgcttcttcatttctccttcaa

SEQ ID NO: 752070 - DNA, 25 bp, Homo sapien
catgcttcttcatttctccttcaat

SEQ ID NO: 752071 - DNA, 25 bp, Homo sapien
gttgttacttccatgcttcttcatt

SEQ ID NO: 752072 - DNA, 25 bp, Homo sapien
gcttcttcatttctccttcaatctt

SEQ ID NO: 752073 - DNA, 25 bp, Homo sapien
gccagcagcatcagtcaagttttct

SEQ ID NO: 752074 - DNA, 25 bp, Homo sapien
gcctgcctgaccagcatagctctta

SEQ ID NO: 752075 - DNA, 25 bp, Homo sapien
tgctccatcagaatagatagtgcct

SEQ ID NO: 752076 - DNA, 25 bp, Homo sapien
aatagatagtgcctgcctgaccagc

SEQ ID NO: 752077 - DNA, 25 bp, Homo sapien
cagctgctccatcagaatagatagt

SEQ ID NO: 752078 - DNA, 25 bp, Homo sapien
accaaccagcatcagtgtgagcagc

SEQ ID NO: 752079 - DNA, 25 bp, Homo sapien
tcaccaaccagcatcagtgtgagca

SEQ ID NO: 752080 - DNA, 25 bp, Homo sapien
caccaaccagcatcagtgtgagcag

SEQ ID NO: 752081 - DNA, 25 bp, Homo sapien
ggttctccatgagggatctgccttt

SEQ ID NO: 752082 - DNA, 25 bp, Homo sapien
tccatgagggatctgcctttgcagc

SEQ ID NO: 752083 - DNA, 25 bp, Homo sapien
tgagggatctgcctttgcagcagac

SEQ ID NO: 752084 - DNA, 25 bp, Homo sapien
catgagggatctgcctttgcagcag

SEQ ID NO: 752085 - DNA, 25 bp, Homo sapien
ataataatgcttgccttcaaatgaa

SEQ ID NO: 752086 - DNA, 25 bp, Homo sapien
aataatgcttgccttcaaatgaagt

SEQ ID NO: 752087 - DNA, 25 bp, Homo sapien
atataataatgcttgccttcaaatg

SEQ ID NO: 752088 - DNA, 25 bp, Homo sapien
ataatgcttgccttcaaatgaagtt

SEQ ID NO: 752089 - DNA, 25 bp, Homo sapien
accattagctagtaaattggcctgc

SEQ ID NO: 752090 - DNA, 25 bp, Homo sapien
ttacttgtagcagaccattagctag

SEQ ID NO: 752091 - DNA, 25 bp, Homo sapien
cacttaaattgctatcatcatttac

SEQ ID NO: 752092 - DNA, 25 bp, Homo sapien
agaccattagctagtaaattggcct

SEQ ID NO: 752093 - DNA, 25 bp, Homo sapien
ctcatcagatgttttcattggaggc

SEQ ID NO: 752094 - DNA, 25 bp, Homo sapien
tcttctcatcagatgttttcattgg

SEQ ID NO: 752095 - DNA, 25 bp, Homo sapien
ttctcatcagatgttttcattggag

SEQ ID NO: 752096 - DNA, 25 bp, Homo sapien
ttgttcttctcatcagatgttttca

SEQ ID NO: 752097 - DNA, 25 bp, Homo sapien
aagcaactcacaatcctcggaggat

SEQ ID NO: 752098 - DNA, 25 bp, Homo sapien
gtcgtcgaggtcattcacagaatat

SEQ ID NO: 752099 - DNA, 25 bp, Homo sapien
caagttaagtcgtcgaggtcattca

SEQ ID NO: 752100 - DNA, 25 bp, Homo sapien
ttcagatagccaagttaagtcgtcg

SEQ ID NO: 752101 - DNA, 25 bp, Homo sapien
aaactggctctaaggatgatgagta

SEQ ID NO: 752102 - DNA, 25 bp, Homo sapien
actattttctggtattgaggcaact

SEQ ID NO: 752103 - DNA, 25 bp, Homo sapien
atgagtagcacttggaatttgagac

SEQ ID NO: 752104 - DNA, 25 bp, Homo sapien
attactattttctggtattgaggca

SEQ ID NO: 752105 - DNA, 25 bp, Homo sapien
tgagtgccaacgaggaccaggagat

SEQ ID NO: 752106 - DNA, 25 bp, Homo sapien
cgcgatgagtgccaacgaggaccag

SEQ ID NO: 752107 - DNA, 25 bp, Homo sapien
cgcgaccggcgcgatgagtgccaac

SEQ ID NO: 752108 - DNA, 25 bp, Homo sapien
cgaccggcgcgatgagtgccaacga

SEQ ID NO: 752109 - DNA, 25 bp, Homo sapien
aggctaacagaatccacatgaggga

SEQ ID NO: 752110 - DNA, 25 bp, Homo sapien
ggctaacagaatccacatgagggag

SEQ ID NO: 752111 - DNA, 25 bp, Homo sapien
taggctaacagaatccacatgaggg

SEQ ID NO: 752112 - DNA, 25 bp, Homo sapien
agtgttcccatgaaagaactgcatc

SEQ ID NO: 752113 - DNA, 25 bp, Homo sapien
gtgttcccatgaaagaactgcatct

SEQ ID NO: 752114 - DNA, 25 bp, Homo sapien
cttgttcccattgacctttttcatg

SEQ ID NO: 752115 - DNA, 25 bp, Homo sapien
gacctttttcatgctctaactgtaa

SEQ ID NO: 752116 - DNA, 25 bp, Homo sapien
tgacctttttcatgctctaactgta

SEQ ID NO: 752117 - DNA, 25 bp, Homo sapien
ttcttgttcccattgacctttttca

SEQ ID NO: 752118 - DNA, 25 bp, Homo sapien
tttcagagtctgtttgagttgtttc

SEQ ID NO: 752119 - DNA, 25 bp, Homo sapien
gtcctcaattctgtgaccagtgatt

SEQ ID NO: 752120 - DNA, 25 bp, Homo sapien
tgtttcaacttctttcccgcattcc

SEQ ID NO: 752121 - DNA, 25 bp, Homo sapien
atcttttttaggcaacatatcatca

SEQ ID NO: 752122 - DNA, 25 bp, Homo sapien
tcagaaagttgcttgtgggtatcgc

SEQ ID NO: 752123 - DNA, 25 bp, Homo sapien
tgggtatcgcttcgcttctgcacaa

SEQ ID NO: 752124 - DNA, 25 bp, Homo sapien
tgcttgtgggtatcgcttcgcttct

SEQ ID NO: 752125 - DNA, 25 bp, Homo sapien
aaagttgcttgtgggtatcgcttcg

SEQ ID NO: 752126 - DNA, 25 bp, Homo sapien
ttgcttactggtcagaatctcatct

SEQ ID NO: 752127 - DNA, 25 bp, Homo sapien
cttcaacctccttttgcttactggt

SEQ ID NO: 752128 - DNA, 25 bp, Homo sapien
ccttttgcttactggtcagaatctc

SEQ ID NO: 752129 - DNA, 25 bp, Homo sapien
ccttcaacctccttttgcttactgg

SEQ ID NO: 752130 - DNA, 25 bp, Homo sapien
gcctctaaactggctatacatttcc

SEQ ID NO: 752131 - DNA, 25 bp, Homo sapien
tgaaattagatactacttggagaaa

SEQ ID NO: 752132 - DNA, 25 bp, Homo sapien
cctctaaactggctatacatttcct

SEQ ID NO: 752133 - DNA, 25 bp, Homo sapien
attagatactacttggagaaaactt

SEQ ID NO: 752134 - DNA, 25 bp, Homo sapien
gcaacatactatttttatgcaacag

SEQ ID NO: 752135 - DNA, 25 bp, Homo sapien
acatactatttttatgcaacaggtc

SEQ ID NO: 752136 - DNA, 25 bp, Homo sapien
ttttctttcttatggctttgagaaa

SEQ ID NO: 752137 - DNA, 25 bp, Homo sapien
atactatttttatgcaacaggtctt

SEQ ID NO: 752138 - DNA, 25 bp, Homo sapien
cagttttatcatattttgaaggttg

SEQ ID NO: 752139 - DNA, 25 bp, Homo sapien
ttatcatattttgaaggttgtcatt

SEQ ID NO: 752140 - DNA, 25 bp, Homo sapien
ctcattcagttttatcatattttga

SEQ ID NO: 752141 - DNA, 25 bp, Homo sapien
gtttcctcattcagttttatcatat

SEQ ID NO: 752142 - DNA, 25 bp, Homo sapien
tcgatatggctgaatttccatttcc

SEQ ID NO: 752143 - DNA, 25 bp, Homo sapien
cagccagcctgcatcgatatggctg

SEQ ID NO: 752144 - DNA, 25 bp, Homo sapien
acaatcatgtacggcagcagccagc

SEQ ID NO: 752145 - DNA, 25 bp, Homo sapien
actgagagttttattctcagctgtc

SEQ ID NO: 752146 - DNA, 25 bp, Homo sapien
tctcctgtaaatgaacccattcatg

SEQ ID NO: 752147 - DNA, 25 bp, Homo sapien
aatgaacccattcatgtcctgttct

SEQ ID NO: 752148 - DNA, 25 bp, Homo sapien
ggttagacatatcagaattcatttt

SEQ ID NO: 752149 - DNA, 25 bp, Homo sapien
aagaatctaactgttatcttttagg

SEQ ID NO: 752150 - DNA, 25 bp, Homo sapien
agttgagcacatctgtcctctatag

SEQ ID NO: 752151 - DNA, 25 bp, Homo sapien
gttgagcacatctgtcctctataga

SEQ ID NO: 752152 - DNA, 25 bp, Homo sapien
tgtagttgagcacatctgtcctcta

SEQ ID NO: 752153 - DNA, 25 bp, Homo sapien
tgagcacatctgtcctctatagatt

SEQ ID NO: 752154 - DNA, 25 bp, Homo sapien
tacaacagcatggatttgatcttgg

SEQ ID NO: 752155 - DNA, 25 bp, Homo sapien
ttctcttctagcagaagactgtgca

SEQ ID NO: 752156 - DNA, 25 bp, Homo sapien
catacattgattaagtccttgtttt

SEQ ID NO: 752157 - DNA, 25 bp, Homo sapien
gactgtgcatttcactcccagctag

SEQ ID NO: 752158 - DNA, 25 bp, Homo sapien
ctctaggtaaggctctgacataggt

SEQ ID NO: 752159 - DNA, 25 bp, Homo sapien
taaggctctgacataggttgtattt

SEQ ID NO: 752160 - DNA, 25 bp, Homo sapien
tatttttagggtatcagccagttct

SEQ ID NO: 752161 - DNA, 25 bp, Homo sapien
atgtggtgtagcctctaggtaaggc

SEQ ID NO: 752162 - DNA, 25 bp, Homo sapien
ttcctcatggggaagctgtttagcc

SEQ ID NO: 752163 - DNA, 25 bp, Homo sapien
caggagtcaaaagtttaagtgctgc

SEQ ID NO: 752164 - DNA, 25 bp, Homo sapien
ctcatggggaagctgtttagccaga

SEQ ID NO: 752165 - DNA, 25 bp, Homo sapien
acaggagtcaaaagtttaagtgctg

SEQ ID NO: 752166 - DNA, 25 bp, Homo sapien
gcatcgtgtactatagtccaggact

SEQ ID NO: 752167 - DNA, 25 bp, Homo sapien
tgtactatagtccaggacttcttgg

SEQ ID NO: 752168 - DNA, 25 bp, Homo sapien
cgattggcatcgtgtactatagtcc

SEQ ID NO: 752169 - DNA, 25 bp, Homo sapien
acacccgattggcatcgtgtactat

SEQ ID NO: 752170 - DNA, 25 bp, Homo sapien
tataacaatagatgaccacagctcc

SEQ ID NO: 752171 - DNA, 25 bp, Homo sapien
gaaagttgtacagaggacccggcat

SEQ ID NO: 752172 - DNA, 25 bp, Homo sapien
aagggaatttggcttggagtgataa

SEQ ID NO: 752173 - DNA, 25 bp, Homo sapien
ggccaggcaactgtaggaaacagaa

SEQ ID NO: 752174 - DNA, 25 bp, Homo sapien
tatcctgtgaggtatcagtggtcat

SEQ ID NO: 752175 - DNA, 25 bp, Homo sapien
ccaaggtgcaaattatcctgtgagg

SEQ ID NO: 752176 - DNA, 25 bp, Homo sapien
ttatcctgtgaggtatcagtggtca

SEQ ID NO: 752177 - DNA, 25 bp, Homo sapien
ctgaaatccaaggtgcaaattatcc

SEQ ID NO: 752178 - DNA, 25 bp, Homo sapien
cctgccccacggtctgagttaaggt

SEQ ID NO: 752179 - DNA, 25 bp, Homo sapien
ttggccctgccccacggtctgagtt

SEQ ID NO: 752180 - DNA, 25 bp, Homo sapien
ggccctgccccacggtctgagttaa

SEQ ID NO: 752181 - DNA, 25 bp, Homo sapien
tctgagttaaggtgaagggagtcat

SEQ ID NO: 752182 - DNA, 25 bp, Homo sapien
gccagcaataacagaagaggccaat

SEQ ID NO: 752183 - DNA, 25 bp, Homo sapien
ttgccagcaataacagaagaggcca

SEQ ID NO: 752184 - DNA, 25 bp, Homo sapien
agaagaggccaatagctggaaaaat

SEQ ID NO: 752185 - DNA, 25 bp, Homo sapien
cagaagaggccaatagctggaaaaa

SEQ ID NO: 752186 - DNA, 25 bp, Homo sapien
tcagtcaagccctgggagtggaaca

SEQ ID NO: 752187 - DNA, 25 bp, Homo sapien
ttcagtcaagccctgggagtggaac

SEQ ID NO: 752188 - DNA, 25 bp, Homo sapien
cttcagtcaagccctgggagtggaa

SEQ ID NO: 752189 - DNA, 25 bp, Homo sapien
cagtcaagccctgggagtggaacag

SEQ ID NO: 752190 - DNA, 25 bp, Homo sapien
tcgtgcttgttgcttgcgtccagcg

SEQ ID NO: 752191 - DNA, 25 bp, Homo sapien
ttgcttgagactctgcccgtggtgg

SEQ ID NO: 752192 - DNA, 25 bp, Homo sapien
tggcatgatgtagaaaccgctcggc

SEQ ID NO: 752193 - DNA, 25 bp, Homo sapien
ggagaggattcgtgtgccgcccact

SEQ ID NO: 752194 - DNA, 25 bp, Homo sapien
actggcgtgctcgctcccgccaggg

SEQ ID NO: 752195 - DNA, 25 bp, Homo sapien
gcactggcgtgctcgctcccgccag

SEQ ID NO: 752196 - DNA, 25 bp, Homo sapien
cgcgcactggcgtgctcgctcccgc

SEQ ID NO: 752197 - DNA, 25 bp, Homo sapien
cgcactggcgtgctcgctcccgcca

SEQ ID NO: 752198 - DNA, 25 bp, Homo sapien
cacaccgcaggcgcctcggaagtgg

SEQ ID NO: 752199 - DNA, 25 bp, Homo sapien
tgacaacaactcccggcctagggcc

SEQ ID NO: 752200 - DNA, 25 bp, Homo sapien
acaactcccggcctagggcctcgcg

SEQ ID NO: 752201 - DNA, 25 bp, Homo sapien
tggcggcgacacaccgcaggcgcct

SEQ ID NO: 752202 - DNA, 25 bp, Homo sapien
cgccctgacgttgggtgcaagttca

SEQ ID NO: 752203 - DNA, 25 bp, Homo sapien
gggagtcccgagtcctccaagtgcc

SEQ ID NO: 752204 - DNA, 25 bp, Homo sapien
tgggcgagacaacaacacgcctcca

SEQ ID NO: 752205 - DNA, 25 bp, Homo sapien
caacgcggaagtaccaccttcgtcg

SEQ ID NO: 752206 - DNA, 25 bp, Homo sapien
aaaacaccagatgcgccgggcgctg

SEQ ID NO: 752207 - DNA, 25 bp, Homo sapien
cgggaaaagcgccacgataatccgg

SEQ ID NO: 752208 - DNA, 25 bp, Homo sapien
ggagctcccgattgcgctcgtcgtc

SEQ ID NO: 752209 - DNA, 25 bp, Homo sapien
gtcgtcctatcctcggcagcgaaaa

SEQ ID NO: 752210 - DNA, 25 bp, Homo sapien
cctccccccagcgccgtgtccgagc

SEQ ID NO: 752211 - DNA, 25 bp, Homo sapien
tccccccagcgccgtgtccgagctg

SEQ ID NO: 752212 - DNA, 25 bp, Homo sapien
ctccccccagcgccgtgtccgagct

SEQ ID NO: 752213 - DNA, 25 bp, Homo sapien
ctgcgcgcctcttgcctctcgccag

SEQ ID NO: 752214 - DNA, 25 bp, Homo sapien
gccagccgcttgacctccagagggg

SEQ ID NO: 752215 - DNA, 25 bp, Homo sapien
gcttgcggcgttcctccaacttctt

SEQ ID NO: 752216 - DNA, 25 bp, Homo sapien
gcggcggcggttgcaggagctgcgg

SEQ ID NO: 752217 - DNA, 25 bp, Homo sapien
gcagcgagaagacccgacgcttctc

SEQ ID NO: 752218 - DNA, 25 bp, Homo sapien
gcgagaagacccgacgcttctccgc

SEQ ID NO: 752219 - DNA, 25 bp, Homo sapien
gggcagcgagaagacccgacgcttc

SEQ ID NO: 752220 - DNA, 25 bp, Homo sapien
tggggcagcgagaagacccgacgct

SEQ ID NO: 752221 - DNA, 25 bp, Homo sapien
ggtcacacccccgccgctactagca

SEQ ID NO: 752222 - DNA, 25 bp, Homo sapien
cagcggggtcacacccccgccgcta

SEQ ID NO: 752223 - DNA, 25 bp, Homo sapien
atcctcgtattccaccagcggggtc

SEQ ID NO: 752224 - DNA, 25 bp, Homo sapien
cccgccgctactagcaccgccaccg

SEQ ID NO: 752225 - DNA, 25 bp, Homo sapien
agcccctgctcggactgggagctca

SEQ ID NO: 752226 - DNA, 25 bp, Homo sapien
gctccttgctgcggccactgctgct

SEQ ID NO: 752227 - DNA, 25 bp, Homo sapien
cgttgccgcgctggccccccccagc

SEQ ID NO: 752228 - DNA, 25 bp, Homo sapien
gaggaggccggactcccgccgctgc

SEQ ID NO: 752229 - DNA, 25 bp, Homo sapien
tcgctgccaccgcgctgcccatccc

SEQ ID NO: 752230 - DNA, 25 bp, Homo sapien
ctcttggcgacctcggcccgttcct

SEQ ID NO: 752231 - DNA, 25 bp, Homo sapien
tgctgctgccgctcttggcgacctc

SEQ ID NO: 752232 - DNA, 25 bp, Homo sapien
ctcggcccgttcctcgccgctgtgg

SEQ ID NO: 752233 - DNA, 25 bp, Homo sapien
cggcccgttcctcgccgctgtggct

SEQ ID NO: 752234 - DNA, 25 bp, Homo sapien
cttagtccggctgcggtgggccttc

SEQ ID NO: 752235 - DNA, 25 bp, Homo sapien
ccctgtgggacaccgggctgtcgtc

SEQ ID NO: 752236 - DNA, 25 bp, Homo sapien
gctcggtcttgtcctcccggtaggc

SEQ ID NO: 752237 - DNA, 25 bp, Homo sapien
tccttgtaggccgaaggcggctcct

SEQ ID NO: 752238 - DNA, 25 bp, Homo sapien
cctaaaaaagtgtcacgcgcgcgaa

SEQ ID NO: 752239 - DNA, 25 bp, Homo sapien
cagtattcagaactatcggcttcca

SEQ ID NO: 752240 - DNA, 25 bp, Homo sapien
ctgagtcgttctgaggacccgggca

SEQ ID NO: 752241 - DNA, 25 bp, Homo sapien
gctcaggcggtgttgtctcgtctcg

SEQ ID NO: 752242 - DNA, 25 bp, Homo sapien
cagggaggcgtgtagatcatttacc

SEQ ID NO: 752243 - DNA, 25 bp, Homo sapien
ggaatgccaataaaatatcccagtg

SEQ ID NO: 752244 - DNA, 25 bp, Homo sapien
tatcccagtgaaagtgcccctatgc

SEQ ID NO: 752245 - DNA, 25 bp, Homo sapien
ggtaaattgagtttggaatgccaat

SEQ ID NO: 752246 - DNA, 25 bp, Homo sapien
gaaaatcaaggcacaagaactacgt

SEQ ID NO: 752247 - DNA, 25 bp, Homo sapien
aagaaatatggaaccatgtgaaaac

SEQ ID NO: 752248 - DNA, 25 bp, Homo sapien
gaaccatgtgaaaacaccaaatcta

SEQ ID NO: 752249 - DNA, 25 bp, Homo sapien
gagctgaaaatcaaggcacaagaac

SEQ ID NO: 752250 - DNA, 25 bp, Homo sapien
caagtgttggcaagtgtatacagaa

SEQ ID NO: 752251 - DNA, 25 bp, Homo sapien
gcttaggagatgtctccactcccat

SEQ ID NO: 752252 - DNA, 25 bp, Homo sapien
aacctaggtgtccattgttagatga

SEQ ID NO: 752253 - DNA, 25 bp, Homo sapien
aaaacaagattaccacatgatccca

SEQ ID NO: 752254 - DNA, 25 bp, Homo sapien
aaacaaatgctcatgcaaaaacttg

SEQ ID NO: 752255 - DNA, 25 bp, Homo sapien
aacccaaaggtccatgactaatgat

SEQ ID NO: 752256 - DNA, 25 bp, Homo sapien
tattgatccatatactacaacacag

SEQ ID NO: 752257 - DNA, 25 bp, Homo sapien
tgctttagtgaaagaatccagccat

SEQ ID NO: 752258 - DNA, 25 bp, Homo sapien
gaagaaagcagtgtaggaaatcaac

SEQ ID NO: 752259 - DNA, 25 bp, Homo sapien
gtcatgtttctatcccctgatcaga

SEQ ID NO: 752260 - DNA, 25 bp, Homo sapien
gaaatcaacttttcctacactggca

SEQ ID NO: 752261 - DNA, 25 bp, Homo sapien
tacactggcaagattctggtcatca

SEQ ID NO: 752262 - DNA, 25 bp, Homo sapien
agtatgtgctttgggtcaactaagg

SEQ ID NO: 752263 - DNA, 25 bp, Homo sapien
cattctaattctaggacaaaaacaa

SEQ ID NO: 752264 - DNA, 25 bp, Homo sapien
tagttgacattaatacagtgtggag

SEQ ID NO: 752265 - DNA, 25 bp, Homo sapien
cgtgcctggacactgaaaatttccg

SEQ ID NO: 752266 - DNA, 25 bp, Homo sapien
tttaccctgacatgactaatatgca

SEQ ID NO: 752267 - DNA, 25 bp, Homo sapien
caaaaaaccataagaggatagttgg

SEQ ID NO: 752268 - DNA, 25 bp, Homo sapien
ccataagaggatagttggattgtct

SEQ ID NO: 752269 - DNA, 25 bp, Homo sapien
taccctgacatgactaatatgcatg

SEQ ID NO: 752270 - DNA, 25 bp, Homo sapien
ttaatccacggcacctctgtagtcc

SEQ ID NO: 752271 - DNA, 25 bp, Homo sapien
ttaacacattaacacactgccaagg

SEQ ID NO: 752272 - DNA, 25 bp, Homo sapien
tacaactcaggtctgaaactcagca

SEQ ID NO: 752273 - DNA, 25 bp, Homo sapien
tctgtagtccctgcattaaagtctc

SEQ ID NO: 752274 - DNA, 25 bp, Homo sapien
tatccaatcactcttaatctgaggc

SEQ ID NO: 752275 - DNA, 25 bp, Homo sapien
tttcacacagaaaatgcaacaaagt

SEQ ID NO: 752276 - DNA, 25 bp, Homo sapien
tatagtctgaactaggacttaggtt

SEQ ID NO: 752277 - DNA, 25 bp, Homo sapien
ttcccacaaagaactatgccacaaa

SEQ ID NO: 752278 - DNA, 25 bp, Homo sapien
gaatgacgacttctggatctagaca

SEQ ID NO: 752279 - DNA, 25 bp, Homo sapien
tctgtgcctgctacgagatcttgaa

SEQ ID NO: 752280 - DNA, 25 bp, Homo sapien
cgggcttctgcttcgggattttcca

SEQ ID NO: 752281 - DNA, 25 bp, Homo sapien
tgcctagatgaatacgggcttctgc

SEQ ID NO: 752282 - DNA, 25 bp, Homo sapien
ctctgctgctcgtgcttttttattc

SEQ ID NO: 752283 - DNA, 25 bp, Homo sapien
tactcttcagagttagtgtgctagg

SEQ ID NO: 752284 - DNA, 25 bp, Homo sapien
ttcttgttcaattcagctgccaggc

SEQ ID NO: 752285 - DNA, 25 bp, Homo sapien
tgcttctgcggctcttgctgcctct

SEQ ID NO: 752286 - DNA, 25 bp, Homo sapien
ccttggtaggtgtagaagtgtttga

SEQ ID NO: 752287 - DNA, 25 bp, Homo sapien
gtgatgcactggcactagtttccgt

SEQ ID NO: 752288 - DNA, 25 bp, Homo sapien
catccttcacatggtttgtttgtga

SEQ ID NO: 752289 - DNA, 25 bp, Homo sapien
agaaggtgcatgttcaattttaatt

SEQ ID NO: 752290 - DNA, 25 bp, Homo sapien
gtagcagcagatttactctcctttc

SEQ ID NO: 752291 - DNA, 25 bp, Homo sapien
taacggtggtaatgtagaggtgact

SEQ ID NO: 752292 - DNA, 25 bp, Homo sapien
caccttcgttacctgaagaggtggc

SEQ ID NO: 752293 - DNA, 25 bp, Homo sapien
agaggtgactaaagctacatgttgc

SEQ ID NO: 752294 - DNA, 25 bp, Homo sapien
cagcttctttatcttcaggcagcat

SEQ ID NO: 752295 - DNA, 25 bp, Homo sapien
ctatcagcttctttatcttcaggca

SEQ ID NO: 752296 - DNA, 25 bp, Homo sapien
tcagcttctttatcttcaggcagca

SEQ ID NO: 752297 - DNA, 25 bp, Homo sapien
tatcagcttctttatcttcaggcag

SEQ ID NO: 752298 - DNA, 25 bp, Homo sapien
cctcaaagggcatgaaactcaagaa

SEQ ID NO: 752299 - DNA, 25 bp, Homo sapien
gaaccttcagcgttccctgagaaca

SEQ ID NO: 752300 - DNA, 25 bp, Homo sapien
ggataaagtagagaaacaccagtct

SEQ ID NO: 752301 - DNA, 25 bp, Homo sapien
tgaaacatggattctcagtaactgg

SEQ ID NO: 752302 - DNA, 25 bp, Homo sapien
ggaaaatccagcacagaatacaagc

SEQ ID NO: 752303 - DNA, 25 bp, Homo sapien
tgggcccatctataccaacatggaa

SEQ ID NO: 752304 - DNA, 25 bp, Homo sapien
ggcaatttcatacatctgggtgcat

SEQ ID NO: 752305 - DNA, 25 bp, Homo sapien
gaagaacacgatacatccattcctg

SEQ ID NO: 752306 - DNA, 25 bp, Homo sapien
tgtccaagtttctttccagctaaag

SEQ ID NO: 752307 - DNA, 25 bp, Homo sapien
taagtagcaatagtcatgaatattc

SEQ ID NO: 752308 - DNA, 25 bp, Homo sapien
tatttcacattataagactattgtc

SEQ ID NO: 752309 - DNA, 25 bp, Homo sapien
gctaaagtaatacactatactcaac

SEQ ID NO: 752310 - DNA, 25 bp, Homo sapien
taaatcagcaagaagacatcggagt

SEQ ID NO: 752311 - DNA, 25 bp, Homo sapien
taggcctccttttactatgtaactg

SEQ ID NO: 752312 - DNA, 25 bp, Homo sapien
gaagacatcggagtttcttttctac

SEQ ID NO: 752313 - DNA, 25 bp, Homo sapien
ctcagggggcagcggtaaatcagca

SEQ ID NO: 752314 - DNA, 25 bp, Homo sapien
atttaagagcaggtagaaagcaagc

SEQ ID NO: 752315 - DNA, 25 bp, Homo sapien
ttaagagcaggtagaaagcaagcac

SEQ ID NO: 752316 - DNA, 25 bp, Homo sapien
tttaagagcaggtagaaagcaagca

SEQ ID NO: 752317 - DNA, 25 bp, Homo sapien
gaataggaatgcaagcaattatgat

SEQ ID NO: 752318 - DNA, 25 bp, Homo sapien
ggaatgcaagcaattatgatttttt

SEQ ID NO: 752319 - DNA, 25 bp, Homo sapien
taggaatgcaagcaattatgatttt

SEQ ID NO: 752320 - DNA, 25 bp, Homo sapien
aacttctgatgacccagaatcactg

SEQ ID NO: 752321 - DNA, 25 bp, Homo sapien
tatttggtctcactaaatgctgact

SEQ ID NO: 752322 - DNA, 25 bp, Homo sapien
tgcccggccagtttagaaaatgacc

SEQ ID NO: 752323 - DNA, 25 bp, Homo sapien
tcaaattcacacactaggcactacc

SEQ ID NO: 752324 - DNA, 25 bp, Homo sapien
gaaacagcagcttgcccattactaa

SEQ ID NO: 752325 - DNA, 25 bp, Homo sapien
ctggctttgtaaacttgtccgtaag

SEQ ID NO: 752326 - DNA, 25 bp, Homo sapien
tctttggtttcaccatagcgaggcc

SEQ ID NO: 752327 - DNA, 25 bp, Homo sapien
tatcaaatttatccacgcagcgttt

SEQ ID NO: 752328 - DNA, 25 bp, Homo sapien
tgtccgtaagtaccttctccaataa

SEQ ID NO: 752329 - DNA, 25 bp, Homo sapien
gctgccggagaattttaatttctcg

SEQ ID NO: 752330 - DNA, 25 bp, Homo sapien
ccttttcattatccagacgtacttt

SEQ ID NO: 752331 - DNA, 25 bp, Homo sapien
attgctgtaattggaaagccttcct

SEQ ID NO: 752332 - DNA, 25 bp, Homo sapien
tactctgatgggtaagctgccggag

SEQ ID NO: 752333 - DNA, 25 bp, Homo sapien
caggtttaagccactatgccaggca

SEQ ID NO: 752334 - DNA, 25 bp, Homo sapien
gatgtttctcttacacaactaatag

SEQ ID NO: 752335 - DNA, 25 bp, Homo sapien
ggtttaagccactatgccaggcatt

SEQ ID NO: 752336 - DNA, 25 bp, Homo sapien
gcttagttagttataacagtgcaaa

SEQ ID NO: 752337 - DNA, 25 bp, Homo sapien
aaactgcgggaatataaattcagac

SEQ ID NO: 752338 - DNA, 25 bp, Homo sapien
tctaaactgcgggaatataaattca

SEQ ID NO: 752339 - DNA, 25 bp, Homo sapien
cagttctaaactgcgggaatataaa

SEQ ID NO: 752340 - DNA, 25 bp, Homo sapien
atcagcagttctaaactgcgggaat

SEQ ID NO: 752341 - DNA, 25 bp, Homo sapien
taagcatctgcccaatccaagatca

SEQ ID NO: 752342 - DNA, 25 bp, Homo sapien
ttatgggcatgagcaaacgtgccca

SEQ ID NO: 752343 - DNA, 25 bp, Homo sapien
gcccagcctgtaggaagatttaaaa

SEQ ID NO: 752344 - DNA, 25 bp, Homo sapien
gccaccttgtcgaaaatcagttgag

SEQ ID NO: 752345 - DNA, 25 bp, Homo sapien
aattactcacagctagtcagatgtg

SEQ ID NO: 752346 - DNA, 25 bp, Homo sapien
tgaaactcttcacaattagagactg

SEQ ID NO: 752347 - DNA, 25 bp, Homo sapien
catcctacctgcctaataattattg

SEQ ID NO: 752348 - DNA, 25 bp, Homo sapien
taaccaattactcacagctagtcag

SEQ ID NO: 752349 - DNA, 25 bp, Homo sapien
tccttgtttaaaagttatgccacag

SEQ ID NO: 752350 - DNA, 25 bp, Homo sapien
tgccccaccttatgtacttttatag

SEQ ID NO: 752351 - DNA, 25 bp, Homo sapien
tataaagaagaactatgcctccttg

SEQ ID NO: 752352 - DNA, 25 bp, Homo sapien
taactgtatgatggatcaactacta

SEQ ID NO: 752353 - DNA, 25 bp, Homo sapien
cttgataaataatgagattctctac

SEQ ID NO: 752354 - DNA, 25 bp, Homo sapien
ttgataaataatgagattctctaca

SEQ ID NO: 752355 - DNA, 25 bp, Homo sapien
atctcagcgttaagtctcaacctcg

SEQ ID NO: 752356 - DNA, 25 bp, Homo sapien
taaggctccaactgcccaatctgag

SEQ ID NO: 752357 - DNA, 25 bp, Homo sapien
tctgtataggaaatctcagcgttaa

SEQ ID NO: 752358 - DNA, 25 bp, Homo sapien
aactgtaaggctccaactgcccaat

SEQ ID NO: 752359 - DNA, 25 bp, Homo sapien
ctgatcaacaagagaacgaccttca

SEQ ID NO: 752360 - DNA, 25 bp, Homo sapien
tctgatcaacaagagaacgaccttc

SEQ ID NO: 752361 - DNA, 25 bp, Homo sapien
tgatcaacaagagaacgaccttcag

SEQ ID NO: 752362 - DNA, 25 bp, Homo sapien
gtccatcaccacgatcgaatgattt

SEQ ID NO: 752363 - DNA, 25 bp, Homo sapien
aggcgtccatcaccacgatcgaatg

SEQ ID NO: 752364 - DNA, 25 bp, Homo sapien
catcaccacgatcgaatgatttttg

SEQ ID NO: 752365 - DNA, 25 bp, Homo sapien
tcaccacgatcgaatgatttttgta

SEQ ID NO: 752366 - DNA, 25 bp, Homo sapien
agttaaaaaatgctacgagttctgg

SEQ ID NO: 752367 - DNA, 25 bp, Homo sapien
cagcattaagagttgcatggtccaa

SEQ ID NO: 752368 - DNA, 25 bp, Homo sapien
catggtccaatacagtagctactag

SEQ ID NO: 752369 - DNA, 25 bp, Homo sapien
tgtaagcatgatcactaaagcaatg

SEQ ID NO: 752370 - DNA, 25 bp, Homo sapien
taaaatgaaccaagcctgattccag

SEQ ID NO: 752371 - DNA, 25 bp, Homo sapien
agttcttcttatgacaataatccag

SEQ ID NO: 752372 - DNA, 25 bp, Homo sapien
tgattccagtagtcccatcagatca

SEQ ID NO: 752373 - DNA, 25 bp, Homo sapien
ggaacatttaatatctctatgcaaa

SEQ ID NO: 752374 - DNA, 25 bp, Homo sapien
acacaacttttgaggtatcccaagt

SEQ ID NO: 752375 - DNA, 25 bp, Homo sapien
ggtatcccaagttataatattgttg

SEQ ID NO: 752376 - DNA, 25 bp, Homo sapien
cttttgaggtatcccaagttataat

SEQ ID NO: 752377 - DNA, 25 bp, Homo sapien
tgaggtatcccaagttataatattg

SEQ ID NO: 752378 - DNA, 25 bp, Homo sapien
tatacaatcgagcaagtccaaagtc

SEQ ID NO: 752379 - DNA, 25 bp, Homo sapien
ctttcttctgagctatacaatcgag

SEQ ID NO: 752380 - DNA, 25 bp, Homo sapien
tgagctatacaatcgagcaagtcca

SEQ ID NO: 752381 - DNA, 25 bp, Homo sapien
tcttctgagctatacaatcgagcaa

SEQ ID NO: 752382 - DNA, 25 bp, Homo sapien
tatgtactaaccatgaaaagtaaac

SEQ ID NO: 752383 - DNA, 25 bp, Homo sapien
tacaataatcaacccaatatggtat

SEQ ID NO: 752384 - DNA, 25 bp, Homo sapien
tatagcttctaatactaaactctag

SEQ ID NO: 752385 - DNA, 25 bp, Homo sapien
agttcacttcagttacacttaaaga

SEQ ID NO: 752386 - DNA, 25 bp, Homo sapien
gcaataaactcaataacccaggaaa

SEQ ID NO: 752387 - DNA, 25 bp, Homo sapien
actccactttacataattagatcaa

SEQ ID NO: 752388 - DNA, 25 bp, Homo sapien
ggtgtgtctatacccagtatttgca

SEQ ID NO: 752389 - DNA, 25 bp, Homo sapien
gaaaaacatatagtcgacttcttag

SEQ ID NO: 752390 - DNA, 25 bp, Homo sapien
gaggcagggatgtatctcacaacac

SEQ ID NO: 752391 - DNA, 25 bp, Homo sapien
tcttgcttccagacgtataaggcca

SEQ ID NO: 752392 - DNA, 25 bp, Homo sapien
taatctgtctttccactacctgtgc

SEQ ID NO: 752393 - DNA, 25 bp, Homo sapien
accatcaaggtctaacaagtctaca

SEQ ID NO: 752394 - DNA, 25 bp, Homo sapien
catgaccaagtgctctccagtggaa

SEQ ID NO: 752395 - DNA, 25 bp, Homo sapien
tgataagtgccatttctaggcctgg

SEQ ID NO: 752396 - DNA, 25 bp, Homo sapien
tcacctctggcaccagcattggaag

SEQ ID NO: 752397 - DNA, 25 bp, Homo sapien
gaatagctgtattgaagcagtcacc

SEQ ID NO: 752398 - DNA, 25 bp, Homo sapien
cttaaggcctgataagctgcaccgt

SEQ ID NO: 752399 - DNA, 25 bp, Homo sapien
cgtatccacaacaaaccaagcagtg

SEQ ID NO: 752400 - DNA, 25 bp, Homo sapien
gcagtgtgataaggagtgtgcccct

SEQ ID NO: 752401 - DNA, 25 bp, Homo sapien
taagctgcaccgtatccacaacaaa

SEQ ID NO: 752402 - DNA, 25 bp, Homo sapien
caacggagtagagatcaaagactat

SEQ ID NO: 752403 - DNA, 25 bp, Homo sapien
cattcaaggaagtgtcaacggagta

SEQ ID NO: 752404 - DNA, 25 bp, Homo sapien
ctgttcattgatagattccaatact

SEQ ID NO: 752405 - DNA, 25 bp, Homo sapien
gaagtgtcaacggagtagagatcaa

SEQ ID NO: 752406 - DNA, 25 bp, Homo sapien
gcccaaacaatgctgggcacaggtc

SEQ ID NO: 752407 - DNA, 25 bp, Homo sapien
tacaatggtgttataaaagtgcaac

SEQ ID NO: 752408 - DNA, 25 bp, Homo sapien
gcaccttaatgtatattgccctcta

SEQ ID NO: 752409 - DNA, 25 bp, Homo sapien
cacatgatttactgggtggaagaac

SEQ ID NO: 752410 - DNA, 25 bp, Homo sapien
gccacctatagatttgcagttccag

SEQ ID NO: 752411 - DNA, 25 bp, Homo sapien
tagttaacagtgctccaaagctagc

SEQ ID NO: 752412 - DNA, 25 bp, Homo sapien
gaggaggttcttcggctgatctgta

SEQ ID NO: 752413 - DNA, 25 bp, Homo sapien
taagcttggcttggtcctggaccag

SEQ ID NO: 752414 - DNA, 25 bp, Homo sapien
tacatcaatggctggtgtgtatcgt

SEQ ID NO: 752415 - DNA, 25 bp, Homo sapien
caggtggacggtaccataaagtaat

SEQ ID NO: 752416 - DNA, 25 bp, Homo sapien
cataaagtaattaccttgttagtat

SEQ ID NO: 752417 - DNA, 25 bp, Homo sapien
ctcccagtagcagttcaggtggacg

SEQ ID NO: 752418 - DNA, 25 bp, Homo sapien
tttttagtgaagagttcgccaagga

SEQ ID NO: 752419 - DNA, 25 bp, Homo sapien
tagtgaagagttcgccaaggataca

SEQ ID NO: 752420 - DNA, 25 bp, Homo sapien
tagttgtgcaagttcctgatttgct

SEQ ID NO: 752421 - DNA, 25 bp, Homo sapien
tctagttgtgcaagttcctgatttg

SEQ ID NO: 752422 - DNA, 25 bp, Homo sapien
tcagtttgtcctccatttagcagtc

SEQ ID NO: 752423 - DNA, 25 bp, Homo sapien
taagccctccagagaaccatgttgt

SEQ ID NO: 752424 - DNA, 25 bp, Homo sapien
tagcagtcataagccctccagagaa

SEQ ID NO: 752425 - DNA, 25 bp, Homo sapien
tgtcctccatttagcagtcataagc

SEQ ID NO: 752426 - DNA, 25 bp, Homo sapien
tataggcgtgggccaccacgccggg

SEQ ID NO: 752427 - DNA, 25 bp, Homo sapien
ttataggcgtgggccaccacgccgg

SEQ ID NO: 752428 - DNA, 25 bp, Homo sapien
attataggcgtgggccaccacgccg

SEQ ID NO: 752429 - DNA, 25 bp, Homo sapien
ataggcgtgggccaccacgccgggc

SEQ ID NO: 752430 - DNA, 25 bp, Homo sapien
gcctatagtatttcaacgttttgga

SEQ ID NO: 752431 - DNA, 25 bp, Homo sapien
taaacctagatgttctaaagcaagc

SEQ ID NO: 752432 - DNA, 25 bp, Homo sapien
tgtccaacttgcagtccatgggctg

SEQ ID NO: 752433 - DNA, 25 bp, Homo sapien
taagcacagggttattagcccatgg

SEQ ID NO: 752434 - DNA, 25 bp, Homo sapien
tagaaagtgacagcctactagctac

SEQ ID NO: 752435 - DNA, 25 bp, Homo sapien
caactggtgggataaatacatagtc

SEQ ID NO: 752436 - DNA, 25 bp, Homo sapien
tgttcagcatactcttcaactggtg

SEQ ID NO: 752437 - DNA, 25 bp, Homo sapien
gtccatccctaattagacagcaatg

SEQ ID NO: 752438 - DNA, 25 bp, Homo sapien
cacttgctagttttatgaccctgga

SEQ ID NO: 752439 - DNA, 25 bp, Homo sapien
tggccaggcatggtttcagactcct

SEQ ID NO: 752440 - DNA, 25 bp, Homo sapien
gaagacatagggttgttacgaagct

SEQ ID NO: 752441 - DNA, 25 bp, Homo sapien
gatcctaaggtaacacctagcagtg

SEQ ID NO: 752442 - DNA, 25 bp, Homo sapien
caaatgtcacttaaagggagatacc

SEQ ID NO: 752443 - DNA, 25 bp, Homo sapien
ccccatatggttcactgagaacata

SEQ ID NO: 752444 - DNA, 25 bp, Homo sapien
ccttcttagtaacagtacagcatgc

SEQ ID NO: 752445 - DNA, 25 bp, Homo sapien
gctacctgaggcaggatgttcctgc

SEQ ID NO: 752446 - DNA, 25 bp, Homo sapien
tgggttcgggtgatccttgtaccgc

SEQ ID NO: 752447 - DNA, 25 bp, Homo sapien
ttcgggtgatccttgtaccgcagcc

SEQ ID NO: 752448 - DNA, 25 bp, Homo sapien
aagaaattaatgctatgaaatcaaa

SEQ ID NO: 752449 - DNA, 25 bp, Homo sapien
ggttcgggtgatccttgtaccgcag

SEQ ID NO: 752450 - DNA, 25 bp, Homo sapien
tcagatttgtttatcagaaacttca

SEQ ID NO: 752451 - DNA, 25 bp, Homo sapien
gatttgtttatcagaaacttcattt

SEQ ID NO: 752452 - DNA, 25 bp, Homo sapien
atcagaaacttcattttcttcatgt

SEQ ID NO: 752453 - DNA, 25 bp, Homo sapien
tatcagaaacttcattttcttcatg

SEQ ID NO: 752454 - DNA, 25 bp, Homo sapien
gacactaggtctcatcattcctgag

SEQ ID NO: 752455 - DNA, 25 bp, Homo sapien
tgtaagattctaaaggccacacact

SEQ ID NO: 752456 - DNA, 25 bp, Homo sapien
ggcattagaacccaaccctgtaaga

SEQ ID NO: 752457 - DNA, 25 bp, Homo sapien
tgggaccctaaaccataagcgcagg

SEQ ID NO: 752458 - DNA, 25 bp, Homo sapien
ttcaaagtgtaagacagaacaatgg

SEQ ID NO: 752459 - DNA, 25 bp, Homo sapien
gaaaacttatatcctccaccgtgag

SEQ ID NO: 752460 - DNA, 25 bp, Homo sapien
tcagtggtggtacaaattatataac

SEQ ID NO: 752461 - DNA, 25 bp, Homo sapien
ccaagtgtcatgtctattaaaccag

SEQ ID NO: 752462 - DNA, 25 bp, Homo sapien
aatgatttgacttgcgaactgaggc

SEQ ID NO: 752463 - DNA, 25 bp, Homo sapien
tattctctgcgatgaaatgggaaat

SEQ ID NO: 752464 - DNA, 25 bp, Homo sapien
acaaactacagtcatccaaacttgg

SEQ ID NO: 752465 - DNA, 25 bp, Homo sapien
gggaaatactcataagcacttctac

SEQ ID NO: 752466 - DNA, 25 bp, Homo sapien
aacctgggtctagataatactgcgg

SEQ ID NO: 752467 - DNA, 25 bp, Homo sapien
catcggtcaaattacattgcttagg

SEQ ID NO: 752468 - DNA, 25 bp, Homo sapien
actgcggtaggtttgtctgtagaca

SEQ ID NO: 752469 - DNA, 25 bp, Homo sapien
aattaaatgagctagcatctggccc

SEQ ID NO: 752470 - DNA, 25 bp, Homo sapien
caggacatggactcccacatattcg

SEQ ID NO: 752471 - DNA, 25 bp, Homo sapien
tgcaggacatggactcccacatatt

SEQ ID NO: 752472 - DNA, 25 bp, Homo sapien
gcaggacatggactcccacatattc

SEQ ID NO: 752473 - DNA, 25 bp, Homo sapien
aggacatggactcccacatattcgg

SEQ ID NO: 752474 - DNA, 25 bp, Homo sapien
tgttgaaatatggtagtttgattac

SEQ ID NO: 752475 - DNA, 25 bp, Homo sapien
gaaatatggtagtttgattacatca

SEQ ID NO: 752476 - DNA, 25 bp, Homo sapien
aatatggtagtttgattacatcagg

SEQ ID NO: 752477 - DNA, 25 bp, Homo sapien
atggtagtttgattacatcaggcca

SEQ ID NO: 752478 - DNA, 25 bp, Homo sapien
tcttaactttcgacgatattgcttc

SEQ ID NO: 752479 - DNA, 25 bp, Homo sapien
ctttcgacgatattgcttctttggt

SEQ ID NO: 752480 - DNA, 25 bp, Homo sapien
aactttcgacgatattgcttctttg

SEQ ID NO: 752481 - DNA, 25 bp, Homo sapien
cttctcttaactttcgacgatattg

SEQ ID NO: 752482 - DNA, 25 bp, Homo sapien
agtaacttgaaagctgttccagtaa

SEQ ID NO: 752483 - DNA, 25 bp, Homo sapien
taggtttacctcagatcactagaga

SEQ ID NO: 752484 - DNA, 25 bp, Homo sapien
tctgcatgtagcaaacagaactcaa

SEQ ID NO: 752485 - DNA, 25 bp, Homo sapien
taaagttctttcacgtaagcaccaa

SEQ ID NO: 752486 - DNA, 25 bp, Homo sapien
catctcggaggaactcgcactgaag

SEQ ID NO: 752487 - DNA, 25 bp, Homo sapien
caaataagtctagcgcagctgcagg

SEQ ID NO: 752488 - DNA, 25 bp, Homo sapien
gcagcgcttactaggatccaaggca

SEQ ID NO: 752489 - DNA, 25 bp, Homo sapien
gaagagcctgttcagcagtgcagcg

SEQ ID NO: 752490 - DNA, 25 bp, Homo sapien
tgtcttcttcgctttttactccata

SEQ ID NO: 752491 - DNA, 25 bp, Homo sapien
tcttcttcgctttttactccataac

SEQ ID NO: 752492 - DNA, 25 bp, Homo sapien
gtcttcttcgctttttactccataa

SEQ ID NO: 752493 - DNA, 25 bp, Homo sapien
gggtgtgttggttctgctgtcatcc

SEQ ID NO: 752494 - DNA, 25 bp, Homo sapien
caccctggggtgtgttggttctgct

SEQ ID NO: 752495 - DNA, 25 bp, Homo sapien
gtgtgttggttctgctgtcatccaa

SEQ ID NO: 752496 - DNA, 25 bp, Homo sapien
ctggggtgtgttggttctgctgtca

SEQ ID NO: 752497 - DNA, 25 bp, Homo sapien
ggataatttacacaggtcctccctc

SEQ ID NO: 752498 - DNA, 25 bp, Homo sapien
tactgagaagaagaaactgacaccg

SEQ ID NO: 752499 - DNA, 25 bp, Homo sapien
caagttcttcttatgatccgtgagc

SEQ ID NO: 752500 - DNA, 25 bp, Homo sapien
tgaatcacatataacgacaaggctc

SEQ ID NO: 752501 - DNA, 25 bp, Homo sapien
ttagattgtagtaggtttagtagaa

SEQ ID NO: 752502 - DNA, 25 bp, Homo sapien
tgccaattcactgtggtttaagtgc

SEQ ID NO: 752503 - DNA, 25 bp, Homo sapien
tcactgtggtttaagtgctgtccag

SEQ ID NO: 752504 - DNA, 25 bp, Homo sapien
taggtttagtagaattgccaattca

SEQ ID NO: 752505 - DNA, 25 bp, Homo sapien
caaaattccagcaggaaggtttatt

SEQ ID NO: 752506 - DNA, 25 bp, Homo sapien
ttcaacacttggacaaaatcagcca

SEQ ID NO: 752507 - DNA, 25 bp, Homo sapien
ccttaatgttcaacacttggacaaa

SEQ ID NO: 752508 - DNA, 25 bp, Homo sapien
taatgttcaacacttggacaaaatc

SEQ ID NO: 752509 - DNA, 25 bp, Homo sapien
cgacaccggagtgctaggttctgga

SEQ ID NO: 752510 - DNA, 25 bp, Homo sapien
agcatcagtctccactttaggctgg

SEQ ID NO: 752511 - DNA, 25 bp, Homo sapien
taatgacgcttcatgtcccgatcca

SEQ ID NO: 752512 - DNA, 25 bp, Homo sapien
acggtttcgaagactcctgttgtgg

SEQ ID NO: 752513 - DNA, 25 bp, Homo sapien
taggtgcagaattcacgtatacttc

SEQ ID NO: 752514 - DNA, 25 bp, Homo sapien
tagtcaagcatcctttcgtatttgg

SEQ ID NO: 752515 - DNA, 25 bp, Homo sapien
cacagataggtactgaattcctggg

SEQ ID NO: 752516 - DNA, 25 bp, Homo sapien
taaagctaattacggctaggtgcag

SEQ ID NO: 752517 - DNA, 25 bp, Homo sapien
tacgtcgttctagtggtggagcaga

SEQ ID NO: 752518 - DNA, 25 bp, Homo sapien
ccttcactccggcatgagggtcagt

SEQ ID NO: 752519 - DNA, 25 bp, Homo sapien
aattcgaggccggtctggttctggc

SEQ ID NO: 752520 - DNA, 25 bp, Homo sapien
aaaggatgagtactctctggccccg

SEQ ID NO: 752521 - DNA, 25 bp, Homo sapien
tctgaaatgagcacaaagtacacct

SEQ ID NO: 752522 - DNA, 25 bp, Homo sapien
cacaataacactgaaagcaggtgca

SEQ ID NO: 752523 - DNA, 25 bp, Homo sapien
gactgacagtgacctttgactaaag

SEQ ID NO: 752524 - DNA, 25 bp, Homo sapien
caaatgtgcatagttcagaagatct

SEQ ID NO: 752525 - DNA, 25 bp, Homo sapien
tcactcccctatcaagagaaggtgg

SEQ ID NO: 752526 - DNA, 25 bp, Homo sapien
ttagagggcacagggttaactggct

SEQ ID NO: 752527 - DNA, 25 bp, Homo sapien
ggaatggacctaacaggaactgaac

SEQ ID NO: 752528 - DNA, 25 bp, Homo sapien
tagtgaaaggcaacacagcccaaag

SEQ ID NO: 752529 - DNA, 25 bp, Homo sapien
gttcaattgtgctgtatatgatcct

SEQ ID NO: 752530 - DNA, 25 bp, Homo sapien
ctatggtatgttcaattgtgctgta

SEQ ID NO: 752531 - DNA, 25 bp, Homo sapien
cttgggactaagttgaatagtcatt

SEQ ID NO: 752532 - DNA, 25 bp, Homo sapien
gggactaagttgaatagtcatttcc

SEQ ID NO: 752533 - DNA, 25 bp, Homo sapien
tttagcctgatcttcattgtatgaa

SEQ ID NO: 752534 - DNA, 25 bp, Homo sapien
tggtgcctctttagcctgatcttca

SEQ ID NO: 752535 - DNA, 25 bp, Homo sapien
gatcagatgatggaatattttagta

SEQ ID NO: 752536 - DNA, 25 bp, Homo sapien
caacaacagccattgctcctacaac

SEQ ID NO: 752537 - DNA, 25 bp, Homo sapien
tagagccatttgatacaacatgaat

SEQ ID NO: 752538 - DNA, 25 bp, Homo sapien
gtgggttcagggagatacaagcttc

SEQ ID NO: 752539 - DNA, 25 bp, Homo sapien
tctaaatgaccataggagaaaggat

SEQ ID NO: 752540 - DNA, 25 bp, Homo sapien
tacagttgaaagattgccaacaatc

SEQ ID NO: 752541 - DNA, 25 bp, Homo sapien
catttagctctggaagtacctacca

SEQ ID NO: 752542 - DNA, 25 bp, Homo sapien
gtaggataacttgcaacatttagct

SEQ ID NO: 752543 - DNA, 25 bp, Homo sapien
caactggaagcttcatgtgtcagga

SEQ ID NO: 752544 - DNA, 25 bp, Homo sapien
tctgtagtggatataagccaacaat

SEQ ID NO: 752545 - DNA, 25 bp, Homo sapien
taccccttttgagcctggagctaag

SEQ ID NO: 752546 - DNA, 25 bp, Homo sapien
aaatgttcatgagctagaaaggttc

SEQ ID NO: 752547 - DNA, 25 bp, Homo sapien
tggtttacaacttgcaactacgtgg

SEQ ID NO: 752548 - DNA, 25 bp, Homo sapien
gagagagtatctctagcatgtctgg

SEQ ID NO: 752549 - DNA, 25 bp, Homo sapien
cggtcccggtgcaagcggcgaactc

SEQ ID NO: 752550 - DNA, 25 bp, Homo sapien
ggctgagcactagtcgcctgctggg

SEQ ID NO: 752551 - DNA, 25 bp, Homo sapien
gggcgcccacggacgccgcagaccc

SEQ ID NO: 752552 - DNA, 25 bp, Homo sapien
tgcaagcggcgaactccgtgcggcg

SEQ ID NO: 752553 - DNA, 25 bp, Homo sapien
ctgactgcgggcggccagtccacag

SEQ ID NO: 752554 - DNA, 25 bp, Homo sapien
cgccgccccggccggagaagaggca

SEQ ID NO: 752555 - DNA, 25 bp, Homo sapien
cgccccggccggagaagaggcaggt

SEQ ID NO: 752556 - DNA, 25 bp, Homo sapien
tgactgcgggcggccagtccacagc

SEQ ID NO: 752557 - DNA, 25 bp, Homo sapien
tctcatgcaggtttacaactaggag

SEQ ID NO: 752558 - DNA, 25 bp, Homo sapien
tcatgcaggtttacaactaggagct

SEQ ID NO: 752559 - DNA, 25 bp, Homo sapien
ctcatgcaggtttacaactaggagc

SEQ ID NO: 752560 - DNA, 25 bp, Homo sapien
catgcaggtttacaactaggagctg

SEQ ID NO: 752561 - DNA, 25 bp, Homo sapien
ctgtttgctcaaagctggctccaat

SEQ ID NO: 752562 - DNA, 25 bp, Homo sapien
tatggtgaccccaatttgtctctca

SEQ ID NO: 752563 - DNA, 25 bp, Homo sapien
caatagttgaaatcaccttgatgaa

SEQ ID NO: 752564 - DNA, 25 bp, Homo sapien
ccgatctcggacaataaacctaagc

SEQ ID NO: 752565 - DNA, 25 bp, Homo sapien
taggtacaaaagagtcataggtcca

SEQ ID NO: 752566 - DNA, 25 bp, Homo sapien
taggtccaaaatgtgcccataggtc

SEQ ID NO: 752567 - DNA, 25 bp, Homo sapien
ctatgggcaaggatggttagccttc

SEQ ID NO: 752568 - DNA, 25 bp, Homo sapien
gagactcgctttagtcaatgccatg

SEQ ID NO: 752569 - DNA, 25 bp, Homo sapien
attgcatttatcccattgaacagca

SEQ ID NO: 752570 - DNA, 25 bp, Homo sapien
ttgcatttatcccattgaacagcat

SEQ ID NO: 752571 - DNA, 25 bp, Homo sapien
tcatctcccataggcaaggtggatg

SEQ ID NO: 752572 - DNA, 25 bp, Homo sapien
gctttggtaaagcatttcgcgtcct

SEQ ID NO: 752573 - DNA, 25 bp, Homo sapien
cctgagtacatcgtacagcttggcc

SEQ ID NO: 752574 - DNA, 25 bp, Homo sapien
taggtgtacacagacgcaactcatc

SEQ ID NO: 752575 - DNA, 25 bp, Homo sapien
aggatgaacaaaagcttgaggtgta

SEQ ID NO: 752576 - DNA, 25 bp, Homo sapien
ggatgaacaaaagcttgaggtgtac

SEQ ID NO: 752577 - DNA, 25 bp, Homo sapien
aaggatgaacaaaagcttgaggtgt

SEQ ID NO: 752578 - DNA, 25 bp, Homo sapien
gttagcttcaatctttgcattacca

SEQ ID NO: 752579 - DNA, 25 bp, Homo sapien
gaagtacgagtactattagttagct

SEQ ID NO: 752580 - DNA, 25 bp, Homo sapien
cgagtactattagttagcttcaatc

SEQ ID NO: 752581 - DNA, 25 bp, Homo sapien
tgcattaccagagctcctgtttctc

SEQ ID NO: 752582 - DNA, 25 bp, Homo sapien
cccttccaatggctttatattgttc

SEQ ID NO: 752583 - DNA, 25 bp, Homo sapien
cttccaatggctttatattgttcat

SEQ ID NO: 752584 - DNA, 25 bp, Homo sapien
accccttccaatggctttatattgt

SEQ ID NO: 752585 - DNA, 25 bp, Homo sapien
taccccttccaatggctttatattg

SEQ ID NO: 752586 - DNA, 25 bp, Homo sapien
agtagcaaaaggtcccgccaggact

SEQ ID NO: 752587 - DNA, 25 bp, Homo sapien
cttttataacttctgctccaagatc

SEQ ID NO: 752588 - DNA, 25 bp, Homo sapien
ctggtctctccacttttataacttc

SEQ ID NO: 752589 - DNA, 25 bp, Homo sapien
ttttataacttctgctccaagatct

SEQ ID NO: 752590 - DNA, 25 bp, Homo sapien
tctccacttttataacttctgctcc

SEQ ID NO: 752591 - DNA, 25 bp, Homo sapien
ccaagttcgtgtatcatcaccagct

SEQ ID NO: 752592 - DNA, 25 bp, Homo sapien
ttttatttcggttaacactgagata

SEQ ID NO: 752593 - DNA, 25 bp, Homo sapien
gtggcccccaagttcgtgtatcatc

SEQ ID NO: 752594 - DNA, 25 bp, Homo sapien
gagataatatgtactttctgtccca

SEQ ID NO: 752595 - DNA, 25 bp, Homo sapien
tttggatccttgatattaacagcaa

SEQ ID NO: 752596 - DNA, 25 bp, Homo sapien
ttttggatccttgatattaacagca

SEQ ID NO: 752597 - DNA, 25 bp, Homo sapien
ttggatccttgatattaacagcaat

SEQ ID NO: 752598 - DNA, 25 bp, Homo sapien
cagacagtttgccagggacatagtt

SEQ ID NO: 752599 - DNA, 25 bp, Homo sapien
ggagcaatctcgtctatatcttcat

SEQ ID NO: 752600 - DNA, 25 bp, Homo sapien
tcccaggcccattgcagacagtttg

SEQ ID NO: 752601 - DNA, 25 bp, Homo sapien
gtgaggagcaatctcgtctatatct

SEQ ID NO: 752602 - DNA, 25 bp, Homo sapien
tccactcatgtcactcacaagccca

SEQ ID NO: 752603 - DNA, 25 bp, Homo sapien
ccacgttagcttttgttgtcttaga

SEQ ID NO: 752604 - DNA, 25 bp, Homo sapien
gtgccttccacgttagcttttgttg

SEQ ID NO: 752605 - DNA, 25 bp, Homo sapien
cacacgtccagtgttctgtgccttc

SEQ ID NO: 752606 - DNA, 25 bp, Homo sapien
gcgtccggccaacactcttcttaag

SEQ ID NO: 752607 - DNA, 25 bp, Homo sapien
cggccaacactcttcttaagcaagc

SEQ ID NO: 752608 - DNA, 25 bp, Homo sapien
gcagccttgtcctatcatgctttct

SEQ ID NO: 752609 - DNA, 25 bp, Homo sapien
agcaagcttaagcagccttgtccta

SEQ ID NO: 752610 - DNA, 25 bp, Homo sapien
ctgggtcagcatggcagcagacagc

SEQ ID NO: 752611 - DNA, 25 bp, Homo sapien
ataccagtacgcctctcaacatctc

SEQ ID NO: 752612 - DNA, 25 bp, Homo sapien
gcagcagacagccataccagtacgc

SEQ ID NO: 752613 - DNA, 25 bp, Homo sapien
ttctgggtcagcatggcagcagaca

SEQ ID NO: 752614 - DNA, 25 bp, Homo sapien
catattcagcaccacacagggtgtg

SEQ ID NO: 752615 - DNA, 25 bp, Homo sapien
aacatattcagcaccacacagggtg

SEQ ID NO: 752616 - DNA, 25 bp, Homo sapien
taaacatattcagcaccacacaggg

SEQ ID NO: 752617 - DNA, 25 bp, Homo sapien
aaataaacatattcagcaccacaca

SEQ ID NO: 752618 - DNA, 25 bp, Homo sapien
tgatgtgcatcagaccagaaacagc

SEQ ID NO: 752619 - DNA, 25 bp, Homo sapien
atcagaccagaaacagccgaggcaa

SEQ ID NO: 752620 - DNA, 25 bp, Homo sapien
gagaaattggacctgtctgaccata

SEQ ID NO: 752621 - DNA, 25 bp, Homo sapien
gccgaggcaacagcatcataaccag

SEQ ID NO: 752622 - DNA, 25 bp, Homo sapien
ctgggattggatcacaaagtaagga

SEQ ID NO: 752623 - DNA, 25 bp, Homo sapien
atattttaagggaaggccagcaggg

SEQ ID NO: 752624 - DNA, 25 bp, Homo sapien
agtgtgccacggaggctgcactcca

SEQ ID NO: 752625 - DNA, 25 bp, Homo sapien
tctaagacttgtgaaaatgaaacga

SEQ ID NO: 752626 - DNA, 25 bp, Homo sapien
caggccagtggcaagatcagtcata

SEQ ID NO: 752627 - DNA, 25 bp, Homo sapien
taatagctccatatgcatacaggcc

SEQ ID NO: 752628 - DNA, 25 bp, Homo sapien
ctgggatgacagtaggttacaatca

SEQ ID NO: 752629 - DNA, 25 bp, Homo sapien
tacaatcaatgaacagtcctttccc

SEQ ID NO: 752630 - DNA, 25 bp, Homo sapien
tcataatggaagacatcataattgc

SEQ ID NO: 752631 - DNA, 25 bp, Homo sapien
cataatggaagacatcataattgca

SEQ ID NO: 752632 - DNA, 25 bp, Homo sapien
cagctatgtgagacaaacacgccac

SEQ ID NO: 752633 - DNA, 25 bp, Homo sapien
atgagctgtaccccaacgttttgct

SEQ ID NO: 752634 - DNA, 25 bp, Homo sapien
catgagctgtaccccaacgttttgc

SEQ ID NO: 752635 - DNA, 25 bp, Homo sapien
taagtcataattaaggatccctgtg

SEQ ID NO: 752636 - DNA, 25 bp, Homo sapien
tacaacctgatttctgaaggaaatt

SEQ ID NO: 752637 - DNA, 25 bp, Homo sapien
acagaattgtttatacctcttgaat

SEQ ID NO: 752638 - DNA, 25 bp, Homo sapien
ttgtttatacctcttgaattgctct

SEQ ID NO: 752639 - DNA, 25 bp, Homo sapien
taaatgtccctatattcaccttcat

SEQ ID NO: 752640 - DNA, 25 bp, Homo sapien
ctgtaaatgtccctatattcacctt

SEQ ID NO: 752641 - DNA, 25 bp, Homo sapien
gtaaatgtccctatattcaccttca

SEQ ID NO: 752642 - DNA, 25 bp, Homo sapien
tgtaaatgtccctatattcaccttc

SEQ ID NO: 752643 - DNA, 25 bp, Homo sapien
tgtttaccctttcaaatagctcaag

SEQ ID NO: 752644 - DNA, 25 bp, Homo sapien
catggtaacacaatttggaatagca

SEQ ID NO: 752645 - DNA, 25 bp, Homo sapien
acagtcaatagattgtagggtctcc

SEQ ID NO: 752646 - DNA, 25 bp, Homo sapien
tggtcaatgatcctacaatttctgg

SEQ ID NO: 752647 - DNA, 25 bp, Homo sapien
ggcttagccagttagtcctagaagt

SEQ ID NO: 752648 - DNA, 25 bp, Homo sapien
cagaggaaggtgttcagagcctatg

SEQ ID NO: 752649 - DNA, 25 bp, Homo sapien
gcacttccatgcctgtaatagggat

SEQ ID NO: 752650 - DNA, 25 bp, Homo sapien
tcaaaacaacttaagcggaatctgc

SEQ ID NO: 752651 - DNA, 25 bp, Homo sapien
tggtaactgtagcctcgtagtaaag

SEQ ID NO: 752652 - DNA, 25 bp, Homo sapien
aactgtagcctcgtagtaaagtttg

SEQ ID NO: 752653 - DNA, 25 bp, Homo sapien
tttggtaactgtagcctcgtagtaa

SEQ ID NO: 752654 - DNA, 25 bp, Homo sapien
ttggtaactgtagcctcgtagtaaa

SEQ ID NO: 752655 - DNA, 25 bp, Homo sapien
ttcagctcttcaactcttattccat

SEQ ID NO: 752656 - DNA, 25 bp, Homo sapien
gacacctgacagatgaagtcacaga

SEQ ID NO: 752657 - DNA, 25 bp, Homo sapien
gaagaatacaggaagagcgtcaaaa

SEQ ID NO: 752658 - DNA, 25 bp, Homo sapien
cattactggacttggaagaatacag

SEQ ID NO: 752659 - DNA, 25 bp, Homo sapien
taacaattaggtcagcccaagcgtc

SEQ ID NO: 752660 - DNA, 25 bp, Homo sapien
gaggatacttccttccaaacttgca

SEQ ID NO: 752661 - DNA, 25 bp, Homo sapien
cataacactgactgaggctttaaca

SEQ ID NO: 752662 - DNA, 25 bp, Homo sapien
ttcctcagggaagtaacaaactctc

SEQ ID NO: 752663 - DNA, 25 bp, Homo sapien
ggtaaccattgctaaatgacttcat

SEQ ID NO: 752664 - DNA, 25 bp, Homo sapien
tccacaaaaggtaaccattgctaaa

SEQ ID NO: 752665 - DNA, 25 bp, Homo sapien
caaaaggtaaccattgctaaatgac

SEQ ID NO: 752666 - DNA, 25 bp, Homo sapien
aaggtaaccattgctaaatgacttc

SEQ ID NO: 752667 - DNA, 25 bp, Homo sapien
tcccactggatgcttctaccttctt

SEQ ID NO: 752668 - DNA, 25 bp, Homo sapien
ccactggatgcttctaccttcttat

SEQ ID NO: 752669 - DNA, 25 bp, Homo sapien
gactcaggaagttcccactggatgc

SEQ ID NO: 752670 - DNA, 25 bp, Homo sapien
gaggaggactcaggaagttcccact

SEQ ID NO: 752671 - DNA, 25 bp, Homo sapien
tctgtttgagcagtctggctgtgaa

SEQ ID NO: 752672 - DNA, 25 bp, Homo sapien
gctgtgaagcgcagggatgagcacg

SEQ ID NO: 752673 - DNA, 25 bp, Homo sapien
gatgagcacggactgaaagcacagc

SEQ ID NO: 752674 - DNA, 25 bp, Homo sapien
acatctgtttgagcagtctggctgt

SEQ ID NO: 752675 - DNA, 25 bp, Homo sapien
ttaaggaaagggagcaagcacacac

SEQ ID NO: 752676 - DNA, 25 bp, Homo sapien
cagtttgacatgaatcacggactcc

SEQ ID NO: 752677 - DNA, 25 bp, Homo sapien
gaatgcagtttgacatgaatcacgg

SEQ ID NO: 752678 - DNA, 25 bp, Homo sapien
ttgacatgaatcacggactccataa

SEQ ID NO: 752679 - DNA, 25 bp, Homo sapien
tgcagtttgacatgaatcacggact

SEQ ID NO: 752680 - DNA, 25 bp, Homo sapien
ctccagaacttgcttaatcatctgt

SEQ ID NO: 752681 - DNA, 25 bp, Homo sapien
tccagaacttgcttaatcatctgta

SEQ ID NO: 752682 - DNA, 25 bp, Homo sapien
ccagaacttgcttaatcatctgtaa

SEQ ID NO: 752683 - DNA, 25 bp, Homo sapien
cagaacttgcttaatcatctgtaag

SEQ ID NO: 752684 - DNA, 25 bp, Homo sapien
aaagactgttttccttgactggact

SEQ ID NO: 752685 - DNA, 25 bp, Homo sapien
gactgttttccttgactggacttac

SEQ ID NO: 752686 - DNA, 25 bp, Homo sapien
aagactgttttccttgactggactt

SEQ ID NO: 752687 - DNA, 25 bp, Homo sapien
tcttcacttcctcctccctttaaga

SEQ ID NO: 752688 - DNA, 25 bp, Homo sapien
tatagccatccttggttttaaaagc

SEQ ID NO: 752689 - DNA, 25 bp, Homo sapien
tacaatatagccatccttggtttta

SEQ ID NO: 752690 - DNA, 25 bp, Homo sapien
ctacaatatagccatccttggtttt

SEQ ID NO: 752691 - DNA, 25 bp, Homo sapien
caatatagccatccttggttttaaa

SEQ ID NO: 752692 - DNA, 25 bp, Homo sapien
tcaatcaactcaggcaaatccaaga

SEQ ID NO: 752693 - DNA, 25 bp, Homo sapien
taataagctcttttctattgtgtac

SEQ ID NO: 752694 - DNA, 25 bp, Homo sapien
atcaatcaactcaggcaaatccaag

SEQ ID NO: 752695 - DNA, 25 bp, Homo sapien
cttttctattgtgtacccgaaggtg

SEQ ID NO: 752696 - DNA, 25 bp, Homo sapien
ctgttttgtagaacctgacatcgtg

SEQ ID NO: 752697 - DNA, 25 bp, Homo sapien
tgccacacttggataccttgcccat

SEQ ID NO: 752698 - DNA, 25 bp, Homo sapien
gacatcgtggatccttgctttttcc

SEQ ID NO: 752699 - DNA, 25 bp, Homo sapien
tcagttctgccacacttggatacct

SEQ ID NO: 752700 - DNA, 25 bp, Homo sapien
ccagtgtttggaagattcctctgtt

SEQ ID NO: 752701 - DNA, 25 bp, Homo sapien
agcccttggcaaatgtgtcaggaag

SEQ ID NO: 752702 - DNA, 25 bp, Homo sapien
ccttggcaaatgtgtcaggaagggg

SEQ ID NO: 752703 - DNA, 25 bp, Homo sapien
gcccttggcaaatgtgtcaggaagg

SEQ ID NO: 752704 - DNA, 25 bp, Homo sapien
cccttggcaaatgtgtcaggaaggg

SEQ ID NO: 752705 - DNA, 25 bp, Homo sapien
tgcgagtgtgctggatggcacctcc

SEQ ID NO: 752706 - DNA, 25 bp, Homo sapien
cttttcccaaaactatgcgagtgtg

SEQ ID NO: 752707 - DNA, 25 bp, Homo sapien
tttcctttccaaacgcctgcacctc

SEQ ID NO: 752708 - DNA, 25 bp, Homo sapien
tataaacagttccatgctgctgaca

SEQ ID NO: 752709 - DNA, 25 bp, Homo sapien
aatactgctttggatatttgtgctt

SEQ ID NO: 752710 - DNA, 25 bp, Homo sapien
ctcccttggttctctaaatactgct

SEQ ID NO: 752711 - DNA, 25 bp, Homo sapien
ccctcccttggttctctaaatactg

SEQ ID NO: 752712 - DNA, 25 bp, Homo sapien
tactgctttggatatttgtgctttt

SEQ ID NO: 752713 - DNA, 25 bp, Homo sapien
gaaaatgcatgtcaatatccaaaca

SEQ ID NO: 752714 - DNA, 25 bp, Homo sapien
aagtggcctgaaagatctacacaga

SEQ ID NO: 752715 - DNA, 25 bp, Homo sapien
ggcctgaaagatctacacagaaaat

SEQ ID NO: 752716 - DNA, 25 bp, Homo sapien
caaagtggcctgaaagatctacaca

SEQ ID NO: 752717 - DNA, 25 bp, Homo sapien
gggccatacgggactccactgcctt

SEQ ID NO: 752718 - DNA, 25 bp, Homo sapien
ttcatgttgttgattgggccatacg

SEQ ID NO: 752719 - DNA, 25 bp, Homo sapien
gttgattgggccatacgggactcca

SEQ ID NO: 752720 - DNA, 25 bp, Homo sapien
catgttgttgattgggccatacggg

SEQ ID NO: 752721 - DNA, 25 bp, Homo sapien
tctttttatctcagacccacaaaca

SEQ ID NO: 752722 - DNA, 25 bp, Homo sapien
tcacatcatgtgacttaagcttgcg

SEQ ID NO: 752723 - DNA, 25 bp, Homo sapien
gcaaaggtaccttgatataagtcaa

SEQ ID NO: 752724 - DNA, 25 bp, Homo sapien
cttgcgatcaatggcaaaggtacct

SEQ ID NO: 752725 - DNA, 25 bp, Homo sapien
gtttccatgcaccaagcgccaagaa

SEQ ID NO: 752726 - DNA, 25 bp, Homo sapien
tcagaggcaaaacaagggaggatac

SEQ ID NO: 752727 - DNA, 25 bp, Homo sapien
tcatcagaggcaaaacaagggagga

SEQ ID NO: 752728 - DNA, 25 bp, Homo sapien
gtggccgtttccatgcaccaagcgc

SEQ ID NO: 752729 - DNA, 25 bp, Homo sapien
gagtgggccacacgcgccagtggtg

SEQ ID NO: 752730 - DNA, 25 bp, Homo sapien
ttccagttgaactagcagctgtgct

SEQ ID NO: 752731 - DNA, 25 bp, Homo sapien
tgaactagcagctgtgctggcacag

SEQ ID NO: 752732 - DNA, 25 bp, Homo sapien
acatggagagtgggccacacgcgcc

SEQ ID NO: 752733 - DNA, 25 bp, Homo sapien
attcctacgccatgttccaggcctt

SEQ ID NO: 752734 - DNA, 25 bp, Homo sapien
tttatcaaagtctccattcctacgc

SEQ ID NO: 752735 - DNA, 25 bp, Homo sapien
ttcctacgccatgttccaggccttg

SEQ ID NO: 752736 - DNA, 25 bp, Homo sapien
aagtctccattcctacgccatgttc

SEQ ID NO: 752737 - DNA, 25 bp, Homo sapien
tatgcctgcaggatcactttaactg

SEQ ID NO: 752738 - DNA, 25 bp, Homo sapien
tttcagtaaatgcagaccaatcccc

SEQ ID NO: 752739 - DNA, 25 bp, Homo sapien
gattgacttaacagtgtatgcctgc

SEQ ID NO: 752740 - DNA, 25 bp, Homo sapien
ttttctgccgttactgagtctccca

SEQ ID NO: 752741 - DNA, 25 bp, Homo sapien
cagttactacttctgcctaaagtac

SEQ ID NO: 752742 - DNA, 25 bp, Homo sapien
tactacttctgcctaaagtacctac

SEQ ID NO: 752743 - DNA, 25 bp, Homo sapien
ctatgccagttactacttctgccta

SEQ ID NO: 752744 - DNA, 25 bp, Homo sapien
tgccagttactacttctgcctaaag

SEQ ID NO: 752745 - DNA, 25 bp, Homo sapien
tgattattaatttggctctccatga

SEQ ID NO: 752746 - DNA, 25 bp, Homo sapien
atttggctctccatgagttccttaa

SEQ ID NO: 752747 - DNA, 25 bp, Homo sapien
atcaatatcctgattattaatttgg

SEQ ID NO: 752748 - DNA, 25 bp, Homo sapien
ctgattattaatttggctctccatg

SEQ ID NO: 752749 - DNA, 25 bp, Homo sapien
aataacagaaaagtgccagcactaa

SEQ ID NO: 752750 - DNA, 25 bp, Homo sapien
aacagtggtatacttaggactctct

SEQ ID NO: 752751 - DNA, 25 bp, Homo sapien
cttaggactctctggaaaaattcga

SEQ ID NO: 752752 - DNA, 25 bp, Homo sapien
gtgccagcactaacagtggtatact

SEQ ID NO: 752753 - DNA, 25 bp, Homo sapien
tagatgatcacacagaacctttttg

SEQ ID NO: 752754 - DNA, 25 bp, Homo sapien
gtttggcagtgcctttgatttgaaa

SEQ ID NO: 752755 - DNA, 25 bp, Homo sapien
gatgatcacacagaacctttttggc

SEQ ID NO: 752756 - DNA, 25 bp, Homo sapien
aactttagatgatcacacagaacct

SEQ ID NO: 752757 - DNA, 25 bp, Homo sapien
gctcatatttggtgtttacttttcc

SEQ ID NO: 752758 - DNA, 25 bp, Homo sapien
atgctcatatttggtgtttactttt

SEQ ID NO: 752759 - DNA, 25 bp, Homo sapien
tggtgtttacttttccatcagtcat

SEQ ID NO: 752760 - DNA, 25 bp, Homo sapien
atttggtgtttacttttccatcagt

SEQ ID NO: 752761 - DNA, 25 bp, Homo sapien
ctcatgaatggcataatccaaaaat

SEQ ID NO: 752762 - DNA, 25 bp, Homo sapien
cctcatgaatggcataatccaaaaa

SEQ ID NO: 752763 - DNA, 25 bp, Homo sapien
aacagctctaacaccttttctaaat

SEQ ID NO: 752764 - DNA, 25 bp, Homo sapien
gaaattatttaaaacagctctaaca

SEQ ID NO: 752765 - DNA, 25 bp, Homo sapien
ctccttggtgcactggtcctcacag

SEQ ID NO: 752766 - DNA, 25 bp, Homo sapien
tccactactcagctccttggtgcac

SEQ ID NO: 752767 - DNA, 25 bp, Homo sapien
agctccttggtgcactggtcctcac

SEQ ID NO: 752768 - DNA, 25 bp, Homo sapien
actactcagctccttggtgcactgg

SEQ ID NO: 752769 - DNA, 25 bp, Homo sapien
ctgatgaccacggaattgccactgc

SEQ ID NO: 752770 - DNA, 25 bp, Homo sapien
tgaccacggaattgccactgcacct

SEQ ID NO: 752771 - DNA, 25 bp, Homo sapien
ttgccactgcacctgttggtgagtt

SEQ ID NO: 752772 - DNA, 25 bp, Homo sapien
acggaattgccactgcacctgttgg

SEQ ID NO: 752773 - DNA, 25 bp, Homo sapien
cctggtaacagtgatttgtctgccc

SEQ ID NO: 752774 - DNA, 25 bp, Homo sapien
tgtctgccctggtttattaacggta

SEQ ID NO: 752775 - DNA, 25 bp, Homo sapien
aatgaaaaggaacatctagttcctc

SEQ ID NO: 752776 - DNA, 25 bp, Homo sapien
tgcgcagtctgctagcaatcctctc

SEQ ID NO: 752777 - DNA, 25 bp, Homo sapien
cctgtcctccccagtatctgtttaa

SEQ ID NO: 752778 - DNA, 25 bp, Homo sapien
tccctgtcctccccagtatctgttt

SEQ ID NO: 752779 - DNA, 25 bp, Homo sapien
ctgtgacagctccctgtcctcccca

SEQ ID NO: 752780 - DNA, 25 bp, Homo sapien
tgtcctccccagtatctgtttaaaa

SEQ ID NO: 752781 - DNA, 25 bp, Homo sapien
tgcatctacattgacagggatacag

SEQ ID NO: 752782 - DNA, 25 bp, Homo sapien
ggatacagagaacagccctgttttt

SEQ ID NO: 752783 - DNA, 25 bp, Homo sapien
tactttaaccacatcatcgccaaga

SEQ ID NO: 752784 - DNA, 25 bp, Homo sapien
gtgtaaggctgagttttcactactt

SEQ ID NO: 752785 - DNA, 25 bp, Homo sapien
acagaaggttttgcaaggcagggtt

SEQ ID NO: 752786 - DNA, 25 bp, Homo sapien
aggttttgcaaggcagggttcttca

SEQ ID NO: 752787 - DNA, 25 bp, Homo sapien
cctgtgtgtcattggtacagaaggt

SEQ ID NO: 752788 - DNA, 25 bp, Homo sapien
tgtgtgtcattggtacagaaggttt

SEQ ID NO: 752789 - DNA, 25 bp, Homo sapien
tgagctttccacagcatatatggga

SEQ ID NO: 752790 - DNA, 25 bp, Homo sapien
agctttccacagcatatatgggatc

SEQ ID NO: 752791 - DNA, 25 bp, Homo sapien
ccacttgcggcacagtgagctttcc

SEQ ID NO: 752792 - DNA, 25 bp, Homo sapien
gtgagctttccacagcatatatggg

SEQ ID NO: 752793 - DNA, 25 bp, Homo sapien
cgcacaggagttaaagtgaggttcc

SEQ ID NO: 752794 - DNA, 25 bp, Homo sapien
cagtattccaaagagccatgccagt

SEQ ID NO: 752795 - DNA, 25 bp, Homo sapien
aatgatgtcctgtgtctaagtctga

SEQ ID NO: 752796 - DNA, 25 bp, Homo sapien
tgtaatttgaggacagcgcacagga

SEQ ID NO: 752797 - DNA, 25 bp, Homo sapien
tccagcaagatgtctggacaagcca

SEQ ID NO: 752798 - DNA, 25 bp, Homo sapien
atgtcctgggtttcccaagagccat

SEQ ID NO: 752799 - DNA, 25 bp, Homo sapien
ccagcaagatgtctggacaagccat

SEQ ID NO: 752800 - DNA, 25 bp, Homo sapien
gtcctgggtttcccaagagccatag

SEQ ID NO: 752801 - DNA, 25 bp, Homo sapien
gtcttaaggaagtgcctctttgccc

SEQ ID NO: 752802 - DNA, 25 bp, Homo sapien
tcttaaggaagtgcctctttgcccc

SEQ ID NO: 752803 - DNA, 25 bp, Homo sapien
agtcttaaggaagtgcctctttgcc

SEQ ID NO: 752804 - DNA, 25 bp, Homo sapien
caagatgccacattcgggacagctg

SEQ ID NO: 752805 - DNA, 25 bp, Homo sapien
gacagctgtcagcactcatccaaca

SEQ ID NO: 752806 - DNA, 25 bp, Homo sapien
cattcgggacagctgtcagcactca

SEQ ID NO: 752807 - DNA, 25 bp, Homo sapien
ctgggcccgtaggaaacaagatgcc

SEQ ID NO: 752808 - DNA, 25 bp, Homo sapien
cacatcctgaacgaagctaagcact

SEQ ID NO: 752809 - DNA, 25 bp, Homo sapien
tcctgaacgaagctaagcactgtgt

SEQ ID NO: 752810 - DNA, 25 bp, Homo sapien
tgaacgaagctaagcactgtgtaat

SEQ ID NO: 752811 - DNA, 25 bp, Homo sapien
cgaagctaagcactgtgtaatgcta

SEQ ID NO: 752812 - DNA, 25 bp, Homo sapien
tctgagtaacatgacgacaatctaa

SEQ ID NO: 752813 - DNA, 25 bp, Homo sapien
tcaaggacatctttggctttgattc

SEQ ID NO: 752814 - DNA, 25 bp, Homo sapien
ggttggatgatacaggaccatttca

SEQ ID NO: 752815 - DNA, 25 bp, Homo sapien
gattcaaacagttgttctgttctga

SEQ ID NO: 752816 - DNA, 25 bp, Homo sapien
tcttctttcactgttgccccttcaa

SEQ ID NO: 752817 - DNA, 25 bp, Homo sapien
cttcaaaacctgcttcccttgtttg

SEQ ID NO: 752818 - DNA, 25 bp, Homo sapien
aaaacctgcttcccttgtttgatag

SEQ ID NO: 752819 - DNA, 25 bp, Homo sapien
ttcttctttcactgttgccccttca

SEQ ID NO: 752820 - DNA, 25 bp, Homo sapien
gaaacattttcctctggtgagggca

SEQ ID NO: 752821 - DNA, 25 bp, Homo sapien
ctaagcaaaccatatggaagaaaca

SEQ ID NO: 752822 - DNA, 25 bp, Homo sapien
ggaagaaacattttcctctggtgag

SEQ ID NO: 752823 - DNA, 25 bp, Homo sapien
acattttcctctggtgagggcagac

SEQ ID NO: 752824 - DNA, 25 bp, Homo sapien
aggtgtatttagtagccattgagat

SEQ ID NO: 752825 - DNA, 25 bp, Homo sapien
cctctaaggtgatgtcagttttatc

SEQ ID NO: 752826 - DNA, 25 bp, Homo sapien
gaaacaatgtgaggacttgtcctct

SEQ ID NO: 752827 - DNA, 25 bp, Homo sapien
caacataaagggagttagtgaaagc

SEQ ID NO: 752828 - DNA, 25 bp, Homo sapien
catggtgccggttctttgaatgctg

SEQ ID NO: 752829 - DNA, 25 bp, Homo sapien
gctgagaccagtatccatatagcac

SEQ ID NO: 752830 - DNA, 25 bp, Homo sapien
tcctgggatttggactccagtaagg

SEQ ID NO: 752831 - DNA, 25 bp, Homo sapien
aatgagaaacgcaggtatcccggca

SEQ ID NO: 752832 - DNA, 25 bp, Homo sapien
tatccatccactaccttcctgagag

SEQ ID NO: 752833 - DNA, 25 bp, Homo sapien
tagacaaggcactgcacaaactgat

SEQ ID NO: 752834 - DNA, 25 bp, Homo sapien
gattgtaacctaccactctagccca

SEQ ID NO: 752835 - DNA, 25 bp, Homo sapien
gactgaatacgatgcaatctgctca

SEQ ID NO: 752836 - DNA, 25 bp, Homo sapien
aggttgaagaccctcaagtcaaaat

SEQ ID NO: 752837 - DNA, 25 bp, Homo sapien
ggttgaagaccctcaagtcaaaata

SEQ ID NO: 752838 - DNA, 25 bp, Homo sapien
gttgaagaccctcaagtcaaaatac

SEQ ID NO: 752839 - DNA, 25 bp, Homo sapien
agccactccagaaggaagtggtgtc

SEQ ID NO: 752840 - DNA, 25 bp, Homo sapien
tcccttaggccccaagccactccag

SEQ ID NO: 752841 - DNA, 25 bp, Homo sapien
gcggatgctacatgaaggttttcct

SEQ ID NO: 752842 - DNA, 25 bp, Homo sapien
atgcggatgctacatgaaggttttc

SEQ ID NO: 752843 - DNA, 25 bp, Homo sapien
ctttcgaagtaagaggcttcacaca

SEQ ID NO: 752844 - DNA, 25 bp, Homo sapien
aggcttcacacatacagactctcag

SEQ ID NO: 752845 - DNA, 25 bp, Homo sapien
cacacatacagactctcagggggag

SEQ ID NO: 752846 - DNA, 25 bp, Homo sapien
gcttcacacatacagactctcaggg

SEQ ID NO: 752847 - DNA, 25 bp, Homo sapien
gaaagcagcctcatggtgacggccc

SEQ ID NO: 752848 - DNA, 25 bp, Homo sapien
ttctgagtgcccgaaacaaatgtgg

SEQ ID NO: 752849 - DNA, 25 bp, Homo sapien
ggccatgcagatcattagggcatct

SEQ ID NO: 752850 - DNA, 25 bp, Homo sapien
ctgtctaaacacagtttctgagtgc

SEQ ID NO: 752851 - DNA, 25 bp, Homo sapien
aaaaaagtcataattatgcctgacc

SEQ ID NO: 752852 - DNA, 25 bp, Homo sapien
gaaaatatagacttttccaggacaa

SEQ ID NO: 752853 - DNA, 25 bp, Homo sapien
tccaggacaaccaacatcaatcaaa

SEQ ID NO: 752854 - DNA, 25 bp, Homo sapien
caaaacttatttgccttgtggcaca

SEQ ID NO: 752855 - DNA, 25 bp, Homo sapien
gttagcatgacgatccctatatttt

SEQ ID NO: 752856 - DNA, 25 bp, Homo sapien
cctcaagttagcatgacgatcccta

SEQ ID NO: 752857 - DNA, 25 bp, Homo sapien
tcctcaagttagcatgacgatccct

SEQ ID NO: 752858 - DNA, 25 bp, Homo sapien
caagttagcatgacgatccctatat

SEQ ID NO: 752859 - DNA, 25 bp, Homo sapien
aaaaacctgaaacgcactctcctgc

SEQ ID NO: 752860 - DNA, 25 bp, Homo sapien
cacatttcaatctgtgatattgaca

SEQ ID NO: 752861 - DNA, 25 bp, Homo sapien
aacccaagcctttgaaactgagcct

SEQ ID NO: 752862 - DNA, 25 bp, Homo sapien
attgacatggatgtgaaaacccaag

SEQ ID NO: 752863 - DNA, 25 bp, Homo sapien
caaataacaggctttagtcccttgt

SEQ ID NO: 752864 - DNA, 25 bp, Homo sapien
ttccagtattccaaataacaggctt

SEQ ID NO: 752865 - DNA, 25 bp, Homo sapien
taacaggctttagtcccttgttcat

SEQ ID NO: 752866 - DNA, 25 bp, Homo sapien
tattccaaataacaggctttagtcc

SEQ ID NO: 752867 - DNA, 25 bp, Homo sapien
catattgccctcactataaccctgg

SEQ ID NO: 752868 - DNA, 25 bp, Homo sapien
gggcagctgctaattcgaccatatt

SEQ ID NO: 752869 - DNA, 25 bp, Homo sapien
aaccctggctttccatgagcaagga

SEQ ID NO: 752870 - DNA, 25 bp, Homo sapien
ttttgccgccccttgccagaaggga

SEQ ID NO: 752871 - DNA, 25 bp, Homo sapien
ccagtaagattagcacaaagggaaa

SEQ ID NO: 752872 - DNA, 25 bp, Homo sapien
agaggcagacgcacagcttgcccag

SEQ ID NO: 752873 - DNA, 25 bp, Homo sapien
ggaaagaagaacatgtcctgcccgc

SEQ ID NO: 752874 - DNA, 25 bp, Homo sapien
catcccaaacgacaggttttccaga

SEQ ID NO: 752875 - DNA, 25 bp, Homo sapien
gagctgccaaactccctaatagcat

SEQ ID NO: 752876 - DNA, 25 bp, Homo sapien
tgaggagacgaggaatgacaggagc

SEQ ID NO: 752877 - DNA, 25 bp, Homo sapien
tgcacacggaattcgaggagctgcc

SEQ ID NO: 752878 - DNA, 25 bp, Homo sapien
cttcctcctgcacacggaattcgag

SEQ ID NO: 752879 - DNA, 25 bp, Homo sapien
gctcgcaaagcaactcgggtaaacc

SEQ ID NO: 752880 - DNA, 25 bp, Homo sapien
ggcaagtttcggtgacggcaagcat

SEQ ID NO: 752881 - DNA, 25 bp, Homo sapien
cttgcccgtggacccaggtgcggac

SEQ ID NO: 752882 - DNA, 25 bp, Homo sapien
ccataagccagtctgaggagggcaa

SEQ ID NO: 752883 - DNA, 25 bp, Homo sapien
atcatgctgtaagcactggagaaca

SEQ ID NO: 752884 - DNA, 25 bp, Homo sapien
gtatcatgctgtaagcactggagaa

SEQ ID NO: 752885 - DNA, 25 bp, Homo sapien
tcatgctgtaagcactggagaacac

SEQ ID NO: 752886 - DNA, 25 bp, Homo sapien
tatcatgctgtaagcactggagaac

SEQ ID NO: 752887 - DNA, 25 bp, Homo sapien
aaggtgtggagttaagatgcagccc

SEQ ID NO: 752888 - DNA, 25 bp, Homo sapien
cagccaaaaggacggaaggtgtgga

SEQ ID NO: 752889 - DNA, 25 bp, Homo sapien
tctctccccgcgaggtaggtgctga

SEQ ID NO: 752890 - DNA, 25 bp, Homo sapien
cgatgaggacattttaggcagagca

SEQ ID NO: 752891 - DNA, 25 bp, Homo sapien
tgctctctagaacaatgaggctctg

SEQ ID NO: 752892 - DNA, 25 bp, Homo sapien
ttgctctctagaacaatgaggctct

SEQ ID NO: 752893 - DNA, 25 bp, Homo sapien
cacttgctctctagaacaatgaggc

SEQ ID NO: 752894 - DNA, 25 bp, Homo sapien
cttgctctctagaacaatgaggctc

SEQ ID NO: 752895 - DNA, 25 bp, Homo sapien
tgacaagggtagaagtctaggctcc

SEQ ID NO: 752896 - DNA, 25 bp, Homo sapien
catgtggcaccgacatcacagaagg

SEQ ID NO: 752897 - DNA, 25 bp, Homo sapien
ggaggaaaccactcatcactaggta

SEQ ID NO: 752898 - DNA, 25 bp, Homo sapien
gcctccctatgtggtctcagcctgg

SEQ ID NO: 752899 - DNA, 25 bp, Homo sapien
ctgcatcatggacggcagaacttct

SEQ ID NO: 752900 - DNA, 25 bp, Homo sapien
tctgcatcatggacggcagaacttc

SEQ ID NO: 752901 - DNA, 25 bp, Homo sapien
tccaccttctgcatcatggacggca

SEQ ID NO: 752902 - DNA, 25 bp, Homo sapien
ccttctgcatcatggacggcagaac

SEQ ID NO: 752903 - DNA, 25 bp, Homo sapien
gccgaatgaaagagataggacatct

SEQ ID NO: 752904 - DNA, 25 bp, Homo sapien
ctaaaatgtagagttggccgaatga

SEQ ID NO: 752905 - DNA, 25 bp, Homo sapien
gatgcaggctgtgcaatgataaaag

SEQ ID NO: 752906 - DNA, 25 bp, Homo sapien
taactgttgcctgttgggatgcagg

SEQ ID NO: 752907 - DNA, 25 bp, Homo sapien
taagaggatcaatcacaggatagca

SEQ ID NO: 752908 - DNA, 25 bp, Homo sapien
catgagagaatactggtgtgaataa

SEQ ID NO: 752909 - DNA, 25 bp, Homo sapien
tcaatcacaggatagcaaatgagat

SEQ ID NO: 752910 - DNA, 25 bp, Homo sapien
actggtgtgaataagaggatcaatc

SEQ ID NO: 752911 - DNA, 25 bp, Homo sapien
ctttcattttcaaacatatcttttc

SEQ ID NO: 752912 - DNA, 25 bp, Homo sapien
ccttgctgatccttgaagatgaagg

SEQ ID NO: 752913 - DNA, 25 bp, Homo sapien
gagttggagcaaacagacgtggtct

SEQ ID NO: 752914 - DNA, 25 bp, Homo sapien
tttataagaaatgggcctttagcca

SEQ ID NO: 752915 - DNA, 25 bp, Homo sapien
ctcaattaagtgaaactgtccagcc

SEQ ID NO: 752916 - DNA, 25 bp, Homo sapien
ccagtttggctgctacaagaatttg

SEQ ID NO: 752917 - DNA, 25 bp, Homo sapien
tcaattctttctaaaccccaatagc

SEQ ID NO: 752918 - DNA, 25 bp, Homo sapien
tctaaaccccaatagctatgatagc

SEQ ID NO: 752919 - DNA, 25 bp, Homo sapien
aatatggcttctgggtatgatccag

SEQ ID NO: 752920 - DNA, 25 bp, Homo sapien
gatagctcatgatcagtaagaaata

SEQ ID NO: 752921 - DNA, 25 bp, Homo sapien
aagcatttggaatagcacctgaaag

SEQ ID NO: 752922 - DNA, 25 bp, Homo sapien
gggaggctttgctaggtcaattaac

SEQ ID NO: 752923 - DNA, 25 bp, Homo sapien
gatggcactaccttatatggttacc

SEQ ID NO: 752924 - DNA, 25 bp, Homo sapien
aattctaggtctcatctcatctgca

SEQ ID NO: 752925 - DNA, 25 bp, Homo sapien
tcaacaatgccccataagcactcat

SEQ ID NO: 752926 - DNA, 25 bp, Homo sapien
tggcaattgtaatacccctcaacaa

SEQ ID NO: 752927 - DNA, 25 bp, Homo sapien
taaaatggtgaaagtctaaggcatc

SEQ ID NO: 752928 - DNA, 25 bp, Homo sapien
tcttaaggcaattcagtatctgggc

SEQ ID NO: 752929 - DNA, 25 bp, Homo sapien
atgccagccacttgcaggctgccat

SEQ ID NO: 752930 - DNA, 25 bp, Homo sapien
catgccagccacttgcaggctgcca

SEQ ID NO: 752931 - DNA, 25 bp, Homo sapien
tgctgtaggagcgaagctgacgccc

SEQ ID NO: 752932 - DNA, 25 bp, Homo sapien
gctgagataggagtgccctgccaca

SEQ ID NO: 752933 - DNA, 25 bp, Homo sapien
gagcgaagctgacgcccacagggcc

SEQ ID NO: 752934 - DNA, 25 bp, Homo sapien
ggaatggcggatgagctcagctctc

SEQ ID NO: 752935 - DNA, 25 bp, Homo sapien
tcaattcagagcttcacctgtgctg

SEQ ID NO: 752936 - DNA, 25 bp, Homo sapien
cctgtgctgagatctccaggaaaaa

SEQ ID NO: 752937 - DNA, 25 bp, Homo sapien
tgttcaaaagaaccatggtcaatcg

SEQ ID NO: 752938 - DNA, 25 bp, Homo sapien
accatggtcaatcggaccctggcaa

SEQ ID NO: 752939 - DNA, 25 bp, Homo sapien
atctcgcccaacagattctcatctt

SEQ ID NO: 752940 - DNA, 25 bp, Homo sapien
ggaaccacttctcaacctcattctg

SEQ ID NO: 752941 - DNA, 25 bp, Homo sapien
ctcttcctaagttggtggcttgcag

SEQ ID NO: 752942 - DNA, 25 bp, Homo sapien
tggtggcttgcagaagtcccacagg

SEQ ID NO: 752943 - DNA, 25 bp, Homo sapien
cattatcggttgaggaattcgtgca

SEQ ID NO: 752944 - DNA, 25 bp, Homo sapien
catctgctgcattatcggttgagga

SEQ ID NO: 752945 - DNA, 25 bp, Homo sapien
taagcagtcatctgctgcattatcg

SEQ ID NO: 752946 - DNA, 25 bp, Homo sapien
gaggaattcgtgcattttgtatatt

SEQ ID NO: 752947 - DNA, 25 bp, Homo sapien
tccgcaaaccggtaccatggtccat

SEQ ID NO: 752948 - DNA, 25 bp, Homo sapien
caggggtccgcaaaccggtaccatg

SEQ ID NO: 752949 - DNA, 25 bp, Homo sapien
gtccgcaaaccggtaccatggtcca

SEQ ID NO: 752950 - DNA, 25 bp, Homo sapien
cataagactagagttcagaaacagg

SEQ ID NO: 752951 - DNA, 25 bp, Homo sapien
tatccagaaggctcggtgactgctg

SEQ ID NO: 752952 - DNA, 25 bp, Homo sapien
aatggtggccaagaccttaagcata

SEQ ID NO: 752953 - DNA, 25 bp, Homo sapien
cccaggtcagaagcaagcacaggga

SEQ ID NO: 752954 - DNA, 25 bp, Homo sapien
ttccccacagttggatgctccatct

SEQ ID NO: 752955 - DNA, 25 bp, Homo sapien
aaatcttccccacagttggatgctc

SEQ ID NO: 752956 - DNA, 25 bp, Homo sapien
ccataacgaggccattgtgtaatac

SEQ ID NO: 752957 - DNA, 25 bp, Homo sapien
ctccatctccataacgaggccattg

SEQ ID NO: 752958 - DNA, 25 bp, Homo sapien
aagaaaggtgctagagaaaatacca

SEQ ID NO: 752959 - DNA, 25 bp, Homo sapien
agaaaggtgctagagaaaataccaa

SEQ ID NO: 752960 - DNA, 25 bp, Homo sapien
taaagaaaggtgctagagaaaatac

SEQ ID NO: 752961 - DNA, 25 bp, Homo sapien
agtaggtggaaaaccactcacagat

SEQ ID NO: 752962 - DNA, 25 bp, Homo sapien
tccagagacagtttagtatcttggg

SEQ ID NO: 752963 - DNA, 25 bp, Homo sapien
gctccacatctttaattgacctgaa

SEQ ID NO: 752964 - DNA, 25 bp, Homo sapien
aggtatgtccatctaaaactaggcc

SEQ ID NO: 752965 - DNA, 25 bp, Homo sapien
gctctaaaaggcataaggtatgtcc

SEQ ID NO: 752966 - DNA, 25 bp, Homo sapien
tttaggctcaaaggatgcatgtgcc

SEQ ID NO: 752967 - DNA, 25 bp, Homo sapien
cactgccctcaaacttttctagaca

SEQ ID NO: 752968 - DNA, 25 bp, Homo sapien
cttatatttaggctcaaaggatgca

SEQ ID NO: 752969 - DNA, 25 bp, Homo sapien
tgtgccaatccaaatacacactgcc

SEQ ID NO: 752970 - DNA, 25 bp, Homo sapien
tcttatgccttctcctatgggcctc

SEQ ID NO: 752971 - DNA, 25 bp, Homo sapien
ctgactcttatgccttctcctatgg

SEQ ID NO: 752972 - DNA, 25 bp, Homo sapien
actcttatgccttctcctatgggcc

SEQ ID NO: 752973 - DNA, 25 bp, Homo sapien
tgactcttatgccttctcctatggg

SEQ ID NO: 752974 - DNA, 25 bp, Homo sapien
cacagataattgcttaatatggctc

SEQ ID NO: 752975 - DNA, 25 bp, Homo sapien
gacgtgattgccagtttaagccaag

SEQ ID NO: 752976 - DNA, 25 bp, Homo sapien
tgtcaacacacatgtctgaaatcac

SEQ ID NO: 752977 - DNA, 25 bp, Homo sapien
gcaaattagttaatagtggccatct

SEQ ID NO: 752978 - DNA, 25 bp, Homo sapien
cttagatcccaagattgctagctgg

SEQ ID NO: 752979 - DNA, 25 bp, Homo sapien
gggatattggccctgaagccctaac

SEQ ID NO: 752980 - DNA, 25 bp, Homo sapien
ttctctgagatcttggccccgtatg

SEQ ID NO: 752981 - DNA, 25 bp, Homo sapien
caaaactggtgcgagctttaagtca

SEQ ID NO: 752982 - DNA, 25 bp, Homo sapien
catcaaagacgcaaattccaatttt

SEQ ID NO: 752983 - DNA, 25 bp, Homo sapien
acaacagttagaacgctgacttctc

SEQ ID NO: 752984 - DNA, 25 bp, Homo sapien
caacagttagaacgctgacttctca

SEQ ID NO: 752985 - DNA, 25 bp, Homo sapien
taacaacagttagaacgctgacttc

SEQ ID NO: 752986 - DNA, 25 bp, Homo sapien
gtaacaacagttagaacgctgactt

SEQ ID NO: 752987 - DNA, 25 bp, Homo sapien
caggttatccttgaaattaagcagc

SEQ ID NO: 752988 - DNA, 25 bp, Homo sapien
tcattttccagaaggctattcccat

SEQ ID NO: 752989 - DNA, 25 bp, Homo sapien
tattcagactgtccaggcttccgct

SEQ ID NO: 752990 - DNA, 25 bp, Homo sapien
gccttggctgaatacagttcttgca

SEQ ID NO: 752991 - DNA, 25 bp, Homo sapien
accaactgggctttgtgaaactgca

SEQ ID NO: 752992 - DNA, 25 bp, Homo sapien
catggctggaagtggaccagttggg

SEQ ID NO: 752993 - DNA, 25 bp, Homo sapien
tattaggtttggacaatggaaggac

SEQ ID NO: 752994 - DNA, 25 bp, Homo sapien
tcttggggaatggaggcaatgtccc

SEQ ID NO: 752995 - DNA, 25 bp, Homo sapien
atttagagcacccactcatttagtt

SEQ ID NO: 752996 - DNA, 25 bp, Homo sapien
ctgtatcagcagcctgacatgcccc

SEQ ID NO: 752997 - DNA, 25 bp, Homo sapien
atcagcagcctgacatgccccatcc

SEQ ID NO: 752998 - DNA, 25 bp, Homo sapien
tttagagcacccactcatttagttc

SEQ ID NO: 752999 - DNA, 25 bp, Homo sapien
gtttctagctgccaactcccatagt

SEQ ID NO: 753000 - DNA, 25 bp, Homo sapien
tcctaacttgtgtttctagctgcca

SEQ ID NO: 753001 - DNA, 25 bp, Homo sapien
cctttcctaacttgtgtttctagct

SEQ ID NO: 753002 - DNA, 25 bp, Homo sapien
tctagctgccaactcccatagtatt

SEQ ID NO: 753003 - DNA, 25 bp, Homo sapien
tcagagccttcaccgaacaggcaat

SEQ ID NO: 753004 - DNA, 25 bp, Homo sapien
gggcacattccacataagaatccag

SEQ ID NO: 753005 - DNA, 25 bp, Homo sapien
tgtttggatttaagctctaaagaaa

SEQ ID NO: 753006 - DNA, 25 bp, Homo sapien
gctctaaagaaatgcaggtagacag

SEQ ID NO: 753007 - DNA, 25 bp, Homo sapien
cagtccttatggattgctggctagc

SEQ ID NO: 753008 - DNA, 25 bp, Homo sapien
cagagcagggttctttcataggcag

SEQ ID NO: 753009 - DNA, 25 bp, Homo sapien
tatgcttattagcagtgagggcaag

SEQ ID NO: 753010 - DNA, 25 bp, Homo sapien
ggtttcggctggtgtctttgctgca

SEQ ID NO: 753011 - DNA, 25 bp, Homo sapien
acagcaggtgtaagcaatgaggaga

SEQ ID NO: 753012 - DNA, 25 bp, Homo sapien
cagcaggtgtaagcaatgaggagaa

SEQ ID NO: 753013 - DNA, 25 bp, Homo sapien
ggcccatgaaggctattgctcctct

SEQ ID NO: 753014 - DNA, 25 bp, Homo sapien
ctgttttcttatatccaacttctgg

SEQ ID NO: 753015 - DNA, 25 bp, Homo sapien
cttcttgtacaaaactctttgaact

SEQ ID NO: 753016 - DNA, 25 bp, Homo sapien
taatgagtttggtatttaccacagt

SEQ ID NO: 753017 - DNA, 25 bp, Homo sapien
ttaccacagtccgtcaccaaatgca

SEQ ID NO: 753018 - DNA, 25 bp, Homo sapien
tttggtatttaccacagtccgtcac

SEQ ID NO: 753019 - DNA, 25 bp, Homo sapien
tcacataatgagactttctgaggag

SEQ ID NO: 753020 - DNA, 25 bp, Homo sapien
gagtcttcctcaacctacgcatcat

SEQ ID NO: 753021 - DNA, 25 bp, Homo sapien
gacgttttgtctccgctgatgtaaa

SEQ ID NO: 753022 - DNA, 25 bp, Homo sapien
tgattttgtggtggtcaccctgcag

SEQ ID NO: 753023 - DNA, 25 bp, Homo sapien
catccaatgcaccaaatggagccat

SEQ ID NO: 753024 - DNA, 25 bp, Homo sapien
ggagccatacacttagaacacatta

SEQ ID NO: 753025 - DNA, 25 bp, Homo sapien
gtagtgtagtaagaagccaaacttc

SEQ ID NO: 753026 - DNA, 25 bp, Homo sapien
tttggctcattgctaagatacatgc

SEQ ID NO: 753027 - DNA, 25 bp, Homo sapien
tcacacttgctaggatgaagacata

SEQ ID NO: 753028 - DNA, 25 bp, Homo sapien
cacacttgctaggatgaagacatag

SEQ ID NO: 753029 - DNA, 25 bp, Homo sapien
gatggccctgtcatcgtatctcagg

SEQ ID NO: 753030 - DNA, 25 bp, Homo sapien
aggacctccttcaggatgtgcgttg

SEQ ID NO: 753031 - DNA, 25 bp, Homo sapien
atgtgcgttgtgtgctgcccgagca

SEQ ID NO: 753032 - DNA, 25 bp, Homo sapien
ctctgacatcttgaacttactgtat

SEQ ID NO: 753033 - DNA, 25 bp, Homo sapien
gaaatctggagttactctaaatctt

SEQ ID NO: 753034 - DNA, 25 bp, Homo sapien
ggcactagattcattaataccagag

SEQ ID NO: 753035 - DNA, 25 bp, Homo sapien
aaagtgttgcctttgccagtgtatt

SEQ ID NO: 753036 - DNA, 25 bp, Homo sapien
gagccattctggagatgccatgtaa

SEQ ID NO: 753037 - DNA, 25 bp, Homo sapien
tgaatcctacgtatgaatgaaacat

SEQ ID NO: 753038 - DNA, 25 bp, Homo sapien
actctcagactctttaggtccatta

SEQ ID NO: 753039 - DNA, 25 bp, Homo sapien
ggtccattatctggagtatgaatcc

SEQ ID NO: 753040 - DNA, 25 bp, Homo sapien
ggagtatgaatcctacgtatgaatg

SEQ ID NO: 753041 - DNA, 25 bp, Homo sapien
cagcctgacgctggagcagaacagt

SEQ ID NO: 753042 - DNA, 25 bp, Homo sapien
aagcaaagtccaagacccagcctga

SEQ ID NO: 753043 - DNA, 25 bp, Homo sapien
gaacagtccccgatcacactgtcat

SEQ ID NO: 753044 - DNA, 25 bp, Homo sapien
gacccaagctgttcggctccagcgt

SEQ ID NO: 753045 - DNA, 25 bp, Homo sapien
tcttctgaagctgagtctcctgttt

SEQ ID NO: 753046 - DNA, 25 bp, Homo sapien
tctcctgttttatggtgagtactcg

SEQ ID NO: 753047 - DNA, 25 bp, Homo sapien
agtatcccagttgcgtcttctgaag

SEQ ID NO: 753048 - DNA, 25 bp, Homo sapien
ttatggtgagtactcgtgcaaagtt

SEQ ID NO: 753049 - DNA, 25 bp, Homo sapien
ttatatcaggatatggggccacccc

SEQ ID NO: 753050 - DNA, 25 bp, Homo sapien
atatcaggatatggggccaccccca

SEQ ID NO: 753051 - DNA, 25 bp, Homo sapien
tttatatcaggatatggggccaccc

SEQ ID NO: 753052 - DNA, 25 bp, Homo sapien
cttttatatcaggatatggggccac

SEQ ID NO: 753053 - DNA, 25 bp, Homo sapien
gcttgtcaagctcctccttcggctt

SEQ ID NO: 753054 - DNA, 25 bp, Homo sapien
tagcttgtcaagctcctccttcggc

SEQ ID NO: 753055 - DNA, 25 bp, Homo sapien
cctttagcttgtcaagctcctcctt

SEQ ID NO: 753056 - DNA, 25 bp, Homo sapien
ttgtcaagctcctccttcggctttc

SEQ ID NO: 753057 - DNA, 25 bp, Homo sapien
aatgttgatacaaatctggacaggg

SEQ ID NO: 753058 - DNA, 25 bp, Homo sapien
acatatttgagtctggaagcctgaa

SEQ ID NO: 753059 - DNA, 25 bp, Homo sapien
gtttttcaatcatgagcaaagcatt

SEQ ID NO: 753060 - DNA, 25 bp, Homo sapien
tggacagggagacagtctgctgaag

SEQ ID NO: 753061 - DNA, 25 bp, Homo sapien
tccagggatccaaaaccatttgttc

SEQ ID NO: 753062 - DNA, 25 bp, Homo sapien
tctctccagggatccaaaaccattt

SEQ ID NO: 753063 - DNA, 25 bp, Homo sapien
tcataaagggacatcccatctctcc

SEQ ID NO: 753064 - DNA, 25 bp, Homo sapien
cagtcataaagggacatcccatctc

SEQ ID NO: 753065 - DNA, 25 bp, Homo sapien
cattgggattgcgttaaatctatag

SEQ ID NO: 753066 - DNA, 25 bp, Homo sapien
tagtttcacagttccagcacttaca

SEQ ID NO: 753067 - DNA, 25 bp, Homo sapien
tcttgaaatcaggttatgtgatacc

SEQ ID NO: 753068 - DNA, 25 bp, Homo sapien
tatttgaggacttttgcggtttcat

SEQ ID NO: 753069 - DNA, 25 bp, Homo sapien
tgtgtgtgtgtccagctttattgag

SEQ ID NO: 753070 - DNA, 25 bp, Homo sapien
tgtgtgtgtgtgtccagctttattg

SEQ ID NO: 753071 - DNA, 25 bp, Homo sapien
gtgtgtgtgtgtccagctttattga

SEQ ID NO: 753072 - DNA, 25 bp, Homo sapien
tgtgtgtgtgtgtgtccagctttat

SEQ ID NO: 753073 - DNA, 25 bp, Homo sapien
cagatcctgcgaaactccaggcctg

SEQ ID NO: 753074 - DNA, 25 bp, Homo sapien
agatcctgcgaaactccaggcctgg

SEQ ID NO: 753075 - DNA, 25 bp, Homo sapien
gccagatcctgcgaaactccaggcc

SEQ ID NO: 753076 - DNA, 25 bp, Homo sapien
cagccagatcctgcgaaactccagg

SEQ ID NO: 753077 - DNA, 25 bp, Homo sapien
cacggcgtttgctctgggcattgaa

SEQ ID NO: 753078 - DNA, 25 bp, Homo sapien
ctggaaagcacagccggtcatcggc

SEQ ID NO: 753079 - DNA, 25 bp, Homo sapien
aatgcttcgctgagaaggcctcgca

SEQ ID NO: 753080 - DNA, 25 bp, Homo sapien
gatgatttgaaatacgcagagaagc

SEQ ID NO: 753081 - DNA, 25 bp, Homo sapien
ggcagacacggttccactgtttggt

SEQ ID NO: 753082 - DNA, 25 bp, Homo sapien
tcggcagacacggttccactgtttg

SEQ ID NO: 753083 - DNA, 25 bp, Homo sapien
tttggtttcacgttatgggcaaatg

SEQ ID NO: 753084 - DNA, 25 bp, Homo sapien
gactcggcagacacggttccactgt

SEQ ID NO: 753085 - DNA, 25 bp, Homo sapien
tcctatcaaggagtaatttgctctc

SEQ ID NO: 753086 - DNA, 25 bp, Homo sapien
tgaacacccaacaatgaagggaacc

SEQ ID NO: 753087 - DNA, 25 bp, Homo sapien
tagactcatgaaggaaactgcagat

SEQ ID NO: 753088 - DNA, 25 bp, Homo sapien
gcttcctgtgcggtgagatgtgaac

SEQ ID NO: 753089 - DNA, 25 bp, Homo sapien
aatttctggccccactggaatctca

SEQ ID NO: 753090 - DNA, 25 bp, Homo sapien
tttagaatttctggccccactggaa

SEQ ID NO: 753091 - DNA, 25 bp, Homo sapien
gcggactttagaatttctggcccca

SEQ ID NO: 753092 - DNA, 25 bp, Homo sapien
cgggtagcggactttagaatttctg

SEQ ID NO: 753093 - DNA, 25 bp, Homo sapien
catcttgttagagccatagcagttc

SEQ ID NO: 753094 - DNA, 25 bp, Homo sapien
tagcagttcctctctgaacctggtg

SEQ ID NO: 753095 - DNA, 25 bp, Homo sapien
ggctgcaacaatgtgtctcccagtg

SEQ ID NO: 753096 - DNA, 25 bp, Homo sapien
cttgtcttccatagcctgcccagtg

SEQ ID NO: 753097 - DNA, 25 bp, Homo sapien
cataggtccttataaggctgaccac

SEQ ID NO: 753098 - DNA, 25 bp, Homo sapien
tgagggaaatcagcatagaagcatc

SEQ ID NO: 753099 - DNA, 25 bp, Homo sapien
tctttggaatgaccatgccctttcc

SEQ ID NO: 753100 - DNA, 25 bp, Homo sapien
tttcctaacagcaagttctatgccc

SEQ ID NO: 753101 - DNA, 25 bp, Homo sapien
ctaaaagaaacccggatgtgagagg

SEQ ID NO: 753102 - DNA, 25 bp, Homo sapien
aagaaacccggatgtgagaggaggt

SEQ ID NO: 753103 - DNA, 25 bp, Homo sapien
aaaagaaacccggatgtgagaggag

SEQ ID NO: 753104 - DNA, 25 bp, Homo sapien
taaaagaaacccggatgtgagagga

SEQ ID NO: 753105 - DNA, 25 bp, Homo sapien
cagactgtgacctttcattggcccc

SEQ ID NO: 753106 - DNA, 25 bp, Homo sapien
tcagactgtgacctttcattggccc

SEQ ID NO: 753107 - DNA, 25 bp, Homo sapien
agactgtgacctttcattggcccca

SEQ ID NO: 753108 - DNA, 25 bp, Homo sapien
gcgtgtcaaccagtgttcttataga

SEQ ID NO: 753109 - DNA, 25 bp, Homo sapien
ccagagggaattccactgaaacagc

SEQ ID NO: 753110 - DNA, 25 bp, Homo sapien
gaactgtcataatctagagcttgga

SEQ ID NO: 753111 - DNA, 25 bp, Homo sapien
gctgcttcctcctcatgcgtgtcaa

SEQ ID NO: 753112 - DNA, 25 bp, Homo sapien
gccacagctgttccttagggctgcc

SEQ ID NO: 753113 - DNA, 25 bp, Homo sapien
ttgcagcggtccataggcagagact

SEQ ID NO: 753114 - DNA, 25 bp, Homo sapien
gatgatctggtcagccatccttgac

SEQ ID NO: 753115 - DNA, 25 bp, Homo sapien
cctcttgagctggaccaaagatgat

SEQ ID NO: 753116 - DNA, 25 bp, Homo sapien
gagttttcaggtcatcgcactgcat

SEQ ID NO: 753117 - DNA, 25 bp, Homo sapien
tttcagaaagtaaggcttccaaatg

SEQ ID NO: 753118 - DNA, 25 bp, Homo sapien
gtaaggcttccaaatgaaactccat

SEQ ID NO: 753119 - DNA, 25 bp, Homo sapien
catttttcagaaagtaaggcttcca

SEQ ID NO: 753120 - DNA, 25 bp, Homo sapien
cagaaagtaaggcttccaaatgaaa

SEQ ID NO: 753121 - DNA, 25 bp, Homo sapien
actccatgagcatgatggagtgaag

SEQ ID NO: 753122 - DNA, 25 bp, Homo sapien
ccatgagcatgatggagtgaagctg

SEQ ID NO: 753123 - DNA, 25 bp, Homo sapien
gtgaagctggctcctatactcatga

SEQ ID NO: 753124 - DNA, 25 bp, Homo sapien
gctcctatactcatgagcttgcatt

SEQ ID NO: 753125 - DNA, 25 bp, Homo sapien
tactttgcccctctactgactacag

SEQ ID NO: 753126 - DNA, 25 bp, Homo sapien
cagtgcccaagtgcttctcagacca

SEQ ID NO: 753127 - DNA, 25 bp, Homo sapien
tctactgactacaggaatagactga

SEQ ID NO: 753128 - DNA, 25 bp, Homo sapien
ggacaaaggccagatcagtgcccca

SEQ ID NO: 753129 - DNA, 25 bp, Homo sapien
gattcagattcagtaaggacacagg

SEQ ID NO: 753130 - DNA, 25 bp, Homo sapien
tccatacttcaaaggcgagagtgtc

SEQ ID NO: 753131 - DNA, 25 bp, Homo sapien
cacctaatgtgtgttaagtgcctgg

SEQ ID NO: 753132 - DNA, 25 bp, Homo sapien
cacaggtgagtttcagtgttacagg

SEQ ID NO: 753133 - DNA, 25 bp, Homo sapien
ctcagcaggcttgctaaaatagcct

SEQ ID NO: 753134 - DNA, 25 bp, Homo sapien
gctcagcaggcttgctaaaatagcc

SEQ ID NO: 753135 - DNA, 25 bp, Homo sapien
ctcaagtattccctggtcatcaccc

SEQ ID NO: 753136 - DNA, 25 bp, Homo sapien
cttctcaagtattccctggtcatca

SEQ ID NO: 753137 - DNA, 25 bp, Homo sapien
aagccacgtggtgctgcagccagag

SEQ ID NO: 753138 - DNA, 25 bp, Homo sapien
gacaagccttgggaacgaaggaagc

SEQ ID NO: 753139 - DNA, 25 bp, Homo sapien
caagccttgggaacgaaggaagcca

SEQ ID NO: 753140 - DNA, 25 bp, Homo sapien
aacgaaggaagccacgtggtgctgc

SEQ ID NO: 753141 - DNA, 25 bp, Homo sapien
gacttagccgagcacaattttccat

SEQ ID NO: 753142 - DNA, 25 bp, Homo sapien
ttctttggcacaagcagcaattcga

SEQ ID NO: 753143 - DNA, 25 bp, Homo sapien
tgaagccgcagccacattacgttct

SEQ ID NO: 753144 - DNA, 25 bp, Homo sapien
gaagtttctgcctgactgaatccat

SEQ ID NO: 753145 - DNA, 25 bp, Homo sapien
gaagatatggaaggcaaaggaacag

SEQ ID NO: 753146 - DNA, 25 bp, Homo sapien
agatatggaaggcaaaggaacagcc

SEQ ID NO: 753147 - DNA, 25 bp, Homo sapien
atatggaaggcaaaggaacagccat

SEQ ID NO: 753148 - DNA, 25 bp, Homo sapien
ctgagaagatatggaaggcaaagga

SEQ ID NO: 753149 - DNA, 25 bp, Homo sapien
cagaggaaacacacgtcagccaagt

SEQ ID NO: 753150 - DNA, 25 bp, Homo sapien
cgatcaatgaacaggagctcaatag

SEQ ID NO: 753151 - DNA, 25 bp, Homo sapien
accattgggcggcttcacagaggaa

SEQ ID NO: 753152 - DNA, 25 bp, Homo sapien
taatatctggacaaaccattgggcg

SEQ ID NO: 753153 - DNA, 25 bp, Homo sapien
gcagttcttccacgtttaggagttg

SEQ ID NO: 753154 - DNA, 25 bp, Homo sapien
taagctagtgttgtgatatccgtca

SEQ ID NO: 753155 - DNA, 25 bp, Homo sapien
gttgggaactcatagactgggagta

SEQ ID NO: 753156 - DNA, 25 bp, Homo sapien
tcaagttaagctcatattcctccag

SEQ ID NO: 753157 - DNA, 25 bp, Homo sapien
ttgtaagtgttccttaacaggagac

SEQ ID NO: 753158 - DNA, 25 bp, Homo sapien
cttgtaagtgttccttaacaggaga

SEQ ID NO: 753159 - DNA, 25 bp, Homo sapien
caggtgagaccagctcacgggatcc

SEQ ID NO: 753160 - DNA, 25 bp, Homo sapien
gtgagaccagctcacgggatcccat

SEQ ID NO: 753161 - DNA, 25 bp, Homo sapien
acaggtgagaccagctcacgggatc

SEQ ID NO: 753162 - DNA, 25 bp, Homo sapien
ggtgagaccagctcacgggatccca

SEQ ID NO: 753163 - DNA, 25 bp, Homo sapien
gaggcaacaacctgcactttgtcat

SEQ ID NO: 753164 - DNA, 25 bp, Homo sapien
gcaacaacctgcactttgtcatttg

SEQ ID NO: 753165 - DNA, 25 bp, Homo sapien
ggcaacaacctgcactttgtcattt

SEQ ID NO: 753166 - DNA, 25 bp, Homo sapien
ggaggcaacaacctgcactttgtca

SEQ ID NO: 753167 - DNA, 25 bp, Homo sapien
tgctgaccttcaaccaagggtgaat

SEQ ID NO: 753168 - DNA, 25 bp, Homo sapien
tgaggttccagtgagaatgctgacc

SEQ ID NO: 753169 - DNA, 25 bp, Homo sapien
tcagaaaagccattgccataggtgc

SEQ ID NO: 753170 - DNA, 25 bp, Homo sapien
gaataatgccagtgagttgtctcag

SEQ ID NO: 753171 - DNA, 25 bp, Homo sapien
tgtactcccgctccgatggctccat

SEQ ID NO: 753172 - DNA, 25 bp, Homo sapien
tgatggccgaggcttgcgcattttg

SEQ ID NO: 753173 - DNA, 25 bp, Homo sapien
tgtatgtgttcggaactcctttgaa

SEQ ID NO: 753174 - DNA, 25 bp, Homo sapien
aggcttgcgcattttggtatctctc

SEQ ID NO: 753175 - DNA, 25 bp, Homo sapien
gaggatgaagaacatcattgaggag

SEQ ID NO: 753176 - DNA, 25 bp, Homo sapien
aagaacatcattgaggagggaggtg

SEQ ID NO: 753177 - DNA, 25 bp, Homo sapien
aggatgaagaacatcattgaggagg

SEQ ID NO: 753178 - DNA, 25 bp, Homo sapien
ggcaattaggtcataagcatcaaga

SEQ ID NO: 753179 - DNA, 25 bp, Homo sapien
gatgtctcttgaggatacaatcgga

SEQ ID NO: 753180 - DNA, 25 bp, Homo sapien
tcagagcagacttacgtaaaatggc

SEQ ID NO: 753181 - DNA, 25 bp, Homo sapien
taagggcaagattgttcagagcaga

SEQ ID NO: 753182 - DNA, 25 bp, Homo sapien
cagcctgaaggcattaaactgcttc

SEQ ID NO: 753183 - DNA, 25 bp, Homo sapien
ccacagcctgaaggcattaaactgc

SEQ ID NO: 753184 - DNA, 25 bp, Homo sapien
cccacagcctgaaggcattaaactg

SEQ ID NO: 753185 - DNA, 25 bp, Homo sapien
ccacccacagcctgaaggcattaaa

SEQ ID NO: 753186 - DNA, 25 bp, Homo sapien
gtgattcagacttaaggctactgtg

SEQ ID NO: 753187 - DNA, 25 bp, Homo sapien
tgcttgtctatctggccacagtgat

SEQ ID NO: 753188 - DNA, 25 bp, Homo sapien
tcagacttaaggctactgtgtttga

SEQ ID NO: 753189 - DNA, 25 bp, Homo sapien
cttaaggctactgtgtttgattgga

SEQ ID NO: 753190 - DNA, 25 bp, Homo sapien
cagtaccttgccagcatgcttgaca

SEQ ID NO: 753191 - DNA, 25 bp, Homo sapien
tgagtcctctagtgaagaacacagt

SEQ ID NO: 753192 - DNA, 25 bp, Homo sapien
gcagcaagctaaccagtgcctggag

SEQ ID NO: 753193 - DNA, 25 bp, Homo sapien
cacagttaactcctttggaggcagc

SEQ ID NO: 753194 - DNA, 25 bp, Homo sapien
ccagatgccagcaagttactgtctc

SEQ ID NO: 753195 - DNA, 25 bp, Homo sapien
catttctaaagcaaccaatcatgac

SEQ ID NO: 753196 - DNA, 25 bp, Homo sapien
tactaggaggtcaaccattttgttc

SEQ ID NO: 753197 - DNA, 25 bp, Homo sapien
gatagtccctggcactactaggagg

SEQ ID NO: 753198 - DNA, 25 bp, Homo sapien
gtgagaaatattcgcatccattttc

SEQ ID NO: 753199 - DNA, 25 bp, Homo sapien
gagaaatattcgcatccattttcat

SEQ ID NO: 753200 - DNA, 25 bp, Homo sapien
tgggtgagaaatattcgcatccatt

SEQ ID NO: 753201 - DNA, 25 bp, Homo sapien
gggtgagaaatattcgcatccattt

SEQ ID NO: 753202 - DNA, 25 bp, Homo sapien
ctcttctctggtagtaggatactcc

SEQ ID NO: 753203 - DNA, 25 bp, Homo sapien
agagtaggaatgacattcttagccc

SEQ ID NO: 753204 - DNA, 25 bp, Homo sapien
gaatgacattcttagcccaagttct

SEQ ID NO: 753205 - DNA, 25 bp, Homo sapien
ctcctactgctggtaagagtaggaa

SEQ ID NO: 753206 - DNA, 25 bp, Homo sapien
cagggatcaacatgttctcgtcacg

SEQ ID NO: 753207 - DNA, 25 bp, Homo sapien
tgttctcgtcacgattcagacagac

SEQ ID NO: 753208 - DNA, 25 bp, Homo sapien
ctaggcacaggtccaacagggatca

SEQ ID NO: 753209 - DNA, 25 bp, Homo sapien
gattcagacagacgcctgacaccag

SEQ ID NO: 753210 - DNA, 25 bp, Homo sapien
ctggcggggaagtttctgctgggtg

SEQ ID NO: 753211 - DNA, 25 bp, Homo sapien
gaggctggcggggaagtttctgctg

SEQ ID NO: 753212 - DNA, 25 bp, Homo sapien
ctctgctctgtaggttggaacggga

SEQ ID NO: 753213 - DNA, 25 bp, Homo sapien
aacgggagctgagagagctgtactt

SEQ ID NO: 753214 - DNA, 25 bp, Homo sapien
tcagagctcaggattctccggtgag

SEQ ID NO: 753215 - DNA, 25 bp, Homo sapien
gattctccggtgagtcagagcagcc

SEQ ID NO: 753216 - DNA, 25 bp, Homo sapien
gagctcaggattctccggtgagtca

SEQ ID NO: 753217 - DNA, 25 bp, Homo sapien
caggattctccggtgagtcagagca

SEQ ID NO: 753218 - DNA, 25 bp, Homo sapien
ccttccatatgtggctatcatgttg

SEQ ID NO: 753219 - DNA, 25 bp, Homo sapien
acgccccttccatatgtggctatca

SEQ ID NO: 753220 - DNA, 25 bp, Homo sapien
ttctccacgccccttccatatgtgg

SEQ ID NO: 753221 - DNA, 25 bp, Homo sapien
tccatatgtggctatcatgttgacc

SEQ ID NO: 753222 - DNA, 25 bp, Homo sapien
ctggttaggtaaagagtcatcccca

SEQ ID NO: 753223 - DNA, 25 bp, Homo sapien
gtaaagagtcatccccaaagagatg

SEQ ID NO: 753224 - DNA, 25 bp, Homo sapien
tggttaggtaaagagtcatccccaa

SEQ ID NO: 753225 - DNA, 25 bp, Homo sapien
taggtaaagagtcatccccaaagag

SEQ ID NO: 753226 - DNA, 25 bp, Homo sapien
tatgatgatgattctatagctgcct

SEQ ID NO: 753227 - DNA, 25 bp, Homo sapien
tagatctttgaatacaagtataaac

SEQ ID NO: 753228 - DNA, 25 bp, Homo sapien
atttttgtaggcctgtatctagaat

SEQ ID NO: 753229 - DNA, 25 bp, Homo sapien
ggcctgtatctagaattccatatga

SEQ ID NO: 753230 - DNA, 25 bp, Homo sapien
aaaagcagccaatctggtgttttgg

SEQ ID NO: 753231 - DNA, 25 bp, Homo sapien
tcttaccagccaatttgtatctcag

SEQ ID NO: 753232 - DNA, 25 bp, Homo sapien
tcatatcgtgaaaaacaccaattaa

SEQ ID NO: 753233 - DNA, 25 bp, Homo sapien
tttcacccaatattttcatatcgtg

SEQ ID NO: 753234 - DNA, 25 bp, Homo sapien
gcagttacctccatgttgttctcat

SEQ ID NO: 753235 - DNA, 25 bp, Homo sapien
tttgcttcaccttttgccacaactg

SEQ ID NO: 753236 - DNA, 25 bp, Homo sapien
tagttcccgtaattcctacatgttg

SEQ ID NO: 753237 - DNA, 25 bp, Homo sapien
cacaactgtaagtttcctcgggcct

SEQ ID NO: 753238 - DNA, 25 bp, Homo sapien
cagagaatgatgaaggctggaggga

SEQ ID NO: 753239 - DNA, 25 bp, Homo sapien
gagaatgatgaaggctggagggacc

SEQ ID NO: 753240 - DNA, 25 bp, Homo sapien
gcagccagaagtctcctgattgaaa

SEQ ID NO: 753241 - DNA, 25 bp, Homo sapien
gggaccttcattcatcctccaggct

SEQ ID NO: 753242 - DNA, 25 bp, Homo sapien
gatcacagtcccgatgcggcttctt

SEQ ID NO: 753243 - DNA, 25 bp, Homo sapien
cgcagcaggatcacagtcccgatgc

SEQ ID NO: 753244 - DNA, 25 bp, Homo sapien
caggatcacagtcccgatgcggctt

SEQ ID NO: 753245 - DNA, 25 bp, Homo sapien
agcaggatcacagtcccgatgcggc

SEQ ID NO: 753246 - DNA, 25 bp, Homo sapien
ctctcagtgctgaggaacacagggt

SEQ ID NO: 753247 - DNA, 25 bp, Homo sapien
gctctcagtgctgaggaacacaggg

SEQ ID NO: 753248 - DNA, 25 bp, Homo sapien
ctcagtgctgaggaacacagggtga

SEQ ID NO: 753249 - DNA, 25 bp, Homo sapien
tctcagtgctgaggaacacagggtg

SEQ ID NO: 753250 - DNA, 25 bp, Homo sapien
tgatttcaacaaacgggcggactcg

SEQ ID NO: 753251 - DNA, 25 bp, Homo sapien
tctggtaaattatgcaacaagctgc

SEQ ID NO: 753252 - DNA, 25 bp, Homo sapien
gagttctccagattggctctccaga

SEQ ID NO: 753253 - DNA, 25 bp, Homo sapien
tcagccgagttttgcagacctggat

SEQ ID NO: 753254 - DNA, 25 bp, Homo sapien
cttgttgggaagcattctgcactga

SEQ ID NO: 753255 - DNA, 25 bp, Homo sapien
cagtggttcccaagacttgctgata

SEQ ID NO: 753256 - DNA, 25 bp, Homo sapien
gataatcagatgttcctaagcggcc

SEQ ID NO: 753257 - DNA, 25 bp, Homo sapien
cacaggctgggatgataccagttta

SEQ ID NO: 753258 - DNA, 25 bp, Homo sapien
ctactcctatgggtatttggagcca

SEQ ID NO: 753259 - DNA, 25 bp, Homo sapien
tacatcagataattcacaggttcca

SEQ ID NO: 753260 - DNA, 25 bp, Homo sapien
cagcctcgtcgctagatatgactta

SEQ ID NO: 753261 - DNA, 25 bp, Homo sapien
ggtttgtaaagtcaccagggcatac

SEQ ID NO: 753262 - DNA, 25 bp, Homo sapien
tactgatcctgctctggtccgtggg

SEQ ID NO: 753263 - DNA, 25 bp, Homo sapien
tcttggacgatgtcacgcggctgtc

SEQ ID NO: 753264 - DNA, 25 bp, Homo sapien
acaggaggatctaggcgattgcgca

SEQ ID NO: 753265 - DNA, 25 bp, Homo sapien
gactgtggtgcgaaccatgctgctg

SEQ ID NO: 753266 - DNA, 25 bp, Homo sapien
caggtcggcctgttttctgtctcaa

SEQ ID NO: 753267 - DNA, 25 bp, Homo sapien
tcggcctgttttctgtctcaaagtg

SEQ ID NO: 753268 - DNA, 25 bp, Homo sapien
ataggagaaggaaatggtccactcc

SEQ ID NO: 753269 - DNA, 25 bp, Homo sapien
ctgttttctgtctcaaagtggcata

SEQ ID NO: 753270 - DNA, 25 bp, Homo sapien
gctctgcacagtctggctctccaca

SEQ ID NO: 753271 - DNA, 25 bp, Homo sapien
ttcctctctgctgaagccagccttg

SEQ ID NO: 753272 - DNA, 25 bp, Homo sapien
cttcctctctgctgaagccagcctt

SEQ ID NO: 753273 - DNA, 25 bp, Homo sapien
tatccatttgctcatcttgatagtt

SEQ ID NO: 753274 - DNA, 25 bp, Homo sapien
gtatctgggcacttttatccatttg

SEQ ID NO: 753275 - DNA, 25 bp, Homo sapien
tgggaacatttattcctccgcaggt

SEQ ID NO: 753276 - DNA, 25 bp, Homo sapien
tgatagttacggacgtatttccatt

SEQ ID NO: 753277 - DNA, 25 bp, Homo sapien
gctggaactcttcctaatctgtctt

SEQ ID NO: 753278 - DNA, 25 bp, Homo sapien
agatggaccaaggatcaaagacacc

SEQ ID NO: 753279 - DNA, 25 bp, Homo sapien
agacaccatggctgactgtccatct

SEQ ID NO: 753280 - DNA, 25 bp, Homo sapien
gagatggaccaaggatcaaagacac

SEQ ID NO: 753281 - DNA, 25 bp, Homo sapien
gggccttctgctggtattcttcaag

SEQ ID NO: 753282 - DNA, 25 bp, Homo sapien
acttcagcgggagctgtagtggagt

SEQ ID NO: 753283 - DNA, 25 bp, Homo sapien
ttcagcgggagctgtagtggagtgc

SEQ ID NO: 753284 - DNA, 25 bp, Homo sapien
cttcagcgggagctgtagtggagtg

SEQ ID NO: 753285 - DNA, 25 bp, Homo sapien
agagaaggttcttccctggctccag

SEQ ID NO: 753286 - DNA, 25 bp, Homo sapien
tggagagaaggttcttccctggctc

SEQ ID NO: 753287 - DNA, 25 bp, Homo sapien
atggagctggagagaaggttcttcc

SEQ ID NO: 753288 - DNA, 25 bp, Homo sapien
agctggagagaaggttcttccctgg

SEQ ID NO: 753289 - DNA, 25 bp, Homo sapien
tgatgatacagggacaaccaagaac

SEQ ID NO: 753290 - DNA, 25 bp, Homo sapien
tacagggacaaccaagaactgctgg

SEQ ID NO: 753291 - DNA, 25 bp, Homo sapien
caaccaagaactgctggctttgatt

SEQ ID NO: 753292 - DNA, 25 bp, Homo sapien
tcatcaagttgatgatacagggaca

SEQ ID NO: 753293 - DNA, 25 bp, Homo sapien
tcagaacgaaagctccagaatgcgt

SEQ ID NO: 753294 - DNA, 25 bp, Homo sapien
tccagaatgcgtttggagcagttgg

SEQ ID NO: 753295 - DNA, 25 bp, Homo sapien
acaattacatcaggtgaagttcttt

SEQ ID NO: 753296 - DNA, 25 bp, Homo sapien
gagttgctccgaggtgaaagagaaa

SEQ ID NO: 753297 - DNA, 25 bp, Homo sapien
aagtagacactttctgtcgggaagt

SEQ ID NO: 753298 - DNA, 25 bp, Homo sapien
tcatgtcccgcagaaagttgtaccc

SEQ ID NO: 753299 - DNA, 25 bp, Homo sapien
ggatgtctatccttctctctatcag

SEQ ID NO: 753300 - DNA, 25 bp, Homo sapien
tcactccatgcatgggccttcatgt

SEQ ID NO: 753301 - DNA, 25 bp, Homo sapien
caagaccattgtgtcctcaagaggg

SEQ ID NO: 753302 - DNA, 25 bp, Homo sapien
gatgactctgcgactgtggcagcaa

SEQ ID NO: 753303 - DNA, 25 bp, Homo sapien
tgggagaaagcgtgaatgacttcca

SEQ ID NO: 753304 - DNA, 25 bp, Homo sapien
tggcaatggctataacaaatagtgg

SEQ ID NO: 753305 - DNA, 25 bp, Homo sapien
ctagtccatgaaggactgtggagac

SEQ ID NO: 753306 - DNA, 25 bp, Homo sapien
gtccatgaaggactgtggagacaga

SEQ ID NO: 753307 - DNA, 25 bp, Homo sapien
agaggctttaccagctctagcgcca

SEQ ID NO: 753308 - DNA, 25 bp, Homo sapien
tggagacagaggctttaccagctct

SEQ ID NO: 753309 - DNA, 25 bp, Homo sapien
gctacgcacgaatgccactgctgct

SEQ ID NO: 753310 - DNA, 25 bp, Homo sapien
tgcagctacgcacgaatgccactgc

SEQ ID NO: 753311 - DNA, 25 bp, Homo sapien
tctgcagctacgcacgaatgccact

SEQ ID NO: 753312 - DNA, 25 bp, Homo sapien
cagctacgcacgaatgccactgctg

SEQ ID NO: 753313 - DNA, 25 bp, Homo sapien
ccatctttgagtgtcacccagtaac

SEQ ID NO: 753314 - DNA, 25 bp, Homo sapien
gttgagattcttgatggacacacca

SEQ ID NO: 753315 - DNA, 25 bp, Homo sapien
cccagtaactccaagcatcttgaca

SEQ ID NO: 753316 - DNA, 25 bp, Homo sapien
tactccagtgggtgttatccgtgcc

SEQ ID NO: 753317 - DNA, 25 bp, Homo sapien
cttctctgcttcagcaagccagtga

SEQ ID NO: 753318 - DNA, 25 bp, Homo sapien
ctgatttaaacttatcttctctgct

SEQ ID NO: 753319 - DNA, 25 bp, Homo sapien
atttaaacttatcttctctgcttca

SEQ ID NO: 753320 - DNA, 25 bp, Homo sapien
ttctctgcttcagcaagccagtgag

SEQ ID NO: 753321 - DNA, 25 bp, Homo sapien
agatgctgagggccgtatccttctg

SEQ ID NO: 753322 - DNA, 25 bp, Homo sapien
gagatgctgagggccgtatccttct

SEQ ID NO: 753323 - DNA, 25 bp, Homo sapien
ctgagctccataaggcagcaggttt

SEQ ID NO: 753324 - DNA, 25 bp, Homo sapien
tgagctccataaggcagcaggtttc

SEQ ID NO: 753325 - DNA, 25 bp, Homo sapien
ctcctgctgagctccataaggcagc

SEQ ID NO: 753326 - DNA, 25 bp, Homo sapien
ctcttcacattgtcatagctcccca

SEQ ID NO: 753327 - DNA, 25 bp, Homo sapien
gggtctctcttcacattgtcatagc

SEQ ID NO: 753328 - DNA, 25 bp, Homo sapien
ttcacattgtcatagctccccagtc

SEQ ID NO: 753329 - DNA, 25 bp, Homo sapien
tgggtctctcttcacattgtcatag

SEQ ID NO: 753330 - DNA, 25 bp, Homo sapien
ctgtgagattgcatggctccgggcc

SEQ ID NO: 753331 - DNA, 25 bp, Homo sapien
agaccgtgagttgcgtttgtgaaaa

SEQ ID NO: 753332 - DNA, 25 bp, Homo sapien
caaatagggacgtagcagggagaaa

SEQ ID NO: 753333 - DNA, 25 bp, Homo sapien
tgggcagcacgcacaaatagggacg

SEQ ID NO: 753334 - DNA, 25 bp, Homo sapien
gcatatgtggctgccaatgcagagg

SEQ ID NO: 753335 - DNA, 25 bp, Homo sapien
ctccagagttgcaatgggaatgtca

SEQ ID NO: 753336 - DNA, 25 bp, Homo sapien
ccagattgaaagtcgcgcagagagc

SEQ ID NO: 753337 - DNA, 25 bp, Homo sapien
ttctgaataggcaaaaccctgagct

SEQ ID NO: 753338 - DNA, 25 bp, Homo sapien
tcccttgttcctacttgaattactg

SEQ ID NO: 753339 - DNA, 25 bp, Homo sapien
cttgttcctacttgaattactggct

SEQ ID NO: 753340 - DNA, 25 bp, Homo sapien
ccttgttcctacttgaattactggc

SEQ ID NO: 753341 - DNA, 25 bp, Homo sapien
gtgtcccttgttcctacttgaatta

SEQ ID NO: 753342 - DNA, 25 bp, Homo sapien
tggccttgtccagcaaaatcctgaa

SEQ ID NO: 753343 - DNA, 25 bp, Homo sapien
catgtgcccgtaggtttctgtgaca

SEQ ID NO: 753344 - DNA, 25 bp, Homo sapien
tcggtcacatgcatgctcactttgg

SEQ ID NO: 753345 - DNA, 25 bp, Homo sapien
taatgagtaccttggagaagggacc

SEQ ID NO: 753346 - DNA, 25 bp, Homo sapien
tcccagtaagagatactggagggag

SEQ ID NO: 753347 - DNA, 25 bp, Homo sapien
tctcctctttctatcagcactgctt

SEQ ID NO: 753348 - DNA, 25 bp, Homo sapien
ccactactggccctgtggtgctccc

SEQ ID NO: 753349 - DNA, 25 bp, Homo sapien
tgtctggcccactactggccctgtg

SEQ ID NO: 753350 - DNA, 25 bp, Homo sapien
ctgctgtgagaaatagcatactcaa

SEQ ID NO: 753351 - DNA, 25 bp, Homo sapien
ctgtgtttgaccatgcgtgaatgct

SEQ ID NO: 753352 - DNA, 25 bp, Homo sapien
gagaaatagcatactcaatcgccat

SEQ ID NO: 753353 - DNA, 25 bp, Homo sapien
ttgaccatgcgtgaatgctgctgtg

SEQ ID NO: 753354 - DNA, 25 bp, Homo sapien
tacataataagaccctttttggata

SEQ ID NO: 753355 - DNA, 25 bp, Homo sapien
ataagaccctttttggatagtgtct

SEQ ID NO: 753356 - DNA, 25 bp, Homo sapien
tttttggatagtgtcttttgactac

SEQ ID NO: 753357 - DNA, 25 bp, Homo sapien
cctttttggatagtgtcttttgact

SEQ ID NO: 753358 - DNA, 25 bp, Homo sapien
taacaccatcggacacaatccaggt

SEQ ID NO: 753359 - DNA, 25 bp, Homo sapien
ttgcacccttcttcacctttggagt

SEQ ID NO: 753360 - DNA, 25 bp, Homo sapien
tttataatttatggtggctgatttc

SEQ ID NO: 753361 - DNA, 25 bp, Homo sapien
caatccaggtcttcattgcaccctt

SEQ ID NO: 753362 - DNA, 25 bp, Homo sapien
caagtatagcagaaagaggatgtcc

SEQ ID NO: 753363 - DNA, 25 bp, Homo sapien
gatggcaattgtgaggatgaaaaac

SEQ ID NO: 753364 - DNA, 25 bp, Homo sapien
caggccatgtgactgctgacccaat

SEQ ID NO: 753365 - DNA, 25 bp, Homo sapien
catgtgactgctgacccaatgtgtc

SEQ ID NO: 753366 - DNA, 25 bp, Homo sapien
caagaccctcttttgtacttgtagg

SEQ ID NO: 753367 - DNA, 25 bp, Homo sapien
ctcaagaccctcttttgtacttgta

SEQ ID NO: 753368 - DNA, 25 bp, Homo sapien
tttgtacttgtaggggccgttcagc

SEQ ID NO: 753369 - DNA, 25 bp, Homo sapien
agcctcaagaccctcttttgtactt

SEQ ID NO: 753370 - DNA, 25 bp, Homo sapien
ttggctgacgttatgaaatgcttcc

SEQ ID NO: 753371 - DNA, 25 bp, Homo sapien
agagattatctgtaggctgggccat

SEQ ID NO: 753372 - DNA, 25 bp, Homo sapien
taagtccttttcgtccttgtatcta

SEQ ID NO: 753373 - DNA, 25 bp, Homo sapien
ttcccaaggattttgcccacataag

SEQ ID NO: 753374 - DNA, 25 bp, Homo sapien
tacattttgcctgatatggaaaagc

SEQ ID NO: 753375 - DNA, 25 bp, Homo sapien
ccttgtatctattgtgtgccttaca

SEQ ID NO: 753376 - DNA, 25 bp, Homo sapien
tttactgttttatcttcaaccatcc

SEQ ID NO: 753377 - DNA, 25 bp, Homo sapien
tcccttggcctaaataaatgtttga

SEQ ID NO: 753378 - DNA, 25 bp, Homo sapien
tcaaccatcccttctgtcttggctt

SEQ ID NO: 753379 - DNA, 25 bp, Homo sapien
tatcttcaaccatcccttctgtctt

SEQ ID NO: 753380 - DNA, 25 bp, Homo sapien
cttggactaaccaaggatagccttc

SEQ ID NO: 753381 - DNA, 25 bp, Homo sapien
tttgaaatccctggtggtgaccttg

SEQ ID NO: 753382 - DNA, 25 bp, Homo sapien
ggtactttgaaatccctggtggtga

SEQ ID NO: 753383 - DNA, 25 bp, Homo sapien
ctaaccaaggatagccttctttcaa

SEQ ID NO: 753384 - DNA, 25 bp, Homo sapien
caagggaatctctcagaggcatggc

SEQ ID NO: 753385 - DNA, 25 bp, Homo sapien
ggacacctgttccttgcaagggaat

SEQ ID NO: 753386 - DNA, 25 bp, Homo sapien
gcagtgacctcgtgatgcccagaag

SEQ ID NO: 753387 - DNA, 25 bp, Homo sapien
tgttgactcatgaagaggctctgct

SEQ ID NO: 753388 - DNA, 25 bp, Homo sapien
tgatgcagttgaccccatttctggt

SEQ ID NO: 753389 - DNA, 25 bp, Homo sapien
gcaaacccagggcaacttgacctta

SEQ ID NO: 753390 - DNA, 25 bp, Homo sapien
ggcaacttgaccttatcagaacagt

SEQ ID NO: 753391 - DNA, 25 bp, Homo sapien
gttgatgtgatctctgcaaacccag

SEQ ID NO: 753392 - DNA, 25 bp, Homo sapien
gtggaggcactgtaactgggtcatt

SEQ ID NO: 753393 - DNA, 25 bp, Homo sapien
cactgtaactgggtcattacggttg

SEQ ID NO: 753394 - DNA, 25 bp, Homo sapien
tgggtcattacggttgcaccccagg

SEQ ID NO: 753395 - DNA, 25 bp, Homo sapien
taactgggtcattacggttgcaccc

SEQ ID NO: 753396 - DNA, 25 bp, Homo sapien
accgaaggctgccactaagtgtgca

SEQ ID NO: 753397 - DNA, 25 bp, Homo sapien
actttggcagggagtgaggctccaa

SEQ ID NO: 753398 - DNA, 25 bp, Homo sapien
ccaagtggctggtgttggacccacc

SEQ ID NO: 753399 - DNA, 25 bp, Homo sapien
taagtgtgcacttgctgtagcttcg

SEQ ID NO: 753400 - DNA, 25 bp, Homo sapien
tccttgagcacgtttagctagaggg

SEQ ID NO: 753401 - DNA, 25 bp, Homo sapien
actggctcagaagcaaactgcggga

SEQ ID NO: 753402 - DNA, 25 bp, Homo sapien
tctcagcaaggatttgttaccaact

SEQ ID NO: 753403 - DNA, 25 bp, Homo sapien
cacatctcaggtgattaaaaatgcc

SEQ ID NO: 753404 - DNA, 25 bp, Homo sapien
acctcctctattaactatttctcct

SEQ ID NO: 753405 - DNA, 25 bp, Homo sapien
cctcctctattaactatttctcctt

SEQ ID NO: 753406 - DNA, 25 bp, Homo sapien
tgctgctttcggacttgaagttctc

SEQ ID NO: 753407 - DNA, 25 bp, Homo sapien
tgctttcggacttgaagttctctct

SEQ ID NO: 753408 - DNA, 25 bp, Homo sapien
caaaacatatagaacaccaaagcct

SEQ ID NO: 753409 - DNA, 25 bp, Homo sapien
gcctgagcctaagatacgtaaagga

SEQ ID NO: 753410 - DNA, 25 bp, Homo sapien
aacaaaacatatagaacaccaaagc

SEQ ID NO: 753411 - DNA, 25 bp, Homo sapien
gcctaagatacgtaaaggacttgta

SEQ ID NO: 753412 - DNA, 25 bp, Homo sapien
tcataggctgctggccagtctatag

SEQ ID NO: 753413 - DNA, 25 bp, Homo sapien
gatggccattttgctcaacagttcc

SEQ ID NO: 753414 - DNA, 25 bp, Homo sapien
ccgtagtatagtggttccaaagcca

SEQ ID NO: 753415 - DNA, 25 bp, Homo sapien
aaagccactccgctgactcaaaggc

SEQ ID NO: 753416 - DNA, 25 bp, Homo sapien
agagatggtggtgattaactcgata

SEQ ID NO: 753417 - DNA, 25 bp, Homo sapien
cagctgcctcgttgaggtgaggttt

SEQ ID NO: 753418 - DNA, 25 bp, Homo sapien
taagcagctgcctcgttgaggtgag

SEQ ID NO: 753419 - DNA, 25 bp, Homo sapien
tgattaactcgataggaatttgatc

SEQ ID NO: 753420 - DNA, 25 bp, Homo sapien
gtgcaattataacttctggaaccag

SEQ ID NO: 753421 - DNA, 25 bp, Homo sapien
ccaaggcaggacttttaagtgcaat

SEQ ID NO: 753422 - DNA, 25 bp, Homo sapien
ttagtgtgcagtccctaaagtccct

SEQ ID NO: 753423 - DNA, 25 bp, Homo sapien
gcataacacgatgttctgcatttga

SEQ ID NO: 753424 - DNA, 25 bp, Homo sapien
catggccactgggacgaaatgtaac

SEQ ID NO: 753425 - DNA, 25 bp, Homo sapien
ggcagtgagttgataaggtccccat

SEQ ID NO: 753426 - DNA, 25 bp, Homo sapien
tgtaacggtgatgattcctggagcc

SEQ ID NO: 753427 - DNA, 25 bp, Homo sapien
agtgagttgataaggtccccatggc

SEQ ID NO: 753428 - DNA, 25 bp, Homo sapien
cagctatcattgctgtgcttgaaaa

SEQ ID NO: 753429 - DNA, 25 bp, Homo sapien
ttcagctatcattgctgtgcttgaa

SEQ ID NO: 753430 - DNA, 25 bp, Homo sapien
gctgtagattcagctatcattgctg

SEQ ID NO: 753431 - DNA, 25 bp, Homo sapien
gtttgcttgctgtagattcagctat

SEQ ID NO: 753432 - DNA, 25 bp, Homo sapien
gttcctgtgtcgctgactcctcctg

SEQ ID NO: 753433 - DNA, 25 bp, Homo sapien
catgatgttcctgtgtcgctgactc

SEQ ID NO: 753434 - DNA, 25 bp, Homo sapien
tgtgtcgctgactcctcctgaaatc

SEQ ID NO: 753435 - DNA, 25 bp, Homo sapien
gatgttcctgtgtcgctgactcctc

SEQ ID NO: 753436 - DNA, 25 bp, Homo sapien
cacttaaaattatcccaaacttcat

SEQ ID NO: 753437 - DNA, 25 bp, Homo sapien
gatcatggccgttctccagtggcat

SEQ ID NO: 753438 - DNA, 25 bp, Homo sapien
tctcctttcatagatattaaatatc

SEQ ID NO: 753439 - DNA, 25 bp, Homo sapien
agtggcatttctgattttgcttctc

SEQ ID NO: 753440 - DNA, 25 bp, Homo sapien
gtccgtaaccttctaatgtccacat

SEQ ID NO: 753441 - DNA, 25 bp, Homo sapien
cacacagtccgtaaccttctaatgt

SEQ ID NO: 753442 - DNA, 25 bp, Homo sapien
cagtccgtaaccttctaatgtccac

SEQ ID NO: 753443 - DNA, 25 bp, Homo sapien
ccgtaaccttctaatgtccacattg

SEQ ID NO: 753444 - DNA, 25 bp, Homo sapien
aaaccaaaggcacagtgcggtgctg

SEQ ID NO: 753445 - DNA, 25 bp, Homo sapien
gaagactctgattttcggtggcaca

SEQ ID NO: 753446 - DNA, 25 bp, Homo sapien
tagacacagtggcattgacagaggg

SEQ ID NO: 753447 - DNA, 25 bp, Homo sapien
cctggcactgtggtagtcgagtaaa

SEQ ID NO: 753448 - DNA, 25 bp, Homo sapien
ttgcatccaagggacgggagcgggc

SEQ ID NO: 753449 - DNA, 25 bp, Homo sapien
tgtgactcgaggctgaatccttgca

SEQ ID NO: 753450 - DNA, 25 bp, Homo sapien
ccttgcatccaagggacgggagcgg

SEQ ID NO: 753451 - DNA, 25 bp, Homo sapien
gagaaagtgtgactcgaggctgaat

SEQ ID NO: 753452 - DNA, 25 bp, Homo sapien
tggtacatagcatattgtgggtcag

SEQ ID NO: 753453 - DNA, 25 bp, Homo sapien
tcttcgtggtacatagcatattgtg

SEQ ID NO: 753454 - DNA, 25 bp, Homo sapien
gtacatagcatattgtgggtcagtt

SEQ ID NO: 753455 - DNA, 25 bp, Homo sapien
cgtggtacatagcatattgtgggtc

SEQ ID NO: 753456 - DNA, 25 bp, Homo sapien
ccgatcccccgatcgtaggagctcc

SEQ ID NO: 753457 - DNA, 25 bp, Homo sapien
gataaacctagagttgtcacccgat

SEQ ID NO: 753458 - DNA, 25 bp, Homo sapien
taaacctagagttgtcacccgatcc

SEQ ID NO: 753459 - DNA, 25 bp, Homo sapien
acccgatcccccgatcgtaggagct

SEQ ID NO: 753460 - DNA, 25 bp, Homo sapien
ctactcatgccccaagttcattgaa

SEQ ID NO: 753461 - DNA, 25 bp, Homo sapien
tactcatgccccaagttcattgaac

SEQ ID NO: 753462 - DNA, 25 bp, Homo sapien
caccaggaatcatgccatcaagaaa

SEQ ID NO: 753463 - DNA, 25 bp, Homo sapien
gctaccagctgttaggtggttccca

SEQ ID NO: 753464 - DNA, 25 bp, Homo sapien
cattgcaagcatatgtccaagtcat

SEQ ID NO: 753465 - DNA, 25 bp, Homo sapien
ccttatgataagttcctagagatgg

SEQ ID NO: 753466 - DNA, 25 bp, Homo sapien
gcaccgccctctagtttttccctca

SEQ ID NO: 753467 - DNA, 25 bp, Homo sapien
cctcacaccatagctgtcaggaact

SEQ ID NO: 753468 - DNA, 25 bp, Homo sapien
ctcacaccatagctgtcaggaactc

SEQ ID NO: 753469 - DNA, 25 bp, Homo sapien
gctgtgaggacttccagcaaggtga

SEQ ID NO: 753470 - DNA, 25 bp, Homo sapien
aaggggctgtgaggacttccagcaa

SEQ ID NO: 753471 - DNA, 25 bp, Homo sapien
caaggtgagacaggaaagccttcct

SEQ ID NO: 753472 - DNA, 25 bp, Homo sapien
gacttgggcaatgcagattccactg

SEQ ID NO: 753473 - DNA, 25 bp, Homo sapien
ctggaagccgaaggaggcttctgac

SEQ ID NO: 753474 - DNA, 25 bp, Homo sapien
tctctttttgcaagggtgtgatgtg

SEQ ID NO: 753475 - DNA, 25 bp, Homo sapien
ctctctttttgcaagggtgtgatgt

SEQ ID NO: 753476 - DNA, 25 bp, Homo sapien
gggtgtgatgtgaacagatttccac

SEQ ID NO: 753477 - DNA, 25 bp, Homo sapien
tttacacttgcaagaagcttctgag

SEQ ID NO: 753478 - DNA, 25 bp, Homo sapien
tactctctggctgtccgttttatgg

SEQ ID NO: 753479 - DNA, 25 bp, Homo sapien
taatggccttcttggtttggccgag

SEQ ID NO: 753480 - DNA, 25 bp, Homo sapien
tgaaaaacagccagtcaccagcaac

SEQ ID NO: 753481 - DNA, 25 bp, Homo sapien
gaagctgatggtggaagaaaattgc

SEQ ID NO: 753482 - DNA, 25 bp, Homo sapien
caaatgcagctgaggttctcagtcc

SEQ ID NO: 753483 - DNA, 25 bp, Homo sapien
gggttgtgaattcctaagacaacac

SEQ ID NO: 753484 - DNA, 25 bp, Homo sapien
gggtcataacgttgatggcatccag

SEQ ID NO: 753485 - DNA, 25 bp, Homo sapien
tggagatcggtatgagcagcctagc

SEQ ID NO: 753486 - DNA, 25 bp, Homo sapien
gggtaagagcgaagaaatgaaggac

SEQ ID NO: 753487 - DNA, 25 bp, Homo sapien
gcagcctagcgcgtactgtgaaggt

SEQ ID NO: 753488 - DNA, 25 bp, Homo sapien
cgtactgtgaaggttcaatggagag

SEQ ID NO: 753489 - DNA, 25 bp, Homo sapien
aatccgcaggctgttcctttctctg

SEQ ID NO: 753490 - DNA, 25 bp, Homo sapien
gggctgccaaaatccgcaggctgtt

SEQ ID NO: 753491 - DNA, 25 bp, Homo sapien
ttgttggagagctagaattagcact

SEQ ID NO: 753492 - DNA, 25 bp, Homo sapien
tcgaattgtcggacccagtgcttgg

SEQ ID NO: 753493 - DNA, 25 bp, Homo sapien
tacttcataagcattctgcaatggg

SEQ ID NO: 753494 - DNA, 25 bp, Homo sapien
cgagctcaagactacagatattttg

SEQ ID NO: 753495 - DNA, 25 bp, Homo sapien
gactgtgtgtcagcaacgagctcaa

SEQ ID NO: 753496 - DNA, 25 bp, Homo sapien
cataagcattctgcaatgggactga

SEQ ID NO: 753497 - DNA, 25 bp, Homo sapien
aaccaagtgcggtgggtgagtgaca

SEQ ID NO: 753498 - DNA, 25 bp, Homo sapien
tcaaggccatatttgtcaacaggtc

SEQ ID NO: 753499 - DNA, 25 bp, Homo sapien
tgagtgacatagaagcctgaggttt

SEQ ID NO: 753500 - DNA, 25 bp, Homo sapien
tttttcagacacatgatttccaaga

SEQ ID NO: 753501 - DNA, 25 bp, Homo sapien
gtaaacttgggccacaatcatttgc

SEQ ID NO: 753502 - DNA, 25 bp, Homo sapien
agaggtaaacttgggccacaatcat

SEQ ID NO: 753503 - DNA, 25 bp, Homo sapien
aagaggtaaacttgggccacaatca

SEQ ID NO: 753504 - DNA, 25 bp, Homo sapien
acttgggccacaatcatttgctcca

SEQ ID NO: 753505 - DNA, 25 bp, Homo sapien
tgtcaaggaaagagactcctacaaa

SEQ ID NO: 753506 - DNA, 25 bp, Homo sapien
cagggactggtgatttgtgtcatca

SEQ ID NO: 753507 - DNA, 25 bp, Homo sapien
tgctgtcatcctggttgctctgtag

SEQ ID NO: 753508 - DNA, 25 bp, Homo sapien
gagactcctacaaatgccagggact

SEQ ID NO: 753509 - DNA, 25 bp, Homo sapien
ttgtcattctacgacatgcaaagcg

SEQ ID NO: 753510 - DNA, 25 bp, Homo sapien
ttagtctatccctatgctctctctc

SEQ ID NO: 753511 - DNA, 25 bp, Homo sapien
ctcaggatctgatgaggaggtcaga

SEQ ID NO: 753512 - DNA, 25 bp, Homo sapien
catgcaaagcgaaactcaggatctg

SEQ ID NO: 753513 - DNA, 25 bp, Homo sapien
gagcctccttcttttttgactccca

SEQ ID NO: 753514 - DNA, 25 bp, Homo sapien
agcctccttcttttttgactcccat

SEQ ID NO: 753515 - DNA, 25 bp, Homo sapien
gtccccaacacaggagcctccttct

SEQ ID NO: 753516 - DNA, 25 bp, Homo sapien
cccaacacaggagcctccttctttt

SEQ ID NO: 753517 - DNA, 25 bp, Homo sapien
ttgcgatccatttcaaatcctactt

SEQ ID NO: 753518 - DNA, 25 bp, Homo sapien
ttcaaatcctactttctctgtaagg

SEQ ID NO: 753519 - DNA, 25 bp, Homo sapien
caaatcctactttctctgtaaggat

SEQ ID NO: 753520 - DNA, 25 bp, Homo sapien
cttttgcgatccatttcaaatccta

SEQ ID NO: 753521 - DNA, 25 bp, Homo sapien
gaaccagacaactcctgcttggcta

SEQ ID NO: 753522 - DNA, 25 bp, Homo sapien
ggctatctctgcaccgccattttgt

SEQ ID NO: 753523 - DNA, 25 bp, Homo sapien
gccattttgtgtcactggcttcact

SEQ ID NO: 753524 - DNA, 25 bp, Homo sapien
caagaaccagacaactcctgcttgg

SEQ ID NO: 753525 - DNA, 25 bp, Homo sapien
tctgtgctcctcaaacatccaactg

SEQ ID NO: 753526 - DNA, 25 bp, Homo sapien
caactgctaggagatacgcatcttc

SEQ ID NO: 753527 - DNA, 25 bp, Homo sapien
ctttggctgaagacctgtggacatc

SEQ ID NO: 753528 - DNA, 25 bp, Homo sapien
aatgtctgacagtgtacctcccgga

SEQ ID NO: 753529 - DNA, 25 bp, Homo sapien
acatgacttgagtctgcacccactc

SEQ ID NO: 753530 - DNA, 25 bp, Homo sapien
gaggcttctcgagcatttctcaaca

SEQ ID NO: 753531 - DNA, 25 bp, Homo sapien
tgcagagaggcttctcgagcatttc

SEQ ID NO: 753532 - DNA, 25 bp, Homo sapien
tttctcaacatgacttgagtctgca

SEQ ID NO: 753533 - DNA, 25 bp, Homo sapien
cttttcaatgcccattgtattgacg

SEQ ID NO: 753534 - DNA, 25 bp, Homo sapien
gcccattgtattgacggcgtcttct

SEQ ID NO: 753535 - DNA, 25 bp, Homo sapien
acacagacgcagctgccagtgactt

SEQ ID NO: 753536 - DNA, 25 bp, Homo sapien
caatgcccattgtattgacggcgtc

SEQ ID NO: 753537 - DNA, 25 bp, Homo sapien
tgctggccagagatgggtgtaatct

SEQ ID NO: 753538 - DNA, 25 bp, Homo sapien
ccagagatgggtgtaatctgaggaa

SEQ ID NO: 753539 - DNA, 25 bp, Homo sapien
ctcatggcattttgctggccagaga

SEQ ID NO: 753540 - DNA, 25 bp, Homo sapien
gaaaaatcccaagtctctcatggca

SEQ ID NO: 753541 - DNA, 25 bp, Homo sapien
tgttctttccacattttcagacaca

SEQ ID NO: 753542 - DNA, 25 bp, Homo sapien
tacttgttctttccacattttcaga

SEQ ID NO: 753543 - DNA, 25 bp, Homo sapien
ctgatacttgttctttccacatttt

SEQ ID NO: 753544 - DNA, 25 bp, Homo sapien
cttgttctttccacattttcagaca

SEQ ID NO: 753545 - DNA, 25 bp, Homo sapien
tagtgctcttaggaccaagagggag

SEQ ID NO: 753546 - DNA, 25 bp, Homo sapien
tctcactggctccattgctgcctgt

SEQ ID NO: 753547 - DNA, 25 bp, Homo sapien
aaatctcactggctccattgctgcc

SEQ ID NO: 753548 - DNA, 25 bp, Homo sapien
gctgcctgtagtgctcttaggacca

SEQ ID NO: 753549 - DNA, 25 bp, Homo sapien
tttataaagatatttgtcgaatatc

SEQ ID NO: 753550 - DNA, 25 bp, Homo sapien
tataaagatatttgtcgaatatcaa

SEQ ID NO: 753551 - DNA, 25 bp, Homo sapien
ctttataaagatatttgtcgaatat

SEQ ID NO: 753552 - DNA, 25 bp, Homo sapien
ttataaagatatttgtcgaatatca

SEQ ID NO: 753553 - DNA, 25 bp, Homo sapien
cttctaaagtttcagaaaggcattt

SEQ ID NO: 753554 - DNA, 25 bp, Homo sapien
tctaaagtttcagaaaggcatttac

SEQ ID NO: 753555 - DNA, 25 bp, Homo sapien
tcttctaaagtttcagaaaggcatt

SEQ ID NO: 753556 - DNA, 25 bp, Homo sapien
cttcttctaaagtttcagaaaggca

SEQ ID NO: 753557 - DNA, 25 bp, Homo sapien
cacctagttactcctaacctggact

SEQ ID NO: 753558 - DNA, 25 bp, Homo sapien
agtgcaatgatatgaaccttgctca

SEQ ID NO: 753559 - DNA, 25 bp, Homo sapien
catgctgggtacacttacattagcc

SEQ ID NO: 753560 - DNA, 25 bp, Homo sapien
actttaaacatgctgggtacactta

SEQ ID NO: 753561 - DNA, 25 bp, Homo sapien
tgatatgaaccttgctcattgcaac

SEQ ID NO: 753562 - DNA, 25 bp, Homo sapien
gacaggattgggctttttcccaagc

SEQ ID NO: 753563 - DNA, 25 bp, Homo sapien
caaaggtttatggacacaaagctca

SEQ ID NO: 753564 - DNA, 25 bp, Homo sapien
tatggagtctgccaagttggctaga

SEQ ID NO: 753565 - DNA, 25 bp, Homo sapien
tcctctataagtattcaaaggttta

SEQ ID NO: 753566 - DNA, 25 bp, Homo sapien
tacaaagattttgtaagctggactc

SEQ ID NO: 753567 - DNA, 25 bp, Homo sapien
caaagattttgtaagctggactcag

SEQ ID NO: 753568 - DNA, 25 bp, Homo sapien
agcaattgaactgcggagcccttct

SEQ ID NO: 753569 - DNA, 25 bp, Homo sapien
ctggaaactaagcaattgaactgcg

SEQ ID NO: 753570 - DNA, 25 bp, Homo sapien
cttaaatactaacagagctgtactc

SEQ ID NO: 753571 - DNA, 25 bp, Homo sapien
ggtcttaaatactaacagagctgta

SEQ ID NO: 753572 - DNA, 25 bp, Homo sapien
ctgggtcttaaatactaacagagct

SEQ ID NO: 753573 - DNA, 25 bp, Homo sapien
tgggtcttaaatactaacagagctg

SEQ ID NO: 753574 - DNA, 25 bp, Homo sapien
tgcctatacccaaaagttccaaatg

SEQ ID NO: 753575 - DNA, 25 bp, Homo sapien
tatgattgacatctctcccatcagc

SEQ ID NO: 753576 - DNA, 25 bp, Homo sapien
ccaaatgtcatcaactctatgattg

SEQ ID NO: 753577 - DNA, 25 bp, Homo sapien
tgtcatcaactctatgattgacatc

SEQ ID NO: 753578 - DNA, 25 bp, Homo sapien
aatgtatgggctcactccttgctcc

SEQ ID NO: 753579 - DNA, 25 bp, Homo sapien
tccaaagagctctggcaagtgagtt

SEQ ID NO: 753580 - DNA, 25 bp, Homo sapien
gaatgttttcacctggacagaccgt

SEQ ID NO: 753581 - DNA, 25 bp, Homo sapien
tattattaccacatggccatccaag

SEQ ID NO: 753582 - DNA, 25 bp, Homo sapien
cattatgctgttcctctcgttgtaa

SEQ ID NO: 753583 - DNA, 25 bp, Homo sapien
tcaaagtcttctcgagtttatttta

SEQ ID NO: 753584 - DNA, 25 bp, Homo sapien
gtaaggttccaatagttctgcatcc

SEQ ID NO: 753585 - DNA, 25 bp, Homo sapien
tcctctcgttgtaaggttccaatag

SEQ ID NO: 753586 - DNA, 25 bp, Homo sapien
atcagaagaaagatcaaccagaaac

SEQ ID NO: 753587 - DNA, 25 bp, Homo sapien
tcagaagaaagatcaaccagaaact

SEQ ID NO: 753588 - DNA, 25 bp, Homo sapien
cagaagaaagatcaaccagaaactt

SEQ ID NO: 753589 - DNA, 25 bp, Homo sapien
agaagaaagatcaaccagaaacttc

SEQ ID NO: 753590 - DNA, 25 bp, Homo sapien
gatactctatggaagagaggaacat

SEQ ID NO: 753591 - DNA, 25 bp, Homo sapien
tggtccccaggtaacaaattgtgat

SEQ ID NO: 753592 - DNA, 25 bp, Homo sapien
tctgattttgcttcaaagacagcat

SEQ ID NO: 753593 - DNA, 25 bp, Homo sapien
tgctgcatgaaaaataggccaacag

SEQ ID NO: 753594 - DNA, 25 bp, Homo sapien
tcttgcagaaaacttgtcagttgaa

SEQ ID NO: 753595 - DNA, 25 bp, Homo sapien
tgatatccaatttcaagaagagccc

SEQ ID NO: 753596 - DNA, 25 bp, Homo sapien
ttcaaatgatctcagcagataccag

SEQ ID NO: 753597 - DNA, 25 bp, Homo sapien
ctgggcgttctaccatgatttcaaa

SEQ ID NO: 753598 - DNA, 25 bp, Homo sapien
cttcagtagaattccagtgtttcta

SEQ ID NO: 753599 - DNA, 25 bp, Homo sapien
tacattaatccaacttcaagtcttc

SEQ ID NO: 753600 - DNA, 25 bp, Homo sapien
cagccatgataagtcaggattcatt

SEQ ID NO: 753601 - DNA, 25 bp, Homo sapien
aaacaattgtctgaggagttttaca

SEQ ID NO: 753602 - DNA, 25 bp, Homo sapien
ttcatgtgtttatagcagaagttat

SEQ ID NO: 753603 - DNA, 25 bp, Homo sapien
tattttggtgtttgcgaggcatgca

SEQ ID NO: 753604 - DNA, 25 bp, Homo sapien
ttagtggacagtattcagcaacgcc

SEQ ID NO: 753605 - DNA, 25 bp, Homo sapien
tatttatttctatggcattccagcg

SEQ ID NO: 753606 - DNA, 25 bp, Homo sapien
tattgaagcttttagccctatgtca

SEQ ID NO: 753607 - DNA, 25 bp, Homo sapien
agtttattctagtacttagcttgcc

SEQ ID NO: 753608 - DNA, 25 bp, Homo sapien
cacttgtgtgaagttggcaaacatt

SEQ ID NO: 753609 - DNA, 25 bp, Homo sapien
aaagtacatgcttaaagccaagttt

SEQ ID NO: 753610 - DNA, 25 bp, Homo sapien
cagttgtaaggaggtccacggtcat

SEQ ID NO: 753611 - DNA, 25 bp, Homo sapien
cattagcagcgattgctatttgaca

SEQ ID NO: 753612 - DNA, 25 bp, Homo sapien
ggaactgagtggttgctaaattcaa

SEQ ID NO: 753613 - DNA, 25 bp, Homo sapien
tatgtttctatatgccaccaagtgg

SEQ ID NO: 753614 - DNA, 25 bp, Homo sapien
tgttctcctgagcattatggcaaca

SEQ ID NO: 753615 - DNA, 25 bp, Homo sapien
tcctgagcattatggcaacagcatt

SEQ ID NO: 753616 - DNA, 25 bp, Homo sapien
cattaggaagacttgaatctctctc

SEQ ID NO: 753617 - DNA, 25 bp, Homo sapien
catataaggtagacattaggaagac

SEQ ID NO: 753618 - DNA, 25 bp, Homo sapien
gaacagacgctttttacagggaggc

SEQ ID NO: 753619 - DNA, 25 bp, Homo sapien
tgctcacggcgcactatgggaagac

SEQ ID NO: 753620 - DNA, 25 bp, Homo sapien
taatagtgcaggaacctaggtcgca

SEQ ID NO: 753621 - DNA, 25 bp, Homo sapien
tagtgaattactcaggcagagcagg

SEQ ID NO: 753622 - DNA, 25 bp, Homo sapien
cagatcacagagaggtaggctgact

SEQ ID NO: 753623 - DNA, 25 bp, Homo sapien
tccagaagctcctcatgggataaag

SEQ ID NO: 753624 - DNA, 25 bp, Homo sapien
ggcttgtcacagagcatttgcccat

SEQ ID NO: 753625 - DNA, 25 bp, Homo sapien
tagtagggtcttttcagtaccagtc

SEQ ID NO: 753626 - DNA, 25 bp, Homo sapien
cactactgagcaaaggtgaacccaa

SEQ ID NO: 753627 - DNA, 25 bp, Homo sapien
tctaaatattacgaagccctagcct

SEQ ID NO: 753628 - DNA, 25 bp, Homo sapien
gactctacccgatgactttgcctta

SEQ ID NO: 753629 - DNA, 25 bp, Homo sapien
taacttaggaggttgactcagccac

SEQ ID NO: 753630 - DNA, 25 bp, Homo sapien
ttactattcagatgcaccagaaggg

SEQ ID NO: 753631 - DNA, 25 bp, Homo sapien
catgcccttacactattggttggaa

SEQ ID NO: 753632 - DNA, 25 bp, Homo sapien
ggaaatttgaatgccaccatgagag

SEQ ID NO: 753633 - DNA, 25 bp, Homo sapien
gacagatcacggagaaggtgcccaa

SEQ ID NO: 753634 - DNA, 25 bp, Homo sapien
tatcaggtttactatcaggttgaga

SEQ ID NO: 753635 - DNA, 25 bp, Homo sapien
tgtattcctagcctctaccacagga

SEQ ID NO: 753636 - DNA, 25 bp, Homo sapien
cacgagctccctgttctgttaatgt

SEQ ID NO: 753637 - DNA, 25 bp, Homo sapien
tccaggagtgctgaatccacgagct

SEQ ID NO: 753638 - DNA, 25 bp, Homo sapien
tgccacataaccagaaggtgatggc

SEQ ID NO: 753639 - DNA, 25 bp, Homo sapien
gccacataaccagaaggtgatggct

SEQ ID NO: 753640 - DNA, 25 bp, Homo sapien
cttatgccacataaccagaaggtga

SEQ ID NO: 753641 - DNA, 25 bp, Homo sapien
tatgccacataaccagaaggtgatg

SEQ ID NO: 753642 - DNA, 25 bp, Homo sapien
taggattcggtggtggctgtattct

SEQ ID NO: 753643 - DNA, 25 bp, Homo sapien
tccaaacaatctcatgtgtatacag

SEQ ID NO: 753644 - DNA, 25 bp, Homo sapien
gatccaatcacttcctacgaaactc

SEQ ID NO: 753645 - DNA, 25 bp, Homo sapien
ttcttccggagagagaatgggattg

SEQ ID NO: 753646 - DNA, 25 bp, Homo sapien
tcctggagaataatccatatgttta

SEQ ID NO: 753647 - DNA, 25 bp, Homo sapien
gcaggaattcctcttttaggtatgt

SEQ ID NO: 753648 - DNA, 25 bp, Homo sapien
tctgtggtatagtcatcccataaaa

SEQ ID NO: 753649 - DNA, 25 bp, Homo sapien
ctctgatgaattgacagcaaactta

SEQ ID NO: 753650 - DNA, 25 bp, Homo sapien
gaagcagattggttgacttcctttc

SEQ ID NO: 753651 - DNA, 25 bp, Homo sapien
gttgaaggcatggatgaagcagatt

SEQ ID NO: 753652 - DNA, 25 bp, Homo sapien
ctgtcctctaattctgtcaagaatg

SEQ ID NO: 753653 - DNA, 25 bp, Homo sapien
caagaatgttaccagctgctaaagg

SEQ ID NO: 753654 - DNA, 25 bp, Homo sapien
gatttcactctggtaaaacactgtg

SEQ ID NO: 753655 - DNA, 25 bp, Homo sapien
caaatcagctggctcgatgcaacaa

SEQ ID NO: 753656 - DNA, 25 bp, Homo sapien
tatccaggaactcaactcccaaatc

SEQ ID NO: 753657 - DNA, 25 bp, Homo sapien
gatgcaacaatgaaattcgaagtac

SEQ ID NO: 753658 - DNA, 25 bp, Homo sapien
tggaggctgctctaccagctgggat

SEQ ID NO: 753659 - DNA, 25 bp, Homo sapien
agaactccgcatgaccctcagtaga

SEQ ID NO: 753660 - DNA, 25 bp, Homo sapien
cacctgctgggaattagctgtggtc

SEQ ID NO: 753661 - DNA, 25 bp, Homo sapien
gccagccattaggagccactttgag

SEQ ID NO: 753662 - DNA, 25 bp, Homo sapien
aggcaacaggtagtcacttagagtg

SEQ ID NO: 753663 - DNA, 25 bp, Homo sapien
agagtggcccaattctgtaagataa

SEQ ID NO: 753664 - DNA, 25 bp, Homo sapien
ttagacctgttaccctttgaggcaa

SEQ ID NO: 753665 - DNA, 25 bp, Homo sapien
tctgttagacctgttaccctttgag

SEQ ID NO: 753666 - DNA, 25 bp, Homo sapien
cagctcaagctggtccctagtggaa

SEQ ID NO: 753667 - DNA, 25 bp, Homo sapien
gaggagtctgctatgctggatacca

SEQ ID NO: 753668 - DNA, 25 bp, Homo sapien
ttcagggagtcaggtatcaggcttc

SEQ ID NO: 753669 - DNA, 25 bp, Homo sapien
tgtgattagggcctgacagcctgcc

SEQ ID NO: 753670 - DNA, 25 bp, Homo sapien
gacgtgtgctcaccccttgactata

SEQ ID NO: 753671 - DNA, 25 bp, Homo sapien
tcctcatggcgggtaactgccagtc

SEQ ID NO: 753672 - DNA, 25 bp, Homo sapien
gcaggaatcagccagttcactggac

SEQ ID NO: 753673 - DNA, 25 bp, Homo sapien
ttgactataccccatgtggccttca

SEQ ID NO: 753674 - DNA, 25 bp, Homo sapien
tagaagatctgacatccgtgggcct

SEQ ID NO: 753675 - DNA, 25 bp, Homo sapien
tgtggtcacagtctgctcaaacact

SEQ ID NO: 753676 - DNA, 25 bp, Homo sapien
cgcaatccctactgtttcagaggct

SEQ ID NO: 753677 - DNA, 25 bp, Homo sapien
cctgactggaaaggcgcagcagatc

SEQ ID NO: 753678 - DNA, 25 bp, Homo sapien
tcccctttctctgacaaagaatgct

SEQ ID NO: 753679 - DNA, 25 bp, Homo sapien
ctttctctgacaaagaatgctaact

SEQ ID NO: 753680 - DNA, 25 bp, Homo sapien
catgttcccctttctctgacaaaga

SEQ ID NO: 753681 - DNA, 25 bp, Homo sapien
ccatgttcccctttctctgacaaag

SEQ ID NO: 753682 - DNA, 25 bp, Homo sapien
aatgcccacgaatggcccacacagc

SEQ ID NO: 753683 - DNA, 25 bp, Homo sapien
cccacacagcgccaaagccgttcat

SEQ ID NO: 753684 - DNA, 25 bp, Homo sapien
ggcccacacagcgccaaagccgttc

SEQ ID NO: 753685 - DNA, 25 bp, Homo sapien
tgcccacgaatggcccacacagcgc

SEQ ID NO: 753686 - DNA, 25 bp, Homo sapien
cctcttctctgggtcaacactgcca

SEQ ID NO: 753687 - DNA, 25 bp, Homo sapien
tggatatagcgacacctgtctctgt

SEQ ID NO: 753688 - DNA, 25 bp, Homo sapien
cctggtgagcatgatgtcatggata

SEQ ID NO: 753689 - DNA, 25 bp, Homo sapien
tctttcttctctatagcaaaccacc

SEQ ID NO: 753690 - DNA, 25 bp, Homo sapien
tcaggaacactcaagaattgaggac

SEQ ID NO: 753691 - DNA, 25 bp, Homo sapien
gcttcactggaaccttttgaaccaa

SEQ ID NO: 753692 - DNA, 25 bp, Homo sapien
aattgaggacaatggagcctgtagg

SEQ ID NO: 753693 - DNA, 25 bp, Homo sapien
gcctgtaggacattaggcttcactg

SEQ ID NO: 753694 - DNA, 25 bp, Homo sapien
taggaactaattcgcattggacagt

SEQ ID NO: 753695 - DNA, 25 bp, Homo sapien
tttcgaccacatttttctagcggag

SEQ ID NO: 753696 - DNA, 25 bp, Homo sapien
tccttgggaaaatctactggcgtgt

SEQ ID NO: 753697 - DNA, 25 bp, Homo sapien
tctagcggagatttcagggagtttt

SEQ ID NO: 753698 - DNA, 25 bp, Homo sapien
tgtttaaagtcagagtttagtctct

SEQ ID NO: 753699 - DNA, 25 bp, Homo sapien
tctcctctcataactaagtttttgg

SEQ ID NO: 753700 - DNA, 25 bp, Homo sapien
cataactaagtttttggtgaaatgt

SEQ ID NO: 753701 - DNA, 25 bp, Homo sapien
cacttccagtccaaggctacactct

SEQ ID NO: 753702 - DNA, 25 bp, Homo sapien
gatattgttagaaacttgatcttta

SEQ ID NO: 753703 - DNA, 25 bp, Homo sapien
tattgttagaaacttgatctttagt

SEQ ID NO: 753704 - DNA, 25 bp, Homo sapien
taagatattgttagaaacttgatct

SEQ ID NO: 753705 - DNA, 25 bp, Homo sapien
ttgttagaaacttgatctttagtag

SEQ ID NO: 753706 - DNA, 25 bp, Homo sapien
taataaattgccaactggtttgaaa

SEQ ID NO: 753707 - DNA, 25 bp, Homo sapien
aatcatgtaacacataattattggc

SEQ ID NO: 753708 - DNA, 25 bp, Homo sapien
aactgcttggttataaaaatcatgt

SEQ ID NO: 753709 - DNA, 25 bp, Homo sapien
ggcattatcatgttcatttgttctc

SEQ ID NO: 753710 - DNA, 25 bp, Homo sapien
tctatttgtgtaggattgcaccctt

SEQ ID NO: 753711 - DNA, 25 bp, Homo sapien
tttgtgtaggattgcacccttctct

SEQ ID NO: 753712 - DNA, 25 bp, Homo sapien
ttatctatttgtgtaggattgcacc

SEQ ID NO: 753713 - DNA, 25 bp, Homo sapien
tatttgtgtaggattgcacccttct

SEQ ID NO: 753714 - DNA, 25 bp, Homo sapien
atgaagttcccagttgatttctcca

SEQ ID NO: 753715 - DNA, 25 bp, Homo sapien
tctggcccaacaattcctggaaacc

SEQ ID NO: 753716 - DNA, 25 bp, Homo sapien
catctggcccaacaattcctggaaa

SEQ ID NO: 753717 - DNA, 25 bp, Homo sapien
ctcctgtcaatgaggcatgaagttc

SEQ ID NO: 753718 - DNA, 25 bp, Homo sapien
tctgggctctaactgttggacactg

SEQ ID NO: 753719 - DNA, 25 bp, Homo sapien
taaattcatcgggtgaatcctcccc

SEQ ID NO: 753720 - DNA, 25 bp, Homo sapien
gacttccggcttcagtctgggctct

SEQ ID NO: 753721 - DNA, 25 bp, Homo sapien
ctaagcactgttccccgtaaattca

SEQ ID NO: 753722 - DNA, 25 bp, Homo sapien
catcagagggactttgtccccagtg

SEQ ID NO: 753723 - DNA, 25 bp, Homo sapien
ttgctctcatcagagggactttgtc

SEQ ID NO: 753724 - DNA, 25 bp, Homo sapien
atcagagggactttgtccccagtgc

SEQ ID NO: 753725 - DNA, 25 bp, Homo sapien
gctctcatcagagggactttgtccc

SEQ ID NO: 753726 - DNA, 25 bp, Homo sapien
ttgtgattcttatcagtgcaactga

SEQ ID NO: 753727 - DNA, 25 bp, Homo sapien
cagaaacgtattcaccaggggacac

SEQ ID NO: 753728 - DNA, 25 bp, Homo sapien
gggacactggactctaagctttagc

SEQ ID NO: 753729 - DNA, 25 bp, Homo sapien
tgataaggtttctaagtcgtggttc

SEQ ID NO: 753730 - DNA, 25 bp, Homo sapien
cccaagatctcctctggttgatcca

SEQ ID NO: 753731 - DNA, 25 bp, Homo sapien
aagatctcctctggttgatccattc

SEQ ID NO: 753732 - DNA, 25 bp, Homo sapien
agcaactccccaagatctcctctgg

SEQ ID NO: 753733 - DNA, 25 bp, Homo sapien
gcaactccccaagatctcctctggt

SEQ ID NO: 753734 - DNA, 25 bp, Homo sapien
ctaccagtcagtgggtctcactgtg

SEQ ID NO: 753735 - DNA, 25 bp, Homo sapien
ccagtcagtgggtctcactgtgggt

SEQ ID NO: 753736 - DNA, 25 bp, Homo sapien
cactgtgggttcatgctcagactgc

SEQ ID NO: 753737 - DNA, 25 bp, Homo sapien
tgtgggttcatgctcagactgcagg

SEQ ID NO: 753738 - DNA, 25 bp, Homo sapien
tgcatcttcaacaggcttatgtgga

SEQ ID NO: 753739 - DNA, 25 bp, Homo sapien
gcatcttcaacaggcttatgtggaa

SEQ ID NO: 753740 - DNA, 25 bp, Homo sapien
atcttcaacaggcttatgtggaaac

SEQ ID NO: 753741 - DNA, 25 bp, Homo sapien
cttcaacaggcttatgtggaaacat

SEQ ID NO: 753742 - DNA, 25 bp, Homo sapien
ggctttaggttcatttgtccagaca

SEQ ID NO: 753743 - DNA, 25 bp, Homo sapien
ttggctttaggttcatttgtccaga

SEQ ID NO: 753744 - DNA, 25 bp, Homo sapien
tttgtccagacaacatgaggcatcc

SEQ ID NO: 753745 - DNA, 25 bp, Homo sapien
aacatgaggcatcctggaatttcca

SEQ ID NO: 753746 - DNA, 25 bp, Homo sapien
tcagggatacaacagaaaggagatc

SEQ ID NO: 753747 - DNA, 25 bp, Homo sapien
gccctgtgcattcggagaactctaa

SEQ ID NO: 753748 - DNA, 25 bp, Homo sapien
gccttcagggaaggactcttatctg

SEQ ID NO: 753749 - DNA, 25 bp, Homo sapien
gggtagatcagggatacaacagaaa

SEQ ID NO: 753750 - DNA, 25 bp, Homo sapien
gtgtctccacaatgccaggtataaa

SEQ ID NO: 753751 - DNA, 25 bp, Homo sapien
ccatgactaggattgcatctgcgat

SEQ ID NO: 753752 - DNA, 25 bp, Homo sapien
cagatgtgtgactggtctcctccaa

SEQ ID NO: 753753 - DNA, 25 bp, Homo sapien
aagtacacggttatatcctccatga

SEQ ID NO: 753754 - DNA, 25 bp, Homo sapien
gtcaacgtctcccaacaaatctgac

SEQ ID NO: 753755 - DNA, 25 bp, Homo sapien
caacaaatctgacggtttcatctgc

SEQ ID NO: 753756 - DNA, 25 bp, Homo sapien
tctcccaacaaatctgacggtttca

SEQ ID NO: 753757 - DNA, 25 bp, Homo sapien
aatctgacggtttcatctgcccagc

SEQ ID NO: 753758 - DNA, 25 bp, Homo sapien
cttttctcaaagcagaagctcacca

SEQ ID NO: 753759 - DNA, 25 bp, Homo sapien
ttttctcaaagcagaagctcaccat

SEQ ID NO: 753760 - DNA, 25 bp, Homo sapien
gtgtgaaagtccaccagtttctctg

SEQ ID NO: 753761 - DNA, 25 bp, Homo sapien
tacaaatgcggctccactcctgaat

SEQ ID NO: 753762 - DNA, 25 bp, Homo sapien
acatatccaactggccagtgtgaaa

SEQ ID NO: 753763 - DNA, 25 bp, Homo sapien
gaatcccagaagctgcaaatctgca

SEQ ID NO: 753764 - DNA, 25 bp, Homo sapien
ggcaaagtatcaggcaaaggtataa

SEQ ID NO: 753765 - DNA, 25 bp, Homo sapien
tccataatcctgtatgcgcgggcaa

SEQ ID NO: 753766 - DNA, 25 bp, Homo sapien
ctacaggacgtttggcccagggtca

SEQ ID NO: 753767 - DNA, 25 bp, Homo sapien
cagcaggcggccatatatttcttcc

SEQ ID NO: 753768 - DNA, 25 bp, Homo sapien
gattctatttctaccaaggatccac

SEQ ID NO: 753769 - DNA, 25 bp, Homo sapien
cttctacacccttcttagtggaggg

SEQ ID NO: 753770 - DNA, 25 bp, Homo sapien
ccacgtggtagcagagcttcggagt

SEQ ID NO: 753771 - DNA, 25 bp, Homo sapien
agggccacgtggtagcagagcttcg

SEQ ID NO: 753772 - DNA, 25 bp, Homo sapien
tcgctctcattccaaccatgctcct

SEQ ID NO: 753773 - DNA, 25 bp, Homo sapien
gctgcttagctgattgatagacgga

SEQ ID NO: 753774 - DNA, 25 bp, Homo sapien
tgcaggccgattgtgtgtgctgaca

SEQ ID NO: 753775 - DNA, 25 bp, Homo sapien
agggccatgctctgcagttctgatc

SEQ ID NO: 753776 - DNA, 25 bp, Homo sapien
catgaagggccctgttctagccagg

SEQ ID NO: 753777 - DNA, 25 bp, Homo sapien
tggaagggtatgaagcccagctgaa

SEQ ID NO: 753778 - DNA, 25 bp, Homo sapien
tcagcgggaccatgcgctaatgaag

SEQ ID NO: 753779 - DNA, 25 bp, Homo sapien
cttggggtggctttctttgctggct

SEQ ID NO: 753780 - DNA, 25 bp, Homo sapien
gaagcccagctgaaataggctcagc

SEQ ID NO: 753781 - DNA, 25 bp, Homo sapien
tcaagtgttctagctaatgaatact

SEQ ID NO: 753782 - DNA, 25 bp, Homo sapien
caagtgttctagctaatgaatactt

SEQ ID NO: 753783 - DNA, 25 bp, Homo sapien
aagtgttctagctaatgaatactta

SEQ ID NO: 753784 - DNA, 25 bp, Homo sapien
gcaagtgattccatagctcaggaat

SEQ ID NO: 753785 - DNA, 25 bp, Homo sapien
agtgattccatagctcaggaattca

SEQ ID NO: 753786 - DNA, 25 bp, Homo sapien
aaagcaagtgattccatagctcagg

SEQ ID NO: 753787 - DNA, 25 bp, Homo sapien
gattccatagctcaggaattcatac

SEQ ID NO: 753788 - DNA, 25 bp, Homo sapien
tatgaagaattgagtggaaagtgtg

SEQ ID NO: 753789 - DNA, 25 bp, Homo sapien
tttggggaaacgtccagcagcttgg

SEQ ID NO: 753790 - DNA, 25 bp, Homo sapien
cagcattgttgtggcaaagtccagt

SEQ ID NO: 753791 - DNA, 25 bp, Homo sapien
ggtaaaatgttgtggaagagatcag

SEQ ID NO: 753792 - DNA, 25 bp, Homo sapien
actggaacatcgacttctgtcatca

SEQ ID NO: 753793 - DNA, 25 bp, Homo sapien
catcgacttctgtcatcagcaggat

SEQ ID NO: 753794 - DNA, 25 bp, Homo sapien
agtgactggaacatcgacttctgtc

SEQ ID NO: 753795 - DNA, 25 bp, Homo sapien
cttctgtcatcagcaggattgggct

SEQ ID NO: 753796 - DNA, 25 bp, Homo sapien
tggactggagcatactgagagatgt

SEQ ID NO: 753797 - DNA, 25 bp, Homo sapien
atttcttgtcaaatttggactggag

SEQ ID NO: 753798 - DNA, 25 bp, Homo sapien
aatttggactggagcatactgagag

SEQ ID NO: 753799 - DNA, 25 bp, Homo sapien
tgtcaaatttggactggagcatact

SEQ ID NO: 753800 - DNA, 25 bp, Homo sapien
tctcccctaccacctgttctagatg

SEQ ID NO: 753801 - DNA, 25 bp, Homo sapien
cacctgttctagatgactctcattc

SEQ ID NO: 753802 - DNA, 25 bp, Homo sapien
cctaccacctgttctagatgactct

SEQ ID NO: 753803 - DNA, 25 bp, Homo sapien
tgttctagatgactctcattcttga

SEQ ID NO: 753804 - DNA, 25 bp, Homo sapien
tagtgcattcacctccgtctaggaa

SEQ ID NO: 753805 - DNA, 25 bp, Homo sapien
aacaacccgggcagctggatgaatg

SEQ ID NO: 753806 - DNA, 25 bp, Homo sapien
gaaagactagtcatgggtgcagcct

SEQ ID NO: 753807 - DNA, 25 bp, Homo sapien
gaatcaagtctttgtgtccccagaa

SEQ ID NO: 753808 - DNA, 25 bp, Homo sapien
atcatcatggagggctaaagacact

SEQ ID NO: 753809 - DNA, 25 bp, Homo sapien
tcatggagggctaaagacacttctt

SEQ ID NO: 753810 - DNA, 25 bp, Homo sapien
catggagggctaaagacacttctta

SEQ ID NO: 753811 - DNA, 25 bp, Homo sapien
catcatggagggctaaagacacttc

SEQ ID NO: 753812 - DNA, 25 bp, Homo sapien
gttcagcgggagcaccggagcccat

SEQ ID NO: 753813 - DNA, 25 bp, Homo sapien
cgtccctgttcagcgggagcaccgg

SEQ ID NO: 753814 - DNA, 25 bp, Homo sapien
ccctgttcagcgggagcaccggagc

SEQ ID NO: 753815 - DNA, 25 bp, Homo sapien
cctgttcagcgggagcaccggagcc

SEQ ID NO: 753816 - DNA, 25 bp, Homo sapien
gcactggcaggagtgaaaactcggg

SEQ ID NO: 753817 - DNA, 25 bp, Homo sapien
gaaggaggttgacaggatgtacata

SEQ ID NO: 753818 - DNA, 25 bp, Homo sapien
gacaggatgtacataaggcactggc

SEQ ID NO: 753819 - DNA, 25 bp, Homo sapien
aacaccccatgaaggagtctgggct

SEQ ID NO: 753820 - DNA, 25 bp, Homo sapien
agcacacttattctgcctggctggt

SEQ ID NO: 753821 - DNA, 25 bp, Homo sapien
ttcagatttacagtcacctacagag

SEQ ID NO: 753822 - DNA, 25 bp, Homo sapien
tcagggttagatgtgaccagcatcc

SEQ ID NO: 753823 - DNA, 25 bp, Homo sapien
acagtgcccaggttcttcgttcaga

SEQ ID NO: 753824 - DNA, 25 bp, Homo sapien
ggacacagtgtgaggctgcggacaa

SEQ ID NO: 753825 - DNA, 25 bp, Homo sapien
cagtgtgaggctgcggacaagatca

SEQ ID NO: 753826 - DNA, 25 bp, Homo sapien
tgaggctgcggacaagatcaccagt

SEQ ID NO: 753827 - DNA, 25 bp, Homo sapien
tgtgaggctgcggacaagatcacca

SEQ ID NO: 753828 - DNA, 25 bp, Homo sapien
ccagcaggtctgtaccggggttttg

SEQ ID NO: 753829 - DNA, 25 bp, Homo sapien
ctccagcaggtctgtaccggggttt

SEQ ID NO: 753830 - DNA, 25 bp, Homo sapien
cagcaggtctgtaccggggttttga

SEQ ID NO: 753831 - DNA, 25 bp, Homo sapien
gctttaagagactcagctgccacca

SEQ ID NO: 753832 - DNA, 25 bp, Homo sapien
tatctgatttaagcagagctttaag

SEQ ID NO: 753833 - DNA, 25 bp, Homo sapien
ctgccaccacaatcccccatacaaa

SEQ ID NO: 753834 - DNA, 25 bp, Homo sapien
tttaagcagagctttaagagactca

SEQ ID NO: 753835 - DNA, 25 bp, Homo sapien
gaaattccagggtcccgacatgatc

SEQ ID NO: 753836 - DNA, 25 bp, Homo sapien
agcccttcagggcttgcaagagcca

SEQ ID NO: 753837 - DNA, 25 bp, Homo sapien
gacatgatccatgctcagaagttgg

SEQ ID NO: 753838 - DNA, 25 bp, Homo sapien
aaacgcgctgcggaggtgtgattca

SEQ ID NO: 753839 - DNA, 25 bp, Homo sapien
aaatacatttaagtattgtaggcat

SEQ ID NO: 753840 - DNA, 25 bp, Homo sapien
tttaaaagaaacacatgtaaataca

SEQ ID NO: 753841 - DNA, 25 bp, Homo sapien
catgtaaatacatttaagtattgta

SEQ ID NO: 753842 - DNA, 25 bp, Homo sapien
tgtaaatacatttaagtattgtagg

SEQ ID NO: 753843 - DNA, 25 bp, Homo sapien
cattttagagcgagaggaccgcctc

SEQ ID NO: 753844 - DNA, 25 bp, Homo sapien
ttttgggatctctgtaggctaggca

SEQ ID NO: 753845 - DNA, 25 bp, Homo sapien
tcttgtcaatgagagggaccagttg

SEQ ID NO: 753846 - DNA, 25 bp, Homo sapien
gtgttgcccaatcagcactccaagg

SEQ ID NO: 753847 - DNA, 25 bp, Homo sapien
agcaatgtgacgagcagtaggcctt

SEQ ID NO: 753848 - DNA, 25 bp, Homo sapien
atgtgacgagcagtaggccttcagg

SEQ ID NO: 753849 - DNA, 25 bp, Homo sapien
tcccttagcaatgtgacgagcagta

SEQ ID NO: 753850 - DNA, 25 bp, Homo sapien
taagaccctcccttagcaatgtgac

SEQ ID NO: 753851 - DNA, 25 bp, Homo sapien
ctacaggttgaaaagcatgccgaag

SEQ ID NO: 753852 - DNA, 25 bp, Homo sapien
caaacctggaaaagccctgggcaat

SEQ ID NO: 753853 - DNA, 25 bp, Homo sapien
tgctttccaccttggtttggtagga

SEQ ID NO: 753854 - DNA, 25 bp, Homo sapien
tggaaaagccctgggcaatgggcct

SEQ ID NO: 753855 - DNA, 25 bp, Homo sapien
caaagacaccccacatgatgacatg

SEQ ID NO: 753856 - DNA, 25 bp, Homo sapien
tctcttaaaataccggtctcgtcat

SEQ ID NO: 753857 - DNA, 25 bp, Homo sapien
ccttgccttaatcgcttcttttggg

SEQ ID NO: 753858 - DNA, 25 bp, Homo sapien
ggctggcaagctaccactggcaaag

SEQ ID NO: 753859 - DNA, 25 bp, Homo sapien
ttcttgccggacactttgtcacaca

SEQ ID NO: 753860 - DNA, 25 bp, Homo sapien
ttttcttgccggacactttgtcaca

SEQ ID NO: 753861 - DNA, 25 bp, Homo sapien
ttgccggacactttgtcacacatcc

SEQ ID NO: 753862 - DNA, 25 bp, Homo sapien
tttttcttgccggacactttgtcac

SEQ ID NO: 753863 - DNA, 25 bp, Homo sapien
tcaggtgtgcctccaggtcagtgtg

SEQ ID NO: 753864 - DNA, 25 bp, Homo sapien
cagtgtggtcctcgggtttcctctc

SEQ ID NO: 753865 - DNA, 25 bp, Homo sapien
aggtgtgcctccaggtcagtgtggt

SEQ ID NO: 753866 - DNA, 25 bp, Homo sapien
caggtcagtgtggtcctcgggtttc

SEQ ID NO: 753867 - DNA, 25 bp, Homo sapien
aactatgctcctgatacttgtactg

SEQ ID NO: 753868 - DNA, 25 bp, Homo sapien
gggacacatcttgactttttgctaa

SEQ ID NO: 753869 - DNA, 25 bp, Homo sapien
ctgggaccaggggacacatcttgac

SEQ ID NO: 753870 - DNA, 25 bp, Homo sapien
gatacttgtactgcagttgtgttac

SEQ ID NO: 753871 - DNA, 25 bp, Homo sapien
cacatccatcatgggtggcaaggac

SEQ ID NO: 753872 - DNA, 25 bp, Homo sapien
tggcaaggaccttaatacctatagc

SEQ ID NO: 753873 - DNA, 25 bp, Homo sapien
gccatgttcccacatctatgacgga

SEQ ID NO: 753874 - DNA, 25 bp, Homo sapien
gataaaccaggaaggagcataacgc

SEQ ID NO: 753875 - DNA, 25 bp, Homo sapien
gcatctggattggtgaacggcttaa

SEQ ID NO: 753876 - DNA, 25 bp, Homo sapien
tcctctgacgtagagcaagaaaaca

SEQ ID NO: 753877 - DNA, 25 bp, Homo sapien
gacgtagagcaagaaaacatcaata

SEQ ID NO: 753878 - DNA, 25 bp, Homo sapien
tggattggtgaacggcttaactgca

SEQ ID NO: 753879 - DNA, 25 bp, Homo sapien
cacagagaggatgctgtgggatcca

SEQ ID NO: 753880 - DNA, 25 bp, Homo sapien
gatgctgtgggatccaggaacgggg

SEQ ID NO: 753881 - DNA, 25 bp, Homo sapien
ctgaacatatccagtccactggggc

SEQ ID NO: 753882 - DNA, 25 bp, Homo sapien
gctactgtgggtcctgatggccaca

SEQ ID NO: 753883 - DNA, 25 bp, Homo sapien
tagcagctagaagaaaacgcttcat

SEQ ID NO: 753884 - DNA, 25 bp, Homo sapien
tggtggccactacagaaattgcagg

SEQ ID NO: 753885 - DNA, 25 bp, Homo sapien
tgtttactcatctgctgttgatcca

SEQ ID NO: 753886 - DNA, 25 bp, Homo sapien
catgcatgtccgatctagggtgctg

SEQ ID NO: 753887 - DNA, 25 bp, Homo sapien
ggacagcccatgtggtacccacagc

SEQ ID NO: 753888 - DNA, 25 bp, Homo sapien
caacagctcttgatgagatgtgcag

SEQ ID NO: 753889 - DNA, 25 bp, Homo sapien
tacaagccaacattagtggatcagc

SEQ ID NO: 753890 - DNA, 25 bp, Homo sapien
gatttacaccctcaaagactggaca

SEQ ID NO: 753891 - DNA, 25 bp, Homo sapien
ttctgttgctggcttcttatgaata

SEQ ID NO: 753892 - DNA, 25 bp, Homo sapien
tggagtggagcagccttcctgcgca

SEQ ID NO: 753893 - DNA, 25 bp, Homo sapien
agcagaaggtcgagggccagccctt

SEQ ID NO: 753894 - DNA, 25 bp, Homo sapien
caggatcaccgtccactgtgtgttc

SEQ ID NO: 753895 - DNA, 25 bp, Homo sapien
ctctgatggcagtgttctgagagca

SEQ ID NO: 753896 - DNA, 25 bp, Homo sapien
tctgatggcagtgttctgagagcag

SEQ ID NO: 753897 - DNA, 25 bp, Homo sapien
atctgttaagtgatactgtgtcaga

SEQ ID NO: 753898 - DNA, 25 bp, Homo sapien
ttaagtgatactgtgtcagagctga

SEQ ID NO: 753899 - DNA, 25 bp, Homo sapien
gaaagaaatggatgtagacactagc

SEQ ID NO: 753900 - DNA, 25 bp, Homo sapien
caaagtctgtcctgtgccattgaag

SEQ ID NO: 753901 - DNA, 25 bp, Homo sapien
tttgtgtaatactgctttacagaca

SEQ ID NO: 753902 - DNA, 25 bp, Homo sapien
gatatctttaatcagcaaagtctgt

SEQ ID NO: 753903 - DNA, 25 bp, Homo sapien
aagatctgggccatctaacactttc

SEQ ID NO: 753904 - DNA, 25 bp, Homo sapien
taacactttctttctactgatctta

SEQ ID NO: 753905 - DNA, 25 bp, Homo sapien
gactgtgttagcacgttgcttggga

SEQ ID NO: 753906 - DNA, 25 bp, Homo sapien
ttagcacgttgcttgggaagatctg

SEQ ID NO: 753907 - DNA, 25 bp, Homo sapien
tgtgaggaacactggtctctggaag

SEQ ID NO: 753908 - DNA, 25 bp, Homo sapien
tcaaagtgtattgtgaggaacactg

SEQ ID NO: 753909 - DNA, 25 bp, Homo sapien
tgtattgtgaggaacactggtctct

SEQ ID NO: 753910 - DNA, 25 bp, Homo sapien
aggaacactggtctctggaagctcc

SEQ ID NO: 753911 - DNA, 25 bp, Homo sapien
gtgtgttattgccattcacgttcat

SEQ ID NO: 753912 - DNA, 25 bp, Homo sapien
ctgatgagccagatctcatgtaaga

SEQ ID NO: 753913 - DNA, 25 bp, Homo sapien
ctcatgtaagagtgtgttattgcca

SEQ ID NO: 753914 - DNA, 25 bp, Homo sapien
gccagatctcatgtaagagtgtgtt

SEQ ID NO: 753915 - DNA, 25 bp, Homo sapien
tgttgccaacactgatgagctcagc

SEQ ID NO: 753916 - DNA, 25 bp, Homo sapien
tttcgtggatcatcagccctgtctg

SEQ ID NO: 753917 - DNA, 25 bp, Homo sapien
tctgagtgccaagatctccagcgtc

SEQ ID NO: 753918 - DNA, 25 bp, Homo sapien
tcagcctgatgatgagagggcaagt

SEQ ID NO: 753919 - DNA, 25 bp, Homo sapien
cattctagagatgagggcccctgaa

SEQ ID NO: 753920 - DNA, 25 bp, Homo sapien
tgagcaagccaaagggtttcatgga

SEQ ID NO: 753921 - DNA, 25 bp, Homo sapien
tctacctctcagtgttggagtgacc

SEQ ID NO: 753922 - DNA, 25 bp, Homo sapien
gaaaaggtcttgagaggcccctcac

SEQ ID NO: 753923 - DNA, 25 bp, Homo sapien
tttctttgagtacaatgcttccact

SEQ ID NO: 753924 - DNA, 25 bp, Homo sapien
ctttgagtacaatgcttccactcat

SEQ ID NO: 753925 - DNA, 25 bp, Homo sapien
ttttctttgagtacaatgcttccac

SEQ ID NO: 753926 - DNA, 25 bp, Homo sapien
ttttttctttgagtacaatgcttcc

SEQ ID NO: 753927 - DNA, 25 bp, Homo sapien
cacggtccaggagcagatattgact

SEQ ID NO: 753928 - DNA, 25 bp, Homo sapien
cggaagccgccgactctatagaggc

SEQ ID NO: 753929 - DNA, 25 bp, Homo sapien
tattgactgaggtattcacgttcac

SEQ ID NO: 753930 - DNA, 25 bp, Homo sapien
tcacgttcactgaaccggaagccgc

SEQ ID NO: 753931 - DNA, 25 bp, Homo sapien
cttccatcctcctgtaccaattgat

SEQ ID NO: 753932 - DNA, 25 bp, Homo sapien
tcctgtaccaattgatgccagacat

SEQ ID NO: 753933 - DNA, 25 bp, Homo sapien
gagggccgttaccattacgatccat

SEQ ID NO: 753934 - DNA, 25 bp, Homo sapien
cagacatcatgagggccgttaccat

SEQ ID NO: 753935 - DNA, 25 bp, Homo sapien
catttccacccagttgggatggcgg

SEQ ID NO: 753936 - DNA, 25 bp, Homo sapien
ggtggtcgatcagaacctgtccgct

SEQ ID NO: 753937 - DNA, 25 bp, Homo sapien
cactagggtgaaataactggaagcc

SEQ ID NO: 753938 - DNA, 25 bp, Homo sapien
gccccattggaattgcctttagaga

SEQ ID NO: 753939 - DNA, 25 bp, Homo sapien
tgggtacgactttatgaatgctgaa

SEQ ID NO: 753940 - DNA, 25 bp, Homo sapien
tgcatgtgcgatgccctgaggagat

SEQ ID NO: 753941 - DNA, 25 bp, Homo sapien
gacatagttgtcagtatccctcaaa

SEQ ID NO: 753942 - DNA, 25 bp, Homo sapien
tcaaaacagccgcataaactggtgc

SEQ ID NO: 753943 - DNA, 25 bp, Homo sapien
tatgataaataggaggtagccaggt

SEQ ID NO: 753944 - DNA, 25 bp, Homo sapien
gcagttttcgcctgactttggagaa

SEQ ID NO: 753945 - DNA, 25 bp, Homo sapien
gacagtagagtacacagcacttagc

SEQ ID NO: 753946 - DNA, 25 bp, Homo sapien
gcccgttagtttgctgacagtagag

SEQ ID NO: 753947 - DNA, 25 bp, Homo sapien
cataggcaggaattgcaaggttgtc

SEQ ID NO: 753948 - DNA, 25 bp, Homo sapien
ctcatttctggtgccgtgtcatcca

SEQ ID NO: 753949 - DNA, 25 bp, Homo sapien
caaggttgtctgagttagtaagtca

SEQ ID NO: 753950 - DNA, 25 bp, Homo sapien
tcttggagtcagtccaaatggcctc

SEQ ID NO: 753951 - DNA, 25 bp, Homo sapien
tttcttgtgggaaacacatgaccat

SEQ ID NO: 753952 - DNA, 25 bp, Homo sapien
ttgtcagttcacttgcagaggaaca

SEQ ID NO: 753953 - DNA, 25 bp, Homo sapien
actgtgaagacaagggtaaacctct

SEQ ID NO: 753954 - DNA, 25 bp, Homo sapien
cctcttgatatgctgagcctgagcc

SEQ ID NO: 753955 - DNA, 25 bp, Homo sapien
ggttgccgcctccaaagcaggattg

SEQ ID NO: 753956 - DNA, 25 bp, Homo sapien
catgaaggtacctgggtttccctgc

SEQ ID NO: 753957 - DNA, 25 bp, Homo sapien
aaggagcactcgatcccatggagcc

SEQ ID NO: 753958 - DNA, 25 bp, Homo sapien
gggacaccataagccatgaagtgca

SEQ ID NO: 753959 - DNA, 25 bp, Homo sapien
ctgaggggacaccataagccatgaa

SEQ ID NO: 753960 - DNA, 25 bp, Homo sapien
gagggaatttgtcctcaactgaggg

SEQ ID NO: 753961 - DNA, 25 bp, Homo sapien
gctgtgttggtataagctctgtatt

SEQ ID NO: 753962 - DNA, 25 bp, Homo sapien
gtgttggtataagctctgtattcag

SEQ ID NO: 753963 - DNA, 25 bp, Homo sapien
ctgtgttggtataagctctgtattc

SEQ ID NO: 753964 - DNA, 25 bp, Homo sapien
ggctgtgttggtataagctctgtat

SEQ ID NO: 753965 - DNA, 25 bp, Homo sapien
tattgagttcctgctgggtatacac

SEQ ID NO: 753966 - DNA, 25 bp, Homo sapien
tatacacggataagtgggcctcttc

SEQ ID NO: 753967 - DNA, 25 bp, Homo sapien
tgggtatacacggataagtgggcct

SEQ ID NO: 753968 - DNA, 25 bp, Homo sapien
cctgctgggtatacacggataagtg

SEQ ID NO: 753969 - DNA, 25 bp, Homo sapien
gcagcctggtcaggctggaagctgc

SEQ ID NO: 753970 - DNA, 25 bp, Homo sapien
gctcactctgaacatgggaagcatg

SEQ ID NO: 753971 - DNA, 25 bp, Homo sapien
ctgggctcactctgaacatgggaag

SEQ ID NO: 753972 - DNA, 25 bp, Homo sapien
actgcacagggaggattccaaagag

SEQ ID NO: 753973 - DNA, 25 bp, Homo sapien
aagtggacggtggacttgagaaggc

SEQ ID NO: 753974 - DNA, 25 bp, Homo sapien
gcaaagtggacggtggacttgagaa

SEQ ID NO: 753975 - DNA, 25 bp, Homo sapien
aaagtggacggtggacttgagaagg

SEQ ID NO: 753976 - DNA, 25 bp, Homo sapien
caaagtggacggtggacttgagaag

SEQ ID NO: 753977 - DNA, 25 bp, Homo sapien
actagtgggaacttcagagagtgga

SEQ ID NO: 753978 - DNA, 25 bp, Homo sapien
aaataggaagccagatgagattgcg

SEQ ID NO: 753979 - DNA, 25 bp, Homo sapien
tgcacatccagcaatgagtatgagg

SEQ ID NO: 753980 - DNA, 25 bp, Homo sapien
tagttctgaaccagcctgcaggcag

SEQ ID NO: 753981 - DNA, 25 bp, Homo sapien
cagtggcctaggctcagtgaaagga

SEQ ID NO: 753982 - DNA, 25 bp, Homo sapien
cagtcctaaaacagaacgctggcaa

SEQ ID NO: 753983 - DNA, 25 bp, Homo sapien
tcttgttagacaaggtaagcagctg

SEQ ID NO: 753984 - DNA, 25 bp, Homo sapien
tgtctgagcacattagcttgtctgg

SEQ ID NO: 753985 - DNA, 25 bp, Homo sapien
cttccggctgttgcttaaattaata

SEQ ID NO: 753986 - DNA, 25 bp, Homo sapien
cctgtgtgtttttctcaggcacaac

SEQ ID NO: 753987 - DNA, 25 bp, Homo sapien
tcaggcacaacttccggctgttgct

SEQ ID NO: 753988 - DNA, 25 bp, Homo sapien
cacaacttccggctgttgcttaaat

SEQ ID NO: 753989 - DNA, 25 bp, Homo sapien
ctgacagcacaccacgggctttgcg

SEQ ID NO: 753990 - DNA, 25 bp, Homo sapien
ctttgttgggaacagcgttgtctcc

SEQ ID NO: 753991 - DNA, 25 bp, Homo sapien
gtgttttcagtgtgccccaagtctt

SEQ ID NO: 753992 - DNA, 25 bp, Homo sapien
gctttgcgctcctgccctggttctt

SEQ ID NO: 753993 - DNA, 25 bp, Homo sapien
cagggtctctcgcaaagaagtgccc

SEQ ID NO: 753994 - DNA, 25 bp, Homo sapien
agggtctctcgcaaagaagtgccca

SEQ ID NO: 753995 - DNA, 25 bp, Homo sapien
gagcaactggcttattaggcttttg

SEQ ID NO: 753996 - DNA, 25 bp, Homo sapien
cttgtgggtggctttgtgactcctc

SEQ ID NO: 753997 - DNA, 25 bp, Homo sapien
gggctccttggagcaactggcttat

SEQ ID NO: 753998 - DNA, 25 bp, Homo sapien
tttgtgactcctcagtccacgtgct

SEQ ID NO: 753999 - DNA, 25 bp, Homo sapien
cctggctccggaagctgtgcatctt

SEQ ID NO: 754000 - DNA, 25 bp, Homo sapien
gagtgcaccacagtgttcaccctgg

SEQ ID NO: 754001 - DNA, 25 bp, Homo sapien
tatttgcagccgaacatcccggagt

SEQ ID NO: 754002 - DNA, 25 bp, Homo sapien
attctggattctagggaccctgact

SEQ ID NO: 754003 - DNA, 25 bp, Homo sapien
cagagtcaaaacatccacacagcac

SEQ ID NO: 754004 - DNA, 25 bp, Homo sapien
ggaccctgaacacccgctcttggag

SEQ ID NO: 754005 - DNA, 25 bp, Homo sapien
tgggcagcaaaggtgtgaccgcttt

SEQ ID NO: 754006 - DNA, 25 bp, Homo sapien
cttggaggatcttagcagttctcct

SEQ ID NO: 754007 - DNA, 25 bp, Homo sapien
gaccgctttgaatgcgtccttcagg

SEQ ID NO: 754008 - DNA, 25 bp, Homo sapien
tatctttgatggcaccaggcccttg

SEQ ID NO: 754009 - DNA, 25 bp, Homo sapien
tgatttccatggcagagttctctgg

SEQ ID NO: 754010 - DNA, 25 bp, Homo sapien
tgctgcttactctccatgctctgac

SEQ ID NO: 754011 - DNA, 25 bp, Homo sapien
gctctgtggctggagtctggtttca

SEQ ID NO: 754012 - DNA, 25 bp, Homo sapien
atcccttaggctggccgcagagcaa

SEQ ID NO: 754013 - DNA, 25 bp, Homo sapien
gcacagcctccaagtgtttccccaa

SEQ ID NO: 754014 - DNA, 25 bp, Homo sapien
caacttttaggcaacagtcttttga

SEQ ID NO: 754015 - DNA, 25 bp, Homo sapien
caatcacatccaacttttaggcaac

SEQ ID NO: 754016 - DNA, 25 bp, Homo sapien
tgatttcccactgcatgcctagtct

SEQ ID NO: 754017 - DNA, 25 bp, Homo sapien
gatttcccactgcatgcctagtctg

SEQ ID NO: 754018 - DNA, 25 bp, Homo sapien
atttcccactgcatgcctagtctgg

SEQ ID NO: 754019 - DNA, 25 bp, Homo sapien
agtccctttatctgtgctttggctg

SEQ ID NO: 754020 - DNA, 25 bp, Homo sapien
ccgggcagctcccaagtctttgttt

SEQ ID NO: 754021 - DNA, 25 bp, Homo sapien
gccacatgctgctggactttcacag

SEQ ID NO: 754022 - DNA, 25 bp, Homo sapien
ctccttccacagcatagaaggtggc

SEQ ID NO: 754023 - DNA, 25 bp, Homo sapien
gctgggctgttgaggttttcctcct

SEQ ID NO: 754024 - DNA, 25 bp, Homo sapien
gccagggctattgggttacatgcaa

SEQ ID NO: 754025 - DNA, 25 bp, Homo sapien
gattccaacccttgcaccaacagga

SEQ ID NO: 754026 - DNA, 25 bp, Homo sapien
tgtacagctgctcggtggctgggct

SEQ ID NO: 754027 - DNA, 25 bp, Homo sapien
cttgtttacgagagacagagctgcc

SEQ ID NO: 754028 - DNA, 25 bp, Homo sapien
taaaatcagtcttatgtgactgcag

SEQ ID NO: 754029 - DNA, 25 bp, Homo sapien
tctttgcttgaggaaaattgatttc

SEQ ID NO: 754030 - DNA, 25 bp, Homo sapien
gatgtgtatggagagctggttcccc

SEQ ID NO: 754031 - DNA, 25 bp, Homo sapien
agagattaggagcaccttgcagcct

SEQ ID NO: 754032 - DNA, 25 bp, Homo sapien
taggagcaccttgcagcctagattt

SEQ ID NO: 754033 - DNA, 25 bp, Homo sapien
gttgtgactagggttcctattgcag

SEQ ID NO: 754034 - DNA, 25 bp, Homo sapien
tcatgtggccataagatctgttgtg

SEQ ID NO: 754035 - DNA, 25 bp, Homo sapien
cttccctccacttttctcatctgcc

SEQ ID NO: 754036 - DNA, 25 bp, Homo sapien
gctctgttctctggcccctctgcat

SEQ ID NO: 754037 - DNA, 25 bp, Homo sapien
tgccagctcctgctctgttctctgg

SEQ ID NO: 754038 - DNA, 25 bp, Homo sapien
tccctccacttttctcatctgccag

SEQ ID NO: 754039 - DNA, 25 bp, Homo sapien
gtggtggtgtgcgggctttggtcgg

SEQ ID NO: 754040 - DNA, 25 bp, Homo sapien
tgtggtggtgtgcgggctttggtcg

SEQ ID NO: 754041 - DNA, 25 bp, Homo sapien
tcttcacactgctccgtacttctgt

SEQ ID NO: 754042 - DNA, 25 bp, Homo sapien
atgtggtggtgtgcgggctttggtc

SEQ ID NO: 754043 - DNA, 25 bp, Homo sapien
caacaacagcgacgggacgtaggtg

SEQ ID NO: 754044 - DNA, 25 bp, Homo sapien
atgctggcaacaacagcgacgggac

SEQ ID NO: 754045 - DNA, 25 bp, Homo sapien
ctggcaacaacagcgacgggacgta

SEQ ID NO: 754046 - DNA, 25 bp, Homo sapien
gcaacaacagcgacgggacgtaggt

SEQ ID NO: 754047 - DNA, 25 bp, Homo sapien
agacaactttgtggatcttctctgt

SEQ ID NO: 754048 - DNA, 25 bp, Homo sapien
gcagacaactttgtggatcttctct

SEQ ID NO: 754049 - DNA, 25 bp, Homo sapien
ggtttagcagacaactttgtggatc

SEQ ID NO: 754050 - DNA, 25 bp, Homo sapien
tagcagacaactttgtggatcttct

SEQ ID NO: 754051 - DNA, 25 bp, Homo sapien
ggcctggtcttttttggcaactcca

SEQ ID NO: 754052 - DNA, 25 bp, Homo sapien
agctttctgggcctggtcttttttg

SEQ ID NO: 754053 - DNA, 25 bp, Homo sapien
ggcaactccattttctgtagggtta

SEQ ID NO: 754054 - DNA, 25 bp, Homo sapien
tgtagggttattcccctccttgcca

SEQ ID NO: 754055 - DNA, 25 bp, Homo sapien
attagggacatatatcctgtcctcc

SEQ ID NO: 754056 - DNA, 25 bp, Homo sapien
tccctcccacaaggtttttgtgcca

SEQ ID NO: 754057 - DNA, 25 bp, Homo sapien
tacacagtcccacaataagtgtcgt

SEQ ID NO: 754058 - DNA, 25 bp, Homo sapien
aataagtgtcgtccacattttctgc

SEQ ID NO: 754059 - DNA, 25 bp, Homo sapien
taaaacgagtaccataactggtaca

SEQ ID NO: 754060 - DNA, 25 bp, Homo sapien
gcaggtcagactctttacaaatttg

SEQ ID NO: 754061 - DNA, 25 bp, Homo sapien
cagcttctccggtgttggtttggtt

SEQ ID NO: 754062 - DNA, 25 bp, Homo sapien
ctcagcttctccggtgttggtttgg

SEQ ID NO: 754063 - DNA, 25 bp, Homo sapien
ttctgttgtcagcaactaaaaggta

SEQ ID NO: 754064 - DNA, 25 bp, Homo sapien
ttgctcagcttctccggtgttggtt

SEQ ID NO: 754065 - DNA, 25 bp, Homo sapien
gactgggagaagcttgaagaccacc

SEQ ID NO: 754066 - DNA, 25 bp, Homo sapien
tcttgtgcctgatgcgaccgtgagt

SEQ ID NO: 754067 - DNA, 25 bp, Homo sapien
gaaaagaccaagagagaccgcattt

SEQ ID NO: 754068 - DNA, 25 bp, Homo sapien
gagctgcattgcaagacaacttgga

SEQ ID NO: 754069 - DNA, 25 bp, Homo sapien
ttttgcagcagacttctgcctgttg

SEQ ID NO: 754070 - DNA, 25 bp, Homo sapien
gcagcagacttctgcctgttgccat

SEQ ID NO: 754071 - DNA, 25 bp, Homo sapien
ttgcagcagacttctgcctgttgcc

SEQ ID NO: 754072 - DNA, 25 bp, Homo sapien
atttttgcagcagacttctgcctgt

SEQ ID NO: 754073 - DNA, 25 bp, Homo sapien
gcctggggactgtgttgtaagtatt

SEQ ID NO: 754074 - DNA, 25 bp, Homo sapien
gagaagttggcgcaaagtagctagc

SEQ ID NO: 754075 - DNA, 25 bp, Homo sapien
gcaaagtagctagccagagcctggg

SEQ ID NO: 754076 - DNA, 25 bp, Homo sapien
tgtctgttctcttatactccgcatc

SEQ ID NO: 754077 - DNA, 25 bp, Homo sapien
tggtttatagcaactcttgttaagt

SEQ ID NO: 754078 - DNA, 25 bp, Homo sapien
ttggtttatagcaactcttgttaag

SEQ ID NO: 754079 - DNA, 25 bp, Homo sapien
tatagcaactcttgttaagtttgtc

SEQ ID NO: 754080 - DNA, 25 bp, Homo sapien
tttatagcaactcttgttaagtttg

SEQ ID NO: 754081 - DNA, 25 bp, Homo sapien
ctgagcggctagctggttggagaga

SEQ ID NO: 754082 - DNA, 25 bp, Homo sapien
gaggtctaggctccagcctttgtgt

SEQ ID NO: 754083 - DNA, 25 bp, Homo sapien
gaggagtcgctgtgcactcgcaaat

SEQ ID NO: 754084 - DNA, 25 bp, Homo sapien
gaacatgtttcactcggtccattga

SEQ ID NO: 754085 - DNA, 25 bp, Homo sapien
tattccgaaataccagaaataggac

SEQ ID NO: 754086 - DNA, 25 bp, Homo sapien
cactattattgcaagaagtattccg

SEQ ID NO: 754087 - DNA, 25 bp, Homo sapien
tgatcagggagactgcgagcacaat

SEQ ID NO: 754088 - DNA, 25 bp, Homo sapien
aataggacgtaagctctgatcaggg

SEQ ID NO: 754089 - DNA, 25 bp, Homo sapien
tcaagtgcatgctggatttggcaag

SEQ ID NO: 754090 - DNA, 25 bp, Homo sapien
tgttcagggcagtgttcaaccaggt

SEQ ID NO: 754091 - DNA, 25 bp, Homo sapien
gacctcgtcatcagtgttcagaagc

SEQ ID NO: 754092 - DNA, 25 bp, Homo sapien
tcaaccaggtcacagcaatcttcgc

SEQ ID NO: 754093 - DNA, 25 bp, Homo sapien
agaaaaatcagtaatgtgggccttg

SEQ ID NO: 754094 - DNA, 25 bp, Homo sapien
ctccccttagaaggtcagggttcat

SEQ ID NO: 754095 - DNA, 25 bp, Homo sapien
tgcgtcccttctcaggtagtttctc

SEQ ID NO: 754096 - DNA, 25 bp, Homo sapien
cctctgcgtcccttctcaggtagtt

SEQ ID NO: 754097 - DNA, 25 bp, Homo sapien
caatcccgctatttgtgcaagccat

SEQ ID NO: 754098 - DNA, 25 bp, Homo sapien
ttggcaatcccgctatttgtgcaag

SEQ ID NO: 754099 - DNA, 25 bp, Homo sapien
gggttggcaatcccgctatttgtgc

SEQ ID NO: 754100 - DNA, 25 bp, Homo sapien
cagactggggttggcaatcccgcta

SEQ ID NO: 754101 - DNA, 25 bp, Homo sapien
tttcacagggccattggagctcgct

SEQ ID NO: 754102 - DNA, 25 bp, Homo sapien
ttattccttgggagctcgcagccag

SEQ ID NO: 754103 - DNA, 25 bp, Homo sapien
tctaaaggcaatgctgagcgcatcc

SEQ ID NO: 754104 - DNA, 25 bp, Homo sapien
cacagtctctgcatgatagctgggc

SEQ ID NO: 754105 - DNA, 25 bp, Homo sapien
tccccagaaattgtccacttttcaa

SEQ ID NO: 754106 - DNA, 25 bp, Homo sapien
tgctgtccccagaaattgtccactt

SEQ ID NO: 754107 - DNA, 25 bp, Homo sapien
gctgtccccagaaattgtccacttt

SEQ ID NO: 754108 - DNA, 25 bp, Homo sapien
atctgctgtccccagaaattgtcca

SEQ ID NO: 754109 - DNA, 25 bp, Homo sapien
tcttgtgtgactaactcctcccaga

SEQ ID NO: 754110 - DNA, 25 bp, Homo sapien
gactcttgtgtgactaactcctccc

SEQ ID NO: 754111 - DNA, 25 bp, Homo sapien
gtgtgactaactcctcccagatcat

SEQ ID NO: 754112 - DNA, 25 bp, Homo sapien
tttggactcttgtgtgactaactcc

SEQ ID NO: 754113 - DNA, 25 bp, Homo sapien
catcttcctggaagaagatgtgtgt

SEQ ID NO: 754114 - DNA, 25 bp, Homo sapien
gcttcctatactcatcttcctggaa

SEQ ID NO: 754115 - DNA, 25 bp, Homo sapien
cctatactcatcttcctggaagaag

SEQ ID NO: 754116 - DNA, 25 bp, Homo sapien
caggcttcctatactcatcttcctg

SEQ ID NO: 754117 - DNA, 25 bp, Homo sapien
cccagccatctttgtagcccctgat

SEQ ID NO: 754118 - DNA, 25 bp, Homo sapien
tgtagcccctgataaggtttcattt

SEQ ID NO: 754119 - DNA, 25 bp, Homo sapien
tcatttcagaatggataggcgacat

SEQ ID NO: 754120 - DNA, 25 bp, Homo sapien
ggtttcatttcagaatggataggcg

SEQ ID NO: 754121 - DNA, 25 bp, Homo sapien
taaaacgagactgaaagatgtgaga

SEQ ID NO: 754122 - DNA, 25 bp, Homo sapien
ctaaaacgagactgaaagatgtgag

SEQ ID NO: 754123 - DNA, 25 bp, Homo sapien
tcatcattcgccaggcaggtggacc

SEQ ID NO: 754124 - DNA, 25 bp, Homo sapien
actgaataaatctgccgtcatggga

SEQ ID NO: 754125 - DNA, 25 bp, Homo sapien
tgaaaaggtctgactgtgccacaca

SEQ ID NO: 754126 - DNA, 25 bp, Homo sapien
tcccacatggttccgtaaatggtag

SEQ ID NO: 754127 - DNA, 25 bp, Homo sapien
gccctgtctgggtttagagctcgtg

SEQ ID NO: 754128 - DNA, 25 bp, Homo sapien
tgtgggctttggacctggccctgtc

SEQ ID NO: 754129 - DNA, 25 bp, Homo sapien
tctgcactcagtcttgatcacaggg

SEQ ID NO: 754130 - DNA, 25 bp, Homo sapien
ccaagttgggacactattcgtgtgc

SEQ ID NO: 754131 - DNA, 25 bp, Homo sapien
tcctttggaaggtaactgcagtcca

SEQ ID NO: 754132 - DNA, 25 bp, Homo sapien
ttttacatccacctagagagtcaga

SEQ ID NO: 754133 - DNA, 25 bp, Homo sapien
ttcttcacccggtttcatgagtgtg

SEQ ID NO: 754134 - DNA, 25 bp, Homo sapien
tctaagggcatatacttccaagcag

SEQ ID NO: 754135 - DNA, 25 bp, Homo sapien
tctgcttttccatgggcctttagga

SEQ ID NO: 754136 - DNA, 25 bp, Homo sapien
gcacactgatttgtatgagtcaacc

SEQ ID NO: 754137 - DNA, 25 bp, Homo sapien
gtagatttcatagccattcttggcc

SEQ ID NO: 754138 - DNA, 25 bp, Homo sapien
gacactgcctatctgggcacactga

SEQ ID NO: 754139 - DNA, 25 bp, Homo sapien
gagcatccctggtacaaacagactg

SEQ ID NO: 754140 - DNA, 25 bp, Homo sapien
agcatggagtgttgaaaataaattc

SEQ ID NO: 754141 - DNA, 25 bp, Homo sapien
aaagtgttgagaggcatttcagttc

SEQ ID NO: 754142 - DNA, 25 bp, Homo sapien
cagactgaatatgttaatggtaacc

SEQ ID NO: 754143 - DNA, 25 bp, Homo sapien
aagagccctctgaacgcaaccaggg

SEQ ID NO: 754144 - DNA, 25 bp, Homo sapien
ttggctgggccaactgtagagtttg

SEQ ID NO: 754145 - DNA, 25 bp, Homo sapien
aatattccgaggagcagggtgacca

SEQ ID NO: 754146 - DNA, 25 bp, Homo sapien
gggtgaccactctgatacgccttga

SEQ ID NO: 754147 - DNA, 25 bp, Homo sapien
tatttactacagaaagcctctggtt

SEQ ID NO: 754148 - DNA, 25 bp, Homo sapien
ttctatttactacagaaagcctctg

SEQ ID NO: 754149 - DNA, 25 bp, Homo sapien
tttactacagaaagcctctggttgt

SEQ ID NO: 754150 - DNA, 25 bp, Homo sapien
actacagaaagcctctggttgttga

SEQ ID NO: 754151 - DNA, 25 bp, Homo sapien
gatttccgcttgactgggtttgagg

SEQ ID NO: 754152 - DNA, 25 bp, Homo sapien
catcagtgtattagtgctgccttca

SEQ ID NO: 754153 - DNA, 25 bp, Homo sapien
gaaagtgtactctgtcgacttgtag

SEQ ID NO: 754154 - DNA, 25 bp, Homo sapien
aaattcattgtctgcccgggcccag

SEQ ID NO: 754155 - DNA, 25 bp, Homo sapien
ggactgtctgcgtctccaagtcaaa

SEQ ID NO: 754156 - DNA, 25 bp, Homo sapien
agggccggccgctgtgcaaatacat

SEQ ID NO: 754157 - DNA, 25 bp, Homo sapien
tgggtacagtgctcatggccctctg

SEQ ID NO: 754158 - DNA, 25 bp, Homo sapien
cgggtagattctggccttgggtaca

SEQ ID NO: 754159 - DNA, 25 bp, Homo sapien
gggacgaagtttgccgcagtggtgg

SEQ ID NO: 754160 - DNA, 25 bp, Homo sapien
gggttcagaagaactccgcgagccc

SEQ ID NO: 754161 - DNA, 25 bp, Homo sapien
acggcgctcgggatgggcggaagga

SEQ ID NO: 754162 - DNA, 25 bp, Homo sapien
tcctttgcgcggtggcgctctacgg

SEQ ID NO: 754163 - DNA, 25 bp, Homo sapien
acgggatggagtgaaaatggctgtc

SEQ ID NO: 754164 - DNA, 25 bp, Homo sapien
ccggagacggattggagaatttcac

SEQ ID NO: 754165 - DNA, 25 bp, Homo sapien
gagcaaggcttgcattcgctccctc

SEQ ID NO: 754166 - DNA, 25 bp, Homo sapien
agccgccggtgaggcgtccgagcaa

SEQ ID NO: 754167 - DNA, 25 bp, Homo sapien
tgagtcagaagggatcggattacac

SEQ ID NO: 754168 - DNA, 25 bp, Homo sapien
cctcccgcggttgaaccaaatcaga

SEQ ID NO: 754169 - DNA, 25 bp, Homo sapien
ccagaaagtcgattggatgccagga

SEQ ID NO: 754170 - DNA, 25 bp, Homo sapien
cggattacacgatccccgaaactga

SEQ ID NO: 754171 - DNA, 25 bp, Homo sapien
gatggggggcggtggtaatcagaga

SEQ ID NO: 754172 - DNA, 25 bp, Homo sapien
aaatgtaaaacaaggagatggggag

SEQ ID NO: 754173 - DNA, 25 bp, Homo sapien
gagccaaggatggggggcggtggta

SEQ ID NO: 754174 - DNA, 25 bp, Homo sapien
tgggaaaatgtaaaacaaggagatg

SEQ ID NO: 754175 - DNA, 25 bp, Homo sapien
catcatcccgcgagagggagtttcg

SEQ ID NO: 754176 - DNA, 25 bp, Homo sapien
tcgcttcgcggatttggccccgagg

SEQ ID NO: 754177 - DNA, 25 bp, Homo sapien
cagacgagtccggtggagagaaaaa

SEQ ID NO: 754178 - DNA, 25 bp, Homo sapien
tataaagtggcccatagggacagca

SEQ ID NO: 754179 - DNA, 25 bp, Homo sapien
ttagagaccaggctccaagcctggg

SEQ ID NO: 754180 - DNA, 25 bp, Homo sapien
aggctccaagcctggggtctttgtt

SEQ ID NO: 754181 - DNA, 25 bp, Homo sapien
gaccaggctccaagcctggggtctt

SEQ ID NO: 754182 - DNA, 25 bp, Homo sapien
caagcctggggtctttgtttttgtg

SEQ ID NO: 754183 - DNA, 25 bp, Homo sapien
tattcatgtgattgaggcagaagca

SEQ ID NO: 754184 - DNA, 25 bp, Homo sapien
aaacaattgtaactgatgctgggag

SEQ ID NO: 754185 - DNA, 25 bp, Homo sapien
tcctaacactatcccctagatgggc

SEQ ID NO: 754186 - DNA, 25 bp, Homo sapien
atcctgggaggtacgcgacctggca

SEQ ID NO: 754187 - DNA, 25 bp, Homo sapien
cattcagtgctccacgagttatcgg

SEQ ID NO: 754188 - DNA, 25 bp, Homo sapien
tttagaggttccagttcaatggaga

SEQ ID NO: 754189 - DNA, 25 bp, Homo sapien
tccacgagttatcggcattcccttt

SEQ ID NO: 754190 - DNA, 25 bp, Homo sapien
gagttatcggcattccctttttaca

SEQ ID NO: 754191 - DNA, 25 bp, Homo sapien
cctttactcccatagtaatacctgg

SEQ ID NO: 754192 - DNA, 25 bp, Homo sapien
catagtaatacctggcattcacatt

SEQ ID NO: 754193 - DNA, 25 bp, Homo sapien
tacctggcattcacattaatattgt

SEQ ID NO: 754194 - DNA, 25 bp, Homo sapien
tactcccatagtaatacctggcatt

SEQ ID NO: 754195 - DNA, 25 bp, Homo sapien
caacccaggaaggtagctgccagtc

SEQ ID NO: 754196 - DNA, 25 bp, Homo sapien
agtgacctgagcacatcgagacgga

SEQ ID NO: 754197 - DNA, 25 bp, Homo sapien
gatgcaatgccaaactcgcagagga

SEQ ID NO: 754198 - DNA, 25 bp, Homo sapien
tcgagacggacacagcacaaacgtg

SEQ ID NO: 754199 - DNA, 25 bp, Homo sapien
cctctgtcccctgctcatttgtcct

SEQ ID NO: 754200 - DNA, 25 bp, Homo sapien
ctctgtcccctgctcatttgtcctc

SEQ ID NO: 754201 - DNA, 25 bp, Homo sapien
cattttaaagtcgtaggctccagag

SEQ ID NO: 754202 - DNA, 25 bp, Homo sapien
taaaatgccagccaaacttaagagc

SEQ ID NO: 754203 - DNA, 25 bp, Homo sapien
tgagtagtgttcagctgcaagcgat

SEQ ID NO: 754204 - DNA, 25 bp, Homo sapien
ctgagttgtaggaccattttgagca

SEQ ID NO: 754205 - DNA, 25 bp, Homo sapien
tcagaagtgacgagaagagacagca

SEQ ID NO: 754206 - DNA, 25 bp, Homo sapien
tggaaaatactccaggctgcttccc

SEQ ID NO: 754207 - DNA, 25 bp, Homo sapien
gacagcatcccttgttggtgttgga

SEQ ID NO: 754208 - DNA, 25 bp, Homo sapien
tttttcagacatcaagtggttctgg

SEQ ID NO: 754209 - DNA, 25 bp, Homo sapien
gagtaccctcaaggtgtgcttcaaa

SEQ ID NO: 754210 - DNA, 25 bp, Homo sapien
caaatttagagtggaagttgcccag

SEQ ID NO: 754211 - DNA, 25 bp, Homo sapien
caaggtgtgcttcaaatttagagtg

SEQ ID NO: 754212 - DNA, 25 bp, Homo sapien
aacttcaacatgagtaccctcaagg

SEQ ID NO: 754213 - DNA, 25 bp, Homo sapien
agtctgttgaaggcctgcacacagg

SEQ ID NO: 754214 - DNA, 25 bp, Homo sapien
ctgttgaaggcctgcacacaggact

SEQ ID NO: 754215 - DNA, 25 bp, Homo sapien
tcagtctgttgaaggcctgcacaca

SEQ ID NO: 754216 - DNA, 25 bp, Homo sapien
tctgttgaaggcctgcacacaggac

SEQ ID NO: 754217 - DNA, 25 bp, Homo sapien
cacataaaaggtcccagtccaaata

SEQ ID NO: 754218 - DNA, 25 bp, Homo sapien
agcacataaaaggtcccagtccaaa

SEQ ID NO: 754219 - DNA, 25 bp, Homo sapien
gcacataaaaggtcccagtccaaat

SEQ ID NO: 754220 - DNA, 25 bp, Homo sapien
cagcacataaaaggtcccagtccaa

SEQ ID NO: 754221 - DNA, 25 bp, Homo sapien
tgatcctcacagaatcgtatttggg

SEQ ID NO: 754222 - DNA, 25 bp, Homo sapien
ttttctccattcttcgaatcccatc

SEQ ID NO: 754223 - DNA, 25 bp, Homo sapien
cagaatcgtatttgggtattctcca

SEQ ID NO: 754224 - DNA, 25 bp, Homo sapien
gcctgatgatcctcacagaatcgta

SEQ ID NO: 754225 - DNA, 25 bp, Homo sapien
gagcacgggacagcatcccatccag

SEQ ID NO: 754226 - DNA, 25 bp, Homo sapien
cctgttagcactggttaaggacccg

SEQ ID NO: 754227 - DNA, 25 bp, Homo sapien
ccgaagccgctaaaggagattcatt

SEQ ID NO: 754228 - DNA, 25 bp, Homo sapien
ccggtcatgcaacggcccaacagag

SEQ ID NO: 754229 - DNA, 25 bp, Homo sapien
ttttggtctccttgaatgatctgct

SEQ ID NO: 754230 - DNA, 25 bp, Homo sapien
tctgccgatgcctacattttggtct

SEQ ID NO: 754231 - DNA, 25 bp, Homo sapien
caaatactttcgatacttctgccga

SEQ ID NO: 754232 - DNA, 25 bp, Homo sapien
gaacaagattctttcgcattagctt

SEQ ID NO: 754233 - DNA, 25 bp, Homo sapien
tcaagatctgtctgagggtaggcct

SEQ ID NO: 754234 - DNA, 25 bp, Homo sapien
cccagagatctaaaaggatgctgac

SEQ ID NO: 754235 - DNA, 25 bp, Homo sapien
tctctccagaggattcttcgctttc

SEQ ID NO: 754236 - DNA, 25 bp, Homo sapien
gcttcaggtaattctaatctagccc

SEQ ID NO: 754237 - DNA, 25 bp, Homo sapien
tcaggggtgggtttatatgatccag

SEQ ID NO: 754238 - DNA, 25 bp, Homo sapien
tgtcaggggtgggtttatatgatcc

SEQ ID NO: 754239 - DNA, 25 bp, Homo sapien
gggtgggtttatatgatccaggagt

SEQ ID NO: 754240 - DNA, 25 bp, Homo sapien
gtgggtttatatgatccaggagtgg

SEQ ID NO: 754241 - DNA, 25 bp, Homo sapien
agagacgcaagcacactcggaagca

SEQ ID NO: 754242 - DNA, 25 bp, Homo sapien
tcctccctgtcccaataccagaaga

SEQ ID NO: 754243 - DNA, 25 bp, Homo sapien
acacacctctcagggcgcacagaga

SEQ ID NO: 754244 - DNA, 25 bp, Homo sapien
cacccaagaggggaggcgacacctt

SEQ ID NO: 754245 - DNA, 25 bp, Homo sapien
tgccaagtacgctcagggccagtgg

SEQ ID NO: 754246 - DNA, 25 bp, Homo sapien
ggctgagcgacaacttcctgtggag

SEQ ID NO: 754247 - DNA, 25 bp, Homo sapien
gcaaccaggtacaaaagccgtggga

SEQ ID NO: 754248 - DNA, 25 bp, Homo sapien
tccgggcaattggactttgccaagt

SEQ ID NO: 754249 - DNA, 25 bp, Homo sapien
agaacaaagggtagttttgccgctg

SEQ ID NO: 754250 - DNA, 25 bp, Homo sapien
ccatgtggaggaggtaaccggtcac

SEQ ID NO: 754251 - DNA, 25 bp, Homo sapien
ggtcacgagcttcctgactcttctt

SEQ ID NO: 754252 - DNA, 25 bp, Homo sapien
ctcttctttccggtccgtgcacttt

SEQ ID NO: 754253 - DNA, 25 bp, Homo sapien
actttttctgtgagtagattcctct

SEQ ID NO: 754254 - DNA, 25 bp, Homo sapien
taggatagtaataagagagaggcca

SEQ ID NO: 754255 - DNA, 25 bp, Homo sapien
tgagtagtaaaggagtcattgggaa

SEQ ID NO: 754256 - DNA, 25 bp, Homo sapien
gtagtaaaggagtcattgggaatct

SEQ ID NO: 754257 - DNA, 25 bp, Homo sapien
ctgagtagtaaaggagtcattggga

SEQ ID NO: 754258 - DNA, 25 bp, Homo sapien
agtagtaaaggagtcattgggaatc

SEQ ID NO: 754259 - DNA, 25 bp, Homo sapien
gaactaatgattctgaggtccactg

SEQ ID NO: 754260 - DNA, 25 bp, Homo sapien
gaattaaccaccagcgtaggcacag

SEQ ID NO: 754261 - DNA, 25 bp, Homo sapien
ggacttctcacttcgcatagctgaa

SEQ ID NO: 754262 - DNA, 25 bp, Homo sapien
tagagcttgggcctaatgtgacccc

SEQ ID NO: 754263 - DNA, 25 bp, Homo sapien
ctatccaaattgctgactgtggtta

SEQ ID NO: 754264 - DNA, 25 bp, Homo sapien
tccaaattgctgactgtggttactg

SEQ ID NO: 754265 - DNA, 25 bp, Homo sapien
ccttcttccccgaaaggggcatctg

SEQ ID NO: 754266 - DNA, 25 bp, Homo sapien
ttgctgactgtggttactgagacat

SEQ ID NO: 754267 - DNA, 25 bp, Homo sapien
ttgcaggaaacatcacataagaaca

SEQ ID NO: 754268 - DNA, 25 bp, Homo sapien
ttggcttggtcattgcaggaaacat

SEQ ID NO: 754269 - DNA, 25 bp, Homo sapien
tggcttggtcattgcaggaaacatc

SEQ ID NO: 754270 - DNA, 25 bp, Homo sapien
acatcacataagaacaagggaagac

SEQ ID NO: 754271 - DNA, 25 bp, Homo sapien
tcggatattaggtgagaacacttcc

SEQ ID NO: 754272 - DNA, 25 bp, Homo sapien
ctctggcttagtcatgttggttgtc

SEQ ID NO: 754273 - DNA, 25 bp, Homo sapien
gagggctcaatgaccttccgaactc

SEQ ID NO: 754274 - DNA, 25 bp, Homo sapien
tatttgcatacagtcagagggctca

SEQ ID NO: 754275 - DNA, 25 bp, Homo sapien
ttgcccctttgagctccacagtggt

SEQ ID NO: 754276 - DNA, 25 bp, Homo sapien
cttctgcggtgggtatttaccgcaa

SEQ ID NO: 754277 - DNA, 25 bp, Homo sapien
agctgccccagagaccttctgcggt

SEQ ID NO: 754278 - DNA, 25 bp, Homo sapien
tttaccgcaaatcccctctgagttc

SEQ ID NO: 754279 - DNA, 25 bp, Homo sapien
catggcccatggcagcgcagagtct

SEQ ID NO: 754280 - DNA, 25 bp, Homo sapien
agtctgagcagcatctggcttgggc

SEQ ID NO: 754281 - DNA, 25 bp, Homo sapien
tggcccatggcagcgcagagtctga

SEQ ID NO: 754282 - DNA, 25 bp, Homo sapien
ctggcttgggctggtctgtagagat

SEQ ID NO: 754283 - DNA, 25 bp, Homo sapien
tttctccttggcaatcctgcttcac

SEQ ID NO: 754284 - DNA, 25 bp, Homo sapien
gagggttgagaaagcccactgtttc

SEQ ID NO: 754285 - DNA, 25 bp, Homo sapien
tcaaggtggaaggtggcctctaact

SEQ ID NO: 754286 - DNA, 25 bp, Homo sapien
ccactgtttccagaatgctcctccc

SEQ ID NO: 754287 - DNA, 25 bp, Homo sapien
tgccattgcaggagagatcctgcca

SEQ ID NO: 754288 - DNA, 25 bp, Homo sapien
tcatgtcaagcctgcatggctgtcc

SEQ ID NO: 754289 - DNA, 25 bp, Homo sapien
cagctcactaggacttgcccctatg

SEQ ID NO: 754290 - DNA, 25 bp, Homo sapien
tcactaggacttgcccctatgtctc

SEQ ID NO: 754291 - DNA, 25 bp, Homo sapien
tttcaaggaatttcatattcttcat

SEQ ID NO: 754292 - DNA, 25 bp, Homo sapien
gagcatggttcttgccgagttgcac

SEQ ID NO: 754293 - DNA, 25 bp, Homo sapien
caaaacgccactgcacggcatgcag

SEQ ID NO: 754294 - DNA, 25 bp, Homo sapien
ttgctgctgcacaaggaggagcaca

SEQ ID NO: 754295 - DNA, 25 bp, Homo sapien
cagtgcctgggtatgtggctctgcc

SEQ ID NO: 754296 - DNA, 25 bp, Homo sapien
tccctggataagtctttccaccaca

SEQ ID NO: 754297 - DNA, 25 bp, Homo sapien
gatctagcaccctttggctggtctg

SEQ ID NO: 754298 - DNA, 25 bp, Homo sapien
ccagaaaggtatcttaggatcatga

SEQ ID NO: 754299 - DNA, 25 bp, Homo sapien
tggtctggcctcatgggctggcaca

SEQ ID NO: 754300 - DNA, 25 bp, Homo sapien
tcaaatcaggtcgtgcttccctcgg

SEQ ID NO: 754301 - DNA, 25 bp, Homo sapien
tgcgttcactctgcagactatgagg

SEQ ID NO: 754302 - DNA, 25 bp, Homo sapien
cctgacacttggagttctgcgttca

SEQ ID NO: 754303 - DNA, 25 bp, Homo sapien
ggaaagagatcaaccattcccctgg

SEQ ID NO: 754304 - DNA, 25 bp, Homo sapien
tgcttcccaactcaataatttgctg

SEQ ID NO: 754305 - DNA, 25 bp, Homo sapien
taatttgctgttaaatagtttctga

SEQ ID NO: 754306 - DNA, 25 bp, Homo sapien
ttctaattattgcttcccaactcaa

SEQ ID NO: 754307 - DNA, 25 bp, Homo sapien
tcagcatcttggaatgtgatgagaa

SEQ ID NO: 754308 - DNA, 25 bp, Homo sapien
taatctgtagactccctgcgtttgc

SEQ ID NO: 754309 - DNA, 25 bp, Homo sapien
ggccacaaatctgaactgcacctga

SEQ ID NO: 754310 - DNA, 25 bp, Homo sapien
agtgggctccgtgtgaatctgtctc

SEQ ID NO: 754311 - DNA, 25 bp, Homo sapien
taaaaggccagactctcagtgggct

SEQ ID NO: 754312 - DNA, 25 bp, Homo sapien
tttttggcagtgtcagcttaatttt

SEQ ID NO: 754313 - DNA, 25 bp, Homo sapien
ttggcagtgtcagcttaattttgtg

SEQ ID NO: 754314 - DNA, 25 bp, Homo sapien
taattttgtgtaaatagtctggaaa

SEQ ID NO: 754315 - DNA, 25 bp, Homo sapien
acagcaagcaaaacttgtatagaca

SEQ ID NO: 754316 - DNA, 25 bp, Homo sapien
acccaaaaatctcccacaatgttct

SEQ ID NO: 754317 - DNA, 25 bp, Homo sapien
gctttgtgataactttgccctcgta

SEQ ID NO: 754318 - DNA, 25 bp, Homo sapien
caatgttctactaccacagccgatg

SEQ ID NO: 754319 - DNA, 25 bp, Homo sapien
tgatggaatgcaaaagacccaccca

SEQ ID NO: 754320 - DNA, 25 bp, Homo sapien
gcagttggcatggagctgtgacctt

SEQ ID NO: 754321 - DNA, 25 bp, Homo sapien
accactcaagtgtagcagttggcat

SEQ ID NO: 754322 - DNA, 25 bp, Homo sapien
tgaccttgacacaatgatgcaactg

SEQ ID NO: 754323 - DNA, 25 bp, Homo sapien
caactgactgcatggatatggaatt

SEQ ID NO: 754324 - DNA, 25 bp, Homo sapien
gaaactgatccaggtgctggcccct

SEQ ID NO: 754325 - DNA, 25 bp, Homo sapien
gtcatagagctgcaactaggcgtca

SEQ ID NO: 754326 - DNA, 25 bp, Homo sapien
ggtgcctagggacccaacagttgaa

SEQ ID NO: 754327 - DNA, 25 bp, Homo sapien
taggcgtcaatacgtcaaggaccat

SEQ ID NO: 754328 - DNA, 25 bp, Homo sapien
agcaggcctggtgtgcaggaaggag

SEQ ID NO: 754329 - DNA, 25 bp, Homo sapien
ggcctggtgtgcaggaaggaggtgg

SEQ ID NO: 754330 - DNA, 25 bp, Homo sapien
gctgagcaggcctggtgtgcaggaa

SEQ ID NO: 754331 - DNA, 25 bp, Homo sapien
ctcctcttgcctggggctgagcagg

SEQ ID NO: 754332 - DNA, 25 bp, Homo sapien
gagagggagctcagtaaaacatcca

SEQ ID NO: 754333 - DNA, 25 bp, Homo sapien
agagggagctcagtaaaacatccag

SEQ ID NO: 754334 - DNA, 25 bp, Homo sapien
tctgggatatttgacgagctgttcc

SEQ ID NO: 754335 - DNA, 25 bp, Homo sapien
tggagacagtacaaggaggcacaga

SEQ ID NO: 754336 - DNA, 25 bp, Homo sapien
gaatctgggatatttgacgagctgt

SEQ ID NO: 754337 - DNA, 25 bp, Homo sapien
acagaatctgggatatttgacgagc

SEQ ID NO: 754338 - DNA, 25 bp, Homo sapien
ttaaaatgttcctccctggaccaca

SEQ ID NO: 754339 - DNA, 25 bp, Homo sapien
tgagggagacagacaacgcttagga

SEQ ID NO: 754340 - DNA, 25 bp, Homo sapien
cgcttaggagtagaatgagtttcag

SEQ ID NO: 754341 - DNA, 25 bp, Homo sapien
gaccacatctcagaggagcggttga

SEQ ID NO: 754342 - DNA, 25 bp, Homo sapien
tatttctgtggatatagtgattggc

SEQ ID NO: 754343 - DNA, 25 bp, Homo sapien
tctgtggatatagtgattggccgag

SEQ ID NO: 754344 - DNA, 25 bp, Homo sapien
cttaatctaaaattaggtgagaagc

SEQ ID NO: 754345 - DNA, 25 bp, Homo sapien
tatgctggcatgtgttgtcgctggt

SEQ ID NO: 754346 - DNA, 25 bp, Homo sapien
catatgaatcacgtccattatctgg

SEQ ID NO: 754347 - DNA, 25 bp, Homo sapien
gggtgcttgtaacatatgaatcacg

SEQ ID NO: 754348 - DNA, 25 bp, Homo sapien
gaatcacgtccattatctggcccac

SEQ ID NO: 754349 - DNA, 25 bp, Homo sapien
taatcaacaggggtgcttgtaacat

SEQ ID NO: 754350 - DNA, 25 bp, Homo sapien
taaactgtagcttgtttggcttcct

SEQ ID NO: 754351 - DNA, 25 bp, Homo sapien
tcaaataaactgtagcttgtttggc

SEQ ID NO: 754352 - DNA, 25 bp, Homo sapien
caaataaactgtagcttgtttggct

SEQ ID NO: 754353 - DNA, 25 bp, Homo sapien
aataaactgtagcttgtttggcttc

SEQ ID NO: 754354 - DNA, 25 bp, Homo sapien
aggactagctttgggctccatgcca

SEQ ID NO: 754355 - DNA, 25 bp, Homo sapien
caggagtacttctagggacaggtgc

SEQ ID NO: 754356 - DNA, 25 bp, Homo sapien
caggtgcaattgcagggtaaggaca

SEQ ID NO: 754357 - DNA, 25 bp, Homo sapien
gacatgggagaagagaaccagccta

SEQ ID NO: 754358 - DNA, 25 bp, Homo sapien
tcttcatagacccaagacttataaa

SEQ ID NO: 754359 - DNA, 25 bp, Homo sapien
tagacccaagacttataaagcactt

SEQ ID NO: 754360 - DNA, 25 bp, Homo sapien
cccaagacttataaagcacttgtct

SEQ ID NO: 754361 - DNA, 25 bp, Homo sapien
taaagcacttgtctaactcttaatt

SEQ ID NO: 754362 - DNA, 25 bp, Homo sapien
catgctttcggatatctggccattg

SEQ ID NO: 754363 - DNA, 25 bp, Homo sapien
tggccattgttctcgtcttttattg

SEQ ID NO: 754364 - DNA, 25 bp, Homo sapien
cccttaggtagtcggcatgctttcg

SEQ ID NO: 754365 - DNA, 25 bp, Homo sapien
cttcatttagcacccttaggtagtc

SEQ ID NO: 754366 - DNA, 25 bp, Homo sapien
cctctgcctctatcttcagcctcat

SEQ ID NO: 754367 - DNA, 25 bp, Homo sapien
tccctctgcctctatcttcagcctc

SEQ ID NO: 754368 - DNA, 25 bp, Homo sapien
ctccctctgcctctatcttcagcct

SEQ ID NO: 754369 - DNA, 25 bp, Homo sapien
ccctctgcctctatcttcagcctca

SEQ ID NO: 754370 - DNA, 25 bp, Homo sapien
ctgtgtggatcagtgtcatggcaca

SEQ ID NO: 754371 - DNA, 25 bp, Homo sapien
catggcacatcggtggtctgcagca

SEQ ID NO: 754372 - DNA, 25 bp, Homo sapien
gtcatggcacatcggtggtctgcag

SEQ ID NO: 754373 - DNA, 25 bp, Homo sapien
tcatggcacatcggtggtctgcagc

SEQ ID NO: 754374 - DNA, 25 bp, Homo sapien
gggagattttgatcttcatgaaact

SEQ ID NO: 754375 - DNA, 25 bp, Homo sapien
ctgggagattttgatcttcatgaaa

SEQ ID NO: 754376 - DNA, 25 bp, Homo sapien
tgggagattttgatcttcatgaaac

SEQ ID NO: 754377 - DNA, 25 bp, Homo sapien
ggagattttgatcttcatgaaactc

SEQ ID NO: 754378 - DNA, 25 bp, Homo sapien
ttacattccttgaagttggaggtgc

SEQ ID NO: 754379 - DNA, 25 bp, Homo sapien
ggtgcccgattcatagtcttcctcg

SEQ ID NO: 754380 - DNA, 25 bp, Homo sapien
gaagctcgtattcaatttcaatggc

SEQ ID NO: 754381 - DNA, 25 bp, Homo sapien
gctcctttgttttgaagctcgtatt

SEQ ID NO: 754382 - DNA, 25 bp, Homo sapien
tgcgatgaatgccatataaaggaat

SEQ ID NO: 754383 - DNA, 25 bp, Homo sapien
ggggacataggctctaggcaaattg

SEQ ID NO: 754384 - DNA, 25 bp, Homo sapien
gttacaaatgcgatgaatgccatat

SEQ ID NO: 754385 - DNA, 25 bp, Homo sapien
tttacaggggacataggctctaggc

SEQ ID NO: 754386 - DNA, 25 bp, Homo sapien
tccccaaaattggtcttgctcccag

SEQ ID NO: 754387 - DNA, 25 bp, Homo sapien
ttccccaaaattggtcttgctccca

SEQ ID NO: 754388 - DNA, 25 bp, Homo sapien
gtcttggcctcaagagcacatctct

SEQ ID NO: 754389 - DNA, 25 bp, Homo sapien
tgctgtcttggcctcaagagcacat

SEQ ID NO: 754390 - DNA, 25 bp, Homo sapien
ttggcctcaagagcacatctcttct

SEQ ID NO: 754391 - DNA, 25 bp, Homo sapien
ggcctcaagagcacatctcttcttc

SEQ ID NO: 754392 - DNA, 25 bp, Homo sapien
cctcctggaaacctcttctctgatc

SEQ ID NO: 754393 - DNA, 25 bp, Homo sapien
ttccctcctggaaacctcttctctg

SEQ ID NO: 754394 - DNA, 25 bp, Homo sapien
tctctctgactccaatcttgtagtc

SEQ ID NO: 754395 - DNA, 25 bp, Homo sapien
ctgactccaatcttgtagtctttcc

SEQ ID NO: 754396 - DNA, 25 bp, Homo sapien
gctgctctgttctttggaacctggc

SEQ ID NO: 754397 - DNA, 25 bp, Homo sapien
tctgttctttcgtcccttccacgtg

SEQ ID NO: 754398 - DNA, 25 bp, Homo sapien
ttatctactcggaacctggctgctc

SEQ ID NO: 754399 - DNA, 25 bp, Homo sapien
gtgacagacagccttatctactcgg

SEQ ID NO: 754400 - DNA, 25 bp, Homo sapien
taacatgaggttcaaaagtatctgc

SEQ ID NO: 754401 - DNA, 25 bp, Homo sapien
ggcactgacgctgctgtgtggccca

SEQ ID NO: 754402 - DNA, 25 bp, Homo sapien
tctgtttcttcggaccagcctcgct

SEQ ID NO: 754403 - DNA, 25 bp, Homo sapien
tcgtctctgcatttctcacttgtga

SEQ ID NO: 754404 - DNA, 25 bp, Homo sapien
ctgtggcaggatagactctcatggg

SEQ ID NO: 754405 - DNA, 25 bp, Homo sapien
gactctcatgggtatacatcgattc

SEQ ID NO: 754406 - DNA, 25 bp, Homo sapien
tgtggttgcatagttcatgtccgcc

SEQ ID NO: 754407 - DNA, 25 bp, Homo sapien
ggtatacatcgattcagaaccccag

SEQ ID NO: 754408 - DNA, 25 bp, Homo sapien
ttagaatggttatcaccccagccat

SEQ ID NO: 754409 - DNA, 25 bp, Homo sapien
ggtgaaggctgggtccacgtggtag

SEQ ID NO: 754410 - DNA, 25 bp, Homo sapien
ggtttagaatggttatcaccccagc

SEQ ID NO: 754411 - DNA, 25 bp, Homo sapien
tgaaggctgggtccacgtggtaggt

SEQ ID NO: 754412 - DNA, 25 bp, Homo sapien
ccaacttgtctgctcatggaagttt

SEQ ID NO: 754413 - DNA, 25 bp, Homo sapien
tgctagcaccttcggatctaccttg

SEQ ID NO: 754414 - DNA, 25 bp, Homo sapien
tgtgcaccttggagaaagtattggc

SEQ ID NO: 754415 - DNA, 25 bp, Homo sapien
tgctgtggccgctaggaaggtgcac

SEQ ID NO: 754416 - DNA, 25 bp, Homo sapien
tcagctgcaagacagatgacaacct

SEQ ID NO: 754417 - DNA, 25 bp, Homo sapien
gaccccatttactaaaagcaagaga

SEQ ID NO: 754418 - DNA, 25 bp, Homo sapien
agaccccatttactaaaagcaagag

SEQ ID NO: 754419 - DNA, 25 bp, Homo sapien
gactacataccgctagaccaaatat

SEQ ID NO: 754420 - DNA, 25 bp, Homo sapien
tttgatgagtggactacataccgct

SEQ ID NO: 754421 - DNA, 25 bp, Homo sapien
cagtgttgagtactggaatatgtcc

SEQ ID NO: 754422 - DNA, 25 bp, Homo sapien
gaatatgtcctcctttccgtttgat

SEQ ID NO: 754423 - DNA, 25 bp, Homo sapien
ttcacggcagcggtacacgttgaat

SEQ ID NO: 754424 - DNA, 25 bp, Homo sapien
gtacacgttgaattctgctcacacc

SEQ ID NO: 754425 - DNA, 25 bp, Homo sapien
gtatcgcagcccctcggctgactgg

SEQ ID NO: 754426 - DNA, 25 bp, Homo sapien
cagcggtacacgttgaattctgctc

SEQ ID NO: 754427 - DNA, 25 bp, Homo sapien
taaccaagccaactggaccaagaga

SEQ ID NO: 754428 - DNA, 25 bp, Homo sapien
agtattggcaatcaaagctgcagcc

SEQ ID NO: 754429 - DNA, 25 bp, Homo sapien
cagtgctgcggtccccaaacacgga

SEQ ID NO: 754430 - DNA, 25 bp, Homo sapien
taacgttctgggagcagatcgcctc

SEQ ID NO: 754431 - DNA, 25 bp, Homo sapien
gcagatcagccagctcacaaagaac

SEQ ID NO: 754432 - DNA, 25 bp, Homo sapien
agatcagccagctcacaaagaactt

SEQ ID NO: 754433 - DNA, 25 bp, Homo sapien
ttgcagatcagccagctcacaaaga

SEQ ID NO: 754434 - DNA, 25 bp, Homo sapien
cttgcagatcagccagctcacaaag

SEQ ID NO: 754435 - DNA, 25 bp, Homo sapien
ggaggtagttccatctccaacttct

SEQ ID NO: 754436 - DNA, 25 bp, Homo sapien
gtagttccatctccaacttctttgt

SEQ ID NO: 754437 - DNA, 25 bp, Homo sapien
ggtagttccatctccaacttctttg

SEQ ID NO: 754438 - DNA, 25 bp, Homo sapien
gaggtagttccatctccaacttctt

SEQ ID NO: 754439 - DNA, 25 bp, Homo sapien
tgctccagaagctttcggaatgcgt

SEQ ID NO: 754440 - DNA, 25 bp, Homo sapien
gaataatgctggcaccagttaccag

SEQ ID NO: 754441 - DNA, 25 bp, Homo sapien
gttagcaaagaaatcgccatttatt

SEQ ID NO: 754442 - DNA, 25 bp, Homo sapien
gttagaataatgctggcaccagtta

SEQ ID NO: 754443 - DNA, 25 bp, Homo sapien
actgcagcttcaaaagtttctttac

SEQ ID NO: 754444 - DNA, 25 bp, Homo sapien
ataccacttcttctgcctgccccaa

SEQ ID NO: 754445 - DNA, 25 bp, Homo sapien
taccacttcttctgcctgccccaac

SEQ ID NO: 754446 - DNA, 25 bp, Homo sapien
ctataccacttcttctgcctgcccc

SEQ ID NO: 754447 - DNA, 25 bp, Homo sapien
tataccacttcttctgcctgcccca

SEQ ID NO: 754448 - DNA, 25 bp, Homo sapien
aactatcttcactacacaaaaagca

SEQ ID NO: 754449 - DNA, 25 bp, Homo sapien
taatcgatgcaaatgtatgagggtt

SEQ ID NO: 754450 - DNA, 25 bp, Homo sapien
caaaactatcttcactacacaaaaa

SEQ ID NO: 754451 - DNA, 25 bp, Homo sapien
gatgcaaatgtatgagggttagtgt

SEQ ID NO: 754452 - DNA, 25 bp, Homo sapien
aagggctacttctacagcacccaca

SEQ ID NO: 754453 - DNA, 25 bp, Homo sapien
caaggtatatagaaagggctacttc

SEQ ID NO: 754454 - DNA, 25 bp, Homo sapien
tttcaaggtatatagaaagggctac

SEQ ID NO: 754455 - DNA, 25 bp, Homo sapien
ggtatatagaaagggctacttctac

SEQ ID NO: 754456 - DNA, 25 bp, Homo sapien
ccgagaccccatgctagttgcatag

SEQ ID NO: 754457 - DNA, 25 bp, Homo sapien
gaccccatgctagttgcatagtttt

SEQ ID NO: 754458 - DNA, 25 bp, Homo sapien
gttcccgagaccccatgctagttgc

SEQ ID NO: 754459 - DNA, 25 bp, Homo sapien
ctgttcccgagaccccatgctagtt

SEQ ID NO: 754460 - DNA, 25 bp, Homo sapien
caagaagtgatcttgcaaactctgc

SEQ ID NO: 754461 - DNA, 25 bp, Homo sapien
acaagaagtgatcttgcaaactctg

SEQ ID NO: 754462 - DNA, 25 bp, Homo sapien
aagaagtgatcttgcaaactctgca

SEQ ID NO: 754463 - DNA, 25 bp, Homo sapien
gaagtgatcttgcaaactctgcaat

SEQ ID NO: 754464 - DNA, 25 bp, Homo sapien
atgaaaagctcttaactttgcaacc

SEQ ID NO: 754465 - DNA, 25 bp, Homo sapien
caagaccaatccattttagattttt

SEQ ID NO: 754466 - DNA, 25 bp, Homo sapien
actttgcaaccagatctgtggattc

SEQ ID NO: 754467 - DNA, 25 bp, Homo sapien
tacgttctgggttaacctgagcctc

SEQ ID NO: 754468 - DNA, 25 bp, Homo sapien
tatggttggttcaaacacccttgct

SEQ ID NO: 754469 - DNA, 25 bp, Homo sapien
tggttggttcaaacacccttgcttg

SEQ ID NO: 754470 - DNA, 25 bp, Homo sapien
actatggttggttcaaacacccttg

SEQ ID NO: 754471 - DNA, 25 bp, Homo sapien
gcttgtttgttgtcttgaggtttac

SEQ ID NO: 754472 - DNA, 25 bp, Homo sapien
ccatcttggaatggggcatgtaaat

SEQ ID NO: 754473 - DNA, 25 bp, Homo sapien
aatggggcatgtaaatttcaaactc

SEQ ID NO: 754474 - DNA, 25 bp, Homo sapien
cttggaatggggcatgtaaatttca

SEQ ID NO: 754475 - DNA, 25 bp, Homo sapien
tggaatggggcatgtaaatttcaaa

SEQ ID NO: 754476 - DNA, 25 bp, Homo sapien
caattcaaagaatggtaattgcagc

SEQ ID NO: 754477 - DNA, 25 bp, Homo sapien
agatcatcaattcaaagaatggtaa

SEQ ID NO: 754478 - DNA, 25 bp, Homo sapien
attcaaagaatggtaattgcagctt

SEQ ID NO: 754479 - DNA, 25 bp, Homo sapien
tcatcaattcaaagaatggtaattg

SEQ ID NO: 754480 - DNA, 25 bp, Homo sapien
gaacagcatgttcataacctccatg

SEQ ID NO: 754481 - DNA, 25 bp, Homo sapien
ttaagggctccagagtgaacagcat

SEQ ID NO: 754482 - DNA, 25 bp, Homo sapien
gttcataacctccatgtttatcatc

SEQ ID NO: 754483 - DNA, 25 bp, Homo sapien
agggctccagagtgaacagcatgtt

SEQ ID NO: 754484 - DNA, 25 bp, Homo sapien
gcaagctgggctactgtagcaaaca

SEQ ID NO: 754485 - DNA, 25 bp, Homo sapien
gttgcccttgttcacgttcgcctta

SEQ ID NO: 754486 - DNA, 25 bp, Homo sapien
tatttattagacttcgcgttgccct

SEQ ID NO: 754487 - DNA, 25 bp, Homo sapien
gcaggcctggccataatccagcgta

SEQ ID NO: 754488 - DNA, 25 bp, Homo sapien
gaaggcagcattcacctggataatg

SEQ ID NO: 754489 - DNA, 25 bp, Homo sapien
aacccgaaggcagcattcacctgga

SEQ ID NO: 754490 - DNA, 25 bp, Homo sapien
caccagaaacccgaaggcagcattc

SEQ ID NO: 754491 - DNA, 25 bp, Homo sapien
gaaacccgaaggcagcattcacctg

SEQ ID NO: 754492 - DNA, 25 bp, Homo sapien
ttccacacccaagccctcgctgagt

SEQ ID NO: 754493 - DNA, 25 bp, Homo sapien
acacccaagccctcgctgagtctct

SEQ ID NO: 754494 - DNA, 25 bp, Homo sapien
aagccctcgctgagtctctgctgag

SEQ ID NO: 754495 - DNA, 25 bp, Homo sapien
cccaagccctcgctgagtctctgct

SEQ ID NO: 754496 - DNA, 25 bp, Homo sapien
gaccacagtttcaatttagctaaag

SEQ ID NO: 754497 - DNA, 25 bp, Homo sapien
tgttaacagccatcagaccacagtt

SEQ ID NO: 754498 - DNA, 25 bp, Homo sapien
tgaaaactggacatggacccttttg

SEQ ID NO: 754499 - DNA, 25 bp, Homo sapien
aatgacaccgacaaaattaatctca

SEQ ID NO: 754500 - DNA, 25 bp, Homo sapien
gcctctacataaagtcaagaagcag

SEQ ID NO: 754501 - DNA, 25 bp, Homo sapien
gcactggaaagttaaccaacagcct

SEQ ID NO: 754502 - DNA, 25 bp, Homo sapien
gcttactggccatggaatcctcaca

SEQ ID NO: 754503 - DNA, 25 bp, Homo sapien
ctcacatgggttgctggtttctcag

SEQ ID NO: 754504 - DNA, 25 bp, Homo sapien
catttatcaaaagtgacaggatgga

SEQ ID NO: 754505 - DNA, 25 bp, Homo sapien
caggatggaagctgtattaggccat

SEQ ID NO: 754506 - DNA, 25 bp, Homo sapien
tgattgcaagatcatcggtcccctt

SEQ ID NO: 754507 - DNA, 25 bp, Homo sapien
gctcctggtggtaggagtagcctcc

SEQ ID NO: 754508 - DNA, 25 bp, Homo sapien
ggatgtttacctgacatgctcctgg

SEQ ID NO: 754509 - DNA, 25 bp, Homo sapien
tgtgggacgcaggtgaagttactcc

SEQ ID NO: 754510 - DNA, 25 bp, Homo sapien
tgaagacgctattgaaacagcacgt

SEQ ID NO: 754511 - DNA, 25 bp, Homo sapien
tgtactctcataccagtgctcctgg

SEQ ID NO: 754512 - DNA, 25 bp, Homo sapien
tcttttagaggaggaggcgaactgc

SEQ ID NO: 754513 - DNA, 25 bp, Homo sapien
cacgttagccaaatccacaagagca

SEQ ID NO: 754514 - DNA, 25 bp, Homo sapien
cagaatgaattagggtatgtttctt

SEQ ID NO: 754515 - DNA, 25 bp, Homo sapien
aatcttgctaatggtttgtcagttt

SEQ ID NO: 754516 - DNA, 25 bp, Homo sapien
cactttaatctcactgcttattggt

SEQ ID NO: 754517 - DNA, 25 bp, Homo sapien
tgtatttcagttgtaatatcttctg

SEQ ID NO: 754518 - DNA, 25 bp, Homo sapien
ctgggcgcagtggccacacttgtaa

SEQ ID NO: 754519 - DNA, 25 bp, Homo sapien
gaataatagtctctaggctgggcgc

SEQ ID NO: 754520 - DNA, 25 bp, Homo sapien
tcaccgtctcccactcttcccaagt

SEQ ID NO: 754521 - DNA, 25 bp, Homo sapien
atccctcaccgtctcccactcttcc

SEQ ID NO: 754522 - DNA, 25 bp, Homo sapien
tagcataggtttgccgtctttgcaa

SEQ ID NO: 754523 - DNA, 25 bp, Homo sapien
ggtttgccgtctttgcaagcactga

SEQ ID NO: 754524 - DNA, 25 bp, Homo sapien
ggcatagcataggtttgccgtcttt

SEQ ID NO: 754525 - DNA, 25 bp, Homo sapien
cataggtttgccgtctttgcaagca

SEQ ID NO: 754526 - DNA, 25 bp, Homo sapien
gttcatctcctgggatagcatccca

SEQ ID NO: 754527 - DNA, 25 bp, Homo sapien
tgtgatcactaatttcctcaggttc

SEQ ID NO: 754528 - DNA, 25 bp, Homo sapien
caggttctgcttcgggtttgttcaa

SEQ ID NO: 754529 - DNA, 25 bp, Homo sapien
tatcagagctgtgatcactaatttc

SEQ ID NO: 754530 - DNA, 25 bp, Homo sapien
agttttgtcatcagaagaaagaatc

SEQ ID NO: 754531 - DNA, 25 bp, Homo sapien
aaagaatctgtttatcctcactgta

SEQ ID NO: 754532 - DNA, 25 bp, Homo sapien
agaagaaagaatctgtttatcctca

SEQ ID NO: 754533 - DNA, 25 bp, Homo sapien
aagaaagaatctgtttatcctcact

SEQ ID NO: 754534 - DNA, 25 bp, Homo sapien
tactgtactgtcaaaagcactggat

SEQ ID NO: 754535 - DNA, 25 bp, Homo sapien
tacttataagtttaacatcttcacc

SEQ ID NO: 754536 - DNA, 25 bp, Homo sapien
ttcagagttaatgtttgcaggagct

SEQ ID NO: 754537 - DNA, 25 bp, Homo sapien
cactggatcagccataagttattac

SEQ ID NO: 754538 - DNA, 25 bp, Homo sapien
ccagagtgtcctttgtaggattcta

SEQ ID NO: 754539 - DNA, 25 bp, Homo sapien
cagtttgccagtctcagtgttccat

SEQ ID NO: 754540 - DNA, 25 bp, Homo sapien
cagagtgtcctttgtaggattctaa

SEQ ID NO: 754541 - DNA, 25 bp, Homo sapien
agagtgtcctttgtaggattctaat

SEQ ID NO: 754542 - DNA, 25 bp, Homo sapien
agcacacatttccaaaggccatatg

SEQ ID NO: 754543 - DNA, 25 bp, Homo sapien
tccaaaggccatatgtttttcctac

SEQ ID NO: 754544 - DNA, 25 bp, Homo sapien
ttcaggaagcacacatttccaaagg

SEQ ID NO: 754545 - DNA, 25 bp, Homo sapien
cacatttccaaaggccatatgtttt

SEQ ID NO: 754546 - DNA, 25 bp, Homo sapien
tcaggccttaacttgaggagttgaa

SEQ ID NO: 754547 - DNA, 25 bp, Homo sapien
ggctttgccagctcaccagtatctt

SEQ ID NO: 754548 - DNA, 25 bp, Homo sapien
tcttctagctcttctcttgtctttg

SEQ ID NO: 754549 - DNA, 25 bp, Homo sapien
cttgtctttggaaaaccaatctttg

SEQ ID NO: 754550 - DNA, 25 bp, Homo sapien
tgctggaagaccgccccggtcccgc

SEQ ID NO: 754551 - DNA, 25 bp, Homo sapien
gtagcagtcgctcccagtagtttcg

SEQ ID NO: 754552 - DNA, 25 bp, Homo sapien
cagtagtttcgaagcactccccggg

SEQ ID NO: 754553 - DNA, 25 bp, Homo sapien
acggcgaaaccaccaagaccagcat

SEQ ID NO: 754554 - DNA, 25 bp, Homo sapien
gccggctctgcggaagcttccgtag

SEQ ID NO: 754555 - DNA, 25 bp, Homo sapien
ttacttccactggtatcatttgctg

SEQ ID NO: 754556 - DNA, 25 bp, Homo sapien
tctttacttccactggtatcatttg

SEQ ID NO: 754557 - DNA, 25 bp, Homo sapien
ctctttacttccactggtatcattt

SEQ ID NO: 754558 - DNA, 25 bp, Homo sapien
catccaaaagatactgtccaaaagg

SEQ ID NO: 754559 - DNA, 25 bp, Homo sapien
gccatccaaaagatactgtccaaaa

SEQ ID NO: 754560 - DNA, 25 bp, Homo sapien
ttctgcggatttcttctcctacacc

SEQ ID NO: 754561 - DNA, 25 bp, Homo sapien
tgcggatttcttctcctacaccggt

SEQ ID NO: 754562 - DNA, 25 bp, Homo sapien
tccatgttgtcagcgaggagaatct

SEQ ID NO: 754563 - DNA, 25 bp, Homo sapien
tactggaaactggattgcatgcaca

SEQ ID NO: 754564 - DNA, 25 bp, Homo sapien
ttcagaagtcatgtaggcacctcac

SEQ ID NO: 754565 - DNA, 25 bp, Homo sapien
cacaactgaaggtatgaagacaccc

SEQ ID NO: 754566 - DNA, 25 bp, Homo sapien
tagttccacctcactttaacaggaa

SEQ ID NO: 754567 - DNA, 25 bp, Homo sapien
tgttcaggctacatgaggtcatcat

SEQ ID NO: 754568 - DNA, 25 bp, Homo sapien
actttcttaggatgttcaggctaca

SEQ ID NO: 754569 - DNA, 25 bp, Homo sapien
ggtcatcatacaccatctagttcca

SEQ ID NO: 754570 - DNA, 25 bp, Homo sapien
aaacgtattttaacatgaggcaata

SEQ ID NO: 754571 - DNA, 25 bp, Homo sapien
taacatgaggcaatataacgaacaa

SEQ ID NO: 754572 - DNA, 25 bp, Homo sapien
tataacgaacaaataaccactgaca

SEQ ID NO: 754573 - DNA, 25 bp, Homo sapien
gaggcaatataacgaacaaataacc

SEQ ID NO: 754574 - DNA, 25 bp, Homo sapien
ctgtttcaggtgaccacattcagga

SEQ ID NO: 754575 - DNA, 25 bp, Homo sapien
gcacaacaacataaagaatcttcct

SEQ ID NO: 754576 - DNA, 25 bp, Homo sapien
gaaatgatttactgtgaagttaccc

SEQ ID NO: 754577 - DNA, 25 bp, Homo sapien
atttcaggagaaatgatttactgtg

SEQ ID NO: 754578 - DNA, 25 bp, Homo sapien
caggagaaatgatttactgtgaagt

SEQ ID NO: 754579 - DNA, 25 bp, Homo sapien
ttcggagtttactcataatatattc

SEQ ID NO: 754580 - DNA, 25 bp, Homo sapien
cggagtttactcataatatattctt

SEQ ID NO: 754581 - DNA, 25 bp, Homo sapien
gaaacataatccattgagcctttgg

SEQ ID NO: 754582 - DNA, 25 bp, Homo sapien
aattttcggagtttactcataatat

SEQ ID NO: 754583 - DNA, 25 bp, Homo sapien
gatttgctcgcaggttggatgtgaa

SEQ ID NO: 754584 - DNA, 25 bp, Homo sapien
tacattagggtcatccatagtgcac

SEQ ID NO: 754585 - DNA, 25 bp, Homo sapien
tgttaaatggccagattctaagtat

SEQ ID NO: 754586 - DNA, 25 bp, Homo sapien
ttctaagtatataatgagggtagaa

SEQ ID NO: 754587 - DNA, 25 bp, Homo sapien
cgtgcccgagccacactagtgatct

SEQ ID NO: 754588 - DNA, 25 bp, Homo sapien
tagagcttgactgatgcacgtgccc

SEQ ID NO: 754589 - DNA, 25 bp, Homo sapien
atccaggtaatctggccgggcctcc

SEQ ID NO: 754590 - DNA, 25 bp, Homo sapien
cattcatggcaatctctgggcagag

SEQ ID NO: 754591 - DNA, 25 bp, Homo sapien
gcaatgccatgtggcaagggaaaaa

SEQ ID NO: 754592 - DNA, 25 bp, Homo sapien
tggcaatgccatgtggcaagggaaa

SEQ ID NO: 754593 - DNA, 25 bp, Homo sapien
ggtataagaagatctggtctttggt

SEQ ID NO: 754594 - DNA, 25 bp, Homo sapien
agtgagcaggtggtataagaagatc

SEQ ID NO: 754595 - DNA, 25 bp, Homo sapien
caagaaaccgatttgcttgagaaaa

SEQ ID NO: 754596 - DNA, 25 bp, Homo sapien
agaaaccgatttgcttgagaaaagc

SEQ ID NO: 754597 - DNA, 25 bp, Homo sapien
atcaagaaaccgatttgcttgagaa

SEQ ID NO: 754598 - DNA, 25 bp, Homo sapien
gaaaccgatttgcttgagaaaagca

SEQ ID NO: 754599 - DNA, 25 bp, Homo sapien
tttcatttccttacagtctttcctc

SEQ ID NO: 754600 - DNA, 25 bp, Homo sapien
tcatttccttacagtctttcctcat

SEQ ID NO: 754601 - DNA, 25 bp, Homo sapien
ttcatttccttacagtctttcctca

SEQ ID NO: 754602 - DNA, 25 bp, Homo sapien
atcctaggttttctgcagtgaagca

SEQ ID NO: 754603 - DNA, 25 bp, Homo sapien
caccaggggaagcatctggagcatg

SEQ ID NO: 754604 - DNA, 25 bp, Homo sapien
ttttctgcagtgaagcagcaaccac

SEQ ID NO: 754605 - DNA, 25 bp, Homo sapien
cagcatcttcccatcctaggttttc

SEQ ID NO: 754606 - DNA, 25 bp, Homo sapien
caaacgtgtgtatactctcagtcag

SEQ ID NO: 754607 - DNA, 25 bp, Homo sapien
tgggcaaacgtgtgtatactctcag

SEQ ID NO: 754608 - DNA, 25 bp, Homo sapien
tcttgggcaaacgtgtgtatactct

SEQ ID NO: 754609 - DNA, 25 bp, Homo sapien
atattcttgggcaaacgtgtgtata

SEQ ID NO: 754610 - DNA, 25 bp, Homo sapien
ttgtgaaaaaggatcttgtgaagac

SEQ ID NO: 754611 - DNA, 25 bp, Homo sapien
gagctctacttaatttgccctaaag

SEQ ID NO: 754612 - DNA, 25 bp, Homo sapien
gtgtaacgtctgtaaaaagagctct

SEQ ID NO: 754613 - DNA, 25 bp, Homo sapien
agattattggttaaatgcaggtcag

SEQ ID NO: 754614 - DNA, 25 bp, Homo sapien
agcagcagtaagcaagtcttctgag

SEQ ID NO: 754615 - DNA, 25 bp, Homo sapien
gagcagcagtaagcaagtcttctga

SEQ ID NO: 754616 - DNA, 25 bp, Homo sapien
ggagcagcagtaagcaagtcttctg

SEQ ID NO: 754617 - DNA, 25 bp, Homo sapien
gcaagcagtttgctctataactgac

SEQ ID NO: 754618 - DNA, 25 bp, Homo sapien
gagcaagcagtttgctctataactg

SEQ ID NO: 754619 - DNA, 25 bp, Homo sapien
agcagtttgctctataactgactgt

SEQ ID NO: 754620 - DNA, 25 bp, Homo sapien
gagtagagcaagcagtttgctctat

SEQ ID NO: 754621 - DNA, 25 bp, Homo sapien
gcctgatgcgcggtaacgcagcaca

SEQ ID NO: 754622 - DNA, 25 bp, Homo sapien
ggctccaacaacagcgcctgatgcg

SEQ ID NO: 754623 - DNA, 25 bp, Homo sapien
catgctcctgtcagcgcgcagatta

SEQ ID NO: 754624 - DNA, 25 bp, Homo sapien
ttcggtcagagtcgcacggtgttcc

SEQ ID NO: 754625 - DNA, 25 bp, Homo sapien
ttgtttctctccgtaccccgcagga

SEQ ID NO: 754626 - DNA, 25 bp, Homo sapien
ggccgggtgcgcctgcagtacccaa

SEQ ID NO: 754627 - DNA, 25 bp, Homo sapien
gggaggcgctgcgaacccgcttggg

SEQ ID NO: 754628 - DNA, 25 bp, Homo sapien
gcggcgcgacccaggctgacaattg

SEQ ID NO: 754629 - DNA, 25 bp, Homo sapien
tcaaagcggcagagcaatcagaatg

SEQ ID NO: 754630 - DNA, 25 bp, Homo sapien
tacgcgctgaaattcggcagggaag

SEQ ID NO: 754631 - DNA, 25 bp, Homo sapien
gtgtgcaagacagagacaccgcgca

SEQ ID NO: 754632 - DNA, 25 bp, Homo sapien
aatcagccaagtggccgggacgtca

SEQ ID NO: 754633 - DNA, 25 bp, Homo sapien
tagccacagccggagtgagtctgct

SEQ ID NO: 754634 - DNA, 25 bp, Homo sapien
gccttttcgggtagggcatctgccc

SEQ ID NO: 754635 - DNA, 25 bp, Homo sapien
tctggccacctgctttgagacgcct

SEQ ID NO: 754636 - DNA, 25 bp, Homo sapien
tgatgagaaacgcagatctggccac

SEQ ID NO: 754637 - DNA, 25 bp, Homo sapien
gcctgtctgtatgccacatccttat

SEQ ID NO: 754638 - DNA, 25 bp, Homo sapien
tcaggcctccatatgcatcaagctt

SEQ ID NO: 754639 - DNA, 25 bp, Homo sapien
acatgcatagatgcctgataacacc

SEQ ID NO: 754640 - DNA, 25 bp, Homo sapien
aaattctccctgcatatcacatgca

SEQ ID NO: 754641 - DNA, 25 bp, Homo sapien
agggaacatccatgcacgttaaatg

SEQ ID NO: 754642 - DNA, 25 bp, Homo sapien
ttgaattacaatccctggccatgga

SEQ ID NO: 754643 - DNA, 25 bp, Homo sapien
aagggaccccgaatgaagtctccat

SEQ ID NO: 754644 - DNA, 25 bp, Homo sapien
catgggcacagatggcgtcctttcc

SEQ ID NO: 754645 - DNA, 25 bp, Homo sapien
ttcatcagctctggtactgacggca

SEQ ID NO: 754646 - DNA, 25 bp, Homo sapien
tactgacggcactgatggcaaggtc

SEQ ID NO: 754647 - DNA, 25 bp, Homo sapien
aagaggatgaggaatcacttgctga

SEQ ID NO: 754648 - DNA, 25 bp, Homo sapien
cggcactgatggcaaggtcttatat

SEQ ID NO: 754649 - DNA, 25 bp, Homo sapien
taaaatatgtctttagaggctgaga

SEQ ID NO: 754650 - DNA, 25 bp, Homo sapien
ttcaatgtgctgtttgtcaaaatca

SEQ ID NO: 754651 - DNA, 25 bp, Homo sapien
gatcgaggtgctctcaagacaggca

SEQ ID NO: 754652 - DNA, 25 bp, Homo sapien
agtgaagaaggccagtgggacaacc

SEQ ID NO: 754653 - DNA, 25 bp, Homo sapien
gacaagcccttaacctagaggagct

SEQ ID NO: 754654 - DNA, 25 bp, Homo sapien
ctagaagcaacgaaatgcagacctt

SEQ ID NO: 754655 - DNA, 25 bp, Homo sapien
cattcggagaaagaagtacctgctg

SEQ ID NO: 754656 - DNA, 25 bp, Homo sapien
tgctgaggcagatactgaggcaagt

SEQ ID NO: 754657 - DNA, 25 bp, Homo sapien
gggtacgcattttgtggacacaaca

SEQ ID NO: 754658 - DNA, 25 bp, Homo sapien
tggggtacgcattttgtggacacaa

SEQ ID NO: 754659 - DNA, 25 bp, Homo sapien
ctttggggtacgcattttgtggaca

SEQ ID NO: 754660 - DNA, 25 bp, Homo sapien
ttggggtacgcattttgtggacaca

SEQ ID NO: 754661 - DNA, 25 bp, Homo sapien
tgactttgcacctcgatcgttgatg

SEQ ID NO: 754662 - DNA, 25 bp, Homo sapien
tttgcacctcgatcgttgatgccac

SEQ ID NO: 754663 - DNA, 25 bp, Homo sapien
cagcactgactttgcacctcgatcg

SEQ ID NO: 754664 - DNA, 25 bp, Homo sapien
gcacctcgatcgttgatgccaccag

SEQ ID NO: 754665 - DNA, 25 bp, Homo sapien
gtggaaaattccacaatggacctca

SEQ ID NO: 754666 - DNA, 25 bp, Homo sapien
gtcaaaattcatgtgcaccacacac

SEQ ID NO: 754667 - DNA, 25 bp, Homo sapien
ctgaaatactacaacgtttgaaatg

SEQ ID NO: 754668 - DNA, 25 bp, Homo sapien
aatgccgacataatgccacaagtgg

SEQ ID NO: 754669 - DNA, 25 bp, Homo sapien
caagttggagtctggcaccttcata

SEQ ID NO: 754670 - DNA, 25 bp, Homo sapien
taaaagggtttaaatcatagcgctg

SEQ ID NO: 754671 - DNA, 25 bp, Homo sapien
gtctggcaccttcatagagggttgg

SEQ ID NO: 754672 - DNA, 25 bp, Homo sapien
taaatcatagcgctgagcactgaca

SEQ ID NO: 754673 - DNA, 25 bp, Homo sapien
ttcattacctctcccagttggaggg

SEQ ID NO: 754674 - DNA, 25 bp, Homo sapien
tggcttatgccagtccgggcagcag

SEQ ID NO: 754675 - DNA, 25 bp, Homo sapien
taaaccattgactacataagccgag

SEQ ID NO: 754676 - DNA, 25 bp, Homo sapien
catccaatagttcctgaacaactgg

SEQ ID NO: 754677 - DNA, 25 bp, Homo sapien
gccatgatgaatatggaactgagtt

SEQ ID NO: 754678 - DNA, 25 bp, Homo sapien
tgtaagcaagttctggacatccaag

SEQ ID NO: 754679 - DNA, 25 bp, Homo sapien
gtacctcttacacgtttatctatgg

SEQ ID NO: 754680 - DNA, 25 bp, Homo sapien
caagttctggacatccaagccatga

SEQ ID NO: 754681 - DNA, 25 bp, Homo sapien
cttgatcaattgagtgtaaacttga

SEQ ID NO: 754682 - DNA, 25 bp, Homo sapien
tgtcatcaagggacttgatcaattg

SEQ ID NO: 754683 - DNA, 25 bp, Homo sapien
aacttgaagttagcagcagagccag

SEQ ID NO: 754684 - DNA, 25 bp, Homo sapien
gcagagccagaccacacctcagtct

SEQ ID NO: 754685 - DNA, 25 bp, Homo sapien
cccactttacttagcaagttgtcca

SEQ ID NO: 754686 - DNA, 25 bp, Homo sapien
ttgtccacgccaagtgaagcctggg

SEQ ID NO: 754687 - DNA, 25 bp, Homo sapien
tacttagcaagttgtccacgccaag

SEQ ID NO: 754688 - DNA, 25 bp, Homo sapien
tagcaagttgtccacgccaagtgaa

SEQ ID NO: 754689 - DNA, 25 bp, Homo sapien
tatcccatgataaatgctcgccagg

SEQ ID NO: 754690 - DNA, 25 bp, Homo sapien
cactagtgaaatgtagactgttgcc

SEQ ID NO: 754691 - DNA, 25 bp, Homo sapien
taagattgttgtactggacctggga

SEQ ID NO: 754692 - DNA, 25 bp, Homo sapien
ttcacgaatctgctgttacacctgt

SEQ ID NO: 754693 - DNA, 25 bp, Homo sapien
tcacctctccaaccttagcttgaat

SEQ ID NO: 754694 - DNA, 25 bp, Homo sapien
ttccaggaatggagagttcactatc

SEQ ID NO: 754695 - DNA, 25 bp, Homo sapien
tccaaaataatggaaaccgtcatca

SEQ ID NO: 754696 - DNA, 25 bp, Homo sapien
taatggaaaccgtcatcacctctcc

SEQ ID NO: 754697 - DNA, 25 bp, Homo sapien
gcaaaaggctttgggactgttctcg

SEQ ID NO: 754698 - DNA, 25 bp, Homo sapien
cacaggtccaaaggtgccgggttgt

SEQ ID NO: 754699 - DNA, 25 bp, Homo sapien
tctgtgctgtgtgctcctggtcaac

SEQ ID NO: 754700 - DNA, 25 bp, Homo sapien
tggtcaactcccttgcctttgcctg

SEQ ID NO: 754701 - DNA, 25 bp, Homo sapien
ttcccaggggtcataactggtcact

SEQ ID NO: 754702 - DNA, 25 bp, Homo sapien
ggataactggcatatggtctgcgac

SEQ ID NO: 754703 - DNA, 25 bp, Homo sapien
tgggaatggaagaccaggagcatga

SEQ ID NO: 754704 - DNA, 25 bp, Homo sapien
ggagcatgagggtgacttgtagcaa

SEQ ID NO: 754705 - DNA, 25 bp, Homo sapien
accctcatctttgcttgtccaaatc

SEQ ID NO: 754706 - DNA, 25 bp, Homo sapien
cctcatctttgcttgtccaaatcct

SEQ ID NO: 754707 - DNA, 25 bp, Homo sapien
cttccatcaaatccaaacatctcca

SEQ ID NO: 754708 - DNA, 25 bp, Homo sapien
ccttccatcaaatccaaacatctcc

SEQ ID NO: 754709 - DNA, 25 bp, Homo sapien
tcttcactcttaagacactcgctga

SEQ ID NO: 754710 - DNA, 25 bp, Homo sapien
gactcttcactcttaagacactcgc

SEQ ID NO: 754711 - DNA, 25 bp, Homo sapien
ctcttaagacactcgctgatgaatg

SEQ ID NO: 754712 - DNA, 25 bp, Homo sapien
cactcttaagacactcgctgatgaa

SEQ ID NO: 754713 - DNA, 25 bp, Homo sapien
atttcctgaacttccggatctcatc

SEQ ID NO: 754714 - DNA, 25 bp, Homo sapien
gtccagagaattattcttgatctgg

SEQ ID NO: 754715 - DNA, 25 bp, Homo sapien
agagaattattcttgatctggattg

SEQ ID NO: 754716 - DNA, 25 bp, Homo sapien
agaattattcttgatctggattgac

SEQ ID NO: 754717 - DNA, 25 bp, Homo sapien
ctagtccagagaattattcttgatc

SEQ ID NO: 754718 - DNA, 25 bp, Homo sapien
cttgatgccgcacaaataatacagc

SEQ ID NO: 754719 - DNA, 25 bp, Homo sapien
tacagctcgattcaagttggagccc

SEQ ID NO: 754720 - DNA, 25 bp, Homo sapien
tctgcggaaagcaagaacctgtgcc

SEQ ID NO: 754721 - DNA, 25 bp, Homo sapien
cacttggaactctcagacttgggag

SEQ ID NO: 754722 - DNA, 25 bp, Homo sapien
aatgacccaccacgtgtacgcgcat

SEQ ID NO: 754723 - DNA, 25 bp, Homo sapien
ataatgacccaccacgtgtacgcgc

SEQ ID NO: 754724 - DNA, 25 bp, Homo sapien
agcataatgacccaccacgtgtacg

SEQ ID NO: 754725 - DNA, 25 bp, Homo sapien
cataatgacccaccacgtgtacgcg

SEQ ID NO: 754726 - DNA, 25 bp, Homo sapien
tccaaatcaataagtgtagagaatt

SEQ ID NO: 754727 - DNA, 25 bp, Homo sapien
caaatcaataagtgtagagaattaa

SEQ ID NO: 754728 - DNA, 25 bp, Homo sapien
ccaaatcaataagtgtagagaatta

SEQ ID NO: 754729 - DNA, 25 bp, Homo sapien
cactatttatcccctaaggtccagg

SEQ ID NO: 754730 - DNA, 25 bp, Homo sapien
gggcagtgctggaccacactattta

SEQ ID NO: 754731 - DNA, 25 bp, Homo sapien
cagggcagtgctggaccacactatt

SEQ ID NO: 754732 - DNA, 25 bp, Homo sapien
gtgctggaccacactatttatcccc

SEQ ID NO: 754733 - DNA, 25 bp, Homo sapien
taggcgattggtctcctcacgggag

SEQ ID NO: 754734 - DNA, 25 bp, Homo sapien
cgattggtctcctcacgggagctcc

SEQ ID NO: 754735 - DNA, 25 bp, Homo sapien
gggagctcctcgaccctgccaaggg

SEQ ID NO: 754736 - DNA, 25 bp, Homo sapien
gctaggcgattggtctcctcacggg

SEQ ID NO: 754737 - DNA, 25 bp, Homo sapien
gcagagggcgagcaatcccggaaga

SEQ ID NO: 754738 - DNA, 25 bp, Homo sapien
ggccgcagccaaggctccgcagatg

SEQ ID NO: 754739 - DNA, 25 bp, Homo sapien
cagatgacccgagttctgatggagg

SEQ ID NO: 754740 - DNA, 25 bp, Homo sapien
gaaaatgttagtggcggagtcacac

SEQ ID NO: 754741 - DNA, 25 bp, Homo sapien
ctgggcatggttaagggcgaggctc

SEQ ID NO: 754742 - DNA, 25 bp, Homo sapien
acagttactgggacaggctgtgagc

SEQ ID NO: 754743 - DNA, 25 bp, Homo sapien
agcccgcacggcgtggtccttcagg

SEQ ID NO: 754744 - DNA, 25 bp, Homo sapien
tgagcgactcaccaggacagtttta

SEQ ID NO: 754745 - DNA, 25 bp, Homo sapien
gccttcttaaagtgcaggctcagaa

SEQ ID NO: 754746 - DNA, 25 bp, Homo sapien
tacgtattcaaaacaagagcgcctt

SEQ ID NO: 754747 - DNA, 25 bp, Homo sapien
gaacaggacagactacgtattcaaa

SEQ ID NO: 754748 - DNA, 25 bp, Homo sapien
cagaagttgttcaatggccaggacc

SEQ ID NO: 754749 - DNA, 25 bp, Homo sapien
tcttattttatgcaacggtgactga

SEQ ID NO: 754750 - DNA, 25 bp, Homo sapien
ccttggatcacattgggcacacttg

SEQ ID NO: 754751 - DNA, 25 bp, Homo sapien
catagttgggttagctccttggatc

SEQ ID NO: 754752 - DNA, 25 bp, Homo sapien
cagaagagccacgtcacaaatattt

SEQ ID NO: 754753 - DNA, 25 bp, Homo sapien
ctgatttctgtatcaatattctaaa

SEQ ID NO: 754754 - DNA, 25 bp, Homo sapien
attaagtcttacttggcataaatag

SEQ ID NO: 754755 - DNA, 25 bp, Homo sapien
aaattaagtcttacttggcataaat

SEQ ID NO: 754756 - DNA, 25 bp, Homo sapien
tcctgatttctgtatcaatattcta

SEQ ID NO: 754757 - DNA, 25 bp, Homo sapien
tctttgtgtcttgtgcattcgggtg

SEQ ID NO: 754758 - DNA, 25 bp, Homo sapien
gatgagtgagtatctaataacaatc

SEQ ID NO: 754759 - DNA, 25 bp, Homo sapien
tacaataatcagttaaggctcacag

SEQ ID NO: 754760 - DNA, 25 bp, Homo sapien
ggccccacagcccttagtacaataa

SEQ ID NO: 754761 - DNA, 25 bp, Homo sapien
tctaacatcgcattaaactttctga

SEQ ID NO: 754762 - DNA, 25 bp, Homo sapien
ctttactgtgtaattctaacatcgc

SEQ ID NO: 754763 - DNA, 25 bp, Homo sapien
taggattgggaagactaatgagcat

SEQ ID NO: 754764 - DNA, 25 bp, Homo sapien
cagattcataggattgggaagacta

SEQ ID NO: 754765 - DNA, 25 bp, Homo sapien
cattcaagtacactggcttaatcca

SEQ ID NO: 754766 - DNA, 25 bp, Homo sapien
gctttgctgggccaatacattaaaa

SEQ ID NO: 754767 - DNA, 25 bp, Homo sapien
ggttgtctatattcccattcaagta

SEQ ID NO: 754768 - DNA, 25 bp, Homo sapien
caagtacgttttcagttagtgccat

SEQ ID NO: 754769 - DNA, 25 bp, Homo sapien
gagatccgaagtctaaacctgccag

SEQ ID NO: 754770 - DNA, 25 bp, Homo sapien
gacagtttccctagtttgccagcca

SEQ ID NO: 754771 - DNA, 25 bp, Homo sapien
gctgaatgactgaccggcagaaacc

SEQ ID NO: 754772 - DNA, 25 bp, Homo sapien
agagcccgagttgctagctgatacc

SEQ ID NO: 754773 - DNA, 25 bp, Homo sapien
tgtactcttttagtgcacccgaggc

SEQ ID NO: 754774 - DNA, 25 bp, Homo sapien
ggtcccagtattccctgtatgtgtt

SEQ ID NO: 754775 - DNA, 25 bp, Homo sapien
gacgctgaagttctttacccgcagg

SEQ ID NO: 754776 - DNA, 25 bp, Homo sapien
tgggcaaagagagaccaccaccttg

SEQ ID NO: 754777 - DNA, 25 bp, Homo sapien
agtgggcctgggtgcggtgccggcc

SEQ ID NO: 754778 - DNA, 25 bp, Homo sapien
gggcctgggtgcggtgccggcccat

SEQ ID NO: 754779 - DNA, 25 bp, Homo sapien
catgatctggatgcagtgggcctgg

SEQ ID NO: 754780 - DNA, 25 bp, Homo sapien
gatctggatgcagtgggcctgggtg

SEQ ID NO: 754781 - DNA, 25 bp, Homo sapien
gtggtgaagcgtggcccggcggcac

SEQ ID NO: 754782 - DNA, 25 bp, Homo sapien
gcgaggaacctgcacctaaaagaag

SEQ ID NO: 754783 - DNA, 25 bp, Homo sapien
acctgcacctaaaagaagatgttgg

SEQ ID NO: 754784 - DNA, 25 bp, Homo sapien
ggaacctgcacctaaaagaagatgt

SEQ ID NO: 754785 - DNA, 25 bp, Homo sapien
cagaattatgctccagcaccaactc

SEQ ID NO: 754786 - DNA, 25 bp, Homo sapien
caactctgctgtaaccgctccttgc

SEQ ID NO: 754787 - DNA, 25 bp, Homo sapien
cattcccaagagtggaactttctgc

SEQ ID NO: 754788 - DNA, 25 bp, Homo sapien
cattcctacttgcaggcaggatctg

SEQ ID NO: 754789 - DNA, 25 bp, Homo sapien
ctaaaaacctgttctggtacagatt

SEQ ID NO: 754790 - DNA, 25 bp, Homo sapien
cggccaggcctaaaaacctgttctg

SEQ ID NO: 754791 - DNA, 25 bp, Homo sapien
cctaaaaacctgttctggtacagat

SEQ ID NO: 754792 - DNA, 25 bp, Homo sapien
gcctaaaaacctgttctggtacaga

SEQ ID NO: 754793 - DNA, 25 bp, Homo sapien
tcctttatgtcccagtggatgacca

SEQ ID NO: 754794 - DNA, 25 bp, Homo sapien
aatgaggtacatgccaatccagtcc

SEQ ID NO: 754795 - DNA, 25 bp, Homo sapien
ttgtagctgtatcggagcggctcct

SEQ ID NO: 754796 - DNA, 25 bp, Homo sapien
tgcccgatggaatagtaggagctgc

SEQ ID NO: 754797 - DNA, 25 bp, Homo sapien
tggcctcggatgacccggtgttgaa

SEQ ID NO: 754798 - DNA, 25 bp, Homo sapien
ttgaatctgttgactcttgtggcct

SEQ ID NO: 754799 - DNA, 25 bp, Homo sapien
taaatccggtgttgtgtgtctgaat

SEQ ID NO: 754800 - DNA, 25 bp, Homo sapien
cagcaattataactcgacttttggg

SEQ ID NO: 754801 - DNA, 25 bp, Homo sapien
tgagttgactcaaaactagatctgg

SEQ ID NO: 754802 - DNA, 25 bp, Homo sapien
ggaagatgcccttgagttgactcaa

SEQ ID NO: 754803 - DNA, 25 bp, Homo sapien
ttgactcaaaactagatctgggctg

SEQ ID NO: 754804 - DNA, 25 bp, Homo sapien
ctgcgggaagatgcccttgagttga

SEQ ID NO: 754805 - DNA, 25 bp, Homo sapien
acaggtgcagctaaatgaatcgaat

SEQ ID NO: 754806 - DNA, 25 bp, Homo sapien
gtaaatttagaggaccagattctgc

SEQ ID NO: 754807 - DNA, 25 bp, Homo sapien
tgtaaatttagaggaccagattctg

SEQ ID NO: 754808 - DNA, 25 bp, Homo sapien
tgcacaggtgcagctaaatgaatcg

SEQ ID NO: 754809 - DNA, 25 bp, Homo sapien
agccccagctctgcagagagccctt

SEQ ID NO: 754810 - DNA, 25 bp, Homo sapien
ccagctctgcagagagcccttttca

SEQ ID NO: 754811 - DNA, 25 bp, Homo sapien
cagctctgcagagagcccttttcat

SEQ ID NO: 754812 - DNA, 25 bp, Homo sapien
ccccagctctgcagagagccctttt

SEQ ID NO: 754813 - DNA, 25 bp, Homo sapien
tagtccagaaagttttcggacaaga

SEQ ID NO: 754814 - DNA, 25 bp, Homo sapien
tgatctggccccgatgagaaccatt

SEQ ID NO: 754815 - DNA, 25 bp, Homo sapien
ttccacaaagtacgagctggcatcg

SEQ ID NO: 754816 - DNA, 25 bp, Homo sapien
gactccacggtttttatagtccaga

SEQ ID NO: 754817 - DNA, 25 bp, Homo sapien
tggaggcagtgcaacgggaacaaat

SEQ ID NO: 754818 - DNA, 25 bp, Homo sapien
ccatttcttagtggaggcagtgcaa

SEQ ID NO: 754819 - DNA, 25 bp, Homo sapien
caaataatgaaacagttgaattctg

SEQ ID NO: 754820 - DNA, 25 bp, Homo sapien
gcagtgcaacgggaacaaataatga

SEQ ID NO: 754821 - DNA, 25 bp, Homo sapien
ttatatcaggtaccacttgctggag

SEQ ID NO: 754822 - DNA, 25 bp, Homo sapien
taatgggagaggtcaacatgaccag

SEQ ID NO: 754823 - DNA, 25 bp, Homo sapien
tgtgccagcaccattgagaactgct

SEQ ID NO: 754824 - DNA, 25 bp, Homo sapien
cttccattgtaggtttgtgcacaca

SEQ ID NO: 754825 - DNA, 25 bp, Homo sapien
gatttcctcttccttaatatttatc

SEQ ID NO: 754826 - DNA, 25 bp, Homo sapien
tcttccttaatatttatcttctgga

SEQ ID NO: 754827 - DNA, 25 bp, Homo sapien
ctaggatttcctcttccttaatatt

SEQ ID NO: 754828 - DNA, 25 bp, Homo sapien
tcctcttccttaatatttatcttct

SEQ ID NO: 754829 - DNA, 25 bp, Homo sapien
gaatgatgagaccacagcgtgcagc

SEQ ID NO: 754830 - DNA, 25 bp, Homo sapien
tataggatgctgctgcttgaccaag

SEQ ID NO: 754831 - DNA, 25 bp, Homo sapien
gccagcggagcccaaatgcatgtat

SEQ ID NO: 754832 - DNA, 25 bp, Homo sapien
tacgacagtgacgacaacacaaggg

SEQ ID NO: 754833 - DNA, 25 bp, Homo sapien
tggcctgatgaagcccctgtgtcta

SEQ ID NO: 754834 - DNA, 25 bp, Homo sapien
gactgtggcctgatgaagcccctgt

SEQ ID NO: 754835 - DNA, 25 bp, Homo sapien
ctctggctgcttcgccgcagggaaa

SEQ ID NO: 754836 - DNA, 25 bp, Homo sapien
ccctgtgtctagtcttggtgctggt

SEQ ID NO: 754837 - DNA, 25 bp, Homo sapien
tcttaagggcttagcgcctatggcc

SEQ ID NO: 754838 - DNA, 25 bp, Homo sapien
attgaaaatggcagcccgcggtgca

SEQ ID NO: 754839 - DNA, 25 bp, Homo sapien
cctatggacttggtagcttgggctc

SEQ ID NO: 754840 - DNA, 25 bp, Homo sapien
gcagtcctggtgaaaacatgcccaa

SEQ ID NO: 754841 - DNA, 25 bp, Homo sapien
gcccttcaatgtcccatatctctga

SEQ ID NO: 754842 - DNA, 25 bp, Homo sapien
gccttcaatccatcaaactgccctt

SEQ ID NO: 754843 - DNA, 25 bp, Homo sapien
ggccttcaatccatcaaactgccct

SEQ ID NO: 754844 - DNA, 25 bp, Homo sapien
tgtcccatatctctgacattcccat

SEQ ID NO: 754845 - DNA, 25 bp, Homo sapien
aaatttggcctctcgccacacacac

SEQ ID NO: 754846 - DNA, 25 bp, Homo sapien
tcttgcctgccaaatttggcctctc

SEQ ID NO: 754847 - DNA, 25 bp, Homo sapien
attcttgcctgccaaatttggcctc

SEQ ID NO: 754848 - DNA, 25 bp, Homo sapien
ttgcctgccaaatttggcctctcgc

SEQ ID NO: 754849 - DNA, 25 bp, Homo sapien
cagacacagaatcttagttaggtca

SEQ ID NO: 754850 - DNA, 25 bp, Homo sapien
acacagaatcttagttaggtcagtg

SEQ ID NO: 754851 - DNA, 25 bp, Homo sapien
cacagaatcttagttaggtcagtgt

SEQ ID NO: 754852 - DNA, 25 bp, Homo sapien
gacacagaatcttagttaggtcagt

SEQ ID NO: 754853 - DNA, 25 bp, Homo sapien
catcttggtgccatacaattgtttt

SEQ ID NO: 754854 - DNA, 25 bp, Homo sapien
tcttggtgccatacaattgttttaa

SEQ ID NO: 754855 - DNA, 25 bp, Homo sapien
tggtgccatacaattgttttaaatt

SEQ ID NO: 754856 - DNA, 25 bp, Homo sapien
cttggtgccatacaattgttttaaa

SEQ ID NO: 754857 - DNA, 25 bp, Homo sapien
ccgagtttttgaccgtgacactggg

SEQ ID NO: 754858 - DNA, 25 bp, Homo sapien
ctgggggtggttgctcgcagggccc

SEQ ID NO: 754859 - DNA, 25 bp, Homo sapien
cactcactccatggtagtatttgaa

SEQ ID NO: 754860 - DNA, 25 bp, Homo sapien
tccatggtagtatttgaagcagatc

SEQ ID NO: 754861 - DNA, 25 bp, Homo sapien
aaggcctcaattagctcatcttcag

SEQ ID NO: 754862 - DNA, 25 bp, Homo sapien
ggcctcaattagctcatcttcagga

SEQ ID NO: 754863 - DNA, 25 bp, Homo sapien
cctcaattagctcatcttcaggatg

SEQ ID NO: 754864 - DNA, 25 bp, Homo sapien
accaaggcctcaattagctcatctt

SEQ ID NO: 754865 - DNA, 25 bp, Homo sapien
agtgagggaaaaacagcgaagccgt

SEQ ID NO: 754866 - DNA, 25 bp, Homo sapien
gatgggaaacccagttcagtgtcca

SEQ ID NO: 754867 - DNA, 25 bp, Homo sapien
cccgctatgagttccgggatgggaa

SEQ ID NO: 754868 - DNA, 25 bp, Homo sapien
gaagccgtcaaaagcacatgtgcct

SEQ ID NO: 754869 - DNA, 25 bp, Homo sapien
aggagaaccggcaggcaaagggagg

SEQ ID NO: 754870 - DNA, 25 bp, Homo sapien
gcaggagaaccggcaggcaaaggga

SEQ ID NO: 754871 - DNA, 25 bp, Homo sapien
tgcaggagaaccggcaggcaaaggg

SEQ ID NO: 754872 - DNA, 25 bp, Homo sapien
tggctcacaccaacagcttcagact

SEQ ID NO: 754873 - DNA, 25 bp, Homo sapien
tcacaccaacagcttcagactgcat

SEQ ID NO: 754874 - DNA, 25 bp, Homo sapien
ccaacagcttcagactgcatcagag

SEQ ID NO: 754875 - DNA, 25 bp, Homo sapien
caccaacagcttcagactgcatcag

SEQ ID NO: 754876 - DNA, 25 bp, Homo sapien
gtgctaagctccttgcctctaatcc

SEQ ID NO: 754877 - DNA, 25 bp, Homo sapien
tgctaagctccttgcctctaatccc

SEQ ID NO: 754878 - DNA, 25 bp, Homo sapien
acttgatgagcgtctgacccctgct

SEQ ID NO: 754879 - DNA, 25 bp, Homo sapien
cacttgatgagcgtctgacccctgc

SEQ ID NO: 754880 - DNA, 25 bp, Homo sapien
tcacttgatgagcgtctgacccctg

SEQ ID NO: 754881 - DNA, 25 bp, Homo sapien
tggaaatgcagtcatctttgtgttc

SEQ ID NO: 754882 - DNA, 25 bp, Homo sapien
ctccttggaaatgcagtcatctttg

SEQ ID NO: 754883 - DNA, 25 bp, Homo sapien
cttggaaatgcagtcatctttgtgt

SEQ ID NO: 754884 - DNA, 25 bp, Homo sapien
tccttggaaatgcagtcatctttgt

SEQ ID NO: 754885 - DNA, 25 bp, Homo sapien
gacctggatcctctaagacttagaa

SEQ ID NO: 754886 - DNA, 25 bp, Homo sapien
ataacctcgatccattcaaagccag

SEQ ID NO: 754887 - DNA, 25 bp, Homo sapien
gatgaatccgtttccataacctcga

SEQ ID NO: 754888 - DNA, 25 bp, Homo sapien
gaacctgagtcctttaatcagaaag

SEQ ID NO: 754889 - DNA, 25 bp, Homo sapien
ccctctgtaggccaatcattcttac

SEQ ID NO: 754890 - DNA, 25 bp, Homo sapien
tgtgaaggggtcatcatcccaccct

SEQ ID NO: 754891 - DNA, 25 bp, Homo sapien
aggccccactcctttcttgtctgga

SEQ ID NO: 754892 - DNA, 25 bp, Homo sapien
tggatgaccattacccagccagctg

SEQ ID NO: 754893 - DNA, 25 bp, Homo sapien
agggtcctcaatttcagggctctta

SEQ ID NO: 754894 - DNA, 25 bp, Homo sapien
caccttgaagacaaggcacagggtc

SEQ ID NO: 754895 - DNA, 25 bp, Homo sapien
ccttgaagacaaggcacagggtcct

SEQ ID NO: 754896 - DNA, 25 bp, Homo sapien
aatttcagggctcttatgctaatca

SEQ ID NO: 754897 - DNA, 25 bp, Homo sapien
tcttccttagttccttagactcctc

SEQ ID NO: 754898 - DNA, 25 bp, Homo sapien
cagatgcccagatctagaccattgg

SEQ ID NO: 754899 - DNA, 25 bp, Homo sapien
cattggatgccataccccttattca

SEQ ID NO: 754900 - DNA, 25 bp, Homo sapien
tcatcttccttagttccttagactc

SEQ ID NO: 754901 - DNA, 25 bp, Homo sapien
tacaggcaacgaagacagtgatttc

SEQ ID NO: 754902 - DNA, 25 bp, Homo sapien
agctacaggcaacgaagacagtgat

SEQ ID NO: 754903 - DNA, 25 bp, Homo sapien
gctacaggcaacgaagacagtgatt

SEQ ID NO: 754904 - DNA, 25 bp, Homo sapien
cagctacaggcaacgaagacagtga

SEQ ID NO: 754905 - DNA, 25 bp, Homo sapien
gagagagaagctgatcagcctccga

SEQ ID NO: 754906 - DNA, 25 bp, Homo sapien
tgtccttggacggtctcatcagcac

SEQ ID NO: 754907 - DNA, 25 bp, Homo sapien
tccttgtccttggacggtctcatca

SEQ ID NO: 754908 - DNA, 25 bp, Homo sapien
gctgatcagcctccgacttccttgt

SEQ ID NO: 754909 - DNA, 25 bp, Homo sapien
cctttggttagtgacaattcctctt

SEQ ID NO: 754910 - DNA, 25 bp, Homo sapien
tggttagtgacaattcctcttggtt

SEQ ID NO: 754911 - DNA, 25 bp, Homo sapien
gcttcaggacttggacttcactgga

SEQ ID NO: 754912 - DNA, 25 bp, Homo sapien
tcttgggcttcaggacttggacttc

SEQ ID NO: 754913 - DNA, 25 bp, Homo sapien
tcagtgattggcggaggtagctctc

SEQ ID NO: 754914 - DNA, 25 bp, Homo sapien
caggatgagtggtgagctggaaaga

SEQ ID NO: 754915 - DNA, 25 bp, Homo sapien
gggtttcagtgattggcggaggtag

SEQ ID NO: 754916 - DNA, 25 bp, Homo sapien
gcaggatgagtggtgagctggaaag

SEQ ID NO: 754917 - DNA, 25 bp, Homo sapien
tgcctatgatcttggatctcctctc

SEQ ID NO: 754918 - DNA, 25 bp, Homo sapien
ggtgttgcctatgatcttggatctc

SEQ ID NO: 754919 - DNA, 25 bp, Homo sapien
gggttcacggtgttgcctatgatct

SEQ ID NO: 754920 - DNA, 25 bp, Homo sapien
tatgatcttggatctcctctcctgt

SEQ ID NO: 754921 - DNA, 25 bp, Homo sapien
gaacccaaccgtgccagcatcctgg

SEQ ID NO: 754922 - DNA, 25 bp, Homo sapien
caccagaacccaaccgtgccagcat

SEQ ID NO: 754923 - DNA, 25 bp, Homo sapien
cagcttcggaactttgagaaataca

SEQ ID NO: 754924 - DNA, 25 bp, Homo sapien
agcatcctgggctcggacttcccag

SEQ ID NO: 754925 - DNA, 25 bp, Homo sapien
tccaggagtctttgaacgggcatcg

SEQ ID NO: 754926 - DNA, 25 bp, Homo sapien
gcacgtcagtgggcaaggacacaaa

SEQ ID NO: 754927 - DNA, 25 bp, Homo sapien
aacgggcatcgacagctttcccaag

SEQ ID NO: 754928 - DNA, 25 bp, Homo sapien
tcacctcaatttccagcacgtcagt

SEQ ID NO: 754929 - DNA, 25 bp, Homo sapien
cagcttggacttaggagagaactca

SEQ ID NO: 754930 - DNA, 25 bp, Homo sapien
cgtttcagaaaccacggatgcaggg

SEQ ID NO: 754931 - DNA, 25 bp, Homo sapien
tgctaagaagataggagccggcagc

SEQ ID NO: 754932 - DNA, 25 bp, Homo sapien
tacaggtggagccaaacgtttcaga

SEQ ID NO: 754933 - DNA, 25 bp, Homo sapien
atgatctgttggaagcctgcggcca

SEQ ID NO: 754934 - DNA, 25 bp, Homo sapien
tgcggccaagtgtgtagctgaccac

SEQ ID NO: 754935 - DNA, 25 bp, Homo sapien
gaagcctgcggccaagtgtgtagct

SEQ ID NO: 754936 - DNA, 25 bp, Homo sapien
tctgttggaagcctgcggccaagtg

SEQ ID NO: 754937 - DNA, 25 bp, Homo sapien
aatcggaattgcagctgtccactca

SEQ ID NO: 754938 - DNA, 25 bp, Homo sapien
gaagtgatctcaaatcggaattgca

SEQ ID NO: 754939 - DNA, 25 bp, Homo sapien
gatctcaaatcggaattgcagctgt

SEQ ID NO: 754940 - DNA, 25 bp, Homo sapien
gaggaagtgatctcaaatcggaatt

SEQ ID NO: 754941 - DNA, 25 bp, Homo sapien
aagaaaaatatgtcatttctcccag

SEQ ID NO: 754942 - DNA, 25 bp, Homo sapien
tatgtcatttctcccagaagagagc

SEQ ID NO: 754943 - DNA, 25 bp, Homo sapien
aaatatgtcatttctcccagaagag

SEQ ID NO: 754944 - DNA, 25 bp, Homo sapien
ctggtaagaagaaaaatatgtcatt

SEQ ID NO: 754945 - DNA, 25 bp, Homo sapien
tgaatttgggctgactcaggctcgg

SEQ ID NO: 754946 - DNA, 25 bp, Homo sapien
tcaggctcggtactcagggaaatct

SEQ ID NO: 754947 - DNA, 25 bp, Homo sapien
tgcctccgtgatgactgctgcttcc

SEQ ID NO: 754948 - DNA, 25 bp, Homo sapien
tctggtgcctcagaccgaggttccc

SEQ ID NO: 754949 - DNA, 25 bp, Homo sapien
cgtcttccagcagcagtgctgatgc

SEQ ID NO: 754950 - DNA, 25 bp, Homo sapien
ttccagcagcagtgctgatgcctcc

SEQ ID NO: 754951 - DNA, 25 bp, Homo sapien
cagcagcagtgctgatgcctcctca

SEQ ID NO: 754952 - DNA, 25 bp, Homo sapien
agcagcagtgctgatgcctcctcac

SEQ ID NO: 754953 - DNA, 25 bp, Homo sapien
cccggctctgggtcgttgcttcctc

SEQ ID NO: 754954 - DNA, 25 bp, Homo sapien
cggctctgggtcgttgcttcctcct

SEQ ID NO: 754955 - DNA, 25 bp, Homo sapien
ccggctctgggtcgttgcttcctcc

SEQ ID NO: 754956 - DNA, 25 bp, Homo sapien
accgtctccagctcggacacaggca

SEQ ID NO: 754957 - DNA, 25 bp, Homo sapien
ctgacgcgatcaccgtctccagctc

SEQ ID NO: 754958 - DNA, 25 bp, Homo sapien
tttttctcttcaccgaggcccgcag

SEQ ID NO: 754959 - DNA, 25 bp, Homo sapien
gctttttctcttcaccgaggcccgc

SEQ ID NO: 754960 - DNA, 25 bp, Homo sapien
gaacctgttgccgttgtagcaggag

SEQ ID NO: 754961 - DNA, 25 bp, Homo sapien
tcttgcgaggagaagaccgtgctct

SEQ ID NO: 754962 - DNA, 25 bp, Homo sapien
tgctctcggagatcttggcgctgtc

SEQ ID NO: 754963 - DNA, 25 bp, Homo sapien
gctctgcatggagtcgggtaccgac

SEQ ID NO: 754964 - DNA, 25 bp, Homo sapien
tataattccacaggcatgactaaga

SEQ ID NO: 754965 - DNA, 25 bp, Homo sapien
tatgtacgtacatgggctagttgaa

SEQ ID NO: 754966 - DNA, 25 bp, Homo sapien
cgttttaaaactaatggtggcagct

SEQ ID NO: 754967 - DNA, 25 bp, Homo sapien
taggataacatgtacactaaccagt

SEQ ID NO: 754968 - DNA, 25 bp, Homo sapien
cacatgccagcgtgtgcatggcctt

SEQ ID NO: 754969 - DNA, 25 bp, Homo sapien
gcagatcaagagacccctcgggaat

SEQ ID NO: 754970 - DNA, 25 bp, Homo sapien
tgcatggccttcagcagatcaagag

SEQ ID NO: 754971 - DNA, 25 bp, Homo sapien
gatggctgggaagaagtcacatgcc

SEQ ID NO: 754972 - DNA, 25 bp, Homo sapien
atgatgttcaggcctcagggaagga

SEQ ID NO: 754973 - DNA, 25 bp, Homo sapien
ggaagctggcttactggctgggaat

SEQ ID NO: 754974 - DNA, 25 bp, Homo sapien
gggaattatggagtataggacattc

SEQ ID NO: 754975 - DNA, 25 bp, Homo sapien
gaagaggctcatcgattgttgggta

SEQ ID NO: 754976 - DNA, 25 bp, Homo sapien
cgtggctgtcaattcgagcttccca

SEQ ID NO: 754977 - DNA, 25 bp, Homo sapien
tgtgcggttcacgtggtccacataa

SEQ ID NO: 754978 - DNA, 25 bp, Homo sapien
tccatctgctggatggaccccgatc

SEQ ID NO: 754979 - DNA, 25 bp, Homo sapien
tggctgctgccgtcggacgctgcca

SEQ ID NO: 754980 - DNA, 25 bp, Homo sapien
cattgattgctattgtgtactctgt

SEQ ID NO: 754981 - DNA, 25 bp, Homo sapien
tctggttcagctcaagggaaactcc

SEQ ID NO: 754982 - DNA, 25 bp, Homo sapien
tagttttatgtctccttgcacaaac

SEQ ID NO: 754983 - DNA, 25 bp, Homo sapien
gggaaactccttgcaacactgaata

SEQ ID NO: 754984 - DNA, 25 bp, Homo sapien
tcttcggacctctctgttgcaatgg

SEQ ID NO: 754985 - DNA, 25 bp, Homo sapien
ggcttgctcgcagctttggctgcca

SEQ ID NO: 754986 - DNA, 25 bp, Homo sapien
caatggttcgctgaatgttttgata

SEQ ID NO: 754987 - DNA, 25 bp, Homo sapien
gccagaatcttcttcggacctctct

SEQ ID NO: 754988 - DNA, 25 bp, Homo sapien
gctggactgggaagattcggcttct

SEQ ID NO: 754989 - DNA, 25 bp, Homo sapien
agctggactgggaagattcggcttc

SEQ ID NO: 754990 - DNA, 25 bp, Homo sapien
tggactgggaagattcggcttctga

SEQ ID NO: 754991 - DNA, 25 bp, Homo sapien
ctggactgggaagattcggcttctg

SEQ ID NO: 754992 - DNA, 25 bp, Homo sapien
catgtagcacagtgaagaactcggg

SEQ ID NO: 754993 - DNA, 25 bp, Homo sapien
tgattttttgtgagttcactggaga

SEQ ID NO: 754994 - DNA, 25 bp, Homo sapien
agttcactggagaaagtgacccttc

SEQ ID NO: 754995 - DNA, 25 bp, Homo sapien
gtgatgaacttgaccgctggggact

SEQ ID NO: 754996 - DNA, 25 bp, Homo sapien
tccagccgagtgtctgcgaacatgt

SEQ ID NO: 754997 - DNA, 25 bp, Homo sapien
gcatcccgtcggactttcagaatca

SEQ ID NO: 754998 - DNA, 25 bp, Homo sapien
tagcgttcaaaattgcgagcatccc

SEQ ID NO: 754999 - DNA, 25 bp, Homo sapien
tactggtgaagactcggtaggcact

SEQ ID NO: 755000 - DNA, 25 bp, Homo sapien
cacatagcaatgtcacaacagttgg

SEQ ID NO: 755001 - DNA, 25 bp, Homo sapien
tggcatctagcagcgtgagggctag

SEQ ID NO: 755002 - DNA, 25 bp, Homo sapien
tcccgtaaggcacagggtattcctc

SEQ ID NO: 755003 - DNA, 25 bp, Homo sapien
gagggctaggagtgctgctaatgtc

SEQ ID NO: 755004 - DNA, 25 bp, Homo sapien
aaattccagtgtgagatttgaaggg

SEQ ID NO: 755005 - DNA, 25 bp, Homo sapien
gggattaaattccagtgtgagattt

SEQ ID NO: 755006 - DNA, 25 bp, Homo sapien
aaacaaatcatatccaaactatcaa

SEQ ID NO: 755007 - DNA, 25 bp, Homo sapien
aacaaatcatatccaaactatcaaa

SEQ ID NO: 755008 - DNA, 25 bp, Homo sapien
tcaatgaaagtggtagctcgactgt

SEQ ID NO: 755009 - DNA, 25 bp, Homo sapien
ggtagctcgactgttgtggtccacg

SEQ ID NO: 755010 - DNA, 25 bp, Homo sapien
gggtcaatgaaagtggtagctcgac

SEQ ID NO: 755011 - DNA, 25 bp, Homo sapien
aagtggtagctcgactgttgtggtc

SEQ ID NO: 755012 - DNA, 25 bp, Homo sapien
gctgtaacttcggagcctctggagg

SEQ ID NO: 755013 - DNA, 25 bp, Homo sapien
gaggtgctgtcggtgagttagatga

SEQ ID NO: 755014 - DNA, 25 bp, Homo sapien
agttagatgattgggaagacgaccg

SEQ ID NO: 755015 - DNA, 25 bp, Homo sapien
tctccagcgctgtaacttcggagcc

SEQ ID NO: 755016 - DNA, 25 bp, Homo sapien
tagcctttcatggtagccacaaagt

SEQ ID NO: 755017 - DNA, 25 bp, Homo sapien
agcctttcatggtagccacaaagtg

SEQ ID NO: 755018 - DNA, 25 bp, Homo sapien
ttagcctttcatggtagccacaaag

SEQ ID NO: 755019 - DNA, 25 bp, Homo sapien
tcctgaagacgtggaatcaagcccc

SEQ ID NO: 755020 - DNA, 25 bp, Homo sapien
ggtctcttagttatgcggtcctgaa

SEQ ID NO: 755021 - DNA, 25 bp, Homo sapien
cacgttagtggtcacccatttgcag

SEQ ID NO: 755022 - DNA, 25 bp, Homo sapien
cctattgcctgtgatacgggacaca

SEQ ID NO: 755023 - DNA, 25 bp, Homo sapien
gttggtactggatggctcaaagacc

SEQ ID NO: 755024 - DNA, 25 bp, Homo sapien
aatgtctgcaaacggttggttggta

SEQ ID NO: 755025 - DNA, 25 bp, Homo sapien
ggagatacggcttgctgcgtccctg

SEQ ID NO: 755026 - DNA, 25 bp, Homo sapien
gcctaatatgagtgtgatagaggaa

SEQ ID NO: 755027 - DNA, 25 bp, Homo sapien
ttcgaatagcagctactaagctgtg

SEQ ID NO: 755028 - DNA, 25 bp, Homo sapien
ccagtggcaatgactcatgttgatg

SEQ ID NO: 755029 - DNA, 25 bp, Homo sapien
gactcatgttgatgttggcttcgaa

SEQ ID NO: 755030 - DNA, 25 bp, Homo sapien
gatgttggcttcgaatagcagctac

SEQ ID NO: 755031 - DNA, 25 bp, Homo sapien
agagataatcactctgatgattgga

SEQ ID NO: 755032 - DNA, 25 bp, Homo sapien
gataatcactctgatgattggaaaa

SEQ ID NO: 755033 - DNA, 25 bp, Homo sapien
cagagataatcactctgatgattgg

SEQ ID NO: 755034 - DNA, 25 bp, Homo sapien
gagataatcactctgatgattggaa

SEQ ID NO: 755035 - DNA, 25 bp, Homo sapien
ggctgacgctcttgcagcatttcaa

SEQ ID NO: 755036 - DNA, 25 bp, Homo sapien
ttggctgacgctcttgcagcatttc

SEQ ID NO: 755037 - DNA, 25 bp, Homo sapien
gctggcgaagaaatgccacaatctt

SEQ ID NO: 755038 - DNA, 25 bp, Homo sapien
aaaaatgtttggctggcgaagaaat

SEQ ID NO: 755039 - DNA, 25 bp, Homo sapien
taccctcagtccgaatgtaatggat

SEQ ID NO: 755040 - DNA, 25 bp, Homo sapien
agcccgtgattaccctcagtccgaa

SEQ ID NO: 755041 - DNA, 25 bp, Homo sapien
agcaaaatgaccagatccgcatcac

SEQ ID NO: 755042 - DNA, 25 bp, Homo sapien
gcatcacaggacaacttctcaagcc

SEQ ID NO: 755043 - DNA, 25 bp, Homo sapien
cagggggacgtaggacataatctct

SEQ ID NO: 755044 - DNA, 25 bp, Homo sapien
ctgcagggggacgtaggacataatc

SEQ ID NO: 755045 - DNA, 25 bp, Homo sapien
gggacgtaggacataatctcttctt

SEQ ID NO: 755046 - DNA, 25 bp, Homo sapien
cgtaggacataatctcttcttcaaa

SEQ ID NO: 755047 - DNA, 25 bp, Homo sapien
cagggtgaacatcggggagagaagc

SEQ ID NO: 755048 - DNA, 25 bp, Homo sapien
tctgaggtgaagaacagggtgaaca

SEQ ID NO: 755049 - DNA, 25 bp, Homo sapien
tgaggtgaagaacagggtgaacatc

SEQ ID NO: 755050 - DNA, 25 bp, Homo sapien
gttctgaggtgaagaacagggtgaa

SEQ ID NO: 755051 - DNA, 25 bp, Homo sapien
tgtcttcgctccccaaaagtaggtc

SEQ ID NO: 755052 - DNA, 25 bp, Homo sapien
cttcgctccccaaaagtaggtcatc

SEQ ID NO: 755053 - DNA, 25 bp, Homo sapien
tcttcgctccccaaaagtaggtcat

SEQ ID NO: 755054 - DNA, 25 bp, Homo sapien
gtcttcgctccccaaaagtaggtca

SEQ ID NO: 755055 - DNA, 25 bp, Homo sapien
ttacagagtactttggcataaactt

SEQ ID NO: 755056 - DNA, 25 bp, Homo sapien
ctttacagagtactttggcataaac

SEQ ID NO: 755057 - DNA, 25 bp, Homo sapien
gctttacagagtactttggcataaa

SEQ ID NO: 755058 - DNA, 25 bp, Homo sapien
tacagagtactttggcataaacttc

SEQ ID NO: 755059 - DNA, 25 bp, Homo sapien
aattgcggagcttggcctcaaagtc

SEQ ID NO: 755060 - DNA, 25 bp, Homo sapien
ctgtagaaattgcggagcttggcct

SEQ ID NO: 755061 - DNA, 25 bp, Homo sapien
tggcctcaaagtctcttcggtaggg

SEQ ID NO: 755062 - DNA, 25 bp, Homo sapien
tagaaattgcggagcttggcctcaa

SEQ ID NO: 755063 - DNA, 25 bp, Homo sapien
tctccaacaaaggtgacgtagagct

SEQ ID NO: 755064 - DNA, 25 bp, Homo sapien
cgctggagctctttccgcgaatagg

SEQ ID NO: 755065 - DNA, 25 bp, Homo sapien
taggccatcacctgattgaaggttc

SEQ ID NO: 755066 - DNA, 25 bp, Homo sapien
tccaacaaatgatcccggcgaataa

SEQ ID NO: 755067 - DNA, 25 bp, Homo sapien
catttgccgagtactcaaagagtcc

SEQ ID NO: 755068 - DNA, 25 bp, Homo sapien
caaagagtccatagtaagggttgaa

SEQ ID NO: 755069 - DNA, 25 bp, Homo sapien
ggttttctacaaatgcggacatggg

SEQ ID NO: 755070 - DNA, 25 bp, Homo sapien
gggctgatctgcaccgtgtaagtat

SEQ ID NO: 755071 - DNA, 25 bp, Homo sapien
gaagaaaatctcatcaccgtgggct

SEQ ID NO: 755072 - DNA, 25 bp, Homo sapien
tgacggaggccacttttaacaggta

SEQ ID NO: 755073 - DNA, 25 bp, Homo sapien
gcaattgcgtttccaggatgcacca

SEQ ID NO: 755074 - DNA, 25 bp, Homo sapien
taacaggtagtccagccaagtgtgg

SEQ ID NO: 755075 - DNA, 25 bp, Homo sapien
ccgtttccttatgagtgatgcacag

SEQ ID NO: 755076 - DNA, 25 bp, Homo sapien
aatagatccatttagctcatcagcg

SEQ ID NO: 755077 - DNA, 25 bp, Homo sapien
ccagtggtaccagtcgtgagcgatc

SEQ ID NO: 755078 - DNA, 25 bp, Homo sapien
ctgctttacaaagtcaaggctgtgc

SEQ ID NO: 755079 - DNA, 25 bp, Homo sapien
catgtgcatttatcactgactttgc

SEQ ID NO: 755080 - DNA, 25 bp, Homo sapien
gcatttatcactgactttgcaaggg

SEQ ID NO: 755081 - DNA, 25 bp, Homo sapien
gggacatgtgcatttatcactgact

SEQ ID NO: 755082 - DNA, 25 bp, Homo sapien
cttaagggacatgtgcatttatcac

SEQ ID NO: 755083 - DNA, 25 bp, Homo sapien
gagcagagtcccagagtgtaaagat

SEQ ID NO: 755084 - DNA, 25 bp, Homo sapien
cagcattcacgcgtcgtggagagca

SEQ ID NO: 755085 - DNA, 25 bp, Homo sapien
acaagcagcattcacgcgtcgtgga

SEQ ID NO: 755086 - DNA, 25 bp, Homo sapien
accacgtgcagtgtgagaagaagga

SEQ ID NO: 755087 - DNA, 25 bp, Homo sapien
ttattcatattcgtatgtctcaaca

SEQ ID NO: 755088 - DNA, 25 bp, Homo sapien
gcctggtgggtggagggaacagcta

SEQ ID NO: 755089 - DNA, 25 bp, Homo sapien
cctttaatccctagggcagccaggg

SEQ ID NO: 755090 - DNA, 25 bp, Homo sapien
ctggtgggtggagggaacagctacc

SEQ ID NO: 755091 - DNA, 25 bp, Homo sapien
cgtcctttaatccctagggcagcca

SEQ ID NO: 755092 - DNA, 25 bp, Homo sapien
gcgtcaagaaggtactgatggatca

SEQ ID NO: 755093 - DNA, 25 bp, Homo sapien
cccaggatgcgaccgctaaacctga

SEQ ID NO: 755094 - DNA, 25 bp, Homo sapien
tagaagggcctcgtgaagaaagcgt

SEQ ID NO: 755095 - DNA, 25 bp, Homo sapien
ctgatggatcagagccagacccagg

SEQ ID NO: 755096 - DNA, 25 bp, Homo sapien
catccaaatattccaggtcactcaa

SEQ ID NO: 755097 - DNA, 25 bp, Homo sapien
tccttcatccactgcaaactctggt

SEQ ID NO: 755098 - DNA, 25 bp, Homo sapien
aaagtgaggtctaagatgtctgtga

SEQ ID NO: 755099 - DNA, 25 bp, Homo sapien
tcattaacagtgaaagtgaggtcta

SEQ ID NO: 755100 - DNA, 25 bp, Homo sapien
ccgccacttcaccatgcgctcgatg

SEQ ID NO: 755101 - DNA, 25 bp, Homo sapien
tcggtctgctgtaccacgccgcgct

SEQ ID NO: 755102 - DNA, 25 bp, Homo sapien
cgtcacctgtgtgttggctcctcca

SEQ ID NO: 755103 - DNA, 25 bp, Homo sapien
cagacttcaactccctttccgtgac

SEQ ID NO: 755104 - DNA, 25 bp, Homo sapien
tggtgaggagcactcgctgagccca

SEQ ID NO: 755105 - DNA, 25 bp, Homo sapien
ggtcacatgccagttgcttgaaagc

SEQ ID NO: 755106 - DNA, 25 bp, Homo sapien
gaagatcctcagtactccctggtga

SEQ ID NO: 755107 - DNA, 25 bp, Homo sapien
taagagttgagtttcccagagaact

SEQ ID NO: 755108 - DNA, 25 bp, Homo sapien
ggtactcagtgttattccgccagtc

SEQ ID NO: 755109 - DNA, 25 bp, Homo sapien
tttccgcggtgccagctatcaccag

SEQ ID NO: 755110 - DNA, 25 bp, Homo sapien
tccgccagtcatttaggtcgatttc

SEQ ID NO: 755111 - DNA, 25 bp, Homo sapien
agctccctggcatcaaacacggaca

SEQ ID NO: 755112 - DNA, 25 bp, Homo sapien
cagaaccagcggatcacaagatgcc

SEQ ID NO: 755113 - DNA, 25 bp, Homo sapien
gaagccttcgtagggcacgctggat

SEQ ID NO: 755114 - DNA, 25 bp, Homo sapien
ttctctatgcagaagcgccgaagcc

SEQ ID NO: 755115 - DNA, 25 bp, Homo sapien
ggatgttcccgtgacaaactgcagt

SEQ ID NO: 755116 - DNA, 25 bp, Homo sapien
cggtgtctggcgctctcatctggga

SEQ ID NO: 755117 - DNA, 25 bp, Homo sapien
gactgacacaaaggttttatgtagc

SEQ ID NO: 755118 - DNA, 25 bp, Homo sapien
tagcctgggctatgaccgggttttg

SEQ ID NO: 755119 - DNA, 25 bp, Homo sapien
cgggttttgctgtggcggtgtctgg

SEQ ID NO: 755120 - DNA, 25 bp, Homo sapien
ttattgcatttatttagagccttgg

SEQ ID NO: 755121 - DNA, 25 bp, Homo sapien
gcatttatttagagccttggtgaac

SEQ ID NO: 755122 - DNA, 25 bp, Homo sapien
ttgcatttatttagagccttggtga

SEQ ID NO: 755123 - DNA, 25 bp, Homo sapien
catttatttagagccttggtgaact

SEQ ID NO: 755124 - DNA, 25 bp, Homo sapien
tcttttcattacaagatccctaggg

SEQ ID NO: 755125 - DNA, 25 bp, Homo sapien
taggccttaaagacataactgggaa

SEQ ID NO: 755126 - DNA, 25 bp, Homo sapien
tcagagtatcagatcactgcccagg

SEQ ID NO: 755127 - DNA, 25 bp, Homo sapien
ggtttcctgcccatcgagaatctag

SEQ ID NO: 755128 - DNA, 25 bp, Homo sapien
caacatggagtacgagggatacggt

SEQ ID NO: 755129 - DNA, 25 bp, Homo sapien
agtccaaaggtgctggtttcctcta

SEQ ID NO: 755130 - DNA, 25 bp, Homo sapien
gatacggtggaagatccagtcggtt

SEQ ID NO: 755131 - DNA, 25 bp, Homo sapien
ccagtcggttgaagcatgtgtgtgc

SEQ ID NO: 755132 - DNA, 25 bp, Homo sapien
tgtcactggccaggaaaatgtcagg

SEQ ID NO: 755133 - DNA, 25 bp, Homo sapien
aaatgtcaggcgaggttccatgtcc

SEQ ID NO: 755134 - DNA, 25 bp, Homo sapien
tctgcagcttcctagtgtggtcccg

SEQ ID NO: 755135 - DNA, 25 bp, Homo sapien
tgagtattcactagggatgctcccc

SEQ ID NO: 755136 - DNA, 25 bp, Homo sapien
tggtttatacctccacctaagtgaa

SEQ ID NO: 755137 - DNA, 25 bp, Homo sapien
gatagatctatagctgtgacatcag

SEQ ID NO: 755138 - DNA, 25 bp, Homo sapien
tgtcccctgattaaaggcgttacac

SEQ ID NO: 755139 - DNA, 25 bp, Homo sapien
cttaaggattctatgcaaggttgca

SEQ ID NO: 755140 - DNA, 25 bp, Homo sapien
tcttttggaccttatgatggctgga

SEQ ID NO: 755141 - DNA, 25 bp, Homo sapien
gggactacatgtcactaacaggaaa

SEQ ID NO: 755142 - DNA, 25 bp, Homo sapien
tggcaactgagaaatttccgaaccc

SEQ ID NO: 755143 - DNA, 25 bp, Homo sapien
tagacttccgtttgcaataaggagc

SEQ ID NO: 755144 - DNA, 25 bp, Homo sapien
catccagttgtactctttcaggttc

SEQ ID NO: 755145 - DNA, 25 bp, Homo sapien
ggcatccagttgtactctttcaggt

SEQ ID NO: 755146 - DNA, 25 bp, Homo sapien
cctggcatccagttgtactctttca

SEQ ID NO: 755147 - DNA, 25 bp, Homo sapien
ccagttgtactctttcaggttccat

SEQ ID NO: 755148 - DNA, 25 bp, Homo sapien
tcagtgtttcttctcaaaagttatc

SEQ ID NO: 755149 - DNA, 25 bp, Homo sapien
agatattcttacctggcccacctgt

SEQ ID NO: 755150 - DNA, 25 bp, Homo sapien
catataataagaggtgtgccaacac

SEQ ID NO: 755151 - DNA, 25 bp, Homo sapien
tgcctggccttgacaattagctgat

SEQ ID NO: 755152 - DNA, 25 bp, Homo sapien
gaaagtcgtaaggagagaactgtcc

SEQ ID NO: 755153 - DNA, 25 bp, Homo sapien
cgcttctttcctggccgcctgttca

SEQ ID NO: 755154 - DNA, 25 bp, Homo sapien
tggccgcctgttcactccgagcagc

SEQ ID NO: 755155 - DNA, 25 bp, Homo sapien
tcctagtgccggtccgcggagcctt

SEQ ID NO: 755156 - DNA, 25 bp, Homo sapien
gcggcaggcagactaccggtagctc

SEQ ID NO: 755157 - DNA, 25 bp, Homo sapien
tagccgtcctggaagggctcggtgc

SEQ ID NO: 755158 - DNA, 25 bp, Homo sapien
gctcggtgcgcaccacggcgcgtat

SEQ ID NO: 755159 - DNA, 25 bp, Homo sapien
gcgtatctctgtcagcagcccgcgg

SEQ ID NO: 755160 - DNA, 25 bp, Homo sapien
gcaccacggcgcgtatctctgtcag

SEQ ID NO: 755161 - DNA, 25 bp, Homo sapien
gagttaccaccactcgcttgctggg

SEQ ID NO: 755162 - DNA, 25 bp, Homo sapien
aacgccacagagaacgaaagggctg

SEQ ID NO: 755163 - DNA, 25 bp, Homo sapien
taaatagccattcgaaacgccacag

SEQ ID NO: 755164 - DNA, 25 bp, Homo sapien
aaaatgcaaagtcggctccacagac

SEQ ID NO: 755165 - DNA, 25 bp, Homo sapien
tctctaaatgactggtgcaatggga

SEQ ID NO: 755166 - DNA, 25 bp, Homo sapien
taggtgctagaatgcagttcccacg

SEQ ID NO: 755167 - DNA, 25 bp, Homo sapien
gacagcaggtcgcaatgatttgagg

SEQ ID NO: 755168 - DNA, 25 bp, Homo sapien
gacccctgctctatcctatgctgaa

SEQ ID NO: 755169 - DNA, 25 bp, Homo sapien
tggggcctcttccccatacttattc

SEQ ID NO: 755170 - DNA, 25 bp, Homo sapien
attcatctgttgctcatgctcctca

SEQ ID NO: 755171 - DNA, 25 bp, Homo sapien
ctggggcctcttccccatacttatt

SEQ ID NO: 755172 - DNA, 25 bp, Homo sapien
tcaaagcaataaagtactgtgcagt

SEQ ID NO: 755173 - DNA, 25 bp, Homo sapien
gaatgaaagatcaaaacctagaagt

SEQ ID NO: 755174 - DNA, 25 bp, Homo sapien
ggcaaattaaacacggactcacaca

SEQ ID NO: 755175 - DNA, 25 bp, Homo sapien
gttgccacacctgacattcaaagca

SEQ ID NO: 755176 - DNA, 25 bp, Homo sapien
actttgcagcaaattctttcccaga

SEQ ID NO: 755177 - DNA, 25 bp, Homo sapien
ctttatacattttctcaccactgca

SEQ ID NO: 755178 - DNA, 25 bp, Homo sapien
attttctcaccactgcaaatttccc

SEQ ID NO: 755179 - DNA, 25 bp, Homo sapien
gaactttgcagcaaattctttccca

SEQ ID NO: 755180 - DNA, 25 bp, Homo sapien
tatttccatccgacaatcttggcct

SEQ ID NO: 755181 - DNA, 25 bp, Homo sapien
ctagttcaagtacagcaatctcatg

SEQ ID NO: 755182 - DNA, 25 bp, Homo sapien
catgtaaattaatgacccaaggatt

SEQ ID NO: 755183 - DNA, 25 bp, Homo sapien
taatgacccaaggattgtcttgtgc

SEQ ID NO: 755184 - DNA, 25 bp, Homo sapien
cactagatgaaatggtaacagcaca

SEQ ID NO: 755185 - DNA, 25 bp, Homo sapien
cattagaacaacaggtataggacca

SEQ ID NO: 755186 - DNA, 25 bp, Homo sapien
catcctagatagagggagcacatgt

SEQ ID NO: 755187 - DNA, 25 bp, Homo sapien
tacatggtacactcattaaagggca

SEQ ID NO: 755188 - DNA, 25 bp, Homo sapien
gaccaacattattcagagccatata

SEQ ID NO: 755189 - DNA, 25 bp, Homo sapien
ccatcaaatatgttaggccctatgc

SEQ ID NO: 755190 - DNA, 25 bp, Homo sapien
aataagtatgtctggtccttcaagc

SEQ ID NO: 755191 - DNA, 25 bp, Homo sapien
ggctgtatcatagcttcccgcctca

SEQ ID NO: 755192 - DNA, 25 bp, Homo sapien
agtgaacaccttctaaaatctgtcg

SEQ ID NO: 755193 - DNA, 25 bp, Homo sapien
gatgaactacatcacgagtgtgtaa

SEQ ID NO: 755194 - DNA, 25 bp, Homo sapien
ggtcaaagatttcacccccagcagc

SEQ ID NO: 755195 - DNA, 25 bp, Homo sapien
aaatctgtcgcataagtctttgaac

SEQ ID NO: 755196 - DNA, 25 bp, Homo sapien
tttagtagaaatcactcccgcatgc

SEQ ID NO: 755197 - DNA, 25 bp, Homo sapien
tatgagcacacactgtcgaagacag

SEQ ID NO: 755198 - DNA, 25 bp, Homo sapien
tgtcacagggacaggagtttcccat

SEQ ID NO: 755199 - DNA, 25 bp, Homo sapien
ttcaaacgcttctagagaccaagag

SEQ ID NO: 755200 - DNA, 25 bp, Homo sapien
caatggagattcacttgtcaacaga

SEQ ID NO: 755201 - DNA, 25 bp, Homo sapien
tattcaggggtacccataatttctc

SEQ ID NO: 755202 - DNA, 25 bp, Homo sapien
cccaatggagattcacttgtcaaca

SEQ ID NO: 755203 - DNA, 25 bp, Homo sapien
ttctcggagctcttcactgttcttc

SEQ ID NO: 755204 - DNA, 25 bp, Homo sapien
tggatccaaccaaatgccctctctg

SEQ ID NO: 755205 - DNA, 25 bp, Homo sapien
tgtaatccaaaggaatagatctctg

SEQ ID NO: 755206 - DNA, 25 bp, Homo sapien
ttctgccagaagcactcaaccatgg

SEQ ID NO: 755207 - DNA, 25 bp, Homo sapien
tgatgatacgcctacacccatggag

SEQ ID NO: 755208 - DNA, 25 bp, Homo sapien
tgagtctttctgtgctccggatagc

SEQ ID NO: 755209 - DNA, 25 bp, Homo sapien
aaactaacttagtggtcatgacgca

SEQ ID NO: 755210 - DNA, 25 bp, Homo sapien
gcagcctaggtgacttccacactga

SEQ ID NO: 755211 - DNA, 25 bp, Homo sapien
gacgcatattagtcagtgtactgaa

SEQ ID NO: 755212 - DNA, 25 bp, Homo sapien
gatataaagtaaattgctgccacac

SEQ ID NO: 755213 - DNA, 25 bp, Homo sapien
tataaggcactatccaacgtttggg

SEQ ID NO: 755214 - DNA, 25 bp, Homo sapien
caaaagctagccgagtgtcatggtg

SEQ ID NO: 755215 - DNA, 25 bp, Homo sapien
aattgggcattctgacactacaggc

SEQ ID NO: 755216 - DNA, 25 bp, Homo sapien
cacatatctgttgccatgcttatag

SEQ ID NO: 755217 - DNA, 25 bp, Homo sapien
taggatcataactaagaatttcagg

SEQ ID NO: 755218 - DNA, 25 bp, Homo sapien
ggatcataactaagaatttcaggag

SEQ ID NO: 755219 - DNA, 25 bp, Homo sapien
gttgccatgcttataggatcataac

SEQ ID NO: 755220 - DNA, 25 bp, Homo sapien
ctcatttcttgaaactaatttgatc

SEQ ID NO: 755221 - DNA, 25 bp, Homo sapien
tactcatttcttgaaactaatttga

SEQ ID NO: 755222 - DNA, 25 bp, Homo sapien
agaaaaatttagtaccatactcatt

SEQ ID NO: 755223 - DNA, 25 bp, Homo sapien
accatactcatttcttgaaactaat

SEQ ID NO: 755224 - DNA, 25 bp, Homo sapien
gacatatgttaacactccaatgctc

SEQ ID NO: 755225 - DNA, 25 bp, Homo sapien
tttcttaactaaaagtgtcctgatg

SEQ ID NO: 755226 - DNA, 25 bp, Homo sapien
tcaacagccgactcagacaaaacat

SEQ ID NO: 755227 - DNA, 25 bp, Homo sapien
cctgatgaaatcaacagccgactca

SEQ ID NO: 755228 - DNA, 25 bp, Homo sapien
aagaatgtttcttgtttatcattgc

SEQ ID NO: 755229 - DNA, 25 bp, Homo sapien
gaaacgctctcttgagagacaccaa

SEQ ID NO: 755230 - DNA, 25 bp, Homo sapien
gcattatattttgggaagtctgaca

SEQ ID NO: 755231 - DNA, 25 bp, Homo sapien
tgacaagttggcaaaaatcttactg

SEQ ID NO: 755232 - DNA, 25 bp, Homo sapien
tggaatttgggtgcaatttcccaca

SEQ ID NO: 755233 - DNA, 25 bp, Homo sapien
tgaccttcttggagggcatttgctt

SEQ ID NO: 755234 - DNA, 25 bp, Homo sapien
ttaatttcaggcacagaatgacctt

SEQ ID NO: 755235 - DNA, 25 bp, Homo sapien
ggctcttgaatactgctctgtgtca

SEQ ID NO: 755236 - DNA, 25 bp, Homo sapien
aactcttcggttacaatggattcct

SEQ ID NO: 755237 - DNA, 25 bp, Homo sapien
caggatgtagaattcaaaggtgcca

SEQ ID NO: 755238 - DNA, 25 bp, Homo sapien
gataagaaactcagcagaaacaggc

SEQ ID NO: 755239 - DNA, 25 bp, Homo sapien
ccaaggtaaccagagtgttgatcag

SEQ ID NO: 755240 - DNA, 25 bp, Homo sapien
tagtagcatcttttcactgaccaag

SEQ ID NO: 755241 - DNA, 25 bp, Homo sapien
gagccttttgtgtgtaaggataatt

SEQ ID NO: 755242 - DNA, 25 bp, Homo sapien
cactgagccttttgtgtgtaaggat

SEQ ID NO: 755243 - DNA, 25 bp, Homo sapien
tgtgtgtaaggataattagttactt

SEQ ID NO: 755244 - DNA, 25 bp, Homo sapien
atgcactgagccttttgtgtgtaag

SEQ ID NO: 755245 - DNA, 25 bp, Homo sapien
tagtgagaaaacagtgcaacctggt

SEQ ID NO: 755246 - DNA, 25 bp, Homo sapien
tgtgtgacaccctaatcagaccgtg

SEQ ID NO: 755247 - DNA, 25 bp, Homo sapien
agttgttcatagtgcagagcgaggc

SEQ ID NO: 755248 - DNA, 25 bp, Homo sapien
cctaatggtgtaaagggcactccca

SEQ ID NO: 755249 - DNA, 25 bp, Homo sapien
gatccatcaagtacaaacgtgtcat

SEQ ID NO: 755250 - DNA, 25 bp, Homo sapien
gatgacagatccatcaagtacaaac

SEQ ID NO: 755251 - DNA, 25 bp, Homo sapien
gattttaaaacttgatgacagatcc

SEQ ID NO: 755252 - DNA, 25 bp, Homo sapien
caaacgtgtcattcaatagtggtta

SEQ ID NO: 755253 - DNA, 25 bp, Homo sapien
gagattcaacaatgagcatctgtcc

SEQ ID NO: 755254 - DNA, 25 bp, Homo sapien
gatacgcagcaaactgaagtggcca

SEQ ID NO: 755255 - DNA, 25 bp, Homo sapien
tagataagtgtagagctagctggca

SEQ ID NO: 755256 - DNA, 25 bp, Homo sapien
tatgactcagtatttaagcacaaca

SEQ ID NO: 755257 - DNA, 25 bp, Homo sapien
gctgtataaacgcaacaacaaagcc

SEQ ID NO: 755258 - DNA, 25 bp, Homo sapien
ggtctactgagtaagcccactgttg

SEQ ID NO: 755259 - DNA, 25 bp, Homo sapien
cctggatgacgttgggtctgtttac

SEQ ID NO: 755260 - DNA, 25 bp, Homo sapien
tcccagggcccttaagatatgctgt

SEQ ID NO: 755261 - DNA, 25 bp, Homo sapien
cctgtgggcctctagctaaagacct

SEQ ID NO: 755262 - DNA, 25 bp, Homo sapien
agactgcaattggtacctgtgggcc

SEQ ID NO: 755263 - DNA, 25 bp, Homo sapien
ccacgtgttctagcgggaagctgca

SEQ ID NO: 755264 - DNA, 25 bp, Homo sapien
gagcttagacttttaccctgaccca

SEQ ID NO: 755265 - DNA, 25 bp, Homo sapien
tgattgcagaacatgtccttggtgg

SEQ ID NO: 755266 - DNA, 25 bp, Homo sapien
cacggagcataagggagacataaac

SEQ ID NO: 755267 - DNA, 25 bp, Homo sapien
tagtgcaccctgctgttaacagtga

SEQ ID NO: 755268 - DNA, 25 bp, Homo sapien
ccagatggtggctacttcaagggct

SEQ ID NO: 755269 - DNA, 25 bp, Homo sapien
tggaagtggctttaggccacttgac

SEQ ID NO: 755270 - DNA, 25 bp, Homo sapien
ggctttaggccacttgactctctgg

SEQ ID NO: 755271 - DNA, 25 bp, Homo sapien
gtggctttaggccacttgactctct

SEQ ID NO: 755272 - DNA, 25 bp, Homo sapien
cagctttggaagtggctttaggcca

SEQ ID NO: 755273 - DNA, 25 bp, Homo sapien
gggtgattctgaacaggctggaact

SEQ ID NO: 755274 - DNA, 25 bp, Homo sapien
ctttgaggatagcagtgatgtacac

SEQ ID NO: 755275 - DNA, 25 bp, Homo sapien
tggagaggcttttctaatctacctg

SEQ ID NO: 755276 - DNA, 25 bp, Homo sapien
ttctatttgaaagccgctatctcgg

SEQ ID NO: 755277 - DNA, 25 bp, Homo sapien
gatgtagattgttcccagcacctga

SEQ ID NO: 755278 - DNA, 25 bp, Homo sapien
ggtggtggcccatctcagtgacaga

SEQ ID NO: 755279 - DNA, 25 bp, Homo sapien
gaattgccctctccttatgccgttg

SEQ ID NO: 755280 - DNA, 25 bp, Homo sapien
gaagtacccagagcattgacatagg

SEQ ID NO: 755281 - DNA, 25 bp, Homo sapien
tgactccctgagcatgggcatggca

SEQ ID NO: 755282 - DNA, 25 bp, Homo sapien
gactccctgagcatgggcatggcag

SEQ ID NO: 755283 - DNA, 25 bp, Homo sapien
gctgactccctgagcatgggcatgg

SEQ ID NO: 755284 - DNA, 25 bp, Homo sapien
ctgactccctgagcatgggcatggc

SEQ ID NO: 755285 - DNA, 25 bp, Homo sapien
ccccgggaggtatctttggccatca

SEQ ID NO: 755286 - DNA, 25 bp, Homo sapien
tgatgggcttccttattaactgtgc

SEQ ID NO: 755287 - DNA, 25 bp, Homo sapien
ggagatgcctgtctcatgatgggct

SEQ ID NO: 755288 - DNA, 25 bp, Homo sapien
accgaggacacaggaaggcactctg

SEQ ID NO: 755289 - DNA, 25 bp, Homo sapien
gactttgaaaggtggagaggaacac

SEQ ID NO: 755290 - DNA, 25 bp, Homo sapien
gaaaattcctgagtaagacagggtg

SEQ ID NO: 755291 - DNA, 25 bp, Homo sapien
ctgtcactattgtgcaggcctaggg

SEQ ID NO: 755292 - DNA, 25 bp, Homo sapien
aggaacacccggctgaggagcagca

SEQ ID NO: 755293 - DNA, 25 bp, Homo sapien
tattgagcagataggaagccgtgtc

SEQ ID NO: 755294 - DNA, 25 bp, Homo sapien
tctgaggcttcgtgtgttagcagct

SEQ ID NO: 755295 - DNA, 25 bp, Homo sapien
taatacaggatgtttgccacacgag

SEQ ID NO: 755296 - DNA, 25 bp, Homo sapien
taagaaaccacccttttgcggcaca

SEQ ID NO: 755297 - DNA, 25 bp, Homo sapien
tttgggaggcctgttaaatgttaga

SEQ ID NO: 755298 - DNA, 25 bp, Homo sapien
catcccattttgtttcatccaagct

SEQ ID NO: 755299 - DNA, 25 bp, Homo sapien
gtaggagatcgccacttgattcaca

SEQ ID NO: 755300 - DNA, 25 bp, Homo sapien
tatgataggaccgtgtgtgttgttt

SEQ ID NO: 755301 - DNA, 25 bp, Homo sapien
aattatgataggaccgtgtgtgttg

SEQ ID NO: 755302 - DNA, 25 bp, Homo sapien
tgtatggtgttaggaagggttccaa

SEQ ID NO: 755303 - DNA, 25 bp, Homo sapien
gtgtatggtgttaggaagggttcca

SEQ ID NO: 755304 - DNA, 25 bp, Homo sapien
tatttattctatagcctgacagagt

SEQ ID NO: 755305 - DNA, 25 bp, Homo sapien
tgaagggctactcctgtgttcaggg

SEQ ID NO: 755306 - DNA, 25 bp, Homo sapien
taaaattaccttcagccaagcacgt

SEQ ID NO: 755307 - DNA, 25 bp, Homo sapien
gaaaatacctaatacctgtgccatg

SEQ ID NO: 755308 - DNA, 25 bp, Homo sapien
tatgtgaccttacagtatgaagagt

SEQ ID NO: 755309 - DNA, 25 bp, Homo sapien
tatgggaaggactacaaatcagtga

SEQ ID NO: 755310 - DNA, 25 bp, Homo sapien
gcaactctgtgacaaagggattatg

SEQ ID NO: 755311 - DNA, 25 bp, Homo sapien
taggaaaagatggttgcaactctgt

SEQ ID NO: 755312 - DNA, 25 bp, Homo sapien
caaggattaccagttatttgaggaa

SEQ ID NO: 755313 - DNA, 25 bp, Homo sapien
tagacccccagtcttaatcataagc

SEQ ID NO: 755314 - DNA, 25 bp, Homo sapien
gcaaatacccaaggattaccagtta

SEQ ID NO: 755315 - DNA, 25 bp, Homo sapien
taatcataagcaaatacccaaggat

SEQ ID NO: 755316 - DNA, 25 bp, Homo sapien
tcctcagactgaatctagggataaa

SEQ ID NO: 755317 - DNA, 25 bp, Homo sapien
ttcatagtagtcaggaagccatcca

SEQ ID NO: 755318 - DNA, 25 bp, Homo sapien
aaaggaaatttagaactcgacagtg

SEQ ID NO: 755319 - DNA, 25 bp, Homo sapien
aatgcacacctgagtacagattcgg

SEQ ID NO: 755320 - DNA, 25 bp, Homo sapien
tctcccgcggtataagagtctccgt

SEQ ID NO: 755321 - DNA, 25 bp, Homo sapien
tcttggagagttccctcacgggtca

SEQ ID NO: 755322 - DNA, 25 bp, Homo sapien
ccagcaagaagcgtttgttcctgca

SEQ ID NO: 755323 - DNA, 25 bp, Homo sapien
ttgctcacaggttagtctcccgcgg

SEQ ID NO: 755324 - DNA, 25 bp, Homo sapien
agccgacgccggaagtctctactgc

SEQ ID NO: 755325 - DNA, 25 bp, Homo sapien
ctgcgagcagccgacgccggaagtc

SEQ ID NO: 755326 - DNA, 25 bp, Homo sapien
tggcgcgcaggaccgcgggcattta

SEQ ID NO: 755327 - DNA, 25 bp, Homo sapien
gcgagcagccgacgccggaagtctc

SEQ ID NO: 755328 - DNA, 25 bp, Homo sapien
cggcaggaatttcagtgctagagtg

SEQ ID NO: 755329 - DNA, 25 bp, Homo sapien
aacggggcggcaggaatttcagtgc

SEQ ID NO: 755330 - DNA, 25 bp, Homo sapien
aatttgtcagctgaacggggcggca

SEQ ID NO: 755331 - DNA, 25 bp, Homo sapien
cagtgctagagtggggggccagacg

SEQ ID NO: 755332 - DNA, 25 bp, Homo sapien
ccaggtgtcaccctacttagcctct

SEQ ID NO: 755333 - DNA, 25 bp, Homo sapien
ccataactgaagatccctactgcca

SEQ ID NO: 755334 - DNA, 25 bp, Homo sapien
cttcccaggtgtcaccctacttagc

SEQ ID NO: 755335 - DNA, 25 bp, Homo sapien
ttagcctctccattgcatctgccat

SEQ ID NO: 755336 - DNA, 25 bp, Homo sapien
gtcatctccaaagagctgatgaaca

SEQ ID NO: 755337 - DNA, 25 bp, Homo sapien
tggagagaggtctggcatggtcatc

SEQ ID NO: 755338 - DNA, 25 bp, Homo sapien
agagaggtctggcatggtcatctcc

SEQ ID NO: 755339 - DNA, 25 bp, Homo sapien
agaggtctggcatggtcatctccaa

SEQ ID NO: 755340 - DNA, 25 bp, Homo sapien
ggaagctggcggtgaatgccagata

SEQ ID NO: 755341 - DNA, 25 bp, Homo sapien
aggaagctggcggtgaatgccagat

SEQ ID NO: 755342 - DNA, 25 bp, Homo sapien
caggaagctggcggtgaatgccaga

SEQ ID NO: 755343 - DNA, 25 bp, Homo sapien
cttggatccagtccagtaaggctgc

SEQ ID NO: 755344 - DNA, 25 bp, Homo sapien
tcccacctgaaaaaggcatgcagtg

SEQ ID NO: 755345 - DNA, 25 bp, Homo sapien
tggatcagatatgggccatgcagga

SEQ ID NO: 755346 - DNA, 25 bp, Homo sapien
tgcagtggtcggctgtcagcccaca

SEQ ID NO: 755347 - DNA, 25 bp, Homo sapien
aagccagggagcttctagcctagtg

SEQ ID NO: 755348 - DNA, 25 bp, Homo sapien
gcctgggctcttatccacctgggaa

SEQ ID NO: 755349 - DNA, 25 bp, Homo sapien
aatattccaggaggccggtgtctgc

SEQ ID NO: 755350 - DNA, 25 bp, Homo sapien
tgaacgtggtctagggaactgcctg

SEQ ID NO: 755351 - DNA, 25 bp, Homo sapien
cgggatcccagctccgattggctgc

SEQ ID NO: 755352 - DNA, 25 bp, Homo sapien
accggggcgggatcccagctccgat

SEQ ID NO: 755353 - DNA, 25 bp, Homo sapien
gcgggcaccgctctccgtgcagcct

SEQ ID NO: 755354 - DNA, 25 bp, Homo sapien
ctgacgcgggcaccgctctccgtgc

SEQ ID NO: 755355 - DNA, 25 bp, Homo sapien
ttctggaatgcatcccgttaaggga

SEQ ID NO: 755356 - DNA, 25 bp, Homo sapien
tacaggtgagaaaatcgaggcaaca

SEQ ID NO: 755357 - DNA, 25 bp, Homo sapien
caagaggttggttaacgtgcccaag

SEQ ID NO: 755358 - DNA, 25 bp, Homo sapien
ccaagatcagatcgcacagcggtat

SEQ ID NO: 755359 - DNA, 25 bp, Homo sapien
tcacagctcaaagacggaagagagg

SEQ ID NO: 755360 - DNA, 25 bp, Homo sapien
tcagaaatgaaaatgcgcgcagctc

SEQ ID NO: 755361 - DNA, 25 bp, Homo sapien
gagtgtcgcctctacatagaagtca

SEQ ID NO: 755362 - DNA, 25 bp, Homo sapien
catcagagtcctggatacgccaaag

SEQ ID NO: 755363 - DNA, 25 bp, Homo sapien
gagaggctagggtacttgtgctccc

SEQ ID NO: 755364 - DNA, 25 bp, Homo sapien
cccacgggtgcgcagtatgtgcttt

SEQ ID NO: 755365 - DNA, 25 bp, Homo sapien
tcaaaagcagtagtggcccacgggt

SEQ ID NO: 755366 - DNA, 25 bp, Homo sapien
aatatccctaagaagtagagcgccc

SEQ ID NO: 755367 - DNA, 25 bp, Homo sapien
cagcacacatgagttgaaatatggt

SEQ ID NO: 755368 - DNA, 25 bp, Homo sapien
cacatgagttgaaatatggtggaca

SEQ ID NO: 755369 - DNA, 25 bp, Homo sapien
cacacatgagttgaaatatggtgga

SEQ ID NO: 755370 - DNA, 25 bp, Homo sapien
catgagttgaaatatggtggacaga

SEQ ID NO: 755371 - DNA, 25 bp, Homo sapien
tgagtttgtaaaagagaaacggcta

SEQ ID NO: 755372 - DNA, 25 bp, Homo sapien
ctgagtttgtaaaagagaaacggct

SEQ ID NO: 755373 - DNA, 25 bp, Homo sapien
acggctaagttacaagaaaaatcat

SEQ ID NO: 755374 - DNA, 25 bp, Homo sapien
aatcattacgtataaatttgactta

SEQ ID NO: 755375 - DNA, 25 bp, Homo sapien
tgaggaacttcaaggccttttcaaa

SEQ ID NO: 755376 - DNA, 25 bp, Homo sapien
tcaggtgaggaacttcaaggccttt

SEQ ID NO: 755377 - DNA, 25 bp, Homo sapien
caaggccttttcaaagtctgaggtt

SEQ ID NO: 755378 - DNA, 25 bp, Homo sapien
ggtgaggaacttcaaggccttttca

SEQ ID NO: 755379 - DNA, 25 bp, Homo sapien
cactcccagaaggtccagatcataa

SEQ ID NO: 755380 - DNA, 25 bp, Homo sapien
tttttaaggcgctccaagttctcag

SEQ ID NO: 755381 - DNA, 25 bp, Homo sapien
tacacaggcacaactcacaagtgcg

SEQ ID NO: 755382 - DNA, 25 bp, Homo sapien
gctacaggaactgcgtacacaggca

SEQ ID NO: 755383 - DNA, 25 bp, Homo sapien
tgctttgactccgaaacacaacggg

SEQ ID NO: 755384 - DNA, 25 bp, Homo sapien
ggcagatgaacttagatgaccctta

SEQ ID NO: 755385 - DNA, 25 bp, Homo sapien
ggtatgcctttctaagagcagccaa

SEQ ID NO: 755386 - DNA, 25 bp, Homo sapien
tctggctccgcaagcaaactaggtt

SEQ ID NO: 755387 - DNA, 25 bp, Homo sapien
cctccacctgcataggctgtccagg

SEQ ID NO: 755388 - DNA, 25 bp, Homo sapien
tgacgatgaccactcctagcttgca

SEQ ID NO: 755389 - DNA, 25 bp, Homo sapien
aaatgcactacagatgcctctccag

SEQ ID NO: 755390 - DNA, 25 bp, Homo sapien
gataaccagaggtgatgaaaaatgc

SEQ ID NO: 755391 - DNA, 25 bp, Homo sapien
ccccctcttgtggggatggcctctg

SEQ ID NO: 755392 - DNA, 25 bp, Homo sapien
tgccatgtggatggacaggacaagt

SEQ ID NO: 755393 - DNA, 25 bp, Homo sapien
ttgccatgtggatggacaggacaag

SEQ ID NO: 755394 - DNA, 25 bp, Homo sapien
ccaagacccccctcttgtggggatg

SEQ ID NO: 755395 - DNA, 25 bp, Homo sapien
cagcagaggaggacccaagtctagc

SEQ ID NO: 755396 - DNA, 25 bp, Homo sapien
cctgtggcagctgtgactgagatga

SEQ ID NO: 755397 - DNA, 25 bp, Homo sapien
gcatgttcttacaaggttaagagga

SEQ ID NO: 755398 - DNA, 25 bp, Homo sapien
cccacagatggcccttcgaggagga

SEQ ID NO: 755399 - DNA, 25 bp, Homo sapien
aaaacactgtaggcatcgagcagaa

SEQ ID NO: 755400 - DNA, 25 bp, Homo sapien
aaacactgtaggcatcgagcagaaa

SEQ ID NO: 755401 - DNA, 25 bp, Homo sapien
aacactgtaggcatcgagcagaaaa

SEQ ID NO: 755402 - DNA, 25 bp, Homo sapien
gtggattccgcaagtccctcatccg

SEQ ID NO: 755403 - DNA, 25 bp, Homo sapien
acggagccggctcggccaacaccaa

SEQ ID NO: 755404 - DNA, 25 bp, Homo sapien
accaccacgccaaacttcctctcgg

SEQ ID NO: 755405 - DNA, 25 bp, Homo sapien
tcgacacgaagccaatcaggttcag

SEQ ID NO: 755406 - DNA, 25 bp, Homo sapien
aaggaaatatcacatgtagagccca

SEQ ID NO: 755407 - DNA, 25 bp, Homo sapien
gatgactatgtcaggattccccggt

SEQ ID NO: 755408 - DNA, 25 bp, Homo sapien
gggttaataacactacgcagaagga

SEQ ID NO: 755409 - DNA, 25 bp, Homo sapien
gggctgaccctaagcacagttctca

SEQ ID NO: 755410 - DNA, 25 bp, Homo sapien
ggagctctcactgcagatataggcg

SEQ ID NO: 755411 - DNA, 25 bp, Homo sapien
tggctggagctctcactgcagatat

SEQ ID NO: 755412 - DNA, 25 bp, Homo sapien
tggactccatcaatgctcccgagct

SEQ ID NO: 755413 - DNA, 25 bp, Homo sapien
cctcttggctggaaagagcatcctc

SEQ ID NO: 755414 - DNA, 25 bp, Homo sapien
gcatcttacccgtgggaaacagcat

SEQ ID NO: 755415 - DNA, 25 bp, Homo sapien
taatttgccaaggatgccggctcca

SEQ ID NO: 755416 - DNA, 25 bp, Homo sapien
cagtactgcactgctgtgtaaggca

SEQ ID NO: 755417 - DNA, 25 bp, Homo sapien
gaaggaggccactactgttgaaaac

SEQ ID NO: 755418 - DNA, 25 bp, Homo sapien
cattttccaggtgcaacatgtgagt

SEQ ID NO: 755419 - DNA, 25 bp, Homo sapien
tacaggccgtggaggataataacgt

SEQ ID NO: 755420 - DNA, 25 bp, Homo sapien
acagcggctagctttgcctgaggca

SEQ ID NO: 755421 - DNA, 25 bp, Homo sapien
caatcggcaaacttcagtgtggcag

SEQ ID NO: 755422 - DNA, 25 bp, Homo sapien
tgtcatggggtattccacaaggacg

SEQ ID NO: 755423 - DNA, 25 bp, Homo sapien
cacagttcctgagcggccgccaatg

SEQ ID NO: 755424 - DNA, 25 bp, Homo sapien
ggacgtgcttgccagcattaaggaa

SEQ ID NO: 755425 - DNA, 25 bp, Homo sapien
gagcggccgccaatgacagtgtcat

SEQ ID NO: 755426 - DNA, 25 bp, Homo sapien
ttcccggttcatacacaagttatgt

SEQ ID NO: 755427 - DNA, 25 bp, Homo sapien
catatgattgtttgccgtctgaata

SEQ ID NO: 755428 - DNA, 25 bp, Homo sapien
gaaggaaggtcttgcttccatgttg

SEQ ID NO: 755429 - DNA, 25 bp, Homo sapien
cgccactgcgttcaagcctaggtaa

SEQ ID NO: 755430 - DNA, 25 bp, Homo sapien
tttcagcaggtctttccccaccact

SEQ ID NO: 755431 - DNA, 25 bp, Homo sapien
gaagaggagcgaccctttcagcagg

SEQ ID NO: 755432 - DNA, 25 bp, Homo sapien
agagttcaacatgctcctcgtgcaa

SEQ ID NO: 755433 - DNA, 25 bp, Homo sapien
acatgctcctcgtgcaagacttttc

SEQ ID NO: 755434 - DNA, 25 bp, Homo sapien
gacctgtgatcccacgtagcactga

SEQ ID NO: 755435 - DNA, 25 bp, Homo sapien
tcctattgctaacggagctgctcaa

SEQ ID NO: 755436 - DNA, 25 bp, Homo sapien
tctgtaatgaaagccctcaggaatg

SEQ ID NO: 755437 - DNA, 25 bp, Homo sapien
tgcccaacgatacggccagagaagg

SEQ ID NO: 755438 - DNA, 25 bp, Homo sapien
tatcagtggctttaccgtgcaaaaa

SEQ ID NO: 755439 - DNA, 25 bp, Homo sapien
ttcctttcgctcttccaaagtggca

SEQ ID NO: 755440 - DNA, 25 bp, Homo sapien
caggcgagagatgccgctgaatgca

SEQ ID NO: 755441 - DNA, 25 bp, Homo sapien
catatactgatcttcctttcgctct

SEQ ID NO: 755442 - DNA, 25 bp, Homo sapien
tgcagggaagccaaaccgctcttct

SEQ ID NO: 755443 - DNA, 25 bp, Homo sapien
cattctccaaggacccagacttgaa

SEQ ID NO: 755444 - DNA, 25 bp, Homo sapien
aatatctgtttcgttttagaccagg

SEQ ID NO: 755445 - DNA, 25 bp, Homo sapien
ttcactcctacatttggcacattct

SEQ ID NO: 755446 - DNA, 25 bp, Homo sapien
gtttctggacaaatatattttgatc

SEQ ID NO: 755447 - DNA, 25 bp, Homo sapien
aattttaagaatagagataatggtc

SEQ ID NO: 755448 - DNA, 25 bp, Homo sapien
taatggtcaactcttgagaagaacc

SEQ ID NO: 755449 - DNA, 25 bp, Homo sapien
tagagataatggtcaactcttgaga

SEQ ID NO: 755450 - DNA, 25 bp, Homo sapien
taagaatagagataatggtcaactc

SEQ ID NO: 755451 - DNA, 25 bp, Homo sapien
taggaaatgccacagtggcacatga

SEQ ID NO: 755452 - DNA, 25 bp, Homo sapien
acagtggcacatgacctgcgtgggc

SEQ ID NO: 755453 - DNA, 25 bp, Homo sapien
agcccggcgccagggcatgatgtcc

SEQ ID NO: 755454 - DNA, 25 bp, Homo sapien
tttggctccctgcagggtaactctg

SEQ ID NO: 755455 - DNA, 25 bp, Homo sapien
cacagcgggcttgtgaacaataggc

SEQ ID NO: 755456 - DNA, 25 bp, Homo sapien
ataactcttaggctccaccttaggg

SEQ ID NO: 755457 - DNA, 25 bp, Homo sapien
ttctatttgtgctactgaaggaggc

SEQ ID NO: 755458 - DNA, 25 bp, Homo sapien
tcaactaagaatcagctaagacctt

SEQ ID NO: 755459 - DNA, 25 bp, Homo sapien
attttccatatcaaggatgcctgcc

SEQ ID NO: 755460 - DNA, 25 bp, Homo sapien
aaggatgcctgcctgtgggaaccat

SEQ ID NO: 755461 - DNA, 25 bp, Homo sapien
ccagaaattaaaacaagttacagta

SEQ ID NO: 755462 - DNA, 25 bp, Homo sapien
tactgtaacttgttttaatttctgg

SEQ ID NO: 755463 - DNA, 25 bp, Homo sapien
tgataaggcaggtgacattttctcc

SEQ ID NO: 755464 - DNA, 25 bp, Homo sapien
tattttgacccagtgatattgggac

SEQ ID NO: 755465 - DNA, 25 bp, Homo sapien
taggtgagacctccgtttcctgtta

SEQ ID NO: 755466 - DNA, 25 bp, Homo sapien
tttactgggacctgatgcctttgca

SEQ ID NO: 755467 - DNA, 25 bp, Homo sapien
aatttaccatgtaacattcatttta

SEQ ID NO: 755468 - DNA, 25 bp, Homo sapien
tccattcttctccaaagcgaacttc

SEQ ID NO: 755469 - DNA, 25 bp, Homo sapien
tttttccattcttctccaaagcgaa

SEQ ID NO: 755470 - DNA, 25 bp, Homo sapien
tttaccatgtaacattcattttata

SEQ ID NO: 755471 - DNA, 25 bp, Homo sapien
tagtataataccacgcagcagcctt

SEQ ID NO: 755472 - DNA, 25 bp, Homo sapien
tctcaacagctaagacacagtggct

SEQ ID NO: 755473 - DNA, 25 bp, Homo sapien
tgagacaacttgaggctgcgtcagt

SEQ ID NO: 755474 - DNA, 25 bp, Homo sapien
gggacaccgcctcactttgagacaa

SEQ ID NO: 755475 - DNA, 25 bp, Homo sapien
caagcaatgaaatgtctggcaaaga

SEQ ID NO: 755476 - DNA, 25 bp, Homo sapien
cattttggtggtcaactgtcagctc

SEQ ID NO: 755477 - DNA, 25 bp, Homo sapien
tttgatgattcacgacttaggtcta

SEQ ID NO: 755478 - DNA, 25 bp, Homo sapien
tcttgtgagccggtataagctagcc

SEQ ID NO: 755479 - DNA, 25 bp, Homo sapien
aactcttatcgagtgcctcctccgg

SEQ ID NO: 755480 - DNA, 25 bp, Homo sapien
tgggacccattagtgagcaaaacat

SEQ ID NO: 755481 - DNA, 25 bp, Homo sapien
gcagcattaaatggtccaagcacgt

SEQ ID NO: 755482 - DNA, 25 bp, Homo sapien
gaaagttgcattcacaacagccagc

SEQ ID NO: 755483 - DNA, 25 bp, Homo sapien
gaaatgcatcccctcagaggactga

SEQ ID NO: 755484 - DNA, 25 bp, Homo sapien
ttccatcaagctgtagcctgcagag

SEQ ID NO: 755485 - DNA, 25 bp, Homo sapien
tcagaggactgaggcatagtctctc

SEQ ID NO: 755486 - DNA, 25 bp, Homo sapien
agaatggaaacgtgggaaaggaatg

SEQ ID NO: 755487 - DNA, 25 bp, Homo sapien
tccggatctgaaaccctatgcaagc

SEQ ID NO: 755488 - DNA, 25 bp, Homo sapien
acagcggcgggatgagcattcacaa

SEQ ID NO: 755489 - DNA, 25 bp, Homo sapien
gagtaacagctagcagcataccgcg

SEQ ID NO: 755490 - DNA, 25 bp, Homo sapien
cccgtactagcgtgaggttgtcgaa

SEQ ID NO: 755491 - DNA, 25 bp, Homo sapien
cgcagcgcgttgtaactcatgtgtt

SEQ ID NO: 755492 - DNA, 25 bp, Homo sapien
cccacagcactttgttatacctctg

SEQ ID NO: 755493 - DNA, 25 bp, Homo sapien
gcagggactgtacattctccagctc

SEQ ID NO: 755494 - DNA, 25 bp, Homo sapien
tggtcgctctgttgtgccccacagc

SEQ ID NO: 755495 - DNA, 25 bp, Homo sapien
aatgtcaccgtgatcagtctagctg

SEQ ID NO: 755496 - DNA, 25 bp, Homo sapien
taatcgatgggagcacgctgagcat

SEQ ID NO: 755497 - DNA, 25 bp, Homo sapien
accatgtttgggctgcggtttgcca

SEQ ID NO: 755498 - DNA, 25 bp, Homo sapien
gggcacatgcccaactaccagtttg

SEQ ID NO: 755499 - DNA, 25 bp, Homo sapien
tatctgtggaggacatggcgcacgc

SEQ ID NO: 755500 - DNA, 25 bp, Homo sapien
gcttcgtgaagaggatccgggccat

SEQ ID NO: 755501 - DNA, 25 bp, Homo sapien
tgggaagcgcaacacaaacctgaga

SEQ ID NO: 755502 - DNA, 25 bp, Homo sapien
catcctgagtccctaccgtgggaag

SEQ ID NO: 755503 - DNA, 25 bp, Homo sapien
cattgcagatggagaacttcagctt

SEQ ID NO: 755504 - DNA, 25 bp, Homo sapien
gagtgttgttctagacaaatgagaa

SEQ ID NO: 755505 - DNA, 25 bp, Homo sapien
gggaatggccttattggatgcttat

SEQ ID NO: 755506 - DNA, 25 bp, Homo sapien
tctctactgaataaacctccagtgg

SEQ ID NO: 755507 - DNA, 25 bp, Homo sapien
gattattggccagttggtcaaggct

SEQ ID NO: 755508 - DNA, 25 bp, Homo sapien
gcagaattgggatcaggcagtaatt

SEQ ID NO: 755509 - DNA, 25 bp, Homo sapien
tagccactaggcacattgtttaaaa

SEQ ID NO: 755510 - DNA, 25 bp, Homo sapien
gagtacttaccatgcactaacattg

SEQ ID NO: 755511 - DNA, 25 bp, Homo sapien
cacccaggtctgctaaatcagaatc

SEQ ID NO: 755512 - DNA, 25 bp, Homo sapien
gccatattctgaggtaggtcagcag

SEQ ID NO: 755513 - DNA, 25 bp, Homo sapien
caaaggtgtgacttcccctagtcgg

SEQ ID NO: 755514 - DNA, 25 bp, Homo sapien
agtcggtaattacttatgtgctgaa

SEQ ID NO: 755515 - DNA, 25 bp, Homo sapien
cctaggctcaagtggaacagtgcag

SEQ ID NO: 755516 - DNA, 25 bp, Homo sapien
gacaacatagagttgggtctcattt

SEQ ID NO: 755517 - DNA, 25 bp, Homo sapien
gcctactgtagcctggatgtcccag

SEQ ID NO: 755518 - DNA, 25 bp, Homo sapien
taatccatttagttggagcacaatg

SEQ ID NO: 755519 - DNA, 25 bp, Homo sapien
ttacaggcatgagccaccacaccca

SEQ ID NO: 755520 - DNA, 25 bp, Homo sapien
cttttagtggaaacagtttcaccat

SEQ ID NO: 755521 - DNA, 25 bp, Homo sapien
acaggcatgagccaccacacccagc

SEQ ID NO: 755522 - DNA, 25 bp, Homo sapien
ccttggcctcccaagagctgggatt

SEQ ID NO: 755523 - DNA, 25 bp, Homo sapien
ggacttcatgggatgcaacagccat

SEQ ID NO: 755524 - DNA, 25 bp, Homo sapien
agagtgcaccaggacttcatgggat

SEQ ID NO: 755525 - DNA, 25 bp, Homo sapien
cagagtgcaccaggacttcatggga

SEQ ID NO: 755526 - DNA, 25 bp, Homo sapien
ggccaggagaaatggagtaagacct

SEQ ID NO: 755527 - DNA, 25 bp, Homo sapien
caggagaaatggagtaagacctgcc

SEQ ID NO: 755528 - DNA, 25 bp, Homo sapien
ccaggagaaatggagtaagacctgc

SEQ ID NO: 755529 - DNA, 25 bp, Homo sapien
gccaggagaaatggagtaagacctg

SEQ ID NO: 755530 - DNA, 25 bp, Homo sapien
actagtactgaaatttgggaatgac

SEQ ID NO: 755531 - DNA, 25 bp, Homo sapien
gaaaaaattctcacttggcaaacta

SEQ ID NO: 755532 - DNA, 25 bp, Homo sapien
gatggcgacacatatagtttgtaat

SEQ ID NO: 755533 - DNA, 25 bp, Homo sapien
gggtggctgcgcttattttgatatt

SEQ ID NO: 755534 - DNA, 25 bp, Homo sapien
tccgggatctccttggtcggggcca

SEQ ID NO: 755535 - DNA, 25 bp, Homo sapien
ccgggatctccttggtcggggccat

SEQ ID NO: 755536 - DNA, 25 bp, Homo sapien
gaatgtcaggatccgggcagatgca

SEQ ID NO: 755537 - DNA, 25 bp, Homo sapien
agaatgtcaggatccgggcagatgc

SEQ ID NO: 755538 - DNA, 25 bp, Homo sapien
cggcgcctggtatcgatgttcctgg

SEQ ID NO: 755539 - DNA, 25 bp, Homo sapien
acccgcggaggcctggaaatgcttc

SEQ ID NO: 755540 - DNA, 25 bp, Homo sapien
aaacttgctcgcgttgggagtggac

SEQ ID NO: 755541 - DNA, 25 bp, Homo sapien
tgtttgccgcgtcgttgagacgtac

SEQ ID NO: 755542 - DNA, 25 bp, Homo sapien
atgatttctcttggtatcgctcctc

SEQ ID NO: 755543 - DNA, 25 bp, Homo sapien
cccaattgtgggtgatgatttctct

SEQ ID NO: 755544 - DNA, 25 bp, Homo sapien
ttctcttggtatcgctcctcaggca

SEQ ID NO: 755545 - DNA, 25 bp, Homo sapien
tgattgctgcactggcccaattgtg

SEQ ID NO: 755546 - DNA, 25 bp, Homo sapien
aaagatgtccttgtggtcagtgccc

SEQ ID NO: 755547 - DNA, 25 bp, Homo sapien
ggtcagtgccctcagtagcgaactc

SEQ ID NO: 755548 - DNA, 25 bp, Homo sapien
tgccctcagtagcgaactcctccat

SEQ ID NO: 755549 - DNA, 25 bp, Homo sapien
tgcctggtagaaaaagatgtccttg

SEQ ID NO: 755550 - DNA, 25 bp, Homo sapien
ccgacaggtagatgttctctgggtt

SEQ ID NO: 755551 - DNA, 25 bp, Homo sapien
tccgacaggtagatgttctctgggt

SEQ ID NO: 755552 - DNA, 25 bp, Homo sapien
gcccgggggatgtagtgctcatcgt

SEQ ID NO: 755553 - DNA, 25 bp, Homo sapien
gacacagcacaaagccatctagatt

SEQ ID NO: 755554 - DNA, 25 bp, Homo sapien
agcaatgaactgacacagcacaaag

SEQ ID NO: 755555 - DNA, 25 bp, Homo sapien
acagcacaaagccatctagattgtc

SEQ ID NO: 755556 - DNA, 25 bp, Homo sapien
agcacaaagccatctagattgtcac

SEQ ID NO: 755557 - DNA, 25 bp, Homo sapien
aattataaagctggaccaccacgtt

SEQ ID NO: 755558 - DNA, 25 bp, Homo sapien
gaattataaagctggaccaccacgt

SEQ ID NO: 755559 - DNA, 25 bp, Homo sapien
tgaattataaagctggaccaccacg

SEQ ID NO: 755560 - DNA, 25 bp, Homo sapien
caggatctggtctgtggcaatctgg

SEQ ID NO: 755561 - DNA, 25 bp, Homo sapien
ggatctggtctgtggcaatctggtt

SEQ ID NO: 755562 - DNA, 25 bp, Homo sapien
gtgcaggatctggtctgtggcaatc

SEQ ID NO: 755563 - DNA, 25 bp, Homo sapien
gatgtgcaggatctggtctgtggca

SEQ ID NO: 755564 - DNA, 25 bp, Homo sapien
gctgggtgtagccagtcatgagaaa

SEQ ID NO: 755565 - DNA, 25 bp, Homo sapien
tgggtgtagccagtcatgagaaagt

SEQ ID NO: 755566 - DNA, 25 bp, Homo sapien
gtccatagtcagctgggtgtagcca

SEQ ID NO: 755567 - DNA, 25 bp, Homo sapien
cactgattggtccatagtcagctgg

SEQ ID NO: 755568 - DNA, 25 bp, Homo sapien
ggagacttcctcgacagggccacct

SEQ ID NO: 755569 - DNA, 25 bp, Homo sapien
gacttcctcgacagggccacctgga

SEQ ID NO: 755570 - DNA, 25 bp, Homo sapien
agacttcctcgacagggccacctgg

SEQ ID NO: 755571 - DNA, 25 bp, Homo sapien
gagacttcctcgacagggccacctg

SEQ ID NO: 755572 - DNA, 25 bp, Homo sapien
ggttggccatcatgcgcccactgac

SEQ ID NO: 755573 - DNA, 25 bp, Homo sapien
gctggtgtggttggccatcatgcgc

SEQ ID NO: 755574 - DNA, 25 bp, Homo sapien
tgtggttggccatcatgcgcccact

SEQ ID NO: 755575 - DNA, 25 bp, Homo sapien
ggtgtggttggccatcatgcgccca

SEQ ID NO: 755576 - DNA, 25 bp, Homo sapien
catgtggccatgtggtactcatcca

SEQ ID NO: 755577 - DNA, 25 bp, Homo sapien
gccatgtggtactcatccatgagct

SEQ ID NO: 755578 - DNA, 25 bp, Homo sapien
gtggccatgtggtactcatccatga

SEQ ID NO: 755579 - DNA, 25 bp, Homo sapien
tgtggtactcatccatgagctgctg

SEQ ID NO: 755580 - DNA, 25 bp, Homo sapien
accagtaaggcagatgagggtccct

SEQ ID NO: 755581 - DNA, 25 bp, Homo sapien
gtaaggcagatgagggtccctgtcc

SEQ ID NO: 755582 - DNA, 25 bp, Homo sapien
gagggtccctgtcctaggggactca

SEQ ID NO: 755583 - DNA, 25 bp, Homo sapien
tcaaccagtaaggcagatgagggtc

SEQ ID NO: 755584 - DNA, 25 bp, Homo sapien
tcagccgccaccaagctgcacgccg

SEQ ID NO: 755585 - DNA, 25 bp, Homo sapien
gccgccaccaagctgcacgccggga

SEQ ID NO: 755586 - DNA, 25 bp, Homo sapien
agccgccaccaagctgcacgccggg

SEQ ID NO: 755587 - DNA, 25 bp, Homo sapien
ggctcagccgccaccaagctgcacg

SEQ ID NO: 755588 - DNA, 25 bp, Homo sapien
tctcctttgctttctgccatgattg

SEQ ID NO: 755589 - DNA, 25 bp, Homo sapien
agatgctggcaccatgcttcttgta

SEQ ID NO: 755590 - DNA, 25 bp, Homo sapien
caggtgacacgcctgcttctccttt

SEQ ID NO: 755591 - DNA, 25 bp, Homo sapien
atgctggcaccatgcttcttgtaca

SEQ ID NO: 755592 - DNA, 25 bp, Homo sapien
gatcagggattataccacgactaga

SEQ ID NO: 755593 - DNA, 25 bp, Homo sapien
ggttatgtggcaagtcctagggctc

SEQ ID NO: 755594 - DNA, 25 bp, Homo sapien
gccatgttttctccccgagggttga

SEQ ID NO: 755595 - DNA, 25 bp, Homo sapien
tgaattaatgcatggaagcagcacc

SEQ ID NO: 755596 - DNA, 25 bp, Homo sapien
cagaacactgggcaggaggatccct

SEQ ID NO: 755597 - DNA, 25 bp, Homo sapien
caccgacaggtcctgcagaacactg

SEQ ID NO: 755598 - DNA, 25 bp, Homo sapien
gacaggtcctgcagaacactgggca

SEQ ID NO: 755599 - DNA, 25 bp, Homo sapien
ccgacaggtcctgcagaacactggg

SEQ ID NO: 755600 - DNA, 25 bp, Homo sapien
cattctactgaaaacgcactgctaa

SEQ ID NO: 755601 - DNA, 25 bp, Homo sapien
ccaaaccacccaagatgcaataact

SEQ ID NO: 755602 - DNA, 25 bp, Homo sapien
aattacagcgcactgtctacacaag

SEQ ID NO: 755603 - DNA, 25 bp, Homo sapien
taagagaccccccaagaaacatgtc

SEQ ID NO: 755604 - DNA, 25 bp, Homo sapien
ccatgatggtggcctgccagtggaa

SEQ ID NO: 755605 - DNA, 25 bp, Homo sapien
cgggcccatgatggtggcctgccag

SEQ ID NO: 755606 - DNA, 25 bp, Homo sapien
gcccatgatggtggcctgccagtgg

SEQ ID NO: 755607 - DNA, 25 bp, Homo sapien
atgatggtggcctgccagtggaaca

SEQ ID NO: 755608 - DNA, 25 bp, Homo sapien
gacacagaaagagatcagtgcatgt

SEQ ID NO: 755609 - DNA, 25 bp, Homo sapien
tgagacacagaaagagatcagtgca

SEQ ID NO: 755610 - DNA, 25 bp, Homo sapien
acacagaaagagatcagtgcatgtg

SEQ ID NO: 755611 - DNA, 25 bp, Homo sapien
ctggaaggatgagacacagaaagag

SEQ ID NO: 755612 - DNA, 25 bp, Homo sapien
tgaacgggtaatctgtaggaaagtg

SEQ ID NO: 755613 - DNA, 25 bp, Homo sapien
ggcttgaacgggtaatctgtaggaa

SEQ ID NO: 755614 - DNA, 25 bp, Homo sapien
acgggtaatctgtaggaaagtggat

SEQ ID NO: 755615 - DNA, 25 bp, Homo sapien
aatctgtaggaaagtggatggtcag

SEQ ID NO: 755616 - DNA, 25 bp, Homo sapien
catcaggggagttgggagagggacc

SEQ ID NO: 755617 - DNA, 25 bp, Homo sapien
tccttcatccaaacatcaggggagt

SEQ ID NO: 755618 - DNA, 25 bp, Homo sapien
ctgacttgaagggccccttgtcaca

SEQ ID NO: 755619 - DNA, 25 bp, Homo sapien
aagggccccttgtcacatgctgtcc

SEQ ID NO: 755620 - DNA, 25 bp, Homo sapien
caaaagcccaggaagttttatgcaa

SEQ ID NO: 755621 - DNA, 25 bp, Homo sapien
ttttgttgatgtatcagcagaaaag

SEQ ID NO: 755622 - DNA, 25 bp, Homo sapien
ccaaactctaatgggatatgggagt

SEQ ID NO: 755623 - DNA, 25 bp, Homo sapien
gattgataccatctccctgaaagca

SEQ ID NO: 755624 - DNA, 25 bp, Homo sapien
cactgagaccgcaggatatcaaggc

SEQ ID NO: 755625 - DNA, 25 bp, Homo sapien
tggagaccactgagaccgcaggata

SEQ ID NO: 755626 - DNA, 25 bp, Homo sapien
cacagtcaacgctggagaccactga

SEQ ID NO: 755627 - DNA, 25 bp, Homo sapien
accgcaggatatcaaggcagatgct

SEQ ID NO: 755628 - DNA, 25 bp, Homo sapien
tgtgacagtcttgagcacaccaggg

SEQ ID NO: 755629 - DNA, 25 bp, Homo sapien
cacaccagggcaattgactgctgag

SEQ ID NO: 755630 - DNA, 25 bp, Homo sapien
cctcgtaggcgtgtaaggatatcca

SEQ ID NO: 755631 - DNA, 25 bp, Homo sapien
cagcagtggacagggctatgtgacc

SEQ ID NO: 755632 - DNA, 25 bp, Homo sapien
gtgtgtgctatctctggcaccaggg

SEQ ID NO: 755633 - DNA, 25 bp, Homo sapien
ttgtaggtgtgtgctatctctggca

SEQ ID NO: 755634 - DNA, 25 bp, Homo sapien
taggtgtgtgctatctctggcacca

SEQ ID NO: 755635 - DNA, 25 bp, Homo sapien
ggtgtgtgctatctctggcaccagg

SEQ ID NO: 755636 - DNA, 25 bp, Homo sapien
atggtgcaaaggcaacccaaagagg

SEQ ID NO: 755637 - DNA, 25 bp, Homo sapien
caaaggcaacccaaagaggacacgt

SEQ ID NO: 755638 - DNA, 25 bp, Homo sapien
acaggtactgcatggagctgcctgg

SEQ ID NO: 755639 - DNA, 25 bp, Homo sapien
cacaggtactgcatggagctgcctg

SEQ ID NO: 755640 - DNA, 25 bp, Homo sapien
gatgtctgtgggaacctgcagccta

SEQ ID NO: 755641 - DNA, 25 bp, Homo sapien
caggaagatgtctgtgggaacctgc

SEQ ID NO: 755642 - DNA, 25 bp, Homo sapien
ctgtgggaacctgcagcctagaagc

SEQ ID NO: 755643 - DNA, 25 bp, Homo sapien
gtgggaacctgcagcctagaagcac

SEQ ID NO: 755644 - DNA, 25 bp, Homo sapien
ggcagggcttggcaatgttttcata

SEQ ID NO: 755645 - DNA, 25 bp, Homo sapien
tggcaatgttttcatatacagtagc

SEQ ID NO: 755646 - DNA, 25 bp, Homo sapien
atgttttcatatacagtagcagcag

SEQ ID NO: 755647 - DNA, 25 bp, Homo sapien
cagggcttggcaatgttttcatata

SEQ ID NO: 755648 - DNA, 25 bp, Homo sapien
cttcggtatagccaagcagacatcc

SEQ ID NO: 755649 - DNA, 25 bp, Homo sapien
gacatccccttgtcttaggctataa

SEQ ID NO: 755650 - DNA, 25 bp, Homo sapien
aatttttcttgttgtcagattcttc

SEQ ID NO: 755651 - DNA, 25 bp, Homo sapien
cttggctgaccactgattttgctgg

SEQ ID NO: 755652 - DNA, 25 bp, Homo sapien
gagagatttatagttacaagaggca

SEQ ID NO: 755653 - DNA, 25 bp, Homo sapien
agatttatagttacaagaggcactg

SEQ ID NO: 755654 - DNA, 25 bp, Homo sapien
attagagagatttatagttacaaga

SEQ ID NO: 755655 - DNA, 25 bp, Homo sapien
tagagagatttatagttacaagagg

SEQ ID NO: 755656 - DNA, 25 bp, Homo sapien
tctcatcattgtaatgacacttgat

SEQ ID NO: 755657 - DNA, 25 bp, Homo sapien
ctcatcattgtaatgacacttgatg

SEQ ID NO: 755658 - DNA, 25 bp, Homo sapien
tcatcattgtaatgacacttgatgc

SEQ ID NO: 755659 - DNA, 25 bp, Homo sapien
tccattgaagactatgcaggtgtgt

SEQ ID NO: 755660 - DNA, 25 bp, Homo sapien
gagcaggccaggcatccattgaaga

SEQ ID NO: 755661 - DNA, 25 bp, Homo sapien
gagaagtctgtatgtaaagcacatg

SEQ ID NO: 755662 - DNA, 25 bp, Homo sapien
tgaagactatgcaggtgtgtgcact

SEQ ID NO: 755663 - DNA, 25 bp, Homo sapien
gtccactctcttgctagtctgttgt

SEQ ID NO: 755664 - DNA, 25 bp, Homo sapien
catatttttgtgtccactctcttgc

SEQ ID NO: 755665 - DNA, 25 bp, Homo sapien
ttacatagcatatttttgtgtccac

SEQ ID NO: 755666 - DNA, 25 bp, Homo sapien
ccactctcttgctagtctgttgtac

SEQ ID NO: 755667 - DNA, 25 bp, Homo sapien
cagcagcaccatttgaggccgggta

SEQ ID NO: 755668 - DNA, 25 bp, Homo sapien
ccctggtgtggtaccatcatgggca

SEQ ID NO: 755669 - DNA, 25 bp, Homo sapien
caagagaccagcagacaaactgagg

SEQ ID NO: 755670 - DNA, 25 bp, Homo sapien
gacagtgtctcatgtaaaacctcca

SEQ ID NO: 755671 - DNA, 25 bp, Homo sapien
gaatggctcacacttggacttagtg

SEQ ID NO: 755672 - DNA, 25 bp, Homo sapien
ttcttggtgtgaggcgagaaatgcc

SEQ ID NO: 755673 - DNA, 25 bp, Homo sapien
gcgggcggtagtgagaatcttcatc

SEQ ID NO: 755674 - DNA, 25 bp, Homo sapien
gatgaggtgcgaacaaagcctgctc

SEQ ID NO: 755675 - DNA, 25 bp, Homo sapien
gaagcatggcttctgcacaagtggg

SEQ ID NO: 755676 - DNA, 25 bp, Homo sapien
tatggctagatccagtagaggtcca

SEQ ID NO: 755677 - DNA, 25 bp, Homo sapien
tatgtatatccaacagagagagcag

SEQ ID NO: 755678 - DNA, 25 bp, Homo sapien
tacccatccttgagcaactgcagtg

SEQ ID NO: 755679 - DNA, 25 bp, Homo sapien
gaccggctataagtggcagctctgc

SEQ ID NO: 755680 - DNA, 25 bp, Homo sapien
tgtgatgattggctagcagcaagtc

SEQ ID NO: 755681 - DNA, 25 bp, Homo sapien
taccgtaagtgctaatcaatgctct

SEQ ID NO: 755682 - DNA, 25 bp, Homo sapien
gacagcagggttgaaagaccggcta

SEQ ID NO: 755683 - DNA, 25 bp, Homo sapien
aggtgctgaagtccccaacttattg

SEQ ID NO: 755684 - DNA, 25 bp, Homo sapien
ggtctatagcgtattttaagtctca

SEQ ID NO: 755685 - DNA, 25 bp, Homo sapien
aaatagtctgtaaatgtctcttaga

SEQ ID NO: 755686 - DNA, 25 bp, Homo sapien
tctagaccataatctgtccaatgct

SEQ ID NO: 755687 - DNA, 25 bp, Homo sapien
ggtgctgctaattggtttggggtgc

SEQ ID NO: 755688 - DNA, 25 bp, Homo sapien
actggggccatccagttatcagaga

SEQ ID NO: 755689 - DNA, 25 bp, Homo sapien
attgggggaagttgtaaatcttgtg

SEQ ID NO: 755690 - DNA, 25 bp, Homo sapien
gttatcagagatgcaaaagcctgaa

SEQ ID NO: 755691 - DNA, 25 bp, Homo sapien
agctcacaggttgtacaggtctcct

SEQ ID NO: 755692 - DNA, 25 bp, Homo sapien
aagtttctgaaacaagtactcagac

SEQ ID NO: 755693 - DNA, 25 bp, Homo sapien
taagataggacaccgttggccagga

SEQ ID NO: 755694 - DNA, 25 bp, Homo sapien
gattctccaggaatagggttgtgag

SEQ ID NO: 755695 - DNA, 25 bp, Homo sapien
tgctcggagaggcacagtaagaacc

SEQ ID NO: 755696 - DNA, 25 bp, Homo sapien
cctttagctgtgacgggtgtgccct

SEQ ID NO: 755697 - DNA, 25 bp, Homo sapien
taagaaccggcctgtttagaatcca

SEQ ID NO: 755698 - DNA, 25 bp, Homo sapien
catgagaaatgagcactgagcctcc

SEQ ID NO: 755699 - DNA, 25 bp, Homo sapien
tgggcccagatctggggtctgtctc

SEQ ID NO: 755700 - DNA, 25 bp, Homo sapien
cccagatctggggtctgtctctgct

SEQ ID NO: 755701 - DNA, 25 bp, Homo sapien
ctgggcccagatctggggtctgtct

SEQ ID NO: 755702 - DNA, 25 bp, Homo sapien
atcctgggtgaatggtatctcctgc

SEQ ID NO: 755703 - DNA, 25 bp, Homo sapien
aacacatgtaactgccaggctgatc

SEQ ID NO: 755704 - DNA, 25 bp, Homo sapien
tgggtgaatggtatctcctgccact

SEQ ID NO: 755705 - DNA, 25 bp, Homo sapien
aaaaaacacatgtaactgccaggct

SEQ ID NO: 755706 - DNA, 25 bp, Homo sapien
tcaggaaggtcggaatctctgatgt

SEQ ID NO: 755707 - DNA, 25 bp, Homo sapien
caggaaggtcggaatctctgatgtc

SEQ ID NO: 755708 - DNA, 25 bp, Homo sapien
atcaggaaggtcggaatctctgatg

SEQ ID NO: 755709 - DNA, 25 bp, Homo sapien
tccaatcaggaaggtcggaatctct

SEQ ID NO: 755710 - DNA, 25 bp, Homo sapien
aagagtatgttatcaattctcaagc

SEQ ID NO: 755711 - DNA, 25 bp, Homo sapien
agtatgttatcaattctcaagccta

SEQ ID NO: 755712 - DNA, 25 bp, Homo sapien
tgttgtccaactgatctccaggcac

SEQ ID NO: 755713 - DNA, 25 bp, Homo sapien
attctcaagcctaggagaagtcagg

SEQ ID NO: 755714 - DNA, 25 bp, Homo sapien
atctgtcccctcttacggaacctag

SEQ ID NO: 755715 - DNA, 25 bp, Homo sapien
cttacggaacctagtctccgttctg

SEQ ID NO: 755716 - DNA, 25 bp, Homo sapien
tacggaacctagtctccgttctgtc

SEQ ID NO: 755717 - DNA, 25 bp, Homo sapien
tccttcgtcttagtcaatcctatcc

SEQ ID NO: 755718 - DNA, 25 bp, Homo sapien
cttccttcgtcttagtcaatcctat

SEQ ID NO: 755719 - DNA, 25 bp, Homo sapien
gtgtgcaccactaccacttggctaa

SEQ ID NO: 755720 - DNA, 25 bp, Homo sapien
ttcgtcttagtcaatcctatcccac

SEQ ID NO: 755721 - DNA, 25 bp, Homo sapien
gctcaaccccatgtgccgctccttc

SEQ ID NO: 755722 - DNA, 25 bp, Homo sapien
tgctcaaccccatgtgccgctcctt

SEQ ID NO: 755723 - DNA, 25 bp, Homo sapien
tcaaccccatgtgccgctccttccc

SEQ ID NO: 755724 - DNA, 25 bp, Homo sapien
tctgctcaaccccatgtgccgctcc

SEQ ID NO: 755725 - DNA, 25 bp, Homo sapien
ctgagtaaagaaaccaggccactgt

SEQ ID NO: 755726 - DNA, 25 bp, Homo sapien
gagtaaagaaaccaggccactgtgt

SEQ ID NO: 755727 - DNA, 25 bp, Homo sapien
aagaaaccaggccactgtgtaatgc

SEQ ID NO: 755728 - DNA, 25 bp, Homo sapien
gtaaagaaaccaggccactgtgtaa

SEQ ID NO: 755729 - DNA, 25 bp, Homo sapien
ctcaaggaggatgggtgacactcgc

SEQ ID NO: 755730 - DNA, 25 bp, Homo sapien
caagctgactgttgaagtccttgtg

SEQ ID NO: 755731 - DNA, 25 bp, Homo sapien
aagtccttgtggtgctcaaggagga

SEQ ID NO: 755732 - DNA, 25 bp, Homo sapien
tgctcaaggaggatgggtgacactc

SEQ ID NO: 755733 - DNA, 25 bp, Homo sapien
aagaacaggattggaggtgctctct

SEQ ID NO: 755734 - DNA, 25 bp, Homo sapien
aaagaacaggattggaggtgctctc

SEQ ID NO: 755735 - DNA, 25 bp, Homo sapien
ctcaaaacaacctcttccacctggg

SEQ ID NO: 755736 - DNA, 25 bp, Homo sapien
ttggctcaaaacaacctcttccacc

SEQ ID NO: 755737 - DNA, 25 bp, Homo sapien
ggctcaaaacaacctcttccacctg

SEQ ID NO: 755738 - DNA, 25 bp, Homo sapien
tcttggctcaaaacaacctcttcca

SEQ ID NO: 755739 - DNA, 25 bp, Homo sapien
ggctcaggggcgagcaccttccgtg

SEQ ID NO: 755740 - DNA, 25 bp, Homo sapien
ctcaggggcgagcaccttccgtggc

SEQ ID NO: 755741 - DNA, 25 bp, Homo sapien
caaaaggacctatgcggggggctgg

SEQ ID NO: 755742 - DNA, 25 bp, Homo sapien
gcaaaaggacctatgcggggggctg

SEQ ID NO: 755743 - DNA, 25 bp, Homo sapien
tcccaggccaggaatcttttaatga

SEQ ID NO: 755744 - DNA, 25 bp, Homo sapien
ttgtccgacaccctcagatctttgt

SEQ ID NO: 755745 - DNA, 25 bp, Homo sapien
caggccaggaatcttttaatgacag

SEQ ID NO: 755746 - DNA, 25 bp, Homo sapien
gccaggaatcttttaatgacaggat

SEQ ID NO: 755747 - DNA, 25 bp, Homo sapien
agaaatgaaggcgttggtattgcca

SEQ ID NO: 755748 - DNA, 25 bp, Homo sapien
gaagccggctcggctgaaatacgct

SEQ ID NO: 755749 - DNA, 25 bp, Homo sapien
gggaagccggctcggctgaaatacg

SEQ ID NO: 755750 - DNA, 25 bp, Homo sapien
agccggctcggctgaaatacgctat

SEQ ID NO: 755751 - DNA, 25 bp, Homo sapien
gaccgttcctagctcaggactggca

SEQ ID NO: 755752 - DNA, 25 bp, Homo sapien
tggcacccaccctgcagagagccat

SEQ ID NO: 755753 - DNA, 25 bp, Homo sapien
aggtaagggaccgttcctagctcag

SEQ ID NO: 755754 - DNA, 25 bp, Homo sapien
taagggaccgttcctagctcaggac

SEQ ID NO: 755755 - DNA, 25 bp, Homo sapien
ggacaggaatcaggttgctgctcag

SEQ ID NO: 755756 - DNA, 25 bp, Homo sapien
tgaggacaggaatcaggttgctgct

SEQ ID NO: 755757 - DNA, 25 bp, Homo sapien
caggagagacctccggctgaggtca

SEQ ID NO: 755758 - DNA, 25 bp, Homo sapien
ctgaggacaggaatcaggttgctgc

SEQ ID NO: 755759 - DNA, 25 bp, Homo sapien
tcatgcaacggcgtaactggaaccg

SEQ ID NO: 755760 - DNA, 25 bp, Homo sapien
agtggaaccgacgtttctggaacag

SEQ ID NO: 755761 - DNA, 25 bp, Homo sapien
tgcaacggcgtaactggaaccgacg

SEQ ID NO: 755762 - DNA, 25 bp, Homo sapien
cgagagcggttcttcccatacagga

SEQ ID NO: 755763 - DNA, 25 bp, Homo sapien
agtgctctgggtcataagcctggat

SEQ ID NO: 755764 - DNA, 25 bp, Homo sapien
cagtgctctgggtcataagcctgga

SEQ ID NO: 755765 - DNA, 25 bp, Homo sapien
ccagtgctctgggtcataagcctgg

SEQ ID NO: 755766 - DNA, 25 bp, Homo sapien
gaaaggcgagcgcgatctcgcgccc

SEQ ID NO: 755767 - DNA, 25 bp, Homo sapien
aaaggcgagcgcgatctcgcgccca

SEQ ID NO: 755768 - DNA, 25 bp, Homo sapien
aggaaaggcgagcgcgatctcgcgc

SEQ ID NO: 755769 - DNA, 25 bp, Homo sapien
ctaggaaaggcgagcgcgatctcgc

SEQ ID NO: 755770 - DNA, 25 bp, Homo sapien
cttctctcaggccgatgacctcagg

SEQ ID NO: 755771 - DNA, 25 bp, Homo sapien
aaaatttctatcgtcagaatttagg

SEQ ID NO: 755772 - DNA, 25 bp, Homo sapien
aaatttctatcgtcagaatttaggg

SEQ ID NO: 755773 - DNA, 25 bp, Homo sapien
tgtgcatggccagaactttataata

SEQ ID NO: 755774 - DNA, 25 bp, Homo sapien
ataataattaaaagagacttgaagc

SEQ ID NO: 755775 - DNA, 25 bp, Homo sapien
tgggtgtgacggtgcacacctctag

SEQ ID NO: 755776 - DNA, 25 bp, Homo sapien
ctttataataattaaaagagacttg

SEQ ID NO: 755777 - DNA, 25 bp, Homo sapien
tactgacgcgtgtcccgcctccaag

SEQ ID NO: 755778 - DNA, 25 bp, Homo sapien
ccgccgccacctgctactgacgcgt

SEQ ID NO: 755779 - DNA, 25 bp, Homo sapien
atccttgagctccatagccccgccg

SEQ ID NO: 755780 - DNA, 25 bp, Homo sapien
gctccatccttgagctccatagccc

SEQ ID NO: 755781 - DNA, 25 bp, Homo sapien
acttcatcaccaagctcgtggacat

SEQ ID NO: 755782 - DNA, 25 bp, Homo sapien
ggacttcatcaccaagctcgtggac

SEQ ID NO: 755783 - DNA, 25 bp, Homo sapien
aggacttcatcaccaagctcgtgga

SEQ ID NO: 755784 - DNA, 25 bp, Homo sapien
gacttcatcaccaagctcgtggaca

SEQ ID NO: 755785 - DNA, 25 bp, Homo sapien
gtgtattgtcccctgtgtccgtgtc

SEQ ID NO: 755786 - DNA, 25 bp, Homo sapien
gatgcagtacctgcacggcgtcctg

SEQ ID NO: 755787 - DNA, 25 bp, Homo sapien
gctggaccccagcaaagtggaagtt

SEQ ID NO: 755788 - DNA, 25 bp, Homo sapien
gtttgtgcttctgcccacccgtgta

SEQ ID NO: 755789 - DNA, 25 bp, Homo sapien
tgctatattgtcctcatcttgcaaa

SEQ ID NO: 755790 - DNA, 25 bp, Homo sapien
atgctatattgtcctcatcttgcaa

SEQ ID NO: 755791 - DNA, 25 bp, Homo sapien
gctatattgtcctcatcttgcaaat

SEQ ID NO: 755792 - DNA, 25 bp, Homo sapien
gttccggagcaactctctggcctca

SEQ ID NO: 755793 - DNA, 25 bp, Homo sapien
cctgttccggagcaactctctggcc

SEQ ID NO: 755794 - DNA, 25 bp, Homo sapien
ggcctcaaagtccatggagtctttt

SEQ ID NO: 755795 - DNA, 25 bp, Homo sapien
tggcctcaaagtccatggagtcttt

SEQ ID NO: 755796 - DNA, 25 bp, Homo sapien
gcaacagaacgccaatgcacactaa

SEQ ID NO: 755797 - DNA, 25 bp, Homo sapien
tatgaccaagtaacaaaagaccaac

SEQ ID NO: 755798 - DNA, 25 bp, Homo sapien
aggaaaacgcctacttatgaccaag

SEQ ID NO: 755799 - DNA, 25 bp, Homo sapien
cttttctaatgaacctgaggcagga

SEQ ID NO: 755800 - DNA, 25 bp, Homo sapien
ggtcatggcactagtatctgatgag

SEQ ID NO: 755801 - DNA, 25 bp, Homo sapien
tccaaggtcatggcactagtatctg

SEQ ID NO: 755802 - DNA, 25 bp, Homo sapien
tcatggcactagtatctgatgaggg

SEQ ID NO: 755803 - DNA, 25 bp, Homo sapien
aaggtcatggcactagtatctgatg

SEQ ID NO: 755804 - DNA, 25 bp, Homo sapien
ctgcagtttggtcgaggccaggata

SEQ ID NO: 755805 - DNA, 25 bp, Homo sapien
ctctgcagtttggtcgaggccagga

SEQ ID NO: 755806 - DNA, 25 bp, Homo sapien
catctggctggtcgcccctagaagg

SEQ ID NO: 755807 - DNA, 25 bp, Homo sapien
cacatctggctggtcgcccctagaa

SEQ ID NO: 755808 - DNA, 25 bp, Homo sapien
tctccgcgccgctgctgtagcttcc

SEQ ID NO: 755809 - DNA, 25 bp, Homo sapien
gccgctgctgtagcttccgggccgg

SEQ ID NO: 755810 - DNA, 25 bp, Homo sapien
ccgccccgcagtctccgcgccgctg

SEQ ID NO: 755811 - DNA, 25 bp, Homo sapien
ccgcgccgctgctgtagcttccggg

SEQ ID NO: 755812 - DNA, 25 bp, Homo sapien
cgttccggctcaggttcgccgccat

SEQ ID NO: 755813 - DNA, 25 bp, Homo sapien
ttctcggtgaccacccgcacgtagg

SEQ ID NO: 755814 - DNA, 25 bp, Homo sapien
cgcacgtaggcctcttgcagcgctg

SEQ ID NO: 755815 - DNA, 25 bp, Homo sapien
cagtcggtcggggacttctcggtga

SEQ ID NO: 755816 - DNA, 25 bp, Homo sapien
tggcccgaccctggcccgtctcgcc

SEQ ID NO: 755817 - DNA, 25 bp, Homo sapien
ctggcccgaccctggcccgtctcgc

SEQ ID NO: 755818 - DNA, 25 bp, Homo sapien
gcccgaccctggcccgtctcgccgc

SEQ ID NO: 755819 - DNA, 25 bp, Homo sapien
cccaaagagcttgggctgacagtaa

SEQ ID NO: 755820 - DNA, 25 bp, Homo sapien
caggttctcagtaggcaactgtgca

SEQ ID NO: 755821 - DNA, 25 bp, Homo sapien
ggacactggcctgacttaccatggg

SEQ ID NO: 755822 - DNA, 25 bp, Homo sapien
aaaacatgagctgtggagtttccca

SEQ ID NO: 755823 - DNA, 25 bp, Homo sapien
gtgccagccacgcggatgtcattgc

SEQ ID NO: 755824 - DNA, 25 bp, Homo sapien
cacgcggatgtcattgctgttgcct

SEQ ID NO: 755825 - DNA, 25 bp, Homo sapien
gttgccttcataggtaaagagagcc

SEQ ID NO: 755826 - DNA, 25 bp, Homo sapien
gctgttgccttcataggtaaagaga

SEQ ID NO: 755827 - DNA, 25 bp, Homo sapien
tgtggctcagtggaccaagacagct

SEQ ID NO: 755828 - DNA, 25 bp, Homo sapien
gaggccgagctgcttctaaaccagg

SEQ ID NO: 755829 - DNA, 25 bp, Homo sapien
ggtatttcatctacagggctccgta

SEQ ID NO: 755830 - DNA, 25 bp, Homo sapien
tgccacaacgttgcaaaagggcccg

SEQ ID NO: 755831 - DNA, 25 bp, Homo sapien
gaggacaaatttgggcagtccagag

SEQ ID NO: 755832 - DNA, 25 bp, Homo sapien
agttggggtccttcactctgcagaa

SEQ ID NO: 755833 - DNA, 25 bp, Homo sapien
gtacatcaccttcccgctgttgagc

SEQ ID NO: 755834 - DNA, 25 bp, Homo sapien
tgatgaggacaaatttgggcagtcc

SEQ ID NO: 755835 - DNA, 25 bp, Homo sapien
ctggcacaggctcccttccgcacat

SEQ ID NO: 755836 - DNA, 25 bp, Homo sapien
cttccgcacatcgttcacgccctcg

SEQ ID NO: 755837 - DNA, 25 bp, Homo sapien
ggctcccttccgcacatcgttcacg

SEQ ID NO: 755838 - DNA, 25 bp, Homo sapien
gcacatcgttcacgccctcgcctgt

SEQ ID NO: 755839 - DNA, 25 bp, Homo sapien
tccatgatgcactcaggctccacat

SEQ ID NO: 755840 - DNA, 25 bp, Homo sapien
gggtcccacgtcctggaagcggcca

SEQ ID NO: 755841 - DNA, 25 bp, Homo sapien
tagttggcacctgaagccttggcca

SEQ ID NO: 755842 - DNA, 25 bp, Homo sapien
cgtgcgttgatggtcacatgggccc

SEQ ID NO: 755843 - DNA, 25 bp, Homo sapien
aggaatcacgtccaaccacacgcat

SEQ ID NO: 755844 - DNA, 25 bp, Homo sapien
caggtatctcccgtgactccaaggg

SEQ ID NO: 755845 - DNA, 25 bp, Homo sapien
ttagttcctccacggtggctacctc

SEQ ID NO: 755846 - DNA, 25 bp, Homo sapien
tctggtttcaggctccgccttgatg

SEQ ID NO: 755847 - DNA, 25 bp, Homo sapien
cacggcattggtcttctggtacaca

SEQ ID NO: 755848 - DNA, 25 bp, Homo sapien
agacacggcattggtcttctggtac

SEQ ID NO: 755849 - DNA, 25 bp, Homo sapien
cggcattggtcttctggtacacaga

SEQ ID NO: 755850 - DNA, 25 bp, Homo sapien
cattggtcttctggtacacagagcc

SEQ ID NO: 755851 - DNA, 25 bp, Homo sapien
agccacagcaagcagaacactccca

SEQ ID NO: 755852 - DNA, 25 bp, Homo sapien
agaacactcccacgtgcccagcatg

SEQ ID NO: 755853 - DNA, 25 bp, Homo sapien
tgctgcatgagctcacttgtgagga

SEQ ID NO: 755854 - DNA, 25 bp, Homo sapien
tgtaatgggcaccaaggagagtgga

SEQ ID NO: 755855 - DNA, 25 bp, Homo sapien
acgggcaccagagccagtcgatcat

SEQ ID NO: 755856 - DNA, 25 bp, Homo sapien
ttttaggcacatggccaaagacggg

SEQ ID NO: 755857 - DNA, 25 bp, Homo sapien
tcattagccttgtggcttaacttac

SEQ ID NO: 755858 - DNA, 25 bp, Homo sapien
tgagttttaggcacatggccaaaga

SEQ ID NO: 755859 - DNA, 25 bp, Homo sapien
tttcctccagccgacggttctcctc

SEQ ID NO: 755860 - DNA, 25 bp, Homo sapien
gcagctcacgctcccggcgctcctg

SEQ ID NO: 755861 - DNA, 25 bp, Homo sapien
tcccggcgtgcagcctcacgcagct

SEQ ID NO: 755862 - DNA, 25 bp, Homo sapien
ccaccctgctcctgatagcgctgct

SEQ ID NO: 755863 - DNA, 25 bp, Homo sapien
tcggttccttgaaaccacttcttgc

SEQ ID NO: 755864 - DNA, 25 bp, Homo sapien
gctcatttcggttccttgaaaccac

SEQ ID NO: 755865 - DNA, 25 bp, Homo sapien
ctgctcatttcggttccttgaaacc

SEQ ID NO: 755866 - DNA, 25 bp, Homo sapien
ggttccttgaaaccacttcttgctg

SEQ ID NO: 755867 - DNA, 25 bp, Homo sapien
gatcagggacttctgcgtgtggcca

SEQ ID NO: 755868 - DNA, 25 bp, Homo sapien
cagtagcccctcaaaggtgagtgtg

SEQ ID NO: 755869 - DNA, 25 bp, Homo sapien
caggacaggtccaaacaagtagagc

SEQ ID NO: 755870 - DNA, 25 bp, Homo sapien
tgggccctcaatccgagatcaggga

SEQ ID NO: 755871 - DNA, 25 bp, Homo sapien
gcttgaaaatctccctcgggtgcac

SEQ ID NO: 755872 - DNA, 25 bp, Homo sapien
gaaaatctccctcgggtgcacggca

SEQ ID NO: 755873 - DNA, 25 bp, Homo sapien
atctccctcgggtgcacggcagact

SEQ ID NO: 755874 - DNA, 25 bp, Homo sapien
ttgaaaatctccctcgggtgcacgg

SEQ ID NO: 755875 - DNA, 25 bp, Homo sapien
ctgccctgggccttgagatggcagc

SEQ ID NO: 755876 - DNA, 25 bp, Homo sapien
ccctgggccttgagatggcagcagc

SEQ ID NO: 755877 - DNA, 25 bp, Homo sapien
ctctggttgggtgagctgcttctgc

SEQ ID NO: 755878 - DNA, 25 bp, Homo sapien
tctgccaaagtgggtctctggttgg

SEQ ID NO: 755879 - DNA, 25 bp, Homo sapien
gggctgctcgtagaaggtctcctgc

SEQ ID NO: 755880 - DNA, 25 bp, Homo sapien
ctgctcgtagaaggtctcctgctct

SEQ ID NO: 755881 - DNA, 25 bp, Homo sapien
accagacatggaggagtgctgggcg

SEQ ID NO: 755882 - DNA, 25 bp, Homo sapien
cagacatggaggagtgctgggcgcc

SEQ ID NO: 755883 - DNA, 25 bp, Homo sapien
ctgaatgtggtggtcaatgtgctca

SEQ ID NO: 755884 - DNA, 25 bp, Homo sapien
tgaatgtggtggtcaatgtgctcag

SEQ ID NO: 755885 - DNA, 25 bp, Homo sapien
gaatgtggtggtcaatgtgctcaga

SEQ ID NO: 755886 - DNA, 25 bp, Homo sapien
aatgtggtggtcaatgtgctcagag

SEQ ID NO: 755887 - DNA, 25 bp, Homo sapien
ccgtgatgaggttctcggggtcaaa

SEQ ID NO: 755888 - DNA, 25 bp, Homo sapien
tcaaaggagatctctgtgtcgtcgg

SEQ ID NO: 755889 - DNA, 25 bp, Homo sapien
ttcgtcgatcacctcgatgcccgtg

SEQ ID NO: 755890 - DNA, 25 bp, Homo sapien
ggaacatgccaaaatggccatccgg

SEQ ID NO: 755891 - DNA, 25 bp, Homo sapien
tcattctaaacagtggtggccacca

SEQ ID NO: 755892 - DNA, 25 bp, Homo sapien
ggctccaacaagacaaattccctgc

SEQ ID NO: 755893 - DNA, 25 bp, Homo sapien
tgtctgccgtttttgaatacccagg

SEQ ID NO: 755894 - DNA, 25 bp, Homo sapien
caataaggaagccatgtctgagagg

SEQ ID NO: 755895 - DNA, 25 bp, Homo sapien
ccactctgtgttacttttcctgaag

SEQ ID NO: 755896 - DNA, 25 bp, Homo sapien
ttcctgaagtcagaatcagttgagg

SEQ ID NO: 755897 - DNA, 25 bp, Homo sapien
ttcccacatgggagcattcaggcta

SEQ ID NO: 755898 - DNA, 25 bp, Homo sapien
catgggagcattcaggctacagcag

SEQ ID NO: 755899 - DNA, 25 bp, Homo sapien
tgggaattcgtggtccaaaagcata

SEQ ID NO: 755900 - DNA, 25 bp, Homo sapien
agctgcgagcctgtgtagaccaaac

SEQ ID NO: 755901 - DNA, 25 bp, Homo sapien
ggtaacaccttgagtcaaccgccta

SEQ ID NO: 755902 - DNA, 25 bp, Homo sapien
caaacctgggtcttccatgggagtg

SEQ ID NO: 755903 - DNA, 25 bp, Homo sapien
tcttgggttgggacaggcaagccca

SEQ ID NO: 755904 - DNA, 25 bp, Homo sapien
taaccatgctccagaattggcgtgc

SEQ ID NO: 755905 - DNA, 25 bp, Homo sapien
gatgtcagaccaggcgatcatggag

SEQ ID NO: 755906 - DNA, 25 bp, Homo sapien
tcaccactgggctatttctgtaggc

SEQ ID NO: 755907 - DNA, 25 bp, Homo sapien
tccttccggcatagggatgtcagac

SEQ ID NO: 755908 - DNA, 25 bp, Homo sapien
catttctgtggcctcgttctcaggg

SEQ ID NO: 755909 - DNA, 25 bp, Homo sapien
tgactgcactcgaagctcgctgtgt

SEQ ID NO: 755910 - DNA, 25 bp, Homo sapien
ttagtattctgacacaagggcagtc

SEQ ID NO: 755911 - DNA, 25 bp, Homo sapien
tcttgatgtaggcttggacccctcg

SEQ ID NO: 755912 - DNA, 25 bp, Homo sapien
ccttaaagcttgttgagtcctggaa

SEQ ID NO: 755913 - DNA, 25 bp, Homo sapien
gccctgcccttctggaacgaggaga

SEQ ID NO: 755914 - DNA, 25 bp, Homo sapien
ccgtttctgtggctggttcgatgca

SEQ ID NO: 755915 - DNA, 25 bp, Homo sapien
aactccattagcaaggtgggctgcc

SEQ ID NO: 755916 - DNA, 25 bp, Homo sapien
tcctggacggcacggaccagatgtg

SEQ ID NO: 755917 - DNA, 25 bp, Homo sapien
cagcagctcagctactggtcacctg

SEQ ID NO: 755918 - DNA, 25 bp, Homo sapien
tgccaccgcctggaatgctgattgg

SEQ ID NO: 755919 - DNA, 25 bp, Homo sapien
gctggttatagacatgccacctgaa

SEQ ID NO: 755920 - DNA, 25 bp, Homo sapien
tattttaagcacagcctcttggcct

SEQ ID NO: 755921 - DNA, 25 bp, Homo sapien
cctctgcctgctgagggccgcctcc

SEQ ID NO: 755922 - DNA, 25 bp, Homo sapien
gactcctctccacaaagctgtggtc

SEQ ID NO: 755923 - DNA, 25 bp, Homo sapien
acaaagctgtggtctgcaccagctc

SEQ ID NO: 755924 - DNA, 25 bp, Homo sapien
tccacaaagctgtggtctgcaccag

SEQ ID NO: 755925 - DNA, 25 bp, Homo sapien
catctggtgctatctacggtaggca

SEQ ID NO: 755926 - DNA, 25 bp, Homo sapien
gccaacctttgggtacagagcctta

SEQ ID NO: 755927 - DNA, 25 bp, Homo sapien
tcaatcaggatcagtgtggaacagt

SEQ ID NO: 755928 - DNA, 25 bp, Homo sapien
tggaacagtgagacctgcgcatggc

SEQ ID NO: 755929 - DNA, 25 bp, Homo sapien
gagctgcagaaggtggttgccccat

SEQ ID NO: 755930 - DNA, 25 bp, Homo sapien
cagtctgggacctgcaatgtgcatc

SEQ ID NO: 755931 - DNA, 25 bp, Homo sapien
ggtagcgttaccctctcaggtttca

SEQ ID NO: 755932 - DNA, 25 bp, Homo sapien
tcaggtttcaagtgcgtacccagct

SEQ ID NO: 755933 - DNA, 25 bp, Homo sapien
aaatgtatcgtttttctctggctga

SEQ ID NO: 755934 - DNA, 25 bp, Homo sapien
tctcaggatgggcatgtattgatca

SEQ ID NO: 755935 - DNA, 25 bp, Homo sapien
tgaaggctggttataaatagctgct

SEQ ID NO: 755936 - DNA, 25 bp, Homo sapien
tctggcctctatagtttctggtgaa

SEQ ID NO: 755937 - DNA, 25 bp, Homo sapien
tggttatgaatttcctcagcttgcc

SEQ ID NO: 755938 - DNA, 25 bp, Homo sapien
ttgaattgcccccagtaatctcttc

SEQ ID NO: 755939 - DNA, 25 bp, Homo sapien
gccatttatgatgttcttcctgcat

SEQ ID NO: 755940 - DNA, 25 bp, Homo sapien
gcattcccaaagttttgaattgccc

SEQ ID NO: 755941 - DNA, 25 bp, Homo sapien
tactcttacagtcaatttagattaa

SEQ ID NO: 755942 - DNA, 25 bp, Homo sapien
gccatttcaagtagcatgtagaaac

SEQ ID NO: 755943 - DNA, 25 bp, Homo sapien
gtcaatttagattaatgttttgcca

SEQ ID NO: 755944 - DNA, 25 bp, Homo sapien
tttgccatttcaagtagcatgtaga

SEQ ID NO: 755945 - DNA, 25 bp, Homo sapien
gttctaggggttctaatacacatag

SEQ ID NO: 755946 - DNA, 25 bp, Homo sapien
tggttgttctaggggttctaataca

SEQ ID NO: 755947 - DNA, 25 bp, Homo sapien
gttgttctaggggttctaatacaca

SEQ ID NO: 755948 - DNA, 25 bp, Homo sapien
tgttctaggggttctaatacacata

SEQ ID NO: 755949 - DNA, 25 bp, Homo sapien
ggcagttgctctgtatccctgtcag

SEQ ID NO: 755950 - DNA, 25 bp, Homo sapien
taagttaaacaccacagtaggcagt

SEQ ID NO: 755951 - DNA, 25 bp, Homo sapien
ccctaatgcctgataacgttgaaca

SEQ ID NO: 755952 - DNA, 25 bp, Homo sapien
ccctgtcagcacttgatagttgcag

SEQ ID NO: 755953 - DNA, 25 bp, Homo sapien
tgcagtccaccagcgttgtgagcac

SEQ ID NO: 755954 - DNA, 25 bp, Homo sapien
tcccgagtgcgtctgtcattttgca

SEQ ID NO: 755955 - DNA, 25 bp, Homo sapien
taagagccaagttgttgtcccgagt

SEQ ID NO: 755956 - DNA, 25 bp, Homo sapien
gtcattttgcagtccaccagcgttg

SEQ ID NO: 755957 - DNA, 25 bp, Homo sapien
ttccactcaggaaattgggctgccc

SEQ ID NO: 755958 - DNA, 25 bp, Homo sapien
tactgtctggtgtgctgtaggcatc

SEQ ID NO: 755959 - DNA, 25 bp, Homo sapien
gcagtcatgaatggcaagtggtccc

SEQ ID NO: 755960 - DNA, 25 bp, Homo sapien
gacatcttcagacacctgggccttg

SEQ ID NO: 755961 - DNA, 25 bp, Homo sapien
gagcaccccgttccaccacaatcat

SEQ ID NO: 755962 - DNA, 25 bp, Homo sapien
catttccattttgagcaccccgttc

SEQ ID NO: 755963 - DNA, 25 bp, Homo sapien
tttccattttgagcaccccgttcca

SEQ ID NO: 755964 - DNA, 25 bp, Homo sapien
gtttcatttccattttgagcacccc

SEQ ID NO: 755965 - DNA, 25 bp, Homo sapien
gcttccagcactgatgagtaattct

SEQ ID NO: 755966 - DNA, 25 bp, Homo sapien
gatgagtaattctgctgcccgaaga

SEQ ID NO: 755967 - DNA, 25 bp, Homo sapien
gcactgatgagtaattctgctgccc

SEQ ID NO: 755968 - DNA, 25 bp, Homo sapien
ttccagcactgatgagtaattctgc

SEQ ID NO: 755969 - DNA, 25 bp, Homo sapien
gcacagaaggataagaggtcatcag

SEQ ID NO: 755970 - DNA, 25 bp, Homo sapien
ggcccagtgtgcctgagttctgact

SEQ ID NO: 755971 - DNA, 25 bp, Homo sapien
cccagtgtgcctgagttctgactgt

SEQ ID NO: 755972 - DNA, 25 bp, Homo sapien
agcaggcccagtgtgcctgagttct

SEQ ID NO: 755973 - DNA, 25 bp, Homo sapien
cagtgtgcctgagttctgactgtgg

SEQ ID NO: 755974 - DNA, 25 bp, Homo sapien
gttgagagagccagaactgtccaag

SEQ ID NO: 755975 - DNA, 25 bp, Homo sapien
agagagccagaactgtccaagggtg

SEQ ID NO: 755976 - DNA, 25 bp, Homo sapien
gagccagaactgtccaagggtggaa

SEQ ID NO: 755977 - DNA, 25 bp, Homo sapien
ccagaactgtccaagggtggaagct

SEQ ID NO: 755978 - DNA, 25 bp, Homo sapien
gggctggtagacactctggtgatcc

SEQ ID NO: 755979 - DNA, 25 bp, Homo sapien
ctggtagacactctggtgatccact

SEQ ID NO: 755980 - DNA, 25 bp, Homo sapien
ggtgcctggtgtttgccataaggct

SEQ ID NO: 755981 - DNA, 25 bp, Homo sapien
ttctccagggcaaatgttggctgcc

SEQ ID NO: 755982 - DNA, 25 bp, Homo sapien
cttctccagggcaaatgttggctgc

SEQ ID NO: 755983 - DNA, 25 bp, Homo sapien
gtgcctggtgtttgccataaggctt

SEQ ID NO: 755984 - DNA, 25 bp, Homo sapien
ctccagctgccacatggacccagag

SEQ ID NO: 755985 - DNA, 25 bp, Homo sapien
gattgagtgtcaactgatcccagga

SEQ ID NO: 755986 - DNA, 25 bp, Homo sapien
gcaggtggattgagtgtcaactgat

SEQ ID NO: 755987 - DNA, 25 bp, Homo sapien
ggtggattgagtgtcaactgatccc

SEQ ID NO: 755988 - DNA, 25 bp, Homo sapien
caggtgcaaaactgccctcagagtg

SEQ ID NO: 755989 - DNA, 25 bp, Homo sapien
gtaggagtcccatgtaagggcatgc

SEQ ID NO: 755990 - DNA, 25 bp, Homo sapien
caggaggcaggtgcaaaactgccct

SEQ ID NO: 755991 - DNA, 25 bp, Homo sapien
gctgggggtaggagtcccatgtaag

SEQ ID NO: 755992 - DNA, 25 bp, Homo sapien
aggtcctggcggctaataggcgctc

SEQ ID NO: 755993 - DNA, 25 bp, Homo sapien
tgagcgagggaatccgggaaaggga

SEQ ID NO: 755994 - DNA, 25 bp, Homo sapien
atagccgtctccaaagcgctggcgg

SEQ ID NO: 755995 - DNA, 25 bp, Homo sapien
gggagagtggattagggtgggcgag

SEQ ID NO: 755996 - DNA, 25 bp, Homo sapien
agcaggggcgccccgcgcacggccg

SEQ ID NO: 755997 - DNA, 25 bp, Homo sapien
ggggcgccccgcgcacggccgccat

SEQ ID NO: 755998 - DNA, 25 bp, Homo sapien
ctgagcaggggcgccccgcgcacgg

SEQ ID NO: 755999 - DNA, 25 bp, Homo sapien
aggggcgccccgcgcacggccgcca

SEQ ID NO: 756000 - DNA, 25 bp, Homo sapien
acagggccagcaacgccaggaggca

SEQ ID NO: 756001 - DNA, 25 bp, Homo sapien
ggcacagggccagcaacgccaggag

SEQ ID NO: 756002 - DNA, 25 bp, Homo sapien
agggcacagggccagcaacgccagg

SEQ ID NO: 756003 - DNA, 25 bp, Homo sapien
cacagggccagcaacgccaggaggc

SEQ ID NO: 756004 - DNA, 25 bp, Homo sapien
tgcggccgtccctggccgcttccct

SEQ ID NO: 756005 - DNA, 25 bp, Homo sapien
actcctcgatctcgtcgtcggtcag

SEQ ID NO: 756006 - DNA, 25 bp, Homo sapien
gaagccctcgaggaactcctcgatc

SEQ ID NO: 756007 - DNA, 25 bp, Homo sapien
caggttctagctctgacaggaagcc

SEQ ID NO: 756008 - DNA, 25 bp, Homo sapien
caactgattatgcaagaggccgtgg

SEQ ID NO: 756009 - DNA, 25 bp, Homo sapien
tacctgtcgcgtactggaggaatgg

SEQ ID NO: 756010 - DNA, 25 bp, Homo sapien
gggccacgatgaaaacagctaagat

SEQ ID NO: 756011 - DNA, 25 bp, Homo sapien
gctcgcgtgcgcattagtaagccag

SEQ ID NO: 756012 - DNA, 25 bp, Homo sapien
cagagaggtgactgagccatccagg

SEQ ID NO: 756013 - DNA, 25 bp, Homo sapien
gacacttggttgagtattgaagccc

SEQ ID NO: 756014 - DNA, 25 bp, Homo sapien
catacaaaggaagggacatgggccc

SEQ ID NO: 756015 - DNA, 25 bp, Homo sapien
gagcatctggtcatccctgccaact

SEQ ID NO: 756016 - DNA, 25 bp, Homo sapien
gactcgtgtcaaatgaacagagcca

SEQ ID NO: 756017 - DNA, 25 bp, Homo sapien
tcagttcccagtgcggatcagcaaa

SEQ ID NO: 756018 - DNA, 25 bp, Homo sapien
taaagactgagcgtagggttcccag

SEQ ID NO: 756019 - DNA, 25 bp, Homo sapien
ccaagtggcaaactgggatccggac

SEQ ID NO: 756020 - DNA, 25 bp, Homo sapien
gtggccactccagggtttctgaggg

SEQ ID NO: 756021 - DNA, 25 bp, Homo sapien
gacccctccaaggactccttgggca

SEQ ID NO: 756022 - DNA, 25 bp, Homo sapien
ccactccagggtttctgagggagcc

SEQ ID NO: 756023 - DNA, 25 bp, Homo sapien
ccagggtttctgagggagccagaat

SEQ ID NO: 756024 - DNA, 25 bp, Homo sapien
tctgccagttatttgagaggggcgc

SEQ ID NO: 756025 - DNA, 25 bp, Homo sapien
ctggattctgccagttatttgagag

SEQ ID NO: 756026 - DNA, 25 bp, Homo sapien
ggattctgccagttatttgagaggg

SEQ ID NO: 756027 - DNA, 25 bp, Homo sapien
tgccagttatttgagaggggcgccc

SEQ ID NO: 756028 - DNA, 25 bp, Homo sapien
ctcccgtgcctccacatgggtctcc

SEQ ID NO: 756029 - DNA, 25 bp, Homo sapien
tcccgtgcctccacatgggtctcct

SEQ ID NO: 756030 - DNA, 25 bp, Homo sapien
cccgtgcctccacatgggtctcctc

SEQ ID NO: 756031 - DNA, 25 bp, Homo sapien
ccgtgcctccacatgggtctcctct

SEQ ID NO: 756032 - DNA, 25 bp, Homo sapien
cctctcgatctggtcattgtagtcc

SEQ ID NO: 756033 - DNA, 25 bp, Homo sapien
tcatagtcctccctctcgatctggt

SEQ ID NO: 756034 - DNA, 25 bp, Homo sapien
agtgtgggttgctcggtctcctcct

SEQ ID NO: 756035 - DNA, 25 bp, Homo sapien
cattgtagtccagtgtgggttgctc

SEQ ID NO: 756036 - DNA, 25 bp, Homo sapien
ctctggccagacccgctcgggcctc

SEQ ID NO: 756037 - DNA, 25 bp, Homo sapien
ctgggttgcttctggcgccgaatgt

SEQ ID NO: 756038 - DNA, 25 bp, Homo sapien
tgcttctggcgccgaatgtactcaa

SEQ ID NO: 756039 - DNA, 25 bp, Homo sapien
cggggccttctcctcagggggctct

SEQ ID NO: 756040 - DNA, 25 bp, Homo sapien
tggggatcacgtaaccatcaccata

SEQ ID NO: 756041 - DNA, 25 bp, Homo sapien
catcaccatagtcagggggcagcgg

SEQ ID NO: 756042 - DNA, 25 bp, Homo sapien
tagttggggatcacgtaaccatcac

SEQ ID NO: 756043 - DNA, 25 bp, Homo sapien
atcgtagttggggatcacgtaacca

SEQ ID NO: 756044 - DNA, 25 bp, Homo sapien
agcatcgggcttctggggcggagga

SEQ ID NO: 756045 - DNA, 25 bp, Homo sapien
tcttcgtctgtctggcgctcagcat

SEQ ID NO: 756046 - DNA, 25 bp, Homo sapien
ggaggaggcccaaagtaatagtcca

SEQ ID NO: 756047 - DNA, 25 bp, Homo sapien
ttctcttcgtctgtctggcgctcag

SEQ ID NO: 756048 - DNA, 25 bp, Homo sapien
tccactgcccacttgtcggtctcct

SEQ ID NO: 756049 - DNA, 25 bp, Homo sapien
ccttctccactgcccacttgtcggt

SEQ ID NO: 756050 - DNA, 25 bp, Homo sapien
ttctccactgcccacttgtcggtct

SEQ ID NO: 756051 - DNA, 25 bp, Homo sapien
ccactgcccacttgtcggtctcctc

SEQ ID NO: 756052 - DNA, 25 bp, Homo sapien
actttctccgtaggcgtccactcct

SEQ ID NO: 756053 - DNA, 25 bp, Homo sapien
ctcctccaactcctcgccctttcgg

SEQ ID NO: 756054 - DNA, 25 bp, Homo sapien
tttctccgtaggcgtccactcctcc

SEQ ID NO: 756055 - DNA, 25 bp, Homo sapien
tgactttctccgtaggcgtccactc

SEQ ID NO: 756056 - DNA, 25 bp, Homo sapien
ggacgcgtaccccagaatggtggct

SEQ ID NO: 756057 - DNA, 25 bp, Homo sapien
tggaatcgactcaaagccaggccag

SEQ ID NO: 756058 - DNA, 25 bp, Homo sapien
ctgggtcccaagaatctgagtagga

SEQ ID NO: 756059 - DNA, 25 bp, Homo sapien
gacattgggccagtcacttgtccca

SEQ ID NO: 756060 - DNA, 25 bp, Homo sapien
ctgcatgttgagccggccgcgctgt

SEQ ID NO: 756061 - DNA, 25 bp, Homo sapien
tctggttgtcctcaatacggtgtga

SEQ ID NO: 756062 - DNA, 25 bp, Homo sapien
tacggtgtgactccatcccaatggg

SEQ ID NO: 756063 - DNA, 25 bp, Homo sapien
aggaggctcggatctggttgtcctc

SEQ ID NO: 756064 - DNA, 25 bp, Homo sapien
gcaccatcatagtagtcgtcctcag

SEQ ID NO: 756065 - DNA, 25 bp, Homo sapien
ggcacaccacgcaccatcatagtag

SEQ ID NO: 756066 - DNA, 25 bp, Homo sapien
tgatgacgcctgtgaaccgggtagt

SEQ ID NO: 756067 - DNA, 25 bp, Homo sapien
tggtgtccacctctatccactgggt

SEQ ID NO: 756068 - DNA, 25 bp, Homo sapien
tcctcatagccgttggtgtacatca

SEQ ID NO: 756069 - DNA, 25 bp, Homo sapien
catcacccatgtctggctgtcattg

SEQ ID NO: 756070 - DNA, 25 bp, Homo sapien
gtcattgctgaagcccacgaagaag

SEQ ID NO: 756071 - DNA, 25 bp, Homo sapien
cgaagaaggtggtcacaaaatcgtc

SEQ ID NO: 756072 - DNA, 25 bp, Homo sapien
ccctcgcccagacaatgggagcaga

SEQ ID NO: 756073 - DNA, 25 bp, Homo sapien
ccagacaatgggagcagagccaaga

SEQ ID NO: 756074 - DNA, 25 bp, Homo sapien
agcccctctgagagcccacccctcg

SEQ ID NO: 756075 - DNA, 25 bp, Homo sapien
aggcctcagagcagtactgccagcc

SEQ ID NO: 756076 - DNA, 25 bp, Homo sapien
cacctccaggcgcatgcacaggctg

SEQ ID NO: 756077 - DNA, 25 bp, Homo sapien
ggtagatgcggatgaaacgagccac

SEQ ID NO: 756078 - DNA, 25 bp, Homo sapien
gagctcactcagcacgggtgtgtcc

SEQ ID NO: 756079 - DNA, 25 bp, Homo sapien
tccttgtccacgttcccatgaaagg

SEQ ID NO: 756080 - DNA, 25 bp, Homo sapien
ctccactcagagcccctgccagccc

SEQ ID NO: 756081 - DNA, 25 bp, Homo sapien
agcccctgccagccctccacactca

SEQ ID NO: 756082 - DNA, 25 bp, Homo sapien
actcagagcccctgccagccctcca

SEQ ID NO: 756083 - DNA, 25 bp, Homo sapien
agagcccctgccagccctccacact

SEQ ID NO: 756084 - DNA, 25 bp, Homo sapien
gggttgtctttagctgggtgccggc

SEQ ID NO: 756085 - DNA, 25 bp, Homo sapien
aggcggggttgtctttagctgggtg

SEQ ID NO: 756086 - DNA, 25 bp, Homo sapien
gcggggttgtctttagctgggtgcc

SEQ ID NO: 756087 - DNA, 25 bp, Homo sapien
gttgtctttagctgggtgccggctg

SEQ ID NO: 756088 - DNA, 25 bp, Homo sapien
ggccaccacctcattctgtgcgtag

SEQ ID NO: 756089 - DNA, 25 bp, Homo sapien
ggtcatcggtggccaccacctcatt

SEQ ID NO: 756090 - DNA, 25 bp, Homo sapien
tgtagctgtggtgccggaaatccag

SEQ ID NO: 756091 - DNA, 25 bp, Homo sapien
cattctgtgcgtagtagctgtagac

SEQ ID NO: 756092 - DNA, 25 bp, Homo sapien
tggcatagatcttgaggcctcgtga

SEQ ID NO: 756093 - DNA, 25 bp, Homo sapien
gatggtggggcactcctcgttcacc

SEQ ID NO: 756094 - DNA, 25 bp, Homo sapien
ttgaggcctcgtgagctcttgccca

SEQ ID NO: 756095 - DNA, 25 bp, Homo sapien
ccaggctgtaagtgcgggtgatggt

SEQ ID NO: 756096 - DNA, 25 bp, Homo sapien
tgtaagacaagccagaatccccaga

SEQ ID NO: 756097 - DNA, 25 bp, Homo sapien
gctcctagggccctgtaagacaagc

SEQ ID NO: 756098 - DNA, 25 bp, Homo sapien
ctcctagggccctgtaagacaagcc

SEQ ID NO: 756099 - DNA, 25 bp, Homo sapien
ctgtaagacaagccagaatccccag

SEQ ID NO: 756100 - DNA, 25 bp, Homo sapien
gcaagggcgggagcctcagtgagca

SEQ ID NO: 756101 - DNA, 25 bp, Homo sapien
gagcctcagtgagcactcagtctcc

SEQ ID NO: 756102 - DNA, 25 bp, Homo sapien
gcgggagcctcagtgagcactcagt

SEQ ID NO: 756103 - DNA, 25 bp, Homo sapien
agtgagcactcagtctcccgaggcc

SEQ ID NO: 756104 - DNA, 25 bp, Homo sapien
gtgggttcccatcgcggtactctcg

SEQ ID NO: 756105 - DNA, 25 bp, Homo sapien
ggtactctcggcacaggtactgcat

SEQ ID NO: 756106 - DNA, 25 bp, Homo sapien
agcagtgtagcggaactcgggctcc

SEQ ID NO: 756107 - DNA, 25 bp, Homo sapien
ggcccagcacctcgttgccatggat

SEQ ID NO: 756108 - DNA, 25 bp, Homo sapien
agtcccagcgcccagttcccaaact

SEQ ID NO: 756109 - DNA, 25 bp, Homo sapien
gtcccagcgcccagttcccaaactc

SEQ ID NO: 756110 - DNA, 25 bp, Homo sapien
tcagggatgggcaagttattgttgg

SEQ ID NO: 756111 - DNA, 25 bp, Homo sapien
catctggcgaaaggtagcgttcagg

SEQ ID NO: 756112 - DNA, 25 bp, Homo sapien
tccccagagcacagagttgagatcc

SEQ ID NO: 756113 - DNA, 25 bp, Homo sapien
gagcacagagttgagatccgggaaa

SEQ ID NO: 756114 - DNA, 25 bp, Homo sapien
caagccaccggaagatggcgtggtc

SEQ ID NO: 756115 - DNA, 25 bp, Homo sapien
acttggccccgttgacgatgcccat

SEQ ID NO: 756116 - DNA, 25 bp, Homo sapien
agcctccgcggtagggctcggtcaa

SEQ ID NO: 756117 - DNA, 25 bp, Homo sapien
aatgatggcccggacctccgtggat

SEQ ID NO: 756118 - DNA, 25 bp, Homo sapien
aggcagttggtatgcaggtaactga

SEQ ID NO: 756119 - DNA, 25 bp, Homo sapien
tgaaggtgagcagcgcctccttgtt

SEQ ID NO: 756120 - DNA, 25 bp, Homo sapien
ggtatgcaggtaactgaagtcattg

SEQ ID NO: 756121 - DNA, 25 bp, Homo sapien
ttgttctcccactcgcggggcagct

SEQ ID NO: 756122 - DNA, 25 bp, Homo sapien
cactcacagagatggtggcgttggc

SEQ ID NO: 756123 - DNA, 25 bp, Homo sapien
ggatgccttgctcgtccgtcaccac

SEQ ID NO: 756124 - DNA, 25 bp, Homo sapien
acgccgtgattaatgccactcacag

SEQ ID NO: 756125 - DNA, 25 bp, Homo sapien
tgtcttcacgccgtgattaatgcca

SEQ ID NO: 756126 - DNA, 25 bp, Homo sapien
aacattgcaggtcttggcgctcggg

SEQ ID NO: 756127 - DNA, 25 bp, Homo sapien
tctatgtgtgggataggccggttcc

SEQ ID NO: 756128 - DNA, 25 bp, Homo sapien
gcttccagttggagcgagccaggat

SEQ ID NO: 756129 - DNA, 25 bp, Homo sapien
tgagtggccccgatgtcatagtcaa

SEQ ID NO: 756130 - DNA, 25 bp, Homo sapien
ctcaggctccaactgggtctcaaac

SEQ ID NO: 756131 - DNA, 25 bp, Homo sapien
tcaggctccaactgggtctcaaact

SEQ ID NO: 756132 - DNA, 25 bp, Homo sapien
ctggccagtggctatctcctcctct

SEQ ID NO: 756133 - DNA, 25 bp, Homo sapien
ctcctctttctcctcctcctcctct

SEQ ID NO: 756134 - DNA, 25 bp, Homo sapien
tcagaagtccccaaagttcactgtg

SEQ ID NO: 756135 - DNA, 25 bp, Homo sapien
ccaaagttcactgtgtaggtctcta

SEQ ID NO: 756136 - DNA, 25 bp, Homo sapien
gtccccaaagttcactgtgtaggtc

SEQ ID NO: 756137 - DNA, 25 bp, Homo sapien
tccccaaagttcactgtgtaggtct

SEQ ID NO: 756138 - DNA, 25 bp, Homo sapien
tgctgctgtagcttgagttgggctg

SEQ ID NO: 756139 - DNA, 25 bp, Homo sapien
ctgctgctgtagcttgagttgggct

SEQ ID NO: 756140 - DNA, 25 bp, Homo sapien
gctgctgtagcttgagttgggctgg

SEQ ID NO: 756141 - DNA, 25 bp, Homo sapien
tcagtgtccataccaggggccttcc

SEQ ID NO: 756142 - DNA, 25 bp, Homo sapien
cagtgtccataccaggggccttcca

SEQ ID NO: 756143 - DNA, 25 bp, Homo sapien
ttgcaccccctcaaaggggcaggac

SEQ ID NO: 756144 - DNA, 25 bp, Homo sapien
tgtttgcaccccctcaaaggggcag

SEQ ID NO: 756145 - DNA, 25 bp, Homo sapien
tcatgtttgcaccccctcaaagggg

SEQ ID NO: 756146 - DNA, 25 bp, Homo sapien
tttgcaccccctcaaaggggcagga

SEQ ID NO: 756147 - DNA, 25 bp, Homo sapien
gcaaccccatctcttacgagactgg

SEQ ID NO: 756148 - DNA, 25 bp, Homo sapien
ccccatctcttacgagactggcagg

SEQ ID NO: 756149 - DNA, 25 bp, Homo sapien
tcttacgagactggcaggtggagca

SEQ ID NO: 756150 - DNA, 25 bp, Homo sapien
tgcagcaaccccatctcttacgaga

SEQ ID NO: 756151 - DNA, 25 bp, Homo sapien
gctgtgtggaccaagcaagtcagga

SEQ ID NO: 756152 - DNA, 25 bp, Homo sapien
ggtgtcaactacagctgttctcctt

SEQ ID NO: 756153 - DNA, 25 bp, Homo sapien
gtgttttcgcagtgaacctccttgg

SEQ ID NO: 756154 - DNA, 25 bp, Homo sapien
tatcctttgggtgcagtgagacacc

SEQ ID NO: 756155 - DNA, 25 bp, Homo sapien
tgttttcgattatgtccccaacatg

SEQ ID NO: 756156 - DNA, 25 bp, Homo sapien
caagttggcccaggtgcgcagcaag

SEQ ID NO: 756157 - DNA, 25 bp, Homo sapien
tgcattggcaggagatttttgtttt

SEQ ID NO: 756158 - DNA, 25 bp, Homo sapien
ctgatgttccacccctcaagagcct

SEQ ID NO: 756159 - DNA, 25 bp, Homo sapien
ttgggcaaggccagagccctagctg

SEQ ID NO: 756160 - DNA, 25 bp, Homo sapien
cctgcagcttgctagtctgtctgtg

SEQ ID NO: 756161 - DNA, 25 bp, Homo sapien
tcacaatgtctacccaggcagcaag

SEQ ID NO: 756162 - DNA, 25 bp, Homo sapien
ggtgcagggaacatagaagcagaat

SEQ ID NO: 756163 - DNA, 25 bp, Homo sapien
tgctgacggggccaccgccggcttc

SEQ ID NO: 756164 - DNA, 25 bp, Homo sapien
tgcccagctgcgggacccgttctca

SEQ ID NO: 756165 - DNA, 25 bp, Homo sapien
ccagctgcgggacccgttctcaggg

SEQ ID NO: 756166 - DNA, 25 bp, Homo sapien
ctgcgggacccgttctcagggagca

SEQ ID NO: 756167 - DNA, 25 bp, Homo sapien
gaaggaagacacatcgtatgcggct

SEQ ID NO: 756168 - DNA, 25 bp, Homo sapien
gacacatcgtatgcggctttgagca

SEQ ID NO: 756169 - DNA, 25 bp, Homo sapien
aggaagacacatcgtatgcggcttt

SEQ ID NO: 756170 - DNA, 25 bp, Homo sapien
gaagacacatcgtatgcggctttga

SEQ ID NO: 756171 - DNA, 25 bp, Homo sapien
agtgcctttcgatgagcgctccaca

SEQ ID NO: 756172 - DNA, 25 bp, Homo sapien
tttcgatgagcgctccacaatcagt

SEQ ID NO: 756173 - DNA, 25 bp, Homo sapien
ttcgatgagcgctccacaatcagtt

SEQ ID NO: 756174 - DNA, 25 bp, Homo sapien
gcctttcgatgagcgctccacaatc

SEQ ID NO: 756175 - DNA, 25 bp, Homo sapien
acccgggatgggtattcattgtcag

SEQ ID NO: 756176 - DNA, 25 bp, Homo sapien
ccgggatgggtattcattgtcagca

SEQ ID NO: 756177 - DNA, 25 bp, Homo sapien
actatcattccggacgtagacgtgg

SEQ ID NO: 756178 - DNA, 25 bp, Homo sapien
cggacgtagacgtggcacagatagt

SEQ ID NO: 756179 - DNA, 25 bp, Homo sapien
acttgcttggagaattcatctagta

SEQ ID NO: 756180 - DNA, 25 bp, Homo sapien
gacttgcttggagaattcatctagt

SEQ ID NO: 756181 - DNA, 25 bp, Homo sapien
cttgcttggagaattcatctagtac

SEQ ID NO: 756182 - DNA, 25 bp, Homo sapien
tcatgggatcagcttctcgtgggtt

SEQ ID NO: 756183 - DNA, 25 bp, Homo sapien
ctttagtcatgggatcagcttctcg

SEQ ID NO: 756184 - DNA, 25 bp, Homo sapien
ttttggtctcatctagttcggcctg

SEQ ID NO: 756185 - DNA, 25 bp, Homo sapien
tagttcggcctgcactttagtcatg

SEQ ID NO: 756186 - DNA, 25 bp, Homo sapien
cttggtcccctagaaacaatgggtg

SEQ ID NO: 756187 - DNA, 25 bp, Homo sapien
taggaaagacagtctgatgcccggg

SEQ ID NO: 756188 - DNA, 25 bp, Homo sapien
catgcctggccagtggaaatcgcac

SEQ ID NO: 756189 - DNA, 25 bp, Homo sapien
gacttgagggttccactggttccca

SEQ ID NO: 756190 - DNA, 25 bp, Homo sapien
gaacaaggagccagcaagaatgtcc

SEQ ID NO: 756191 - DNA, 25 bp, Homo sapien
tataaaatgcaggttcccaggctcc

SEQ ID NO: 756192 - DNA, 25 bp, Homo sapien
ccacctaggtggtaagaaagctcac

SEQ ID NO: 756193 - DNA, 25 bp, Homo sapien
tagatgcacacatgaagcgccatag

SEQ ID NO: 756194 - DNA, 25 bp, Homo sapien
cacctctaggtgtcgagactcggtc

SEQ ID NO: 756195 - DNA, 25 bp, Homo sapien
tctaactgggatgtagcagacttcc

SEQ ID NO: 756196 - DNA, 25 bp, Homo sapien
caagtggatggaacagaacctggtg

SEQ ID NO: 756197 - DNA, 25 bp, Homo sapien
gaagtgatgcacctctaatccaagg

SEQ ID NO: 756198 - DNA, 25 bp, Homo sapien
gaaggctttagactgtgttcccagc

SEQ ID NO: 756199 - DNA, 25 bp, Homo sapien
gctgcgactgctctctagagagaac

SEQ ID NO: 756200 - DNA, 25 bp, Homo sapien
aagctgcgactgctctctagagaga

SEQ ID NO: 756201 - DNA, 25 bp, Homo sapien
caagctgcgactgctctctagagag

SEQ ID NO: 756202 - DNA, 25 bp, Homo sapien
agcaagctgcgactgctctctagag

SEQ ID NO: 756203 - DNA, 25 bp, Homo sapien
gagttcagaaatcagccagagcagc

SEQ ID NO: 756204 - DNA, 25 bp, Homo sapien
ccttaggctcttgccgcacaaggaa

SEQ ID NO: 756205 - DNA, 25 bp, Homo sapien
gcttaagaacctcttcaggaaggct

SEQ ID NO: 756206 - DNA, 25 bp, Homo sapien
gatcagaacttgaaccagccttcct

SEQ ID NO: 756207 - DNA, 25 bp, Homo sapien
cagttaggccaggtacaaacaaagg

SEQ ID NO: 756208 - DNA, 25 bp, Homo sapien
tatgactatccaaccatgggccaac

SEQ ID NO: 756209 - DNA, 25 bp, Homo sapien
caatgctatctgaccaccacggtgg

SEQ ID NO: 756210 - DNA, 25 bp, Homo sapien
tggtcctgaggacaacagatgtggt

SEQ ID NO: 756211 - DNA, 25 bp, Homo sapien
tgatggcacagcatgagttttgttt

SEQ ID NO: 756212 - DNA, 25 bp, Homo sapien
gatggcacagcatgagttttgtttc

SEQ ID NO: 756213 - DNA, 25 bp, Homo sapien
atggcacagcatgagttttgtttcc

SEQ ID NO: 756214 - DNA, 25 bp, Homo sapien
ttggaagctgcttaggatgggccct

SEQ ID NO: 756215 - DNA, 25 bp, Homo sapien
gatggtgccattccagcattgggcc

SEQ ID NO: 756216 - DNA, 25 bp, Homo sapien
tctacagaagccagtcggagtttat

SEQ ID NO: 756217 - DNA, 25 bp, Homo sapien
tagtctacttgctggtacgaaccca

SEQ ID NO: 756218 - DNA, 25 bp, Homo sapien
caaggcaagttgcaagtcaaggcaa

SEQ ID NO: 756219 - DNA, 25 bp, Homo sapien
ggcaagttgcaagtcaaggcaagtg

SEQ ID NO: 756220 - DNA, 25 bp, Homo sapien
tgctttgatcgtgatgttcaaggca

SEQ ID NO: 756221 - DNA, 25 bp, Homo sapien
tgctgctttgatcgtgatgttcaag

SEQ ID NO: 756222 - DNA, 25 bp, Homo sapien
tgttcagatgcataggcctcaggcg

SEQ ID NO: 756223 - DNA, 25 bp, Homo sapien
tgggcagactggaacataacactag

SEQ ID NO: 756224 - DNA, 25 bp, Homo sapien
tcctggtgctcaagggagagaccca

SEQ ID NO: 756225 - DNA, 25 bp, Homo sapien
ataggtgacaccatcccagcagaag

SEQ ID NO: 756226 - DNA, 25 bp, Homo sapien
tacagtctcgccaaatgatttacaa

SEQ ID NO: 756227 - DNA, 25 bp, Homo sapien
atacagtctcgccaaatgatttaca

SEQ ID NO: 756228 - DNA, 25 bp, Homo sapien
aatacagtctcgccaaatgatttac

SEQ ID NO: 756229 - DNA, 25 bp, Homo sapien
acagtctcgccaaatgatttacaac

SEQ ID NO: 756230 - DNA, 25 bp, Homo sapien
gacaggcgcctctcaaatagaacac

SEQ ID NO: 756231 - DNA, 25 bp, Homo sapien
atttcaagacaactttatccagaca

SEQ ID NO: 756232 - DNA, 25 bp, Homo sapien
tttcaagacaactttatccagacag

SEQ ID NO: 756233 - DNA, 25 bp, Homo sapien
ttcaagacaactttatccagacagg

SEQ ID NO: 756234 - DNA, 25 bp, Homo sapien
tcaggataacttggacccttgcatg

SEQ ID NO: 756235 - DNA, 25 bp, Homo sapien
ggataacttggacccttgcatgcgg

SEQ ID NO: 756236 - DNA, 25 bp, Homo sapien
acttggacccttgcatgcggcaggc

SEQ ID NO: 756237 - DNA, 25 bp, Homo sapien
taacttggacccttgcatgcggcag

SEQ ID NO: 756238 - DNA, 25 bp, Homo sapien
ggacagagttggtgtttggagcccg

SEQ ID NO: 756239 - DNA, 25 bp, Homo sapien
gtgtttggagcccgactgccctcgg

SEQ ID NO: 756240 - DNA, 25 bp, Homo sapien
agagctgcgccctggtttcgccgga

SEQ ID NO: 756241 - DNA, 25 bp, Homo sapien
ggcacacggcctgcctgtcgcatgt

SEQ ID NO: 756242 - DNA, 25 bp, Homo sapien
cgcaggaggtgacgccttgtttttc

SEQ ID NO: 756243 - DNA, 25 bp, Homo sapien
gaagcattccaacatcggtgagcag

SEQ ID NO: 756244 - DNA, 25 bp, Homo sapien
tctcctgacatggacgatccctggg

SEQ ID NO: 756245 - DNA, 25 bp, Homo sapien
cggatctgccgccttctgaagcatt

SEQ ID NO: 756246 - DNA, 25 bp, Homo sapien
catgagtgtcatatctgcattcgat

SEQ ID NO: 756247 - DNA, 25 bp, Homo sapien
cattcgatttactgaatctgggacc

SEQ ID NO: 756248 - DNA, 25 bp, Homo sapien
gaacgtggattgtagcttagagaca

SEQ ID NO: 756249 - DNA, 25 bp, Homo sapien
acgtcccgtggcgatgtgtggtcct

SEQ ID NO: 756250 - DNA, 25 bp, Homo sapien
gcagcagggaaggcagaccaaatgg

SEQ ID NO: 756251 - DNA, 25 bp, Homo sapien
cagcagggaaggcagaccaaatggc

SEQ ID NO: 756252 - DNA, 25 bp, Homo sapien
tgagcccctcctggtactggcgtgg

SEQ ID NO: 756253 - DNA, 25 bp, Homo sapien
cccttcctctgtgatgtcggccttg

SEQ ID NO: 756254 - DNA, 25 bp, Homo sapien
tcctctgtgatgtcggccttgctgc

SEQ ID NO: 756255 - DNA, 25 bp, Homo sapien
tggcgtggcgttgtctccccttcct

SEQ ID NO: 756256 - DNA, 25 bp, Homo sapien
tctttccccatgagcatgagtggtt

SEQ ID NO: 756257 - DNA, 25 bp, Homo sapien
tttccccatgagcatgagtggtttg

SEQ ID NO: 756258 - DNA, 25 bp, Homo sapien
tccccatgagcatgagtggtttgct

SEQ ID NO: 756259 - DNA, 25 bp, Homo sapien
ccatgagcatgagtggtttgctttg

SEQ ID NO: 756260 - DNA, 25 bp, Homo sapien
ctcctctcggtctctgggtctgaca

SEQ ID NO: 756261 - DNA, 25 bp, Homo sapien
gcctcctctcggtctctgggtctga

SEQ ID NO: 756262 - DNA, 25 bp, Homo sapien
tcctctcggtctctgggtctgacaa

SEQ ID NO: 756263 - DNA, 25 bp, Homo sapien
gggcctcctctcggtctctgggtct

SEQ ID NO: 756264 - DNA, 25 bp, Homo sapien
attggacagatgtgtgcccagctct

SEQ ID NO: 756265 - DNA, 25 bp, Homo sapien
gggctgatgggtcttgccaatgtac

SEQ ID NO: 756266 - DNA, 25 bp, Homo sapien
tgccaatgtactgacagtgcaggga

SEQ ID NO: 756267 - DNA, 25 bp, Homo sapien
cagagtattggacagatgtgtgccc

SEQ ID NO: 756268 - DNA, 25 bp, Homo sapien
gctggcgggttaattgctggttgtc

SEQ ID NO: 756269 - DNA, 25 bp, Homo sapien
agctgctggcgggttaattgctggt

SEQ ID NO: 756270 - DNA, 25 bp, Homo sapien
gctgctggcgggttaattgctggtt

SEQ ID NO: 756271 - DNA, 25 bp, Homo sapien
tggcgggttaattgctggttgtcgt

SEQ ID NO: 756272 - DNA, 25 bp, Homo sapien
tccctggcctcgggctgtgctccct

SEQ ID NO: 756273 - DNA, 25 bp, Homo sapien
gaacctccgggcagctgtccactct

SEQ ID NO: 756274 - DNA, 25 bp, Homo sapien
ggcagtgcttgccccggactgtgct

SEQ ID NO: 756275 - DNA, 25 bp, Homo sapien
agggatgagtgggaacctccgggca

SEQ ID NO: 756276 - DNA, 25 bp, Homo sapien
gccccgactccagctcggtgtggag

SEQ ID NO: 756277 - DNA, 25 bp, Homo sapien
ccgactccagctcggtgtggagtga

SEQ ID NO: 756278 - DNA, 25 bp, Homo sapien
gagccccgactccagctcggtgtgg

SEQ ID NO: 756279 - DNA, 25 bp, Homo sapien
tccagctcggtgtggagtgattagc

SEQ ID NO: 756280 - DNA, 25 bp, Homo sapien
agggcccaccctgttggcatttgga

SEQ ID NO: 756281 - DNA, 25 bp, Homo sapien
gcagggcccaccctgttggcatttg

SEQ ID NO: 756282 - DNA, 25 bp, Homo sapien
cagggcccaccctgttggcatttgg

SEQ ID NO: 756283 - DNA, 25 bp, Homo sapien
ccctggggaagacaaatgcatcctg

SEQ ID NO: 756284 - DNA, 25 bp, Homo sapien
tgcctggtcggcagaatccgcggaa

SEQ ID NO: 756285 - DNA, 25 bp, Homo sapien
aatgagtgcctggtcggcagaatcc

SEQ ID NO: 756286 - DNA, 25 bp, Homo sapien
gccagaaaacgacccctgctcaggg

SEQ ID NO: 756287 - DNA, 25 bp, Homo sapien
gttttcttgtggctcccgcgcaatc

SEQ ID NO: 756288 - DNA, 25 bp, Homo sapien
ttgaacttcctactgagggtcaacc

SEQ ID NO: 756289 - DNA, 25 bp, Homo sapien
gcagtctgttgaacttcctactgag

SEQ ID NO: 756290 - DNA, 25 bp, Homo sapien
tggcatagatgtgcagtctgttgaa

SEQ ID NO: 756291 - DNA, 25 bp, Homo sapien
ttggcatagatgtgcagtctgttga

SEQ ID NO: 756292 - DNA, 25 bp, Homo sapien
cgacacagcggtgccatacgggcat

SEQ ID NO: 756293 - DNA, 25 bp, Homo sapien
atatggtgcatggatgtcgtgtgct

SEQ ID NO: 756294 - DNA, 25 bp, Homo sapien
ctgcggtcaggctcttggtgatatg

SEQ ID NO: 756295 - DNA, 25 bp, Homo sapien
gaacagctgtggcttgccgccctct

SEQ ID NO: 756296 - DNA, 25 bp, Homo sapien
ccgccttccccgattgctgactgct

SEQ ID NO: 756297 - DNA, 25 bp, Homo sapien
tgctccgacctaggctgatggtgca

SEQ ID NO: 756298 - DNA, 25 bp, Homo sapien
tgactgctccgacctaggctgatgg

SEQ ID NO: 756299 - DNA, 25 bp, Homo sapien
ccgattgctgactgctccgacctag

SEQ ID NO: 756300 - DNA, 25 bp, Homo sapien
aagagcagggccttcttcacccccg

SEQ ID NO: 756301 - DNA, 25 bp, Homo sapien
tggtcccttcctgctgagtgtctgc

SEQ ID NO: 756302 - DNA, 25 bp, Homo sapien
ctgcaggcctgtgtccaagagcagg

SEQ ID NO: 756303 - DNA, 25 bp, Homo sapien
tgagtgtctgctgggtgcctggcac

SEQ ID NO: 756304 - DNA, 25 bp, Homo sapien
tcagcaactggtggccggttgcaag

SEQ ID NO: 756305 - DNA, 25 bp, Homo sapien
gtgggagccacggatagtcagcaac

SEQ ID NO: 756306 - DNA, 25 bp, Homo sapien
gatagtcagcaactggtggccggtt

SEQ ID NO: 756307 - DNA, 25 bp, Homo sapien
ccacggatagtcagcaactggtggc

SEQ ID NO: 756308 - DNA, 25 bp, Homo sapien
ggagagtggggcaggccacagagcc

SEQ ID NO: 756309 - DNA, 25 bp, Homo sapien
tggagagtggggcaggccacagagc

SEQ ID NO: 756310 - DNA, 25 bp, Homo sapien
ttagtggagagtggggcaggccaca

SEQ ID NO: 756311 - DNA, 25 bp, Homo sapien
agtggagagtggggcaggccacaga

SEQ ID NO: 756312 - DNA, 25 bp, Homo sapien
gcgagggccgcagtgcgaccagcat

SEQ ID NO: 756313 - DNA, 25 bp, Homo sapien
gagggccgcagtgcgaccagcatga

SEQ ID NO: 756314 - DNA, 25 bp, Homo sapien
tggcgagggccgcagtgcgaccagc

SEQ ID NO: 756315 - DNA, 25 bp, Homo sapien
agggccgcagtgcgaccagcatgac

SEQ ID NO: 756316 - DNA, 25 bp, Homo sapien
ctcaggactgatgcaggcagccctg

SEQ ID NO: 756317 - DNA, 25 bp, Homo sapien
ggaaactggatggtgtggacatggg

SEQ ID NO: 756318 - DNA, 25 bp, Homo sapien
gcacttggggaggaaactggatggt

SEQ ID NO: 756319 - DNA, 25 bp, Homo sapien
cggtgaggctcaggactgatgcagg

SEQ ID NO: 756320 - DNA, 25 bp, Homo sapien
aaagctgtcggcctgagagtgcttc

SEQ ID NO: 756321 - DNA, 25 bp, Homo sapien
agagtgcttctgtggccggcccaga

SEQ ID NO: 756322 - DNA, 25 bp, Homo sapien
tccagaaggacctgctctggaggac

SEQ ID NO: 756323 - DNA, 25 bp, Homo sapien
ttacagcaggaaataaagctgtcgg

SEQ ID NO: 756324 - DNA, 25 bp, Homo sapien
tgagctctccggcatgacccagagg

SEQ ID NO: 756325 - DNA, 25 bp, Homo sapien
tccggcatgacccagagggtcccgg

SEQ ID NO: 756326 - DNA, 25 bp, Homo sapien
gctctccggcatgacccagagggtc

SEQ ID NO: 756327 - DNA, 25 bp, Homo sapien
cttgagctctccggcatgacccaga

SEQ ID NO: 756328 - DNA, 25 bp, Homo sapien
gaagatttctggaggatatggttca

SEQ ID NO: 756329 - DNA, 25 bp, Homo sapien
gggctacaggtgttcctgggtggtc

SEQ ID NO: 756330 - DNA, 25 bp, Homo sapien
aagatttctggaggatatggttcac

SEQ ID NO: 756331 - DNA, 25 bp, Homo sapien
tgaagatttctggaggatatggttc

SEQ ID NO: 756332 - DNA, 25 bp, Homo sapien
tgttccattgtcactcagcacactg

SEQ ID NO: 756333 - DNA, 25 bp, Homo sapien
aggctctttcgggtacatttacaca

SEQ ID NO: 756334 - DNA, 25 bp, Homo sapien
gatgtgtttgatcgcaggctgctgc

SEQ ID NO: 756335 - DNA, 25 bp, Homo sapien
tgcgtggcgacctgtagtgtgaaca

SEQ ID NO: 756336 - DNA, 25 bp, Homo sapien
tccagcaaccgagggatgagtgtca

SEQ ID NO: 756337 - DNA, 25 bp, Homo sapien
tcagagtgggagaccctgaactcca

SEQ ID NO: 756338 - DNA, 25 bp, Homo sapien
ggcgcctgcttcagagtcaaccgag

SEQ ID NO: 756339 - DNA, 25 bp, Homo sapien
actggctttgccagggttaccagga

SEQ ID NO: 756340 - DNA, 25 bp, Homo sapien
cgaagtcctccctccaggtgtgtgg

SEQ ID NO: 756341 - DNA, 25 bp, Homo sapien
agccgaagtcctccctccaggtgtg

SEQ ID NO: 756342 - DNA, 25 bp, Homo sapien
ccagccgaagtcctccctccaggtg

SEQ ID NO: 756343 - DNA, 25 bp, Homo sapien
gctgagacgccagccgaagtcctcc

SEQ ID NO: 756344 - DNA, 25 bp, Homo sapien
tgtacgtgcttgagcaacctcctgg

SEQ ID NO: 756345 - DNA, 25 bp, Homo sapien
ggctgtacgtgcttgagcaacctcc

SEQ ID NO: 756346 - DNA, 25 bp, Homo sapien
tttgtgattttgcagacctcaggag

SEQ ID NO: 756347 - DNA, 25 bp, Homo sapien
gacctcaggagtcctgcactttgct

SEQ ID NO: 756348 - DNA, 25 bp, Homo sapien
tagtattgggtattggccccatggc

SEQ ID NO: 756349 - DNA, 25 bp, Homo sapien
ttctctatagttcccgagttggccc

SEQ ID NO: 756350 - DNA, 25 bp, Homo sapien
ttagacacaacagccgcagtttggc

SEQ ID NO: 756351 - DNA, 25 bp, Homo sapien
cccaccctgtgggtagtcttccaga

SEQ ID NO: 756352 - DNA, 25 bp, Homo sapien
tgcacactctctatggatacttggg

SEQ ID NO: 756353 - DNA, 25 bp, Homo sapien
ccttgtaagaaagcattcctgggaa

SEQ ID NO: 756354 - DNA, 25 bp, Homo sapien
caaacatgttgctccgatcatcaca

SEQ ID NO: 756355 - DNA, 25 bp, Homo sapien
gatcatcacaggagagcaaaaggcc

SEQ ID NO: 756356 - DNA, 25 bp, Homo sapien
tgaagtcattgaagtgtgtgaagct

SEQ ID NO: 756357 - DNA, 25 bp, Homo sapien
ggctgctctgggaaactccttgccc

SEQ ID NO: 756358 - DNA, 25 bp, Homo sapien
cattcacgtggtcttcttgctcatc

SEQ ID NO: 756359 - DNA, 25 bp, Homo sapien
cttgccccttgacctcttttgagag

SEQ ID NO: 756360 - DNA, 25 bp, Homo sapien
tttcaagggtgaaccaggccttcca

SEQ ID NO: 756361 - DNA, 25 bp, Homo sapien
gacttgctcgtcttgtttaccccta

SEQ ID NO: 756362 - DNA, 25 bp, Homo sapien
cgattcgaccctgccatgttcaaca

SEQ ID NO: 756363 - DNA, 25 bp, Homo sapien
gcatctccagactgttccagagaag

SEQ ID NO: 756364 - DNA, 25 bp, Homo sapien
ctccaattggctgaggtccactcca

SEQ ID NO: 756365 - DNA, 25 bp, Homo sapien
tgctccaattggctgaggtccactc

SEQ ID NO: 756366 - DNA, 25 bp, Homo sapien
gctccaattggctgaggtccactcc

SEQ ID NO: 756367 - DNA, 25 bp, Homo sapien
gaggtcctgccaagtcttaacaccg

SEQ ID NO: 756368 - DNA, 25 bp, Homo sapien
attgctgagtagaagtgctgctatt

SEQ ID NO: 756369 - DNA, 25 bp, Homo sapien
ctggatctgtgattgctgagtagaa

SEQ ID NO: 756370 - DNA, 25 bp, Homo sapien
tattcaaagccatggaggtcctgcc

SEQ ID NO: 756371 - DNA, 25 bp, Homo sapien
tcacggaggtggttgaggttagcct

SEQ ID NO: 756372 - DNA, 25 bp, Homo sapien
tggttgaggttagcctcagtggtta

SEQ ID NO: 756373 - DNA, 25 bp, Homo sapien
tgaggttagcctcagtggttatatg

SEQ ID NO: 756374 - DNA, 25 bp, Homo sapien
agctggcatagctcacggaggtggt

SEQ ID NO: 756375 - DNA, 25 bp, Homo sapien
gcttttctgtccttcccatagcatc

SEQ ID NO: 756376 - DNA, 25 bp, Homo sapien
ggtagcttttctgtccttcccatag

SEQ ID NO: 756377 - DNA, 25 bp, Homo sapien
cttttctgtccttcccatagcatcc

SEQ ID NO: 756378 - DNA, 25 bp, Homo sapien
tagcttttctgtccttcccatagca

SEQ ID NO: 756379 - DNA, 25 bp, Homo sapien
tctttggtgcttcttcaaaggctcc

SEQ ID NO: 756380 - DNA, 25 bp, Homo sapien
ggctccttcactttcaatggtatag

SEQ ID NO: 756381 - DNA, 25 bp, Homo sapien
tataggtcagattgtaccatgtgtc

SEQ ID NO: 756382 - DNA, 25 bp, Homo sapien
ggtgtggccattctgcatgtcacat

SEQ ID NO: 756383 - DNA, 25 bp, Homo sapien
agatggctgccacctccgtaggcag

SEQ ID NO: 756384 - DNA, 25 bp, Homo sapien
gatgccgaggaggagatggctgcca

SEQ ID NO: 756385 - DNA, 25 bp, Homo sapien
atggctgccacctccgtaggcagcg

SEQ ID NO: 756386 - DNA, 25 bp, Homo sapien
ggagatggctgccacctccgtaggc

SEQ ID NO: 756387 - DNA, 25 bp, Homo sapien
ttcacaaggggtctgagggcggcca

SEQ ID NO: 756388 - DNA, 25 bp, Homo sapien
tggtgctggatgaacttcttggttc

SEQ ID NO: 756389 - DNA, 25 bp, Homo sapien
tttttgacgatcttgggcttcacaa

SEQ ID NO: 756390 - DNA, 25 bp, Homo sapien
tgctggatgaacttcttggttctct

SEQ ID NO: 756391 - DNA, 25 bp, Homo sapien
gttgtcagtgcctctgggtttccgc

SEQ ID NO: 756392 - DNA, 25 bp, Homo sapien
cttctacgaaccctgttgtcagtgc

SEQ ID NO: 756393 - DNA, 25 bp, Homo sapien
ttctacgaaccctgttgtcagtgcc

SEQ ID NO: 756394 - DNA, 25 bp, Homo sapien
aatcttctacgaaccctgttgtcag

SEQ ID NO: 756395 - DNA, 25 bp, Homo sapien
aggaaacattgtgagcgatctcggc

SEQ ID NO: 756396 - DNA, 25 bp, Homo sapien
aacattgtgagcgatctcggcacag

SEQ ID NO: 756397 - DNA, 25 bp, Homo sapien
acattgtgagcgatctcggcacagt

SEQ ID NO: 756398 - DNA, 25 bp, Homo sapien
gaaacattgtgagcgatctcggcac

SEQ ID NO: 756399 - DNA, 25 bp, Homo sapien
gccagttgggcagctgtttccacga

SEQ ID NO: 756400 - DNA, 25 bp, Homo sapien
ggccagttgggcagctgtttccacg

SEQ ID NO: 756401 - DNA, 25 bp, Homo sapien
actctgatggccagttgggcagctg

SEQ ID NO: 756402 - DNA, 25 bp, Homo sapien
tgatggccagttgggcagctgtttc

SEQ ID NO: 756403 - DNA, 25 bp, Homo sapien
ttaaacagaaaacgtgcacacgagc

SEQ ID NO: 756404 - DNA, 25 bp, Homo sapien
aacagaaaacgtgcacacgagctgt

SEQ ID NO: 756405 - DNA, 25 bp, Homo sapien
aaacagaaaacgtgcacacgagctg

SEQ ID NO: 756406 - DNA, 25 bp, Homo sapien
taaacagaaaacgtgcacacgagct

SEQ ID NO: 756407 - DNA, 25 bp, Homo sapien
tgtttgttagcacaacgctattttg

SEQ ID NO: 756408 - DNA, 25 bp, Homo sapien
gaccccatcctaggtgttagccaga

SEQ ID NO: 756409 - DNA, 25 bp, Homo sapien
taggttgtctcagagtacccgaccc

SEQ ID NO: 756410 - DNA, 25 bp, Homo sapien
cagagtccctaactcctttctgggc

SEQ ID NO: 756411 - DNA, 25 bp, Homo sapien
tttgctgattattacccacatgtgg

SEQ ID NO: 756412 - DNA, 25 bp, Homo sapien
tgaatcaggctactaataaggctcc

SEQ ID NO: 756413 - DNA, 25 bp, Homo sapien
tgtatttcccactagctggattttg

SEQ ID NO: 756414 - DNA, 25 bp, Homo sapien
cagaagaacatgactcctcatgtgc

SEQ ID NO: 756415 - DNA, 25 bp, Homo sapien
tttgtgcgcagttacagggacctcg

SEQ ID NO: 756416 - DNA, 25 bp, Homo sapien
tcctaatagtgtccttggcagatac

SEQ ID NO: 756417 - DNA, 25 bp, Homo sapien
gacttggtctccgtaggtatgggca

SEQ ID NO: 756418 - DNA, 25 bp, Homo sapien
agcaggtaaccatgcctccttggag

SEQ ID NO: 756419 - DNA, 25 bp, Homo sapien
cgagggctgactatatctgctgctt

SEQ ID NO: 756420 - DNA, 25 bp, Homo sapien
tggtggaaccttgacttatacagat

SEQ ID NO: 756421 - DNA, 25 bp, Homo sapien
gacttggatatgtttcaggaaagct

SEQ ID NO: 756422 - DNA, 25 bp, Homo sapien
tctgagtaatagactagaatagcta

SEQ ID NO: 756423 - DNA, 25 bp, Homo sapien
tttgacaaggtgctccagtcccttg

SEQ ID NO: 756424 - DNA, 25 bp, Homo sapien
caaggtgctccagtcccttgtttgt

SEQ ID NO: 756425 - DNA, 25 bp, Homo sapien
tgacaaggtgctccagtcccttgtt

SEQ ID NO: 756426 - DNA, 25 bp, Homo sapien
aggtgctccagtcccttgtttgtct

SEQ ID NO: 756427 - DNA, 25 bp, Homo sapien
gaaggatgctctcataaggcccagg

SEQ ID NO: 756428 - DNA, 25 bp, Homo sapien
gaaggatgctctcataagcaccttg

SEQ ID NO: 756429 - DNA, 25 bp, Homo sapien
gacaatgaccactaccctgggtgtg

SEQ ID NO: 756430 - DNA, 25 bp, Homo sapien
tttaacacgtagcagtgtccctgag

SEQ ID NO: 756431 - DNA, 25 bp, Homo sapien
caggaaccatagacgggagggtggg

SEQ ID NO: 756432 - DNA, 25 bp, Homo sapien
ggaagccaaggaagatgcagtattg

SEQ ID NO: 756433 - DNA, 25 bp, Homo sapien
tgcatggctgactacggggcccctg

SEQ ID NO: 756434 - DNA, 25 bp, Homo sapien
acaaaggtaagctaagtgggccctg

SEQ ID NO: 756435 - DNA, 25 bp, Homo sapien
tctttattttgacttcggatgctca

SEQ ID NO: 756436 - DNA, 25 bp, Homo sapien
gggtgtggtaagctgctcaaggtca

SEQ ID NO: 756437 - DNA, 25 bp, Homo sapien
actctcgggtggtccaattatctcc

SEQ ID NO: 756438 - DNA, 25 bp, Homo sapien
agcaaccagcactcgcttgctgaga

SEQ ID NO: 756439 - DNA, 25 bp, Homo sapien
tacatccatcgagctggcaggtagt

SEQ ID NO: 756440 - DNA, 25 bp, Homo sapien
ggttggagatgcaagctgcactgtc

SEQ ID NO: 756441 - DNA, 25 bp, Homo sapien
aacctttgtgcttcccacggagcag

SEQ ID NO: 756442 - DNA, 25 bp, Homo sapien
caggcatctgcatggtaggcacact

SEQ ID NO: 756443 - DNA, 25 bp, Homo sapien
taaccaagcagagagacggtcatgc

SEQ ID NO: 756444 - DNA, 25 bp, Homo sapien
cattcatagggtgatgtgcccggcg

SEQ ID NO: 756445 - DNA, 25 bp, Homo sapien
tcagaagtctgacacgggtcttaac

SEQ ID NO: 756446 - DNA, 25 bp, Homo sapien
caggcagtccggttagggagcccta

SEQ ID NO: 756447 - DNA, 25 bp, Homo sapien
tacctgttggtgcatgagctgatct

SEQ ID NO: 756448 - DNA, 25 bp, Homo sapien
gcaagggtgggttgagctctcacat

SEQ ID NO: 756449 - DNA, 25 bp, Homo sapien
tggtcccagcatgactacctgttgg

SEQ ID NO: 756450 - DNA, 25 bp, Homo sapien
tacactgaaagacttatgggccagg

SEQ ID NO: 756451 - DNA, 25 bp, Homo sapien
gagaagacaggaaggcacagattag

SEQ ID NO: 756452 - DNA, 25 bp, Homo sapien
cagtagacacagtggagcacatctt

SEQ ID NO: 756453 - DNA, 25 bp, Homo sapien
tagtcagtggatgggccaatagctg

SEQ ID NO: 756454 - DNA, 25 bp, Homo sapien
tcagactacgtttgtgagaagacag

SEQ ID NO: 756455 - DNA, 25 bp, Homo sapien
aatagttttatatcctcctgtttct

SEQ ID NO: 756456 - DNA, 25 bp, Homo sapien
atagttttatatcctcctgtttcta

SEQ ID NO: 756457 - DNA, 25 bp, Homo sapien
cagggctgacctcaaggccgtatca

SEQ ID NO: 756458 - DNA, 25 bp, Homo sapien
tagagtcagaggtaaggtagcaaca

SEQ ID NO: 756459 - DNA, 25 bp, Homo sapien
ggtgcctgggctacctatgcagata

SEQ ID NO: 756460 - DNA, 25 bp, Homo sapien
gactcgtggtactaaggcttggcct

SEQ ID NO: 756461 - DNA, 25 bp, Homo sapien
gtcagaatttcttaaggctaatatt

SEQ ID NO: 756462 - DNA, 25 bp, Homo sapien
ttttgtcctgacacccaccattcta

SEQ ID NO: 756463 - DNA, 25 bp, Homo sapien
gccacatttcgctttcagtagtcat

SEQ ID NO: 756464 - DNA, 25 bp, Homo sapien
gtctctatgatcctgactaccctat

SEQ ID NO: 756465 - DNA, 25 bp, Homo sapien
gatggctctcttcgctggtggcaaa

SEQ ID NO: 756466 - DNA, 25 bp, Homo sapien
gaaaacacttgtgagcccgagctga

SEQ ID NO: 756467 - DNA, 25 bp, Homo sapien
gatccgaaactatggcagcactggg

SEQ ID NO: 756468 - DNA, 25 bp, Homo sapien
cgagtacatatcactgcgcaggcgt

SEQ ID NO: 756469 - DNA, 25 bp, Homo sapien
gtgatgtccaccaggtcagggccca

SEQ ID NO: 756470 - DNA, 25 bp, Homo sapien
tgatgtccaccaggtcagggcccat

SEQ ID NO: 756471 - DNA, 25 bp, Homo sapien
ggtggtgatgtccaccaggtcaggg

SEQ ID NO: 756472 - DNA, 25 bp, Homo sapien
ggtgatgtccaccaggtcagggccc

SEQ ID NO: 756473 - DNA, 25 bp, Homo sapien
gaaagtaagatatctctagcgcctg

SEQ ID NO: 756474 - DNA, 25 bp, Homo sapien
tccagcggcttctgctatcataaat

SEQ ID NO: 756475 - DNA, 25 bp, Homo sapien
tgaggttgtctatggacttccagcg

SEQ ID NO: 756476 - DNA, 25 bp, Homo sapien
ccagctgtttgctccgctagagaga

SEQ ID NO: 756477 - DNA, 25 bp, Homo sapien
agctccacccgaatgaggcgccgac

SEQ ID NO: 756478 - DNA, 25 bp, Homo sapien
tccacccgaatgaggcgccgacacc

SEQ ID NO: 756479 - DNA, 25 bp, Homo sapien
tgaggcgccgacaccccactccggg

SEQ ID NO: 756480 - DNA, 25 bp, Homo sapien
gaatgaggcgccgacaccccactcc

SEQ ID NO: 756481 - DNA, 25 bp, Homo sapien
caagcgccgcgacacccggcactgg

SEQ ID NO: 756482 - DNA, 25 bp, Homo sapien
cgcgatctccaaccccgggccgcca

SEQ ID NO: 756483 - DNA, 25 bp, Homo sapien
ctcctaccaccctccgtgagcccca

SEQ ID NO: 756484 - DNA, 25 bp, Homo sapien
cggcactgggacgggcgcggcgaca

SEQ ID NO: 756485 - DNA, 25 bp, Homo sapien
cgcggctccattggctgccacggcc

SEQ ID NO: 756486 - DNA, 25 bp, Homo sapien
ccgcggctccattggctgccacggc

SEQ ID NO: 756487 - DNA, 25 bp, Homo sapien
cacgaagtcctatgttctgggcaaa

SEQ ID NO: 756488 - DNA, 25 bp, Homo sapien
tgtctttcggacaaagcgacgcggt

SEQ ID NO: 756489 - DNA, 25 bp, Homo sapien
tcctaggtctacacggcaaagtaca

SEQ ID NO: 756490 - DNA, 25 bp, Homo sapien
caaagtacggactgcaagacaaggc

SEQ ID NO: 756491 - DNA, 25 bp, Homo sapien
ttttttcaaagaatataacatagga

SEQ ID NO: 756492 - DNA, 25 bp, Homo sapien
ttttcaaagaatataacataggatg

SEQ ID NO: 756493 - DNA, 25 bp, Homo sapien
tcaaagaatataacataggatgtgg

SEQ ID NO: 756494 - DNA, 25 bp, Homo sapien
ttcaaagaatataacataggatgtg

SEQ ID NO: 756495 - DNA, 25 bp, Homo sapien
caaggtcataggctactaacagcag

SEQ ID NO: 756496 - DNA, 25 bp, Homo sapien
cataggctactaacagcagagtcag

SEQ ID NO: 756497 - DNA, 25 bp, Homo sapien
cagagtcaggatccaagcggaaagt

SEQ ID NO: 756498 - DNA, 25 bp, Homo sapien
agcggaaagttcacaaggacgctgc

SEQ ID NO: 756499 - DNA, 25 bp, Homo sapien
ggtgagcaactctacgcatctgact

SEQ ID NO: 756500 - DNA, 25 bp, Homo sapien
ctccatggtgagcaactctacgcat

SEQ ID NO: 756501 - DNA, 25 bp, Homo sapien
tgactcatacataaacccagaggct

SEQ ID NO: 756502 - DNA, 25 bp, Homo sapien
ggctcccaataaggcaggcaccagc

SEQ ID NO: 756503 - DNA, 25 bp, Homo sapien
tgttgaaatgtcctagctgctgctg

SEQ ID NO: 756504 - DNA, 25 bp, Homo sapien
cgtcaatggcctcaacttagcagca

SEQ ID NO: 756505 - DNA, 25 bp, Homo sapien
taacagtctgggaagccgtcaatgg

SEQ ID NO: 756506 - DNA, 25 bp, Homo sapien
tagttcgaactagtcccactgagaa

SEQ ID NO: 756507 - DNA, 25 bp, Homo sapien
gaaattacatgaggtgactacggca

SEQ ID NO: 756508 - DNA, 25 bp, Homo sapien
gaaagtatcctctccagacagttag

SEQ ID NO: 756509 - DNA, 25 bp, Homo sapien
cacagtgtctactgctggacgccaa

SEQ ID NO: 756510 - DNA, 25 bp, Homo sapien
gatgctggagggtcacacacatgct

SEQ ID NO: 756511 - DNA, 25 bp, Homo sapien
tcacaaggcatgacatggccaggcg

SEQ ID NO: 756512 - DNA, 25 bp, Homo sapien
caatgttggctaggcactgcctccg

SEQ ID NO: 756513 - DNA, 25 bp, Homo sapien
gaaagcttgtttacaggagcccagt

SEQ ID NO: 756514 - DNA, 25 bp, Homo sapien
cacaggagcttagaaacgctgggac

SEQ ID NO: 756515 - DNA, 25 bp, Homo sapien
gcagaacggtgtcgacagatgagca

SEQ ID NO: 756516 - DNA, 25 bp, Homo sapien
ggcagatgcatcacaaggaactcaa

SEQ ID NO: 756517 - DNA, 25 bp, Homo sapien
tgttgggagaagaacaacaggcccc

SEQ ID NO: 756518 - DNA, 25 bp, Homo sapien
taatctgaacgcatagagaccctcc

SEQ ID NO: 756519 - DNA, 25 bp, Homo sapien
caagcttcgaacacagctgtcatga

SEQ ID NO: 756520 - DNA, 25 bp, Homo sapien
gctgcaaactaccacacaagtgagg

SEQ ID NO: 756521 - DNA, 25 bp, Homo sapien
taacagggcaagactgcttttcctc

SEQ ID NO: 756522 - DNA, 25 bp, Homo sapien
tgctaaagttggagaaggcgcactc

SEQ ID NO: 756523 - DNA, 25 bp, Homo sapien
gtttgaggctactatcatggtgcca

SEQ ID NO: 756524 - DNA, 25 bp, Homo sapien
aggctactatcatggtgccactgca

SEQ ID NO: 756525 - DNA, 25 bp, Homo sapien
attaaaaacatccaccaggcggatc

SEQ ID NO: 756526 - DNA, 25 bp, Homo sapien
aaaacatccaccaggcggatcatga

SEQ ID NO: 756527 - DNA, 25 bp, Homo sapien
gactttgtgcaggaatcgctccggc

SEQ ID NO: 756528 - DNA, 25 bp, Homo sapien
tacggtctggacctaggcctcaaag

SEQ ID NO: 756529 - DNA, 25 bp, Homo sapien
tgctctaaccaaggtaatggcgtgg

SEQ ID NO: 756530 - DNA, 25 bp, Homo sapien
ctggagctactctgggactttgtgc

SEQ ID NO: 756531 - DNA, 25 bp, Homo sapien
tgctgagactcatgatactgccaca

SEQ ID NO: 756532 - DNA, 25 bp, Homo sapien
gagaatagacaacaggagcacctgg

SEQ ID NO: 756533 - DNA, 25 bp, Homo sapien
ccaccaaatggcatcagagggaggg

SEQ ID NO: 756534 - DNA, 25 bp, Homo sapien
tcttgaaaggctagaaacagtatcc

SEQ ID NO: 756535 - DNA, 25 bp, Homo sapien
gagccaatgaataccattatttcta

SEQ ID NO: 756536 - DNA, 25 bp, Homo sapien
tgaggcacgatgctgagccaatgaa

SEQ ID NO: 756537 - DNA, 25 bp, Homo sapien
tacaggcaccgccatcgtgtctggt

SEQ ID NO: 756538 - DNA, 25 bp, Homo sapien
gcaccgccatcgtgtctggttaatt

SEQ ID NO: 756539 - DNA, 25 bp, Homo sapien
agaaaacaaccaccagagatgtgac

SEQ ID NO: 756540 - DNA, 25 bp, Homo sapien
aaacaaccaccagagatgtgactgc

SEQ ID NO: 756541 - DNA, 25 bp, Homo sapien
gaaaacaaccaccagagatgtgact

SEQ ID NO: 756542 - DNA, 25 bp, Homo sapien
aaaacaaccaccagagatgtgactg

SEQ ID NO: 756543 - DNA, 25 bp, Homo sapien
caagtctaccataggctggctgagc

SEQ ID NO: 756544 - DNA, 25 bp, Homo sapien
ggtacagggttacctcactgctccc

SEQ ID NO: 756545 - DNA, 25 bp, Homo sapien
aaggcaagtctaccataggctggct

SEQ ID NO: 756546 - DNA, 25 bp, Homo sapien
agaaggtacagggttacctcactgc

SEQ ID NO: 756547 - DNA, 25 bp, Homo sapien
gggctgtgcttctaccagggactgt

SEQ ID NO: 756548 - DNA, 25 bp, Homo sapien
ctgatatgccctgatgagcgactgc

SEQ ID NO: 756549 - DNA, 25 bp, Homo sapien
tccacgagcttgtccacgttgggct

SEQ ID NO: 756550 - DNA, 25 bp, Homo sapien
ggctccggcattcgtgttgcgaaaa

SEQ ID NO: 756551 - DNA, 25 bp, Homo sapien
caatagggcccatgaggcatgacct

SEQ ID NO: 756552 - DNA, 25 bp, Homo sapien
tacactcagaaaggccaatagggcc

SEQ ID NO: 756553 - DNA, 25 bp, Homo sapien
cgtgtgcgggtaaagcacccgcctt

SEQ ID NO: 756554 - DNA, 25 bp, Homo sapien
gagaaagcacctagtatttgaggag

SEQ ID NO: 756555 - DNA, 25 bp, Homo sapien
tacacaactaattccgagaggatca

SEQ ID NO: 756556 - DNA, 25 bp, Homo sapien
ttgaagaaacagttactggagcatc

SEQ ID NO: 756557 - DNA, 25 bp, Homo sapien
atcaagttttgcaatgtggtgaccc

SEQ ID NO: 756558 - DNA, 25 bp, Homo sapien
aacagttactggagcatcatcaaaa

SEQ ID NO: 756559 - DNA, 25 bp, Homo sapien
tgtctgtggatgagataatgtcagc

SEQ ID NO: 756560 - DNA, 25 bp, Homo sapien
atgagataatgtcagcgggcacgga

SEQ ID NO: 756561 - DNA, 25 bp, Homo sapien
cacggaggagtccagatcagcatcc

SEQ ID NO: 756562 - DNA, 25 bp, Homo sapien
gctgtgctacatggtgccctcgtat

SEQ ID NO: 756563 - DNA, 25 bp, Homo sapien
actgttagcattcgaagtcgttcct

SEQ ID NO: 756564 - DNA, 25 bp, Homo sapien
gaagtcgttccttgaaaactgcaag

SEQ ID NO: 756565 - DNA, 25 bp, Homo sapien
cattcgaagtcgttccttgaaaact

SEQ ID NO: 756566 - DNA, 25 bp, Homo sapien
tagcattcgaagtcgttccttgaaa

SEQ ID NO: 756567 - DNA, 25 bp, Homo sapien
gagcaattaagaacacgatagagac

SEQ ID NO: 756568 - DNA, 25 bp, Homo sapien
caatggataggctcaatggcagaat

SEQ ID NO: 756569 - DNA, 25 bp, Homo sapien
cagtatatttgaagacggaacaaca

SEQ ID NO: 756570 - DNA, 25 bp, Homo sapien
gctgagtgaatccacaggatattcc

SEQ ID NO: 756571 - DNA, 25 bp, Homo sapien
gaataaggcacaccagctagggagg

SEQ ID NO: 756572 - DNA, 25 bp, Homo sapien
ccacttgggcctaggtgaagcacgt

SEQ ID NO: 756573 - DNA, 25 bp, Homo sapien
tagggaggtctcaaggcaaaacaca

SEQ ID NO: 756574 - DNA, 25 bp, Homo sapien
aactatatcggtccagtgtatgccc

SEQ ID NO: 756575 - DNA, 25 bp, Homo sapien
gctgattcctgtcccccgatgaaag

SEQ ID NO: 756576 - DNA, 25 bp, Homo sapien
ccccgatgaaagtggtggtgggcaa

SEQ ID NO: 756577 - DNA, 25 bp, Homo sapien
agtggaagaccttgtcgaggtcaga

SEQ ID NO: 756578 - DNA, 25 bp, Homo sapien
accttgtcgaggtcagactcatcca

SEQ ID NO: 756579 - DNA, 25 bp, Homo sapien
cacaaacctcctgatgaaatttgat

SEQ ID NO: 756580 - DNA, 25 bp, Homo sapien
tgttttgtttgtgagggtggatccc

SEQ ID NO: 756581 - DNA, 25 bp, Homo sapien
ccgcgcccggctatttaagatattt

SEQ ID NO: 756582 - DNA, 25 bp, Homo sapien
gggccacatgggagatgttttgttt

SEQ ID NO: 756583 - DNA, 25 bp, Homo sapien
tgaactccaccccaatatgctggca

SEQ ID NO: 756584 - DNA, 25 bp, Homo sapien
ctggtggaccgcacaagcctggcca

SEQ ID NO: 756585 - DNA, 25 bp, Homo sapien
gctccaggtcattgatgaacatgaa

SEQ ID NO: 756586 - DNA, 25 bp, Homo sapien
gggtccgtttctcctcatttgtgaa

SEQ ID NO: 756587 - DNA, 25 bp, Homo sapien
acctcggccaacaggctgcacacag

SEQ ID NO: 756588 - DNA, 25 bp, Homo sapien
acaggcccgatcaacacagacaggg

SEQ ID NO: 756589 - DNA, 25 bp, Homo sapien
gaggcggaggttgctctgaaggctg

SEQ ID NO: 756590 - DNA, 25 bp, Homo sapien
tcttcacacatgtgcagatggagct

SEQ ID NO: 756591 - DNA, 25 bp, Homo sapien
catgcccatgatcacgtagtccacg

SEQ ID NO: 756592 - DNA, 25 bp, Homo sapien
ggatcagtacctcgcagccttctag

SEQ ID NO: 756593 - DNA, 25 bp, Homo sapien
agcgcttctcagaggaccacttccg

SEQ ID NO: 756594 - DNA, 25 bp, Homo sapien
cacttccgctgtaggaactcctcaa

SEQ ID NO: 756595 - DNA, 25 bp, Homo sapien
ctgcctccagctttgaatcgaattg

SEQ ID NO: 756596 - DNA, 25 bp, Homo sapien
tcgaattgacagaagatctgttcca

SEQ ID NO: 756597 - DNA, 25 bp, Homo sapien
acatttgcaagcacgttcagccgcc

SEQ ID NO: 756598 - DNA, 25 bp, Homo sapien
gatgacatttgcaagcacgttcagc

SEQ ID NO: 756599 - DNA, 25 bp, Homo sapien
tcggtgacacgattgatcctgcggt

SEQ ID NO: 756600 - DNA, 25 bp, Homo sapien
tcagtgtcgccacagtaaaactgtt

SEQ ID NO: 756601 - DNA, 25 bp, Homo sapien
gttggccaccaaggacaaggtaatg

SEQ ID NO: 756602 - DNA, 25 bp, Homo sapien
tcctgcggtgatacatgcccaggtg

SEQ ID NO: 756603 - DNA, 25 bp, Homo sapien
ggaacatggggccttgacgatctgc

SEQ ID NO: 756604 - DNA, 25 bp, Homo sapien
ggccttgacgatctgccttgcacgc

SEQ ID NO: 756605 - DNA, 25 bp, Homo sapien
atgctggaacatggggccttgacga

SEQ ID NO: 756606 - DNA, 25 bp, Homo sapien
tggggccttgacgatctgccttgca

SEQ ID NO: 756607 - DNA, 25 bp, Homo sapien
aaagtctagatgcacccagggctct

SEQ ID NO: 756608 - DNA, 25 bp, Homo sapien
aataagggcaaattgttacaatctg

SEQ ID NO: 756609 - DNA, 25 bp, Homo sapien
cacatgaccagaaatggtgaagcag

SEQ ID NO: 756610 - DNA, 25 bp, Homo sapien
caatctgttgagactatttctacac

SEQ ID NO: 756611 - DNA, 25 bp, Homo sapien
gattctatcttgaagttaaataagg

SEQ ID NO: 756612 - DNA, 25 bp, Homo sapien
cgtgcacggtgccatgagttgtgta

SEQ ID NO: 756613 - DNA, 25 bp, Homo sapien
gaaggtctcgtacacaatgccctgg

SEQ ID NO: 756614 - DNA, 25 bp, Homo sapien
tgcagcatccccatgcaacaggatg

SEQ ID NO: 756615 - DNA, 25 bp, Homo sapien
gagttgtgtaggatggcaggtcgct

SEQ ID NO: 756616 - DNA, 25 bp, Homo sapien
tcattctaagtaagactgatgtgag

SEQ ID NO: 756617 - DNA, 25 bp, Homo sapien
cagaaaacagtgaacgtcctaaatg

SEQ ID NO: 756618 - DNA, 25 bp, Homo sapien
gtaagactgatgtgagcagcaaagc

SEQ ID NO: 756619 - DNA, 25 bp, Homo sapien
agtgaacgtcctaaatgactcagag

SEQ ID NO: 756620 - DNA, 25 bp, Homo sapien
tcagctggtattgaagccagcattg

SEQ ID NO: 756621 - DNA, 25 bp, Homo sapien
ttgggcttcagcatgtaaagaaggg

SEQ ID NO: 756622 - DNA, 25 bp, Homo sapien
ggtattgaagccagcattgcccatc

SEQ ID NO: 756623 - DNA, 25 bp, Homo sapien
cagcattgcccatcttgggcttcag

SEQ ID NO: 756624 - DNA, 25 bp, Homo sapien
acatgaacaaatcccaacggtttcg

SEQ ID NO: 756625 - DNA, 25 bp, Homo sapien
cacaaagcatgataataccacactg

SEQ ID NO: 756626 - DNA, 25 bp, Homo sapien
taacgccttcacctaacatgaacaa

SEQ ID NO: 756627 - DNA, 25 bp, Homo sapien
tccctaccagttagatgtaccaaaa

SEQ ID NO: 756628 - DNA, 25 bp, Homo sapien
gccggcacagggaccagagggcggg

SEQ ID NO: 756629 - DNA, 25 bp, Homo sapien
ccggcacagggaccagagggcgggg

SEQ ID NO: 756630 - DNA, 25 bp, Homo sapien
agccggcacagggaccagagggcgg

SEQ ID NO: 756631 - DNA, 25 bp, Homo sapien
ttgcacacgtacatgacagcctcgg

SEQ ID NO: 756632 - DNA, 25 bp, Homo sapien
agcctcggggtcatctgagttcacg

SEQ ID NO: 756633 - DNA, 25 bp, Homo sapien
aggagcgggccatccgagggtcggt

SEQ ID NO: 756634 - DNA, 25 bp, Homo sapien
attcaccactcgggccacgtcagtg

SEQ ID NO: 756635 - DNA, 25 bp, Homo sapien
gttgtggccgttgcgccggtaacac

SEQ ID NO: 756636 - DNA, 25 bp, Homo sapien
tcatactcaggctggttgaccacac

SEQ ID NO: 756637 - DNA, 25 bp, Homo sapien
agcagctcagcgtacttctgtaaca

SEQ ID NO: 756638 - DNA, 25 bp, Homo sapien
ttctgcttgcggatctgcttgtaca

SEQ ID NO: 756639 - DNA, 25 bp, Homo sapien
gccagtgcttaatgtgcaagatctt

SEQ ID NO: 756640 - DNA, 25 bp, Homo sapien
gatcttctcatctttagatctggca

SEQ ID NO: 756641 - DNA, 25 bp, Homo sapien
ctcatctttagatctggcaaaagct

SEQ ID NO: 756642 - DNA, 25 bp, Homo sapien
cagggagagtccagccagtgcttaa

SEQ ID NO: 756643 - DNA, 25 bp, Homo sapien
gaactagccacattcccgatgtgtg

SEQ ID NO: 756644 - DNA, 25 bp, Homo sapien
tgggctgcccgtccagggtgaagaa

SEQ ID NO: 756645 - DNA, 25 bp, Homo sapien
ccatgaatagtaaagttttccacag

SEQ ID NO: 756646 - DNA, 25 bp, Homo sapien
gtcagaatatcctccgtcagacccg

SEQ ID NO: 756647 - DNA, 25 bp, Homo sapien
cctggccgctcagccgaatgtggat

SEQ ID NO: 756648 - DNA, 25 bp, Homo sapien
aaacgccatgtactccgctagagcc

SEQ ID NO: 756649 - DNA, 25 bp, Homo sapien
gtggatgccctccttcaggagcgag

SEQ ID NO: 756650 - DNA, 25 bp, Homo sapien
gtccacagtccggttcttcaccatt

SEQ ID NO: 756651 - DNA, 25 bp, Homo sapien
cacgccgtactcagacagtgagctg

SEQ ID NO: 756652 - DNA, 25 bp, Homo sapien
gcctgattgggccagagatggttca

SEQ ID NO: 756653 - DNA, 25 bp, Homo sapien
gctgttgcacacagtatagggggcc

SEQ ID NO: 756654 - DNA, 25 bp, Homo sapien
tcatggggatgcaggttctcttgtc

SEQ ID NO: 756655 - DNA, 25 bp, Homo sapien
caccaaattgggcttcccagaggac

SEQ ID NO: 756656 - DNA, 25 bp, Homo sapien
gcattaggactggccatggcgaagc

SEQ ID NO: 756657 - DNA, 25 bp, Homo sapien
gcttgtcccgggcagatgaactggt

SEQ ID NO: 756658 - DNA, 25 bp, Homo sapien
gggcagcagcaacacgatgccattc

SEQ ID NO: 756659 - DNA, 25 bp, Homo sapien
gggtcatcgttgcacatctgcaaga

SEQ ID NO: 756660 - DNA, 25 bp, Homo sapien
cgttgcacatctgcaagaaccgctc

SEQ ID NO: 756661 - DNA, 25 bp, Homo sapien
gacatctgggtcatcgttgcacatc

SEQ ID NO: 756662 - DNA, 25 bp, Homo sapien
tctgggtcatcgttgcacatctgca

SEQ ID NO: 756663 - DNA, 25 bp, Homo sapien
gctgattgatgtcgaagttggcttc

SEQ ID NO: 756664 - DNA, 25 bp, Homo sapien
ggagcagttgacaacaacccaattg

SEQ ID NO: 756665 - DNA, 25 bp, Homo sapien
aacaacccaattgcagtcatatagc

SEQ ID NO: 756666 - DNA, 25 bp, Homo sapien
tcgtagcacgtggaagaagttgcca

SEQ ID NO: 756667 - DNA, 25 bp, Homo sapien
tctggcctcggggtggcgcaacagg

SEQ ID NO: 756668 - DNA, 25 bp, Homo sapien
tcatcaaagctggatctggcctcgg

SEQ ID NO: 756669 - DNA, 25 bp, Homo sapien
tcggggtggcgcaacagggatttgg

SEQ ID NO: 756670 - DNA, 25 bp, Homo sapien
atctcatcaaagctggatctggcct

SEQ ID NO: 756671 - DNA, 25 bp, Homo sapien
attacagacatgtggcactacgcct

SEQ ID NO: 756672 - DNA, 25 bp, Homo sapien
aggtgatctgccctcgaactcctga

SEQ ID NO: 756673 - DNA, 25 bp, Homo sapien
cagacatgtggcactacgcctggct

SEQ ID NO: 756674 - DNA, 25 bp, Homo sapien
ggtgatctgccctcgaactcctgac

SEQ ID NO: 756675 - DNA, 25 bp, Homo sapien
cacttctgagtacatattcaaaaga

SEQ ID NO: 756676 - DNA, 25 bp, Homo sapien
tgttcatagcagctcctctaatcat

SEQ ID NO: 756677 - DNA, 25 bp, Homo sapien
ttccacttctgagtacatattcaaa

SEQ ID NO: 756678 - DNA, 25 bp, Homo sapien
atcataatagctgaaacatggaagc

SEQ ID NO: 756679 - DNA, 25 bp, Homo sapien
atagagaacagtgggttggccagca

SEQ ID NO: 756680 - DNA, 25 bp, Homo sapien
taaaaactttcaacacaatcagaga

SEQ ID NO: 756681 - DNA, 25 bp, Homo sapien
tattcagatagagaacagtgggttg

SEQ ID NO: 756682 - DNA, 25 bp, Homo sapien
agaacagtgggttggccagcacttt

SEQ ID NO: 756683 - DNA, 25 bp, Homo sapien
gcgctcccgggtgaggtcataatac

SEQ ID NO: 756684 - DNA, 25 bp, Homo sapien
tgcagggccatcttctgggatcacc

SEQ ID NO: 756685 - DNA, 25 bp, Homo sapien
ctgctcaatccttgtgatggccacc

SEQ ID NO: 756686 - DNA, 25 bp, Homo sapien
tgccggtgcagaagagaagcctttt

SEQ ID NO: 756687 - DNA, 25 bp, Homo sapien
gcaccaggccagctcagcattgggg

SEQ ID NO: 756688 - DNA, 25 bp, Homo sapien
gcattggggtacttctgcacctcct

SEQ ID NO: 756689 - DNA, 25 bp, Homo sapien
cttggcgcggctgatggtggtccga

SEQ ID NO: 756690 - DNA, 25 bp, Homo sapien
ggtccgaagtcttggcttcacgtag

SEQ ID NO: 756691 - DNA, 25 bp, Homo sapien
gcagctccgtcaggtgggtcttctt

SEQ ID NO: 756692 - DNA, 25 bp, Homo sapien
agacgtccaggtcgaaggccgtgtc

SEQ ID NO: 756693 - DNA, 25 bp, Homo sapien
gagaagttcttgaagacgtccaggt

SEQ ID NO: 756694 - DNA, 25 bp, Homo sapien
gggtcttcttgttgccggtggctgg

SEQ ID NO: 756695 - DNA, 25 bp, Homo sapien
cgaaggaacagcagataatggacac

SEQ ID NO: 756696 - DNA, 25 bp, Homo sapien
gacgacagcctaactcctatgagag

SEQ ID NO: 756697 - DNA, 25 bp, Homo sapien
gttaacaggaccaagacagagcagc

SEQ ID NO: 756698 - DNA, 25 bp, Homo sapien
tgtgggcagcgctgaggcactattc

SEQ ID NO: 756699 - DNA, 25 bp, Homo sapien
tccagaaaagcgcaaggatgttggc

SEQ ID NO: 756700 - DNA, 25 bp, Homo sapien
tagatatttcggatccagaagtacc

SEQ ID NO: 756701 - DNA, 25 bp, Homo sapien
tccccagtggagcaagctgacgctc

SEQ ID NO: 756702 - DNA, 25 bp, Homo sapien
gccatcaccagcagtagtacttggg

SEQ ID NO: 756703 - DNA, 25 bp, Homo sapien
ttgggcactttggagttaacagaag

SEQ ID NO: 756704 - DNA, 25 bp, Homo sapien
atacagcactggagagggagactct

SEQ ID NO: 756705 - DNA, 25 bp, Homo sapien
ccaggggcctgggtggacttgggca

SEQ ID NO: 756706 - DNA, 25 bp, Homo sapien
aacagaagttcccatggcaatctgg

SEQ ID NO: 756707 - DNA, 25 bp, Homo sapien
tgaacgcggcgtcggcagagccact

SEQ ID NO: 756708 - DNA, 25 bp, Homo sapien
ctttctgaacgcggcgtcggcagag

SEQ ID NO: 756709 - DNA, 25 bp, Homo sapien
ctgaacgcggcgtcggcagagccac

SEQ ID NO: 756710 - DNA, 25 bp, Homo sapien
gaacgcggcgtcggcagagccactg

SEQ ID NO: 756711 - DNA, 25 bp, Homo sapien
cggcctggcccggcccctcgccgtg

SEQ ID NO: 756712 - DNA, 25 bp, Homo sapien
ctggcccggcccctcgccgtggcgg

SEQ ID NO: 756713 - DNA, 25 bp, Homo sapien
gcctggcccggcccctcgccgtggc

SEQ ID NO: 756714 - DNA, 25 bp, Homo sapien
tggcccggcccctcgccgtggcggc

SEQ ID NO: 756715 - DNA, 25 bp, Homo sapien
gtgcagtggtcaaccaacaactctc

SEQ ID NO: 756716 - DNA, 25 bp, Homo sapien
tgcagtggtcaaccaacaactctcc

SEQ ID NO: 756717 - DNA, 25 bp, Homo sapien
gagtgcagtggtcaaccaacaactc

SEQ ID NO: 756718 - DNA, 25 bp, Homo sapien
agtgcagtggtcaaccaacaactct

SEQ ID NO: 756719 - DNA, 25 bp, Homo sapien
gtaggggcataggcggttctggagg

SEQ ID NO: 756720 - DNA, 25 bp, Homo sapien
aggggcataggcggttctggaggcc

SEQ ID NO: 756721 - DNA, 25 bp, Homo sapien
taggggcataggcggttctggaggc

SEQ ID NO: 756722 - DNA, 25 bp, Homo sapien
ggccgggtctgacagtttttatctg

SEQ ID NO: 756723 - DNA, 25 bp, Homo sapien
ctacaggccgggtctgacagttttt

SEQ ID NO: 756724 - DNA, 25 bp, Homo sapien
ccgggtctgacagtttttatctgga

SEQ ID NO: 756725 - DNA, 25 bp, Homo sapien
caggccgggtctgacagtttttatc

SEQ ID NO: 756726 - DNA, 25 bp, Homo sapien
ccgtgtggcgcagggggcagggcag

SEQ ID NO: 756727 - DNA, 25 bp, Homo sapien
tgtggcgcagggggcagggcaggtt

SEQ ID NO: 756728 - DNA, 25 bp, Homo sapien
tggcgcagggggcagggcaggtttc

SEQ ID NO: 756729 - DNA, 25 bp, Homo sapien
gcgcagggggcagggcaggtttcat

SEQ ID NO: 756730 - DNA, 25 bp, Homo sapien
aactccccacacagtagtgaccaca

SEQ ID NO: 756731 - DNA, 25 bp, Homo sapien
cagacagcgatccagccggctgagt

SEQ ID NO: 756732 - DNA, 25 bp, Homo sapien
ctggctctgtgtcgcgttgccaact

SEQ ID NO: 756733 - DNA, 25 bp, Homo sapien
ccaaggcacagactcatatgcgaat

SEQ ID NO: 756734 - DNA, 25 bp, Homo sapien
tgcagggcccatggggttccccaaa

SEQ ID NO: 756735 - DNA, 25 bp, Homo sapien
aggtcaaggcggagctgccccctgc

SEQ ID NO: 756736 - DNA, 25 bp, Homo sapien
ggaggtcaaggcggagctgccccct

SEQ ID NO: 756737 - DNA, 25 bp, Homo sapien
ctgccacaccaggcatcatggagct

SEQ ID NO: 756738 - DNA, 25 bp, Homo sapien
gaggtcaaggcggagctgccccctg

SEQ ID NO: 756739 - DNA, 25 bp, Homo sapien
acgtagcccttgttggcgccgcctt

SEQ ID NO: 756740 - DNA, 25 bp, Homo sapien
gccgccttcagcaaacgcctgctgt

SEQ ID NO: 756741 - DNA, 25 bp, Homo sapien
ggctgtacacgccttgctgcacgta

SEQ ID NO: 756742 - DNA, 25 bp, Homo sapien
gccttgctgcacgtagcccttgttg

SEQ ID NO: 756743 - DNA, 25 bp, Homo sapien
gccagattgatggctcctagcatac

SEQ ID NO: 756744 - DNA, 25 bp, Homo sapien
tgccagattgatggctcctagcata

SEQ ID NO: 756745 - DNA, 25 bp, Homo sapien
ctgccagattgatggctcctagcat

SEQ ID NO: 756746 - DNA, 25 bp, Homo sapien
attctttctagaccctccactacag

SEQ ID NO: 756747 - DNA, 25 bp, Homo sapien
gctgatcagcgccacagttctgagg

SEQ ID NO: 756748 - DNA, 25 bp, Homo sapien
aagcagagagggaacgtccagctga

SEQ ID NO: 756749 - DNA, 25 bp, Homo sapien
gaccctccactacagctgtcaggaa

SEQ ID NO: 756750 - DNA, 25 bp, Homo sapien
ctgccgcttgcgtgaagtcagtgga

SEQ ID NO: 756751 - DNA, 25 bp, Homo sapien
tcttgcagcatgtgaggggaggccc

SEQ ID NO: 756752 - DNA, 25 bp, Homo sapien
ggagagcagccacggtggctgtggc

SEQ ID NO: 756753 - DNA, 25 bp, Homo sapien
gagggtcttgcagcatgtgagggga

SEQ ID NO: 756754 - DNA, 25 bp, Homo sapien
ctggctcagctcctggctctgcttc

SEQ ID NO: 756755 - DNA, 25 bp, Homo sapien
ctccatactggctcagctcctggct

SEQ ID NO: 756756 - DNA, 25 bp, Homo sapien
cgctccatactggctcagctcctgg

SEQ ID NO: 756757 - DNA, 25 bp, Homo sapien
ggctcagctcctggctctgcttctc

SEQ ID NO: 756758 - DNA, 25 bp, Homo sapien
ccctcctatgccagtagggttcatg

SEQ ID NO: 756759 - DNA, 25 bp, Homo sapien
aaactggctgttaaaagactgtccg

SEQ ID NO: 756760 - DNA, 25 bp, Homo sapien
tatgccagtagggttcatgccagcg

SEQ ID NO: 756761 - DNA, 25 bp, Homo sapien
tggctgttaaaagactgtccggccc

SEQ ID NO: 756762 - DNA, 25 bp, Homo sapien
gccctgcatacaagggtgtcattcc

SEQ ID NO: 756763 - DNA, 25 bp, Homo sapien
cccaggatacccatgttggggcaga

SEQ ID NO: 756764 - DNA, 25 bp, Homo sapien
gatacccatgttggggcagacgctg

SEQ ID NO: 756765 - DNA, 25 bp, Homo sapien
tacaagggtgtcattcctgctgccc

SEQ ID NO: 756766 - DNA, 25 bp, Homo sapien
ggccccaaactaggtgacctggaca

SEQ ID NO: 756767 - DNA, 25 bp, Homo sapien
tgcaggggagcgatcacagctaact

SEQ ID NO: 756768 - DNA, 25 bp, Homo sapien
cagaagcctgctctttaccacagct

SEQ ID NO: 756769 - DNA, 25 bp, Homo sapien
ctgggtgagggagttggtacccaag

SEQ ID NO: 756770 - DNA, 25 bp, Homo sapien
ggctgggcgcaaactgggcggtgct

SEQ ID NO: 756771 - DNA, 25 bp, Homo sapien
tgggcgcaaactgggcggtgctggg

SEQ ID NO: 756772 - DNA, 25 bp, Homo sapien
gcaaactgggcggtgctgggtgcat

SEQ ID NO: 756773 - DNA, 25 bp, Homo sapien
caaactgggcggtgctgggtgcata

SEQ ID NO: 756774 - DNA, 25 bp, Homo sapien
cttataatgcagtcccgtggggcca

SEQ ID NO: 756775 - DNA, 25 bp, Homo sapien
acagggactgggtcatgccctgctg

SEQ ID NO: 756776 - DNA, 25 bp, Homo sapien
gggccaggcacggacagggactggg

SEQ ID NO: 756777 - DNA, 25 bp, Homo sapien
taatgcagtcccgtggggccaggca

SEQ ID NO: 756778 - DNA, 25 bp, Homo sapien
cgagggcctgtcctctcaatggatt

SEQ ID NO: 756779 - DNA, 25 bp, Homo sapien
acccagaaagggtacatggccagca

SEQ ID NO: 756780 - DNA, 25 bp, Homo sapien
tctgcagcaagtagaaggaatgaca

SEQ ID NO: 756781 - DNA, 25 bp, Homo sapien
gaatcttgtagagggtcctttcgga

SEQ ID NO: 756782 - DNA, 25 bp, Homo sapien
ggctgtagctgacgctgcccccgtt

SEQ ID NO: 756783 - DNA, 25 bp, Homo sapien
gtagctgacgctgcccccgttgaag

SEQ ID NO: 756784 - DNA, 25 bp, Homo sapien
gttggctgtagctgacgctgccccc

SEQ ID NO: 756785 - DNA, 25 bp, Homo sapien
ggcgccctgcccgttgaactgctct

SEQ ID NO: 756786 - DNA, 25 bp, Homo sapien
tgagcctcccggcccatcctcccgg

SEQ ID NO: 756787 - DNA, 25 bp, Homo sapien
gagcctcccggcccatcctcccggc

SEQ ID NO: 756788 - DNA, 25 bp, Homo sapien
cctgtgagcctcccggcccatcctc

SEQ ID NO: 756789 - DNA, 25 bp, Homo sapien
tgtgagcctcccggcccatcctccc

SEQ ID NO: 756790 - DNA, 25 bp, Homo sapien
tgttcacggcgcacccactgggaac

SEQ ID NO: 756791 - DNA, 25 bp, Homo sapien
cactgggaaccatgataacagaggt

SEQ ID NO: 756792 - DNA, 25 bp, Homo sapien
ggtgcctgcccggtcgccctctctc

SEQ ID NO: 756793 - DNA, 25 bp, Homo sapien
cagtcaaggcagattgccagggtgg

SEQ ID NO: 756794 - DNA, 25 bp, Homo sapien
gacatgtaagggacgctgctgcttg

SEQ ID NO: 756795 - DNA, 25 bp, Homo sapien
ggaactgggatagcccgggatggaa

SEQ ID NO: 756796 - DNA, 25 bp, Homo sapien
tttggtgacatgtaagggacgctgc

SEQ ID NO: 756797 - DNA, 25 bp, Homo sapien
gacttgacctcttggtttggtgaca

SEQ ID NO: 756798 - DNA, 25 bp, Homo sapien
gagggcgatgagtgcaaggagttga

SEQ ID NO: 756799 - DNA, 25 bp, Homo sapien
gcgatgagtgcaaggagttgaggtt

SEQ ID NO: 756800 - DNA, 25 bp, Homo sapien
ggcgatgagtgcaaggagttgaggt

SEQ ID NO: 756801 - DNA, 25 bp, Homo sapien
cagagggcgatgagtgcaaggagtt

SEQ ID NO: 756802 - DNA, 25 bp, Homo sapien
ttttcttagggatatggcagccatc

SEQ ID NO: 756803 - DNA, 25 bp, Homo sapien
caagctcctacaggactctctggag

SEQ ID NO: 756804 - DNA, 25 bp, Homo sapien
gctgtcccaagagtggacagactta

SEQ ID NO: 756805 - DNA, 25 bp, Homo sapien
tggcaagatcacactcacggtaacc

SEQ ID NO: 756806 - DNA, 25 bp, Homo sapien
cattatcagggtcttgtagactgag

SEQ ID NO: 756807 - DNA, 25 bp, Homo sapien
cagctggaagacatggttgcttaca

SEQ ID NO: 756808 - DNA, 25 bp, Homo sapien
ttgcttacagccaggttgtgctgca

SEQ ID NO: 756809 - DNA, 25 bp, Homo sapien
atcgcgcacagggaaggtcagccgc

SEQ ID NO: 756810 - DNA, 25 bp, Homo sapien
cccagaaaacgggccctgagagtgt

SEQ ID NO: 756811 - DNA, 25 bp, Homo sapien
gaggaacagagcctcgtgggggtca

SEQ ID NO: 756812 - DNA, 25 bp, Homo sapien
gacacccagaaaacgggccctgaga

SEQ ID NO: 756813 - DNA, 25 bp, Homo sapien
aggaacagagcctcgtgggggtcag

SEQ ID NO: 756814 - DNA, 25 bp, Homo sapien
ggtcctcgtggtggtagcacttgaa

SEQ ID NO: 756815 - DNA, 25 bp, Homo sapien
gccggtcctcgtggtggtagcactt

SEQ ID NO: 756816 - DNA, 25 bp, Homo sapien
cggtcctcgtggtggtagcacttga

SEQ ID NO: 756817 - DNA, 25 bp, Homo sapien
tgccggtcctcgtggtggtagcact

SEQ ID NO: 756818 - DNA, 25 bp, Homo sapien
tgcttcaggtagagtggcttgtgcg

SEQ ID NO: 756819 - DNA, 25 bp, Homo sapien
gttgtcgccacgctcgatggtgagc

SEQ ID NO: 756820 - DNA, 25 bp, Homo sapien
tagagtggcttgtgcgaggtcttgt

SEQ ID NO: 756821 - DNA, 25 bp, Homo sapien
agcggcgtggcattgacgctgacct

SEQ ID NO: 756822 - DNA, 25 bp, Homo sapien
cggtgatctggatggtgttgcggcc

SEQ ID NO: 756823 - DNA, 25 bp, Homo sapien
cacatgctacagcaggcggtggaca

SEQ ID NO: 756824 - DNA, 25 bp, Homo sapien
gcccaggctgactagtgcactcata

SEQ ID NO: 756825 - DNA, 25 bp, Homo sapien
tagaaccggtaatgcttgatcagcc

SEQ ID NO: 756826 - DNA, 25 bp, Homo sapien
tgaccctgatgcttgctagaaccgg

SEQ ID NO: 756827 - DNA, 25 bp, Homo sapien
gagcggacggatgggcggtgcacta

SEQ ID NO: 756828 - DNA, 25 bp, Homo sapien
cagcaccgagcggacggatgggcgg

SEQ ID NO: 756829 - DNA, 25 bp, Homo sapien
ggaggcgctttttgaggaggccctg

SEQ ID NO: 756830 - DNA, 25 bp, Homo sapien
ggatgggcggtgcactagctgcagc

SEQ ID NO: 756831 - DNA, 25 bp, Homo sapien
gtggcgacagtcatgacctcgggca

SEQ ID NO: 756832 - DNA, 25 bp, Homo sapien
gtgccgctgctgaagttccgcttta

SEQ ID NO: 756833 - DNA, 25 bp, Homo sapien
gggatggtgccgctgctgaagttcc

SEQ ID NO: 756834 - DNA, 25 bp, Homo sapien
cgacagtcatgacctcgggcaggga

SEQ ID NO: 756835 - DNA, 25 bp, Homo sapien
tctgcaaagacagatgctaacgatg

SEQ ID NO: 756836 - DNA, 25 bp, Homo sapien
caaagacagatgctaacgatggtca

SEQ ID NO: 756837 - DNA, 25 bp, Homo sapien
agacagatgctaacgatggtcaccc

SEQ ID NO: 756838 - DNA, 25 bp, Homo sapien
tgcaaagacagatgctaacgatggt

SEQ ID NO: 756839 - DNA, 25 bp, Homo sapien
ctccaagtcccccgctcacagttga

SEQ ID NO: 756840 - DNA, 25 bp, Homo sapien
gcaggtacgactccaggtcaaagca

SEQ ID NO: 756841 - DNA, 25 bp, Homo sapien
tcacagttgagctgcaggtacgact

SEQ ID NO: 756842 - DNA, 25 bp, Homo sapien
ccaagtcccccgctcacagttgagc

SEQ ID NO: 756843 - DNA, 25 bp, Homo sapien
caggccctccagcaaagctgtcttg

SEQ ID NO: 756844 - DNA, 25 bp, Homo sapien
ttctgaatgtaaatcaggatgccca

SEQ ID NO: 756845 - DNA, 25 bp, Homo sapien
ggatgcccagcatgtactggtccac

SEQ ID NO: 756846 - DNA, 25 bp, Homo sapien
ctgaatgtaaatcaggatgcccagc

SEQ ID NO: 756847 - DNA, 25 bp, Homo sapien
tgcatgtcaggcttcacgggcactg

SEQ ID NO: 756848 - DNA, 25 bp, Homo sapien
ggctcctccttgatgtgcatgtcag

SEQ ID NO: 756849 - DNA, 25 bp, Homo sapien
tctccatcacgctgggcatgagcac

SEQ ID NO: 756850 - DNA, 25 bp, Homo sapien
ctcacggtgcggcagcgcttcagtg

SEQ ID NO: 756851 - DNA, 25 bp, Homo sapien
ttcaaggctagcctgctgtacttac

SEQ ID NO: 756852 - DNA, 25 bp, Homo sapien
gagaggagccatatgcccagggtca

SEQ ID NO: 756853 - DNA, 25 bp, Homo sapien
agggtcatctgaggttcaaggctag

SEQ ID NO: 756854 - DNA, 25 bp, Homo sapien
agaggagccatatgcccagggtcat

SEQ ID NO: 756855 - DNA, 25 bp, Homo sapien
catagccacattcttgcaggtgagg

SEQ ID NO: 756856 - DNA, 25 bp, Homo sapien
acattcttgcaggtgaggagactga

SEQ ID NO: 756857 - DNA, 25 bp, Homo sapien
ctgcatagccacattcttgcaggtg

SEQ ID NO: 756858 - DNA, 25 bp, Homo sapien
cattcttgcaggtgaggagactgat

SEQ ID NO: 756859 - DNA, 25 bp, Homo sapien
aacaaacgcaccacgcgtgtgaggt

SEQ ID NO: 756860 - DNA, 25 bp, Homo sapien
cctgtgaggtgttccagccaggagc

SEQ ID NO: 756861 - DNA, 25 bp, Homo sapien
atgggagcagccacaaacaaacgca

SEQ ID NO: 756862 - DNA, 25 bp, Homo sapien
tgaaggtctcggaggttataggaat

SEQ ID NO: 756863 - DNA, 25 bp, Homo sapien
gctgccaagggaattggccttggga

SEQ ID NO: 756864 - DNA, 25 bp, Homo sapien
ccacaaacaacagcgggttttgcag

SEQ ID NO: 756865 - DNA, 25 bp, Homo sapien
tgcagaagtcgctatttggaaaagg

SEQ ID NO: 756866 - DNA, 25 bp, Homo sapien
gtcgctatttggaaaagggcatttc

SEQ ID NO: 756867 - DNA, 25 bp, Homo sapien
gctgtggcatgggtgggacttgcag

SEQ ID NO: 756868 - DNA, 25 bp, Homo sapien
tggcatgggtgggacttgcagtgct

SEQ ID NO: 756869 - DNA, 25 bp, Homo sapien
tgagaggagagtcggggcctgggtg

SEQ ID NO: 756870 - DNA, 25 bp, Homo sapien
ctgtgagaggagagtcggggcctgg

SEQ ID NO: 756871 - DNA, 25 bp, Homo sapien
gcttgggaggcaggcggtagacttc

SEQ ID NO: 756872 - DNA, 25 bp, Homo sapien
tggtcccggggtgaactcagcaagg

SEQ ID NO: 756873 - DNA, 25 bp, Homo sapien
ggcaggcggtagacttctctgaagt

SEQ ID NO: 756874 - DNA, 25 bp, Homo sapien
gctgggaatgtcagactggtaggag

SEQ ID NO: 756875 - DNA, 25 bp, Homo sapien
ctgtggcaggactgaaggccagttc

SEQ ID NO: 756876 - DNA, 25 bp, Homo sapien
tgaaggccagttcacccgtaggtcc

SEQ ID NO: 756877 - DNA, 25 bp, Homo sapien
ttggcccaaggactgccgggacgct

SEQ ID NO: 756878 - DNA, 25 bp, Homo sapien
cccgtaggtcctaagctcgcttggc

SEQ ID NO: 756879 - DNA, 25 bp, Homo sapien
tctagccctggctcccacgcactcc

SEQ ID NO: 756880 - DNA, 25 bp, Homo sapien
cctggctcccacgcactcccccgca

SEQ ID NO: 756881 - DNA, 25 bp, Homo sapien
ggctcccacgcactcccccgcatgg

SEQ ID NO: 756882 - DNA, 25 bp, Homo sapien
ctagccctggctcccacgcactccc

SEQ ID NO: 756883 - DNA, 25 bp, Homo sapien
tgatgccccaaggtgaatgctggtg

SEQ ID NO: 756884 - DNA, 25 bp, Homo sapien
cataggcctgcatgtgctcaaagag

SEQ ID NO: 756885 - DNA, 25 bp, Homo sapien
gaaatttgactctaaggaccgtgct

SEQ ID NO: 756886 - DNA, 25 bp, Homo sapien
tgagtttctattatggtccagggac

SEQ ID NO: 756887 - DNA, 25 bp, Homo sapien
tcatcagggttggtcagttccggga

SEQ ID NO: 756888 - DNA, 25 bp, Homo sapien
caagtaggacagtagctcatcaggg

SEQ ID NO: 756889 - DNA, 25 bp, Homo sapien
ctcaaacagagaaagcaggtcgtca

SEQ ID NO: 756890 - DNA, 25 bp, Homo sapien
cgtcattgttgttcgtagggaggtc

SEQ ID NO: 756891 - DNA, 25 bp, Homo sapien
gctgtacaacaggaacatgctggct

SEQ ID NO: 756892 - DNA, 25 bp, Homo sapien
gcacagggctgcttccaattcaggg

SEQ ID NO: 756893 - DNA, 25 bp, Homo sapien
gcgcagcccgctagagaatctttac

SEQ ID NO: 756894 - DNA, 25 bp, Homo sapien
tgccattcagcgaggttccaagagc

SEQ ID NO: 756895 - DNA, 25 bp, Homo sapien
aatagagatcggcacagacaggaga

SEQ ID NO: 756896 - DNA, 25 bp, Homo sapien
gtcctttaatagagatcggcacaga

SEQ ID NO: 756897 - DNA, 25 bp, Homo sapien
tttaatagagatcggcacagacagg

SEQ ID NO: 756898 - DNA, 25 bp, Homo sapien
aggcgccctgctcgcacaggctggg

SEQ ID NO: 756899 - DNA, 25 bp, Homo sapien
aaatgtctctcctgggcaagcctgg

SEQ ID NO: 756900 - DNA, 25 bp, Homo sapien
tggcttacgaggagaaaatagtccc

SEQ ID NO: 756901 - DNA, 25 bp, Homo sapien
ccaagctttaggcaggtcgctggct

SEQ ID NO: 756902 - DNA, 25 bp, Homo sapien
gagccttggcttgaaacatccagag

SEQ ID NO: 756903 - DNA, 25 bp, Homo sapien
ccaggactggaggaaatggtgaccc

SEQ ID NO: 756904 - DNA, 25 bp, Homo sapien
gcccaggactggaggaaatggtgac

SEQ ID NO: 756905 - DNA, 25 bp, Homo sapien
gggcccaggactggaggaaatggtg

SEQ ID NO: 756906 - DNA, 25 bp, Homo sapien
gactggaggaaatggtgacccggac

SEQ ID NO: 756907 - DNA, 25 bp, Homo sapien
gccttggccgccagcctgaggatgc

SEQ ID NO: 756908 - DNA, 25 bp, Homo sapien
cagaggctttgtcagggaataagga

SEQ ID NO: 756909 - DNA, 25 bp, Homo sapien
gaagcccacctgtgtggtcccaaat

SEQ ID NO: 756910 - DNA, 25 bp, Homo sapien
agacagatgccctcctctagtgcct

SEQ ID NO: 756911 - DNA, 25 bp, Homo sapien
tccatccgggagcatcacgtttgca

SEQ ID NO: 756912 - DNA, 25 bp, Homo sapien
ctaaagattttgtcgaggcagggtc

SEQ ID NO: 756913 - DNA, 25 bp, Homo sapien
cacgtttgcaacaggcagggcaggt

SEQ ID NO: 756914 - DNA, 25 bp, Homo sapien
cactaacgtgtggtctgtcctggag

SEQ ID NO: 756915 - DNA, 25 bp, Homo sapien
tttggaagggcaggtacacacgcgt

SEQ ID NO: 756916 - DNA, 25 bp, Homo sapien
caggatgggctgtctcaatggcccc

SEQ ID NO: 756917 - DNA, 25 bp, Homo sapien
caacttgggtgacaggccatcctga

SEQ ID NO: 756918 - DNA, 25 bp, Homo sapien
gcgtgtgcacttaccaaaacctact

SEQ ID NO: 756919 - DNA, 25 bp, Homo sapien
tgaatcaatgagaagtgaggctccg

SEQ ID NO: 756920 - DNA, 25 bp, Homo sapien
ggccctgacttatcctggaggcaga

SEQ ID NO: 756921 - DNA, 25 bp, Homo sapien
gaaccagaaggagagtgatcatcac

SEQ ID NO: 756922 - DNA, 25 bp, Homo sapien
gagggttctcccaggaatggcgtct

SEQ ID NO: 756923 - DNA, 25 bp, Homo sapien
gagcattcgtgtattttggtatcca

SEQ ID NO: 756924 - DNA, 25 bp, Homo sapien
ttatatacaggacttgagcattcgt

SEQ ID NO: 756925 - DNA, 25 bp, Homo sapien
tctagtggtctatagcattttagga

SEQ ID NO: 756926 - DNA, 25 bp, Homo sapien
ataagtgggctaagttctagtggtc

SEQ ID NO: 756927 - DNA, 25 bp, Homo sapien
gacattctacaagaaactcctgaat

SEQ ID NO: 756928 - DNA, 25 bp, Homo sapien
ttgtgcgaaaagatcaatgtaatga

SEQ ID NO: 756929 - DNA, 25 bp, Homo sapien
ggctccagccttatctttcaagtaa

SEQ ID NO: 756930 - DNA, 25 bp, Homo sapien
caggtgcaaaatgtgagtgttgatc

SEQ ID NO: 756931 - DNA, 25 bp, Homo sapien
tgcaaaacggcacgagcctggcctc

SEQ ID NO: 756932 - DNA, 25 bp, Homo sapien
gcaaaacggcacgagcctggcctcc

SEQ ID NO: 756933 - DNA, 25 bp, Homo sapien
ctgcaaaacggcacgagcctggcct

SEQ ID NO: 756934 - DNA, 25 bp, Homo sapien
caaaacggcacgagcctggcctccc

SEQ ID NO: 756935 - DNA, 25 bp, Homo sapien
cgccgtcgacggcaatgtcgaagaa

SEQ ID NO: 756936 - DNA, 25 bp, Homo sapien
ggctcgccgtcgacggcaatgtcga

SEQ ID NO: 756937 - DNA, 25 bp, Homo sapien
gctcgccgtcgacggcaatgtcgaa

SEQ ID NO: 756938 - DNA, 25 bp, Homo sapien
agggctcgccgtcgacggcaatgtc

SEQ ID NO: 756939 - DNA, 25 bp, Homo sapien
ccactttctgggccccattcccgca

SEQ ID NO: 756940 - DNA, 25 bp, Homo sapien
ctttctgggccccattcccgcacgc

SEQ ID NO: 756941 - DNA, 25 bp, Homo sapien
actttctgggccccattcccgcacg

SEQ ID NO: 756942 - DNA, 25 bp, Homo sapien
ttctgggccccattcccgcacgccg

SEQ ID NO: 756943 - DNA, 25 bp, Homo sapien
ggatgtaaagcacccatgcctgcca

SEQ ID NO: 756944 - DNA, 25 bp, Homo sapien
ctacaggaccgagcatggacgggct

SEQ ID NO: 756945 - DNA, 25 bp, Homo sapien
caccgcgcctcgatccttgagaaaa

SEQ ID NO: 756946 - DNA, 25 bp, Homo sapien
aaaatggcccctcgtcaggaaatgg

SEQ ID NO: 756947 - DNA, 25 bp, Homo sapien
cttggtcggaagaggcctgccttgt

SEQ ID NO: 756948 - DNA, 25 bp, Homo sapien
ttgctaggcagagggacaatcggga

SEQ ID NO: 756949 - DNA, 25 bp, Homo sapien
ctgccttgtggccagtcgcaacttg

SEQ ID NO: 756950 - DNA, 25 bp, Homo sapien
cagtcgcaacttgcttgctaggcag

SEQ ID NO: 756951 - DNA, 25 bp, Homo sapien
tgatgcccaacattaggtcaggcca

SEQ ID NO: 756952 - DNA, 25 bp, Homo sapien
tatttaactttgaagacacgcgcca

SEQ ID NO: 756953 - DNA, 25 bp, Homo sapien
cagtgtttcagtgcctatgtgccag

SEQ ID NO: 756954 - DNA, 25 bp, Homo sapien
cacgaagactgcatgaggatcaatc

SEQ ID NO: 756955 - DNA, 25 bp, Homo sapien
tatggattagatgagcagtcacttc

SEQ ID NO: 756956 - DNA, 25 bp, Homo sapien
tttatggattagatgagcagtcact

SEQ ID NO: 756957 - DNA, 25 bp, Homo sapien
ttatggattagatgagcagtcactt

SEQ ID NO: 756958 - DNA, 25 bp, Homo sapien
gaacagcaagcactgctgcacgatc

SEQ ID NO: 756959 - DNA, 25 bp, Homo sapien
ctgttcttttagtcacttgtaatga

SEQ ID NO: 756960 - DNA, 25 bp, Homo sapien
tagtcacttgtaatgaaaatgctac

SEQ ID NO: 756961 - DNA, 25 bp, Homo sapien
cacgatcaggggtaaacagctgttc

SEQ ID NO: 756962 - DNA, 25 bp, Homo sapien
ggcttcttaaatgtctatcaccacc

SEQ ID NO: 756963 - DNA, 25 bp, Homo sapien
tattttgttgcttagtacccatgtc

SEQ ID NO: 756964 - DNA, 25 bp, Homo sapien
tcctgacagccataaggccctgcag

SEQ ID NO: 756965 - DNA, 25 bp, Homo sapien
gcagttgggttaagaaacatgaaac

SEQ ID NO: 756966 - DNA, 25 bp, Homo sapien
tgtctttgggaccttgtctgcaaac

SEQ ID NO: 756967 - DNA, 25 bp, Homo sapien
ctgctgtctttgggaccttgtctgc

SEQ ID NO: 756968 - DNA, 25 bp, Homo sapien
gctgtctttgggaccttgtctgcaa

SEQ ID NO: 756969 - DNA, 25 bp, Homo sapien
tctttgggaccttgtctgcaaacag

SEQ ID NO: 756970 - DNA, 25 bp, Homo sapien
cacacaaactgtcacaattggaaca

SEQ ID NO: 756971 - DNA, 25 bp, Homo sapien
caaactgtcacaattggaacatctt

SEQ ID NO: 756972 - DNA, 25 bp, Homo sapien
acacacacaaactgtcacaattgga

SEQ ID NO: 756973 - DNA, 25 bp, Homo sapien
cacaaactgtcacaattggaacatc

SEQ ID NO: 756974 - DNA, 25 bp, Homo sapien
ctctccagtgctcagagcacgaaaa

SEQ ID NO: 756975 - DNA, 25 bp, Homo sapien
ctccagtgctcagagcacgaaaatt

SEQ ID NO: 756976 - DNA, 25 bp, Homo sapien
tctccagtgctcagagcacgaaaat

SEQ ID NO: 756977 - DNA, 25 bp, Homo sapien
tccagtgctcagagcacgaaaattt

SEQ ID NO: 756978 - DNA, 25 bp, Homo sapien
ttctggctcaatcccaaatgaaggg

SEQ ID NO: 756979 - DNA, 25 bp, Homo sapien
ccgaaatggtagagtaacagttcag

SEQ ID NO: 756980 - DNA, 25 bp, Homo sapien
taaccatgaagtgtgccaaatctgc

SEQ ID NO: 756981 - DNA, 25 bp, Homo sapien
gtcacttctgacaacataaccatga

SEQ ID NO: 756982 - DNA, 25 bp, Homo sapien
tctcatcttcaaatttctccccata

SEQ ID NO: 756983 - DNA, 25 bp, Homo sapien
tgccaggacccgtatgctttaggat

SEQ ID NO: 756984 - DNA, 25 bp, Homo sapien
atcttcaaatttctccccatagatg

SEQ ID NO: 756985 - DNA, 25 bp, Homo sapien
atgccaggacccgtatgctttagga

SEQ ID NO: 756986 - DNA, 25 bp, Homo sapien
acttttcatttagtcaggtggttag

SEQ ID NO: 756987 - DNA, 25 bp, Homo sapien
aggtggttagtgtgccatgttgtac

SEQ ID NO: 756988 - DNA, 25 bp, Homo sapien
ttcatttagtcaggtggttagtgtg

SEQ ID NO: 756989 - DNA, 25 bp, Homo sapien
ttagtgtgccatgttgtacccttac

SEQ ID NO: 756990 - DNA, 25 bp, Homo sapien
ccaacctgggagataagagcgagat

SEQ ID NO: 756991 - DNA, 25 bp, Homo sapien
acctgggagataagagcgagatcca

SEQ ID NO: 756992 - DNA, 25 bp, Homo sapien
ctgggagataagagcgagatccagt

SEQ ID NO: 756993 - DNA, 25 bp, Homo sapien
caacctgggagataagagcgagatc

SEQ ID NO: 756994 - DNA, 25 bp, Homo sapien
cattaaacatgattctccaattacc

SEQ ID NO: 756995 - DNA, 25 bp, Homo sapien
actatgactggcaaccacaaacaag

SEQ ID NO: 756996 - DNA, 25 bp, Homo sapien
gcagcctccatgtgtcatgaaccaa

SEQ ID NO: 756997 - DNA, 25 bp, Homo sapien
tgaaccaagacgagaaaggtagctt

SEQ ID NO: 756998 - DNA, 25 bp, Homo sapien
catgccttctttcactttgccaaac

SEQ ID NO: 756999 - DNA, 25 bp, Homo sapien
tttcactttgccaaacaccacatgc

SEQ ID NO: 757000 - DNA, 25 bp, Homo sapien
ccttctttcactttgccaaacacca

SEQ ID NO: 757001 - DNA, 25 bp, Homo sapien
ctttcactttgccaaacaccacatg

SEQ ID NO: 757002 - DNA, 25 bp, Homo sapien
gctacagaaggaatgatctggtggt

SEQ ID NO: 757003 - DNA, 25 bp, Homo sapien
gaaggaatgatctggtggttaagat

SEQ ID NO: 757004 - DNA, 25 bp, Homo sapien
attctaggatactgcgagcaaatgg

SEQ ID NO: 757005 - DNA, 25 bp, Homo sapien
gcagcgagagcacaaagattctagg

SEQ ID NO: 757006 - DNA, 25 bp, Homo sapien
ctgcaatccagctaggcatgggagg

SEQ ID NO: 757007 - DNA, 25 bp, Homo sapien
aatccagctaggcatgggagggaac

SEQ ID NO: 757008 - DNA, 25 bp, Homo sapien
tccagctaggcatgggagggaacaa

SEQ ID NO: 757009 - DNA, 25 bp, Homo sapien
actctgcaatccagctaggcatggg

SEQ ID NO: 757010 - DNA, 25 bp, Homo sapien
ccatgcccagttgctgcctacattt

SEQ ID NO: 757011 - DNA, 25 bp, Homo sapien
ttaagcaaacaagtgatgtttcaga

SEQ ID NO: 757012 - DNA, 25 bp, Homo sapien
atctaagtactgtgtagaattaagc

SEQ ID NO: 757013 - DNA, 25 bp, Homo sapien
gcctacattttcaatattccactca

SEQ ID NO: 757014 - DNA, 25 bp, Homo sapien
gatcttgactcctaccctcaggtgg

SEQ ID NO: 757015 - DNA, 25 bp, Homo sapien
gctgatcttgactcctaccctcagg

SEQ ID NO: 757016 - DNA, 25 bp, Homo sapien
tcttgactcctaccctcaggtggtc

SEQ ID NO: 757017 - DNA, 25 bp, Homo sapien
caggctgatcttgactcctaccctc

SEQ ID NO: 757018 - DNA, 25 bp, Homo sapien
cataaccaaagctagggagaggctc

SEQ ID NO: 757019 - DNA, 25 bp, Homo sapien
cacccagggaatacgtaaccagaca

SEQ ID NO: 757020 - DNA, 25 bp, Homo sapien
gacattgaatggtatcacccaggga

SEQ ID NO: 757021 - DNA, 25 bp, Homo sapien
tgactgtagcaccaagtacctggct

SEQ ID NO: 757022 - DNA, 25 bp, Homo sapien
ttggctcattgtgctttctggtttc

SEQ ID NO: 757023 - DNA, 25 bp, Homo sapien
tggctcattgtgctttctggtttca

SEQ ID NO: 757024 - DNA, 25 bp, Homo sapien
actgccccgcagatcaatgaataca

SEQ ID NO: 757025 - DNA, 25 bp, Homo sapien
gagtcacaggtgcaaaaatagagcc

SEQ ID NO: 757026 - DNA, 25 bp, Homo sapien
gaaatcaaggaagttgccatctgcc

SEQ ID NO: 757027 - DNA, 25 bp, Homo sapien
tactaaggaaccacagccagagggt

SEQ ID NO: 757028 - DNA, 25 bp, Homo sapien
tggatttggtgctattgtaggatgg

SEQ ID NO: 757029 - DNA, 25 bp, Homo sapien
gatttggtgctattgtaggatggtt

SEQ ID NO: 757030 - DNA, 25 bp, Homo sapien
tttggtgctattgtaggatggtttc

SEQ ID NO: 757031 - DNA, 25 bp, Homo sapien
gtgctattgtaggatggtttctttc

SEQ ID NO: 757032 - DNA, 25 bp, Homo sapien
tctggattggcacatcttattctac

SEQ ID NO: 757033 - DNA, 25 bp, Homo sapien
ggaagagagcttgggctagacaatc

SEQ ID NO: 757034 - DNA, 25 bp, Homo sapien
caatcggaaaacgaagatcactgga

SEQ ID NO: 757035 - DNA, 25 bp, Homo sapien
gcttgggctagacaatcggaaaacg

SEQ ID NO: 757036 - DNA, 25 bp, Homo sapien
actgctttgagagtacaaagacaag

SEQ ID NO: 757037 - DNA, 25 bp, Homo sapien
tgtccacaccaccggttgatgaatc

SEQ ID NO: 757038 - DNA, 25 bp, Homo sapien
ctgctttgagagtacaaagacaagt

SEQ ID NO: 757039 - DNA, 25 bp, Homo sapien
cacaccaccggttgatgaatctcct

SEQ ID NO: 757040 - DNA, 25 bp, Homo sapien
cacacaaactgctactgtctggctg

SEQ ID NO: 757041 - DNA, 25 bp, Homo sapien
aaagtcttccatatgccactgcagg

SEQ ID NO: 757042 - DNA, 25 bp, Homo sapien
tctgaggacacatactcaagctgct

SEQ ID NO: 757043 - DNA, 25 bp, Homo sapien
tactggtcctctgtcatcaagtttg

SEQ ID NO: 757044 - DNA, 25 bp, Homo sapien
tcatggatgtgtgcttcatttgatc

SEQ ID NO: 757045 - DNA, 25 bp, Homo sapien
tctattgtatgtagctcgtgatcac

SEQ ID NO: 757046 - DNA, 25 bp, Homo sapien
caaatgacaaaaagcaagctagttg

SEQ ID NO: 757047 - DNA, 25 bp, Homo sapien
tctgttggttaacattgttcctagc

SEQ ID NO: 757048 - DNA, 25 bp, Homo sapien
tcttcacgaggagtcctttattcct

SEQ ID NO: 757049 - DNA, 25 bp, Homo sapien
gaggagtcctttattcctgcatgtt

SEQ ID NO: 757050 - DNA, 25 bp, Homo sapien
gctaacctccacagatgctgatagt

SEQ ID NO: 757051 - DNA, 25 bp, Homo sapien
tgttctttgggacctttaggagcta

SEQ ID NO: 757052 - DNA, 25 bp, Homo sapien
ttataagtgatacaagggccccatg

SEQ ID NO: 757053 - DNA, 25 bp, Homo sapien
ttcaggaactggtctcgagagagca

SEQ ID NO: 757054 - DNA, 25 bp, Homo sapien
gggtcaactccctaaatggcagctg

SEQ ID NO: 757055 - DNA, 25 bp, Homo sapien
gaatgaacgtttcgcctgccaaaga

SEQ ID NO: 757056 - DNA, 25 bp, Homo sapien
atattttgagtgagacccagtccag

SEQ ID NO: 757057 - DNA, 25 bp, Homo sapien
tgctataactgcttggacacttggc

SEQ ID NO: 757058 - DNA, 25 bp, Homo sapien
ggtgataggcagaattttggtcccc

SEQ ID NO: 757059 - DNA, 25 bp, Homo sapien
gattcaaaggaaggcccaaggtgct

SEQ ID NO: 757060 - DNA, 25 bp, Homo sapien
cactaccatcctaagtgaagactta

SEQ ID NO: 757061 - DNA, 25 bp, Homo sapien
gacttagtaagtctgaggatctcca

SEQ ID NO: 757062 - DNA, 25 bp, Homo sapien
ttgctgcagtgttggtccacactac

SEQ ID NO: 757063 - DNA, 25 bp, Homo sapien
tgtttgaccttttggataaactgtg

SEQ ID NO: 757064 - DNA, 25 bp, Homo sapien
tatcagctcatctatgagatggccc

SEQ ID NO: 757065 - DNA, 25 bp, Homo sapien
caaaaaagttccagtagttatccag

SEQ ID NO: 757066 - DNA, 25 bp, Homo sapien
tgcgatgcttctgacattatgaaaa

SEQ ID NO: 757067 - DNA, 25 bp, Homo sapien
cctatggttgaatttgttgcgatgc

SEQ ID NO: 757068 - DNA, 25 bp, Homo sapien
tagtgggtttggatgctgccagccc

SEQ ID NO: 757069 - DNA, 25 bp, Homo sapien
taaactgacagatctagagggcttc

SEQ ID NO: 757070 - DNA, 25 bp, Homo sapien
tctgattgaataggcgcccattttg

SEQ ID NO: 757071 - DNA, 25 bp, Homo sapien
ggattccattagaggttgccaacca

SEQ ID NO: 757072 - DNA, 25 bp, Homo sapien
gcagaatgaagctctgtgtacccat

SEQ ID NO: 757073 - DNA, 25 bp, Homo sapien
catgccctgcgctaagtaactgtta

SEQ ID NO: 757074 - DNA, 25 bp, Homo sapien
aatgtactagttaattgacccttag

SEQ ID NO: 757075 - DNA, 25 bp, Homo sapien
cagtttgagtcccattaacaggcat

SEQ ID NO: 757076 - DNA, 25 bp, Homo sapien
atggtacacacatgttgtcccaact

SEQ ID NO: 757077 - DNA, 25 bp, Homo sapien
gggcactggggcacaaaaaatcact

SEQ ID NO: 757078 - DNA, 25 bp, Homo sapien
catggtacacacatgttgtcccaac

SEQ ID NO: 757079 - DNA, 25 bp, Homo sapien
gcatggtacacacatgttgtcccaa

SEQ ID NO: 757080 - DNA, 25 bp, Homo sapien
taaaagtaccttttcatgtggtgac

SEQ ID NO: 757081 - DNA, 25 bp, Homo sapien
cagttgtgtgttgattggctaggtt

SEQ ID NO: 757082 - DNA, 25 bp, Homo sapien
acatttgtatgttcttagactcgaa

SEQ ID NO: 757083 - DNA, 25 bp, Homo sapien
tagactcgaagtttgataaaagtac

SEQ ID NO: 757084 - DNA, 25 bp, Homo sapien
cagtagctaaaaatacataagtatt

SEQ ID NO: 757085 - DNA, 25 bp, Homo sapien
ttgtcgttcttgatagattttaaac

SEQ ID NO: 757086 - DNA, 25 bp, Homo sapien
aatacataagtattaacataagcta

SEQ ID NO: 757087 - DNA, 25 bp, Homo sapien
ggagacattgagttgtcgttcttga

SEQ ID NO: 757088 - DNA, 25 bp, Homo sapien
cttaaaagttagcaccaagctgtca

SEQ ID NO: 757089 - DNA, 25 bp, Homo sapien
tatggtattgaatagacataacacc

SEQ ID NO: 757090 - DNA, 25 bp, Homo sapien
aaagttagcaccaagctgtcattta

SEQ ID NO: 757091 - DNA, 25 bp, Homo sapien
gatttgtcttgtgcttgatgtgaca

SEQ ID NO: 757092 - DNA, 25 bp, Homo sapien
ctttctgttcgtcaggcttgggcgc

SEQ ID NO: 757093 - DNA, 25 bp, Homo sapien
tctgcgaggcgtccaatctcattgg

SEQ ID NO: 757094 - DNA, 25 bp, Homo sapien
gcgggcgatatttttattggctttc

SEQ ID NO: 757095 - DNA, 25 bp, Homo sapien
gcctcccttgctcgcgggcgatatt

SEQ ID NO: 757096 - DNA, 25 bp, Homo sapien
tcttgacagtaggtgaggctacagg

SEQ ID NO: 757097 - DNA, 25 bp, Homo sapien
ctcagtcttgacagtaggtgaggct

SEQ ID NO: 757098 - DNA, 25 bp, Homo sapien
tgacagtaggtgaggctacaggttc

SEQ ID NO: 757099 - DNA, 25 bp, Homo sapien
taggtgaggctacaggttcgcgcca

SEQ ID NO: 757100 - DNA, 25 bp, Homo sapien
tattaggcctagagggacatgagta

SEQ ID NO: 757101 - DNA, 25 bp, Homo sapien
aatcccatgcatacccaattgttta

SEQ ID NO: 757102 - DNA, 25 bp, Homo sapien
ggacttcggttatgcccaccctctg

SEQ ID NO: 757103 - DNA, 25 bp, Homo sapien
atttcattcctgactatcggcctca

SEQ ID NO: 757104 - DNA, 25 bp, Homo sapien
tttctagctgggagttatcctccaa

SEQ ID NO: 757105 - DNA, 25 bp, Homo sapien
gggaaggcgattccactttagagct

SEQ ID NO: 757106 - DNA, 25 bp, Homo sapien
tagctgggagttatcctccaaattt

SEQ ID NO: 757107 - DNA, 25 bp, Homo sapien
ggaaggcgattccactttagagctt

SEQ ID NO: 757108 - DNA, 25 bp, Homo sapien
tccttggtggagatgcaagtgttct

SEQ ID NO: 757109 - DNA, 25 bp, Homo sapien
tggtcctactttgcctgggtctgag

SEQ ID NO: 757110 - DNA, 25 bp, Homo sapien
gatatgcaagcatgagcctcctctc

SEQ ID NO: 757111 - DNA, 25 bp, Homo sapien
gataaaccttatcaaagcaggagat

SEQ ID NO: 757112 - DNA, 25 bp, Homo sapien
tgaagtgcagtacccattcagaaat

SEQ ID NO: 757113 - DNA, 25 bp, Homo sapien
gctgcatgggcaattcaaacaaatc

SEQ ID NO: 757114 - DNA, 25 bp, Homo sapien
tcactgcctgtaggttgaagctcag

SEQ ID NO: 757115 - DNA, 25 bp, Homo sapien
ccagacgggctgttgatctcactgc

SEQ ID NO: 757116 - DNA, 25 bp, Homo sapien
aatagccctattcagtgtccactag

SEQ ID NO: 757117 - DNA, 25 bp, Homo sapien
tgtgggcccagagtattggaaagaa

SEQ ID NO: 757118 - DNA, 25 bp, Homo sapien
tccaattgggataggtagagtcatg

SEQ ID NO: 757119 - DNA, 25 bp, Homo sapien
cactaggatggatattgcagaaggc

SEQ ID NO: 757120 - DNA, 25 bp, Homo sapien
aggctcccttagataattgcttatg

SEQ ID NO: 757121 - DNA, 25 bp, Homo sapien
tgtggatcatagtttctcaggctcc

SEQ ID NO: 757122 - DNA, 25 bp, Homo sapien
gactgttttgatgtccaatctcagg

SEQ ID NO: 757123 - DNA, 25 bp, Homo sapien
catgcataaggcctgttcagagagc

SEQ ID NO: 757124 - DNA, 25 bp, Homo sapien
gggtcttcacaatccttcaccagtg

SEQ ID NO: 757125 - DNA, 25 bp, Homo sapien
tggtggttctgttgctcagctgcag

SEQ ID NO: 757126 - DNA, 25 bp, Homo sapien
tttgcaaaggtgcagtacctctcct

SEQ ID NO: 757127 - DNA, 25 bp, Homo sapien
gaattgcagtaactagccttgcctt

SEQ ID NO: 757128 - DNA, 25 bp, Homo sapien
tcagtacctcacaatcagagttggc

SEQ ID NO: 757129 - DNA, 25 bp, Homo sapien
tgattcaagcagtgcacccggtgga

SEQ ID NO: 757130 - DNA, 25 bp, Homo sapien
gatcctcaggtccagaattccagca

SEQ ID NO: 757131 - DNA, 25 bp, Homo sapien
gaacctggaccaaggcaaatgtctt

SEQ ID NO: 757132 - DNA, 25 bp, Homo sapien
gaatagatccttgcacatccagggc

SEQ ID NO: 757133 - DNA, 25 bp, Homo sapien
gctggcgaagctcatagacgactac

SEQ ID NO: 757134 - DNA, 25 bp, Homo sapien
tccaggaacgacagagggataagct

SEQ ID NO: 757135 - DNA, 25 bp, Homo sapien
tgaggattgaaacgggcagcttccc

SEQ ID NO: 757136 - DNA, 25 bp, Homo sapien
tagaaaccgagcagtaacactagcc

SEQ ID NO: 757137 - DNA, 25 bp, Homo sapien
ggctgagtcacgctaaggctggcaa

SEQ ID NO: 757138 - DNA, 25 bp, Homo sapien
ttcatagaacactacgcgcagctgg

SEQ ID NO: 757139 - DNA, 25 bp, Homo sapien
ttagatgtgaagcagaacgccaagg

SEQ ID NO: 757140 - DNA, 25 bp, Homo sapien
taaaggtcatggatatagttcaggc

SEQ ID NO: 757141 - DNA, 25 bp, Homo sapien
taatgaaatcatgagctcctaccaa

SEQ ID NO: 757142 - DNA, 25 bp, Homo sapien
taatgacagcatccagaaaccctgc

SEQ ID NO: 757143 - DNA, 25 bp, Homo sapien
tctaaatctaatccaaccataaggt

SEQ ID NO: 757144 - DNA, 25 bp, Homo sapien
tgtaaagagagccacgtggtgagct

SEQ ID NO: 757145 - DNA, 25 bp, Homo sapien
gaccatgcgtgtgaagcagcctgtg

SEQ ID NO: 757146 - DNA, 25 bp, Homo sapien
gctggacacagcgactacgggattc

SEQ ID NO: 757147 - DNA, 25 bp, Homo sapien
tgtgtcccaaagtgtgccatcagga

SEQ ID NO: 757148 - DNA, 25 bp, Homo sapien
ttttgctccaatgggctgggcgcga

SEQ ID NO: 757149 - DNA, 25 bp, Homo sapien
catgtgttcagatttccaggaaacg

SEQ ID NO: 757150 - DNA, 25 bp, Homo sapien
gcttgaagcttggattgaacagatc

SEQ ID NO: 757151 - DNA, 25 bp, Homo sapien
ttcacaaagcattgacaggtaggct

SEQ ID NO: 757152 - DNA, 25 bp, Homo sapien
gaccatcatgccttactgggctgca

SEQ ID NO: 757153 - DNA, 25 bp, Homo sapien
ggaacatatgctatcattaagattg

SEQ ID NO: 757154 - DNA, 25 bp, Homo sapien
gaactatgttcactcaagcaaaatg

SEQ ID NO: 757155 - DNA, 25 bp, Homo sapien
tttaataaattatggctgatcatac

SEQ ID NO: 757156 - DNA, 25 bp, Homo sapien
agccaggcgtgacggcacacacctt

SEQ ID NO: 757157 - DNA, 25 bp, Homo sapien
gccaggcgtgacggcacacaccttc

SEQ ID NO: 757158 - DNA, 25 bp, Homo sapien
ccaggcgtgacggcacacaccttca

SEQ ID NO: 757159 - DNA, 25 bp, Homo sapien
caggcgtgacggcacacaccttcag

SEQ ID NO: 757160 - DNA, 25 bp, Homo sapien
ttactgtagataaaagaggttgtgg

SEQ ID NO: 757161 - DNA, 25 bp, Homo sapien
cttcctagattgtcactagagatag

SEQ ID NO: 757162 - DNA, 25 bp, Homo sapien
caggctggttactgtagataaaaga

SEQ ID NO: 757163 - DNA, 25 bp, Homo sapien
tggcttcctgcaagtttgacttata

SEQ ID NO: 757164 - DNA, 25 bp, Homo sapien
ctcagtcccctcaacccctcatccc

SEQ ID NO: 757165 - DNA, 25 bp, Homo sapien
ccctcaaccccctcagtgctcagcc

SEQ ID NO: 757166 - DNA, 25 bp, Homo sapien
ctcaaaccctcagcccctcagtcct

SEQ ID NO: 757167 - DNA, 25 bp, Homo sapien
gtgctcagccccctcaaaccctcag

SEQ ID NO: 757168 - DNA, 25 bp, Homo sapien
gcccctcagccctcagcctcctcaa

SEQ ID NO: 757169 - DNA, 25 bp, Homo sapien
agcccctcagccctcagcctcctca

SEQ ID NO: 757170 - DNA, 25 bp, Homo sapien
ccctcagcccctcagccctcagcct

SEQ ID NO: 757171 - DNA, 25 bp, Homo sapien
ctcagcccctcagccctcagcctcc

SEQ ID NO: 757172 - DNA, 25 bp, Homo sapien
cggtcttcggcagtctagtcatcca

SEQ ID NO: 757173 - DNA, 25 bp, Homo sapien
tactccgtacttcgtagtcgcagcg

SEQ ID NO: 757174 - DNA, 25 bp, Homo sapien
tcttggctggcagacctgtactccg

SEQ ID NO: 757175 - DNA, 25 bp, Homo sapien
caccagtgattcttggagaccaagc

SEQ ID NO: 757176 - DNA, 25 bp, Homo sapien
gcgcgcgggagcagctccaactttt

SEQ ID NO: 757177 - DNA, 25 bp, Homo sapien
ctccgcccactcagcgcgcgcggga

SEQ ID NO: 757178 - DNA, 25 bp, Homo sapien
agcgcgcgcgggagcagctccaact

SEQ ID NO: 757179 - DNA, 25 bp, Homo sapien
gttcgctccgcccactcagcgcgcg

SEQ ID NO: 757180 - DNA, 25 bp, Homo sapien
gccagcagccgctacatgctcgacc

SEQ ID NO: 757181 - DNA, 25 bp, Homo sapien
gcagccgctacatgctcgacccggg

SEQ ID NO: 757182 - DNA, 25 bp, Homo sapien
agccgctacatgctcgacccgggcc

SEQ ID NO: 757183 - DNA, 25 bp, Homo sapien
gccagccgggcccgaagtctccgcc

SEQ ID NO: 757184 - DNA, 25 bp, Homo sapien
cttcttgcccttcttgccctcctct

SEQ ID NO: 757185 - DNA, 25 bp, Homo sapien
ttcttgcccttcttgccctcctctt

SEQ ID NO: 757186 - DNA, 25 bp, Homo sapien
tgcccttcttgccctcctcttccat

SEQ ID NO: 757187 - DNA, 25 bp, Homo sapien
cttgcccttcttgccctcctcttcc

SEQ ID NO: 757188 - DNA, 25 bp, Homo sapien
accacagcagtaggacgcccccgcg

SEQ ID NO: 757189 - DNA, 25 bp, Homo sapien
ccgaccacagcagtaggacgccccc

SEQ ID NO: 757190 - DNA, 25 bp, Homo sapien
cacagcagtaggacgcccccgcgca

SEQ ID NO: 757191 - DNA, 25 bp, Homo sapien
ccagccgcccgccgaccacagcagt

SEQ ID NO: 757192 - DNA, 25 bp, Homo sapien
cacccttgcttttactggatatcca

SEQ ID NO: 757193 - DNA, 25 bp, Homo sapien
gccaaatgtagctagcgtcactaaa

SEQ ID NO: 757194 - DNA, 25 bp, Homo sapien
caaaaacgaagtccagtgagcagca

SEQ ID NO: 757195 - DNA, 25 bp, Homo sapien
tagtggacgagtgagctggccataa

SEQ ID NO: 757196 - DNA, 25 bp, Homo sapien
ctggcagagtacacgaggtagtgtt

SEQ ID NO: 757197 - DNA, 25 bp, Homo sapien
cttgtctggcttgtctacaggaaac

SEQ ID NO: 757198 - DNA, 25 bp, Homo sapien
ggtagtgttaagtcatgacctggag

SEQ ID NO: 757199 - DNA, 25 bp, Homo sapien
tgtctggcttgtctacaggaaacaa

SEQ ID NO: 757200 - DNA, 25 bp, Homo sapien
agttattaaactggaggtgatctca

SEQ ID NO: 757201 - DNA, 25 bp, Homo sapien
atgagaatgatttaaccaccgaagt

SEQ ID NO: 757202 - DNA, 25 bp, Homo sapien
actggaggtgatctcacattgaatg

SEQ ID NO: 757203 - DNA, 25 bp, Homo sapien
tgagaatgatttaaccaccgaagtt

SEQ ID NO: 757204 - DNA, 25 bp, Homo sapien
tttggtccataggttctctgccaac

SEQ ID NO: 757205 - DNA, 25 bp, Homo sapien
tccataggttctctgccaactcact

SEQ ID NO: 757206 - DNA, 25 bp, Homo sapien
ggtccataggttctctgccaactca

SEQ ID NO: 757207 - DNA, 25 bp, Homo sapien
tggtccataggttctctgccaactc

SEQ ID NO: 757208 - DNA, 25 bp, Homo sapien
ccatgttgacagtgtagacttggtc

SEQ ID NO: 757209 - DNA, 25 bp, Homo sapien
gagggttgtcctgtcactctgagca

SEQ ID NO: 757210 - DNA, 25 bp, Homo sapien
tgagggttgtcctgtcactctgagc

SEQ ID NO: 757211 - DNA, 25 bp, Homo sapien
atgttgacagtgtagacttggtcct

SEQ ID NO: 757212 - DNA, 25 bp, Homo sapien
caacatgtgaaatggttatctccca

SEQ ID NO: 757213 - DNA, 25 bp, Homo sapien
gacaccacgggtttaggctgaccag

SEQ ID NO: 757214 - DNA, 25 bp, Homo sapien
taggtttcccttaagaacagtgaca

SEQ ID NO: 757215 - DNA, 25 bp, Homo sapien
gggatcactttcattgcacatacat

SEQ ID NO: 757216 - DNA, 25 bp, Homo sapien
aacccacatgctctgaacactagtc

SEQ ID NO: 757217 - DNA, 25 bp, Homo sapien
tccccacggtcagcatgagagagaa

SEQ ID NO: 757218 - DNA, 25 bp, Homo sapien
tagctagtatacttagagacacttg

SEQ ID NO: 757219 - DNA, 25 bp, Homo sapien
ggaagagacaggcacaggaacctac

SEQ ID NO: 757220 - DNA, 25 bp, Homo sapien
agagataactccattcccaggtggg

SEQ ID NO: 757221 - DNA, 25 bp, Homo sapien
tgaaattaaacagcgtgcctctggc

SEQ ID NO: 757222 - DNA, 25 bp, Homo sapien
tacctgcctcatacgaagggtggaa

SEQ ID NO: 757223 - DNA, 25 bp, Homo sapien
caggccgtgctgttggtgaagaccc

SEQ ID NO: 757224 - DNA, 25 bp, Homo sapien
ccctgtgtgaaattctgtttgagga

SEQ ID NO: 757225 - DNA, 25 bp, Homo sapien
ctggttcctcctctgccgacagcta

SEQ ID NO: 757226 - DNA, 25 bp, Homo sapien
tcctctgccgacagctactatgcat

SEQ ID NO: 757227 - DNA, 25 bp, Homo sapien
tcattctccatggaataccctgtgt

SEQ ID NO: 757228 - DNA, 25 bp, Homo sapien
cttagtgcccacaggaggccacact

SEQ ID NO: 757229 - DNA, 25 bp, Homo sapien
gccacactggcggtggccaggatcc

SEQ ID NO: 757230 - DNA, 25 bp, Homo sapien
ggaggccacactggcggtggccagg

SEQ ID NO: 757231 - DNA, 25 bp, Homo sapien
gaggccacactggcggtggccagga

SEQ ID NO: 757232 - DNA, 25 bp, Homo sapien
ccggctgacagagcgaatttcaagg

SEQ ID NO: 757233 - DNA, 25 bp, Homo sapien
cactgtacccggctgacagagcgaa

SEQ ID NO: 757234 - DNA, 25 bp, Homo sapien
cactaccgcctgtttgcttcagtga

SEQ ID NO: 757235 - DNA, 25 bp, Homo sapien
gctctgcccactaccgcctgtttgc

SEQ ID NO: 757236 - DNA, 25 bp, Homo sapien
cagatgccaactgcgggtcttgagt

SEQ ID NO: 757237 - DNA, 25 bp, Homo sapien
gcagcgctgtgcaaagacatccata

SEQ ID NO: 757238 - DNA, 25 bp, Homo sapien
cacagggctctgagtcaccatgcag

SEQ ID NO: 757239 - DNA, 25 bp, Homo sapien
cccagaaggaaaccaggctaagtgc

SEQ ID NO: 757240 - DNA, 25 bp, Homo sapien
ccattcagcacggaatgcagggtag

SEQ ID NO: 757241 - DNA, 25 bp, Homo sapien
tgatggggcttttcagaggtaatgt

SEQ ID NO: 757242 - DNA, 25 bp, Homo sapien
attcagcacggaatgcagggtagct

SEQ ID NO: 757243 - DNA, 25 bp, Homo sapien
cagcacggaatgcagggtagctgct

SEQ ID NO: 757244 - DNA, 25 bp, Homo sapien
acgcttggaccaggctaggcatctg

SEQ ID NO: 757245 - DNA, 25 bp, Homo sapien
caataaacgctggtactgactcttg

SEQ ID NO: 757246 - DNA, 25 bp, Homo sapien
gactcttgatggaacgcttggacca

SEQ ID NO: 757247 - DNA, 25 bp, Homo sapien
gactggacagcaataaacgctggta

SEQ ID NO: 757248 - DNA, 25 bp, Homo sapien
gcaacagggatcactgactgccaga

SEQ ID NO: 757249 - DNA, 25 bp, Homo sapien
ctatggttaacaaacagaagtagcc

SEQ ID NO: 757250 - DNA, 25 bp, Homo sapien
tgctttgtgttgtacctatggttaa

SEQ ID NO: 757251 - DNA, 25 bp, Homo sapien
tgcaggcagaaacggcaatgattgg

SEQ ID NO: 757252 - DNA, 25 bp, Homo sapien
tatagtcgctcagcagtctgtctgg

SEQ ID NO: 757253 - DNA, 25 bp, Homo sapien
gtttaaatggcgagacaattccagg

SEQ ID NO: 757254 - DNA, 25 bp, Homo sapien
gctcgacgcgctcaggcaatgacaa

SEQ ID NO: 757255 - DNA, 25 bp, Homo sapien
acagtgtgcagagggcgcctctctg

SEQ ID NO: 757256 - DNA, 25 bp, Homo sapien
cgtcctgtggcccatgacgacttac

SEQ ID NO: 757257 - DNA, 25 bp, Homo sapien
tcactgtcgtttggcaggcacgtcc

SEQ ID NO: 757258 - DNA, 25 bp, Homo sapien
caggcacgtcctgtggcccatgacg

SEQ ID NO: 757259 - DNA, 25 bp, Homo sapien
ggcacgtcctgtggcccatgacgac

SEQ ID NO: 757260 - DNA, 25 bp, Homo sapien
tgatgagcctcaaacacatggtctg

SEQ ID NO: 757261 - DNA, 25 bp, Homo sapien
agaccccttgggctatgaatccgtg

SEQ ID NO: 757262 - DNA, 25 bp, Homo sapien
tcctctgcaggaactcgggtctggc

SEQ ID NO: 757263 - DNA, 25 bp, Homo sapien
caagacaatgggtgggataatcaac

SEQ ID NO: 757264 - DNA, 25 bp, Homo sapien
tctggaagagtatgtagaattgaca

SEQ ID NO: 757265 - DNA, 25 bp, Homo sapien
ggcaatactgcccttacaaaatgag

SEQ ID NO: 757266 - DNA, 25 bp, Homo sapien
tcagggcaatactgcccttacaaaa

SEQ ID NO: 757267 - DNA, 25 bp, Homo sapien
tgcccttacaaaatgagtcagaaaa

SEQ ID NO: 757268 - DNA, 25 bp, Homo sapien
cccagaaggcattgggaagagtaaa

SEQ ID NO: 757269 - DNA, 25 bp, Homo sapien
ctgtggaacacagacctcaagcact

SEQ ID NO: 757270 - DNA, 25 bp, Homo sapien
gaatgaattcataagacggagagtg

SEQ ID NO: 757271 - DNA, 25 bp, Homo sapien
ctaaacaactaattctggagggaga

SEQ ID NO: 757272 - DNA, 25 bp, Homo sapien
tgtcacttctagctgcacctagcag

SEQ ID NO: 757273 - DNA, 25 bp, Homo sapien
ccaaggtgattcaagttcccatgca

SEQ ID NO: 757274 - DNA, 25 bp, Homo sapien
cacctagcagctataacgatagtgg

SEQ ID NO: 757275 - DNA, 25 bp, Homo sapien
ttcccatgcacaatagcagggcctg

SEQ ID NO: 757276 - DNA, 25 bp, Homo sapien
gcgtagccctgcatcctgaagattt

SEQ ID NO: 757277 - DNA, 25 bp, Homo sapien
tatactgtagataccaaccctctgt

SEQ ID NO: 757278 - DNA, 25 bp, Homo sapien
aatgatacagggagatccatcgctc

SEQ ID NO: 757279 - DNA, 25 bp, Homo sapien
actgctttctagagtggcggtacca

SEQ ID NO: 757280 - DNA, 25 bp, Homo sapien
acagagtcctcacgtatgcactgac

SEQ ID NO: 757281 - DNA, 25 bp, Homo sapien
cactcggcgataaatcaagatacac

SEQ ID NO: 757282 - DNA, 25 bp, Homo sapien
caacccacagttgcttgactcaggt

SEQ ID NO: 757283 - DNA, 25 bp, Homo sapien
tgtgtgctaatgtgaacactcggcg

SEQ ID NO: 757284 - DNA, 25 bp, Homo sapien
tctggatagaatgaacttaacgtga

SEQ ID NO: 757285 - DNA, 25 bp, Homo sapien
tagttgctacatggtgctatgtccc

SEQ ID NO: 757286 - DNA, 25 bp, Homo sapien
gaaaggtttccagaaatcatgacca

SEQ ID NO: 757287 - DNA, 25 bp, Homo sapien
gagatgacaccctgaaaggatgccc

SEQ ID NO: 757288 - DNA, 25 bp, Homo sapien
tagctgggtaaatgcctttgagaac

SEQ ID NO: 757289 - DNA, 25 bp, Homo sapien
caccggctacgggatgtgtctaacg

SEQ ID NO: 757290 - DNA, 25 bp, Homo sapien
tctaacgagttctgacagagctggg

SEQ ID NO: 757291 - DNA, 25 bp, Homo sapien
gagagatcttctctactacggcatg

SEQ ID NO: 757292 - DNA, 25 bp, Homo sapien
tgattcacaatcaactaaagcaaga

SEQ ID NO: 757293 - DNA, 25 bp, Homo sapien
ggagaggcattgtccaacaggaaca

SEQ ID NO: 757294 - DNA, 25 bp, Homo sapien
ccaaatgtgatctacacatacaatg

SEQ ID NO: 757295 - DNA, 25 bp, Homo sapien
cctgtgaaaagcaatatggtggttc

SEQ ID NO: 757296 - DNA, 25 bp, Homo sapien
ttaataattatacaccacgaccagg

SEQ ID NO: 757297 - DNA, 25 bp, Homo sapien
caaatatcaatcgtagcgggggcag

SEQ ID NO: 757298 - DNA, 25 bp, Homo sapien
ggtgtgcaaggctaattcaatgttc

SEQ ID NO: 757299 - DNA, 25 bp, Homo sapien
ggcaggatttatcccaggtgtgcaa

SEQ ID NO: 757300 - DNA, 25 bp, Homo sapien
tgactgtagcctaaggataaatgaa

SEQ ID NO: 757301 - DNA, 25 bp, Homo sapien
taaaatttgtgtattgggtgactgt

SEQ ID NO: 757302 - DNA, 25 bp, Homo sapien
cttggttacaaggtatttgcactac

SEQ ID NO: 757303 - DNA, 25 bp, Homo sapien
gaatgtatattgcaaaccctaaggc

SEQ ID NO: 757304 - DNA, 25 bp, Homo sapien
acaagaatgacactggatttctctt

SEQ ID NO: 757305 - DNA, 25 bp, Homo sapien
agaggagggaactatttgattctgt

SEQ ID NO: 757306 - DNA, 25 bp, Homo sapien
cttcaggaaccatccaagcaagaag

SEQ ID NO: 757307 - DNA, 25 bp, Homo sapien
tttctcttcaggaaccatccaagca

SEQ ID NO: 757308 - DNA, 25 bp, Homo sapien
gagccaagactgcgccattatactc

SEQ ID NO: 757309 - DNA, 25 bp, Homo sapien
ccaagactgcgccattatactccag

SEQ ID NO: 757310 - DNA, 25 bp, Homo sapien
gccaagactgcgccattatactcca

SEQ ID NO: 757311 - DNA, 25 bp, Homo sapien
gtgagccaagactgcgccattatac

SEQ ID NO: 757312 - DNA, 25 bp, Homo sapien
cattgtctatgaaatgcaggatttc

SEQ ID NO: 757313 - DNA, 25 bp, Homo sapien
caggatttcagtcctactggaggga

SEQ ID NO: 757314 - DNA, 25 bp, Homo sapien
ctggagggattcaggtatcctggta

SEQ ID NO: 757315 - DNA, 25 bp, Homo sapien
cctggtatggacgttaactgaccta

SEQ ID NO: 757316 - DNA, 25 bp, Homo sapien
cctgagtcaagtgtcccggaagctg

SEQ ID NO: 757317 - DNA, 25 bp, Homo sapien
gcgatgtcatggatgggcaccctga

SEQ ID NO: 757318 - DNA, 25 bp, Homo sapien
ccaggccagcttgacgttgtacgca

SEQ ID NO: 757319 - DNA, 25 bp, Homo sapien
tgtgcagcgtcatcccgaacatagg

SEQ ID NO: 757320 - DNA, 25 bp, Homo sapien
ccaaaggctcttagtgtgacagtca

SEQ ID NO: 757321 - DNA, 25 bp, Homo sapien
gaaattaacgggcagcttgggcttg

SEQ ID NO: 757322 - DNA, 25 bp, Homo sapien
tacccagagggagtcaataggagcc

SEQ ID NO: 757323 - DNA, 25 bp, Homo sapien
tcctgggaggtctgggtctcatctt

SEQ ID NO: 757324 - DNA, 25 bp, Homo sapien
gtagaaaaacaggagggtcaccatg

SEQ ID NO: 757325 - DNA, 25 bp, Homo sapien
tccctaaggatgtcccaggcctaag

SEQ ID NO: 757326 - DNA, 25 bp, Homo sapien
ggaaagtttctcctatggcgctcat

SEQ ID NO: 757327 - DNA, 25 bp, Homo sapien
tgcaagaagcgagtcagaaaccagt

SEQ ID NO: 757328 - DNA, 25 bp, Homo sapien
tggaccctattgcagctagacctgg

SEQ ID NO: 757329 - DNA, 25 bp, Homo sapien
taatcctaaatacagcatggcggcc

SEQ ID NO: 757330 - DNA, 25 bp, Homo sapien
cctgtggtagttctcaaggaagcag

SEQ ID NO: 757331 - DNA, 25 bp, Homo sapien
tatcatccaggaagtgctaccacgg

SEQ ID NO: 757332 - DNA, 25 bp, Homo sapien
gagaggacctttacctggctcaggc

SEQ ID NO: 757333 - DNA, 25 bp, Homo sapien
tctcagtttagcacagtggaagggc

SEQ ID NO: 757334 - DNA, 25 bp, Homo sapien
aagtgccactagtgccagggtgtca

SEQ ID NO: 757335 - DNA, 25 bp, Homo sapien
cacagaacgactcaggtgaagggcc

SEQ ID NO: 757336 - DNA, 25 bp, Homo sapien
ctctggaactttccgcacacagact

SEQ ID NO: 757337 - DNA, 25 bp, Homo sapien
atgaccaggcagcatgcctccacgg

SEQ ID NO: 757338 - DNA, 25 bp, Homo sapien
aggatgaccaggcagcatgcctcca

SEQ ID NO: 757339 - DNA, 25 bp, Homo sapien
tttccgcacacagactctggctggg

SEQ ID NO: 757340 - DNA, 25 bp, Homo sapien
aaacaacctggaagacctggcctag

SEQ ID NO: 757341 - DNA, 25 bp, Homo sapien
tggtggactccgtgtaaacaacctg

SEQ ID NO: 757342 - DNA, 25 bp, Homo sapien
ggtagaggccccatcaaatatcgct

SEQ ID NO: 757343 - DNA, 25 bp, Homo sapien
ccagaaagtcgatggtggactccgt

SEQ ID NO: 757344 - DNA, 25 bp, Homo sapien
gaagccatagcgctgacctggtgca

SEQ ID NO: 757345 - DNA, 25 bp, Homo sapien
gagtttcacattaagagcagccata

SEQ ID NO: 757346 - DNA, 25 bp, Homo sapien
tctctcaaggacaggtgacacttct

SEQ ID NO: 757347 - DNA, 25 bp, Homo sapien
gcatactgaaaaggaggctccccag

SEQ ID NO: 757348 - DNA, 25 bp, Homo sapien
cattcctctggataagctgttgact

SEQ ID NO: 757349 - DNA, 25 bp, Homo sapien
tgctgggccaacacaaggcgtgtag

SEQ ID NO: 757350 - DNA, 25 bp, Homo sapien
tgaagattgcacctatctcgctggg

SEQ ID NO: 757351 - DNA, 25 bp, Homo sapien
cagtgggacccacaatggactctta

SEQ ID NO: 757352 - DNA, 25 bp, Homo sapien
agagtcctgaaatgcagaggaagct

SEQ ID NO: 757353 - DNA, 25 bp, Homo sapien
tgcaagagtcctgaaatgcagagga

SEQ ID NO: 757354 - DNA, 25 bp, Homo sapien
tgggctcaatgtgattgcaagagtc

SEQ ID NO: 757355 - DNA, 25 bp, Homo sapien
tgtgattgcaagagtcctgaaatgc

SEQ ID NO: 757356 - DNA, 25 bp, Homo sapien
gtatttacaggagacagcggcagcc

SEQ ID NO: 757357 - DNA, 25 bp, Homo sapien
gaagtacacattcacccatggccag

SEQ ID NO: 757358 - DNA, 25 bp, Homo sapien
gaggtatcactcatgtgccaggcag

SEQ ID NO: 757359 - DNA, 25 bp, Homo sapien
gacattaggtccgtgtgacacagac

SEQ ID NO: 757360 - DNA, 25 bp, Homo sapien
ccttaatgtccacttttgtagaaga

SEQ ID NO: 757361 - DNA, 25 bp, Homo sapien
ttaatgtccacttttgtagaagagt

SEQ ID NO: 757362 - DNA, 25 bp, Homo sapien
taatgtccacttttgtagaagagtc

SEQ ID NO: 757363 - DNA, 25 bp, Homo sapien
cttaatgtccacttttgtagaagag

SEQ ID NO: 757364 - DNA, 25 bp, Homo sapien
agtgggtgaactactacagagcccc

SEQ ID NO: 757365 - DNA, 25 bp, Homo sapien
tacacaggtcaaggcagtgggcagc

SEQ ID NO: 757366 - DNA, 25 bp, Homo sapien
gaaacctagtccatgccgtgtgtgt

SEQ ID NO: 757367 - DNA, 25 bp, Homo sapien
atttggtgcgtgtcccaccgcaggg

SEQ ID NO: 757368 - DNA, 25 bp, Homo sapien
cccacatccacagattcagggaagc

SEQ ID NO: 757369 - DNA, 25 bp, Homo sapien
ctgtggggtgatgcaccacccacat

SEQ ID NO: 757370 - DNA, 25 bp, Homo sapien
cacccacatccacagattcagggaa

SEQ ID NO: 757371 - DNA, 25 bp, Homo sapien
cacatccacagattcagggaagcag

SEQ ID NO: 757372 - DNA, 25 bp, Homo sapien
gcagctcagtggcgctggcgctcag

SEQ ID NO: 757373 - DNA, 25 bp, Homo sapien
agctcagtggcgctggcgctcagct

SEQ ID NO: 757374 - DNA, 25 bp, Homo sapien
ctcagtggcgctggcgctcagctcg

SEQ ID NO: 757375 - DNA, 25 bp, Homo sapien
tcagtggcgctggcgctcagctcgc

SEQ ID NO: 757376 - DNA, 25 bp, Homo sapien
tcctgagctggaacacagagtgcat

SEQ ID NO: 757377 - DNA, 25 bp, Homo sapien
cacagtaggcaagagtcggcagtcg

SEQ ID NO: 757378 - DNA, 25 bp, Homo sapien
gatgctctcctagactatccccagg

SEQ ID NO: 757379 - DNA, 25 bp, Homo sapien
tatccccaggaaaaggcagtgatgt

SEQ ID NO: 757380 - DNA, 25 bp, Homo sapien
caagagagcagagccagataggggg

SEQ ID NO: 757381 - DNA, 25 bp, Homo sapien
tgcaagagagcagagccagataggg

SEQ ID NO: 757382 - DNA, 25 bp, Homo sapien
ctgcaagagagcagagccagatagg

SEQ ID NO: 757383 - DNA, 25 bp, Homo sapien
gcaagagagcagagccagatagggg

SEQ ID NO: 757384 - DNA, 25 bp, Homo sapien
tgcagaactcgtggatagaggcccc

SEQ ID NO: 757385 - DNA, 25 bp, Homo sapien
tagagctgccgcaggttgatgcaga

SEQ ID NO: 757386 - DNA, 25 bp, Homo sapien
cattgcggtactcgtgcagcagtgc

SEQ ID NO: 757387 - DNA, 25 bp, Homo sapien
aacttgcggctgtccccgtagagct

SEQ ID NO: 757388 - DNA, 25 bp, Homo sapien
ctgtcagtgatgatgccgcggccat

SEQ ID NO: 757389 - DNA, 25 bp, Homo sapien
gaagttctcgaagtgctggctgtcc

SEQ ID NO: 757390 - DNA, 25 bp, Homo sapien
caatggtctccaggaagttctcgaa

SEQ ID NO: 757391 - DNA, 25 bp, Homo sapien
atccttcacgccaatggtctccagg

SEQ ID NO: 757392 - DNA, 25 bp, Homo sapien
ggtgccgaccggtcatcagagctgc

SEQ ID NO: 757393 - DNA, 25 bp, Homo sapien
ccctctgagggtgccgaccggtcat

SEQ ID NO: 757394 - DNA, 25 bp, Homo sapien
gtccgagatcatgcggtcccactca

SEQ ID NO: 757395 - DNA, 25 bp, Homo sapien
cagcgcctcaatgtcgctgctgatg

SEQ ID NO: 757396 - DNA, 25 bp, Homo sapien
ctatgacgactgcgcggaaggtgtg

SEQ ID NO: 757397 - DNA, 25 bp, Homo sapien
gacgactgcgcggaaggtgtgggtg

SEQ ID NO: 757398 - DNA, 25 bp, Homo sapien
tgacgactgcgcggaaggtgtgggt

SEQ ID NO: 757399 - DNA, 25 bp, Homo sapien
tatgacgactgcgcggaaggtgtgg

SEQ ID NO: 757400 - DNA, 25 bp, Homo sapien
ccgcactgaggctcgtgtccctcgg

SEQ ID NO: 757401 - DNA, 25 bp, Homo sapien
ggacaaggcaaagagccttccaccc

SEQ ID NO: 757402 - DNA, 25 bp, Homo sapien
tgctccttcacagtagaggacctgg

SEQ ID NO: 757403 - DNA, 25 bp, Homo sapien
accaagggctgacacgcaggtctgg

SEQ ID NO: 757404 - DNA, 25 bp, Homo sapien
caataggaacatcatgtgcaaaact

SEQ ID NO: 757405 - DNA, 25 bp, Homo sapien
gcaaaactgacagccgtccaagggc

SEQ ID NO: 757406 - DNA, 25 bp, Homo sapien
aagggcccagccgacaggactggct

SEQ ID NO: 757407 - DNA, 25 bp, Homo sapien
aacttctttttaaggtctctgagag

SEQ ID NO: 757408 - DNA, 25 bp, Homo sapien
tcactccctgatgtcccattactcc

SEQ ID NO: 757409 - DNA, 25 bp, Homo sapien
ctagcaaagaccagcgactgcagca

SEQ ID NO: 757410 - DNA, 25 bp, Homo sapien
tctttctgctagcaaagaccagcga

SEQ ID NO: 757411 - DNA, 25 bp, Homo sapien
tctactctttctgctagcaaagacc

SEQ ID NO: 757412 - DNA, 25 bp, Homo sapien
accctctcgtgcccctcattactct

SEQ ID NO: 757413 - DNA, 25 bp, Homo sapien
cagtactctctggcgtcccttcact

SEQ ID NO: 757414 - DNA, 25 bp, Homo sapien
caccaccctctcgtgcccctcatta

SEQ ID NO: 757415 - DNA, 25 bp, Homo sapien
gtactctctggcgtcccttcactgc

SEQ ID NO: 757416 - DNA, 25 bp, Homo sapien
tcccaatactctccggtgtcccttc

SEQ ID NO: 757417 - DNA, 25 bp, Homo sapien
ccaatactctccggtgtcccttcac

SEQ ID NO: 757418 - DNA, 25 bp, Homo sapien
tgtcccaatactctccggtgtccct

SEQ ID NO: 757419 - DNA, 25 bp, Homo sapien
ggtgtcccctcaccgccttctgacg

SEQ ID NO: 757420 - DNA, 25 bp, Homo sapien
ctggtgtcccctcaccgccttctga

SEQ ID NO: 757421 - DNA, 25 bp, Homo sapien
tcaccgccttctgacgtcccctcat

SEQ ID NO: 757422 - DNA, 25 bp, Homo sapien
accgccttctgacgtcccctcatta

SEQ ID NO: 757423 - DNA, 25 bp, Homo sapien
ctcaccgccttctgatatctcacca

SEQ ID NO: 757424 - DNA, 25 bp, Homo sapien
gatatctcaccaccttctgatgtgc

SEQ ID NO: 757425 - DNA, 25 bp, Homo sapien
cctcaccgccttctgatatctcacc

SEQ ID NO: 757426 - DNA, 25 bp, Homo sapien
tatctcaccaccttctgatgtgccc

SEQ ID NO: 757427 - DNA, 25 bp, Homo sapien
ataaatcggtgtcccttcattgccc

SEQ ID NO: 757428 - DNA, 25 bp, Homo sapien
tcaatactccccggtgtaccttcac

SEQ ID NO: 757429 - DNA, 25 bp, Homo sapien
tcaataaatcggtgtcccttcattg

SEQ ID NO: 757430 - DNA, 25 bp, Homo sapien
ctcaatactccccggtgtaccttca

SEQ ID NO: 757431 - DNA, 25 bp, Homo sapien
cagaggggcctatctgtcccagaga

SEQ ID NO: 757432 - DNA, 25 bp, Homo sapien
ctcacactctgcaggtagccccagg

SEQ ID NO: 757433 - DNA, 25 bp, Homo sapien
cagatgatgagaggctgtacagcgg

SEQ ID NO: 757434 - DNA, 25 bp, Homo sapien
cccagagacaggaattgatctcaga

SEQ ID NO: 757435 - DNA, 25 bp, Homo sapien
gggcatggacgaggcttttgccttc

SEQ ID NO: 757436 - DNA, 25 bp, Homo sapien
cacggagggcatggacgaggctttt

SEQ ID NO: 757437 - DNA, 25 bp, Homo sapien
ctgtccatcacggagggcatggacg

SEQ ID NO: 757438 - DNA, 25 bp, Homo sapien
tttgccttccgggacgacacctctg

SEQ ID NO: 757439 - DNA, 25 bp, Homo sapien
gacttcctggccaatgacccaatga

SEQ ID NO: 757440 - DNA, 25 bp, Homo sapien
gagggccacttcttcgacctggact

SEQ ID NO: 757441 - DNA, 25 bp, Homo sapien
tgacaccgctatccccagaggaaga

SEQ ID NO: 757442 - DNA, 25 bp, Homo sapien
gtggatgaacgagagctgcacccag

SEQ ID NO: 757443 - DNA, 25 bp, Homo sapien
ggaagttctccctcaaacgcagcgt

SEQ ID NO: 757444 - DNA, 25 bp, Homo sapien
gggctcctacattacggccgatggg

SEQ ID NO: 757445 - DNA, 25 bp, Homo sapien
ggtgtccttgagaaaagccgccaga

SEQ ID NO: 757446 - DNA, 25 bp, Homo sapien
tgggccctatgcagccggaattcat

SEQ ID NO: 757447 - DNA, 25 bp, Homo sapien
tgcgcgcgtcgtgctggtgccacct

SEQ ID NO: 757448 - DNA, 25 bp, Homo sapien
gaagcccagagtgttcgagctgcgc

SEQ ID NO: 757449 - DNA, 25 bp, Homo sapien
gcctggtgaaaccctgacatgttgg

SEQ ID NO: 757450 - DNA, 25 bp, Homo sapien
catgttggcctcaagtgtaggtagc

SEQ ID NO: 757451 - DNA, 25 bp, Homo sapien
aaatacaggccagtaagagtccagg

SEQ ID NO: 757452 - DNA, 25 bp, Homo sapien
tcaggcatgcaagaacccaaaggac

SEQ ID NO: 757453 - DNA, 25 bp, Homo sapien
tggatgcttcaaacagaggtgcctt

SEQ ID NO: 757454 - DNA, 25 bp, Homo sapien
tgttggccctctgaagctgtcctgt

SEQ ID NO: 757455 - DNA, 25 bp, Homo sapien
gggtcctcagttgcacccggtctgt

SEQ ID NO: 757456 - DNA, 25 bp, Homo sapien
catcccgttgtttgcaccgagctgc

SEQ ID NO: 757457 - DNA, 25 bp, Homo sapien
cagtacgatcaggtgaccaccggga

SEQ ID NO: 757458 - DNA, 25 bp, Homo sapien
ggccaggtggtggaataaagcctaa

SEQ ID NO: 757459 - DNA, 25 bp, Homo sapien
catgattttggagcaattgtaagtg

SEQ ID NO: 757460 - DNA, 25 bp, Homo sapien
attcacacattgattgttagcatat

SEQ ID NO: 757461 - DNA, 25 bp, Homo sapien
ggtgtagtgcttaattttggcattc

SEQ ID NO: 757462 - DNA, 25 bp, Homo sapien
cctgaaaacaggaatgtatttatcc

SEQ ID NO: 757463 - DNA, 25 bp, Homo sapien
gggactttgtggcacctcaccttgc

SEQ ID NO: 757464 - DNA, 25 bp, Homo sapien
caagtactgacctagggagctgcag

SEQ ID NO: 757465 - DNA, 25 bp, Homo sapien
ctgctggacagtgacggcgagtttc

SEQ ID NO: 757466 - DNA, 25 bp, Homo sapien
catggctgttggactgcatattctt

SEQ ID NO: 757467 - DNA, 25 bp, Homo sapien
tattcagggccaatgagtgaccaca

SEQ ID NO: 757468 - DNA, 25 bp, Homo sapien
atacactggtttggctccaaaagac

SEQ ID NO: 757469 - DNA, 25 bp, Homo sapien
cccgaggcagtcagattatagtttg

SEQ ID NO: 757470 - DNA, 25 bp, Homo sapien
aaagccttaagtgttcccgaggcag

SEQ ID NO: 757471 - DNA, 25 bp, Homo sapien
cctgagacacaggtatgggaaaggt

SEQ ID NO: 757472 - DNA, 25 bp, Homo sapien
tgggtcaacaggtcccgtggaggcc

SEQ ID NO: 757473 - DNA, 25 bp, Homo sapien
cgtggaggccctgtcaatgatgcac

SEQ ID NO: 757474 - DNA, 25 bp, Homo sapien
caggtatgggaaaggtgggtcaaca

SEQ ID NO: 757475 - DNA, 25 bp, Homo sapien
aaaggcctctccactaggttctgga

SEQ ID NO: 757476 - DNA, 25 bp, Homo sapien
aaggcctctccactaggttctggag

SEQ ID NO: 757477 - DNA, 25 bp, Homo sapien
gcctctccactaggttctggagaca

SEQ ID NO: 757478 - DNA, 25 bp, Homo sapien
aggcctctccactaggttctggaga

SEQ ID NO: 757479 - DNA, 25 bp, Homo sapien
ccagagagtgcatgatgccttctac

SEQ ID NO: 757480 - DNA, 25 bp, Homo sapien
gccttctacggctgctaatttaaaa

SEQ ID NO: 757481 - DNA, 25 bp, Homo sapien
ctttctgtgtatctgtcccgggctc

SEQ ID NO: 757482 - DNA, 25 bp, Homo sapien
tctgctcgacagaaaccatctctct

SEQ ID NO: 757483 - DNA, 25 bp, Homo sapien
tggcatatgagggtggcctcatcca

SEQ ID NO: 757484 - DNA, 25 bp, Homo sapien
agctctaggtcaggggttccaaaca

SEQ ID NO: 757485 - DNA, 25 bp, Homo sapien
tgggttctgggctaaccgtccaagc

SEQ ID NO: 757486 - DNA, 25 bp, Homo sapien
ctttctggcatatgagggtggcctc

SEQ ID NO: 757487 - DNA, 25 bp, Homo sapien
gcagagcaggccgtgtgccccgagg

SEQ ID NO: 757488 - DNA, 25 bp, Homo sapien
gtcaaaacctgcctcacctacaatg

SEQ ID NO: 757489 - DNA, 25 bp, Homo sapien
aggtgccctgcgtcaaaacctgcct

SEQ ID NO: 757490 - DNA, 25 bp, Homo sapien
tcctccgaggaggtgccctgcgtca

SEQ ID NO: 757491 - DNA, 25 bp, Homo sapien
agcagggctgtatttccacgtggag

SEQ ID NO: 757492 - DNA, 25 bp, Homo sapien
aagcagggctgtatttccacgtgga

SEQ ID NO: 757493 - DNA, 25 bp, Homo sapien
gaaaagcagggctgtatttccacgt

SEQ ID NO: 757494 - DNA, 25 bp, Homo sapien
cagggctgtatttccacgtggaggc

SEQ ID NO: 757495 - DNA, 25 bp, Homo sapien
ttgcagctcataagcagaaggcatc

SEQ ID NO: 757496 - DNA, 25 bp, Homo sapien
gcttgcagctcataagcagaaggca

SEQ ID NO: 757497 - DNA, 25 bp, Homo sapien
gagcttgcagctcataagcagaagg

SEQ ID NO: 757498 - DNA, 25 bp, Homo sapien
gcagctcataagcagaaggcatctc

SEQ ID NO: 757499 - DNA, 25 bp, Homo sapien
caaatccactcatgatgtaggtagg

SEQ ID NO: 757500 - DNA, 25 bp, Homo sapien
aagggccaccaaggcctgccagtaa

SEQ ID NO: 757501 - DNA, 25 bp, Homo sapien
tgtgtgtgtagctcccttcccggga

SEQ ID NO: 757502 - DNA, 25 bp, Homo sapien
gcatcggcgacagaaggactcagat

SEQ ID NO: 757503 - DNA, 25 bp, Homo sapien
gagagcagacgaaggtcgtggaaga

SEQ ID NO: 757504 - DNA, 25 bp, Homo sapien
agtcgaagtaggccatttgctgctg

SEQ ID NO: 757505 - DNA, 25 bp, Homo sapien
gagcagacgaaggtcgtggaagagt

SEQ ID NO: 757506 - DNA, 25 bp, Homo sapien
tgaagtcgaagtaggccatttgctg

SEQ ID NO: 757507 - DNA, 25 bp, Homo sapien
gccagtgggacatccaacccacctg

SEQ ID NO: 757508 - DNA, 25 bp, Homo sapien
agccagtgggacatccaacccacct

SEQ ID NO: 757509 - DNA, 25 bp, Homo sapien
gagccagtgggacatccaacccacc

SEQ ID NO: 757510 - DNA, 25 bp, Homo sapien
caacccacctgccaatgaccacagg

SEQ ID NO: 757511 - DNA, 25 bp, Homo sapien
cctcagtagggccttaggcccactg

SEQ ID NO: 757512 - DNA, 25 bp, Homo sapien
caccgctagagaaaggacggccaag

SEQ ID NO: 757513 - DNA, 25 bp, Homo sapien
gaaccaggcctcagtagggccttag

SEQ ID NO: 757514 - DNA, 25 bp, Homo sapien
gctctgccaccgctagagaaaggac

SEQ ID NO: 757515 - DNA, 25 bp, Homo sapien
ccgctggctgtaaaagcccttttgc

SEQ ID NO: 757516 - DNA, 25 bp, Homo sapien
cgctggctgtaaaagcccttttgcc

SEQ ID NO: 757517 - DNA, 25 bp, Homo sapien
tccgctggctgtaaaagcccttttg

SEQ ID NO: 757518 - DNA, 25 bp, Homo sapien
gctccgctggctgtaaaagcccttt

SEQ ID NO: 757519 - DNA, 25 bp, Homo sapien
tcatccgaggcatgcaccgtttctc

SEQ ID NO: 757520 - DNA, 25 bp, Homo sapien
taggcaaagtctgctttaggacagc

SEQ ID NO: 757521 - DNA, 25 bp, Homo sapien
ttctcgttgggctttaggcaaagtc

SEQ ID NO: 757522 - DNA, 25 bp, Homo sapien
gtggggccagccctcatccgaggca

SEQ ID NO: 757523 - DNA, 25 bp, Homo sapien
ccatcctccacaatgcagtgtacat

SEQ ID NO: 757524 - DNA, 25 bp, Homo sapien
acggctccacccagaagccgccctc

SEQ ID NO: 757525 - DNA, 25 bp, Homo sapien
tgtgagagtgaggtcccatcctcca

SEQ ID NO: 757526 - DNA, 25 bp, Homo sapien
ccacaatgcagtgtacatttgccat

SEQ ID NO: 757527 - DNA, 25 bp, Homo sapien
cccagaccacgcctgcggccgtgcc

SEQ ID NO: 757528 - DNA, 25 bp, Homo sapien
acgcctgcggccgtgccccgttgcc

SEQ ID NO: 757529 - DNA, 25 bp, Homo sapien
gtgccccgttgcctccagatgtggg

SEQ ID NO: 757530 - DNA, 25 bp, Homo sapien
cggccgtgccccgttgcctccagat

SEQ ID NO: 757531 - DNA, 25 bp, Homo sapien
cagctgggtcacgctcggtcccgct

SEQ ID NO: 757532 - DNA, 25 bp, Homo sapien
ggtcacgctcggtcccgctgggggc

SEQ ID NO: 757533 - DNA, 25 bp, Homo sapien
agctgggtcacgctcggtcccgctg

SEQ ID NO: 757534 - DNA, 25 bp, Homo sapien
ctgggtcacgctcggtcccgctggg

SEQ ID NO: 757535 - DNA, 25 bp, Homo sapien
agaagttgcgggcgccgcagcgctc

SEQ ID NO: 757536 - DNA, 25 bp, Homo sapien
gagaagttgcgggcgccgcagcgct

SEQ ID NO: 757537 - DNA, 25 bp, Homo sapien
ggagaagttgcgggcgccgcagcgc

SEQ ID NO: 757538 - DNA, 25 bp, Homo sapien
gataaggggtaaagagccagacctg

SEQ ID NO: 757539 - DNA, 25 bp, Homo sapien
gggtaaagagccagacctggtccac

SEQ ID NO: 757540 - DNA, 25 bp, Homo sapien
taaagagccagacctggtccacctc

SEQ ID NO: 757541 - DNA, 25 bp, Homo sapien
aagagccagacctggtccacctctt

SEQ ID NO: 757542 - DNA, 25 bp, Homo sapien
acaggtcggcattgatcctgggaag

SEQ ID NO: 757543 - DNA, 25 bp, Homo sapien
tctggagtacaggtcggcattgatc

SEQ ID NO: 757544 - DNA, 25 bp, Homo sapien
agctccatgtcaagcctgggctctg

SEQ ID NO: 757545 - DNA, 25 bp, Homo sapien
tggagtggccccacttagccctggt

SEQ ID NO: 757546 - DNA, 25 bp, Homo sapien
gctgaccccaggttctcttgtagca

SEQ ID NO: 757547 - DNA, 25 bp, Homo sapien
gaccccaggttctcttgtagcacag

SEQ ID NO: 757548 - DNA, 25 bp, Homo sapien
ttctcttgtagcacagctctagacc

SEQ ID NO: 757549 - DNA, 25 bp, Homo sapien
caggttctcttgtagcacagctcta

SEQ ID NO: 757550 - DNA, 25 bp, Homo sapien
gagctgctgctccacgaccctctgg

SEQ ID NO: 757551 - DNA, 25 bp, Homo sapien
atgagctgctgctccacgaccctct

SEQ ID NO: 757552 - DNA, 25 bp, Homo sapien
tgctgctccacgaccctctggctgc

SEQ ID NO: 757553 - DNA, 25 bp, Homo sapien
gctgctgctccacgaccctctggct

SEQ ID NO: 757554 - DNA, 25 bp, Homo sapien
tgagaagcctgtgtaggcactcaca

SEQ ID NO: 757555 - DNA, 25 bp, Homo sapien
gctggtaaagttggacagaggactt

SEQ ID NO: 757556 - DNA, 25 bp, Homo sapien
acccagggcatcttgaggccccaga

SEQ ID NO: 757557 - DNA, 25 bp, Homo sapien
gtaaagttggacagaggacttgcag

SEQ ID NO: 757558 - DNA, 25 bp, Homo sapien
tcttcccttcgtgactgcccaaacc

SEQ ID NO: 757559 - DNA, 25 bp, Homo sapien
ggacaggtgttagctggaaccccac

SEQ ID NO: 757560 - DNA, 25 bp, Homo sapien
tcgtgggttcccagactcaaggcac

SEQ ID NO: 757561 - DNA, 25 bp, Homo sapien
agggtcgtgggttcccagactcaag

SEQ ID NO: 757562 - DNA, 25 bp, Homo sapien
gagaacacaaaagggcttgccagct

SEQ ID NO: 757563 - DNA, 25 bp, Homo sapien
tgcagcagaacacctggagcacata

SEQ ID NO: 757564 - DNA, 25 bp, Homo sapien
gcagcagaacacctggagcacatac

SEQ ID NO: 757565 - DNA, 25 bp, Homo sapien
ctgcagcagaacacctggagcacat

SEQ ID NO: 757566 - DNA, 25 bp, Homo sapien
gacagccataagaattccactacag

SEQ ID NO: 757567 - DNA, 25 bp, Homo sapien
gggacagccataagaattccactac

SEQ ID NO: 757568 - DNA, 25 bp, Homo sapien
ggacagccataagaattccactaca

SEQ ID NO: 757569 - DNA, 25 bp, Homo sapien
aggggacagccataagaattccact

SEQ ID NO: 757570 - DNA, 25 bp, Homo sapien
aggttgcaccacttccagacgtcca

SEQ ID NO: 757571 - DNA, 25 bp, Homo sapien
accttgcccatcatgtctgcgaaag

SEQ ID NO: 757572 - DNA, 25 bp, Homo sapien
atgcctgtctcgttgcagccgcctg

SEQ ID NO: 757573 - DNA, 25 bp, Homo sapien
atcatgtctgcgaaagccttcccac

SEQ ID NO: 757574 - DNA, 25 bp, Homo sapien
aactgcctgtggatgccggtgatga

SEQ ID NO: 757575 - DNA, 25 bp, Homo sapien
gatcagcgggatgagaacctcgtct

SEQ ID NO: 757576 - DNA, 25 bp, Homo sapien
catggcgacagtcagaacgacgggt

SEQ ID NO: 757577 - DNA, 25 bp, Homo sapien
aacgacgggtataacgatcagcggg

SEQ ID NO: 757578 - DNA, 25 bp, Homo sapien
catgggatgccattccagagggccc

SEQ ID NO: 757579 - DNA, 25 bp, Homo sapien
tccactggccctagaatgagcaaag

SEQ ID NO: 757580 - DNA, 25 bp, Homo sapien
catagcgggcacagcatcatgatgg

SEQ ID NO: 757581 - DNA, 25 bp, Homo sapien
cacagatggtagcagatagaggcca

SEQ ID NO: 757582 - DNA, 25 bp, Homo sapien
cagtgcctgactttgctggaaaagc

SEQ ID NO: 757583 - DNA, 25 bp, Homo sapien
gaacgcccctagagcaaagcaaatt

SEQ ID NO: 757584 - DNA, 25 bp, Homo sapien
gagaactcaatcctccaaccgtaaa

SEQ ID NO: 757585 - DNA, 25 bp, Homo sapien
caaagaggcttccatgaatgtagtg

SEQ ID NO: 757586 - DNA, 25 bp, Homo sapien
agcagtctgtgtacaagtctcatct

SEQ ID NO: 757587 - DNA, 25 bp, Homo sapien
tcatctccaaggctccaagacagat

SEQ ID NO: 757588 - DNA, 25 bp, Homo sapien
tctccaaggctccaagacagatagc

SEQ ID NO: 757589 - DNA, 25 bp, Homo sapien
ctgctctttagggagcagtctgtgt

SEQ ID NO: 757590 - DNA, 25 bp, Homo sapien
gaccagaagtcatagcaccctgtga

SEQ ID NO: 757591 - DNA, 25 bp, Homo sapien
caaactatggatgcccaaatgtgga

SEQ ID NO: 757592 - DNA, 25 bp, Homo sapien
agcacagactctgcgaaggcatcca

SEQ ID NO: 757593 - DNA, 25 bp, Homo sapien
tgttaccctaaacagcactctggag

SEQ ID NO: 757594 - DNA, 25 bp, Homo sapien
cctccaccctctgggctcacgcgat

SEQ ID NO: 757595 - DNA, 25 bp, Homo sapien
caccctctgggctcacgcgattctg

SEQ ID NO: 757596 - DNA, 25 bp, Homo sapien
ccctctgggctcacgcgattctgcc

SEQ ID NO: 757597 - DNA, 25 bp, Homo sapien
aacctccaccctctgggctcacgcg

SEQ ID NO: 757598 - DNA, 25 bp, Homo sapien
cgcgggctgctatgaccatcagtgg

SEQ ID NO: 757599 - DNA, 25 bp, Homo sapien
ttacaagggctgacagaatgtgttg

SEQ ID NO: 757600 - DNA, 25 bp, Homo sapien
gatgttatcaacaggtccttacaag

SEQ ID NO: 757601 - DNA, 25 bp, Homo sapien
caacaggtccttacaagggctgaca

SEQ ID NO: 757602 - DNA, 25 bp, Homo sapien
gatggaggctgtgcgggatgtcggg

SEQ ID NO: 757603 - DNA, 25 bp, Homo sapien
ggaaggcttgagtgaaggctctggg

SEQ ID NO: 757604 - DNA, 25 bp, Homo sapien
cagggcctgggtgaccagaagcacc

SEQ ID NO: 757605 - DNA, 25 bp, Homo sapien
tggatggaggctgtgcgggatgtcg

SEQ ID NO: 757606 - DNA, 25 bp, Homo sapien
gagctctgcaaacgttattctcggc

SEQ ID NO: 757607 - DNA, 25 bp, Homo sapien
tattcgctaggagaggcaagacacc

SEQ ID NO: 757608 - DNA, 25 bp, Homo sapien
gaacggtaacgtactatggcatctg

SEQ ID NO: 757609 - DNA, 25 bp, Homo sapien
ttagactcccatgcccgacaaaaat

SEQ ID NO: 757610 - DNA, 25 bp, Homo sapien
ctgttgctgctttagcagctggaac

SEQ ID NO: 757611 - DNA, 25 bp, Homo sapien
ctgggcagaagcagatgctgttgct

SEQ ID NO: 757612 - DNA, 25 bp, Homo sapien
agcagctggaactgctctgggttcc

SEQ ID NO: 757613 - DNA, 25 bp, Homo sapien
cagatgctgttgctgctttagcagc

SEQ ID NO: 757614 - DNA, 25 bp, Homo sapien
ggtctgctcggaagaacaccttgtt

SEQ ID NO: 757615 - DNA, 25 bp, Homo sapien
ttggtgcctgatggagaactggtct

SEQ ID NO: 757616 - DNA, 25 bp, Homo sapien
tgatggagaactggtctgctcggaa

SEQ ID NO: 757617 - DNA, 25 bp, Homo sapien
gaactggtctgctcggaagaacacc

SEQ ID NO: 757618 - DNA, 25 bp, Homo sapien
tgtgtacaaagtccaacaactgggc

SEQ ID NO: 757619 - DNA, 25 bp, Homo sapien
tacacaggatcttgaggtcagccag

SEQ ID NO: 757620 - DNA, 25 bp, Homo sapien
tgcatggtccatacattccttgggc

SEQ ID NO: 757621 - DNA, 25 bp, Homo sapien
cagtatagtttagcggtcagccaaa

SEQ ID NO: 757622 - DNA, 25 bp, Homo sapien
caggagagactagcagtgccatgag

SEQ ID NO: 757623 - DNA, 25 bp, Homo sapien
atgaggcaggctactcccaaagcca

SEQ ID NO: 757624 - DNA, 25 bp, Homo sapien
ccctcaggagagactagcagtgcca

SEQ ID NO: 757625 - DNA, 25 bp, Homo sapien
ccaaagccagccaccacttcttcat

SEQ ID NO: 757626 - DNA, 25 bp, Homo sapien
acaaggaccccctactccagccctg

SEQ ID NO: 757627 - DNA, 25 bp, Homo sapien
tgtcccagggcttctttgaggactc

SEQ ID NO: 757628 - DNA, 25 bp, Homo sapien
cttctttgaggactccggggttatg

SEQ ID NO: 757629 - DNA, 25 bp, Homo sapien
ctcccaggaggagcatcaggctgtc

SEQ ID NO: 757630 - DNA, 25 bp, Homo sapien
tgctcttgtagcttataacccgtct

SEQ ID NO: 757631 - DNA, 25 bp, Homo sapien
aacccgtcttgcatttgcctaaagg

SEQ ID NO: 757632 - DNA, 25 bp, Homo sapien
tctgcggtatagaggcttgggatct

SEQ ID NO: 757633 - DNA, 25 bp, Homo sapien
tgccagaccatccagaaagccggct

SEQ ID NO: 757634 - DNA, 25 bp, Homo sapien
tcagtctctgtgtgcctccgtgtca

SEQ ID NO: 757635 - DNA, 25 bp, Homo sapien
cctcagtctctgtgtgcctccgtgt

SEQ ID NO: 757636 - DNA, 25 bp, Homo sapien
cccctcagtctctgtgtgcctccgt

SEQ ID NO: 757637 - DNA, 25 bp, Homo sapien
tgcccctcagtctctgtgtgcctcc

SEQ ID NO: 757638 - DNA, 25 bp, Homo sapien
cagaggatgccctccggggaggtga

SEQ ID NO: 757639 - DNA, 25 bp, Homo sapien
aggatgccctccggggaggtgaaag

SEQ ID NO: 757640 - DNA, 25 bp, Homo sapien
agaggatgccctccggggaggtgaa

SEQ ID NO: 757641 - DNA, 25 bp, Homo sapien
tcagaggatgccctccggggaggtg

SEQ ID NO: 757642 - DNA, 25 bp, Homo sapien
acattcctatacaatttccactgag

SEQ ID NO: 757643 - DNA, 25 bp, Homo sapien
tatacaatttccactgagcagggtc

SEQ ID NO: 757644 - DNA, 25 bp, Homo sapien
ttcctatacaatttccactgagcag

SEQ ID NO: 757645 - DNA, 25 bp, Homo sapien
acaatttccactgagcagggtccag

SEQ ID NO: 757646 - DNA, 25 bp, Homo sapien
ttgctctgacaaacaaccttggttg

SEQ ID NO: 757647 - DNA, 25 bp, Homo sapien
tatcagacactggttatatgcatta

SEQ ID NO: 757648 - DNA, 25 bp, Homo sapien
tgtttactaacatgtgagccattgt

SEQ ID NO: 757649 - DNA, 25 bp, Homo sapien
tctttttgcccttcacagttaccca

SEQ ID NO: 757650 - DNA, 25 bp, Homo sapien
ctccaggatctccatttgcacaagc

SEQ ID NO: 757651 - DNA, 25 bp, Homo sapien
gctggctgctgcttttgtagaactt

SEQ ID NO: 757652 - DNA, 25 bp, Homo sapien
gatctccatttgcacaagcactgct

SEQ ID NO: 757653 - DNA, 25 bp, Homo sapien
tgctggctgctgcttttgtagaact

SEQ ID NO: 757654 - DNA, 25 bp, Homo sapien
tcctatattcatgcctaaatttgtg

SEQ ID NO: 757655 - DNA, 25 bp, Homo sapien
tattatctatatgaacttccatggg

SEQ ID NO: 757656 - DNA, 25 bp, Homo sapien
tcctcagcacataaagactcgagga

SEQ ID NO: 757657 - DNA, 25 bp, Homo sapien
actcgaggaccaaagccaagtcttt

SEQ ID NO: 757658 - DNA, 25 bp, Homo sapien
tgctttatcccttccacgggtccca

SEQ ID NO: 757659 - DNA, 25 bp, Homo sapien
attttactcttctgcagagcctgga

SEQ ID NO: 757660 - DNA, 25 bp, Homo sapien
gccatctggagcagtagctattctg

SEQ ID NO: 757661 - DNA, 25 bp, Homo sapien
gatggaaggattggcgaagaggctg

SEQ ID NO: 757662 - DNA, 25 bp, Homo sapien
agcagtagctattctgggcctgaag

SEQ ID NO: 757663 - DNA, 25 bp, Homo sapien
tggaggaacgctgggctgcgtgcac

SEQ ID NO: 757664 - DNA, 25 bp, Homo sapien
cttcccattgtctgactctcttggc

SEQ ID NO: 757665 - DNA, 25 bp, Homo sapien
ccattgtctgactctcttggcaatt

SEQ ID NO: 757666 - DNA, 25 bp, Homo sapien
tcccattgtctgactctcttggcaa

SEQ ID NO: 757667 - DNA, 25 bp, Homo sapien
ctcttcccattgtctgactctcttg

SEQ ID NO: 757668 - DNA, 25 bp, Homo sapien
ctaagggcaatgccagggaattggg

SEQ ID NO: 757669 - DNA, 25 bp, Homo sapien
taagggcaatgccagggaattggga

SEQ ID NO: 757670 - DNA, 25 bp, Homo sapien
aggagaaagtctctactccaccctc

SEQ ID NO: 757671 - DNA, 25 bp, Homo sapien
ggagaaagtctctactccaccctcc

SEQ ID NO: 757672 - DNA, 25 bp, Homo sapien
taattctgggaccatagcaatggag

SEQ ID NO: 757673 - DNA, 25 bp, Homo sapien
cctgatcctgagctatgggaacact

SEQ ID NO: 757674 - DNA, 25 bp, Homo sapien
cacagagatctcacaagaagaagga

SEQ ID NO: 757675 - DNA, 25 bp, Homo sapien
ggacacaagtgagatcctgatcctg

SEQ ID NO: 757676 - DNA, 25 bp, Homo sapien
tcctgtctgtgaagtgcccgtcact

SEQ ID NO: 757677 - DNA, 25 bp, Homo sapien
gtcctgtctgtgaagtgcccgtcac

SEQ ID NO: 757678 - DNA, 25 bp, Homo sapien
ctccattcagcttcttttagagcaa

SEQ ID NO: 757679 - DNA, 25 bp, Homo sapien
tgacttttgcaccattgaattactc

SEQ ID NO: 757680 - DNA, 25 bp, Homo sapien
tgatgatgacagttaatgagtctga

SEQ ID NO: 757681 - DNA, 25 bp, Homo sapien
attactccattcagcttcttttaga

SEQ ID NO: 757682 - DNA, 25 bp, Homo sapien
ttgcctcctaccaccagaactaaga

SEQ ID NO: 757683 - DNA, 25 bp, Homo sapien
ctcctaccaccagaactaagagatt

SEQ ID NO: 757684 - DNA, 25 bp, Homo sapien
gcctcctaccaccagaactaagaga

SEQ ID NO: 757685 - DNA, 25 bp, Homo sapien
tctcttgcctcctaccaccagaact

SEQ ID NO: 757686 - DNA, 25 bp, Homo sapien
cagcagcagcttgggacccttgttg

SEQ ID NO: 757687 - DNA, 25 bp, Homo sapien
tgtgcaggtggcaccgtgggttctg

SEQ ID NO: 757688 - DNA, 25 bp, Homo sapien
agaacccttcctatacatctttttg

SEQ ID NO: 757689 - DNA, 25 bp, Homo sapien
gaattgcagatcacaagcatgcagc

SEQ ID NO: 757690 - DNA, 25 bp, Homo sapien
cttgtgggggccatgccacaggctc

SEQ ID NO: 757691 - DNA, 25 bp, Homo sapien
ggggccatgccacaggctccgactg

SEQ ID NO: 757692 - DNA, 25 bp, Homo sapien
atgccacaggctccgactgccgggg

SEQ ID NO: 757693 - DNA, 25 bp, Homo sapien
ccttgtgggggccatgccacaggct

SEQ ID NO: 757694 - DNA, 25 bp, Homo sapien
tgcaggtcagacctttcaggggcct

SEQ ID NO: 757695 - DNA, 25 bp, Homo sapien
gcaggtcagacctttcaggggcctc

SEQ ID NO: 757696 - DNA, 25 bp, Homo sapien
ctgcaggtcagacctttcaggggcc

SEQ ID NO: 757697 - DNA, 25 bp, Homo sapien
ccgaggtccaaagggcacatgagct

SEQ ID NO: 757698 - DNA, 25 bp, Homo sapien
agccgaggtccaaagggcacatgag

SEQ ID NO: 757699 - DNA, 25 bp, Homo sapien
gccgaggtccaaagggcacatgagc

SEQ ID NO: 757700 - DNA, 25 bp, Homo sapien
ttttatgaaccagattggcaccacc

SEQ ID NO: 757701 - DNA, 25 bp, Homo sapien
tatgaaccagattggcaccacctga

SEQ ID NO: 757702 - DNA, 25 bp, Homo sapien
gaaccagattggcaccacctgattc

SEQ ID NO: 757703 - DNA, 25 bp, Homo sapien
gcttttttatgaaccagattggcac

SEQ ID NO: 757704 - DNA, 25 bp, Homo sapien
cactgctgggctctatccaatttga

SEQ ID NO: 757705 - DNA, 25 bp, Homo sapien
aagagcatcttgattagataagccc

SEQ ID NO: 757706 - DNA, 25 bp, Homo sapien
gcttttgccatagtcattcacctta

SEQ ID NO: 757707 - DNA, 25 bp, Homo sapien
tcctagaactcaagaggcaaatagc

SEQ ID NO: 757708 - DNA, 25 bp, Homo sapien
tgctgcttcgtaccaggtatcctga

SEQ ID NO: 757709 - DNA, 25 bp, Homo sapien
tggtccgctctctaacttcatccat

SEQ ID NO: 757710 - DNA, 25 bp, Homo sapien
tgcctagacctgtgagcaaaaccca

SEQ ID NO: 757711 - DNA, 25 bp, Homo sapien
agtccagggactccaactgcctaga

SEQ ID NO: 757712 - DNA, 25 bp, Homo sapien
tgctggtgcaggttgggtggcccct

SEQ ID NO: 757713 - DNA, 25 bp, Homo sapien
tggggactcatgtgccagttgcttt

SEQ ID NO: 757714 - DNA, 25 bp, Homo sapien
tgagatggggactcatgtgccagtt

SEQ ID NO: 757715 - DNA, 25 bp, Homo sapien
ctggtgcaggttgggtggcccctga

SEQ ID NO: 757716 - DNA, 25 bp, Homo sapien
aacattccagggaatgttatcacta

SEQ ID NO: 757717 - DNA, 25 bp, Homo sapien
acattccagggaatgttatcactac

SEQ ID NO: 757718 - DNA, 25 bp, Homo sapien
attggcagaccttgtttgatggctc

SEQ ID NO: 757719 - DNA, 25 bp, Homo sapien
tgacttccttcaattgagcagcttt

SEQ ID NO: 757720 - DNA, 25 bp, Homo sapien
cattcttagatctagacattggcag

SEQ ID NO: 757721 - DNA, 25 bp, Homo sapien
cctctgacttccttcaattgagcag

SEQ ID NO: 757722 - DNA, 25 bp, Homo sapien
gaagtctcattgcactcagtgcctg

SEQ ID NO: 757723 - DNA, 25 bp, Homo sapien
tcaagaagtctcattgcactcagtg

SEQ ID NO: 757724 - DNA, 25 bp, Homo sapien
taagctttcaagaagtctcattgca

SEQ ID NO: 757725 - DNA, 25 bp, Homo sapien
tcattgcactcagtgcctgatgcat

SEQ ID NO: 757726 - DNA, 25 bp, Homo sapien
aagggctgcttccttgctgatgtgg

SEQ ID NO: 757727 - DNA, 25 bp, Homo sapien
ctgcttccttgctgatgtggtacat

SEQ ID NO: 757728 - DNA, 25 bp, Homo sapien
ctgtggggtgcacagaagggctgct

SEQ ID NO: 757729 - DNA, 25 bp, Homo sapien
gggctgcttccttgctgatgtggta

SEQ ID NO: 757730 - DNA, 25 bp, Homo sapien
cagtctccactaggtctcaaatctt

SEQ ID NO: 757731 - DNA, 25 bp, Homo sapien
tccactaggtctcaaatctttgctc

SEQ ID NO: 757732 - DNA, 25 bp, Homo sapien
ttgtccccagttttctcctgggctc

SEQ ID NO: 757733 - DNA, 25 bp, Homo sapien
tggcctttggggttcttagagccag

SEQ ID NO: 757734 - DNA, 25 bp, Homo sapien
acagtcaggcgcactgctcgaagtt

SEQ ID NO: 757735 - DNA, 25 bp, Homo sapien
gtagtgctacagctgtctgcttttg

SEQ ID NO: 757736 - DNA, 25 bp, Homo sapien
tgtagtgctacagctgtctgctttt

SEQ ID NO: 757737 - DNA, 25 bp, Homo sapien
agtgcacagtcaggcgcactgctcg

SEQ ID NO: 757738 - DNA, 25 bp, Homo sapien
atttcatcttgatagcccaggtcaa

SEQ ID NO: 757739 - DNA, 25 bp, Homo sapien
atcttgatagcccaggtcaatcacc

SEQ ID NO: 757740 - DNA, 25 bp, Homo sapien
ttgatagcccaggtcaatcacccca

SEQ ID NO: 757741 - DNA, 25 bp, Homo sapien
tctgttatggagtagtagagtgatt

SEQ ID NO: 757742 - DNA, 25 bp, Homo sapien
atctcattagataggttaaatatag

SEQ ID NO: 757743 - DNA, 25 bp, Homo sapien
aagaaatctcattagataggttaaa

SEQ ID NO: 757744 - DNA, 25 bp, Homo sapien
cattagataggttaaatataggagc

SEQ ID NO: 757745 - DNA, 25 bp, Homo sapien
aaagaaatctcattagataggttaa

SEQ ID NO: 757746 - DNA, 25 bp, Homo sapien
taaaatctgacactggtgaggacac

SEQ ID NO: 757747 - DNA, 25 bp, Homo sapien
agtaaaatctgacactggtgaggac

SEQ ID NO: 757748 - DNA, 25 bp, Homo sapien
aggagctcgcagtgcaggggtggag

SEQ ID NO: 757749 - DNA, 25 bp, Homo sapien
ccagggcagtaaaatctgacactgg

SEQ ID NO: 757750 - DNA, 25 bp, Homo sapien
tattgccaaggtcgtaacgtgggag

SEQ ID NO: 757751 - DNA, 25 bp, Homo sapien
caaatagagggaatgcagcaatgga

SEQ ID NO: 757752 - DNA, 25 bp, Homo sapien
aagactggatgaggaggctattgcc

SEQ ID NO: 757753 - DNA, 25 bp, Homo sapien
gcaccagggtaaggcggtgcaaata

SEQ ID NO: 757754 - DNA, 25 bp, Homo sapien
ctttgtgctggtgcttcaagtacat

SEQ ID NO: 757755 - DNA, 25 bp, Homo sapien
attcattcactatgagggagacaac

SEQ ID NO: 757756 - DNA, 25 bp, Homo sapien
cattcactatgagggagacaacttt

SEQ ID NO: 757757 - DNA, 25 bp, Homo sapien
gagacaactttgtgctggtgcttca

SEQ ID NO: 757758 - DNA, 25 bp, Homo sapien
cttccttgtcccctccgagcctcag

SEQ ID NO: 757759 - DNA, 25 bp, Homo sapien
tcccctccgagcctcagtttcccca

SEQ ID NO: 757760 - DNA, 25 bp, Homo sapien
ccgagcctcagtttccccaccgtgc

SEQ ID NO: 757761 - DNA, 25 bp, Homo sapien
cctccgagcctcagtttccccaccg

SEQ ID NO: 757762 - DNA, 25 bp, Homo sapien
atgcagcggccgcggccgcgggcgc

SEQ ID NO: 757763 - DNA, 25 bp, Homo sapien
agcggccgcggccgcgggcgcgccc

SEQ ID NO: 757764 - DNA, 25 bp, Homo sapien
ctcagcgccatgcagcggccgcggc

SEQ ID NO: 757765 - DNA, 25 bp, Homo sapien
gcagcggccgcggccgcgggcgcgc

SEQ ID NO: 757766 - DNA, 25 bp, Homo sapien
cttgtcccggccgcccgctcggcgc

SEQ ID NO: 757767 - DNA, 25 bp, Homo sapien
cgcccgctcggcgcccccgggctcg

SEQ ID NO: 757768 - DNA, 25 bp, Homo sapien
cgccgcctccgccgcgcggcgcccc

SEQ ID NO: 757769 - DNA, 25 bp, Homo sapien
cccgggctcgcccgcgccgcctccg

SEQ ID NO: 757770 - DNA, 25 bp, Homo sapien
ccagcaggctgagaacggccagcgc

SEQ ID NO: 757771 - DNA, 25 bp, Homo sapien
agcgccttcagcgtggccgcctgct

SEQ ID NO: 757772 - DNA, 25 bp, Homo sapien
ccgcagcgtgtagccgcggaacagc

SEQ ID NO: 757773 - DNA, 25 bp, Homo sapien
agctctgggcaagcgaactcctcgt

SEQ ID NO: 757774 - DNA, 25 bp, Homo sapien
aggaagaggacgcagtgcaccgggt

SEQ ID NO: 757775 - DNA, 25 bp, Homo sapien
gaggacgcagtgcaccgggtgtgag

SEQ ID NO: 757776 - DNA, 25 bp, Homo sapien
cgttggttaccacgagcagcgccag

SEQ ID NO: 757777 - DNA, 25 bp, Homo sapien
tgcagggaccggacgttggttacca

SEQ ID NO: 757778 - DNA, 25 bp, Homo sapien
ccgcccagcgcgaaaggacagcaga

SEQ ID NO: 757779 - DNA, 25 bp, Homo sapien
ggcggggccgcccagcgcgaaagga

SEQ ID NO: 757780 - DNA, 25 bp, Homo sapien
acagcagagcagcgcgaaggtgagg

SEQ ID NO: 757781 - DNA, 25 bp, Homo sapien
cagcagagcagcgcgaaggtgaggc

SEQ ID NO: 757782 - DNA, 25 bp, Homo sapien
gcacgggcagcaaggcataggacac

SEQ ID NO: 757783 - DNA, 25 bp, Homo sapien
gcaaggcataggacacgaaggtgac

SEQ ID NO: 757784 - DNA, 25 bp, Homo sapien
taggacacgaaggtgaccaaaagga

SEQ ID NO: 757785 - DNA, 25 bp, Homo sapien
cgggcagcaaggcataggacacgaa

SEQ ID NO: 757786 - DNA, 25 bp, Homo sapien
tcctccagagacgtgggcgcttggc

SEQ ID NO: 757787 - DNA, 25 bp, Homo sapien
accacgagcccaaagcctatggcca

SEQ ID NO: 757788 - DNA, 25 bp, Homo sapien
tggcggggaccaaggtggctgtgac

SEQ ID NO: 757789 - DNA, 25 bp, Homo sapien
tgtgaccagcaagtgcgacgcagcc

SEQ ID NO: 757790 - DNA, 25 bp, Homo sapien
ggccgtcttgcggttgcgggtctgg

SEQ ID NO: 757791 - DNA, 25 bp, Homo sapien
cgtcttgcggttgcgggtctggctg

SEQ ID NO: 757792 - DNA, 25 bp, Homo sapien
tcagattggggaggccgtcttgcgg

SEQ ID NO: 757793 - DNA, 25 bp, Homo sapien
ggaggccgtcttgcggttgcgggtc

SEQ ID NO: 757794 - DNA, 25 bp, Homo sapien
tgtgtaaccactggcacctcagttc

SEQ ID NO: 757795 - DNA, 25 bp, Homo sapien
gtgttagggccgcatgcagcctgtt

SEQ ID NO: 757796 - DNA, 25 bp, Homo sapien
ctttggtgcttcctgtgtaaccact

SEQ ID NO: 757797 - DNA, 25 bp, Homo sapien
gaaaggattctcacggggacctgga

SEQ ID NO: 757798 - DNA, 25 bp, Homo sapien
tgcaggccagacgggatggctgtca

SEQ ID NO: 757799 - DNA, 25 bp, Homo sapien
gcaggccagacgggatggctgtcac

SEQ ID NO: 757800 - DNA, 25 bp, Homo sapien
gacacaggcaactctgacgagccat

SEQ ID NO: 757801 - DNA, 25 bp, Homo sapien
ggcaactctgacgagccatgcaggg

SEQ ID NO: 757802 - DNA, 25 bp, Homo sapien
ctggacacaggcaactctgacgagc

SEQ ID NO: 757803 - DNA, 25 bp, Homo sapien
ccagggttcccctccacaatcactt

SEQ ID NO: 757804 - DNA, 25 bp, Homo sapien
cctgtccgggcggctgtgagacagc

SEQ ID NO: 757805 - DNA, 25 bp, Homo sapien
tgtccgggcggctgtgagacagcat

SEQ ID NO: 757806 - DNA, 25 bp, Homo sapien
ctgtccgggcggctgtgagacagca

SEQ ID NO: 757807 - DNA, 25 bp, Homo sapien
gaacgccttcctctgtgaacgctca

SEQ ID NO: 757808 - DNA, 25 bp, Homo sapien
tacatgttcacaccgacgaagagca

SEQ ID NO: 757809 - DNA, 25 bp, Homo sapien
tgaacgctcagtcagaatccgcaca

SEQ ID NO: 757810 - DNA, 25 bp, Homo sapien
agtcggtcctcaatgcagctccggg

SEQ ID NO: 757811 - DNA, 25 bp, Homo sapien
gagggttgaagcgtactaatcacaa

SEQ ID NO: 757812 - DNA, 25 bp, Homo sapien
caagcatgaaggagtcgccgtcagc

SEQ ID NO: 757813 - DNA, 25 bp, Homo sapien
tacagtgagaagttcacccgactgc

SEQ ID NO: 757814 - DNA, 25 bp, Homo sapien
caggaaagtcagaatgtaacgggac

SEQ ID NO: 757815 - DNA, 25 bp, Homo sapien
tgaagggcaggggcccagggtgacc

SEQ ID NO: 757816 - DNA, 25 bp, Homo sapien
cagggtgaccctttgttctgtttct

SEQ ID NO: 757817 - DNA, 25 bp, Homo sapien
ctgcaggcaaggacagatgaagggc

SEQ ID NO: 757818 - DNA, 25 bp, Homo sapien
caggcaaggacagatgaagggcagg

SEQ ID NO: 757819 - DNA, 25 bp, Homo sapien
cttgaccttcttctctgcccagacc

SEQ ID NO: 757820 - DNA, 25 bp, Homo sapien
aggcgacaaccagctccggcatctt

SEQ ID NO: 757821 - DNA, 25 bp, Homo sapien
aaggcgacaaccagctccggcatct

SEQ ID NO: 757822 - DNA, 25 bp, Homo sapien
tcccacagaccaaggcgacaaccag

SEQ ID NO: 757823 - DNA, 25 bp, Homo sapien
agaccaaggcgacaaccagctccgg

SEQ ID NO: 757824 - DNA, 25 bp, Homo sapien
acattgtcgtgcctctggatgtaaa

SEQ ID NO: 757825 - DNA, 25 bp, Homo sapien
gcaggaggctcatgaggagccgctc

SEQ ID NO: 757826 - DNA, 25 bp, Homo sapien
ctcacattgtcgtgcctctggatgt

SEQ ID NO: 757827 - DNA, 25 bp, Homo sapien
tctccatggcaacgttccggggcag

SEQ ID NO: 757828 - DNA, 25 bp, Homo sapien
tattggtctagctaagaacttgtca

SEQ ID NO: 757829 - DNA, 25 bp, Homo sapien
tttgtggcctcagttataatatctc

SEQ ID NO: 757830 - DNA, 25 bp, Homo sapien
aattttggagacttggagaaggact

SEQ ID NO: 757831 - DNA, 25 bp, Homo sapien
tttcctgggttacacagtttgctgg

SEQ ID NO: 757832 - DNA, 25 bp, Homo sapien
cgtggctaattcatcgaacttgccg

SEQ ID NO: 757833 - DNA, 25 bp, Homo sapien
ccgaagagctcattgaggagtttca

SEQ ID NO: 757834 - DNA, 25 bp, Homo sapien
actgggatgccaagcccgtgaaacc

SEQ ID NO: 757835 - DNA, 25 bp, Homo sapien
ccgtgaaacccacgatgtcagcaaa

SEQ ID NO: 757836 - DNA, 25 bp, Homo sapien
aacgctgttggtatggccttggccc

SEQ ID NO: 757837 - DNA, 25 bp, Homo sapien
tgcacgttacaagccaacgctgttg

SEQ ID NO: 757838 - DNA, 25 bp, Homo sapien
gactggtccaaggaaggtctttcaa

SEQ ID NO: 757839 - DNA, 25 bp, Homo sapien
tggcccgacattcagcagaacttgg

SEQ ID NO: 757840 - DNA, 25 bp, Homo sapien
gggtaggatatcgatgccatgcaat

SEQ ID NO: 757841 - DNA, 25 bp, Homo sapien
tctctgggcctgcaacgtctgttgg

SEQ ID NO: 757842 - DNA, 25 bp, Homo sapien
tacaatgtatccatgggcagcggag

SEQ ID NO: 757843 - DNA, 25 bp, Homo sapien
catgcaatagatgtgctctctctgg

SEQ ID NO: 757844 - DNA, 25 bp, Homo sapien
gactacaggcaggtgacatgacaac

SEQ ID NO: 757845 - DNA, 25 bp, Homo sapien
tcagccctaagggacaagagctgcc

SEQ ID NO: 757846 - DNA, 25 bp, Homo sapien
cagaggccctggcttttgttagcaa

SEQ ID NO: 757847 - DNA, 25 bp, Homo sapien
tccaggtatggcctaaagagctgcg

SEQ ID NO: 757848 - DNA, 25 bp, Homo sapien
agaaaggaccgtgtcctgtcccagg

SEQ ID NO: 757849 - DNA, 25 bp, Homo sapien
acagccaagaggccacaaaagtgac

SEQ ID NO: 757850 - DNA, 25 bp, Homo sapien
tacagccaagaggccacaaaagtga

SEQ ID NO: 757851 - DNA, 25 bp, Homo sapien
tcagcacagtcttgagggctgggac

SEQ ID NO: 757852 - DNA, 25 bp, Homo sapien
cagcacagtcttgagggctgggacc

SEQ ID NO: 757853 - DNA, 25 bp, Homo sapien
gggaccaggctcacattgatctcct

SEQ ID NO: 757854 - DNA, 25 bp, Homo sapien
accaggctcacattgatctccttct

SEQ ID NO: 757855 - DNA, 25 bp, Homo sapien
cgagaatcttgatgcggcgacagtg

SEQ ID NO: 757856 - DNA, 25 bp, Homo sapien
ggtgaggcccgacacgcagtagtag

SEQ ID NO: 757857 - DNA, 25 bp, Homo sapien
caatcatgtcgagtcccatctccac

SEQ ID NO: 757858 - DNA, 25 bp, Homo sapien
gtagcagtccccgagaatcttgatg

SEQ ID NO: 757859 - DNA, 25 bp, Homo sapien
tgtcatctgagatgcaacatacaat

SEQ ID NO: 757860 - DNA, 25 bp, Homo sapien
tgatggtcatcacttctaagtcttc

SEQ ID NO: 757861 - DNA, 25 bp, Homo sapien
ccattaagaaatacgaaagacagtt

SEQ ID NO: 757862 - DNA, 25 bp, Homo sapien
tgtgatatgatgtgatccattaaga

SEQ ID NO: 757863 - DNA, 25 bp, Homo sapien
gaggaacctgaagcatcgcctgaag

SEQ ID NO: 757864 - DNA, 25 bp, Homo sapien
ccagaactggctgactaggagcaac

SEQ ID NO: 757865 - DNA, 25 bp, Homo sapien
gagccaagaatctagcaggttcctg

SEQ ID NO: 757866 - DNA, 25 bp, Homo sapien
tactcagggcaactctgggagagca

SEQ ID NO: 757867 - DNA, 25 bp, Homo sapien
ctgcaacacagacacagagcgtggg

SEQ ID NO: 757868 - DNA, 25 bp, Homo sapien
tgcaacacagacacagagcgtgggg

SEQ ID NO: 757869 - DNA, 25 bp, Homo sapien
ccacacgcatgttcagatccacctc

SEQ ID NO: 757870 - DNA, 25 bp, Homo sapien
acgcatgttcagatccacctcggtg

SEQ ID NO: 757871 - DNA, 25 bp, Homo sapien
ctgccacttgcgcaagcccaggaca

SEQ ID NO: 757872 - DNA, 25 bp, Homo sapien
ttgcgcaagcccaggacaccacaga

SEQ ID NO: 757873 - DNA, 25 bp, Homo sapien
attcctgtgttcagctgatgcttca

SEQ ID NO: 757874 - DNA, 25 bp, Homo sapien
attccatcagcaatgaagacagcgg

SEQ ID NO: 757875 - DNA, 25 bp, Homo sapien
tggccctgaactacaacggtcaccg

SEQ ID NO: 757876 - DNA, 25 bp, Homo sapien
ctacaacggtcaccgaggctgtctg

SEQ ID NO: 757877 - DNA, 25 bp, Homo sapien
atgctcccatgcaagtccgtccatg

SEQ ID NO: 757878 - DNA, 25 bp, Homo sapien
gatacagtagggccatcaggaacca

SEQ ID NO: 757879 - DNA, 25 bp, Homo sapien
gggagtattcatgctcccatgcaag

SEQ ID NO: 757880 - DNA, 25 bp, Homo sapien
gcaagtccgtccatgccaggaggga

SEQ ID NO: 757881 - DNA, 25 bp, Homo sapien
tagtccccattcaagcacgctaggg

SEQ ID NO: 757882 - DNA, 25 bp, Homo sapien
ggtcgtctttgtgatatgaaccttc

SEQ ID NO: 757883 - DNA, 25 bp, Homo sapien
tgttcctctcatgtccgtaacccgg

SEQ ID NO: 757884 - DNA, 25 bp, Homo sapien
tttcggcgatgggatggcacaataa

SEQ ID NO: 757885 - DNA, 25 bp, Homo sapien
ttttggccggttttatatctgagag

SEQ ID NO: 757886 - DNA, 25 bp, Homo sapien
cttgtcatcgtcctcgcaggtcatg

SEQ ID NO: 757887 - DNA, 25 bp, Homo sapien
tcctcgcaggtcatgacattggaga

SEQ ID NO: 757888 - DNA, 25 bp, Homo sapien
gccttgaacattttccggcagtgca

SEQ ID NO: 757889 - DNA, 25 bp, Homo sapien
ctgctaaccgagagtaacagaggaa

SEQ ID NO: 757890 - DNA, 25 bp, Homo sapien
gtggagactgctgagaagactgttt

SEQ ID NO: 757891 - DNA, 25 bp, Homo sapien
tgctgttttgctcgtctggacgtcc

SEQ ID NO: 757892 - DNA, 25 bp, Homo sapien
tggagactgctgagaagactgtttt

SEQ ID NO: 757893 - DNA, 25 bp, Homo sapien
ttgctcgtctggacgtcctggctgg

SEQ ID NO: 757894 - DNA, 25 bp, Homo sapien
gagctcatccttgcagcactggtga

SEQ ID NO: 757895 - DNA, 25 bp, Homo sapien
tatgtttacgatcaggagagagtgc

SEQ ID NO: 757896 - DNA, 25 bp, Homo sapien
caggacctgaagctacgtgcacagt

SEQ ID NO: 757897 - DNA, 25 bp, Homo sapien
cactcagtgagggatggatctgaac

SEQ ID NO: 757898 - DNA, 25 bp, Homo sapien
gtcctgggttactgactgtcctcca

SEQ ID NO: 757899 - DNA, 25 bp, Homo sapien
tcctgggttactgactgtcctccac

SEQ ID NO: 757900 - DNA, 25 bp, Homo sapien
cacagtcataaatcacagtcctggg

SEQ ID NO: 757901 - DNA, 25 bp, Homo sapien
ctccacagtcataaatcacagtcct

SEQ ID NO: 757902 - DNA, 25 bp, Homo sapien
gaacatgggtccaccctccagttgg

SEQ ID NO: 757903 - DNA, 25 bp, Homo sapien
ggcttgttcagaagaccagtggtca

SEQ ID NO: 757904 - DNA, 25 bp, Homo sapien
gatccacacaagtctaccctcaggt

SEQ ID NO: 757905 - DNA, 25 bp, Homo sapien
gctccctggtctgacagttctgaga

SEQ ID NO: 757906 - DNA, 25 bp, Homo sapien
tcataaacagaacctctggtactta

SEQ ID NO: 757907 - DNA, 25 bp, Homo sapien
gatgtacctgttgacgcgagtgccc

SEQ ID NO: 757908 - DNA, 25 bp, Homo sapien
tttccgaggctgttcttaatgccct

SEQ ID NO: 757909 - DNA, 25 bp, Homo sapien
caacgttggtagaaaaagatgagcg

SEQ ID NO: 757910 - DNA, 25 bp, Homo sapien
tttgctcccgttcgacatgtttgta

SEQ ID NO: 757911 - DNA, 25 bp, Homo sapien
ggatgagggtgaggacaacggcgct

SEQ ID NO: 757912 - DNA, 25 bp, Homo sapien
tgaaatactcgtcctgaagctggtg

SEQ ID NO: 757913 - DNA, 25 bp, Homo sapien
gaatattagaaggtagacaaggcca

SEQ ID NO: 757914 - DNA, 25 bp, Homo sapien
tgtgggaatattagaaggtagacaa

SEQ ID NO: 757915 - DNA, 25 bp, Homo sapien
ccgggacttcttggtgagttcctca

SEQ ID NO: 757916 - DNA, 25 bp, Homo sapien
cctcacctcgttgatagaaatactc

SEQ ID NO: 757917 - DNA, 25 bp, Homo sapien
cacaaccacgaaccccagaaacaca

SEQ ID NO: 757918 - DNA, 25 bp, Homo sapien
cttggtgagttcctcacctcgttga

SEQ ID NO: 757919 - DNA, 25 bp, Homo sapien
ctggacccgggtgatgtgcaggtac

SEQ ID NO: 757920 - DNA, 25 bp, Homo sapien
tgtgcaggtacaggacacaggccac

SEQ ID NO: 757921 - DNA, 25 bp, Homo sapien
gaagcagatgcagaatactagcagg

SEQ ID NO: 757922 - DNA, 25 bp, Homo sapien
gcagaatactagcaggagcaggacg

SEQ ID NO: 757923 - DNA, 25 bp, Homo sapien
ggatgctcagagcccggtgcagagc

SEQ ID NO: 757924 - DNA, 25 bp, Homo sapien
agggatgctcagagcccggtgcaga

SEQ ID NO: 757925 - DNA, 25 bp, Homo sapien
gcagggatgctcagagcccggtgca

SEQ ID NO: 757926 - DNA, 25 bp, Homo sapien
tccattcccacagccatttgcacag

SEQ ID NO: 757927 - DNA, 25 bp, Homo sapien
cagtgcgaatctgaatcgtcaggca

SEQ ID NO: 757928 - DNA, 25 bp, Homo sapien
cacacaaccttgggctactgagtag

SEQ ID NO: 757929 - DNA, 25 bp, Homo sapien
taagaccactatgaaaatacacagg

SEQ ID NO: 757930 - DNA, 25 bp, Homo sapien
aatacacaggacagtgcgaatctga

SEQ ID NO: 757931 - DNA, 25 bp, Homo sapien
tggtgtatccgctgagctccagaac

SEQ ID NO: 757932 - DNA, 25 bp, Homo sapien
gacacccggaaaaatatggctagcg

SEQ ID NO: 757933 - DNA, 25 bp, Homo sapien
gagcccggagagcaggatcattttt

SEQ ID NO: 757934 - DNA, 25 bp, Homo sapien
gctccagaacgaggatgtaggacgt

SEQ ID NO: 757935 - DNA, 25 bp, Homo sapien
aggatggccacaatcggctcgtagc

SEQ ID NO: 757936 - DNA, 25 bp, Homo sapien
ggccacaatcggctcgtagctgcgc

SEQ ID NO: 757937 - DNA, 25 bp, Homo sapien
acaatcggctcgtagctgcgcccgg

SEQ ID NO: 757938 - DNA, 25 bp, Homo sapien
atcggctcgtagctgcgcccggaga

SEQ ID NO: 757939 - DNA, 25 bp, Homo sapien
tgcctggcatgcagggccagcgcac

SEQ ID NO: 757940 - DNA, 25 bp, Homo sapien
ctgcctggcatgcagggccagcgca

SEQ ID NO: 757941 - DNA, 25 bp, Homo sapien
ccagaggtagtccagcctcagcctg

SEQ ID NO: 757942 - DNA, 25 bp, Homo sapien
agaggtagtccagcctcagcctgat

SEQ ID NO: 757943 - DNA, 25 bp, Homo sapien
tagtccagcctcagcctgatgtcca

SEQ ID NO: 757944 - DNA, 25 bp, Homo sapien
ggtagtccagcctcagcctgatgtc

SEQ ID NO: 757945 - DNA, 25 bp, Homo sapien
gcccccgtcagatgcttgctgaaga

SEQ ID NO: 757946 - DNA, 25 bp, Homo sapien
ccctccgagggccatacggcgtgtg

SEQ ID NO: 757947 - DNA, 25 bp, Homo sapien
ttgcatgctgctgaggagggccctc

SEQ ID NO: 757948 - DNA, 25 bp, Homo sapien
gtggcagcccccgtcagatgcttgc

SEQ ID NO: 757949 - DNA, 25 bp, Homo sapien
tcaggtatgcagtgaagacagcgcc

SEQ ID NO: 757950 - DNA, 25 bp, Homo sapien
tccccagcaggaattagggcctgtt

SEQ ID NO: 757951 - DNA, 25 bp, Homo sapien
tcctttctcgcgatagtcagagttc

SEQ ID NO: 757952 - DNA, 25 bp, Homo sapien
caaagggcgagggttctcagcaacc

SEQ ID NO: 757953 - DNA, 25 bp, Homo sapien
caggtatgtgctgtatctggccaga

SEQ ID NO: 757954 - DNA, 25 bp, Homo sapien
accggttctgtaccagggaggccag

SEQ ID NO: 757955 - DNA, 25 bp, Homo sapien
ggactctaccaacagggtcctgggc

SEQ ID NO: 757956 - DNA, 25 bp, Homo sapien
taagaccaagttcagcaacacagcc

SEQ ID NO: 757957 - DNA, 25 bp, Homo sapien
tttatatgacataaactcctccaca

SEQ ID NO: 757958 - DNA, 25 bp, Homo sapien
gatgaccacggctttatatgacata

SEQ ID NO: 757959 - DNA, 25 bp, Homo sapien
gaagcatgatgaccacggctttata

SEQ ID NO: 757960 - DNA, 25 bp, Homo sapien
tatatgacataaactcctccacaac

SEQ ID NO: 757961 - DNA, 25 bp, Homo sapien
ctgcaggtgaacttcacgtgctcaa

SEQ ID NO: 757962 - DNA, 25 bp, Homo sapien
tgagacacaccacagacatcttctt

SEQ ID NO: 757963 - DNA, 25 bp, Homo sapien
cgtgctcaagcccaacatggcattg

SEQ ID NO: 757964 - DNA, 25 bp, Homo sapien
tgccacactgctaccacactgctct

SEQ ID NO: 757965 - DNA, 25 bp, Homo sapien
ctctacttgcaagatgcaggagagt

SEQ ID NO: 757966 - DNA, 25 bp, Homo sapien
ccactccgtgggcagaaagcaactt

SEQ ID NO: 757967 - DNA, 25 bp, Homo sapien
ccttttactctacttgcaagatgca

SEQ ID NO: 757968 - DNA, 25 bp, Homo sapien
tgtcttccacactcctcgagtctcc

SEQ ID NO: 757969 - DNA, 25 bp, Homo sapien
gacgtgggccggcaggaggttgaag

SEQ ID NO: 757970 - DNA, 25 bp, Homo sapien
gaagtgctgggcgacgtgggccggc

SEQ ID NO: 757971 - DNA, 25 bp, Homo sapien
gggccggcaggaggttgaagaggat

SEQ ID NO: 757972 - DNA, 25 bp, Homo sapien
gatgcgcctgttgtccagcttcacc

SEQ ID NO: 757973 - DNA, 25 bp, Homo sapien
ctcgatgtagaagtcattgaagttg

SEQ ID NO: 757974 - DNA, 25 bp, Homo sapien
cgatgtagaagtcattgaagttggg

SEQ ID NO: 757975 - DNA, 25 bp, Homo sapien
aggcaaacatgacgcccacctggga

SEQ ID NO: 757976 - DNA, 25 bp, Homo sapien
tgacgcccacctgggagtaggactg

SEQ ID NO: 757977 - DNA, 25 bp, Homo sapien
cttctctatgtccttgtaaaagtct

SEQ ID NO: 757978 - DNA, 25 bp, Homo sapien
ccgaggtgggcgctagccccacagc

SEQ ID NO: 757979 - DNA, 25 bp, Homo sapien
gggcgctagccccacagcggccatg

SEQ ID NO: 757980 - DNA, 25 bp, Homo sapien
tggtccccgaggtgggcgctagccc

SEQ ID NO: 757981 - DNA, 25 bp, Homo sapien
tccagaacgtcaaacatctcaatgg

SEQ ID NO: 757982 - DNA, 25 bp, Homo sapien
caatggcaaagtccgccagcgtgct

SEQ ID NO: 757983 - DNA, 25 bp, Homo sapien
caactcggaggacaaagtcgttgta

SEQ ID NO: 757984 - DNA, 25 bp, Homo sapien
ggtagttgatttcatccagaacgtc

SEQ ID NO: 757985 - DNA, 25 bp, Homo sapien
ccagatgtcgtactggggcctgcga

SEQ ID NO: 757986 - DNA, 25 bp, Homo sapien
gactggccacgttgactgtgtttcc

SEQ ID NO: 757987 - DNA, 25 bp, Homo sapien
tgtgctatccatccgactggccacg

SEQ ID NO: 757988 - DNA, 25 bp, Homo sapien
gcctgcgagcgccaatcactccagc

SEQ ID NO: 757989 - DNA, 25 bp, Homo sapien
cctgcagttcccagcgagggtggct

SEQ ID NO: 757990 - DNA, 25 bp, Homo sapien
tgaatagctgctgtcacgtgcctgg

SEQ ID NO: 757991 - DNA, 25 bp, Homo sapien
cacaatctccatcttagttttaagg

SEQ ID NO: 757992 - DNA, 25 bp, Homo sapien
aaactgcccccgtgaatagctgctg

SEQ ID NO: 757993 - DNA, 25 bp, Homo sapien
ggttcgcaaccagtattctagctca

SEQ ID NO: 757994 - DNA, 25 bp, Homo sapien
gacaggttcgcaaccagtattctag

SEQ ID NO: 757995 - DNA, 25 bp, Homo sapien
gcaaccagtattctagctcaaagaa

SEQ ID NO: 757996 - DNA, 25 bp, Homo sapien
tttcttgacaggttcgcaaccagta

SEQ ID NO: 757997 - DNA, 25 bp, Homo sapien
gagggagggaccagcatacggaggg

SEQ ID NO: 757998 - DNA, 25 bp, Homo sapien
aggaccccggcatagctgcctctgc

SEQ ID NO: 757999 - DNA, 25 bp, Homo sapien
aaaccagccagttcacaggaccccg

SEQ ID NO: 758000 - DNA, 25 bp, Homo sapien
catggtgtcggtgggggtgcaaacc

SEQ ID NO: 758001 - DNA, 25 bp, Homo sapien
accttctcagcagccggtggacttc

SEQ ID NO: 758002 - DNA, 25 bp, Homo sapien
ctttgcctcggcacacaaagtggta

SEQ ID NO: 758003 - DNA, 25 bp, Homo sapien
tcctgccttctagaaagtatgtcaa

SEQ ID NO: 758004 - DNA, 25 bp, Homo sapien
aaagtatgtcaacatctcgcctttg

SEQ ID NO: 758005 - DNA, 25 bp, Homo sapien
tggacacattttccgatccaagccc

SEQ ID NO: 758006 - DNA, 25 bp, Homo sapien
cacattttccgatccaagcccaggg

SEQ ID NO: 758007 - DNA, 25 bp, Homo sapien
gacacattttccgatccaagcccag

SEQ ID NO: 758008 - DNA, 25 bp, Homo sapien
aaatggacacattttccgatccaag

SEQ ID NO: 758009 - DNA, 25 bp, Homo sapien
tgcagagggcaggtactggcctggg

SEQ ID NO: 758010 - DNA, 25 bp, Homo sapien
ctgcagagggcaggtactggcctgg

SEQ ID NO: 758011 - DNA, 25 bp, Homo sapien
gcagagggcaggtactggcctgggg

SEQ ID NO: 758012 - DNA, 25 bp, Homo sapien
taaccctgggatgctctgaaggtcc

SEQ ID NO: 758013 - DNA, 25 bp, Homo sapien
tgtaaaggatccacgatgccacagg

SEQ ID NO: 758014 - DNA, 25 bp, Homo sapien
tgtgcctgtggtgtgaacaacccca

SEQ ID NO: 758015 - DNA, 25 bp, Homo sapien
gaacaaacacagtgccggtgcagga

SEQ ID NO: 758016 - DNA, 25 bp, Homo sapien
gctcatgggtgtgacagccgctcat

SEQ ID NO: 758017 - DNA, 25 bp, Homo sapien
ttctgccggagaaacagcatcttcc

SEQ ID NO: 758018 - DNA, 25 bp, Homo sapien
caattctgaaacttcgtcctggagg

SEQ ID NO: 758019 - DNA, 25 bp, Homo sapien
ccgctcatattcaacagaagtggag

SEQ ID NO: 758020 - DNA, 25 bp, Homo sapien
tgcacataggaggttgtcagacgtc

SEQ ID NO: 758021 - DNA, 25 bp, Homo sapien
cacaggtctacactccagggaagga

SEQ ID NO: 758022 - DNA, 25 bp, Homo sapien
gtgactgctttaaatccggctggga

SEQ ID NO: 758023 - DNA, 25 bp, Homo sapien
gagatccaaggtttccacatgccag

SEQ ID NO: 758024 - DNA, 25 bp, Homo sapien
gggctctgcacccttctcaacagct

SEQ ID NO: 758025 - DNA, 25 bp, Homo sapien
ccttctcaacagctcgtgggtcaag

SEQ ID NO: 758026 - DNA, 25 bp, Homo sapien
tgcacccttctcaacagctcgtggg

SEQ ID NO: 758027 - DNA, 25 bp, Homo sapien
tcaacagctcgtgggtcaaggacag

SEQ ID NO: 758028 - DNA, 25 bp, Homo sapien
gaaacaagttctggctgccgtcggg

SEQ ID NO: 758029 - DNA, 25 bp, Homo sapien
tagagagaatcctacccgaatggct

SEQ ID NO: 758030 - DNA, 25 bp, Homo sapien
ctatttgaaggtctgaaccgcccgg

SEQ ID NO: 758031 - DNA, 25 bp, Homo sapien
tactgaggctcatcaattggaacgg

SEQ ID NO: 758032 - DNA, 25 bp, Homo sapien
tctacagaagcatcctcagtgagtt

SEQ ID NO: 758033 - DNA, 25 bp, Homo sapien
catgagaagttacccagtgagagtg

SEQ ID NO: 758034 - DNA, 25 bp, Homo sapien
gaaggtaccctacagtgttcagttg

SEQ ID NO: 758035 - DNA, 25 bp, Homo sapien
tattgtgcgagaaaatgacaccctt

SEQ ID NO: 758036 - DNA, 25 bp, Homo sapien
atttttcaactgaaatggccacaga

SEQ ID NO: 758037 - DNA, 25 bp, Homo sapien
tttatttttcaactgaaatggccac

SEQ ID NO: 758038 - DNA, 25 bp, Homo sapien
aaaacatccacataaccatttattt

SEQ ID NO: 758039 - DNA, 25 bp, Homo sapien
ccatttatttttcaactgaaatggc

SEQ ID NO: 758040 - DNA, 25 bp, Homo sapien
cttttttgatatgaaagtccaccat

SEQ ID NO: 758041 - DNA, 25 bp, Homo sapien
ttgatatgaaagtccaccatcaggg

SEQ ID NO: 758042 - DNA, 25 bp, Homo sapien
tactgcttgtaactgcttgtaactg

SEQ ID NO: 758043 - DNA, 25 bp, Homo sapien
atatgaaagtccaccatcagggagc

SEQ ID NO: 758044 - DNA, 25 bp, Homo sapien
gcaaccctagcttgggacgcgtgaa

SEQ ID NO: 758045 - DNA, 25 bp, Homo sapien
ggcataggcacccatgacccttctg

SEQ ID NO: 758046 - DNA, 25 bp, Homo sapien
cggagagggcatctgtccaacgcct

SEQ ID NO: 758047 - DNA, 25 bp, Homo sapien
tagctcaccgtgacgaagctgcgtt

SEQ ID NO: 758048 - DNA, 25 bp, Homo sapien
cataccccttaaaaataggcaccag

SEQ ID NO: 758049 - DNA, 25 bp, Homo sapien
tgaggctttagaacttacatacccc

SEQ ID NO: 758050 - DNA, 25 bp, Homo sapien
aactttcagttgctgagttgaggct

SEQ ID NO: 758051 - DNA, 25 bp, Homo sapien
agtgacccctgtaccttgttcccag

SEQ ID NO: 758052 - DNA, 25 bp, Homo sapien
tttagaaaaattggtgtcatccagt

SEQ ID NO: 758053 - DNA, 25 bp, Homo sapien
cttcaggcaggattgggtagtacat

SEQ ID NO: 758054 - DNA, 25 bp, Homo sapien
taggcaggtgctatgatccccactt

SEQ ID NO: 758055 - DNA, 25 bp, Homo sapien
ggtataggcaggtgctatgatcccc

SEQ ID NO: 758056 - DNA, 25 bp, Homo sapien
caggtgctatgatccccacttttca

SEQ ID NO: 758057 - DNA, 25 bp, Homo sapien
tataggcaggtgctatgatccccac

SEQ ID NO: 758058 - DNA, 25 bp, Homo sapien
gctgcacccctgagcttgacgtctg

SEQ ID NO: 758059 - DNA, 25 bp, Homo sapien
tgagggagctgcacccctgagcttg

SEQ ID NO: 758060 - DNA, 25 bp, Homo sapien
acccctgagcttgacgtctgacggc

SEQ ID NO: 758061 - DNA, 25 bp, Homo sapien
tgcacccctgagcttgacgtctgac

SEQ ID NO: 758062 - DNA, 25 bp, Homo sapien
cagaaggtgcaaccgatcgcactgt

SEQ ID NO: 758063 - DNA, 25 bp, Homo sapien
ctgtcgcagaaggtgcaaccgatcg

SEQ ID NO: 758064 - DNA, 25 bp, Homo sapien
cactgtcgcgcagaagctcctcaat

SEQ ID NO: 758065 - DNA, 25 bp, Homo sapien
aaccgatcgcactgtcgcgcagaag

SEQ ID NO: 758066 - DNA, 25 bp, Homo sapien
ttctatttttgaccaacataaacac

SEQ ID NO: 758067 - DNA, 25 bp, Homo sapien
tcagaaggtggggaataatcatcat

SEQ ID NO: 758068 - DNA, 25 bp, Homo sapien
ctttgtctctcagaaggtggggaat

SEQ ID NO: 758069 - DNA, 25 bp, Homo sapien
ctctcagaaggtggggaataatcat

SEQ ID NO: 758070 - DNA, 25 bp, Homo sapien
tttgtctctcagaaggtggggaata

SEQ ID NO: 758071 - DNA, 25 bp, Homo sapien
gactggtggctgtggtggctcgttg

SEQ ID NO: 758072 - DNA, 25 bp, Homo sapien
ggttctgggactggtggctgtggtg

SEQ ID NO: 758073 - DNA, 25 bp, Homo sapien
cccagcattggcgggttctgggact

SEQ ID NO: 758074 - DNA, 25 bp, Homo sapien
tccgttccccagcattggcgggttc

SEQ ID NO: 758075 - DNA, 25 bp, Homo sapien
agatgcacctggcatgaagcgtgcc

SEQ ID NO: 758076 - DNA, 25 bp, Homo sapien
atgcacctggcatgaagcgtgccca

SEQ ID NO: 758077 - DNA, 25 bp, Homo sapien
cacctggcatgaagcgtgcccagag

SEQ ID NO: 758078 - DNA, 25 bp, Homo sapien
cacagatgcacctggcatgaagcgt

SEQ ID NO: 758079 - DNA, 25 bp, Homo sapien
taggcattcccagatacagtgaagg

SEQ ID NO: 758080 - DNA, 25 bp, Homo sapien
tcaccgaggtgaccagtaggcattc

SEQ ID NO: 758081 - DNA, 25 bp, Homo sapien
caccgaggtgaccagtaggcattcc

SEQ ID NO: 758082 - DNA, 25 bp, Homo sapien
agtgaaggtcctcacaccaagatat

SEQ ID NO: 758083 - DNA, 25 bp, Homo sapien
cacagagcctcagaagccaccgacc

SEQ ID NO: 758084 - DNA, 25 bp, Homo sapien
cccacagagcctcagaagccaccga

SEQ ID NO: 758085 - DNA, 25 bp, Homo sapien
aaacagattctcccacagagcctca

SEQ ID NO: 758086 - DNA, 25 bp, Homo sapien
agattctcccacagagcctcagaag

SEQ ID NO: 758087 - DNA, 25 bp, Homo sapien
gtttacgtagatcagcgatacgatt

SEQ ID NO: 758088 - DNA, 25 bp, Homo sapien
acgtagatcagcgatacgattattc

SEQ ID NO: 758089 - DNA, 25 bp, Homo sapien
tcagcgatacgattattccatttct

SEQ ID NO: 758090 - DNA, 25 bp, Homo sapien
gtagatcagcgatacgattattcca

SEQ ID NO: 758091 - DNA, 25 bp, Homo sapien
ctcacgaagctgatttatcaagttg

SEQ ID NO: 758092 - DNA, 25 bp, Homo sapien
atcttcacctgttgaattcataagt

SEQ ID NO: 758093 - DNA, 25 bp, Homo sapien
cacctgttgaattcataagttcatg

SEQ ID NO: 758094 - DNA, 25 bp, Homo sapien
ttcacctgttgaattcataagttca

SEQ ID NO: 758095 - DNA, 25 bp, Homo sapien
aagggtatgggatcatcaccggacc

SEQ ID NO: 758096 - DNA, 25 bp, Homo sapien
aaaagggtatgggatcatcaccgga

SEQ ID NO: 758097 - DNA, 25 bp, Homo sapien
aaaaaagggtatgggatcatcaccg

SEQ ID NO: 758098 - DNA, 25 bp, Homo sapien
gactggaaaaaagggtatgggatca

SEQ ID NO: 758099 - DNA, 25 bp, Homo sapien
gtatgtgtgctactgaggcaagcat

SEQ ID NO: 758100 - DNA, 25 bp, Homo sapien
acttaagtatgtgtgctactgaggc

SEQ ID NO: 758101 - DNA, 25 bp, Homo sapien
taagtatgtgtgctactgaggcaag

SEQ ID NO: 758102 - DNA, 25 bp, Homo sapien
aagtatgtgtgctactgaggcaagc

SEQ ID NO: 758103 - DNA, 25 bp, Homo sapien
ttcagaagtctttcatggtagatcc

SEQ ID NO: 758104 - DNA, 25 bp, Homo sapien
ctggattcagaagtctttcatggta

SEQ ID NO: 758105 - DNA, 25 bp, Homo sapien
cagaagtctttcatggtagatccag

SEQ ID NO: 758106 - DNA, 25 bp, Homo sapien
gtctctcttcctggattcagaagtc

SEQ ID NO: 758107 - DNA, 25 bp, Homo sapien
tatagtctcagccacgtgggaggtt

SEQ ID NO: 758108 - DNA, 25 bp, Homo sapien
cccctctggaatccacgtataggaa

SEQ ID NO: 758109 - DNA, 25 bp, Homo sapien
cagccttggacaagagagggagacc

SEQ ID NO: 758110 - DNA, 25 bp, Homo sapien
tcacccctctggaatccacgtatag

SEQ ID NO: 758111 - DNA, 25 bp, Homo sapien
gctcaagtgcatccaaaacaaccct

SEQ ID NO: 758112 - DNA, 25 bp, Homo sapien
tgctgtgtggctccttacggctcca

SEQ ID NO: 758113 - DNA, 25 bp, Homo sapien
ctgctcaagtgcatccaaaacaacc

SEQ ID NO: 758114 - DNA, 25 bp, Homo sapien
tcaagtgcatccaaaacaacccttc

SEQ ID NO: 758115 - DNA, 25 bp, Homo sapien
gtttttctgcaactggatggtccta

SEQ ID NO: 758116 - DNA, 25 bp, Homo sapien
tgtagaatcagtgggcgtgttaagc

SEQ ID NO: 758117 - DNA, 25 bp, Homo sapien
tttttctgcaactggatggtcctac

SEQ ID NO: 758118 - DNA, 25 bp, Homo sapien
cagtgggcgtgttaagcttgttttt

SEQ ID NO: 758119 - DNA, 25 bp, Homo sapien
gggtatgggcctaaataggccattg

SEQ ID NO: 758120 - DNA, 25 bp, Homo sapien
gtagggtatgggcctaaataggcca

SEQ ID NO: 758121 - DNA, 25 bp, Homo sapien
tagggtatgggcctaaataggccat

SEQ ID NO: 758122 - DNA, 25 bp, Homo sapien
agggtatgggcctaaataggccatt

SEQ ID NO: 758123 - DNA, 25 bp, Homo sapien
gcaagagctggatgtagacaggcca

SEQ ID NO: 758124 - DNA, 25 bp, Homo sapien
tgaggcaagagctggatgtagacag

SEQ ID NO: 758125 - DNA, 25 bp, Homo sapien
aggcaagagctggatgtagacaggc

SEQ ID NO: 758126 - DNA, 25 bp, Homo sapien
caagagctggatgtagacaggccag

SEQ ID NO: 758127 - DNA, 25 bp, Homo sapien
ggaaaagtcgccgtggggcatgagc

SEQ ID NO: 758128 - DNA, 25 bp, Homo sapien
tggagacgccgagttaaggacattc

SEQ ID NO: 758129 - DNA, 25 bp, Homo sapien
gctcgtcctggagacgccgagttaa

SEQ ID NO: 758130 - DNA, 25 bp, Homo sapien
aggatgagctcgtcctggagacgcc

SEQ ID NO: 758131 - DNA, 25 bp, Homo sapien
aagccaccggtagctaggagttggc

SEQ ID NO: 758132 - DNA, 25 bp, Homo sapien
caccggtagctaggagttggccctg

SEQ ID NO: 758133 - DNA, 25 bp, Homo sapien
gcctgcagaagccaccggtagctag

SEQ ID NO: 758134 - DNA, 25 bp, Homo sapien
cagaagccaccggtagctaggagtt

SEQ ID NO: 758135 - DNA, 25 bp, Homo sapien
tggagaggccgactggaggaagtcc

SEQ ID NO: 758136 - DNA, 25 bp, Homo sapien
gcctggagaggccgactggaggaag

SEQ ID NO: 758137 - DNA, 25 bp, Homo sapien
agaggccgactggaggaagtccaga

SEQ ID NO: 758138 - DNA, 25 bp, Homo sapien
cctggagaggccgactggaggaagt

SEQ ID NO: 758139 - DNA, 25 bp, Homo sapien
gccctggacaggccgacttgacaac

SEQ ID NO: 758140 - DNA, 25 bp, Homo sapien
gcctgcagagggcaccgggaggcag

SEQ ID NO: 758141 - DNA, 25 bp, Homo sapien
caggccgacttgacaacagtctggg

SEQ ID NO: 758142 - DNA, 25 bp, Homo sapien
ctggccctggacaggccgacttgac

SEQ ID NO: 758143 - DNA, 25 bp, Homo sapien
aaaggccgttgtgaggaatgagccc

SEQ ID NO: 758144 - DNA, 25 bp, Homo sapien
ggccgttgtgaggaatgagccccat

SEQ ID NO: 758145 - DNA, 25 bp, Homo sapien
ctgggtccgcagaggccgccggaag

SEQ ID NO: 758146 - DNA, 25 bp, Homo sapien
tgggtccgcagaggccgccggaagg

SEQ ID NO: 758147 - DNA, 25 bp, Homo sapien
gcccggagaggacgccgggaggctg

SEQ ID NO: 758148 - DNA, 25 bp, Homo sapien
tggagacgcagccgggaggaagagc

SEQ ID NO: 758149 - DNA, 25 bp, Homo sapien
agaggacgccgggaggctgcaagtg

SEQ ID NO: 758150 - DNA, 25 bp, Homo sapien
ccggagaggacgccgggaggctgca

SEQ ID NO: 758151 - DNA, 25 bp, Homo sapien
ccaggagatgcgcaggcgctgagtc

SEQ ID NO: 758152 - DNA, 25 bp, Homo sapien
ggccgccaggagatgcgcaggcgct

SEQ ID NO: 758153 - DNA, 25 bp, Homo sapien
aggagatgcgcaggcgctgagtcca

SEQ ID NO: 758154 - DNA, 25 bp, Homo sapien
ccgccaggagatgcgcaggcgctga

SEQ ID NO: 758155 - DNA, 25 bp, Homo sapien
gagacgccatcggagggcaggagct

SEQ ID NO: 758156 - DNA, 25 bp, Homo sapien
ggagctgatcctggagaggccaccg

SEQ ID NO: 758157 - DNA, 25 bp, Homo sapien
ctggagacgccatcggagggcagga

SEQ ID NO: 758158 - DNA, 25 bp, Homo sapien
gagctgatcctggagaggccaccgt

SEQ ID NO: 758159 - DNA, 25 bp, Homo sapien
cgggagacgccgacttcaggacgac

SEQ ID NO: 758160 - DNA, 25 bp, Homo sapien
agggccgggagacgccgacttcagg

SEQ ID NO: 758161 - DNA, 25 bp, Homo sapien
aggcagggccgggagacgccgactt

SEQ ID NO: 758162 - DNA, 25 bp, Homo sapien
gcagggccgggagacgccgacttca

SEQ ID NO: 758163 - DNA, 25 bp, Homo sapien
tcctggctgcatctctcggcccagc

SEQ ID NO: 758164 - DNA, 25 bp, Homo sapien
ggctgcatctctcggcccagctcct

SEQ ID NO: 758165 - DNA, 25 bp, Homo sapien
gctcttcaggcccacatcctgcctc

SEQ ID NO: 758166 - DNA, 25 bp, Homo sapien
tgcctcccagcaagcaagctctttt

SEQ ID NO: 758167 - DNA, 25 bp, Homo sapien
ccaggagatgcgcaggcgctgagtc

SEQ ID NO: 758168 - DNA, 25 bp, Homo sapien
ggccgccaggagatgcgcaggcgct

SEQ ID NO: 758169 - DNA, 25 bp, Homo sapien
aggagatgcgcaggcgctgagtcca

SEQ ID NO: 758170 - DNA, 25 bp, Homo sapien
ccgccaggagatgcgcaggcgctga

SEQ ID NO: 758171 - DNA, 25 bp, Homo sapien
tggagaggccaccgtgaggcctgac

SEQ ID NO: 758172 - DNA, 25 bp, Homo sapien
ctggagaggccaccgtgaggcctga

SEQ ID NO: 758173 - DNA, 25 bp, Homo sapien
gagacgccatcggagggcaggagct

SEQ ID NO: 758174 - DNA, 25 bp, Homo sapien
ctggagacgccatcggagggcagga

SEQ ID NO: 758175 - DNA, 25 bp, Homo sapien
acgccatcggagggcaggagctgat

SEQ ID NO: 758176 - DNA, 25 bp, Homo sapien
gacgccatcggagggcaggagctga

SEQ ID NO: 758177 - DNA, 25 bp, Homo sapien
cgggagacgccgacttcaggacgac

SEQ ID NO: 758178 - DNA, 25 bp, Homo sapien
agggccgggagacgccgacttcagg

SEQ ID NO: 758179 - DNA, 25 bp, Homo sapien
gcagggccgggagacgccgacttca

SEQ ID NO: 758180 - DNA, 25 bp, Homo sapien
aggcagggccgggagacgccgactt

SEQ ID NO: 758181 - DNA, 25 bp, Homo sapien
tcaacaggccaccgtgagggaggaa

SEQ ID NO: 758182 - DNA, 25 bp, Homo sapien
caccgtgagggaggaactgggctgc

SEQ ID NO: 758183 - DNA, 25 bp, Homo sapien
ggccaccgtgagggaggaactgggc

SEQ ID NO: 758184 - DNA, 25 bp, Homo sapien
caacaggccaccgtgagggaggaac

SEQ ID NO: 758185 - DNA, 25 bp, Homo sapien
gggctagtgtcaggcaaggggctca

SEQ ID NO: 758186 - DNA, 25 bp, Homo sapien
gtgggaggggctagtgtcaggcaag

SEQ ID NO: 758187 - DNA, 25 bp, Homo sapien
gcgtgggaggggctagtgtcaggca

SEQ ID NO: 758188 - DNA, 25 bp, Homo sapien
aggggctagtgtcaggcaaggggct

SEQ ID NO: 758189 - DNA, 25 bp, Homo sapien
ctgtcagtgtggaggggccggtgtg

SEQ ID NO: 758190 - DNA, 25 bp, Homo sapien
ggtgtgaggcaaggggctcacgctg

SEQ ID NO: 758191 - DNA, 25 bp, Homo sapien
ctctgtcagtgtggaggggccggtg

SEQ ID NO: 758192 - DNA, 25 bp, Homo sapien
ggccggtgtgaggcaaggggctcac

SEQ ID NO: 758193 - DNA, 25 bp, Homo sapien
ctagagacgcagccgggaggaagag

SEQ ID NO: 758194 - DNA, 25 bp, Homo sapien
agaggttgttgggaggccggagtcg

SEQ ID NO: 758195 - DNA, 25 bp, Homo sapien
taccagggccactgggagctgggca

SEQ ID NO: 758196 - DNA, 25 bp, Homo sapien
cttcaggaagttgtgggcctaccag

SEQ ID NO: 758197 - DNA, 25 bp, Homo sapien
caaagaggttgttgggaggccggag

SEQ ID NO: 758198 - DNA, 25 bp, Homo sapien
cggaggccgtttgggacctggagat

SEQ ID NO: 758199 - DNA, 25 bp, Homo sapien
aggccgtttgggacctggagatgcc

SEQ ID NO: 758200 - DNA, 25 bp, Homo sapien
aggacaacttaggcctgcagaggct

SEQ ID NO: 758201 - DNA, 25 bp, Homo sapien
gccgtttgggacctggagatgccat

SEQ ID NO: 758202 - DNA, 25 bp, Homo sapien
cctgggaaggctgctgagagccatg

SEQ ID NO: 758203 - DNA, 25 bp, Homo sapien
gctgggctgggccaaaagaggccac

SEQ ID NO: 758204 - DNA, 25 bp, Homo sapien
aaaagcggggcctgggaaggctgct

SEQ ID NO: 758205 - DNA, 25 bp, Homo sapien
ggaaggctgctgagagccatgagct

SEQ ID NO: 758206 - DNA, 25 bp, Homo sapien
ggagctgggcctgccaaagcggccg

SEQ ID NO: 758207 - DNA, 25 bp, Homo sapien
atggtagcaatattccaaaattcca

SEQ ID NO: 758208 - DNA, 25 bp, Homo sapien
ctgggcctgccaaagcggccgaaag

SEQ ID NO: 758209 - DNA, 25 bp, Homo sapien
aatggtagcaatattccaaaattcc

SEQ ID NO: 758210 - DNA, 25 bp, Homo sapien
tcatgggtggtatttttcattgtgc

SEQ ID NO: 758211 - DNA, 25 bp, Homo sapien
ttgtgccaaaaagttgccatgaccg

SEQ ID NO: 758212 - DNA, 25 bp, Homo sapien
ttcattgtgccaaaaagttgccatg

SEQ ID NO: 758213 - DNA, 25 bp, Homo sapien
cattgtgccaaaaagttgccatgac

SEQ ID NO: 758214 - DNA, 25 bp, Homo sapien
tgtgggaccttcagagcttttcact

SEQ ID NO: 758215 - DNA, 25 bp, Homo sapien
catgagcaggatgttctgcacacaa

SEQ ID NO: 758216 - DNA, 25 bp, Homo sapien
gactggagcaggtgccaactgaagc

SEQ ID NO: 758217 - DNA, 25 bp, Homo sapien
tgaaacggatgctggtggtgagtgc

SEQ ID NO: 758218 - DNA, 25 bp, Homo sapien
cgctgcatgggtcccagaggctgga

SEQ ID NO: 758219 - DNA, 25 bp, Homo sapien
tgggactgatgactgcatgatcttc

SEQ ID NO: 758220 - DNA, 25 bp, Homo sapien
gggactgatgactgcatgatcttct

SEQ ID NO: 758221 - DNA, 25 bp, Homo sapien
cccaccacgctcaaatgcaagatga

SEQ ID NO: 758222 - DNA, 25 bp, Homo sapien
cacgctcaaatgcaagatgagaaga

SEQ ID NO: 758223 - DNA, 25 bp, Homo sapien
tcaaatgcaagatgagaagatgctc

SEQ ID NO: 758224 - DNA, 25 bp, Homo sapien
tggaggaccccaccacgctcaaatg

SEQ ID NO: 758225 - DNA, 25 bp, Homo sapien
tgaacgcctgtcagttgcggcccag

SEQ ID NO: 758226 - DNA, 25 bp, Homo sapien
acgcctgtcagttgcggcccagaca

SEQ ID NO: 758227 - DNA, 25 bp, Homo sapien
agtgtacaagggctcgtgggagcgg

SEQ ID NO: 758228 - DNA, 25 bp, Homo sapien
gcggagcatatcagagacgggcact

SEQ ID NO: 758229 - DNA, 25 bp, Homo sapien
atgagacgcagaagtgctacgacct

SEQ ID NO: 758230 - DNA, 25 bp, Homo sapien
gagacgcagaagtgctacgacctgg

SEQ ID NO: 758231 - DNA, 25 bp, Homo sapien
gacgcagaagtgctacgacctggcc

SEQ ID NO: 758232 - DNA, 25 bp, Homo sapien
caatgagacgcagaagtgctacgac

SEQ ID NO: 758233 - DNA, 25 bp, Homo sapien
agctttcctctccgtcatgtcccct

SEQ ID NO: 758234 - DNA, 25 bp, Homo sapien
cacgatgaagctttcctctccgtca

SEQ ID NO: 758235 - DNA, 25 bp, Homo sapien
acgatgaagctttcctctccgtcat

SEQ ID NO: 758236 - DNA, 25 bp, Homo sapien
gtcagcatgttcatgtggaggaatg

SEQ ID NO: 758237 - DNA, 25 bp, Homo sapien
tcagcatgttcatgtggaggaatgt

SEQ ID NO: 758238 - DNA, 25 bp, Homo sapien
cattttaagatgctcgaacttgtcg

SEQ ID NO: 758239 - DNA, 25 bp, Homo sapien
ttttaagatgctcgaacttgtcgtg

SEQ ID NO: 758240 - DNA, 25 bp, Homo sapien
ttaagatgctcgaacttgtcgtgca

SEQ ID NO: 758241 - DNA, 25 bp, Homo sapien
taagatgctcgaacttgtcgtgcag

SEQ ID NO: 758242 - DNA, 25 bp, Homo sapien
tgtcatcttcgtgtttgtctatgtc

SEQ ID NO: 758243 - DNA, 25 bp, Homo sapien
tataattcaaatgcaactcatggct

SEQ ID NO: 758244 - DNA, 25 bp, Homo sapien
caagcaagactatggtaaagaaatt

SEQ ID NO: 758245 - DNA, 25 bp, Homo sapien
ggtaactttagcatatacctcaaat

SEQ ID NO: 758246 - DNA, 25 bp, Homo sapien
catctttgtgcaggggccatgctaa

SEQ ID NO: 758247 - DNA, 25 bp, Homo sapien
tcttctctgtatctttccaatttta

SEQ ID NO: 758248 - DNA, 25 bp, Homo sapien
tggaacgcaacacaaatttgcatgt

SEQ ID NO: 758249 - DNA, 25 bp, Homo sapien
gtatatgtgctaccgaagcatgcac

SEQ ID NO: 758250 - DNA, 25 bp, Homo sapien
ggttccactgtcatctagctttttg

SEQ ID NO: 758251 - DNA, 25 bp, Homo sapien
gctttcctagtttcctgttgcaccg

SEQ ID NO: 758252 - DNA, 25 bp, Homo sapien
tccaatcatatccacccagagcagg

SEQ ID NO: 758253 - DNA, 25 bp, Homo sapien
ttttgatctctgcatggttccactg

SEQ ID NO: 758254 - DNA, 25 bp, Homo sapien
tttgtggttcttggtggtgctgagt

SEQ ID NO: 758255 - DNA, 25 bp, Homo sapien
tcccttttgtggttcttggtggtgc

SEQ ID NO: 758256 - DNA, 25 bp, Homo sapien
ggttcttggtggtgctgagtttcat

SEQ ID NO: 758257 - DNA, 25 bp, Homo sapien
aagcctctccaggtcccttttgtgg

SEQ ID NO: 758258 - DNA, 25 bp, Homo sapien
tgccgggtatagttcatcaggatct

SEQ ID NO: 758259 - DNA, 25 bp, Homo sapien
ctgtgatggaattgttacagtccat

SEQ ID NO: 758260 - DNA, 25 bp, Homo sapien
tgcaggagcatgattcacttaaggc

SEQ ID NO: 758261 - DNA, 25 bp, Homo sapien
acaaatgtgcttgccgggtatagtt

SEQ ID NO: 758262 - DNA, 25 bp, Homo sapien
gggcgctgcaactgcccacttggaa

SEQ ID NO: 758263 - DNA, 25 bp, Homo sapien
cacagcaggtatttcttggtgctga

SEQ ID NO: 758264 - DNA, 25 bp, Homo sapien
ggtgggcgctgcaactgcccacttg

SEQ ID NO: 758265 - DNA, 25 bp, Homo sapien
agggtgggcgctgcaactgcccact

SEQ ID NO: 758266 - DNA, 25 bp, Homo sapien
ttcttcgtcctctacaagattcaac

SEQ ID NO: 758267 - DNA, 25 bp, Homo sapien
gtggtttcttcgtcctctacaagat

SEQ ID NO: 758268 - DNA, 25 bp, Homo sapien
ggtttcttcgtcctctacaagattc

SEQ ID NO: 758269 - DNA, 25 bp, Homo sapien
tgtggtttcttcgtcctctacaaga

SEQ ID NO: 758270 - DNA, 25 bp, Homo sapien
cttccttgtgctcaagagggccctc

SEQ ID NO: 758271 - DNA, 25 bp, Homo sapien
gcagctgaaaattgggcaatccatg

SEQ ID NO: 758272 - DNA, 25 bp, Homo sapien
cagcagctgaaaattgggcaatcca

SEQ ID NO: 758273 - DNA, 25 bp, Homo sapien
agctgaaaattgggcaatccatgct

SEQ ID NO: 758274 - DNA, 25 bp, Homo sapien
cagctgaaaattgggcaatccatgc

SEQ ID NO: 758275 - DNA, 25 bp, Homo sapien
taccatacaggcattttatgtaggc

SEQ ID NO: 758276 - DNA, 25 bp, Homo sapien
tacaggcattttatgtaggctaggg

SEQ ID NO: 758277 - DNA, 25 bp, Homo sapien
ctgccataccatacaggcattttat

SEQ ID NO: 758278 - DNA, 25 bp, Homo sapien
caggcattttatgtaggctagggcc

SEQ ID NO: 758279 - DNA, 25 bp, Homo sapien
tcatgccaagccacacatgccaaag

SEQ ID NO: 758280 - DNA, 25 bp, Homo sapien
aagttgccagtaggtctcatcacca

SEQ ID NO: 758281 - DNA, 25 bp, Homo sapien
tcttcacccgaatcaaagcctttac

SEQ ID NO: 758282 - DNA, 25 bp, Homo sapien
catgccaaagttgccagtaggtctc

SEQ ID NO: 758283 - DNA, 25 bp, Homo sapien
ttcgggaagtgacttggatttgcca

SEQ ID NO: 758284 - DNA, 25 bp, Homo sapien
ttgttctacctctaaagtctccaaa

SEQ ID NO: 758285 - DNA, 25 bp, Homo sapien
acctctaaagtctccaaagagtaat

SEQ ID NO: 758286 - DNA, 25 bp, Homo sapien
tctacctctaaagtctccaaagagt

SEQ ID NO: 758287 - DNA, 25 bp, Homo sapien
caggcttatctccaggagttgcagg

SEQ ID NO: 758288 - DNA, 25 bp, Homo sapien
tcaaagaaagtcagaatcaggctta

SEQ ID NO: 758289 - DNA, 25 bp, Homo sapien
ccctccatggccttccagtggagag

SEQ ID NO: 758290 - DNA, 25 bp, Homo sapien
aggagttgcaggctctccccatcac

SEQ ID NO: 758291 - DNA, 25 bp, Homo sapien
tcacaggaaagaagtcgaaagaaaa

SEQ ID NO: 758292 - DNA, 25 bp, Homo sapien
ttcacaggaaagaagtcgaaagaaa

SEQ ID NO: 758293 - DNA, 25 bp, Homo sapien
tttcacaggaaagaagtcgaaagaa

SEQ ID NO: 758294 - DNA, 25 bp, Homo sapien
ctttcacaggaaagaagtcgaaaga

SEQ ID NO: 758295 - DNA, 25 bp, Homo sapien
caaggtcttgttagcagtggagcca

SEQ ID NO: 758296 - DNA, 25 bp, Homo sapien
gactttcccgcataggccagatatt

SEQ ID NO: 758297 - DNA, 25 bp, Homo sapien
gtagcaaatgcaaaggttttctctt

SEQ ID NO: 758298 - DNA, 25 bp, Homo sapien
gaggggcagttaagaaggtctaaca

SEQ ID NO: 758299 - DNA, 25 bp, Homo sapien
aggccgcgccacttgcaccaggagg

SEQ ID NO: 758300 - DNA, 25 bp, Homo sapien
gccgcgccacttgcaccaggaggtt

SEQ ID NO: 758301 - DNA, 25 bp, Homo sapien
acaggccgcgccacttgcaccagga

SEQ ID NO: 758302 - DNA, 25 bp, Homo sapien
ggcacaggccgcgccacttgcacca

SEQ ID NO: 758303 - DNA, 25 bp, Homo sapien
gatgggatggcggtggccgatgctc

SEQ ID NO: 758304 - DNA, 25 bp, Homo sapien
tggtggagcggtggccagtgctctc

SEQ ID NO: 758305 - DNA, 25 bp, Homo sapien
caaactctgggcaagtgatggtgga

SEQ ID NO: 758306 - DNA, 25 bp, Homo sapien
gcggcagatgctcgctggatgggat

SEQ ID NO: 758307 - DNA, 25 bp, Homo sapien
agacgcgagcaacggggacctctga

SEQ ID NO: 758308 - DNA, 25 bp, Homo sapien
agcaggagcagtaccagccagacgc

SEQ ID NO: 758309 - DNA, 25 bp, Homo sapien
agcagtaccagccagacgcgagcaa

SEQ ID NO: 758310 - DNA, 25 bp, Homo sapien
gtaccagccagacgcgagcaacggg

SEQ ID NO: 758311 - DNA, 25 bp, Homo sapien
gcagggcgcacatcgggcaacagcc

SEQ ID NO: 758312 - DNA, 25 bp, Homo sapien
gagcggaggcgtcagactcctgcac

SEQ ID NO: 758313 - DNA, 25 bp, Homo sapien
gcagagcgcgagcttctcggcggag

SEQ ID NO: 758314 - DNA, 25 bp, Homo sapien
cggaccgggtgacctccgagcacga

SEQ ID NO: 758315 - DNA, 25 bp, Homo sapien
ccttgaggatcagtgagacgactcc

SEQ ID NO: 758316 - DNA, 25 bp, Homo sapien
gaatcagcacactggcctataaggg

SEQ ID NO: 758317 - DNA, 25 bp, Homo sapien
gaagagttatgtcccaacagcatgc

SEQ ID NO: 758318 - DNA, 25 bp, Homo sapien
taaccgcattagtagggagcctcga

SEQ ID NO: 758319 - DNA, 25 bp, Homo sapien
tccgtgctctctgggctttcagggc

SEQ ID NO: 758320 - DNA, 25 bp, Homo sapien
ctctctgggctttcagggctccctg

SEQ ID NO: 758321 - DNA, 25 bp, Homo sapien
ctccgtgctctctgggctttcaggg

SEQ ID NO: 758322 - DNA, 25 bp, Homo sapien
tctgggctttcagggctccctgcct

SEQ ID NO: 758323 - DNA, 25 bp, Homo sapien
gacatggagagccttcgagccatca

SEQ ID NO: 758324 - DNA, 25 bp, Homo sapien
gagccttcgagccatcataggtact

SEQ ID NO: 758325 - DNA, 25 bp, Homo sapien
tcataggtactgatggcgtcccaaa

SEQ ID NO: 758326 - DNA, 25 bp, Homo sapien
caaaggatggaatgatcctcttcag

SEQ ID NO: 758327 - DNA, 25 bp, Homo sapien
tctctgtcgccctcaagtggtagaa

SEQ ID NO: 758328 - DNA, 25 bp, Homo sapien
gtttaactgagaaatggccactagg

SEQ ID NO: 758329 - DNA, 25 bp, Homo sapien
tactgaatacttttggcacccgcca

SEQ ID NO: 758330 - DNA, 25 bp, Homo sapien
catgaagtaacctatcgtccggaac

SEQ ID NO: 758331 - DNA, 25 bp, Homo sapien
tgtctgctgtgataaaatccattct

SEQ ID NO: 758332 - DNA, 25 bp, Homo sapien
tggctaaactctctacgactctgta

SEQ ID NO: 758333 - DNA, 25 bp, Homo sapien
tgtagagttctattcggcagggctc

SEQ ID NO: 758334 - DNA, 25 bp, Homo sapien
ctcctgtgccttggctaaactctct

SEQ ID NO: 758335 - DNA, 25 bp, Homo sapien
gaggaacccaagatccaagcgttag

SEQ ID NO: 758336 - DNA, 25 bp, Homo sapien
gggtggatctggctcaatacaacca

SEQ ID NO: 758337 - DNA, 25 bp, Homo sapien
tactttggagtggaccttctttgac

SEQ ID NO: 758338 - DNA, 25 bp, Homo sapien
catgaatgaccgtggcttggcagga

SEQ ID NO: 758339 - DNA, 25 bp, Homo sapien
aagggtagacgcaccagcagagtcc

SEQ ID NO: 758340 - DNA, 25 bp, Homo sapien
agtcccgcctctccatccatggatg

SEQ ID NO: 758341 - DNA, 25 bp, Homo sapien
ctcttcccattccaagggtagacgc

SEQ ID NO: 758342 - DNA, 25 bp, Homo sapien
tctcccctgatctctggagacccag

SEQ ID NO: 758343 - DNA, 25 bp, Homo sapien
cattttaacaggtggcaacatcacc

SEQ ID NO: 758344 - DNA, 25 bp, Homo sapien
cagacgcaggagctttggaagagca

SEQ ID NO: 758345 - DNA, 25 bp, Homo sapien
cattatagacacgtgtttaacaaca

SEQ ID NO: 758346 - DNA, 25 bp, Homo sapien
taaccgtcctccttcaaactagctg

SEQ ID NO: 758347 - DNA, 25 bp, Homo sapien
cactgggagcacatagagattcacc

SEQ ID NO: 758348 - DNA, 25 bp, Homo sapien
accacatgttggtcgaagcggccga

SEQ ID NO: 758349 - DNA, 25 bp, Homo sapien
tattcagagactcgagcacagcacc

SEQ ID NO: 758350 - DNA, 25 bp, Homo sapien
tacagtgcgcacaggctttatcgag

SEQ ID NO: 758351 - DNA, 25 bp, Homo sapien
tggattccacagcttcgcgccgtgt

SEQ ID NO: 758352 - DNA, 25 bp, Homo sapien
gccccggttgcaggcgtcatgcagc

SEQ ID NO: 758353 - DNA, 25 bp, Homo sapien
gagggccagccgtgcggcatctaca

SEQ ID NO: 758354 - DNA, 25 bp, Homo sapien
gctgctgcctgacgtgcgcactgag

SEQ ID NO: 758355 - DNA, 25 bp, Homo sapien
cagctttgacatgcatgttcccctt

SEQ ID NO: 758356 - DNA, 25 bp, Homo sapien
ctttgcagctttgacatgcatgttc

SEQ ID NO: 758357 - DNA, 25 bp, Homo sapien
tgacatgcatgttccccttctttga

SEQ ID NO: 758358 - DNA, 25 bp, Homo sapien
gctttgacatgcatgttccccttct

SEQ ID NO: 758359 - DNA, 25 bp, Homo sapien
gttagacaatcccagagggctggcc

SEQ ID NO: 758360 - DNA, 25 bp, Homo sapien
tggttagacaatcccagagggctgg

SEQ ID NO: 758361 - DNA, 25 bp, Homo sapien
cctggttagacaatcccagagggct

SEQ ID NO: 758362 - DNA, 25 bp, Homo sapien
tagacaatcccagagggctggccat

SEQ ID NO: 758363 - DNA, 25 bp, Homo sapien
gcttcctgcttgctaataacctttc

SEQ ID NO: 758364 - DNA, 25 bp, Homo sapien
cctgcttgctaataacctttcttgc

SEQ ID NO: 758365 - DNA, 25 bp, Homo sapien
ctgtgcttcctgcttgctaataacc

SEQ ID NO: 758366 - DNA, 25 bp, Homo sapien
tgtgcttcctgcttgctaataacct

SEQ ID NO: 758367 - DNA, 25 bp, Homo sapien
tagccagcaaccaggtttgagatcc

SEQ ID NO: 758368 - DNA, 25 bp, Homo sapien
tggtagccagcaaccaggtttgaga

SEQ ID NO: 758369 - DNA, 25 bp, Homo sapien
ctctggtagccagcaaccaggtttg

SEQ ID NO: 758370 - DNA, 25 bp, Homo sapien
agccagcaaccaggtttgagatcca

SEQ ID NO: 758371 - DNA, 25 bp, Homo sapien
gtggttggcaatggcgaaactgctc

SEQ ID NO: 758372 - DNA, 25 bp, Homo sapien
agccggcctcggtgatgcaccggtc

SEQ ID NO: 758373 - DNA, 25 bp, Homo sapien
ctgctctgtggttggcaatggcgaa

SEQ ID NO: 758374 - DNA, 25 bp, Homo sapien
ctcggtgatgcaccggtcggctgct

SEQ ID NO: 758375 - DNA, 25 bp, Homo sapien
gaactgagtggtgcctccactcaaa

SEQ ID NO: 758376 - DNA, 25 bp, Homo sapien
taaacacctttcactcccctagcat

SEQ ID NO: 758377 - DNA, 25 bp, Homo sapien
gcctccactcaaagaaataagccca

SEQ ID NO: 758378 - DNA, 25 bp, Homo sapien
cattctgtgcagacaacaacagcaa

SEQ ID NO: 758379 - DNA, 25 bp, Homo sapien
tgctttctgacgtccacagggcaca

SEQ ID NO: 758380 - DNA, 25 bp, Homo sapien
tccacggttaagagagacggcttct

SEQ ID NO: 758381 - DNA, 25 bp, Homo sapien
agaagcctgagtacttacacccggg

SEQ ID NO: 758382 - DNA, 25 bp, Homo sapien
cagccgcgaggttcttgggttccaa

SEQ ID NO: 758383 - DNA, 25 bp, Homo sapien
agatggctttgacggccattgcagt

SEQ ID NO: 758384 - DNA, 25 bp, Homo sapien
gctttgacggccattgcagtggaat

SEQ ID NO: 758385 - DNA, 25 bp, Homo sapien
tggctttgacggccattgcagtgga

SEQ ID NO: 758386 - DNA, 25 bp, Homo sapien
tcagatggctttgacggccattgca

SEQ ID NO: 758387 - DNA, 25 bp, Homo sapien
accacactgtcaccgggcatttagc

SEQ ID NO: 758388 - DNA, 25 bp, Homo sapien
caaccacactgtcaccgggcattta

SEQ ID NO: 758389 - DNA, 25 bp, Homo sapien
cactgtcaccgggcatttagctgtt

SEQ ID NO: 758390 - DNA, 25 bp, Homo sapien
gacaaccacactgtcaccgggcatt

SEQ ID NO: 758391 - DNA, 25 bp, Homo sapien
gagtgaagcttccacacatataatg

SEQ ID NO: 758392 - DNA, 25 bp, Homo sapien
tggaaccacatgaggaagatcaaga

SEQ ID NO: 758393 - DNA, 25 bp, Homo sapien
tcaggcatgtctctgattaggaggt

SEQ ID NO: 758394 - DNA, 25 bp, Homo sapien
caactgaaagtatccaggttgacca

SEQ ID NO: 758395 - DNA, 25 bp, Homo sapien
gcatcagataagactgaatctccgt

SEQ ID NO: 758396 - DNA, 25 bp, Homo sapien
aggcatcagataagactgaatctcc

SEQ ID NO: 758397 - DNA, 25 bp, Homo sapien
cataatttagacagaagagcctgaa

SEQ ID NO: 758398 - DNA, 25 bp, Homo sapien
ataatttagacagaagagcctgaag

SEQ ID NO: 758399 - DNA, 25 bp, Homo sapien
ggaagaggcactctccacacagcat

SEQ ID NO: 758400 - DNA, 25 bp, Homo sapien
aggaagaggcactctccacacagca

SEQ ID NO: 758401 - DNA, 25 bp, Homo sapien
ctggaggaagaggcactctccacac

SEQ ID NO: 758402 - DNA, 25 bp, Homo sapien
ggaggaagaggcactctccacacag

SEQ ID NO: 758403 - DNA, 25 bp, Homo sapien
tcagtcctcttcaacacggagccac

SEQ ID NO: 758404 - DNA, 25 bp, Homo sapien
aggctccctagcacgggcacatcct

SEQ ID NO: 758405 - DNA, 25 bp, Homo sapien
tcattgcccgttccagccacattct

SEQ ID NO: 758406 - DNA, 25 bp, Homo sapien
tgctgacaacggttctcattgcccg

SEQ ID NO: 758407 - DNA, 25 bp, Homo sapien
gaacgagggagttccgtgtttgcaa

SEQ ID NO: 758408 - DNA, 25 bp, Homo sapien
gctaatgttccagtcctctcaggga

SEQ ID NO: 758409 - DNA, 25 bp, Homo sapien
ctggaagttgctgataagattagaa

SEQ ID NO: 758410 - DNA, 25 bp, Homo sapien
tgcagatggatctgagatatgctaa

SEQ ID NO: 758411 - DNA, 25 bp, Homo sapien
cagaaaccggctcaagataagtggg

SEQ ID NO: 758412 - DNA, 25 bp, Homo sapien
tgcaaatcagctgaggagaagcatg

SEQ ID NO: 758413 - DNA, 25 bp, Homo sapien
cgctcaaagatacaaaaccagtgtg

SEQ ID NO: 758414 - DNA, 25 bp, Homo sapien
aagcatgagagcaccgagcatcgct

SEQ ID NO: 758415 - DNA, 25 bp, Homo sapien
gtacttgtggatcttctaaacctat

SEQ ID NO: 758416 - DNA, 25 bp, Homo sapien
tggaggcagccatcaaccacctggt

SEQ ID NO: 758417 - DNA, 25 bp, Homo sapien
aggcagccatcaaccacctggtcaa

SEQ ID NO: 758418 - DNA, 25 bp, Homo sapien
cagaattattccattgaggtggagg

SEQ ID NO: 758419 - DNA, 25 bp, Homo sapien
ttgagaatcgacatccacaatctgg

SEQ ID NO: 758420 - DNA, 25 bp, Homo sapien
caatctggtcattgagagcactttt

SEQ ID NO: 758421 - DNA, 25 bp, Homo sapien
ttgagagcacttttctgctcagcaa

SEQ ID NO: 758422 - DNA, 25 bp, Homo sapien
ttctttggtgaaacagtttgagaat

SEQ ID NO: 758423 - DNA, 25 bp, Homo sapien
acccttattcataatggcaaatctg

SEQ ID NO: 758424 - DNA, 25 bp, Homo sapien
acctcccctggtacagttgcctgaa

SEQ ID NO: 758425 - DNA, 25 bp, Homo sapien
gcagaaaacccttattcataatggc

SEQ ID NO: 758426 - DNA, 25 bp, Homo sapien
tagccccatagagcgggatgcaggt

SEQ ID NO: 758427 - DNA, 25 bp, Homo sapien
cattgatgtccacggggtaggagca

SEQ ID NO: 758428 - DNA, 25 bp, Homo sapien
tccacggggtaggagcaagattttc

SEQ ID NO: 758429 - DNA, 25 bp, Homo sapien
gcaggcattgatgtccacggggtag

SEQ ID NO: 758430 - DNA, 25 bp, Homo sapien
atgtccacggggtaggagcaagatt

SEQ ID NO: 758431 - DNA, 25 bp, Homo sapien
cagcttccaaagcggccagactgtc

SEQ ID NO: 758432 - DNA, 25 bp, Homo sapien
gctgctgtgactttacggagatcat

SEQ ID NO: 758433 - DNA, 25 bp, Homo sapien
agcttccaaagcggccagactgtca

SEQ ID NO: 758434 - DNA, 25 bp, Homo sapien
catgttaagactcgaggagagccac

SEQ ID NO: 758435 - DNA, 25 bp, Homo sapien
tgttaagactcgaggagagccacgc

SEQ ID NO: 758436 - DNA, 25 bp, Homo sapien
ttaggtcatgttaagactcgaggag

SEQ ID NO: 758437 - DNA, 25 bp, Homo sapien
ggtcatgttaagactcgaggagagc

SEQ ID NO: 758438 - DNA, 25 bp, Homo sapien
tggacttctgcacaacagtgtcttt

SEQ ID NO: 758439 - DNA, 25 bp, Homo sapien
tgtctccttggccccgggaagttgc

SEQ ID NO: 758440 - DNA, 25 bp, Homo sapien
gacttctgcacaacagtgtctttgt

SEQ ID NO: 758441 - DNA, 25 bp, Homo sapien
cctggacttctgcacaacagtgtct

SEQ ID NO: 758442 - DNA, 25 bp, Homo sapien
tcctgcattcctgttgggcgtcaca

SEQ ID NO: 758443 - DNA, 25 bp, Homo sapien
caccatacttgaagaattatagcct

SEQ ID NO: 758444 - DNA, 25 bp, Homo sapien
cctgttgggcgtcacattgttttga

SEQ ID NO: 758445 - DNA, 25 bp, Homo sapien
cttgaagaattatagcctggatgtt

SEQ ID NO: 758446 - DNA, 25 bp, Homo sapien
ggagctggcagagttcctggagtat

SEQ ID NO: 758447 - DNA, 25 bp, Homo sapien
atgaagtgacctggaagaaataggg

SEQ ID NO: 758448 - DNA, 25 bp, Homo sapien
agtgacctggaagaaatagggtcct

SEQ ID NO: 758449 - DNA, 25 bp, Homo sapien
gaagaaatagggtcctgttggagct

SEQ ID NO: 758450 - DNA, 25 bp, Homo sapien
gacccagtgtggagagcaagtgaac

SEQ ID NO: 758451 - DNA, 25 bp, Homo sapien
taaaccttaacataaccaatgcata

SEQ ID NO: 758452 - DNA, 25 bp, Homo sapien
aatgcataaaagtcgcagccactga

SEQ ID NO: 758453 - DNA, 25 bp, Homo sapien
aaagtcgcagccactgacccagtgt

SEQ ID NO: 758454 - DNA, 25 bp, Homo sapien
caaagcctttgacgagcctaaatgg

SEQ ID NO: 758455 - DNA, 25 bp, Homo sapien
tccaaagcctttgacgagcctaaat

SEQ ID NO: 758456 - DNA, 25 bp, Homo sapien
aaagcctttgacgagcctaaatgga

SEQ ID NO: 758457 - DNA, 25 bp, Homo sapien
agcctttgacgagcctaaatggaaa

SEQ ID NO: 758458 - DNA, 25 bp, Homo sapien
agctggggctgtgaccattggttct

SEQ ID NO: 758459 - DNA, 25 bp, Homo sapien
tggggctgtgaccattggttctctt

SEQ ID NO: 758460 - DNA, 25 bp, Homo sapien
gctgtgaccattggttctcttctcc

SEQ ID NO: 758461 - DNA, 25 bp, Homo sapien
gggctgtgaccattggttctcttct

SEQ ID NO: 758462 - DNA, 25 bp, Homo sapien
acccagtggtacaggatggagctgt

SEQ ID NO: 758463 - DNA, 25 bp, Homo sapien
caggacccagtggtacaggatggag

SEQ ID NO: 758464 - DNA, 25 bp, Homo sapien
ggacccagtggtacaggatggagct

SEQ ID NO: 758465 - DNA, 25 bp, Homo sapien
gacccagtggtacaggatggagctg

SEQ ID NO: 758466 - DNA, 25 bp, Homo sapien
aggtaattgaattataggagcagac

SEQ ID NO: 758467 - DNA, 25 bp, Homo sapien
tatacattatgcttcaatgcagtag

SEQ ID NO: 758468 - DNA, 25 bp, Homo sapien
tataggagcagacctttcccgtgct

SEQ ID NO: 758469 - DNA, 25 bp, Homo sapien
tactttatcatatgtctcttataca

SEQ ID NO: 758470 - DNA, 25 bp, Homo sapien
gagggttataaccttgggctgtcaa

SEQ ID NO: 758471 - DNA, 25 bp, Homo sapien
gctgtcaaaaccctaaattctctgc

SEQ ID NO: 758472 - DNA, 25 bp, Homo sapien
tcttccctgtgtcgtacagctgcag

SEQ ID NO: 758473 - DNA, 25 bp, Homo sapien
tcttggctatctcctctttagatgg

SEQ ID NO: 758474 - DNA, 25 bp, Homo sapien
ctcatgaaccgaaaagcatgttcat

SEQ ID NO: 758475 - DNA, 25 bp, Homo sapien
cacactcatgaaccgaaaagcatgt

SEQ ID NO: 758476 - DNA, 25 bp, Homo sapien
cactcatgaaccgaaaagcatgttc

SEQ ID NO: 758477 - DNA, 25 bp, Homo sapien
tgcacactcatgaaccgaaaagcat

SEQ ID NO: 758478 - DNA, 25 bp, Homo sapien
ctctgatgcagaacctagatgattt

SEQ ID NO: 758479 - DNA, 25 bp, Homo sapien
ggcattcatgaaattctcccccagt

SEQ ID NO: 758480 - DNA, 25 bp, Homo sapien
caaactctgatgcagaacctagatg

SEQ ID NO: 758481 - DNA, 25 bp, Homo sapien
gatgcagaacctagatgatttttca

SEQ ID NO: 758482 - DNA, 25 bp, Homo sapien
ccaggatggtcctaggctccagcca

SEQ ID NO: 758483 - DNA, 25 bp, Homo sapien
gcagacactgtcatcaagacaagtt

SEQ ID NO: 758484 - DNA, 25 bp, Homo sapien
tcagaagttgatgaacctagcagac

SEQ ID NO: 758485 - DNA, 25 bp, Homo sapien
gaggacggagccatctgtgcactct

SEQ ID NO: 758486 - DNA, 25 bp, Homo sapien
ccatctttctaaggaagttgtgagg

SEQ ID NO: 758487 - DNA, 25 bp, Homo sapien
aagccatttctgctaccggacagac

SEQ ID NO: 758488 - DNA, 25 bp, Homo sapien
ctggactaaaaccttgggtcctgct

SEQ ID NO: 758489 - DNA, 25 bp, Homo sapien
tgacttaaactaactccctggacta

SEQ ID NO: 758490 - DNA, 25 bp, Homo sapien
gctaccttcaccatatgctgcccat

SEQ ID NO: 758491 - DNA, 25 bp, Homo sapien
ggcagccctcggtgaaggtcagccc

SEQ ID NO: 758492 - DNA, 25 bp, Homo sapien
agcagagtgtccctccaagttcagc

SEQ ID NO: 758493 - DNA, 25 bp, Homo sapien
gatgcccaggataggcaacacggtg

SEQ ID NO: 758494 - DNA, 25 bp, Homo sapien
catgtcagttccatgctgaagatgc

SEQ ID NO: 758495 - DNA, 25 bp, Homo sapien
gaacctggatgttagctagtttgaa

SEQ ID NO: 758496 - DNA, 25 bp, Homo sapien
tgttttccacatgtcaatgcatatg

SEQ ID NO: 758497 - DNA, 25 bp, Homo sapien
cgcctgacagcgaagagaagtcttt

SEQ ID NO: 758498 - DNA, 25 bp, Homo sapien
tgcatatgtttccaagtacacgcct

SEQ ID NO: 758499 - DNA, 25 bp, Homo sapien
caatccgtggatacaagtaggtgat

SEQ ID NO: 758500 - DNA, 25 bp, Homo sapien
tcctcaatccgtggatacaagtagg

SEQ ID NO: 758501 - DNA, 25 bp, Homo sapien
tctctcctcaatccgtggatacaag

SEQ ID NO: 758502 - DNA, 25 bp, Homo sapien
tcatctctcctcaatccgtggatac

SEQ ID NO: 758503 - DNA, 25 bp, Homo sapien
tcacaaggaatccagtgccctcttg

SEQ ID NO: 758504 - DNA, 25 bp, Homo sapien
tcttgtcgcccgagtcccactgact

SEQ ID NO: 758505 - DNA, 25 bp, Homo sapien
tcatcgcatgagaccggagctgcca

SEQ ID NO: 758506 - DNA, 25 bp, Homo sapien
aaggaatccagtgccctcttgtcgc

SEQ ID NO: 758507 - DNA, 25 bp, Homo sapien
ggtcattaaagaccatagctggagc

SEQ ID NO: 758508 - DNA, 25 bp, Homo sapien
gtcattaaagaccatagctggagcc

SEQ ID NO: 758509 - DNA, 25 bp, Homo sapien
catctccgacctggtcattaaagac

SEQ ID NO: 758510 - DNA, 25 bp, Homo sapien
tgtctgctcatctccgacctggtca

SEQ ID NO: 758511 - DNA, 25 bp, Homo sapien
agagccctgcattatcccgcgggag

SEQ ID NO: 758512 - DNA, 25 bp, Homo sapien
cgtgctgcgaacctggaagccagag

SEQ ID NO: 758513 - DNA, 25 bp, Homo sapien
tgggtgggcgggagcagtgcgtgct

SEQ ID NO: 758514 - DNA, 25 bp, Homo sapien
ggagctctccggagactgtgcctgt

SEQ ID NO: 758515 - DNA, 25 bp, Homo sapien
gttaggtcacagatgtgatgtgagc

SEQ ID NO: 758516 - DNA, 25 bp, Homo sapien
ctgttaggtcacagatgtgatgtga

SEQ ID NO: 758517 - DNA, 25 bp, Homo sapien
tgttaggtcacagatgtgatgtgag

SEQ ID NO: 758518 - DNA, 25 bp, Homo sapien
cattcctcgcagctgctttgctgag

SEQ ID NO: 758519 - DNA, 25 bp, Homo sapien
gcagtaccctcattcctcgcagctg

SEQ ID NO: 758520 - DNA, 25 bp, Homo sapien
ttgctgagtacatccaggcctgaga

SEQ ID NO: 758521 - DNA, 25 bp, Homo sapien
agctgctttgctgagtacatccagg

SEQ ID NO: 758522 - DNA, 25 bp, Homo sapien
gtatcctccaagcatgttggctgcc

SEQ ID NO: 758523 - DNA, 25 bp, Homo sapien
cactacatgaagtatcctccaagca

SEQ ID NO: 758524 - DNA, 25 bp, Homo sapien
ctgcctgggcttagactgcacagac

SEQ ID NO: 758525 - DNA, 25 bp, Homo sapien
ggcttagactgcacagaccctgaca

SEQ ID NO: 758526 - DNA, 25 bp, Homo sapien
tcggtccagagtcaaagccagagtc

SEQ ID NO: 758527 - DNA, 25 bp, Homo sapien
catgtccgggccatgttcatgctta

SEQ ID NO: 758528 - DNA, 25 bp, Homo sapien
ctttgaggcggcaacatgtccgggc

SEQ ID NO: 758529 - DNA, 25 bp, Homo sapien
taaggccctctgatcttggaatgtg

SEQ ID NO: 758530 - DNA, 25 bp, Homo sapien
cccagatagactcgggaccactcag

SEQ ID NO: 758531 - DNA, 25 bp, Homo sapien
agatagactcgggaccactcaggca

SEQ ID NO: 758532 - DNA, 25 bp, Homo sapien
gcccagatagactcgggaccactca

SEQ ID NO: 758533 - DNA, 25 bp, Homo sapien
aaaggcccagatagactcgggacca

SEQ ID NO: 758534 - DNA, 25 bp, Homo sapien
tgcagggatccgtggatcccagacc

SEQ ID NO: 758535 - DNA, 25 bp, Homo sapien
gaaacttggtctcctagaggaccac

SEQ ID NO: 758536 - DNA, 25 bp, Homo sapien
aatgaagaaacttggtctcctagag

SEQ ID NO: 758537 - DNA, 25 bp, Homo sapien
agccctggagtacaagcccatgcag

SEQ ID NO: 758538 - DNA, 25 bp, Homo sapien
gcttcatcgtgaccttcattctgct

SEQ ID NO: 758539 - DNA, 25 bp, Homo sapien
gctgccataaccacctgaatgtgtt

SEQ ID NO: 758540 - DNA, 25 bp, Homo sapien
gtaaggagccggctgccataaccac

SEQ ID NO: 758541 - DNA, 25 bp, Homo sapien
tgcaaatttcttagtgcttgcttca

SEQ ID NO: 758542 - DNA, 25 bp, Homo sapien
cattcacacaatgcaatatcaacaa

SEQ ID NO: 758543 - DNA, 25 bp, Homo sapien
ttcgattttcatggccttctggaaa

SEQ ID NO: 758544 - DNA, 25 bp, Homo sapien
aacaagatgtgtgcattcacacaat

SEQ ID NO: 758545 - DNA, 25 bp, Homo sapien
gaagagctattgctcgatgcacagc

SEQ ID NO: 758546 - DNA, 25 bp, Homo sapien
gtggtccccacttctcaggaagctt

SEQ ID NO: 758547 - DNA, 25 bp, Homo sapien
ctgtggtccccacttctcaggaagc

SEQ ID NO: 758548 - DNA, 25 bp, Homo sapien
ggtccccacttctcaggaagcttag

SEQ ID NO: 758549 - DNA, 25 bp, Homo sapien
tgtggtccccacttctcaggaagct

SEQ ID NO: 758550 - DNA, 25 bp, Homo sapien
aaataattcttaagtaatgcgagat

SEQ ID NO: 758551 - DNA, 25 bp, Homo sapien
tctggagagacacacgccacgaaat

SEQ ID NO: 758552 - DNA, 25 bp, Homo sapien
gcttgcaagtagtgacaccataaca

SEQ ID NO: 758553 - DNA, 25 bp, Homo sapien
acagactcacagcttgcaagtagtg

SEQ ID NO: 758554 - DNA, 25 bp, Homo sapien
tcgtgctagacatcgttccttcagc

SEQ ID NO: 758555 - DNA, 25 bp, Homo sapien
cagtgagcctcgtgctagacatcgt

SEQ ID NO: 758556 - DNA, 25 bp, Homo sapien
agcaccacagtgagcctcgtgctag

SEQ ID NO: 758557 - DNA, 25 bp, Homo sapien
gagcctcgtgctagacatcgttcct

SEQ ID NO: 758558 - DNA, 25 bp, Homo sapien
tgtcctccttatcagccaagccgat

SEQ ID NO: 758559 - DNA, 25 bp, Homo sapien
tcctccttatcagccaagccgatgt

SEQ ID NO: 758560 - DNA, 25 bp, Homo sapien
cctgtcctccttatcagccaagccg

SEQ ID NO: 758561 - DNA, 25 bp, Homo sapien
tcccccaaccaaagggcagcagtaa

SEQ ID NO: 758562 - DNA, 25 bp, Homo sapien
ccttagcagaaaactgcgagaccac

SEQ ID NO: 758563 - DNA, 25 bp, Homo sapien
gtagcaccgatgagatatttagttc

SEQ ID NO: 758564 - DNA, 25 bp, Homo sapien
atgttcctcacatctaaggcccaac

SEQ ID NO: 758565 - DNA, 25 bp, Homo sapien
gcaccttgttagtctgtagcaccga

SEQ ID NO: 758566 - DNA, 25 bp, Homo sapien
cagcagggtggcatcacgtgtccct

SEQ ID NO: 758567 - DNA, 25 bp, Homo sapien
ggcagcccttagagcaggagcctga

SEQ ID NO: 758568 - DNA, 25 bp, Homo sapien
atcacgtgtcccttcttcaatagtc

SEQ ID NO: 758569 - DNA, 25 bp, Homo sapien
gctttcgtctggcagcccttagagc

SEQ ID NO: 758570 - DNA, 25 bp, Homo sapien
ggggcgaagctaattaagtcctcca

SEQ ID NO: 758571 - DNA, 25 bp, Homo sapien
gacattttgtgggatggttattccc

SEQ ID NO: 758572 - DNA, 25 bp, Homo sapien
ttggagttcaggtagtggttgagca

SEQ ID NO: 758573 - DNA, 25 bp, Homo sapien
ttgtgctgggaaacacgacattttg

SEQ ID NO: 758574 - DNA, 25 bp, Homo sapien
tggttattccctccgcatttgcagc

SEQ ID NO: 758575 - DNA, 25 bp, Homo sapien
tacatcttgctagggtttttctaaa

SEQ ID NO: 758576 - DNA, 25 bp, Homo sapien
taaatagctcgtttttgattttaca

SEQ ID NO: 758577 - DNA, 25 bp, Homo sapien
gagacttaccctgtctcagatgaaa

SEQ ID NO: 758578 - DNA, 25 bp, Homo sapien
tgtttccctaatattctctaatgat

SEQ ID NO: 758579 - DNA, 25 bp, Homo sapien
gaagttttaatcttgccaatttgat

SEQ ID NO: 758580 - DNA, 25 bp, Homo sapien
gttttaatcttgccaatttgatatg

SEQ ID NO: 758581 - DNA, 25 bp, Homo sapien
tgaagttttaatcttgccaatttga

SEQ ID NO: 758582 - DNA, 25 bp, Homo sapien
tttaatcttgccaatttgatatgtc

SEQ ID NO: 758583 - DNA, 25 bp, Homo sapien
agaagtgtccccttgagagggaact

SEQ ID NO: 758584 - DNA, 25 bp, Homo sapien
aaatgccatgtgcacagagaaggag

SEQ ID NO: 758585 - DNA, 25 bp, Homo sapien
gctcataatagattagcagtgtttc

SEQ ID NO: 758586 - DNA, 25 bp, Homo sapien
cagaaactgaccaggctcataatag

SEQ ID NO: 758587 - DNA, 25 bp, Homo sapien
ggagcagatggacattacaatgaaa

SEQ ID NO: 758588 - DNA, 25 bp, Homo sapien
ctagtcctcactgttgaagagcacg

SEQ ID NO: 758589 - DNA, 25 bp, Homo sapien
cactgttgaagagcacggtctgttt

SEQ ID NO: 758590 - DNA, 25 bp, Homo sapien
tgaagagcacggtctgtttggagca

SEQ ID NO: 758591 - DNA, 25 bp, Homo sapien
ctttcatcattggcgttcattcgta

SEQ ID NO: 758592 - DNA, 25 bp, Homo sapien
tctttcatcattggcgttcattcgt

SEQ ID NO: 758593 - DNA, 25 bp, Homo sapien
catcattggcgttcattcgtatcat

SEQ ID NO: 758594 - DNA, 25 bp, Homo sapien
ttcatcattggcgttcattcgtatc

SEQ ID NO: 758595 - DNA, 25 bp, Homo sapien
ggctcactgaacctgatgggcacag

SEQ ID NO: 758596 - DNA, 25 bp, Homo sapien
aggcctgaattgtgtatgtcggtac

SEQ ID NO: 758597 - DNA, 25 bp, Homo sapien
ttgatgatatcaggctcactgaacc

SEQ ID NO: 758598 - DNA, 25 bp, Homo sapien
caggtaaccataccccagaggcctg

SEQ ID NO: 758599 - DNA, 25 bp, Homo sapien
atacaccaggctacaggtggactgt

SEQ ID NO: 758600 - DNA, 25 bp, Homo sapien
tatcctgtacaaaccaactacatcc

SEQ ID NO: 758601 - DNA, 25 bp, Homo sapien
tgatctgcaatatctgttgtcaaat

SEQ ID NO: 758602 - DNA, 25 bp, Homo sapien
aaagttgatctgcaatatctgttgt

SEQ ID NO: 758603 - DNA, 25 bp, Homo sapien
gttgtcaaatttatcctgtacaaac

SEQ ID NO: 758604 - DNA, 25 bp, Homo sapien
tcttcagctccttcacgttatgttc

SEQ ID NO: 758605 - DNA, 25 bp, Homo sapien
ctataaaatattggaaactcgggat

SEQ ID NO: 758606 - DNA, 25 bp, Homo sapien
gagctcagggtcagcctttttcttc

SEQ ID NO: 758607 - DNA, 25 bp, Homo sapien
cgggatgacagctgagcttccttga

SEQ ID NO: 758608 - DNA, 25 bp, Homo sapien
ggaatgggatgtggtgtgtacagat

SEQ ID NO: 758609 - DNA, 25 bp, Homo sapien
aagcctgcaacggaagagtccttca

SEQ ID NO: 758610 - DNA, 25 bp, Homo sapien
tcccgtgcatctaagctgctcccct

SEQ ID NO: 758611 - DNA, 25 bp, Homo sapien
tgtacagatgaagcctgcaacggaa

SEQ ID NO: 758612 - DNA, 25 bp, Homo sapien
cacatggatgagccgggtgagaggt

SEQ ID NO: 758613 - DNA, 25 bp, Homo sapien
gatgagccgggtgagaggtttagcc

SEQ ID NO: 758614 - DNA, 25 bp, Homo sapien
tgagaggtttagcctggcgtgccat

SEQ ID NO: 758615 - DNA, 25 bp, Homo sapien
ccgggtgagaggtttagcctggcgt

SEQ ID NO: 758616 - DNA, 25 bp, Homo sapien
gctctcctgggactgggtacgcaat

SEQ ID NO: 758617 - DNA, 25 bp, Homo sapien
cgcaatgttctcaagccgctggctg

SEQ ID NO: 758618 - DNA, 25 bp, Homo sapien
tcctgggactgggtacgcaatgttc

SEQ ID NO: 758619 - DNA, 25 bp, Homo sapien
tgggtacgcaatgttctcaagccgc

SEQ ID NO: 758620 - DNA, 25 bp, Homo sapien
ccaaataccctggttgcagaagctg

SEQ ID NO: 758621 - DNA, 25 bp, Homo sapien
gggatcagctttttgacttcggtga

SEQ ID NO: 758622 - DNA, 25 bp, Homo sapien
ttcagaatcacagacttgagtgcct

SEQ ID NO: 758623 - DNA, 25 bp, Homo sapien
gactttggaattacagacctcagtt

SEQ ID NO: 758624 - DNA, 25 bp, Homo sapien
gcctcccgagggcataacaccagat

SEQ ID NO: 758625 - DNA, 25 bp, Homo sapien
agccaccgtgtggtgtgttgtcatc

SEQ ID NO: 758626 - DNA, 25 bp, Homo sapien
caccgtgtggtgtgttgtcatcagc

SEQ ID NO: 758627 - DNA, 25 bp, Homo sapien
ctcccgagggcataacaccagatct

SEQ ID NO: 758628 - DNA, 25 bp, Homo sapien
ccccacaattctctatgtcacaata

SEQ ID NO: 758629 - DNA, 25 bp, Homo sapien
tgaaacccgagactgccaaagtccc

SEQ ID NO: 758630 - DNA, 25 bp, Homo sapien
attcatctggatagcacaaaaaggg

SEQ ID NO: 758631 - DNA, 25 bp, Homo sapien
caaacaaccagtgaatgatttaacc

SEQ ID NO: 758632 - DNA, 25 bp, Homo sapien
ctcagggttgcactcatggtcactt

SEQ ID NO: 758633 - DNA, 25 bp, Homo sapien
tcagggttgcactcatggtcactta

SEQ ID NO: 758634 - DNA, 25 bp, Homo sapien
cagggttgcactcatggtcacttac

SEQ ID NO: 758635 - DNA, 25 bp, Homo sapien
gaaacccaaggcttgcaggtacgct

SEQ ID NO: 758636 - DNA, 25 bp, Homo sapien
gcatcctcatttgggagatgagaaa

SEQ ID NO: 758637 - DNA, 25 bp, Homo sapien
ttttagcatcctcatttgggagatg

SEQ ID NO: 758638 - DNA, 25 bp, Homo sapien
tacgctgtgttgtctaaggtggtgc

SEQ ID NO: 758639 - DNA, 25 bp, Homo sapien
gattcaaatagaattcctaagagtt

SEQ ID NO: 758640 - DNA, 25 bp, Homo sapien
tctgcaatgtgaattcaacactttc

SEQ ID NO: 758641 - DNA, 25 bp, Homo sapien
cctaagagttggtgtctagaaggat

SEQ ID NO: 758642 - DNA, 25 bp, Homo sapien
catttacaagcagtctggtggccca

SEQ ID NO: 758643 - DNA, 25 bp, Homo sapien
tcttggttacaggaccagctaggtg

SEQ ID NO: 758644 - DNA, 25 bp, Homo sapien
caggaagttaagagtgccatccacc

SEQ ID NO: 758645 - DNA, 25 bp, Homo sapien
aagaaatgttcccaccagaagacaa

SEQ ID NO: 758646 - DNA, 25 bp, Homo sapien
gactttatgctctgctgacctagaa

SEQ ID NO: 758647 - DNA, 25 bp, Homo sapien
ttcccagtaataagcgggcgaggcc

SEQ ID NO: 758648 - DNA, 25 bp, Homo sapien
ccagtaataagcgggcgaggcctcc

SEQ ID NO: 758649 - DNA, 25 bp, Homo sapien
tcccagtaataagcgggcgaggcct

SEQ ID NO: 758650 - DNA, 25 bp, Homo sapien
ctttcccagtaataagcgggcgagg

SEQ ID NO: 758651 - DNA, 25 bp, Homo sapien
tccagttctctactccagaatcatc

SEQ ID NO: 758652 - DNA, 25 bp, Homo sapien
cagggaactggtccagggcagcgct

SEQ ID NO: 758653 - DNA, 25 bp, Homo sapien
caggaagcatctcccgcatagctgt

SEQ ID NO: 758654 - DNA, 25 bp, Homo sapien
atcctgctgtccacacgccctccag

SEQ ID NO: 758655 - DNA, 25 bp, Homo sapien
atccaaggggagtcagtgcctgtga

SEQ ID NO: 758656 - DNA, 25 bp, Homo sapien
gtctgacagtgttacgtcttcaaag

SEQ ID NO: 758657 - DNA, 25 bp, Homo sapien
agcatccaaggggagtcagtgcctg

SEQ ID NO: 758658 - DNA, 25 bp, Homo sapien
ctgacagtgttacgtcttcaaagtt

SEQ ID NO: 758659 - DNA, 25 bp, Homo sapien
tgggcctttcaaccttttctccata

SEQ ID NO: 758660 - DNA, 25 bp, Homo sapien
tatatcatgttcatcagtcattttg

SEQ ID NO: 758661 - DNA, 25 bp, Homo sapien
tgttcatcagtcattttgggccttt

SEQ ID NO: 758662 - DNA, 25 bp, Homo sapien
ggcctttcaaccttttctccataga

SEQ ID NO: 758663 - DNA, 25 bp, Homo sapien
cttaagctgcttactggtgaggatc

SEQ ID NO: 758664 - DNA, 25 bp, Homo sapien
ttaagctgcttactggtgaggatct

SEQ ID NO: 758665 - DNA, 25 bp, Homo sapien
cacccagtgtctcagtcaggttgac

SEQ ID NO: 758666 - DNA, 25 bp, Homo sapien
ttaagtcaggaagagaccaatgtcc

SEQ ID NO: 758667 - DNA, 25 bp, Homo sapien
ttcagagatacacccggaacaatgt

SEQ ID NO: 758668 - DNA, 25 bp, Homo sapien
tgaccaaataactgacacccagtgt

SEQ ID NO: 758669 - DNA, 25 bp, Homo sapien
ggatgtggaattcatatgggcccca

SEQ ID NO: 758670 - DNA, 25 bp, Homo sapien
tgtggaagttccctggttggctcca
